United States Patent Application Publication US 2007/0067865 A1 - sequence listing, part 9

SEQ ID NO: 40305 - DNA, 384 bp, Glycine max
cttttccttcttttatgcttaaattatcaccatgaacgactcattaatttcagctgcgcaagtcggtgacatagacttgctctacaaattaattcagatgcaaccatatgtgttggagcaaacagatttcatgccatttgttgatacacctttgcatgttgcagctgctgctggccatgcaagtttcgccactgagatcatgagactcaagccttcatttgcatggaagctgaatccgtgtggccttagccccatgcaccttgctttgcagaacaagcattacagaatggtgtgtcgctttgtggacatcaacaaaaaccttgttagagtcaaaaggagggggggtcttactcctttgcatttgcaactcaaaccgggagaact

SEQ ID NO: 40306 - DNA, 415 bp, Glycine max
ctcgagccgaatcggctcgagctcactcagtaaacaatgggcgacttcacggttgcgttaaaccctcccaaaaccttccgcgccgatattctcctatccaccaccaacaaccgcacttccccggcggcgcgtggctttcaaaccgtactcgcgttcaaaccaccgcgcgcttttcgaggaatccgcgcttcggtgatgccaagagagggtcaacaagcgtctctcggagacgcccttgtcaacactccgcgccgaagcgacttcgttgaggccatcagaagaaccgccgcactctccagctgcctctcagaaacgagcctccacgccaccgttcccggcctcgagtccaaaacccgcggcaaagttcgagatatatacgacgctggggattacctcgttttggtgaccactgatc

SEQ ID NO: 40307 - DNA, 324 bp, Glycine max
ggaagctatacagtcgagaaggactgttctatcttgatttgcatgggtgcaaaaagctgttgcgcctaccatagcacagagaggagagttccattcgatgcagacgatgatgaatgctcctgattcaaatgataatattgatttactgttgagcattgatttgttgggattacaaggagcaggtaaagctttttcaaacaaaattgtttttgatgataaacttgtgttggctaacacacaataattctttgatggaaattttccagtggattcttggttaccaatatttgtgaagtgtatttatcctaggagtcaattaccttc

SEQ ID NO: 40308 - DNA, 412 bp, Glycine max
gctaatatgtggttgatgttaacaaaatttaatcaggaacaaagctgaaggacttcttggccacaattgagtcatcttctacctttcaatcggagatagcaaagctccgccttgatgttgaggagtatgcaaaacaatttccaaccattggttttgataaagcaaccatgaagcacaagaattgagaaaagaaaattttccattaggtatgcgttattctttactcattttctcatttgtttattcttattcattttcgtttgtcccatattggttgacaaggtcatagacaagaggtagttagccacagaacttcaaaatggtgcactagagtagagactttgttcttttttcattcaaaaaaccttgtctactttatatacttatatttcatttcatagtgtccactcaa

SEQ ID NO: 40309 - DNA, 372 bp, Glycine max
ggcacgacggcattatgaatcgagcaataatctggaaaagcgagaagcttgtcttgtcaacccagtgagtgtgtgacgtgtattggatttgcacagtccggacgaagctcgtctaatgaaaaggagagctctctgtcgtattgaacggctcgaaaaagcaactgtcctaccatagtacagattgaagcgttctatagcactcagactgtgatgaatgctactgatatacacgatagtatggatttactgacgatcattgatttgttaagtttacaaagcgcatctaaagttttttcgatgaaactagtctttgatgataagcttgtgtgggctaacactcatgattgcttggatggaaatattacagcggat

SEQ ID NO: 40310 - DNA, 289 bp, Glycine max
atctggaaatgcaagaagcttatcttggcaatctcgtaaatggggtaccagaattggatttgcacaggccaaaagaagctcccccattgagaaaggaagctctctttcgtattggatggctggaaaaagctggtgtgcctaccatagcacaaattggagaggtccattccatgccaaagatgatgaatgcttctggatcaaaaggatatattgatttactggtgggccttggtttggtggggttaccaagggcaaggtaagctttttccaaccaaaatggttttgatga

SEQ ID NO: 40311 - DNA, 397 bp, Glycine max
gatttgttgggtttacaaggagcaggtaaagcttttccaaacaaaattgtttttgatgataagcttgtgttggctaacacacaagaattctttgatggaaattttccagtggattcttggttaccaatttttgtgaattgtctttatcctgtaagtcaattaccttcagaagctgtcgttgtaaatgttacatgtggtagtggacgtgtggtttacccaccactgcttggattagttctgcagttaacaatcgctcctcagatatcaacaaaaggattcgcacagcacttgggaaaggtaagaaaattgtttttcttactagagttgatccttttccagtagctttactggctgttctttttggcgttaagaatgaaattctgagttctaacgccac

SEQ ID NO: 40312 - DNA, 377 bp, Glycine max
agcatgtggaaatttcgctgatgataccatgaattttgaggcttttccccacaagctgatgcacttgggagagattaaagacaaaaatgtattgaaattatcacaacaggaatttcttacagatcgatcaactcaagtgcgttctgcaacaactctgaaggatgatgggaggccatatttgtatacaatgcagcatgataggtaagtgtctacaataccacgagattttgtcattggtgtcaagttgacaaccataaacaatatgtgtgcatatggactcaatcctggtatttcaaggtctcgacttttgggcaccatacttcagtccatttcacagcaaactgtttgcaatcataatggcatcagcgagaacacca

SEQ ID NO: 40313 - DNA, 337 bp, Glycine max
ctcacacattacacataactcttactcttttgtccgtcgctggacggatcacgatactgtgtggatactgtttacggcaacggtgatattaccgaaaccagaaagtgccggttgtacgtcagagtcggacttacccagatgctctgagggggtgtgatcatagacatcctgcacgccgaacaggtcaggatcatggatgaggcctatgcctgctgggtgatagtcctggagcgtgtcccaagcgacatccgggacgagagcaggatgcaccgcctgagcgattcgatggtgattaatgatatcgatgcgtctcgttactatcacagcaatggggaac

SEQ ID NO: 40314 - DNA, 333 bp, Glycine max
aacaactatgagggctgatggtggcccatattagtatgcaatggagcatgatagttacattgtctacaataccaggagattttgtcattggtggcaagatgactaccataaacaatatgcgtgcatatgggctcaatgctggaatatgacgttcttggctattgggcaccatttgtcagcacatttcacagcacactgtttggaatcaaatggcatcagtgagaacaccattggatattaattctagcaagcagaacttttgtcagttttctattcaccgtctgtttccaggaagataactggacaaaactggagattggatcacacttatac

SEQ ID NO: 40315 - DNA, 331 bp, Glycine max
cggctcgagggaatttcttacagcttggtcaactcaggtgcgtcctgcaacaactctgttggctgatgggtgtccatatttgtatgcaatggtgcatgatagttcagtgtctacaataccaggtgattttgtcattggtgtcaagttgacaaccataaacaatatgtgtgcatatgggctcaaatcctgtattttcaggttctcgtcttttgggccccatttcttaagccatttcacaacaaactggttggaaataaaaggccaacagtgagaacaccattgaattttgattttagcaagcaaagctttggtcagttttctattgaccttt

SEQ ID NO: 40316 - DNA, 377 bp, Glycine max
gtggagtattttggaaggatgtcttacgttgctcataacgttaatcagccccaagagaaagatttgttggagggaaatttttcctttgatattaaatctcgctctacattggaaaaagtttcctctacaaaagcacaatttgttagtggaaaaaccttcaaatatgatataattggtgctggttcacattcttcagaagactttcctgaaaaggaagatcaagaaaaacccaaaaagattgatgccacattgagacaaagaatatatcctcaatacaatgaggttcaggctcagatggaaacaaatttgtttaaattgtctcttgatgatgttgaaactcctaaaggttccatgttgggatctgaaaattctcaatc

SEQ ID NO: 40317 - DNA, 372 bp, Glycine max
ggcggccaccgcttccagaaccacccgattctcttcttcctcttcacaccccaccttccccaaacgcattactagatccaccctccctctctctcatcaaaccctcaccaaacccaaccacgctctcaaaatcaaatgttccatctccaaaccccccacggcggcgcccttcaccaaggaagcgccgaccacggagcccttcgtgtcacggttcgcctccggcgaacctcgcaagggcgcggacatccttgtggaggcgctggaaaggcaaggcgtgacgactgtgttcgcgtaccccggcggtgcgtcgatggagatccaacaagcgctcacgcgcttcggcggcattcggaacgtgcttccgcgccacga

SEQ ID NO: 40318 - DNA, 373 bp, Glycine max
attgtcatcaattcacacatccaccgttcagttaaaaaccacccaaatccgatggcggcgtcgcggcgtctccgggacctccaatcccaaccggcgaacaagatctgcgtggactgttcccagaagaacccgcaatgggcctccgtatcgtacggcgtcttcatgtgcctagagtgctcaggcaagcaccgcggcctgggcgtgcacatctccttcgtgcgatccgtgacgatggattcgtggtccgaaatccagatcaagaaaatggaagccggaggcaacgacaaactcaacgccttcctcacgcaatacggcatccccaaggaaaccgacatcgtcgccaagtacaactccaatgccgcagccgtctacc

SEQ ID NO: 40319 - DNA, 361 bp, Glycine max
ttccttattgtctataccaaacagccttctaaattggataaagtctcgtgtaccactccacaatttgtaagtgcagaaaccactctaattccaacaattggtgctgcgcaagcttcttccaaatatttttctgaagcggaagaccatgaaagacccggaaagagtgatgccttactgtgacaaagactagacacctccctacaacagaggttcatgctcagatggaaacaaatttgttttaattgtctcttgatgatgttgacacttctaaaagttccatgttggatctgaaaatttcttcatcttaaaatgcactttccaagaacacaatttggtggaaccattctgcgtagtgatctat

SEQ ID NO: 40320 - DNA, 382 bp, Glycine max
aatgaattggcacatggatccccaccctatctgtgcctttggctatgtgtgtgaatttaaatgataactgaagaaaactaaggaaggaaggaagagtgagcgtgaaagatgccttgggtgaggctttcagagtctccaaggctcgacgttgctattgacatgggtaatccatttctcaatctcactgttgatggtttccttaagatcggagctgtcgcagccacgcgatcagctgctgaagatacttatcatattatccaaaaggggaatatctcaagtcgtgatttcgagaaaacttaagaagatgtgtaaagaaggtgtatattggggaactatagctggcgtttatgttggaatggaatatggggtagagaggatccgt

SEQ ID NO: 40321 - DNA, 197 bp, Glycine max
  unsure (1)..(197): unsure at all n locations
cgattggagagattcagggaaaaagtcttatggaattttcacaagaggaatgtcttacagcttgttcaactcaggtgcgtcctgcaacaactcttttagcctaatgggtgtccatatttgtatgcaatggtgcatgatagttcagtgtctacaataccaagtgatnttgttattggggtcaagttgacaaccataaa

SEQ ID NO: 40322 - DNA, 344 bp, Glycine max
gtgttcccaggacctattgtgttttaaacccacaaaatccttgtgggatcaatacgtggctgggaagactgactttaccccaccgcacttgccgaagcggtaagacaatgcctgtttgtatatgtgcgggagctggcgcacagaacgctacttctaatgaatatgcgctatgccgcgcttatcaatggcgaaaggttttgcgggaaacctcttcactacaagggcttaggactaccacctccctaccctaaatgttctgtgtcttgcttgataccttaccgccatatacctgacgataccatcaattatgaagcttttcccgaccagctgctacaacttggaga

SEQ ID NO: 40323 - DNA, 246 bp, Glycine max
ctcgagccgctctagccgcaacttcctgcttcatctggagaaaatcgtgttggtgttgccccaacttcctcaacaaattctgcacctgccaagccacggatgcgctggacacctgagcttcatgaggcatttgtggaggctgtcaaccaacttggtgggagtgaaagagctacccctaaaggtgtgctgaagctcatgaaagttgatggattaactatataccatgttaaaagccacctacagaag

SEQ ID NO: 40324 - DNA, 259 bp, Glycine max
ggatgatgaatgctcctgattcaaatgataatatcgatttactgttgagcattgatttggcggggttacaaggagcaggttaagctttttcaaacaaaattgattttgatgatcagctcgtgttggctaacacacaagaattctttgatggaaattttccagtggactcttggttaccaatttttgagaattgtctttatgctgtaagtcaattaccttcagaagcctgtcgtgtaaatgatacatgtggtagtggacg

SEQ ID NO: 40325 - DNA, 424 bp, Glycine max
cggaatttggtctcgcccaatgggacccggggaaaacaccatggattttgaatcttaccaggcgagcctttggccggttttttattgaccttctcggtggaggaatcttagtggacaaaactggagattggatcacacttatacaaaattctccaattagtaacttgttgagagttgctgcttggaagaaaggctgtttaatggtcaagattgtgatgtctgggaatgcagcagtcaaaaggagtgattgggcctcattggtacaagtgtttttaacaaacagcaacagtacagagcattttgatgcatgtaagtggacaaaatcagaaccacattcctgggaattgatcttcccaatagaggtatgtggtcctaataatggttttgaaatgtggagttctgagtgggcaaatcaaacttcatg

SEQ ID NO: 40326 - DNA, 284 bp, Glycine max
ctaaagccaaatcttatttttcaattgaatatttaatctaattcgcggggttattgtcattaatttataaaccttcttggttggggaattctaacgaataaggttggagattggatcacacgtatacacatgtctactattagaaacttgtaaatagtttttttttggaaaaaaggctagttaatggtcaaaattgttatgcttgcaaaagcataaattgaaaagttatgatttgcacatattgtatgatgtgttttttaaatacaaaatccgaacatataatt

SEQ ID NO: 40327 - DNA, 245 bp, Glycine max
atagatcaagaagatttggttactgtaaagcatgcagagaacaaagcatttggagggacagaaccaatggatgtctctacaacatcaacattgcaaccatgtcaaattcctaggtcagatgtgatagttttggaagggcatacttcaaaagtgtgtgcttgtgcatggagtcctacaagatctcttctagcatcaaggtctggggattcaacagctcgtatttggacaatagcagaagggagatg

SEQ ID NO: 40328 - DNA, 313 bp, Glycine max
gaaaataatagaaactaattagagaaaaagtgatgaaacttctggtgaactgcatgaaaaaaatcaggtgcccattaggcgagctggttcattttctttataccaggagtgaattcccaattatttatagatcatggctatatcttttcttatgtgttaatgaattgtttgggaaagaaatgagaggaaacagcgttaagggatggaaaaatctacgttatgttcctttttttttaaaacaatgaggagatattttgttggagaactcgtctttgaagtttctaagatgacttctccctacattaaatgtaca

SEQ ID NO: 40329 - DNA, 332 bp, Glycine max
gttttcttcatataccctaatttgttttcacagctatgacatctgtgaagctcacaaccccccagacgggcgagttcgagcagcccaccggactcttcatcaacaatgagttcgtaaaggccgttgacggcaagacctttgatgttatcaacccctccactgaggaggtcatctgcagtgttcaggaggccaccgagaaggatgttgacatcgctgttgctgccgcccgcaaagccttcaacggcccatggcgaaaggagacaccagagaacaggggaaagctgcttaacaagcttgccgatctgttcgagaagaatgccgacctcattgct

SEQ ID NO: 40330 - DNA, 354 bp, Glycine max
aatcaaatggctacagcgagaacaccattgaattttgattctagcaagcagagcttttgtcagttttctattgaccctctcggtggcggaatattaatggacaaaactggagattggatcacacttatacaaaattctccaattagtaacttgctcagagacgctgcttggaagaaaggctggacaatggtcaccattgagacgcatgggaatgcatccgtcaaaaggagtgattgagcctcattggtacaagtgtttttaacaaacagcagcagtacagagcattgtgatgcatgtcagtggacaaaatcagaaccacattgctgcgaatggatcttaccaatacaggtatgt

SEQ ID NO: 40331 - DNA, 302 bp, Glycine max
gattctgtcattggtgtcaaggtgacaaccatacacaatatgggtgcatatggactcaatcctggtctttcaggtgctaagttatggggcaccattactaactccattttacagcagactgtcagaaatcaaatggcaacagcgagaacaccattggattctgattctagcaggcagagcttttgtcagatttctattgaccttctcggtggaggaagcttatgggacaaaactggagattggatcacacttatacaaagacctccaattagaaaccagttgagagttgctgtttggaagaa

SEQ ID NO: 40332 - DNA, 347 bp, Glycine max
  unsure (1)..(347): unsure at all n locations
agagctatgacgtcccctgcacgcgtacgctagctcgtaatttcgcgattgtaacaagcttagtctttgctagggattatgattcacccggggggggacctaagttatgcgctccaactttagattggttctcacttttacaaaaatctcccattacttacttattgagagttgctgcttggaagaaaggctgtttaatggtcaagattgtgatgtctgggaatgcagcagtcaaaaggagtgattgggcctcattggtacaagtgtttttaacaaacagcaacagtacagancgttttggtgcctgtcagtggacaaaatcagaaccacattcctgggaattgatc

SEQ ID NO: 40333 - DNA, 372 bp, Glycine max
cggactgaaaaacaaacgcgaagtctggagagtgaagctcactgtggccaaaatccgtaaggccgcccgacagctcttgacccttgacgagaaggatccccgccgcctattcgaaggcgatgccatcctccgtcgcctccatcgcctcggggtgctcgaggagtccaaaaacaaactcgattacgtcctcggtctcaagatccaggacttgctccaacgacgactccagacccaatgctggaagttgggactggccaaatctatccatcacgctcgcgttctcattcgccaacgacacattcgagtcggacgtcaactcgtcgacaattcctttttccttgttcgagtcgagagccagaaacacattgatta

SEQ ID NO: 40334 - DNA, 309 bp, Glycine max
tgggaatgcaataatcaaaaggagcgattgggcctcattgggacaagtgttgttaacaaacagcaacagtgcagagcattgtgatgcatgtaagaggacaaaatcagaaccacattcctgggaattgatcttccaaatagaggtatgtgggcctaataatggttttgaaacgtggagttatgagtgagcaaatcaaacttcatggcatgtgagtttacttattgacaatcccaaacagactacagatttagatattctcttgggaatctatcaagattttgaaatagctggttatactcttatgccagc

SEQ ID NO: 40335 - DNA, 320 bp, Glycine max
agtgtatgcacagaagccggtatgtatgctatccgggcccggaggaggactgtaacagagaaagactttcttgatgcagtaaataaagtcatcaaaggataccagaagttcagtgcaactccaagtatatggtctataactgagttattctttatgccctttcccagaccatagagaacgtcatctctatttcccctgaaattgaaggcacgtgagtcttttattaactcctgatgaatgcatcttgcagcaacctttcctgatgtacatccaaaatgcgagcaaaacttcttttacccttgacgatatacttatattat

SEQ ID NO: 40336 - DNA, 290 bp, Glycine max
gtttttgatattcgattcagaagataatatggatttactgttgcgcgttgatctgttatgccaacattgtgtggtccacaggctactgaacaaaattgtttttgatgataagcttgtgttggataacacacaagagttctttgatggtaagttcgcagtggaatctaggttaccaatttttgtgaattgcctttatcctgtaagtcaattaccttcagaagctgtccgcgtcaatgttacatgtcgtaatgaacgtggagggtacccacctctgcttggattagttctgc

SEQ ID NO: 40337 - DNA, 385 bp, Glycine max
ggatactgcatactcgctggatctcccaatctggcttcaaactcaacaatggcatacgccgcacctccgctggacccgccaggaataggcacgaactcgccttcgtctcagaagaagagagtggcttatttgtatgacagcgacgtcgggaactatgcctaccagtcgggacatctgatgaaaccccatcgaattcggatggcgcattcgcttgttatgaactatggactgtacaacaagatggagatttaccgggccaaaccagcgtcaaaatacgagatgacacagttccatacggacgaatacgtggactttttgcagcgtgtcactcccgacaatgaacatcttctggctaaagagtgcgccaagcacaatgttggggaag

SEQ ID NO: 40338 - DNA, 262 bp, Glycine max
cgcacttcgcgtgttcgtgtcgtttccactttttctctcattactctctctgcctttccgtctttttctttcatcgccaaaaccctaattcgatccgccggacctagcactcaccgtagatgactgtacgattgaggaacaggtgagagatcagagaggctggatttcctcgccgaatggagggagggatacatccatggattatgatgacaatgattttcaaagccagaatctccatttacctggtgaagggagcacaaaa

SEQ ID NO: 40339 - DNA, 275 bp, Glycine max
cagaaccacattcctgggaattgatcttcccaatagaggtatgtggtcctaataatggttttgaaatgtgcaggtctgagtgggcaaatcaaacttcatggcatttgagtatccttattgacaatcccaaacagtctacagactttgatattctcttgggaatctctcatgattttgaaattgctggtaatactcttatgccagctctttctgttccacaggctactgacagatctatctaatatgctgaatgctctgcatgatctggaatttgt

SEQ ID NO: 40340 - DNA, 401 bp, Glycine max
ctcgagccgaatcggctcgaggggcaatgatattctgtgttgcgattatgctagttttgatggtttgattaccaagcaagttatgagcaagatggcagaaatgataaacagtctttgtggtggtgatgaaaaattgatgcgtgaaaggacgcacctgctgttggcttgttgttcaaggatggcaatttgtaagaaagatgtttggagagttgaatgtggaatcccttctggatttccgctcacagttatttgcaatagcatttttaatgaaatgctcattaaatataactatgaaaaattactgggccaggcttaaacttcaaatatgtttttacaattcttcaaaaaatttggttctttgtgtgtggatggcgatgataacttaattagtgttcatgaat

SEQ ID NO: 40341 - DNA, 151 bp, Glycine max
ggacgcacctgctgttggcttgttgttcaaggatggcaatctgtaaaaaagatgtttggagaggttaattttgaaatcccttctgatttccccttacaagtattttccattgccattttaaagggaatcttctttaaaattggctttaaaa

SEQ ID NO: 40342 - DNA, 357 bp, Glycine max
caaggcagaaagcaagctcatcctagagttttaaaaatggcagcagcctcctccatggctctctcttccccatccttggctggcaaggccgtgaagctgggcccatcagcccccgaagtcgggagggtcagcatgaggaagaccgtcaccaagcaggcctactccggaagcccatggtacggcccagaccgcgtcaagtacttgggcccattctctggcgagccctcgtcctaccttactggcgagttcccaggtgactacggctgggacactgctgggcttactgccgacccagaaaccttcgccagaaaccgtgagctcgaagagatccactcccggtgggccattcttggggcc

SEQ ID NO: 40343 - DNA, 268 bp, Glycine max
atcagaaccacattcctgggaattgatctttccaatagaggtatgtggtcctaataatggatttgaaatgtggaattctcagtgggccaatcaaacttcatggcatttgagtttccttattgacaatcccaaacaggctacagtttttgatattctcttgggaatctctcaagattgtgcaattgctgggaatacctttatgccagctttttctgtttcacaagctactgtcagatcttgtgaaaatgcagaatcctctgcatgatct

SEQ ID NO: 40344 - DNA, 313 bp, Glycine max
tcacacttatacaaaattcttcaattagtaactggttgagagttgttgtttggaagaaaggctgtttaatggtcaagattgtgatgtctgggaatgcaacactcaaaaggtgtgattgagccttatttgtacaagtgtttttaacaaacaacctcgggatccctccattttgatgcatgtaagtggactaattcataaccacattcctgggtattgctctttccaataaaagtatgtggtcctaataaaggctttgaaatgtggagttatgagtgggcaaatcaaactgtttggcatttgagtttacttattg

SEQ ID NO: 40345 - DNA, 448 bp, Glycine max
tgacactatagaagaactatgacgtcccctgccccccttcctaaacttcggattcgggttcaggggaccttttgggggaggaatcttaatggacaaaactggagattggatcacacttattcaaaattcttcaatttgtaacttggtgagagatgctgcttggaagaaaggctgtttaatggtcaagattgtgatgtctgggaatgcagcagtcaaaaggagtgattgggcctcattggtacaagtgtttttaacaaacagcaacagtacagagcattttgatgcatgttagtggacaaaatcagaaccacatttctgggaattgatctttccaatagaggtatgtggtcctaataatggttttgaaatgtggagatctgagtgggcaaatcaaacttcatggcatttgagtttccttattgacaatcccaaacagtctacagttttt

SEQ ID NO: 40346 - DNA, 403 bp, Glycine max
caactaacacttaaatacagggttcaaagtcgtcacaatggcacgccgtccagcccgctgctaccgctactgcaagaacaagccctaccccaagagcagattcaaccgtggtgtacccgacgccaagatccgcattttcgatctcggtcgtaagcgcgccaacgtcgacgacttccctctttgcatccatcttgtctccaacgagtacgagcagctgtcctccgaggctctcgaggccgcccgtatttgcgccaacaagtacctcgtcaaggtcgccggaaaggaaggtttccatctccgcgtccgcgtccacccataccatgtcgtccgtatcaacaagatgttgtcgtgcgctggaactgataagcttcaaactggtatgcgtggtgcattcggcaagccc

SEQ ID NO: 40347 - DNA, 359 bp, Glycine max
tgtattgtgggtgtctcctgaggacaatgcgagtttacggacacgagctttattatctaacgtgtcataatctggcaatgcaagacgcttatcttgtcgatctcgtcaatgtgtgacgagaattgtatttgcacagcccacaggaagctcgccaattgagaaggaaagctctctctcgaattgaatggctgcaaaaagctgatgtgcctaccatagcacagattgaagagttccattcaacgcagacgatgatgaatgctcctgattcagaatgatcatattgatttactgttgagcattgatttgttgggtttacaaggagcaggataagctatttcaaacaaaattgtttttgatga

SEQ ID NO: 40348 - DNA, 352 bp, Glycine max
  unsure (1)..(352): unsure at all n locations
aaagttttgcttctttctttcttactttctctcactcaccaaatagttttctcacaaaggaggaagaatggcatctttcatttcactctctttgttgcttctctttctcaattaccccttcctttccctctcaaccaaccctgaagggaacgctctgcatgctttgagaagcaggatttctgatcccaacaatgtgttgcagagttgggacccaacactggttaatccctgtacttggttccatgttacttgtgactccaacaatcatgtgattcgcttgtaaggatccctttgntcttttcttttctttctgttagtttattcttcagacttttttttagtctttttggtt

SEQ ID NO: 40349 - DNA, 321 bp, Glycine max
ccctgaactcggcattgggctcgagctcaggccgctcatggctagagtatataaccactaactgaggaagcggatttctggggttggagtttactcaattgggacgaaacttctgaactccaccgtaggaccttcaccctttcgaccaccgaagatggatttggccacgctctctccgtattgtaacctgcttgtccccaaacaagagaatgtgcagagagttcaactcggtggcaagtactttgaccgagctgctcttggtgatgcttatcaggatggcatctgaagacgaactttctctggctaagcaccccagcatgt

SEQ ID NO: 40350 - DNA, 369 bp, Glycine max
ctcgagccgattttattcacttaaatatctggttgatgagtgtccttttgcatttgtgaactagtatgtagtattttattcacttaaataaagcgcattactatgtgcaatgagtgtgtttaaatatgaaaaaaaaaaaaaaaaaaaaacaaaaaaaaaaaaaaaaaaaaaaaaaaaaaacaaacataaacaatatgtgtgcaatatagactaaataaataaataaaaaagatatagaattttgggcaaccatttctcagtccatttcacagcaggcgggggggcatcaaatgggggctgtgacaacaccattaaatttggacggtacccgggggggcttccgttttttttttattgggcttttttaaa

SEQ ID NO: 40351 - DNA, 437 bp, Glycine max
gcacgcgtacgtcagctcggaattcggctttaggttcgagggcgctcattctctggccactggtgagctcgcgagccttagggagcaaccacttgaggattgcgatcacttttgtgatccataacaatatggtgcgtgagacgtcaagctgctacgccggcttgattaacaacgcattttcatgcatacttcatgctggggcagtacacaaagatactgactatccatacaccgggagagatggctcctgcaaatgctgccagaaccaaaggagcggatcctggctctaagaacagagggagatccctcctttattgacgtgttgctagacacctaccttagaacgtacctaatgcatgcgctatgcacgcagctttattgagacatactgtggaggcgattcatgcacatacatatgtggccatcacttggatcat

SEQ ID NO: 40352 - DNA, 229 bp, Glycine max
gtataagagaagaaagagattgaagagacccaacccaccgacaaggacagatggaagggtcttgcctatgatatctcagacgaccaacaggacatcacaagaggaaagggtttggttgactcacttttccaagctccacaggatgctggaactcactatgctgttgtgagctcctacgagtaccttagcactggacttcgacacgacttggacaacaacatggatggat

SEQ ID NO: 40353 - DNA, 342 bp, Glycine max
gttgttcattgatttgttgggtttacaaggagcaggtaaaggtttttcaaacaaaattggttttgatgataagcttgtgttggctaacacacaaaaattctttgatggaaattttccagtggattcttggttaccaatttttgtgaagtgtctttatcctgtaagtcaattaccttcaaaagctgtcgatgtaaatgttacatgtcgtattggacgtggtggtttacccaccactgcttggattaattctgcagttaacaatcgctcctcggatatcaacaaaaagattcgcacaccacttgtgataggtaagaaaatagtttttcttactatagttgatcc

SEQ ID NO: 40354 - DNA, 341 bp, Glycine max
gtcacgacttcgttatgtttcgtgtaatactccggaaatgcaggaggcttatcttgtcaatgtcggaaatgtgttacgagaatcgcatttgcacagtccagaggaagctcgcccattgagaaggaaagctctctctcgtattgaatggctgcaaaacgctgatgtgcctaccatagcacagattgaagagttccattccatccaaaggatgaggaatgctcctgcttcagatgataatattgatttactgctgagcattgatttgttgggtttacaacgagcaggtaaagcttttccaaacaaaattgtttttgatgatcagcttgagttggctaacacac

SEQ ID NO: 40355 - DNA, 357 bp, Glycine max
tcatatatacagattttattgtcaataaggaaataagatatcattattcagtgcatataaagcaaagacagggatagacatggtccaacctcatctctgctggaacaggacagtggatcagggaagagaacatcaggtcagggtggggagggacagcagtgggcatgggtgggccagtctccctaactcctatgttatgcaaataagagcacagacacattcacatgcagctgcagaaagaggggtccggggatctgatgtcacatagcgggatgaagcatcactcagtcctcataaggcaggtatctcacactttaggaaccgcgagaaacacatcataaccctgggcactgtcac

SEQ ID NO: 40356 - DNA, 351 bp, Glycine max
tcctatttacaagaaaatattgtcaggggggaaataagatatgattgttcagtgcatataaagcaaagacaggtttacacttggtccaggctaatatttgccggaacaggacagtggatcatgtaagaaaacatcatgtcaggggggggcgggacagcaatgttgatgggtcggccaatcaaaataactcctgtgttatgcaaataacagcacagactcattcacatgattttgaagaaagaggggtccggagagctgatgtcacatacttggatgaagtaattcttatgcctaattaagcaggtatctcacactttaggaaccaagaaagactcttctgacccctgggca

SEQ ID NO: 40357 - DNA, 236 bp, Glycine max
gactttcattcatctcttcgttttacacggagcaggtcacgctttttcaaacaaaatagggcttgatgataagctcgtgctggctaacacacaacaattctttgatggaaatcttccagtggattcttggttaccaattcttgagaagcgattttatctctgtcggacaattaccttcataagctgtcgatgcaaatgttacatgtggaattcgacatggtggcttacccaccact

SEQ ID NO: 40358 - DNA, 259 bp, Glycine max
aatggggcacaattgggtttaacaaaaacccaacttttttttaaggggcattttttcaaaccccttaaaaattaaagttttttaaatgttttgggaaaacattcaaaatttcacaacggggtttaaaccccccacgggaaccggggaaaaggggaaggggtgatttcttttggatgttgtaaacaacgagggttctttcattcttgagctggttggcaaaaaaaaataaccttttttggtccggggggatgcctttctt

SEQ ID NO: 40359 - DNA, 352 bp, Glycine max
  unsure (1)..(352): unsure at all n locations
gctccgaattcgggtcgagctcgagccgctcgagccgctcgagcggctcgagaagggagcggcagcaatggtgtacgtcaaggctcataaatcaaaagcctacttcaagagatatcaagtcaagttcaagagaagaagagagggaaaaaccgattaccgtgccaggattcggttgattaatcaggacaagaacaaatataacactcccgaataccgatttgtggttcgctntaacaacaaggacattgttgcacaaataatatctgcttgcattgccggcgaattagttcttgctacagcatatttcacatgagctggcacgatatggtcttgaagtaggacttacaaaata

SEQ ID NO: 40360 - DNA, 373 bp, Glycine max
gtcaccactggtgccggtatcgcctcttacccccttgacaccatccgtcgtcgcatgatgatgacctctggtgaggccgtcaagtacaagtcctccatcgacgctggtcgccagatcatcgccaaggagggtgtccgctccctcttcaagggtgctggagccaacatcctccgtggtgttgccggtgccggtgtcctgtccatctacgaccaggcccagctcctcatgttcggcaaggccttcaagtaaacgtatcaccaccaaatacgttgacaacaccatcgcggcggaagttgcggcatggaagtctgcaggcctgtgatgaatgcagacataaaagaaaaagagacgtggagtggcgatgttccgagcg

SEQ ID NO: 40361 - DNA, 379 bp, Glycine max
acggcgcgcgcacgcgtgcgtgaactctgaatacgggtcgagcttcactgtttgttattaaaggtgaacacaccacaactccattgaatacagagtctagcgagcggcgcttttgacaggtggctattgaccttgtccgtggaggaataataagggacaaaactcgagagtggatcacacttatacaaaagtctccaattacaacttattgagagttactgctcgaaagaacggctagtgaatgagaaacattgtgatgcctgggactgcagctctcaaaaagagtgattgggcctaagtgctacaagtgattgtaacgaacatcgactggacagaagatgttgatgcatgtcacttgactacatcaaaacgacattgc

SEQ ID NO: 40362 - DNA, 371 bp, Glycine max
tgctctcaagactgtgaattgtggaatcctgcttgcacaaaagcaatgactatgtcatttaatccaaacccgtgttctgatgcatggagtttggaatttctgaagcgtactggatttcattgcgatatcatttgtgtcactggatggactgccaccccaatgcaagatgttcaggttacaattgattggtttatttcctctcaggaatgtgttcccaggacctattgtgttttaaatccacaaaatccttttgtgttaaataggtggatgggaaaattgacttcccccagggcacttcccgaagtgttaagagaatgcctctttctatagggggaggagctggtgcaaagaatgctattctcatgaatatg

SEQ ID NO: 40363 - DNA, 404 bp, Glycine max
tgctggtatttcaggttctcgtcttttgggcaccattcctcagtccatttcacagcaaactgtttggaatcaaatggctacagtgagaacaccattgaattttgattttagcaagcatagcttttgtcagggatctattgaccttctcggtggaagaatcttactggacaaaactggagattggatcacacttatacaaaattctccaattagtaactcattgagagttgctgcttggaagaaaggctgtttaatggtcaagattgtgatgtctgggaatgcagcaatcaaaacgagcgattgggcctcatcggttcaagtgtttttaacacacagcaacaggccagagcattttgatgcatgttagtggacataatcagaaccacattactgggaattgatct

SEQ ID NO: 40364 - DNA, 307 bp, Glycine max
  unsure (1)..(307): unsure at all n locations
caacatacattcatttttttttttttcagtttttattttagggaacgggcgatagaactccccgaccatttaaagggctcccaaccactaataaaatgatggtagggactattctgtaggggactatctggccaatctttttccaccccaggacatacttttttttacaaatgggtcttctgaaggcattgccgtgccactcacaggagggctaacatatataacttcgaatatacgggaaaggttattgaaaccgcatgggaaggaccattnccctgccatgatcaaatcacccaagacatttggg

SEQ ID NO: 40365 - DNA, 275 bp, Glycine max
tggaaacaaatttggttaaattgtctcttgatgatgttgaaactcctaaaggttccatgttggatctgaaaatttctcaatctaaaattgcacttcccaagaacacagttggaggaaccattctgcgtagtgatctattggcaaattttttgacagagggcaattttagagcaagtgttgatttgcagcgcactcatcgtattagaggaatgattaaaatggttggccacagttggtattcctgagaatacaggtatatcatttggcctgtgcta

SEQ ID NO: 40366 - DNA, 397 bp, Glycine max
ctctttcttcatagcatttggaaatttggcttgtgataccatcaattttggggcttttgcccacaagctggtgcagtttggagagattcaggaaaaagttgtattgaaattttcacaagaggaatttcttacagctaggtcaactcatgtgcgttctgcaacaactctgttggctgatgggtgtccatatttgtatgcaatggtgcatgatagttcaaagtctacaataacaggtgattttgtgattggcgtcaagatgacaaccataaacaatatgtgtgcatatgggctcaatcctggtatttcatgttctcagcttttgggcaccattcctcagttcatttcacagcacactgtttggaatcaaatggctacagtgtgaacaccattgaatttt

SEQ ID NO: 40367 - DNA, 387 bp, Glycine max
tttatgttgagtcatttattgtaagataatttacaaatatcttgctgtctttagtaatctgaacaatggaccaataaattcttctgacaaggacagcagtaagctaaaaacaaaatcagcttgctgaattcttctttacctcttgtctgaggatgaaacttgattttcattagtccagagccgcagcaccagagatgatttctatcagctccttggtgatgacagcttggcgggtgcgattgaatgtcagagtcaacttgtcaatcatttcagaagcattcttgctggcgttgtccatggccgtcatcctggcgctctgttcactcgtggtagactccttcagggagtagtagatgatgttggccaggctgtattcctggtagttcc

SEQ ID NO: 40368 - DNA, 295 bp, Glycine max
tatccttccgattgccaaggctatctacaaaagacacaatctagtagatagaataattctcactagccccaggccagaagtttttgtggatagccttggcgatcgggcggattgctgcgccggctatcgggagctggtctgcgctacttgttctcacagtgatctgtccactgagcttgttgttcaatccagcgcgaacagtctccttatatcctcgtgcgacagatacttctggcctggggctagtgggaattattctatctgctagattgtgtcctttgtttgtggccctggc

SEQ ID NO: 40369 - DNA, 338 bp, Glycine max
agcggacatgactggtcaggggatgacacttatacaaagtgctacagttcctaactgattcagaggtgctgctcggacaaaaggctgtctaatggtcaagatggatgtgtctgggcatgcaccgaaccacatgagtgagagttgctcattgcaacagaggtatgtaacactcatcatcggtacaaaacgttgtgatgcatgtgagcggacaaaacctgatccacattgctgggaattgatgtcaccaacaaacggatgtcagcctaagaattgctcttaaaagtggagctctaagtgggcaaagctaactatactgcatttgcatcttcttattgacc

SEQ ID NO: 40370 - DNA, 277 bp, Glycine max
gcaactttgcaatttaaaaagttagcaaattgtgatttctctaaagaaaaccttaaaccaaatgtctaatgttttggggggggctcctggggacagggcgagtttttggtcacacctcctttatgttgcgtgtaataatctgaaaacgcaaaaagcttatcttgcaaatctcgaaaatgtgtaacgagatttgtttttgcacatcccagagaaagctccccatttgaaagggaaagctctctctcgtattgaatggctgcaaaaagctgatgtgcct

SEQ ID NO: 40371 - DNA, 288 bp, Glycine max
cttcataagatttttctgaaaaggaagatcatgaaaaacccatgatgattgatgccagattgagacatagaatagatcctcaatacaacgaggttcaggctcagatggaaacaaatttagttaaattgtctcttggtgatgatgaaactcactaaaggtgccatgttggatctgagaatttctcaatctaaaattgcaacttccaagaacacaattggaggaaccattctgcgtagtgatctattggcaaattttttgacagagggcatttttagagcaagtgttgat

SEQ ID NO: 40372 - DNA, 276 bp, Glycine max
gttgaaatgtggaatcccttctggatttccgctcacagttatttgcaatagccatttttaatgagatgctcattaaatatagctatgaaaaatactgccccaggctaaagctccaagtttgtttttccattcctccaaaaatttggttccttggggggggtatggggaggataactaaattagggtccatgaatatgtcaagccttactttagtggttctaaattgaaaagctttctacctagtcataacatcaccattcctgatggtattgacaa

SEQ ID NO: 40373 - DNA, 239 bp, Glycine max
tgtttctctagcctttgatttaataacgaaagaaaaggtgaaggcaattattggacctcaaaaatcagaacaagcaaggcatgttataaaccttgggcgcgagcttggcattcccattatttccttctccgctacaaatgcatatcttttcccagcccacactcccattttcataccaatgggacaaaatgattcttctcaggtgaaaaccatatcagccattgtggaaacatattgat

SEQ ID NO: 40374 - DNA, 199 bp, Glycine max
gggggtgataacctaattaggggtcctggatttttccaggccttccttaaggggtcctaaatggaaaagctttttacctggtcttaccatacccattcctgttggttttgccaaaactagggcacctttgcaatttaaaaagtttgcgaattgggattttttcaaaagaaactttaagcaaatgcctaatgttttgggg

SEQ ID NO: 40375 - DNA, 278 bp, Glycine max
gtgaacaagatggatggcgtgcagagcctaaagttttaaaaagggcggcggcctcctcaatggcttttttttcccaatccttggctggcaaggccgtgaagctggcccattatgcccccgaagtcgggagggtcatcatgagggaagaccgtcaccaagcaggccttcttcggaagcccatggtacggcccagaccgcgtcaagtacttgggcccattctctggcgagcccccgtcctacctcactggcgagttcccaggtgactacagctggacact

SEQ ID NO: 40376 - DNA, 248 bp, Glycine max
tgaaaatttccacacctcttttaattgtcgtaatgatgtgtgaagtgtgtgttattttaaaaaaaaaaaaaaaaaaaaaaaaaaaaaaaaaaaaaaaaaaaaaaaaaaaaaaaaaaaaaaaaaaaaaaaaaaaaaaaaaaaaaaaaggccgcccccccactattgacctcttcaacccggaaattaattccgaaccggtccctgcaggcgtaccacctttccctataggaagccgtattaaaccttgg

SEQ ID NO: 40377 - DNA, 386 bp, Glycine max
caagtagttgagaactaagaagaaggaaatggcttcctcaatgatctcctccccagctgttaccaccgtcaaccgtgccggtgccggcatggttgctccattcaccggcctcaaatccatggctggcttccccacgaggaagaccaacaatgacattacctccattgctagcaacggtggaagagtacaatgcatgcaggtgtggccaccaattggcaagaagaagttcgagactctttcctacttgccagacctcgatgatgcccaattggcaaaggaagtcgaataccttctaaggaaaggatggattccttgcttggaattcgagttggagcacggtttcgtgtaccgtgagcacaacaggtcacctggatactatgatggac

SEQ ID NO: 40378 - DNA, 397 bp, Glycine max
cacgatgccgaaggaagtcaagcagaagtctggtctcatcgttggcctcaacgccggccacaaggtcacccccaggacccccgctcccaggatctcgaggaggaagggtttcctctccaagcgcactgcgtttgtccgtgagatcaccaaggaggttgctggtcttgccccatacgagaagcgcatcatcgaattgcttcgcaactccaaggacaagcgtgcccgccgtctagcgaagaagaggctcggtaccttcggtcgctcaaagagaaaggtcgacgagatgaccaaggtcatcgccgagtcgaggcgcgctggtcactaaacggtttcacgatttgcggtggatgaagcaacacggcgaacgaacgaccgacttacttttcgattttattct

SEQ ID NO: 40379 - DNA, 285 bp, Glycine max
ttgcaacaccgcacatattcttccctaattccatcttgaagtaaccattgtcaccccagttgtggcttaaatgtatgcagagagatgtggtgcccgatatgcccgtgtaactgcaccttgcacgtcatgcttcgtatcggccatcttaaagggtgaaacattgtactgggataaaaatttacaggatatggtgatggttatctgtaaaataaggttggaattgggatggtcaattctcttgagcttaattacattacaaaatcgtactggaaattatttggcaca

SEQ ID NO: 40380 - DNA, 415 bp, Glycine max
ttttgatggtttgattaccaagcaagttatgagcaagatggcagaaatgataaacagtctttgtggtggtgatgaaaaattgatgcgtgaaaggacgcacctgctgttggcttgttgttcaaggatggcaatttgtaagaaagatgtttggagagttgaatgtggaatcccttctggatttccgctcacagttatttgcaatagcatttttaatgagatgctcattagatatagctatgaaaaattactgcgccaggctaaagctccaagtatgtttttacaatccttcaaaaattttgtttctttgtgtgtgtatggtgatgataacttaattagtgttcatgaatatgtcaagccttactttagtggttctaaattgaaaagctttctagctagtcataacatcaccattact

SEQ ID NO: 40381 - DNA, 279 bp, Glycine max
taaaaattttggggctggttttttgtaaggataccatagtgggtgatgaaatgcacagaggggtatccggtggccaaaagaagcgtgtcactacaggagagatgattgttgggcccacaaaaacactattcatggatgaaatatcaacgggtcttgatagttccacaacatatcagattgtgaaatgcttgcagcaaattgtgcaccttaatgaaggaactatcttaatgtgccttttccaacctgcttctgagactttcaatctctttgatgacatca

SEQ ID NO: 40382 - DNA, 232 bp, Glycine max
ggaaaaattgatgcgtgaaaggacgcacctgctgttggcttgttgttcaaggatggcaatttgtaagaaagatgtttggagagttgaatgtggaatcccttctggatttccgctcacagttatttgcaatagcatttttaatggatgctcattagatatagctatgaaaaattactgcgccaggctaaagctccaagtatgttttcatagctatatctaatgagcatctcat

SEQ ID NO: 40383 - DNA, 246 bp, Glycine max
cgtgactgaccctctgactgacaaccagcccattctggaggccagctacgtgaacatccccatcattgccttcgctgacactgatgcccctctgcgtcacattgatgtctccattccctgcaacaacaagggcaagcagtccatcgctctgatgtactggctgctggcccgcgaggtgcagcgcatgcgcggactgctgcagcgcgcgcagccgtggaacgtcatggtcgatctgttcatgtaccg

SEQ ID NO: 40384 - DNA, 354 bp, Glycine max
gtttcttacaagcctctactatactgcttcaccttctgctctagaaaattcagtgctgaaacatggcttcggctactctctctgtagccaaaccagcccttcaggcaaatgggaaaggcttctctgaattctctggcctccgaagctcatcaggcttccttcccttttctagaaaatcttcagaggatttccattctgtcattgccttccagacctatgcagttggaagcagtggaggatacaagaagggtgtgacagaagcaaaactgaaggttgccataaacgggtttggaaggattggaaggaacttcttgaggtgctggcacggtcgcaaagactcccctcttgatgtca

SEQ ID NO: 40385 - DNA, 377 bp, Glycine max
agaagcaatggctatgtgatttaatccaaacccgtgttctgatgcatggagtttggaattcctgaagcgtgctggacttcattgctatatcatttgagacactgggtggactgctaaccctatgcaggttgttcaacaaacaatcgaaaggtttatttcctttcatgaatgtggtgacaataactaaagtggtgtaaatgcacataatcctcctgagtttaataggtggaaagggaaaatgactttacctcagggtactatcaccagtgctgatagaatgcccatatctatagggggaggagcttgtacaaagaatgctattctgaagaatatgccaaaagcctttctttcaatgtggagatattttggtggagatc

SEQ ID NO: 40386 - DNA, 337 bp, Glycine max
atcccagcctaggagagagatggtggggaaggatcaggatgtgtcgttgggagcatactatttcccggagagactgactattggaacggatgtgcaaagccaagactacggcacggactaccacgagccggcgccagcgccgttatttgaccatactgagtttacgtcatggtctttttacagagcaaggattgcagagtttgtgggcacttttttgtttgtctacatcaccgacttaaccgttatgggagatgccggggcttagtctaagtgtaccaccgttgggattcaaggaatcacttgggccttctgtggcatgatattcggcctcgtttac

SEQ ID NO: 40387 - DNA, 303 bp, Glycine max
gctgaatactgggatttcaaggtctcgaatatggcgcaccattacatagaacattcaacagctaactgtatggaatcaaatggcaacagtgagaacaccattgaattttgagtttagcaagcaaagcttgtgccagttgtatagagacctgataaggggaggaatattagtggacaaaactggagattgactcacagttatacaaaagtgcgcaatgaatcaactattgagagttgctggttggcataaaggcatgctaatgggcaagatagtgatgtgtgtacaatgcccagtgaaaatgag

SEQ ID NO: 40388 - DNA, 350 bp, Glycine max
caggagtacatggaaccttttctctaccaccatgagcgcgaaatcgacgagttcattacccagagtcatgatcgcgccaagtcagcaggtatagcatacgtcgagatgggtattgagtgggtaaaggtcaacgtgttgggctttgcacccaggaagcccgactcaccgaggcccgatggacagacgtacgcgcaaaacctcatgagcaggttccagatgccgtcagcaaggggcagtaatgatctatacgggctggtcaaccaggcgctcagcggagccagtgcgctttatggtgctgccggtaccgcaggtacaagagacgcgcaagcctcggacctgagccgtggtgc

SEQ ID NO: 40389 - DNA, 329 bp, Glycine max
agaaggggtaagggtgattattatgataatgatgaaagtggacacacatcggctaagtttgatttggatagggaaactatacctaggagatttgattacaaagaactagttgtagctaccaatgggttcgccgatgatacaaggcttggacgaggaggttcgggacaagtttacaaaggggttctgagtcatttaggaagggtggttgcagtgaaaaggattttcactaactctgaaaattcagaaagagttttcatcaatgaggttaggatcataagccgtcttatacacaagaaactttgtgcagttcgtagggtggtgccacgagc

SEQ ID NO: 40390 - DNA, 366 bp, Glycine max
gtgggattctgctttgagcacgaagaacaaatgctggtttatgagtatgttcaaaatggaagtttaaaggacgctctctcagggaagtcaggaattagattagattggattagaaggctaaaaattgcccttggtactgcccgtggtttggcttatcttcacgaacttgttaatcctcccatcatacatagggacatcaaatcaaacaatattttgctggatgaccgcctgaatgccaaagtttctgattttggtctctccaagtctatggttgattctgagaaagatcatgttaccactcaagttaaaggaacaatgggttacttggatccaaaagtttaatatgcttcaccaattgactgaaaa

SEQ ID NO: 40391 - DNA, 305 bp, Glycine max
gttaaagtgtccacttaactcaaaattatagaggaagacagtccaatatgaaaaatatagtaaaatcatctcaaacttggcatcttctctttgcacctaagacattgagttaaagtgtccacttaaattgaatttggtgccttttccttttgtcctaaagaaaaaaaagaaaaacagactttgtggtggtgatgaaaaaatgatgcgtgaaaggacgcacctgctgttggctcgatgatcaaggatggcaatttggaagaaagatgtttggagagttgaatgtggaatcccttctggatttccgc

SEQ ID NO: 40392 - DNA, 384 bp, Glycine max
tcgcatgcaccgcgtacgtaagcctcggaattcggcttggagggagaagctctcttctcgttattgaatgggctgcaaaaagcttgatgtggcctaccatagcacacgattgaagagcttccatatcgatgccagaggagatgaaatgctcctgattcaaatgataatattgatttactgttgagcattgatttgttgggtttacaaggagcaggtaaagcttttccaaacaaaattgtttttgatgataagcttgtgttggctaacacacaaaaattctttgatggaaattttccagtggattcttggttaccaaatttttgggaattgtctttatcctgtaagtcaattaccttcagaagctgtcgttgtaaatagtacatg

SEQ ID NO: 40393 - DNA, 361 bp, Glycine max
gttttggagatttagagaatccatattagaataacaaaataagtaaagaatatgattgtgaggaaaaacaagccaagtgcaaggtcactacttatgctttttgttatggttcttgcttttctctttgtcacttataatttggtgtttataatcaaacaccatatgggtggaacttgggtagcagaagagttgaggtttcttgatcctgtgatcagcatgcctggaaaggtgatggcattagcaaattccaattcaaaatttcatgttgcagtgaccgcaaccgatgcggcttacagccaatggcaatgccggattatgtactattggtataagaaggttaaagatattcctggatcaaaca

SEQ ID NO: 40394 - DNA, 164 bp, Glycine max
ctaccttagcttggaatttcggttgggggggaaccaaattcaaccgggacctaaaaaggggctaataactgttccgggaaaaggaaatatccccacctacgtggttggtgtcaatgagtatgactacagccctgatgaacccatcatcagcaatgcctcttgca

SEQ ID NO: 40395 - DNA, 401 bp, Glycine max
ctactacaaccacctctacacttcgatcctccacccaacaccaaaaaaacccacctcaacacattcacaatggcatcaatcgagcagacatggagccttgccggcaaggtcgccgttgttaccggctcaggccgtggtatcggaaaggcgatggccattgagctggccaagcgtggcgcaaaggtcgccgtcaactacgccaacgccgtcgagggagctgagcaggttgtcaaggagatcaaggcccttggtaacggctcagatgccgctgccttcaaggctaacgttggcaacgtcgaggagtctgagaagctgatggatgacgtttgtgcccacttcggcaagctcgacatctgctgctcaaactctggtgtcggctcattcggtcacttcaaagacgt

SEQ ID NO: 40396 - DNA, 373 bp, Glycine max
gctgatggatggtctgctatcagtgatgaggaagttgaatctattctgcctgccgcagcttatgcacttgccaagatacacatgcatcttggttatagtgggtattgttatacagcacgtggtggtttttgctacacagaagaagacatatttgacttccacacagatgacggcatgggagtagatggcttgccaactgaaggtgtagaaattacatatttcgatcaggaaggtgcccgctacatgatttatacaccatctgatccacttctttttgttgctatgaagggtgagaacgggatgttatacattgctgatgatgatctacttgaggatcctgctgtcattgactccatagatgaggagaccgaat

SEQ ID NO: 40397 - DNA, 380 bp, Glycine max
caccagctatgacctatgatgcacacgcacgcaagcttgaacttcggatcgaggtccagattagaatgcagtggtgcatgatatttcagcgtctacaataccaggtgattttgtcatcggtgtcaagttgacaaccataaacaatatgtgtgcatatgggctcaatcctggtatttcaggatctcgacttttgggcaccattcataatgccattatacaggcaactgttcggaatcaaatggcaacagagagaacaccattgaatactgatactagcgagcagagctttagctagtcttgtattgacctactgcgcggaggaatcttaatggacaaaactggagattggacacacttatacaaagatttacaattagtaa

SEQ ID NO: 40398 - DNA, 432 bp, Glycine max
caccagctaagacctatgactgcacgctgtcacgcgtgcttgagcttcggattcaggtgcagcgagggtggctatttgtaagaaagatgtttggagagttgaatgtggaatcccttctggatttccgctcacagttatttgcaatagcatttttaatgagatgctcattagatatagctatgaagggttgctgcgccaggctaaagctccaagtctgtttttacaatccttcaaaaattttgtttctttgtgtgtgtatggtgatgataacttaattagtgttcatgaatatgtcaagccttactttagtggttctaaattgaaaagctttctagctagtcataacatcaccattactgatggtattgacaaaactagggcagctttgcaatttagaaagttagcatattgtgattttctcaagagaaactt

SEQ ID NO: 40399 - DNA, 434 bp, Glycine max
caccagctaagacctatgcatgcacacgcacgcatgcttaaaattcggattgaggtccagatagggttgcaatggtgcatgatagttcaatgtctacaatgccaggtgattttgtcattggtgtcaagttgacaaccataaacaatatgtgtgcatatgggctcaatcctggtatttcaggtgcttgtcttttgggcaccattcctcagtccatttgacagcccactgtttggaatcaaatggcaacagtgagaacaccattgaatcttgattctagcaagcagagcttttgtcagttttctattgaccttctaggtggaggaatcttattggacaaaactggagattggatcacacttatacaaaattctccaattagtcacttgttgagagttgctgcttggaagaaaggctgtttaatggtcaagattgtg

SEQ ID NO: 40400 - DNA, 426 bp, Glycine max
agagctatgactgcactctgcacgcgtgcgtgagctcgggattgagctcgagctgcagccgaatcggctcgagcgggttctcgtctttggggcagcgtttctcagtccatttcacagcagactgtggggaatcaaatggcaacagtgagaacaccattgaattgggatgctagcaagcacagcttttggcagttttctattgaccttctcggcggaggaatcttaccggacaaagctggagattggatcacacttatacaaaattctccaattagtaacttgttgagagtcgctgcttgtaagaaaggctgcttaatggtcaagactgtgatgtctgcgaatgcagcagtcaaaaggagcgattgggcctcattggtacaagtgttgttaacaaacagcaacagtacagagcatttcgatgcatgt

SEQ ID NO: 40401 - DNA, 402 bp, Glycine max
  unsure (1)..(402): unsure at all n locations
ccttaatgaggtttttgagagttttgtagaaccaaagctcatccaacctacatttgttttagactatccaattgagatatctccactggccaaaccacacagaagatccacaggtttgactgagagatttgaactcttcatttgtggtcgtgagttgggcaatgcattctctgaattgactgatcctatagatcagagaggacgcttagaagatcaaattaggcagcatgaaaagaagagagcagctgtttcaacaaatgacgataaaaaggaaggaacggaagatgatgatgattcatatgaagtgactcttgatgatgactttctcacagctttggaatacggaatgcctccagcttctggaatgggacttggaatngataggctggtgatgnctttgac

SEQ ID NO: 40402 - DNA, 372 bp, Glycine max
  unsure (1)..(372): unsure at all n locations
ggcaaaggaaaatttgaagcagctgggtcggatggttgcaaagttagctcatgccaaccctatgactgtccttcgaacaattgttcatcagattgaggcttatagagagatgattactcctgtagtggatgcatttaagtacttaactcagcttgagtatgatatattggaatatgttgtgattgagcgtttggcgcttggtggacgtgataagttaaaggatgatggccttaatttgtcagattggcttcaatctcttgcttcattttggggccacctgtgtaagaagtacccatcaatggaattacggngccttttccagtatcttgtgaatcagttaaaaaaggggcagggaattgagcttgttctact

SEQ ID NO: 40403 - DNA, 249 bp, Glycine max
ctcgagcccaatccgcttgggctcgaggtttggattcaatacatgaatggtctagtgttctttctctgggagagcagcaacgccttgcatttgctcgggggcggccgtcaactcctgagttggctttcctggatgagtataccggaccgctccatgaagccaaccaggttcatttataccaagtgattttagcacctgacataacataggtcatagctggccatcgggcatacttatgtgctgaccaca

SEQ ID NO: 40404 - DNA, 375 bp, Glycine max
tggaccgcagaggaagaagcagcattgaaagctggagtggtcaaacacggggctggaaaatggcgcaccatacttacagacccagagttcagttccattttgcgcatgcgttcaaatgtagatctcaaggacaaatggaggaacataaatgtgacagcaatatggggatcgaggcagaaagcaaagctagctcttaaaaagaacctactaccatccaccaaaattgacaataaccacttggccttgagtactgtagttcaacgtgacaaagaagttgcaaatcccaagcctttggcagtttctagtgggacatctcctaattcaaaggaaaaaatatcgaagctacagaactttcagttggataatcttatatta

SEQ ID NO: 40405 - DNA, 376 bp, Glycine max
gtaaagcttttccaaacaaaattgtttttgatgataagcttgtgttggctaacacacaagaattctttgatggaaattttccagtggattcttggttaccaatttttgtgaattgtctttatcctgtaagtcaattaccttcagaagctgtcgttgtaaatgttacatgtggtagtggacgtggtggtttacccaccactgcttggattagttctgcagttaacaatcgctcctcagatatcaacaaaaggattcgcacagcacttgggaaaggtaagaaaattgtttttcttactagagttgatccttttccagtagctttactggctgttctttttggcgttaagaatgaaattctgagttctaacgccactaa

SEQ ID NO: 40406 - DNA, 311 bp, Glycine max
atctggtttgcaaaaagacagaggcctaattgaagcctattttggaaggatgtcttacgctgctcataacgttaatcagccccaagagaaagatttgttggagggaaatttttgctttgatattaaatctggctctagattggaaaaggcttcctctacaaaagcacagtgtgttagtggaaaaaccttcaaatatgatataattggtgctgggtcacattcttcagaagattgtactgaaaaggaagatcaagaaaaacccaaaaagattgatgccacattgagacaaagaatagatcctcaatacaatg

SEQ ID NO: 40407 - DNA, 296 bp, Glycine max
ctcgagccgaatcttctcgagttgcgatatcatttgtgtcactggatggactgccaccccaatgcattatgttcaggctacaatagattggtctagaacctcttatggatgtgttcccaggacctattctgttttaaatggacagaatcctcttgtgttgaataggtgcgaaaagaaaattgaccttccctcacagcacttgcagaagtgtatttcagaacgcctgattatatatgctgcggagctggagcaaaatattcatttactgttgagcttccaaatgctgggttttcaat

SEQ ID NO: 40408 - DNA, 268 bp, Glycine max
atacaatgaggttcaggctcagatggaaacaaatttgtttaaattgtctcttgatgatgttgaaactcctaaaggttccatgttggatctgaaaatgactcaatctaaaattgcacttccgaagatcacagtttgaggaaccattctgcgtattgttctattggcatattatttgacgagagggcatctttagagcaagtggtgatgtgcagcttcctcactcaattataaggattgttttctttggagcgctcattttgttttactg

SEQ ID NO: 40409 - DNA, 258 bp, Glycine max
gcgttgccattctcattcttctctgtctctctctctccaccattgccatggatccttacaagctccgtccattcagcgccttcaattctcccttctggactacaaattctggtgctcctgtttggaacaacaactcctctttaaccggtggagctagaggcccaattcatcttgaggattcatatcttgtggcgaagcttgctaactttgacagggaacctatcccacaacgtgttgtccatgccaggggagctagtg

SEQ ID NO: 40410 - DNA, 394 bp, Glycine max
ggattattacttattcaaaattctccaattagtaactgattgggagttgctgcttggaagaaaggctgcttaaaggtcattattgcgatgtctgggaatgcagccctcaaaaagagtgattgggcctcattggtacaagtgtttttaacaaacagcttccgtacatagcattttgatgcatgtttgtggacaaaatcagaaccacattcctgggaattgatcttcccaatataggtatgttgtcctaataatggtttttaaatgtgcaattctgagtgggcaaatcaaacttcatggcatttgattttccttattgacaatcccaaacaacctacaaattttgatattttcttgggaatctctcaagattgtgaaaaagctggtgatactctta

SEQ ID NO: 40411 - DNA, 396 bp, Glycine max
ctcgtcccacttttaccgaaaggaccgcttaatgtatgagcgtgagtattttctcgaaaaatatgctaagttggggtcagaatcgaagtgtctgggaatgcatgcacccaaaaagagtgattgggcctcattgctacaagtgtttttatctaacaacttcagcacagagcatttttatgcatgtgagtggacaaaatcagaaccacattcctgggaattgatcttgccagtacaggtttgtggtcctaataatggatttgaaatgtggagttctgaccgggcaaatcaaacttcatggcatttgagtttccttattgacaatcccaaacagtcgacaaaatttgatattctcttgggaatctctcaagattttgaaattgcttggaatactcttat

SEQ ID NO: 40412 - DNA, 288 bp, Glycine max
agtctctttcttcatatcatttggaaatttggctgatgataccatcaatttttaggctttttcccacaagctggtgcattttggatagattcaggaaaaagttgcattgaaattttcacatgaggaattgattacagcttggtctactctggagctttctgcaacaacactgtttgctgattggtgttcatatgtgcatgcaatgcagcatgatagcgctgtttctacatcaccatttgattaagtgatcggtggatagtcaacaactataaacaatttgggtgcata

SEQ ID NO: 40413 - DNA, 363 bp, Glycine max
gagttgttccattaggcactgtgcatggagacttcaagccttacttcagtggaaccatatcaaaaagacccctaactcatcttttcatctcgcttgccgatggatttgtcaggcccattgcggcttgcccatattccaagttggcaccttgtgataggttccacagaaacgatgaggagctgattcttgactagcggattgctacggtagcctccgtacgcttgtccgcacacattattgctgaggctgatatctacatgttagatccatgggactatccagctaacgccacctatgtggagcaagaatggtatttgctcagtcctagagacggaaagcacccaaatggtgcagggccataca

SEQ ID NO: 40414 - DNA, 334 bp, Glycine max
ggaaaaagttgtattgaaattttcacaagaggaatttcttacagcttggtcaactcaggtgcgtcctgcaacaactctgttggctgatgggtgtccatatttgtatgcaatggtgcatgatagttcagtgtctacaataccaggtgattttgtcattggtgtcaagttgacaaccataaacattatgtgtgcatatgggctgaatccgggtatttcaggtgctctgttttcggtcaccattgctcagtccatatcacagctgtctgttaggaatcaaatggctacagtgagaacaccatggaattttgattctatcaagcacagcttctgtcag

SEQ ID NO: 40415 - DNA, 272 bp, Glycine max
tggcaattgaagttgaagtcttgccctcctctcttcaactccaaacacaagacatcatcatccatggctgcctacgtctccactgtctgagctgtcaacagagctcttttgaacccgaatgggtctggacctggggtttcagctgccagttcatgcttctttgggagcagcttgaagaaggctattggctcaagggtccccgacacagagacttcctatggaagcttcaagattgatgcatgtgaagagacgaccgagattgattagacccc

SEQ ID NO: 40416 - DNA, 398 bp, Glycine max
gaacagtgaaggatttatcttccagaaaggctcaccagtggccagagatttttccaaagctatactgcgtctcttggaggatggaacagtgaaggaattagaagacaaatggttgaaacctgatggagactgccacaataattcgacctcacagggtacagaaagtttgaggcttgaaagtttctgggttctgtatgtgatctatggtgccgcttctactatttgaatgctacattatacaatcctgtcgctgaaatctagacaaacaacccgggatgaggcacgagaaggtaatgccaacccatgtgaggaaagccgatgataaacgatagctataatagccaatcaaatttatagcatatataatgcaacagcgacacccgtgcatgactagccac

SEQ ID NO: 40417 - DNA, 396 bp, Glycine max
acaagctggtgcagtttgcagagatacaggaaaaagcgggattgaatttttcacaatatgcatttcttactgctagttcaactcacgcccgtgctgtagcaactatgaaggctgatgggtgtccatatctgattgcagtggtgcattatattgcattgtctacgataccaattgatgttgtgattgatgtcatcgtatgcatccatgaccaatatgcgtgcatatctgactcgatcctgatataacctgaacttggctattgggcaccatgcctaagctcatatacacgctaactgtatggcatcatatatcgccggacagttacacgattgaattttgattctagcaagcaaagactaatgccattgaactatcgacccactcggttgcagaatg

SEQ ID NO: 40418 - DNA, 282 bp, Glycine max
gttgagaactaacaaggagaagcaaatggcttcctcaatgatctcttccccagctgttaccactgtcaaccgagccggtgccggcatggttgctccattcactggcctcaagtccatggctggcttccccaccatatagaccaactttgacattacctccattgcttgcaactttggaagagtgcactgcatgcaccgttgtgccctagccttcaagactaattttgagactctatattacaccgtacaccatgatgatgcatatatggctatggatgtata

SEQ ID NO: 40419 - DNA, 342 bp, Glycine max
cgagaaggctggttccgacctcacacaagacttgatgcggctacggcactatctgaagctgactacactagcgcggctgcctcatgctgcactggtcgaactggctagcgagctccactgggcttgaaccgcgtctaagctcgatgcttagttgccaatgtaaccttctgtggcaccagcttgaaaaagggtattgcctggagggctcctaacggcaagatttgctctggaaggttcaaaatcgatgccgcggaaaaagagattgttgagaaacaacagacagacaaggacagatggaaaggtcttgcctatgatgtttcagacgaccagcaagacattaca

SEQ ID NO: 40420 - DNA, 374 bp, Glycine max
  unsure (1)..(374): unsure at all n locations
gacaccanataagagctatgacgccccacgcacgcgtacgtaagactcggaattcagctcgagcatacatttaatgttcagcctaaaagttaataacagctggagatttggctgctgatcccatcaaccaatgaagcttttccccacaagcctgaagccgaatggagagattcacgaaagagtcaagttggaaagttcacacgaggaatttattaagacttggtcaactcacgtgcgtaccgcaacaactatgttagctgatgagtggacctatttttatgcaaaggagcatgatagttcaccgaatacaataccatgtgattttgtcattggtgtcaaggtgacaacactaaacaatatgcgtgcatatgggc

SEQ ID NO: 40421 - DNA, 371 bp, Glycine max
cggggtgtttttaacaaacagcaccagtccaaaccattttgatgcatgtaagtggacaaaatcagaacccctttctggggattggaccttccaaataaaggattggggccctaatatgggtttggaaatgggaagtcttaagggggcaaataaacttcatggcatttgaagttccttaatgacaatccaaacagtctacagttttgatattctcttgggaatctctcaagattttgaaattgctggtaatactcttatgccaactttttctgttccacaagctactgccagaacttctgaaaatgcggaatcctctgcatgatctggaaatttgtgttttctttcgcttgttcctttgtttaattcaataa

SEQ ID NO: 40422 - DNA, 399 bp, Glycine max
tcacagttatttgcaatagcatttttaatgggatgctcattagatatagctattaaaaaatactgggcccggcttaagcttcaagtatggttttacaatccttcaaaaattttggttctttggggggggatggggaagaaaacctaattaggggtcatggatatgtgaaggcctaccttaatgggtcttaaatggaaaggcttcttacttggcataccatacccttactgattgtttggacaaactagtgccacttttcaattttaaaagttagccgaatgtgattttctcaggagaaactttaaagcagatgtctaatgtttttgtgggtgggctcctgaggacaagggcgagtttatggtcacaacttcattatgtttcgggtaataatctggaaat

SEQ ID NO: 40423 - DNA, 362 bp, Glycine max
gtttggagagattcaggaaaaaggagccttgaaattatcacaagacgaatttcttacagctcggtcaactcaagtgcgtactgcaacaactgtgtgggctgatgggagtccatatttgtatgcagggtgccatgatatgctatggtctacaataccatgtgattcagtcattaggagtcaagttgacaaccataaacaatatgcgagcatatgggctcaatactggtatttaacgatctcgtctacagggcgccatttctaattccatatcacagcatactgccaggaactaaactggctccgcgagaacaccattgaattttgattctagcaagcagagcttaagccagaactgtattgac

SEQ ID NO: 40424 - DNA, 367 bp, Glycine max
ttcttaagtccttttacaagaaaacggttgggattaaatgggcaccgggggaacacccttggattttggttcttgccaggcgaggttttggcaggtttttattggccctttcgggggggggatcttaaggggccaaaccggggaatgggtcccacctataccaaaatcttccattaagtacttattgagaagtgctgcttgggaaaaaggcttgttaatggtcaagattgtgatgtctgggaatgcagcagtcaaaaggagtgattgggcctcattggtaccagtgtttttaacaaacagcaacagtacagagcattttgatgcatgtaagtggacaaaatcagaaccacattcctgggaaatgatc

SEQ ID NO: 40425 - DNA, 360 bp, Glycine max
  unsure (1)..(360): unsure at all n locations
gccactaatcctatgctgacgcgacttcttgagaactgtaagagtctcaaatatctggttgatgagtgtccttttgcatttgtgaactagtatgtagtattttattcacttaaataaagcgcattactatgtgcaatgagtgtgtttaaattttnaaaaaaaaaaaaaaataaaaaaaaaaaaaaaaaaaaaaaaannaaaaaaaaaaaaaaaaaaaaaaaaaaaaaaaaaaaaaaaaaaaaaaaaaaaaaaataaaaaaaaaaaaaaaaaaaataaacaaaaaaaaaaaaaaaaatgggggggccccccacttttggaccttctccccccggaaataatttcggacccggtccctgggg

SEQ ID NO: 40426 - DNA, 346 bp, Glycine max
ctcaagagaaactttaagcagatgtctaatgttttgtgggtggctcctgatgacaaggcgagtttatggatcacaacttcattatgttccgcgtaataatctggaaatgcaagaagcttatcttgtcaatctcgtaaatgtgtgacgagaatacgtatttgcacagtccagaggaagcttggcaattcatacagaaagctctctctcgtattgaatggctgcaaaaagctgatgtgccgtccatacctcagattgaacagttccattcgatgcagaagatgatgaatgctcctgattcaaaagataatattgatttactggtgcgcattgatttgttgggtttaca

SEQ ID NO: 40427 - DNA, 249 bp, Glycine max
ctcgagccgctcgagccgcttggtgagagttgctgcttggaagaaaggctgtttaatggtcacgattgggatgtctgggaatgcagcagtcaaaaggagtggttgggcctcattggtaccagtggttttaacaaacagcgacagtgcagagcattttgatgcatgtaaggggacaaaatccgaaccacattcctgggaattggtcttcccaatagaggtatgtggtcctaataatggtttctgaatgtg

SEQ ID NO: 40428 - DNA, 301 bp, Glycine max
ctttgatggaaattttccagtggattcttggttaccaatttttgtgaattgtctttatcctgtaagtcaattaccttcagaagctgtcgttgtaaatgttacatgtggtagtggacgttgtggttcactcaccactgcttggatttgcattgcattctacagatgctccttgcttctgaaccaaatgattatctcagttctctggaaaggatagaaaatttgtgttctcactggacttgatactttttcacaaactaaactggttgttcttattggctttggtaaggtaacacacaagaat

SEQ ID NO: 40429 - DNA, 385 bp, Glycine max
gccttactttagtggttctaaattgaaaagctctctagctagtcataacatcaccattactgatggtattgacaaaactagtgcaactttgcaatttacaaagttagcagattgtgattttctcaatagaaactttaagcagatgtctaatgttttgtgggtggctcctgaggacaaggcgagcttatggtcacaacttcattatgtttcgtgtaataatctggaaatgcaagaagcttatcttgtcaacctcgtaaatgtgctacgagaattgtatttgcacagaccagacgaagctcgccatttgagaaagaaagctctctctcgtattgaatggctgcagaaagctgatgtgcctaccataacacagattgaagagttccat

SEQ ID NO: 40430 - DNA, 258 bp, Glycine max
gcagtttggagagattcaggaaaaagttgtattgaaatttttacaagaggaatttcttacagcttggtcaactcatgggcgtcctgcaacaactttgttgggttatgggtgtacatatttgtatgcaatggggcatgatacctcagtgtctacaataccaggtgatcttgtcattggtgtcaagttgacaaccatttacaatatgtgtgcatatgggctcaatcctggtatttaacgttctcattttttgggcaccat

SEQ ID NO: 40431 - DNA, 262 bp, Glycine max
cgccactaatcctatgctgacgccacttcttggagaactgaaggagtttaaaatttctggtggatgagggccctttggctttggggacctatattgaatattttattcaactaaataaagcgcattactatgtgcaatgagtgtgtttaaatattaaaaaaaaaaaaaaaaaaaaaaaaaaaaaaaaaaaaaaataaaaaaaaaaaaagaaaaataaaattacaaatttaaattaacaaagaaaatattaatatggggggtc

SEQ ID NO: 40432 - DNA, 377 bp, Glycine max
gtggagattatcatgctgctgtgagagatgcaattaccaaaaagctctttgatgttcttttgtatagtagcaggaaagaagagagatgtgctggaactgtttggctagtatcacttataaagtactgcggcaatcatcctactattcagcaaatgcttccagaaattcaggaagctttttctcaccttcttggtgagcaaaatgaactcacacaagagttggcttctcagggcatgagtattgtgtatgacattggtgatgaatctatgaaaaagaatttggtgaatgcacttgtaaataccttgactgggtcacggaaacggaaaagagccatcaaacttgttgaagacactgaagtatttacggatggagctctt

SEQ ID NO: 40433 - DNA, 331 bp, Glycine max
cacaataacaaacaacacactctaatagttcttctttcctcacttacgtcgacctcacaaagtgacaatggaccccatgagtctgatgcgcaccggagccctcctcgccagcggcgtctaatgactcgtgcgcgtgctgggcccctccgagccaaacggcagacgcgccagcaatctttcctgcggttgcatctgggccgagaaagctcaagacaaatactgacaggactggaccgtgttgtgacggccaaaagagatcgagaccgccgacaaaggacccgacttagtgcacaccgtatacaatctagtcacaaacatctacgagtggggg

SEQ ID NO: 40434 - DNA, 360 bp, Glycine max
aaggacgcacctgctgttggcttgttgatcaaagatggcaatttgctagaaagatgtttggagagttgaatgtcgaatcccttctggatttccgctcacagatatttgcatagcatttttaatgagatgctcattagatatagctatgaaaaaatactgcgccgggctaaagctccaagtatgtgcttacaatcccttcaaaaattttcctctctttgtgtgcgtatggcgatgataacttaattagtgttcatgaatatgtcaagccttactttagtggttctaaaatgaagagctttctagctagtcataacatcaccattactgatggtattgacaaaactagtgcagctttgcaat

SEQ ID NO: 40435 - DNA, 261 bp, Glycine max
cgcactcatcgtattataggaaagattaagatggtggccacagccggtattagcgtgaatacaggtatatcataggcctagcctaagaatagatctcaagggggcacgccaagtctgatatttacaccatctgctatgcatgactgtgaattgtggaattctgcttgcgcaaaagctatgactatgtgatgaaatccacacccgcgatatggtgcatggcgtggggcatttctgaagcggactgaatatcattgcgatatc

SEQ ID NO: 40436 - DNA, 370 bp, Glycine max
ctagaacaaacacttaagttgcttcacaaggcactagagatacttaatgaaggctctggtcagcaaaacacaatagcaggaattgaagcatagatgggggtcatgtactacgtgttggagaactacactgaatcttacaatgctttcaagaatgctgtgtcgaagcttcatgctaccggagagaagaaatctgccttctttggtactgttcttaatcaaatgggacttgcttgtgtgcagctccatgccttagatgaggctgcagaattatttgaagaagcgagggtcattttggaacaagagaatggaccctgtcaccctgaaacacttggagtatatggcaatcttgctggcacgtatgatgcaattg

SEQ ID NO: 40437 - DNA, 367 bp, Glycine max
cgcttctagtacacagccaactgtatggaatcaaattgcgacagtgggaacaccattgaattttgatcttaacaagcaccgctttcagtcagctttactatggagctttttgggggaggaatattaaaggacagaactgtacatcggatcacactatatacaacactacttcaatgagaaccgtgataagagtagctgtttggaagaaaagctgtctaatggataagagagcgatgactgggaatgcaatacactaaaagagtgatcgtgcctaattgctacgagtgtgtttaactatcagcaacagtacagagcattttgatgcctgtcagcggacaaaatcataaccacattcctgggaaatgat

SEQ ID NO: 40438 - DNA, 395 bp, Glycine max
ttcatgctctacgatatatttgctaatttaaggacatgtcggtgtcaaaaaaaaaaaaaaaaaaaaaaaaaaaaaaaaaaaaaaaaaaaaaaaaaaaaaaaaaaaaaaaaaaaaaaaaaaaaaaaaaaaataagaacacaaaaagaataatgattcaaaacacgcaaagaaaaagaaaagacatctattgacacttatcgatggaggaaatcttaaatgacaaaaactggggattggatcacactgatacaaaatcctccaactagaaaatccacgagagaagctgctcggaagaaaggctgcttaatggagaaaactgtaatatacgggaatgcagaagccaaaaggtgtgatcgggcaatattggtacctgagaccataacaaacagcaacag

SEQ ID NO: 40439 - DNA, 446 bp, Glycine max
gggttcccgcggcgggacccggagaagatccgcgtggcgctggagcacacggaggcggtgctgtgggtggagcaccgcaagacgcggcggccggtggcgttcgcgagggccaccggcgacggcgtcttcaacgccatcatatgggacgtcgtggtggacccctccttccaggggatcgggcttgggaaggccgttatcgagaggctgctcagggagcttcggggaaagggaatttccaatattgccctctattcggagcctcgcgttttgggcttttatcgtcctttgggatttgttgctgacccggatgggatcaggggaatggtgtactccaggaaacaaaagaaaaaataggataactcttcattttctttctctattttttttaatttatttattgattatatgaaagtagagtaccaagtttaatttccatgcattatgtt

SEQ ID NO: 40440 - DNA, 263 bp, Glycine max
ctaactttcacactcatcgaggcagcctcttcttcttccgttggtgtgcatcgatgtgagcaatctctacatactctgcgatgaaccccacaaaacccgggttggaggattcccaacaacacatccacaaaataaggctcacccttttctccaagcacgtcaaaaacctcgagaaagtttcagcttatttgattagcggtgcaacggataatatactcagggtgaacggacctgttacgatgcccactaaggttctccacatc

SEQ ID NO: 40441 - DNA, 546 bp, Glycine max
aaaaatggttcctgaaaaggccccccttctggtggcttggtggtcaaaggatggcaaattgtaaagaaagatgtttggagagttgaatgtggaatcccttctggatttccgctcacagttatttgcaatagcatttttaatgagatgctcattagatatagctatgaaaaattactgcgccaggctaaagctccaagtatgtttttacaatccttcaaaaattttgtttctttgtgtgtgtatggtgatgataacttaattagtgttcatgaatatgtcaagccttactttagtggttctaaattgaaaagctttctagctagtcataacatcaccattactgatggtattgacaaaactagtgcaactttgcaatttagaaagttagcagattgtgattttctcaagagaaactttaagcagatgtctaatgttttgtgggtggctcctgaggacaaggcgagtttatggtcacaacttcaatatgtttcgtgtaataatctggaaatgcaagaagcttatcttgtcaatctcgtaaatgtgtta

SEQ ID NO: 40442 - DNA, 442 bp, Glycine max
gattgaagagttccattcgatgcagaggatgatgaatgctcctgattcaaatgataatattgatttactgttgagcattgatttgttgggtttacaaggagcaggtaaagcttttccaaacaaaattgtttttgatgataagcttgtgttggctaacacacaagaattctttgatggaaattttccagtggattcttggttaccaatttttgtgaattgtctttatcctgtaagtcaattaccttcagaagctgtcgttgtaaatgttacatgtggtagtggacgtggtggtttacccaccactgcttggattagttctgcagttaacaatcgctcctcagatatcaacaaaaagattcgcacagcacttgggaaaggtaagaaaattgtttttcttactagaggtgatccttttccagtagctttactggctgttcttttt

SEQ ID NO: 40443 - DNA, 336 bp, Glycine max
ggaaatttggctgatgataccatcaattttgaggcttttacccacatgctggtgcactttggagagattcacgaaaaagttgtattgtaatttttacaagaggaatttattacagcttggtcaactcatgtgcgtgctgcaacaactatgttggctgatgggtgtccatatttgtatgcaatggtgcatgatagatcagcgtctacaataccaggtgatcatgacattggtgtcaaggtgacaaccataaacaatctgtgtgcatatgggctcaatcctggaatttcaagatatcacttattgggcaccatacctcagttcatttcacagcatact

SEQ ID NO: 40444 - DNA, 437 bp, Glycine max
aagagctacgacgtcgcatgcacccgtacatgcactcgtacttaagctcgaggttcggattcagatggcaacagcgagaacaccattgaatttggattctagcaagcactgctttggatagtcttctattgaccttctcggtggaggaatcttagtggacaaaactggagattggatcacacttatacaaaattctccaattagtaacttgttgagagttgctgcttggaagaaaggctgtttaatggtcaagattgtgatgtctgggaatgcagcagtcaaaaggagtgattgggcctcattggtacaagtgtttttaacaaacagcaacagtacagagcattttgatgcatgtaagtggacaaaatcagaaccacattcctgggaattgatcttcccaatagaagtatgtggtcctaataatggttttgaaatgt

SEQ ID NO: 40445 - DNA, 262 bp, Glycine max
gagagactcatgacaaagctggcttgagattttcacatgatgaattatttaccgcttggtcaactcacgtgcgtactgcaactactatgttggctgatgggtgtacatatttgtgtgcaatggtgcatgatatctcaaactgtacactgccaggggatgttgacattggagctcagatgccatccataaacaataggcgcgcatatacggctcaattctgaaccattatgatgtccacatacgggcaccatgactaacaaca

SEQ ID NO: 40446 - DNA, 366 bp, Glycine max
ccataaacgggtggtgcctctcttacatattcccagccaaaacctatatcaggaaggccacattgcgcccttccgacttcgcaacccataacactccttcatcttcttcctatacatgttccttgccctatctcattcaagacaggcactgtttttgctgcctctgcccccatcatcaccccaactgtgagagaggatatggcataggaatacgagaaagctattgaagaacttcagaaattgttgagggagaagagtgaactcaaagcgacagctgctgaaaaagtggcacagataacagcttctatagggacatcatcatctgatggcatgccatcatcagaagcctgagacaggatcaaagct

SEQ ID NO: 40447 - DNA, 380 bp, Glycine max
aaaatttagaaacaaaaacatgttggtgaaggtgtacggtccaacctatggagcccccaagagggtgctggtgtgtctgattgagaaggaaattgagtttgaaacagtacatattgatctcttcaagggagagaataaggaacctgagttcctaaagctgcaggttcaattttaactttatttgctctatcacacactgtttgcttcactttgtttccatttttttttataatatgttttcatgttcaattacacttgtgtctaataaatctgcagccatttggatcacttcctgttattcaagatggtgattatactctctatgaatctcgtgcaataatcagatactttgcagagaagtataaagaccaaaggacaga

SEQ ID NO: 40448 - DNA, 257 bp, Glycine max
agaataccccctcttttgctgcatcacaggagttgtgcatcaagagcatggctgcacacgctcttgtatcatcatcttctcttaccttctcagcggatgctgctagacaaagtcttggaccaagatcactccaatctccatgtggcttattcagaagagcctgcttacttgttaaggcagctgctaccccccctgtcaagcaaggatcacacacacctttgtggattgcatcaaagcagagtgtttcttacttggat

SEQ ID NO: 40449 - DNA, 170 bp, Glycine max
cccagttacattcacaccatggattgcatggtacttatcgaacgtgctcgtatacaggaccgcattgagcgcactactgatagggatcgaggtgggcctggaccatggctaccttctggtgcgcccagttgtgatagcctggcctgtgaggaacaccgagatcgccgggc

SEQ ID NO: 40450 - DNA, 230 bp, Glycine max
cgaaggttccaacatttttttgttttacaaggcttccaaccggcgggggtatcgcgcctattaactttttggcaaaggccatcaaccctttcagcggggggtcctttgtcgtttcccacgacttccgtctcctcgacaagattgccaaggacattatggtctgcgagcacaagacttgccgcaggtgggacggttctatcggcgagtacaagaaccacctccgcaagaag

SEQ ID NO: 40451 - DNA, 403 bp, Glycine max
  unsure (1)..(403): unsure at all n locations
acaagagctgcgaccgtacatgcacccgtacataagcttggagcgagggtcgagacatgatgttgctgacacgggcctaccaacagtctagaaatcaccactgtctgctcttcggcagatgccagcaacgctcttcagcggtggtgtcgttgtcgtttcccacgacttccgtctcctcgacaagattgccaaggacatcatggtctgcgagcacaagactgtccgcaggtgggacggttctatcggcgagtacaagaaccacctccgcaagaagatgtcgtcgaccggtgtcctttcttaagcgttgtttgattgtttcttgcaaattgcatgcgttttccgagctgcggaacgcgggttcgaagcaaaagtggccttagagcanggttcatgatacccctgc

SEQ ID NO: 40452 - DNA, 297 bp, Glycine max
  unsure (1)..(297): unsure at all n locations
agaagagctatgacgtacgatgagactcggaattcggctcggaggtntgttatagtaaatgtattattgttgcacaaattgaccagattcgtggagcgagccttgttcataaaaagggacctgaaagtgtcggatgtgcaaatcgagatcctgctcggaatcatcaacctctactctctgataggctcatgcctcgccggcggggcctccgactggataggtctgcgttacacgattgttttcgccggcgccatcttttttgtcggagcacttctcatgggggggttccccaactat

SEQ ID NO: 40453 - DNA, 331 bp, Glycine max
ttccagaggactgccactatgaaccagaggatcttgtcaatttatttcttcatgccttatgtaaagggcatcggtaggcaggctaggtagctctcaggtgaatccgcggatgtatcaggcgaacaatgcagtgcctatgaattaattccttcctgggacaatgtgagtgttagcgatgatgatctgactgatctacatagtgtaatggatgtctctacctcacttattgctcagccacgatagatcaatatagttgaagtacagtatgacacaacattcagacaagtcaacgctcatgctctgaaaataacactttgggaccatattcaag

SEQ ID NO: 40454 - DNA, 347 bp, Glycine max
gcgtctctgaagtttctaagatgactttgtcgtgcattaaatgtacaggctctatcttcatagcatttggaaatttggctgatgaaaccatcaacatggaggcttttccccacaagctgctgcactttggagagatgcacgacaaagttggattgaaaattgtacataaggaatttcttacaggttgggcaactcaggggcgacctgcaccaactctgatggctgaggggtcgccatatttgcctgcaacggtgcatgatcattcagtgtctacaataccatgtgattttgtcatttgtggcaagctgacaaccataaacattatgagtgcatatggacgcaatcct

SEQ ID NO: 40455 - DNA, 369 bp, Glycine max
agatctgctagttttggcagatcttgtgctcctgggctatatagaaagtttgcacatagagattttcttaagagatgctttaggcagagctctaatgtaagggggttggctcctgacgacatcgcttgtaaatgatcacgaatcaattatgattcaaggcttcatctgtgaaggcgataagctgctatcgatgatctggtccatgtgatacaagactcgtgtctgcacagtccataggtagctcgccaattgagaaggagagctgtctatcgtcaagaatgggtgcaaaacgcagatgtgcctaccatagcacaaattgcagaattacatccaatgcacaagatgatgaatgctcctgatacagactat

SEQ ID NO: 40456 - DNA, 231 bp, Glycine max
gagtcttgcaattgaagatgaaggcttgcccttctctcttcaactccgaacacacgacatcatcatgcatggctgcctacggcttcactgtcagagctgtcaacagagctcttttgaacctgaatgggactggacctggggcttgagctcccaaatcattcttctttgggagcagcttggacaaagttattggctcaagggtccccaacacaaaagcttcctctggaagct

SEQ ID NO: 40457 - DNA, 206 bp, Glycine max
gtcgtaatgatgtgtgaagtgtgtgctatttttaacaaacgagagacaaaacaccagatctggcaaagaataactaatcatccactagggaaaagggtcacatcaacaatgacgacattggacgtgtcaactctgggaagtccacccccactggtaacctgatctacgagcgtcgaggtattgacaagcgtctgaattgatacgtt

SEQ ID NO: 40458 - DNA, 373 bp, Glycine max
cccaggtattccttcacccaacaatgatgctgcagaaccaagcatagcacaattaaacctggaaactggaattcccatttatgaagcggagcctcttcttctgtttttcatcctcttcaccctgctaggagccattggaggtttaggtgaccgtggaaaatttgtcgatgacgaacctactactggaggtgttattccttcaggcaaaggcttcagggaagcccttgggctcggatcaggtcctttattcggattcacgaaagcgaacgagctatttgtgggaagattggctcaattgggtttcgttttctcattgattggagaaattattactggaaagggagctctagcccaactcaacattgagacgggg

SEQ ID NO: 40459 - DNA, 391 bp, Glycine max
ggagaattgacttttccacaaggcactttcctaagtgctaagagaatgcctctctctatagggggaggagctggcgcaaacaaagctaatctcataaatatgccaaatgctgctctttcaatgaggagatattccgttggagatctactctttcaagcttctaagatgacttctccctacattaaatgtacagtctctatcttcatagcatttagaaatttgactgatgacaccatcacttttgaggctattccccacaagctggtgcagttttgatagattcaagaacaagttgtattgaaatattcacaagaggaatttcttacagctcggtcaactcaagtgcgtcctgcaacaactctggtggctgatgggcgtccatatttctatg

SEQ ID NO: 40460 - DNA, 388 bp, Glycine max
gccgacgtgcgttgaattgtgcttggcttgactgcaggcatggggagagttatctttgcggggactagattaaagagaattactggatattctcgccaaaactcaaggatataccgtcccacaacaagaaacgtttgggctatactctgtctgccatcaatttgctgattggacttgggaggagttctaaaggcacagacttacacctagcgcgaattggtctgtgcttcttaatagctaccacatgctcaccgatatttttcttcctacgactaaggactggctaaaaacacgtctagagagaataagtaaacatcaatggtgctgcggctcattctattcgttgagcagaactacggctaattgagcaagctatttgcaaacattt

SEQ ID NO: 40461 - DNA, 309 bp, Glycine max
attttatccaattgaaattttaaaaatgactggggttaacttaagaattcaattattggaattggattagttaacaatttaattgggttggtcggatggttttaaaaaaatggaggactaacttccatttcttatttattattggattaacccatccacttggtttgttatcgaacatttttttttggattcaaaagtttttccggaaaaaattgaatttatttttattttccaatcaaatctaataactttggtcccggaggttcctggcctggaaaaaaaaatttgggtcctaatcgcccaaataat

SEQ ID NO: 40462 - DNA, 225 bp, Glycine max
gttcggagagatgcatgataaacttgcattgaaattttcacaagcggcatttgttacagcttggtcaacttatgcgcgtcctgcaacaactctgctggctgatgcgtgtccatatttgtatgcaatggagcatgatacatcagtgtctacaataccaggtgatttggccattggtgtcaaggtgacaaccataaacaatatgtgtgcatatgggctcactcctgg

SEQ ID NO: 40463 - DNA, 374 bp, Glycine max
gattaacgatttataacaacaacaacgacgacgacactttgacacacctaaccctccaaattcctatctctcttcgaatggaatccgcagctctgtcgcgcataggcctggcgggcctggccgtgatgggccaaaacctagccctgaacatcgcggaaaaggggtttcctatctccgtctacaaccgcacagcctcgaaagtggacgagaccgtagatcgggcccgcaacgagggctccctccctctcacgggccaatacacccctcgcgacttcgttctctccctccagcgccctagatccgtcatcatcctcgtcaaggccggcgcccccgtcgaccaaaccatcgccgtcctcttcgaccaccttgacccc

SEQ ID NO: 40464 - DNA, 315 bp, Glycine max
gttttaaatccacaaaatccttttgtgttaaataggtggatgggaaaattgactttcccccagggcactttccgaagtgttaagagaatgcctttttctatagggggaggagctggtgccaagaatgctattctcatgaatatgccaaatgctgttctttcaatgtggagatattttggtggagatctcgtctttgaaggttctaagatgacttcttcctacattaaatggacaggctttttcttcataacatttggaaatttggctgattataccatcaattttgaggctttttcccacaagcttgtgccagtt

SEQ ID NO: 40465 - DNA, 306 bp, Glycine max
ggtggtgcaatgcttttggctgatacttatcataccaatgctggaaatgcacttcgcaatatttttgctgcgcctttcagaggcagagggcccattcaggcggttacatttgcgaataccattgggcatattgaaccagacatgaattcacggtttcagcttttgagtaccactaccaatggtgatcatgttcaagggaaagatctctcaatggttaaagagaatgtaacatgtgctgcagttggcttgacatcaagctacactccaactccattgttgggatcatggttgctgaaagacaaaagg

SEQ ID NO: 40466 - DNA, 399 bp, Glycine max
ctcgagccgcaacaactctgttggctgatgggtgtccatatttgtatgcaatggtgcatgatagttcagtgtctacaataccaggtgattttgtcattggtgtcaagttgacaaccataaacaatatgtgtgcatatgggctcaatcctggtatttcaggttctcgttttttgggcaccattcctcagtccattttacagcaaactgtttggaatcaaatggcaacagtgagaacaccattgaattttgattctagcaagcagagcttttgtcagttatctattgaccttctcggttgaggaaatttagcggacacaactggagagtggatcacacttatacaaaattcttcgattagtaacttgttgagagatgctgcttggaaaaaggctgtttaat

SEQ ID NO: 40467 - DNA, 387 bp, Glycine max
attgaaaagctttctagctagtcataacatcatcattgctgatggtattgacaaaactagagcaacttttcaatttagaaagctagcaaattgtgattttatcaatagcaactttaaacagatgtttaatgctttgtgcgttgctcctgaggaccaggcgagtctatggtcacaacatcattatgttgcgagtaataatctggaaatgcaagaatcttatatcgtcaatcttgtaaatgtgttactagaattgtatttgccccatccagaggaagctcgccaattgagaaagtaagctctctttcttattcaatggctgcatatagctgatgtgcctaccatcacaccaattgtagagttccattcgatgcaaaggatgatgaatgc

SEQ ID NO: 40468 - DNA, 237 bp, Glycine max
cgacaccactgatgatgctaatgcagaaatacatgaaaagggaggtttttcaccaaacctgtagagggttatttttgcacgagagcatctggataatctgcgtaccctggcttattataatatacagaaagcatccactgtgcatttgcagacgaggcttcacggtggcatgctagtattggtcaagactctgacagggtatactgtaaacttcgaagtggatagctctgataccat

SEQ ID NO: 40469 - DNA, 330 bp, Glycine max
cggctgtctacttgatgctcatagatgggcatcgtgttaaagagcgatatggaatggtgtgtctctgatacctcttttgtctctccctcctcttattttgcggaggctttttgctgaagtgctcattaaatatagtattggagactactcgtccaggcttaaactccaagtgtgtttttacaacccgtcaaaaaaatggtgtatctctgtgtgtatggtgatggtaacttaattagtgtgtatgaatatatatagccgtactttagctgttcttacttgtaaagcgttctagctagttataacatcaccgttactgatggtattgacaaa

SEQ ID NO: 40470 - DNA, 227 bp, Glycine max
gaaattttcacatgaggagatttttacagcctggtcaacgtatgtgcgtcctgcaacaactctgttgtctgatgggcttccatatttgtattcaatggttcatgattgtgtagtgtcttctatactaggagacaatgtcaatggtgtgatgttgtctaccataaacattatgagtgcgtaattgctggttatactcttatgacgactttttcttttttgcacgatac

SEQ ID NO: 40471 - DNA, 328 bp, Glycine max
ctgcttcaaaatgctgagtttgatatcaagaaagaagctgcttgggctatctcaaatgctacatccggtggttctcatgaacaaatcaagttcctagtaagccaagggtgtattaagcccttgtgtgatcttctcatctgtcctgatcctagaattgtcacagtttgtctggaatgcctcgaaaacctcatggaagggggagaagccggtataaacattagaaaatcctgtgatttgaattttttttcccaaatttttttttcaacctagggattggagaaaatttagaaccttcttaggcatgacaacacaaaaatttacgaaaagg

SEQ ID NO: 40472 - DNA, 373 bp, Glycine max
ctcctgaccccattttacaccatattgcttggaatcaaatgggatcaggcgtaacactattgaacgtcgaggctagcaagcagagcttttgtgagttttctattgacctcctcgttgtaggactctaagtggagacaaatgtagattgaatcacacttgtagacaaccttctgaattccaaccaacacgttagtgagctttaaggaacaatggctgaatacctaccccgacagggatgagcacgatcattgcttccgcgtcttgaagtccaacctcctgagagccaggctgcacgccaagcttgaccccttcggcgttcactgggtcaccaaatttttcgatctaactacggccgagttccggcgtcagtttc

SEQ ID NO: 40473 - DNA, 165 bp, Glycine max
gcagaagatcaagtagttgtgaactacgattgagaagcgcatggcttcctcaatgatctctgccccagctgtcaccactgtcaaccgtgccggtgccagcatggttgctccattcactgtcctcaattacatggctggcttccccaccaggaagaacgccatctg

SEQ ID NO: 40474 - DNA, 260 bp, Glycine max
ctggtacggggcgcaccagctgtgatatttacaccatctgctgtcaagactgggaatcgggcaatcccgctcgcacaaaagcaatgactctctcaatgcatccaaacccgggtgctgcagcatggtgtacggcatctgtgtaccctactggatttgatcgcaatattattcgtgtcactggatggactgtctccccaatgcaggctgtatacgttacaatggactggttcatcgcctctgaggaatgcgataccaggacc

SEQ ID NO: 40475 - DNA, 369 bp, Glycine max
agcccaatcctccactcagagccagcaagtgatgggcgcccacaggcagtattcgtcagaatccaagtctctgattgccctgcgcgatcaataaatcttctacgacgcacacaccttcagatatttacaccatgtgcgtgtgagactgtgtatagtggactcctgcttgcacaaaagcaaggactatagcatgtaatgacaacccatgttctgatgcatggagtttggaatctctgcagcgtactggatctcattgcgatatgatttgtgtcactggatggactgccaccccaatgcatgatgttcacgctacaattgagtggcttatttcctctcaggaatgtgttcgcaggacctattgtgttttaa

SEQ ID NO: 40476 - DNA, 369 bp, Glycine max
cggaaactttcacgaggttttcggagaaaaccaaactcggggctttgcatcgcaagtatcataccctttcctatcaaaattcttttgcctttccctaccaagggcgcccctcaaccgatatgtacgccactctctcatattactgataacgtgtatcaattcatgttgctcaaaagcaataactactacgtttatatccagagacgagatctgtatctggatctgggaatctctcaagcaaactttatttcatttggatatgatttgtgtcactacatagactgccaccccaatgcataatgtttacgttacaatatatgggtggatttcctgccatgaatgtgtttccaatacctattgagctttaaa

SEQ ID NO: 40477 - DNA, 230 bp, Glycine max
gcagaagccctaggagactggccagagcgagcacctcaacatcaaggtgaccgacaacaacaacgaggtcttcttcaagatcaagcgaaccaccacgctcggcaagctcatgaacgctttttgcgatcgtcagggcaagaatattaacagcgttcgcttgctgttcaatggccagcgtgtgaccgcacaagacaacccagatacgcttgacatgcaagatggcgatacac

SEQ ID NO: 40478 - DNA, 378 bp, Glycine max
aaagctataagtattatacgtcttcgttcagacctccagaaagctattgagaatgaggattatgccttggctgctgaattacgtgatgaaatttccaaacttgaagcagagtctctagctgcatcagctacagctttggcacatgaaaatgctcaatatgcattccgcttggggcagaaagtgagacataaaaaatttggctatagagctgtgatctgtggaatggatccagtatgcagtgaatcaagttcatggatggaaaatgcacaagtcaaaaaattgtctcgtggttccgctcaaaccatttatcaagttcttggtgatgtacatgctgaaccaaaattattagtggcatatgttccagaggagaaattttta

SEQ ID NO: 40479 - DNA, 357 bp, Glycine max
gtggttacattttcgaataccattgtgcatattgaaccatacatgaattcaaggtttcagcttttgagtaccactaccaatggtagattttgttcacgtggaaagatctctcaaaggttaaagtgaaagtagcatgtgccgcttttgtcttgtcatcaagttacactccaacttctttgttggtatctggtacgcaaatataccgatgtattattgccgtgtattctgatcggcacacttataatgagaacatccatacatatatatatatgtatgtatagatgtatgtatatatatatattatatatatatattggctatattactataggcgggccattttatgcaagctgaatt

SEQ ID NO: 40480 - DNA, 392 bp, Glycine max
  unsure (1)..(392): unsure at all n locations
cttattttggagctacatttcctcacctttttctgatgacttatgggaatctgaagccacagaagcaatcacagaactatgtacctagagtttttggtttcaaagttcacaagtcctgaagctggatggagtttcaagctttcatcaaagtaggaatctgagcatgccttgcttagttgtatttctttaaaattcagtgaattttcagtttctgaaatcagtacattctagatccatatgttctgtaaacgtaaagatatatgcaggcaccaacatcaaagccacaagagattaattttgttctctgcttcaaatcagtgttgccttgtaaagttttctgatagaatttaatgattagtattgaatgcactnttcaaatatatactataaaa

SEQ ID NO: 40481 - DNA, 305 bp, Glycine max
tctcaatccagactttctggaatgctcaaacattctttcatgaaggtgatacaacgtcatgaatccaattattgccactcataacattgctacagctaaaaagatttccactgaagaacctgaagtgttagggttttcctcacaagcaggttccattcatacagattttgggaaaatttgttttgaaattttcccatgatgagtttcttacatcttgggctactcaagtgctgtcttcaacaactctattggcttatgggtgcccctatttctatgccacggcgcatgatttttcatctcctaca

SEQ ID NO: 40482 - DNA, 220 bp, Glycine max
cacagttggaggaaccattctgcgtagtgatctattggcaaatggtttgacagagggcatttttagagcaagtgccgatttgcagcgcactcatcgcattagaggaatgagttaaatggtggccacagtcgggattcctgagactacaagtgttctgtttctcctgtgccttggaatgggatcttcagcctctctcaagattttataagaactccttaac

SEQ ID NO: 40483 - DNA, 239 bp, Glycine max
ggcgagtgcaagattggaatcatgcccggacacatccacaagcaaggaaagattggaatcgtatctcgatctggaactttgacatatgaggctgtggaccaaaccaccgttgtgggtcttggacaatcgacatgtgttggaatcggaggagatccattcaatggaaccaacctctgtgatgtactcaagatgttcgccaaggatcccgaaactgaaagaatcatcctcatccgagagat

SEQ ID NO: 40484 - DNA, 290 bp, Glycine max
ggcaatttgtaagaaagatgtttggagagttgaatgtggaatcccttctggatttccgctcacagttatttgcaatagcatttttaatgagatgctcattagatatagctatgaaaaattactgcgccaggctaaagctccaagtatgtttttacaatccttcaaaaattttgattctttgtgtgtgtatggtgatgataacataattagtgtgcatgaatatgtcaagccttactgtagtggttctaaattgaaaagctgtctagctagtcatagcaatcccattactg

SEQ ID NO: 40485 - DNA, 374 bp, Glycine max
ggaagcttcaagattgttgctgtagaagagaagaaagagattgaagagacccagcagaccgacaaggacagatggaagggtcttgcctatgatatctcagacgaccaacaagacatcacaagaggaaagggtttggttgactcccttttccaagctccacaggatgctggaactcactatgcagtcatgagctcctacgagtacctcagcactggacttcgccagtacttggacaacaaaatggatggattctacattgctccagcttttatggacaagcttgttgttcacatctccaagaacttcatgaccctgcccaacatcaaggttcctctcattctttgtatctggggaagcaagggacaaggaaaatc

SEQ ID NO: 40486 - DNA, 347 bp, Glycine max
attggtgctgcctcacattcctcagaagattttcctgacaaggaagatcaagaaaaacccaaaaagattgatgccagattgagacaaagaatagatcctcaatacaatgaggttcaagctcagatggaaacaaatttgtttaaattgtctcttgatgatgttgaaactcctaaaggttccatgttggatctgaaaatttctcaatctaaaattgcactttccaagaacacatttggaggaaccattctgcgtagtgatctattggcaaattttttgacagagggcatttttaaaacaagtgttgatttgcaacgcactcatcggattacaggaatgattaaaatggt

SEQ ID NO: 40487 - DNA, 325 bp, Glycine max
tgcacgcgtacgtaagctcggaattgggctcgaggggaaaaattctcttgtacagaaacttctgtcctaaagttgctgaggttggtttggccaatctttgcaacagggacaatactcatataagcatgactgggggcagggggactcccggttatgccgcacctgagctttggttgccatttcctgtaactcacaagtgtgacgtttacagcttcggcatgctgctatttgaaatcattggcaggagaagaaaccataacattaaccttccagaaagtcaggtgtggtttccaatgtgggtttgggaaaaatttgatgccgaaaa

SEQ ID NO: 40488 - DNA, 274 bp, Glycine max
ctgcacatggctatcaatctattgatgacatttcatatggttttaagaagctacatgaagatgcagatggaaatggttcactggtagatggtgatactcatgcaattggacctgccctccctgatgatgaggaggagctgttacctggcataacaggtgattttgacctacatggcttgcctggatcccttgaggacttggaagagtatgatctttatggtcgtggcggaggtatggtactagaaactgatgcacaggaaggtctcactggggg

SEQ ID NO: 40489 - DNA, 218 bp, Glycine max
gcatgacgccatgcacgcgtacgtaagctggaattggtcgggtttcaaatgaggttttctcaaactgcttgaggtcaagtgggaggacagggataatagcatcagaggtaggaagatgtgccagtggcagttgaagagagtattctggaaactacattgtggtgtttgacccacttgatgggtatccaatattgatgctgcatgcaactgttccattt

SEQ ID NO: 40490 - DNA, 375 bp, Glycine max
tgcaggagttgctcaagtactccaacgaggagaagaagcgcaactggttggagaccgtcgagctccagatcggcctcaagaactacgatccccagcgtgacaagcgtttctctggcaccgtcaagcttccccgtgtccctcgccccaacatggccatctgcattctcggtgaccagcacgatatcgaccgtgccaagcacggcggtgtcgacgccatgttcgccgacgacttgaagaagctcaacaagaacaagaagctcatcaagaagcttgctcgcaagtacgatgccttcgtcgcttccgacgccctcatcaagcagatcccccgtctcttgggtcctggtctctccaaggccggcaagtttcctacccccg

SEQ ID NO: 40491 - DNA, 217 bp, Glycine max
gtttctaaaatgacttttccctacattaaatggcagtctctttcttcatagcatttggaaattaggctgatgataccatcaattttgaggcttttccccacaagctggtgcagtttggagagattcatgaaaatgtcgattgaaattttacaagaggaatttcttcagcttggtaactatgtgcgtctgcacaactctgtggctgtgggtgtcatat

SEQ ID NO: 40492 - DNA, 380 bp, Glycine max
caggtattcagtgctgttttcagaaaatggaaggtatctcctgcaaaggcagaagaactttatgaggtcgatggtccacaatctgctataaaaggcagtagaaagattcggcacactgatgattttgagtaagcattgagattgctaattttctttttatacttggttgtattgaattagtacacctagttgataattgaaaatttgaaactttatatctgtgatttgtttattatattgggcagattcatggacaaggcagcaacaattaaagagactgaagagcatagtccaaagaatccatggaggctctgcactgtgactcaagtggaggaagccaaatgtgtgttaagaatgttaccagtttggctatgcaccat

SEQ ID NO: 40493 - DNA, 316 bp, Glycine max
cggagagttcgagaagaagtacattgcgacgctcggagtcgaggtccaccctctcggcttcactacaaacctcggccccatccagttcgacgtctgggacaccgcaggtcaggagaagtttggtggtctccgtgatggctactacatcaacggccagtgcggtattatcatgttcgacgtcacctcgcgtatcacatacaagaacgtccccaactggcaccgtgacttggtccgtgtctgtgagaacatccccatcgttctgaccggcaacaaggtcgacgtgaaggagcgcaaggttaaggcgaaatcaatcacc

SEQ ID NO: 40494 - DNA, 313 bp, Glycine max
ccaaatctaaaacaaatgccggtcctgctaacactaaggctacagagccaatgcacaaggtcgaagatggtgtctttggcactgtcggacgattcagagtgtactaaccagaacgagccctttgctgctactgtcgctatgctagcatctgcaacatgattgatgggagaaagaataactggcacatgaatgctaagtcaattaaacacaggaactggtactcccatttatgagagcggagcctatagatccgctacacatgctcattaccctgctcagagccattggagggacaagagaccgtggaaaattt

SEQ ID NO: 40495 - DNA, 290 bp, Glycine max
agcgacacttttcaacttcaataatcgcatcgcacaagcggagcgcggcgcatctcattgtctacggaattgatcgacccaactttgagcaatcacatccagcggatcgggcggtaccatctcaagccgtgctatctgataggcgatggcgcattgtgctgtccaagcgtagggctaaggttgccggcaactacaccaacgccgacctgggagctgagcaagttggcaaggatatcaacgcccttggcgacggcttagatgtcgctggcttcaaggctaactttggcaac

SEQ ID NO: 40496 - DNA, 277 bp, Glycine max
ggtccaggctgtagaaggagtgattgggcctgattggtacaagtgtttggaacaaacaggaacggtacatagcattttgatgcatggaagcggacaaaatcaaaaccacattcctgggaattgatcttaccaatagaggaatgcggtcctaataatgggattgaaatgtggagttcttagtgggcaaatcaaactttatggcgtctgagtttccttattggcgagacaaaacagcatacagtttgtgatatactcttgggaatctggcacgattttg

SEQ ID NO: 40497 - DNA, 357 bp, Glycine max
atggtggagtaggagcatccaagtactgctatattggtggatgtgatgcaacaagcaatgttgcagcaggaaagttattcgggataccccttcgtggtactcattcccatgcctttggtagttcatacatgagcctggatgagattacagactggtaacttaacagaaaagatggctcacgtacatgtgatgattttgtcagtctcgtctatacattgtttcacaaaattaagatatcaaatggtgtttttggtgaaaccacaccaaagtgagtgggctcgatgcacatcatatgctttgtcatttcctgatggatgacttgacctcgtaatacatattacgttatgagaagtggaa

SEQ ID NO: 40498 - DNA, 347 bp, Glycine max
cagcagtgaaaaggagtgattgggcctcattggtacaagtgtgtgtaacaaacagcaacagtacagagcattttgatgcatgtaagtggacaaaatcagaaccacattcctgggaattgatcttcccaatagaggtatgaggtcctaataatggttctgaaatgtggagttctgagtgggcaaagcaaacttcatggcatttgagtttccttattgacaatctcaaacagactacagtttttgatattctcttgggaatatatcaagattttgaaattgctggtaatactcttatgccaactttttctgctccacaggctaatgtcagatcttctgaaaaagcggaa

SEQ ID NO: 40499 - DNA, 386 bp, Glycine max
gcaagatacaaatacttaagggttttacatttaagtgattcctcttttgagactctacccaattcaattgctaaattggagcacttgcgagctctcaatcttgcaaataactgcaaaataaaaagacttcctcattcgatatgcaaactccaaaatttgcaagttttgtcactgagaggatgcatggagcttcaaacattgcctaaaggattagggatgttaatgagccttcgaaaattttatataaccacaaaacaatctattctgtcagaggatgaatttgcaagattgagaaatcttcatactctgagttttgaatattgtgacaatttgaaatttttgttcaaagtggcacaagtcagttctcttgaagttttgatcgttca

SEQ ID NO: 40500 - DNA, 306 bp, Glycine max
ctacataaaaatcaccacattactgggaatcaaaaaaacaaagagaagggtgtcacactcaataatgtcttttcctttcattaaatttcctcaatggcgtcttacgtcgactaacgtccgaacccctgtctccaatatgaaactggttgccctctatgatattgtcttgacaacctgaaaagatcttgaatatgctattactactcgaactccatctttttctgattcaacagaataaaaggacaacactttgaacttgaacgatcagattcacaatctaacaactgagtttcaatatcacacgct

SEQ ID NO: 40501 - DNA, 255 bp, Glycine max
aacagcaacggttctgaactttttgctgcatgttagcgcacaaagtaagcaccacattcctgggaattgctcttttcaatataggtttgtgaaccttataaaggtcttgtaatgtgatgtgcttattgaccaaatgaaacattctggccttcgagaattcttattgacaaacccatacagtctaacaaattttgatattctcttgggagtctctaatgaatttgaaactcattgtaatactcttattcaatcttt

SEQ ID NO: 40502 - DNA, 338 bp, Glycine max
ggcaatgccactttctatatcgccaggtgcagctacgattaatgccagggttacaaatatagcgatcccttggcctatcaactgatgttacttccatggcgactttgacatgcttggaaacaccctgtatcctactggcgccacatggacagattttttagtctttgggcgtgccagctataagactcattctcttgtattgatcatcccaagtgaggcttgcggaccaaataatggttttgaaatgtggagttctgagtgggcaaattaaacttcatggcatttgagtttccttattgacaatcccaaacagtctacagtttttgatattctcttgg

SEQ ID NO: 40503 - DNA, 385 bp, Glycine max
ccgcaacacagtttgaggaaccattctgcgtagcgacttataggcaacttttttgacagagggcaattatagagcaagtgttgattacgcagcgcacttatcgcattagaggcatgactaatatggcggccacactgggcactcctgagaatacagttttatcattgacctgtgctatgaatagatcttttacggggcgcgccagctctgatatttacaccatctgttctaaaaactgttgattcgtggaatcctgcttgcacaaaatgcatgactatgtcattaaatcctaacccgtgttttgaagcatagtgcttgtgattttttgagccgactgcattgcattgcgatgatatttgtgtcattggatggtctgacaccccaa

SEQ ID NO: 40504 - DNA, 261 bp, Glycine max
aactaactctaagtaagctactcatagatgaagagctgggcaaatctggtgcacccttacaagctatgaaagatagctgctagtgactgtctcacgaaaaacgtgacgcgtatgtgtaacgtattgtggggggctcctgaggacatggcgggtgattggacaccactagagtatggtaatagtgacaaaccggaaacgcaagaagccgattttgtcaatcgcgtatatgtgctacgggacttgaagttgcacagctcagat

SEQ ID NO: 40505 - DNA, 387 bp, Glycine max
gtcaaggccgctgctcaaaaccccatgcgggaactccgcatcgagaagctcgtcatcaacatctccgtcggagagtctggtgataggctcactcgtgcggccaaggttctcgaacaattgaccggtcaaactcccgtcacctcgaaggctcgttacactgtccgaactttcggtatccgtcgtaacgaaaagattgccgttcacgtcacgatccgtggacccaaggccgaagagatcctcgaacgtggtttgaaagtcaaggagttcgaactcaagaagaagaacttctccgcgactggtaactttggtttcggtatcaatgaacacatcgatatgggaatcaagtacgatcccggaatcggtatcttcggaatggacttctacact

SEQ ID NO: 40506 - DNA, 369 bp, Glycine max
gggaacccttgggtatttgaacgcgcagttatttccaatatcagagttattgaaattctcaatagatatcgctattacaaattactgcgccaggctaaagctccaagtatgtgcttacaatccttcaaaaaatgcccgactttgtgtgggtacggccatcgataacttaattagcgttcatcagtgtggcaagccttactttagggtgactaagttgcaaagtttgctggctagtcataacatcaccattactgatggtgttgacaaaacttgttcaactttgcagtttagaagagtagcagactgggattaactgaagataaactttcaactgatgtctaatgttttgtgattagctcctgatgacaa

SEQ ID NO: 40507 - DNA, 263 bp, Glycine max
ggtgattttgtcattggtgtcaagttgacaaccataggcactgtgtgtgcatatgggcactatcctggtatttcagggtctcttctttcgggcaccattgcacagtccatttgacagattactgttgggaatcaaatggcaactgatcgaactccattgaatgtttattctatcaagctaagcttttgtcgcttttcttttgaccgtctccgtagaggaatcgttattgacgtaagtggtgagtgcatcacacttaatcaaaa

SEQ ID NO: 40508 - DNA, 242 bp, Glycine max
ctcatctttgaagtttctaagatgactgctccctacattaacgggacagtctctttgttcatagcatttggaaattaggctgatgataccatcaattttgaggcttttccccacaagctggtgtatttaggagagattcaggagaaagttgctttgaaattctcacaaaaagaatttcttacagcttggtcaactcacgtgcgttcagcaacaactttattggctgatgggtggccatattt

SEQ ID NO: 40509 - DNA, 392 bp, Glycine max
gtttcacaacaggcccaaggcaaatggcggcgactcatgcaaggatctctgacgtagctcatagcgcgactcatcctcgagcgacagattcgtggtcgggaagtgcttcctctgcacttaaatctctctctagattggaaagagcctcctctaacctagcacaatgggctagtgggatcaccttgaattatgatatgcttgcggccgcgtcacatctcttggaacaatttcctgttcaggacgatcaaaaactacccaacccgatatgtgccttattgtcacatataatatatccctagtaccatgaggttcaggctgccatggagacaaataagttctagttgactatagatgatgttgcatctcctaaaagttccatgtgggatctaaaa

SEQ ID NO: 40510 - DNA, 379 bp, Glycine max
cattttgatgcatgtaagtggacaaaaccacaaccacattcctgggaattgatcttgccaatagaggtatgcggtcctaataaagggtttgaaacgtggagttctgattgggcaaaacaaacttcatggcatttgagtatacttattgacaatcccaagacacgatacagaatttgatattctctagggaatctctcaagatttagaaattgctggtcatactcttatgccagctttttctgttccacaggctactgccagatattctgacaatgcggaaacctatgcttgatctggaatatgagtaatctttcgcttgctcggttggttaacttaataaacgaaatttggcaagatcctattgttgaaatttctctgg

SEQ ID NO: 40511 - DNA, 312 bp, Glycine max
ctcctacgacgttcttattttcacgaccagcgttggtggtctcggactcaacctgacgggggctgacaccgtcatcttagaagagcgtgactggaacccacaaaaggacattcacgccatggaccgtgcgcatcgaatcggccaaaagaaggtcgttaacgtataccgcatcgttacgcgctggactctggaggagaagaacctcaatctccaacgctttaggatcgacgtcgcatgctccgccctcaatcaacacaacgcctgtcttgggttcatgccgactgaccaaatcctggatctgatcaacattaa

SEQ ID NO: 40512 - DNA, 144 bp, Glycine max
atcgcattgcgattaatttaagtgcagatcttccaatgagttttgaaaaccgtgttgcagctgttggaattgccacagagtttcaggagaacagtagccaagtatttgagatggtcgaagaggaaacagacaatgcaaaaactc

SEQ ID NO: 40513 - DNA, 369 bp, Glycine max
ccccttttgcactctcagaactgttcatggaagaccactgcttattgtcgcagtattgctcgaaatgttatggcaatggccacaagaaaagcaccaacttgaacttgccccactggagggcccaaaaatggcaaaaacttttaaaaaaacttggaacaaagttgatgataagtatgcagtgagttcactggccctggttggtgtggttgcattgtggggctcagttgggttgatctcattactacatcactttgaaacaggcaattgataggcttcctttgattcctgggatacgtgagattgtatgcattggatacgcaggccggtttgtatataagaacatagttttcaagccagacagggaagctt

SEQ ID NO: 40514 - DNA, 334 bp, Glycine max
cccgcgagcacgcccttctcgcctttacccttggtgttcgtcagctcatcgttgccatcaacaagatggacaccaccaagtggtccgaggcccgataccaggaaattgtcaaggagactttcaactttattaagaaaggcggattcaaccccaagactggtgcttttgtccccattttcgggttggaccgagaccacatgttggaggaatcttccaacattaactggtttaagggattgaagaaaggaaaccaattttggcaattccaaggaaaaaaccttcttgagggcattgaattgattcaagcccctttgggaaccaaccaccaagccct

SEQ ID NO: 40515 - DNA, 330 bp, Glycine max
ctcaaacttcaacaaactacaactaccactttcaaaccttcaaccaaccaccaacaatcaacatgtctgactctatgcgcaagggcctcggcgagcaagcctctgagaagatcacccccgactctcaaaagtccaccaccgagaaggccagcgagagcctcaccggagcttgtgaccggattgcccgcgccgtccaacctgagggccaaaaattcaccggacagaagcttggggacgcaacccgcttccgcggcgattaaggccaaggcgttatgaagcaagcccaagacgcttttgggaacgcttggcaaaacattttcgacacccttt

SEQ ID NO: 40516 - DNA, 443 bp, Glycine max
aaaagatttaagacgcacgcacggcgcgctccgataatctgcgaaattcggtctcggggcaaacgtgtttgagattcaattcggcaacagtggcgaacaccattgaggttttgattctagcaagcagagcgttcgccagttttctattgaccttctcggaggaggaatctcattggacaaaactggtgattggatcacacttatacaaaattctccaattagtaacttgttgagagttgctgcttggaagaaaggctgcttaatggtcaagattgtgatgtctgggaatgcagcaatcaaaaggagtgattgggcctcattggtacaagtgtttttaacaaacagcaacagtacagagcattttgatgcatgtaagtggacaaaatcagaaccacattcctgggaattgatcttcccaatagaggtatgtggtgctaataatg

SEQ ID NO: 40517 - DNA, 395 bp, Glycine max
attggtttatttggcttttggaagaacccattaccctgggttttccaaccaagcattattcccaatttcgattggtttcccttaagggctcagggccccatattccccttgttggacattgcaagacttttgccccggcgtggggtgattgttaccatattcactaccccaaaaaatgcataacgtttcaattttgttctttttcgggctgtttcataaggcctccaaatccggttagttcaactccactttccatccaaagaagcaggactacccgaagggtgcgagaatttcgacatgttaacatcaatggacatgatgtacaaagtcttccacgccatcagcatgctccaaaagtcagcagaggagttgtttgaagcactgataccaaaacc

SEQ ID NO: 40518 - DNA, 423 bp, Glycine max
  unsure (1)..(423): unsure at all n locations
cacccgtacgtaagctcggaattcggttcgagggcacaagatctcgtagtttgacgggccggaagccctcggtggcgattggacctggggcaacggccaggctacgtttggccacttgattggcgggtacgatgctggatactacggctacctctcctcacaggtctactccaccgacatgttctactcggtcttcaaggacgacccgatgaacggcaaggagggcaggcggtataggcatacggtgctggagcggngtgggagcatggaggagatggatatcttggaggagttcttggggaggaagccgagtactgaggcgttttacaaggagttggggattgcgaagtangtggttgatgagatgatggggcgcatggatagcggggaggctcgtctgattgcatttgaaatggcttcgtg

SEQ ID NO: 40519 - DNA, 406 bp, Glycine max
attgatttactgttgagcattgatttgttgggtttacaaggagcaggtaaagcttttccaaacaaaattgtttttgatgataagcttgtgttggctaacacacaagaattctttgatggaaattttccagtggattcttggttaccaatttttgtgaattgtctttatcctgtaagtcaattaccttcagaagctgtcgttgtaaatgttacatgtggtagtggacggtgtggtttacccaccactgcttggattagttctgcagttaacaatcgctcctcagatatcaacaaaaggattcgcacagcacttgggaaaggtaagaaaattgtttttcttactagagttgatccttttccagtagctttactggctgttctttttggcgttaagaatgaaattctga

SEQ ID NO: 40520 - DNA, 236 bp, Glycine max
cttgcccctacattaattgtacgggctctttgtccataccattgggaaatatggctgacgatcccatcaatcttgtggcgtttccacacatgctggtgctgtgtgtagagattcatgaaaaatggccttagtactgtcagcagacgaatttcatacagctcgatcaactcacgtgcagccggcatcaactctgatgactgatgggtgtacatatttagactgcaacagggcatgat

SEQ ID NO: 40521 - DNA, 132 bp, Glycine max
aaaaggatgacttgtggacttttgagagtttttagatttgtgtttggtgaagtatatgttattgcaatgtacttcagataatgtgaattatcttgtgtatcccaatccaacttaatgttacttgctttttac

SEQ ID NO: 40522 - DNA, 335 bp, Glycine max
ccgcggggagagaggccatcgcgagagagaaccccgtcgtgaaggccgcgaagatcgtcaaagtctgacaaccctaaatcggagaacaaatctagaagaagaaggggcaaaaaggggataacacaaaacgacgacgtttccactcgatcgcggttaggtgattgattaattaattattaattactcgcgtcgcgtcttttcttcgagacgcgactaggcgcgtgggtggaaacccggtgaatttgtaaccgggaaagatgaatttctcgggggaccctttttcttttttcttaattttaatggtttaatttcttaaatttttatgcccttttttt

SEQ ID NO: 40523 - DNA, 240 bp, Glycine max
gtgcatatgggctcaatcctggtatttcaggttctcgtcttttggggaccattcctcagtccattttacagcaaactgtttggtatcaaatggcaacagtgtgaacaccattgtatttttattctagcaagcagagcttttgtcagttttctattgaccttttcgggggaggaattttattggacaaaactggtgattgggtctcaccttttctaaaattttccattattaaactacttt

SEQ ID NO: 40524 - DNA, 371 bp, Glycine max
aatatattagctgatgaattagtagttgttgttcttgtttctttaggacctttagtagttcctatacctgtcatgttccttggattattcacaagcggtatttaagctctcatttttgctactttagctgcggcttatataggtgaatccatggaaggccatcattgaccagttttctacaaaatagtccttttcgtttagcttgccggacatattattgcggctcaatataatctacttagtaaacatctatatctatctacctatatctattatgatttaggttgatagatttagataggttttttgtttaacctatttttagccatattttaaggtttatttttggaatattccaaaatatttagatt

SEQ ID NO: 40525 - DNA, 343 bp, Glycine max
gttgaattagcaaatatcaagaaagatataatagctccctacaggcatctagtaggcaccataccaagagccgaatcagcttcatttgaaaaacgtaccacactggtgtatttccagggagcaatatacaggaaagatggaggagccattcgccaagaactgtactacctcctcaaagatgagaatgatgttcatttcacatttgggagcataggtggaaatgggattaatcaggcaagccagggcatggccttgtcgaaattctgcctcaacattgcaggggataccccatcctcaaatcgcctttttgatgccatagtaagccactgtgttcctgtgatca

SEQ ID NO: 40526 - DNA, 338 bp, Glycine max
atggactgccaccccatttcatgatgttcaggttacaattgattggggtatttcctctcatgaatgtgttcccaggacctattgtgttttaaatccacaaaatccttttgtgttaaatatgtggatgggaatattgacttttccccagtgcactttccgaagtgttaagagaatgcctctttctatatttgtgaggagctgttgcaaataatgcttttctcattaatattccatatgcttttctttcaattgttagatattttgttttaaattctcttcttagaagattctgatatgaatttttccctttaatttaatatttacatgtcttctttttt

SEQ ID NO: 40527 - DNA, 289 bp, Glycine max
gaatcgaccgacctgtctttcggatcaagatggacacagaaaatcctcgctcaagagtcactcaggccgaagatttctttgtgaacgcgttggaaagctggaggaaggctcaaaagctcggaagtatgacactggttggacatagcttgggaggttatctcacgacagcttatgccctccgctatccagaacatgtcacgaagctcattcttgtgtcgacggcgggctttcaccgacacataccgaatgtctatgacctttcaaaacaacacgagagcgcacagcaaga

SEQ ID NO: 40528 - DNA, 183 bp, Glycine max
gatatgacatgcacgcgtacgtatcgcacggaattcgactcgagtgaccctgcccaacatccaaaggccttcaatggttggtatctggggaggcaagggacaaggaaaatctttccaatgtgagcttgtctttgccaagatgggaatcaaccccatcatgatgagtgctggaaagttggaaag

SEQ ID NO: 40529 - DNA, 359 bp, Glycine max
atggtctcattcctgggggaacaggaactaggctattgggcaccattcctcattccatttcacagcaaactgtttgtaatcaaatggcaacagtgagaacaccattgaattttgattctagcaagcagagctattgtcaatttactatagaccttgtctgtggaagaatcttagtggacaaaactggagattggatcacacttattcaaaatttctccaatctagtaactttattgaaaagttgctgtttgtataaaaaggctgtttaatggtcaattattgttattgcctggggattgcattcattcaaaaatgtatggatttgggccttatttggttccaagttgttttttaacaaa

SEQ ID NO: 40530 - DNA, 300 bp, Glycine max
attcggctcgagctctcctccaattcttcacgctccaccgcacaaaccctaataaccccctcctcgctccccttcccccgatcccctcccccgccgtcggctccgcctacgccgtcctcggccccaccatctacgtcctcggcggctccatccacgacgtcccctcccccaacgtctggctcctcgactgccgcttcaaccgctggctccgcggtccctccatgcgcgtcggccgcgaattcgccgccgcgggagtcctccacggcaagatctacgtcctcggcgggtgcgtcgctgaca

SEQ ID NO: 40531 - DNA, 374 bp, Glycine max
ctcctgagcagctctctcattgaagcagcccagagaatcgcattctgggtcactcctcaaaaacatacaagaggtaccaccggatttcatcttcattgactgcttgggggaaagaagcgcagtttctgatttgatattccgggttcgacctcttttctatctgcaaacaggtttcatctagtacatcatggtccgcgtatccgtcctcggcgactgcctcaacaacatctgcaatgcagagcgaaccggaaagcgccaggtcctcatcaggcccagcagcaaggtcatcgtcaggttcttgaccgtcatgcacaagcacggctacatcgacgagttcgaagagatcgacgaccaccgctcttgcaagattgtca

SEQ ID NO: 40532 - DNA, 370 bp, Glycine max
gtcagttatatattgaccttctagggggaggaatcttagtggacaaaactggagattggatcacacttatacaaaatttttcaattagtaacttattgatagttgctgcttggaaaaaaggctgtttaatggtcaagattgtgatgtctgggaatgcactagtctaaaggagtgattgggcctcattggtacaagtgtttataacaaacaacacctgtgcagagcattttgatgcatgttactggacaaaatcagaaccacattcctgggaattgatcttaccaatagagggatgtggtcctaataatggttttgaaatgtggagctctgagtgggcaaatcaaacttcatggcatttgagtttccttat

SEQ ID NO: 40533 - DNA, 379 bp, Glycine max
attcagtaattgttgactctcttgccattattatgtatttggaagataagtatcctgaccctcctctgcttcctcgtgatattcaccaaagagccatcaatttccaagctgccactattgtttcctcatctatacagccttttcaaaattatactgtagtgaagtacatagaggaaaaagttggcactgatgaaaaacttccttggacccaaagtgtaattggaaaaggctttatggcactcgaaaaattgttgaaagaccatgctaggagatatgcaactggagatgaaattttactggcagatttgtttttagcacctcagttagatacagcaattaagagattcaacgttgacatgaaggaattccctactctatc

SEQ ID NO: 40534 - DNA, 377 bp, Glycine max
actgaactgaattgagtctcaacaacccagttgagtaactaagatggcgcaagtgaggaacaagcaagtgcttctaaaggactatgttaccggttttcccaaagaatccgacatgaatattgtcgaaagtaccataacattgaagcttccacaaggttccaatgatgtcttgctcaaaaatttgtacttgtcttgtgatccgtatatgaggaatctcatgaacaagcccgaaggccctcccaatagtcgtgcttacactcctggctctgtaagtcatgctttttttttttttttttttttttgcaaattatataatttgattgtttaaaaaattattttgcttttgttggtttgattttggaaatatataatttttg

SEQ ID NO: 40535 - DNA, 343 bp, Glycine max
cttcctcagtagtgtcttttacgcttctcttctctgcagcaactatgcctaaccctaagggcttctttgacatgaccattggggggcaatctggtggccggattgggatggaacttttccccgacgttaattcccggaccggccagaactttcgcgcgctttgcacccgccagaaaggcgttaggcggaacggcaagccccttcacttcaaggggttgttcttgcaccgggtgatcccgagttttatgtgtcaaggtggggacttcaccggcggaaaccgaacccgcggcgagtcgatttattgcgcccaggttgccgaccagaactctgtgaagaaacacac

SEQ ID NO: 40536 - DNA, 384 bp, Glycine max
atcgatcccaatggaaacttcctcatcaatcatccttctgtcgtcaccgatctttccaacccaaccacacctgcttcagcttttggaatcatcatcgaagccttacgattacgaagagacgctggcatcaaacccttcacagtcatgtcttgcgataatctcagacacaacggtgaccaagccaagaaagcctgcatatcatttgctcgtgctctcgatccccaactcgctgattggatctctgagaatgtctgctttcccaatggcatggtcgatcgtatcactcccgccactactcccgatatccgaaccgatttgaattccaaatcaggaatcgaagatttggttcccgtcatttgcgaagactttatccaatgggtcttg

SEQ ID NO: 40537 - DNA, 307 bp, Glycine max
agaaaattcaatgctgaaacatggcttcggctactctctctgtagccaaaccaaccctttaagccaatgggaaaaggttcttttaattcttttgccttccaaacttatcaagcttccttcccttttctagaaaatcttcaaaggatttccattctggcattgccttccaaacctattccagtggaaaccagggaagattccaaaaaggtgggacagaagcaaaactgaagggtgccataaaccggtttggaaagaatggaaagaacttcttgaggggcttgcaccggcgcaaagacttcccttttga

SEQ ID NO: 40538 - DNA, 386 bp, Glycine max
gcaagcacagcttttgtcagttttatattgaccttctcggcggaggaatcttaatggacaaaactggagattggatcacacttatacaaaattctgcaattagtaacttattgagagttgctgcttggaagaaaggctgtttaatggtcaagattgtgatgtctgggaatgcagcaatcaataagagtgattgggcctcattggtacacgtgtttttaacatacagccacagtacagagcattttgatgcatgtaagtggacaaaatcagaaccacattcctgggaattgatcttgccaatagaggtatgtggtcctaataatggatgtgaaatgtggagttctgagtgggcaaatcaaactttatggcatttgagtttacttatt

SEQ ID NO: 40539 - DNA, 409 bp, Glycine max
gttcagtgtctacaataccaggtgattttgtcattggtgtcaaggtgacaaccataaacaatatgggtgcatatgggctcaatcctggtatttcaagttcttggcttttgggcaccattccttaatccatttcacaacaaactggttggaatcaaatggccaccggggaaaccccattggattttgattctaaccagccaaacttttgtcaagtttctattgaccttctcggtggaggaatcttagtggacaaaactggagatgggatcacacttatacaaaattctccaattagtaaccttgttgagaagtgctgcttggaaaaaaaggctgttaatggtcaagattgtgatgtctgggaatgcagcagtcaaaaagagtgattgggcctcattggtacaagtgtttt

SEQ ID NO: 40540 - DNA, 361 bp, Glycine max
ctcgagccggcaccattggcaaaattggaatctacaaatgatgagaaagaaagagattatctgcccaaagtcaattatgaacatgaagtagacaagttactggacggtcttggccctagatacacagattggcctggatgtgatccattgcctgtcgatgcggatatgcttccagtaactgttcccggttaccaacctcccttcagacattagctgtagccatgattaaattgtgggaaataagttctattgcaaaggttgcactcaaacgtggtgtgcagctaacaaccagtgagagaatggcagaagagatcaagaaattgacaggtggtattctactctccagaaataaagacttctt

SEQ ID NO: 40541 - DNA, 394 bp, Glycine max
gtgcatgatagttcagtgtctacaataccaggtgattttggcattggtgtcaagttgacaaccataaacaatatgtgtcctattggcctaaatcctgttttttaaggtgctcattttttggccccatttcctaattcctttccacactaaactgtttggaatcaattggcaacagtgaaaacacctttgattttggattctacaagcagagctttcgtcagttttctattagaccttctcggtggaggaatcttagtggacaaaactggagattggatcacacttatacaaaattctccaattagtaacttgttgagagttgctgcttggaagaaaggctgtttaatggtcaagattgtgatgtctgggaatgcagcagtcaaaaggagtgatt

SEQ ID NO: 40542 - DNA, 302 bp, Glycine max
aaaagagcctttgctttttctttaggcctttccgaattaagtacttgtttcattttctctcgaagcaagaaaaatgttcatcgagagtttcaaggttgagagtcctaacgtgaagtacacagagactgagattcagtccgtgtacaactatgaaaccactgaacttgttcacgagaacaagaatggcacttatcagtgggttgtcaagcccaaaactgtcaaatatgaatttaaaaccaacacccatgtccctaaactaggggtaatgcttgtggggtggggtggaaacaatggctcaaccc

SEQ ID NO: 40543 - DNA, 359 bp, Glycine max
cgagctcaagcaccgtatcgtcatggcgccgttgacgcgcaaccgggcgaccgtgcccacgttggccccgaacgacatgatcgcagagtactacgagcagcgcgcgtccgacggtggtctgctcatcactgaggtgagtattgtgctcctcgccgagctggcacgcgcaggctgtggacgacggcgtccgacaggagacacatctgacacgcaggcgacgtatccctccggtgaatcgggtggataccccaacaccccgggactgtacaccgacgagcacgtgcgggagtggaagaaggtgacggaccgcgtgcacgccaagggcgggttcatctatactcagctgtgggctctcggac

SEQ ID NO: 40544 - DNA, 388 bp, Glycine max
  unsure (1)..(388): unsure at all n locations
gaccttacaattatagaggtcttgtcaaggcatgcttccgatgagttgtaccttggacagagagatggtggtgaattttggacttttgacaaagagccattagaggccttcaagaggtttggaaagaagttggcagaaattgagcaaaagctcatccaaaggaacaatgatgagacactgaggaaccgatacggcccagtgcagatgccctacacattgctttatccttctagtgaagaagggttgacttgcagaggcattcctaacagcatctccatctaaagaggtttatggttgtgttgcaatttaaataaaagatgaggtgtaattccttcattcccggggttttaagaaagaataaaaaaangcttaaagagagtattaaaaa

SEQ ID NO: 40545 - DNA, 219 bp, Glycine max
aaattttgtgagggtcattatgaagaaaagggacaaacttaagtgtcaaggtggaatcaacccatactccattgaatggaccggtttggcccattaatttctgagttaaggccatggttttctggggtgcgaatattcctagtttgatgggttgattacccaaccaggttttaaccaaattggcgaaattattaaccagctttgggggggggataaaaa

SEQ ID NO: 40546 - DNA, 406 bp, Glycine max
attttattcacttaaataaagcgcattactatgtgcaatgagtgtgtttaaatataaaaaaaaaaaaaaaaaaaaaaaaaaaaaaaaaaaaaaaaaaaaaaaaaaaaaaaaaaaaaaaaaaaaaaaaaaaaaaaaaaaaaaaaaaaaaaaaaaaaaaaaaaaaaaaaaaaaaaaaggggggccaaaaaataggggaactttcaaaaccgggaataaatcagggcgggaaacttttgggggaaaaaaatttccttttattaaatgttttaaaaattgggcgaaaaaaaatcaataaagtggtaccggggaaaaatttttattcgttaaaaatttaaaaaaaaataagaccaaaaaccttaaattgtaaaactgggggtgcctaaggagggagcaacttaaaattaat

SEQ ID NO: 40547 - DNA, 396 bp, Glycine max
ctcgagccgattcggctcgagcaggttctcgtcttgtgggcaccattcctcagtgcatttcacagcaaactgcttggaatcaaatggcaacagggagaacaccattgaattttgattctggcaagcatagcttttgtcagttttctattgaccttctcggcggaggaatcttagtggacaaaactggagattggatcacacttatacaaaattctccaattagtaacttattgagagttgctgcttggaagaaaggctgtttaatggtcaagattgtgatgtctgggaatgcagcaatcaaaaggagtgattgggcctcattggtacaagtgtcgttaacaaacagcaacagttcagagcattttgatgcattgtagcggacaaaatcagaaccac

SEQ ID NO: 40548 - DNA, 309 bp, Glycine max
tgacaatctcgcatatgtgatactagaattgtattagcaccgtggggaagaagctacccaactgagaacgaaagctctctctcctatgagatgtctgcaaaaagctgatgtgcctaccatagcacatatcgaagagttacattcaatgcagaagatgataaatgctgctgattgaaaagataatattgatacacggttgagcatatgatgaaactgtatacatagagcaagtaaagctgttgcaaacaaaatggataaatgatgataagctcaggtaggctaacacacaagaattcattgatggaaatt

SEQ ID NO: 40549 - DNA, 218 bp, Glycine max
gtgtccttctgcatttgtgaactagtatgtagtattttattcacttaaataaagcgcattactatgtgcaatgagtgtgtttaattcttacaaaaacaagaaaaaaagcaaccgaactacgataacaaaaaaaacatgaaaaatcactaaaaaaacaaatcaaaaaaggggcggccgcccactattgagctcgtccacccggaaattaattccggacc

SEQ ID NO: 40550 - DNA, 364 bp, Glycine max
caaatggcaacagtgagatcaccattgaattttgattctagcaagcagagcttttgtcagttttctattgaccttctcggtggaggaatcttagtggacaaaactggagattggatcacacttatacaaaattctccaattagtaacttgttgagagttgctgcttggaagaaaggctgtctaatggtcaagattgcgatgtctgggaatgcaacagtcaaaaggagtgattgggcctcattggtacaagtgttttaacatacagcaacagtacagaccatttgatgcatgtaagtggacaaatcagaccacatgcctgggattggtccttccaaataaaggattggggccctataatgggttt

SEQ ID NO: 40551 - DNA, 353 bp, Glycine max
atcattggcctgtgctatgaatagttcttttagggggcgcgccagttctgatatttacaccatctgctctcaagactgtgaattgtggaatcctgcttgcacaaaagcaatgactatgtcatttaatccaaacccgtgttctgatgcatggagtttggaatttctgaagcgtactggatttcattgcgatatcatttgtgtcactggatggactgccaccccaatgcaggatgttcaagttacaattgattggtttatttcctctcaggaatgtgttcccaggacctattgtgttttaaatccacaaaatccttttgtgttaaataggtggatgggaaaattgactttccccc

SEQ ID NO: 40552 - DNA, 291 bp, Glycine max
gacccctacatcctccctctttccctccgcatccccttcacatacttctcgcaactctcgttggacacttggtgcatccgatatcatgttcaccaaccccgtcttttcccgcttctttggtgctggacaagtgatagagactgtccgaggtggaggggtgtttcagcccgcgatagataaggctgtcaagctgttacaagatggcgaatggatacatatcttcccagaaggcaaggtcaatcagcacgccatgaaccctccaggagggctctttcggttcaaatggggcgt

SEQ ID NO: 40553 - DNA, 380 bp, Glycine max
ctcggccgcaaacgcaaagggcgattccaccactcgagtttcgtaacgggtgctccaatctttgcagccggcaagatcatcgtaaaaaatggcgtcattgtcgccgtcgagccgcacagtggccactttaaaccgcgactggggaatctcctggctctttgcttcatgctggcaaaacatggtgttgacattgacaacatcgcctttgttaagccaaagaagtggacctgtgcctggccttttccatcacaaccggacctcgagcttgaacattttgtcagcgccttagacacggactacggcgactcagaagagtcgtagtcagtagaataaggccagcattatcatgtaccttggtgcgtttgtatttatcacgattt

SEQ ID NO: 40554 - DNA, 330 bp, Glycine max
atcatcttgaattttatgttttgttggttccttcacctaaaacaatttttactcccacctgaaaagctaaaataatttagttcttaatcaattctactcacggctggattgattttaagaactccaaaaattacctagacaactattgttagtttacgaataaattcttttgggccttaaacaaataggacattagttggaagttcattttaacaattttttttttcttgttttgattacagttggtgaccttaaccacctgatatctgccaccatgagtggagttacttgttgtctacgtttccctggcaactgaactctgatcttcgc

SEQ ID NO: 40555 - DNA, 382 bp, Glycine max
aattcctaccaagtttatcaaactgttcccaagcttttcgtgttcgaatggtcttcttccttttttgtccctttgaaaagctaaggaattgctgaattgggataatcaaatagaaccaccttgaagttgagacaagagtaatggccgccctatagtaattagacaatatcaggacaaattactattcaagagatattatgatcactatggatgtgaaaggtataaaatgggttggaaatatgtaccagaaatttgagaatatgttcctggaggtggaagacgtgatgtacgaagatacagttaaatacatagagaatcagatgcaagctgttggggaaatcttaaaaaagtatattcaaaaattgtgggagatttacttccc

SEQ ID NO: 40556 - DNA, 418 bp, Glycine max
caaaagattttaaattttgcgaggttcattatgaagaaaagggacaaagttagttgtctagttggaatcaacccatactccatggaatggactggcttggccaatagattactgagtaagggcaatgatattctgcgttgcgattacgctagttttgatggtttgattaccaagcaagttatgagccagatgacacaaatgataaacagtctctgtggtggtgatgaaaaattgatgcaccaaacgacgcacctgctgttggctcgttgttcaaggatggctatttgttaaaaagatgtttggagagctgaatgtggaatcccttctgaatttccgctcacacttatttgcaaccgcatctctaatgagatgctcattagatattgctatgaaaaaatactgcgccaggctataactc

SEQ ID NO: 40557 - DNA, 372 bp, Glycine max
gtcttgcaattaaagtttttgtctcgcccttctctcttcaactccagggacaagacatcatcatccatggctgcctccctctccactgtcggagctgtcaacagagctcttttgaacctgaacgggtctggacctggggtttcagatcccagttcatacttctttgggagcagcttaaataacggtattggctcaagggtccccatcacaaagacctcctctggaagcttcaagattgttgctgtacaacagaagaaacagattgaccagacccatcagaccaacccggacagatggaacggcctcgcctatgatatctcacacgaccaacaagacatcacaagaagaaagggtttggtcgactcccttttc

SEQ ID NO: 40558 - DNA, 412 bp, Glycine max
gatgaatgctcctgattcaaatgataatattgatttactgttgagcattgatttgttgggtttacaaggagcaggtaaagcttttccaaacaaaattgtttttgatgataagcttgtgttggctaacacacaagaattctttgatggaaattttccagtggattcttggttaccaatttttgtgaattgtctttatcctgtaagtcaattaccttcagaagctgtcgttgtaaatgttacatgtggtagtggacggtgtggtttacccaccactgcttggattagttctgcagttaacaatcgctcctcagatatcaacaaaaagattcgcacagcacttgggaaaggtaagaaaattgtttttcttactagagttgatccttttccagtagctttactggctgttcttttt

SEQ ID NO: 40559 - DNA, 385 bp, Glycine max
ctcgagccgctcgagccgctcgagccgctcgagccgattcggctcgagggcatttgacagtgtctggggagcaaagagctgcgctcatgaagatggtttgcttcttccttgtgaatctcattctcttgaggggtttggtggaatcgtcgttagagagtatgatcttgaagatggggcggcgctatttggatggagaagattgcaagaggattgagcagtatatgagtgcttcgatcctgtccaaatcatgcctctcctcacttgcatttctgatcacaagcactttcttggggatttcttatgatcttttggcacccattccctggatcaaaagatacattcagaaatttaggaagaatgacatgcttcaattggtgccagaaca

SEQ ID NO: 40560 - DNA, 452 bp, Glycine max
  unsure (1)..(452): unsure at all n locations
acaccatagnaagagctatgacagtcgcatgcacgccgtacgtaagnctcggaattcggcttcgagaaattctccaattagtatctttctgagagttgctgctcggaagaaaggctgtttaatggtcaagattgagatgtctgggaatgcagcagtcaaaaggagtgattgggcctcattggtacaagtgtttttaacaaacagcaacagtacagagcattttgatgcatgtaagtggacaaaatcagaaccacattcctgggaattgatcttcccaatagaggtatgtggtcctaataatggttttgaaatgtggagttctgagtgggcaaatcaaacttcatggcatttgagtttccttattgacaatcccaaacagtctacagtttttgatattctcttgngaatctctcaagattttgaaattgctggtaatactcttatgccagctt

SEQ ID NO: 40561 - DNA, 413 bp, Glycine max
agaagaacaagttgctgagaactaataacgagaagcttacggctggctcaatgatctcttgcgcagctgttaccactgtcaaccgtgccggtggcgacatggttgctacattcactggcctcatgtccatggctggcttgcccaccactaagaccaacgatgacatttcctccattgctagcaacggtggaagagtgcaatgcatgcaggcgtagccaccagttggcaagaagaagtttgagactctttgctacctgccagaccttgatgatgcacaattggcaaaggaagtagaataccttcttaggaagggatggattgcttgctggtaattcgagttggatcacagattctggtaccgtgagcacaacacgtcagcagaatactactactgacgctactggaccatgtgg

SEQ ID NO: 40562 - DNA, 385 bp, Glycine max
tacttctacatttgctgtgccgtcgccaccgataagggactggtgtccctctgggctctgtacgccttttgcatgttcttgtgtttcgtgcaccatgccttatcccatctcacagtgaactgtcgcgtctccaatggcaccagtgtgaacacgactggatgttgattctagcacgcctaccttttgtcagttgtctattgaccttctcggtggaggaatcttatgggacaaaactggatgattggatcacacttatacaaaattctgcaattagtaacttattgagagttgctgcttggaatatatgctgttgaatggctaagattgtgatatctggtaatgcagcacacaaaaggagtgattgtgcctcattggtacaagtgtt

SEQ ID NO: 40563 - DNA, 392 bp, Glycine max
gtttttgatgataagcttgtgttggctaacacacaagaattctttgatggaaattttccagtggattcttggttaccaatttttgtgaattgtctttatcctgtaagtcaattaccttcagaagctgtcgttgtaaatgttacatgtggtagtggacgtggtggtttacccaccactgcttggattagttctgcagttaacaatcgctcctcagatatcaacaaaaggattcgcacagcacttgggaaaggtaagaaaattgtttttcttactagagttgatccttttccagtagctttactggctgttctttttggcgttaagaatgaaattctgagttctaacgccactaatcctatgctgacgcgacttcttgagaactgtaagagtct

SEQ ID NO: 40564 - DNA, 373 bp, Glycine max
gacattacctccattgctagcaacggtggaagagtgcaatgcatgcaggtgtggccaccaattggcatgaagaagttcgagactctttcctacctgccagaccttgatgatgcacaattggcaaaggaagtagaataccttcttaggaagggatggattccttgcttggaattcgagttggagcacggtttcatgtaccgagagcacaacatgtcaccaggatactacgatggacgctactggaccatgtggaagctgcctatgtttggttgcactgatgcttttgacgtgttgaaggagcttcaagaggctaagactgcataccccaacggcttcatgcgtatcatcggattcaacaacgttcggcaagtgc

SEQ ID NO: 40565 - DNA, 313 bp, Glycine max
cctgagttgattggcatcatcctttccatcctgcacagaagttatggccatcgatctacgttacaagcacagataggcctctggtcgccgtgatgtcaagagcgacaacgtatacctccgtctactagtcaagttataccggttcttacaccggagaactggatctgacttcaaccgtgtcgttctgaagagactcatcatgagcagaagaaacaagcccgccgtatccctcataaagctcatcatgtccctcgagggaagaaacgacaagatcgtcgtcgtcgtcgataccgtcaccgatgacgccagacta

SEQ ID NO: 40566 - DNA, 352 bp, Glycine max
gacgaggacggctactttgccgagctttatgggtataaatggacatcactctgtcttcatactacaacaatgcttattgcgagttcggttgggattgtagctggtgtatcctatgccattcacagtggttaccagtctggcggtccactacttgggaggctgttctccgctatatgaatcattgaccatctattcccattgttgaagggtctcttatgcagagcaatatcgtaccccaaccattgttattgtatgagccgttcctgttgcttcaatatactccttgctgagggcgaagatcgatcccttcacctgtgtctacaacaaattcaccaatggccaatgagggatc

SEQ ID NO: 40567 - DNA, 188 bp, Glycine max
ctgccgcacagtttgctattctcatgaatatgccaaatgctggggcttctatgtggagatattttgttgcagatctcgccttcgaagtttctaagatgacttctccctacattaaatgtacaagctctttcttcatcccattcggaaagttggctgatgataccatcatattttaggattttccccac

SEQ ID NO: 40568 - DNA, 262 bp, Glycine max
gggaggagctggtgcaaagaatgctatgctcatgaatttgccaaatgctgttctttcaatgtggagatattttgttggagatctcgtctttgaagtgtctaagatgacttatgcctacattaaatgtacagtctctttcttcatatgatttgcaaagtaggctgatgataccatcaattctgaggctgtccccatcatgctgtttcagtctggagagattcacgaaaatgtcgtattgaaattttcactagaaggaattctt

SEQ ID NO: 40569 - DNA, 341 bp, Glycine max
tgcacgcgcacgcgtgctcgagattcggatccaggtgtagggaatatcttctcgtacacatctgcatatagtgacggtagaggcttctatgagatactcatttgatctaactttcaatgcttgccgcgccaggctgagactccgacgcttcttctcacatcatcatatatcatgggttatctactgtcgttcgatgcgagtactccatcagggctcgtaaatggagaacacactactggatgggagtccaactgctcagttgaagatctgggaatatgcatatccaaactgctgtgatctacattcacaaccgaaatctactgttgatacccgtgcctaca

SEQ ID NO: 40570 - DNA, 388 bp, Glycine max
gctttgacttgatcaaattgtagataagatgggcggaggaggcggagcggcgacagcgcaagcagaggcgcagtactcgacggcgaagacgtcggtgtggtgggacatagagaactgtcacgtgccgaaaggatgcgatccccacgccatcgcgcagaacataagctccgccctcgttcgcacgaactactgcgggcccgttttcatctccgcctacggcgacaccactcgcattactggcgtcgtccaacatgccctctccagcaccggcattttccttaaccatgttcccgccggcgtttaagatgcaagtgacaagaaaattcttgttgacatgctgttctgggcagtggacaatcctgcacccgctaattacctattaatttct

SEQ ID NO: 40571 - DNA, 337 bp, Glycine max
tccacaccgagctcataaacacacaccgatctagaatctatctgacaaacttcggcatcccatcacccacgcataacacctccaaactaccgccaaaatttccttcctgcgtcacttcttcacgcgcgccccctcgcccgccacaatgtccgctacaaagaccaaggtccagtccatcatcgacgagaaccccgtcgccgtcttctcaaagtcttactgcccttactgtcgccaggccaagcagttgctcagcgacagtggcgcaaagttctacgcgattgagttggaccaagttgatgacggctcagctattcagtctactctcggcgaaatgact

SEQ ID NO: 40572 - DNA, 273 bp, Glycine max
ccaaggtttggatggtctagccttggcaccatgactcgtcgttggaacctgcaaggggcaccaaacccttgtcgactttaataccaggaacaatgttttgctcaagcagcacgtcaacaatcttcctgccatcagttgtggattggtagagtgtttcctcaaagagaatggtgccaaggtttggatggtctagcctctcgctcagctgcatactacgagcaaggtgcccgtttcgccaaatggcgtactggtgtgagcattcccaacggtccc

SEQ ID NO: 40573 - DNA, 352 bp, Glycine max
gaaacatatgatttcttttgggctgattttgctgattggtacattgaggctagtaaagagcgtctttaccagtctggagctggaggcaagtctgttgcttcagtggcacaggctgttctattatatacttttgagaacatactcaaagtgctgcatcctttcatgccatttgtaactgaggagctgtggcaggcactcccttatcgaaagcatgctcttattgtatcgccttggccagagactcaactttcaaggaacacctgctctgttaaaaagtttgaaaatttccaggctttggttagagccatcaggaatgctcgggcagaatattctgttgagcctgcaaagcgga

SEQ ID NO: 40574 - DNA, 378 bp, Glycine max
cgcccgattcaatcgacttcaagccatcaacgacaatcaaccaaaccaagagactctccataaaccgtcaaaatggttctcgcagttgaccttctcaacccttccccggccgctgaggcccgcaagcacaagctcaagaccctcgtgcccgctccccgctccttcttcatggacgtcaagtgccccggatgcttcaccatcaccaccgtcttctcgcacgccaacacagtcgtcgtctgccagggctgctcgcaggtcctgtgccagcccactggtggcaaggcgcgattgaccgagggctgctctttccgaaggaagtaaacgtttcgtcggagtgatgacagctgggattgatgggttacgatgacgactatcatg

SEQ ID NO: 40575 - DNA, 388 bp, Glycine max
ctcgagccgcttttccaaacaaaattgtttttgatgataagcttgtgttggctaacacacaagaattctttgatggaaattttccagtggattcttggttaccaatttttgtgaattgtctttatcctgtaagtcaattaccttcagaagctgtcgttgtaaatgttacatgtggtagtggacgtggtggtttacccaccactgcttggattagttctgcagttaacaatcgctcctcagatatcaacaaaaagattcgcacagcacttgggaaaggtaagaaaattgtttttcttactagagttgatccttttccagtagctttactggctgttctttttggcgttaagaatgaaattctgagttctaacgccactaatcctatgct

SEQ ID NO: 40576 - DNA, 362 bp, Glycine max
  unsure (1)..(362): unsure at all n locations
catgcacgcgtacgnaagcccgaaanncggcacgaggcctaactttagtgggtcgaaattgaaaagttttctagctagtcataacattatcattactgatggtgtngacaaaacgagagcaacgaagcaatttataaagatagcggnaagggggtacgagaagagaaactgcacacaccagacgaagcgtcgcgagggagaaagagagcactctgtcagattgaagggacgaaaaaagcagatgtgcctaccatagcacagattgaagagttccattcgatgcagaggatgatgaatgctcctgattcaaatgataatattgatttactgttgagcattganttggtgggtttacaaggagc

SEQ ID NO: 40577 - DNA, 373 bp, Glycine max
acgtcaatgcacgcgtccgtaagctcggaaaacccgtgttctgatgcatgaatttggtaattcctgaagcgtactggatttcattgcgatttcatttgcgtcactggatggactgccaccccaatgcaggatgttcaagatacaattgattggtttatttcctctcaggaatgtgttcccaggacctattgtgttttaaatacacaaaattcttttgtgttaaataggtggatgggaaaattgacttttccccacggcacttgccgaagtggtaagagaatgcctctttctattcggggaggagctggagcaaagaatgcttttcttatggatatggccaatgctggtacttcaatggggaaattttttggtg

SEQ ID NO: 40578 - DNA, 348 bp, Glycine max
cgccccctgcccgcgtcttgagctcggaattcgggtagtgcactgaaatgctttgtctgcaatttctatggtaattgcggcttttgtggagatgaaaagactcaaaatggctcgtgactgtgggctaattgacatgcctaatgtgacaatttcaatgagcatctggaggatagttcctcaatatgccttgtttggaattgctgatgtctttgcgatggtgggtctgcaagagcttttttatgatcaagtcccacaggaattaagaaatgtgggtctttctctctatctaagtatttttggggtcaggagctttctgagtggctttctcatatctgctattgaaaatgt

SEQ ID NO: 40579 - DNA, 365 bp, Glycine max
gcgcgacgatccaagtgcagtacccctccgatatcatggccaagaagctgtggaagattctcgaggcgaaagcccgcggagagggcggcgggtgctcgatcacctacggcgcactcgaccccgtgcagatcactcaaatggcaaagcacctcgaaacggtctacgtgtccggctggcaatgctcatcgaccgcgtcgagctcgctcgagccgggacccgatctggctgattacccgtccaacaccgtccccaacaaggtcgcccagctcttcaccgcccagctgttccatgaccgcaaacaacgctggacgcgcagtcaggcactggccaagggcgaagacctgcccccgccatcgactacctgc

SEQ ID NO: 40580 - DNA, 264 bp, Glycine max
ctatgacgtgccctgcacgcgtacgctcgcaattcggctcgggcgcgagccgatctagccgagcgtcttaataaacgctaacctctgcaccactgttggtcttgacaatgcgagagcgcctttgcatccacattggccaggccggcgttcatgtctgaaatgcttgctgggagctttattgcctggagcatgccatgcacgctgaggcacagatgcctaatggtcacaccatcagtgggggtgacgatgctttcaacaacttct

SEQ ID NO: 40581 - DNA, 307 bp, Glycine max
gcagaggatgccgtatgacgccgtaatgcggtcgccgagtatcggaagaaacttctccagcacaaggaattggaatccagagtccgatccgtcagggagaatttgcgagcttcaaagaaagagttcaataaaacagaagatgatttgaaatctcttcaaagtgttgggcagattattggcgaagttctcaagcctcttgacaatgaacgccgtatgtggttggttgccgcaataaagtggataaggaaaaattgacttcagggacaagggtggttcttgatatgacaacactcaccataatgcgagc

SEQ ID NO: 40582 - DNA, 169 bp, Glycine max
ctttgcacaaattctctgactatgtctgttaatacaaacctgcgtactgatgcatggagtgtgtaattattgaaacgatcccgatatcagtgtgcattcatatgtgtcactggactgactggcacttcaatgcaagatgttcatggctcaacataacggcacatttact

SEQ ID NO: 40583 - DNA, 251 bp, Glycine max
gcttgcacaaaagcaatgactatgtcatttaatccaaacccgtgttctgatgcatggagtttggaatgtctgaaacgtaccggatttcattgggatatcatttgagtcacttgatggactgccactccaatgcaagatgttcagggtacaattgattggatgatttcctctcaggaatgtgttaccaggacttattgtgttgtaaatccacaaaatccttttgtgttgaataggtggatggggaaactgac

SEQ ID NO: 40584 - DNA, 457 bp, Glycine max
  unsure (1)..(457): unsure at all n locations
ctcgagcctttttcaatgtggagatattttgttggagatctcgtctttgaagtttctaagatgacttctccctacattaaatgtacagtctctttcttcatagcatttggaaatttggctgatgataccatcaattttgaggcttttccccacaagctggtgcagtttggagagattcaggaaaaagttgtattgaaattttcacaagaggaatttcttacagcttggtcaactcatgtgcgtcctgcaacaactctgttggctgatgggtgtccatatttgtatgcaatggtgcatgatanntcagtgtctacaataccaggtgattttgtcattggtgtcaagttgacaaccataaacaatatgtgggcatatgggctcaatcctggtatttaaggtcttgtcttttgggcaccattcttcagtccatttacatcaactgttggaatcaaatggc

SEQ ID NO: 40585 - DNA, 231 bp, Glycine max
  unsure (1)..(231): unsure at all n locations
aacgatttgatggtttggaatgcatttcccaagcaacgagtcttcggttcgaaaccagcagagagagagaagaagagattttacactgtcatccaattactaatcactatgtatcgtaaaagttaacaaactnacaatatgtgatcgtatattacatatggatcgtgtgatcatgcatggacctgaggagcaaagcaaggactcttccagcaccaattagtgaccattcat

SEQ ID NO: 40586 - DNA, 351 bp, Glycine max
ttattttcttgattgattaattaattaattagtttggatatcctttcttatcttgtgcacaagacaaatgtggtgggcacgctcaacatgttgggtttggcaaagagggtaggtgcccgttttctgattagtagcaccagtgaagtttacggtgatccacttcagcaccctcaggctgagacctactggggaaacgttaatcccatcggtgtaaggagctgttatgacgagggaaagcgcactgcggagactttggcaatggactatcacagaagtgctggtattgaagtgaggattgctcgaatcttcaacacttatggaccgagaatgtgccttgatgatggccgtgtg

SEQ ID NO: 40587 - DNA, 370 bp, Glycine max
gagctatgaccgacgattgcaccgcgtacgtaagcctcggaattcggctcggggggattgcttctatttacaacacgtttaaaaaagaattatcggatatcatagataatctctgtatcaagaatgatatatcggaagatgcgattctagatatggaaaaaaatatgtatagaaagtattatgattggatgggaatcaatagagaaatactaaatcgttgcatatcgaatccagaattttggttcttttcaaaatttgcgatattttatgacgcatataggggtaactcgcacgttataccaatcaaattactgtttttttcttctaatgtaaatcaaaatgttagtgaaaataaaaagaacattgctag

SEQ ID NO: 40588 - DNA, 214 bp, Glycine max
gatgtcttacgtttctcctaaccgtgatcaacccccaaagaaagatttggtgggggggaatttttcctttgatattaaatctcgctctaaattgggaaaaatttcctctacaaaagcccaatttggtagtgggaaaaccttcaaatattatataattggtgcttggtcacattcttaaaaaatttttctgaaaggagatcaagaaaacccaaaa

SEQ ID NO: 40589 - DNA, 312 bp, Glycine max
gatgtgttgcgttgacaaggaccaggatcagccccaacaaacagaattgttggaggtgattagctcctgttgtcttacacacaacactacattgatagaaattttccatacgactgcacaataccaatgtgggaaaaccgtctaaattcatataatcaatgcccgttcacatccttcagaagaaatgtctcaatgtggaagtcgacgtgaacccaaaaagattgatgccaggttgagacaaagaattgatcctcaatacaatgatgttcacgctcagatggaaacaaatttgtttaaattgtctcttgatga

SEQ ID NO: 40590 - DNA, 340 bp, Glycine max
tgaacctattacatattcaatgggactttgatctcgaatgtggcaaattggcaattacttattttatggaggcatcacttttctgtttagtagataccaattactgtaggattttatttgtaccaagcaagagccctatatcaggggagagctgcaggatctcaacacacacattggccattgcaccatctatttctagctagcatttgttctctgttagctggaattgttggtggacttcttggtacaagttctggatttgttatgggtcctttatttctagaagtgggaattgctccacaggtagcaagtgccacaaccacttttggaatgatgtatt

SEQ ID NO: 40591 - DNA, 212 bp, Glycine max
tggaaatcttgctgttgatgttgacgaagcaattatttattatgactttggcatgatgggggagataaaatctttcacccgagagagactgcttgaactgttctatgctggttatgagaaagatgcccaaaaggttatgccatgccttatagatctgggagcacttcaacccactggtgacctgtcattaatgaggagatctattcaatttt

SEQ ID NO: 40592 - DNA, 343 bp, Glycine max
ctcgagccgatcaaatggcaacagtgagaacaccattgaattttgattctagcacgcagagcttttgtcagcattctattgaccttctcggaggcggaatcttaatggacaaaacttgcgattggatcacacttatacagaattctccaattcgtaacttgttgagagttgctgcttggaagaaaggctgtttaatggtcgaaactgggatgtctgggaatgcagcaatcaaaatgagtgattgggcctcattggtacaagtgcttttaacaaacagcaacagctcagagcattttgatgcatgtgagtggacaaaatcagaaccacatttctgggaattgat

SEQ ID NO: 40593 - DNA, 220 bp, Glycine max
agcacaaatactagtcccagatggcctctagcacaaccgatgaggcttcttggtcataatggagagatcaacaccatacagggcaacttgaattggatgcaatcacgagaaccatcattgaagtcacctgtatggcgaggtcctgaaaatgaaattcgtccatttggaaatcccaagggatcaaactcaacaaatcttgacagtgcttcagaattattga

SEQ ID NO: 40594 - DNA, 222 bp, Glycine max
gctggtgcaaagaatgctattctcatgaatatgccaaatgctgttctttcaatgtggagatattttgttggggatctcgtctttgaaggttctaagatgacctctccctacattaaatgtacaagctctttcttcataacatttggaaaattggctggtgataccctcaaattttaggctttttcccacaaacttgtgcccttttgagagaattaagaaaaa

SEQ ID NO: 40595 - DNA, 136 bp, Glycine max
cgtttgggtagctgacacagatggctcgtacgaagcagaccgctcgtaagtccacacgaggaaaggctgctacgaagcatcttgcaaccaaggctgcacgttagtctgcacgaactactggtggtgtgaagaagcc

SEQ ID NO: 40596 - DNA, 350 bp, Glycine max
aattagtaacttattgagagttgctgcttggaagaaaggctgtttaatggtcaagattgggatgtctgggaatgcaacagtcaaaaggagtgattgggcctcattggtacaagtgtttttaacaaacagcaacattacatagcattttgatgcatgtaagtggacaaaatcagaaccacattgctgggaattgatcttcccaataaacgtattgtggcctaataatggatttgaaatgtggagttcttagtgggcaacataaactttatggcatttgaatttccttattgacaatagcaaacagtctacaacttttgatattcttttgggaatatctcaagattttgaaa

SEQ ID NO: 40597 - DNA, 203 bp, Glycine max
aaagctgcaagaaaggaccgctccaacagtatcttaaatcaaacaagatgggtcgcatgcactctggaggaaagggtatttctggctcagccctgccatacaagaaaactcccccctcttggctaaagaccacaccttctgaggttgccgagcatgtgatgaagctgtcaaagaaaggactcaccccctctcaaatcggtatc

SEQ ID NO: 40598 - DNA, 461 bp, Glycine max
  unsure (1)..(461): unsure at all n locations
cacgccggacaacatgagagcgaaatgggtacaagaatggttccaataccaagggatagggtgatcctgcacttcgattacgattgcttctacgcctctgtcttcgaatcggaagatccgagtcttcgatcactccctttcgccgtccagcaaaagcaaatatgcgtaactgctaattatgtggcccgaagcagaagaatctacaagctacagctggtcaaagatgcaaagcgcatgtgtccagatctgatcatcaaactaggtgaagacatcagcaaatttcgcgatgcctccaaggaactctactcgttcatcaagagcttcagctggaataacaaagtggaaaggctcggcttcgatgaagtctggttagatgtgtccgatatcngtgactacaatcaagagatcctgaacaagcacgacttggagcattcatttttccagacgtctaangatgatcc

SEQ ID NO: 40599 - DNA, 377 bp, Glycine max
tcctaaggtagacgttccctctcgttttgttggcttagttttggagaattgtccttgtgcaaatcatagccatctcatattgggagatccttcgccagttgtgttctatcctataagtagttcagaagtccgttgtcttgttgatgttcctggtcagaaagttccatccatttccaatggtgaaatggcaaagtatttgaagacagtgatagctccacagattcctcttgagcttcatgacgctttcatagccgcagtggacaaaggcaacataaggacaatgcgaaacagaagcaagccagcagcttcttatcctactcctggagcccagcttgatggagatgcattcaacatggggtggaatgaccggggcatta

SEQ ID NO: 40600 - DNA, 211 bp, Glycine max
tccttttccagtagctttactggctgttctttttggcgttaagaatgaaattctgagttctaacgccactaatcctatgctgacgcgacttcttgagaactgtaagagtctcaaatatctggttgatgagtgtccttttgcatttgtgaactagtatgtagtattttattcacttaaataaagcgcattactatgtgcaatgagtgtgttt

SEQ ID NO: 40601 - DNA, 453 bp, Glycine max
ttcgaagctcatcaacaaaatggctgctactcgactctactcaaaaggccgaatccttggtcacaagcgaggaaagaggaactcgaggcccaaccagtctcttgttcagatcgagggtgtcgacaaccaggaggccgccaagcactacctcggaaagcgaattgcctacgtctacaaggccaagagggagatcaacggatcgagggttcgagttatctggggccgagttacgagaccacacggaaactctggtgtcgtcaagtcgaagttccgagtcaatcttcccgcccgagtgttcggtgcttcgtgccgaatcatgctctacccattcgccatctaaaccgactacccgcacagcgatatgatcgctaattctacctacctctaacacgttacgaccttgatgtaacaagttaacatgttccgctttttttcgaggcatgcagacattgc

SEQ ID NO: 40602 - DNA, 286 bp, Glycine max
ctgctatttcaagttctcgtctttggggcaccatggcgaagaccacttcacaggtgaccgtgagtattcaaagggctactgtgagggcaccatagagttaagcttcttgcctgctgagctcatgaccgtttctgatggacctgacaagacgaggactcctagtggacataactagtgagcggatcacacttatacaaaatgatacaattagcaactggctgatagttgctgcttggctgataggctcatggctagtcaatagtgacatgtctaggattgcagcagt

SEQ ID NO: 40603 - DNA, 318 bp, Glycine max
ggaacatgttaatctcttacaaacaaaattgtttttgatgataagcttgtgttggctaacacacaagaattctttgatggaaattttccagtggattcttggttaccaatttttgtgaattgtctttatcctgtaagtcaattaccttcagaagctgtcgttgtaaatgttacatgtggtagtggacgtggtggttttcccaccacttgtttggattagttctagtattaacaatcgctccttatatatcaacataaggattctcacagctcttgtgtaaggttaaaaatattgtttttttactaattatttatctct

SEQ ID NO: 40604 - DNA, 362 bp, Glycine max
gatgaagaacacatacacttgtgtagagttccatgattaccatcagttgatagccattttaaaagatggtgatacattttgtgtgagtaagagaaatccaccttttgataaagggttggagttaaaacaatgcggggttcatttaatctttgaaggggatgatgattatgatggatgggaagaatcattggacaatgacctacaatctgtcttataaaaattagccaactttttcaagacttatgaagatgagagtgtcaggaatctgaatgaattggagatgatgggacaagtaccaagaacttttcttgttacacttagaagcaattttatttttttttttctgatttgagctattcttt

SEQ ID NO: 40605 - DNA, 295 bp, Glycine max
  unsure (1)..(295): unsure at all n locations
ttttcttaagtgtctntattatgtccttgcgaaaactactctttttatcttcctctttccagtgaagttgaagtcttgcccttctctcttcaacttcaaacacaagacatcatcattcatggctgcctccgtctccactgtcggagctgtcaacagagctcttttgaacctgaatgggtctggacctggggtttcagcttccagttcatccttctttgggagcagcttgaagaaagttattggctcaagggtccccaacacaaagatttcctctggaagcttcaaagattgtgct

SEQ ID NO: 40606 - DNA, 302 bp, Glycine max
aaattctacaacgtcataactagcaaggtgggggcccacactgggttcctgtgcctcgtaaggttgatgagcacatgttcattaccattgggttcaacacagaattttgtgattccaagaatcccaacaatgcctcgtgtaagggcccaaatggtcaaagattttctgccagcatgaacaacgagtcatttgctgttcccgcgggtgtgaagttttctttgttggaagcattctatgaaaacatgagtggagtttacactacggatttccctaacaagccaccagttatgttcgacttcaca

SEQ ID NO: 40607 - DNA, 333 bp, Glycine max
ctcaagagaaactttaagcagatgtctaatgttttgtgggtggctcctgagaaaatcacaatcttcttaccacaacttcattatgtttcgtgtaataatctgtaaatgcaagaagcttatcttgtcaatctcgtaaatgtgttacaagaattgtatttgcacaatccatatgaagctctccaattgagaatgaaagctctcttttgtattgaatggcttcataatacctattttccttccatagctcagattgattagttcctttcgattcaaataatttagaatgctcctgattcaaatgataatttagatttactgtttagcatttatttg

SEQ ID NO: 40608 - DNA, 346 bp, Glycine max
ggcggtggcatgaaatttaacatcaacggcaagacccatgacgcggacgtggacatccgtacctcgctgctcgacctgtgtcgcgaacatctggggctgaccggctccaagaagggttgcgaccatggccagtgcggcgcgtgtaccatgctggtcgacggccgacgcatcaacagctgcctgacgctcgccgtcatgcaccatgacagcgagatcgtgacgatcgaaggtctgggtcaggtcggcgacctccacgcgatgcaagacgccttcgtccggcatgacggctatcagtgcggctattgcacgccgggccaaatctgctcggcggtcgggatgctcggcg

SEQ ID NO: 40609 - DNA, 210 bp, Glycine max
tacaccgatcactgtatcaacaccagaacttccgtcaaaatgaagaccttcaccatcgctaccatcgtcgctctggcctccgttggcgccgctcagcttgacaacatcccgtcttgcgctctcaactgcttcgtcggtcccctcaccagcgacggctgctcctctctcaccgacttcgcctgccactgcaagaagggtgctcagctcctc

SEQ ID NO: 40610 - DNA, 387 bp, Glycine max
  unsure (1)..(387): unsure at all n locations
tcacaaatgaggctgtctacgagaagataccttctggtgaactcctccgccttatggccgtactgaagaagtcgtaccacttcgctaagcgcttcaatgcgaatcgcgatctgcgatcacgtttgtttagggaaggtttcatgaagcaaccgccaaacctgctcaagcaggagagcggatcggcgtcggtgtacgttagcattctatttagaatgtaccacgacacatncaacgaccgcgccgtctcacgcgccgataccgaagccgccctgatcccgctctgcgaagacatcattgcctcctatgtcgatcttgacgaggaaacacaacaacgcaacatcgtcacttggcgccccgttgtcgtcaccgtgctggacggatacactg

SEQ ID NO: 40611 - DNA, 383 bp, Glycine max
agctgggatttgggctcgcgcagatacaaaaatgctttcagttgcaaaaaggggggcttttaaatttgcatttataaacgctcctaacttctggagatgttatgcatttaaatttactgtaccagtacagagttccaatctggctcttactcctccaggattcaaaaagatcaaagtcgctaacccagtagtagacttagacggggatgaaatggctcgtttcttctggcaaatgatcaaagattatttgggcttgccttatttggatattgatatcaaatactacgacttatcttttcaaaaaagagatgaaactgacgatcaaatcactgtagactctgcaaacgccatcttaaaatacaatgttggtattaaaatgcgct

SEQ ID NO: 40612 - DNA, 377 bp, Glycine max
  unsure (1)..(377): unsure at all n locations
ggaatcttagtggataaaactggagattggatcacacttatacaaaattctccaatttgtgacttattgagagttgctgcttggaagaaaggctgtttaatggtcaagattgtgatgtctgggaatgcagcattcaaaaggagtgattgggcctcattggtacaagtgtttttaacaaactgcaacagtgcagagcattttgatgcatgtaagtggacaaaatcaggaccacattcctgggaattgaacttcccaatagaagtatgtggtcctaattatgggtttgaaatgtggagttctgagtgggcaaatcaaactttatggcatttgagtttccttattgacaattccaaacagnctacaggttttgatattct

SEQ ID NO: 40613 - DNA, 183 bp, Glycine max
caaaatccttttgtgttaaatagggggatgggaaaattgactttcccccagggcccttcccgaggggttaaaaaaatgcctctttcttatggggggggagctcggtgcaaaaatgctcttctcatgaatatgcccaatgctgttcttttaaagtggagatattttgttggggatctcgtcttt

SEQ ID NO: 40614 - DNA, 359 bp, Glycine max
  unsure (1)..(359): unsure at all n locations
gtaagctcggaattcggttcgagcaaaacttcattatgtttcgtgtaataatctggaaatgcaagaagcttatcttgtcaacctcgtaaatgtgttacgagaattgtatttgcacagtccagaggaagctcgccaattgagaaagaaagctctctctcgtattgaatggctgcaaaaagctgatgtgcctaccatagcacaaattggagaagtccattcgatgcaaaagatgatgaatgcttctgattcaaatgataatattgatttactggtgaacattgatttggtggggttacaaagagcangtaaagcttttcaaacaaaaattgttttgatgataagctgtgttgcttacacac

SEQ ID NO: 40615 - DNA, 466 bp, Glycine max
tggtacaagtgtttttaacaaacagcaacagtacagagcattttgatgcatgtaagtggacaaaatcagaaccacattcctgggaattgatcttcccaatagaggtatgtggtcctaataatggttttgaaatgtggagttctgagtgggcaaatcaaacttcatggcatttgagtttccttattgacaatcccaaacagtctacagtttttgatattctcttgggaatctctcaagaatttgaaattgctggtaatactcttatgccagctttttctgttccacaagctacttgcagatcttcttgaaatgcggaatcctttgcatgatctggaaaattgtgtttctttcgcttggtcgtttgttaattcaataaggaaattaggcatgaccctcttgtgagtatgctctgctatttgaaattccacacctttttaattgcgtatgatgtgtgagtgtggtattt

SEQ ID NO: 40616 - DNA, 204 bp, Glycine max
cacattctgaagatttttatattctcctatgggatgcaacagcgcggacttgaattcaaacgggccgtctacagcatgacatgttttggattcttgctcaccatcctgaaatgaatctgctcgcacactagtcatgacagtgacatgattgtttttaatctcgcaagagaaaggcctgcatttgatgttagcggtgattctttg

SEQ ID NO: 40617 - DNA, 279 bp, Glycine max
gccaaattcagaaccacattcctgggaatggatcttcccaatagaggtttgtggtcctaataatggttttgaaatgtggagttctgagtgggcaaatcaaacttcatggcattggagtttccttatggccaatcccaaacagtctacagttttggatattctctggggaatctctcaaaattttgaaattgctggtaatactcttatgccgcttttttctgttcacaggctactgccagatcttctgaaaatgcggaatcctctgcatgatctgggaat

SEQ ID NO: 40618 - DNA, 167 bp, Glycine max
caaacagcaacagtacagagcattttgatgcatgtaagtggacaaaatcagaaccacattcctggggattgatcttgccaatagagggttgtggtcctaatgatgggtttggaatggggaggtctgagtgggccaattaaacttcatgggatttgggtttccttaat

SEQ ID NO: 40619 - DNA, 406 bp, Glycine max
cgccaactaacctcacagaccgtcaacatgggtaaacgcggactcggaaagcaccagaagcgcctcagcgcgccatcgcactggctcttggacaagctgtccggtgcttatgcccctaaagcatcgcccggtcctcacaagctccgcgactccctgcctctcatcatcttcctccgcaaccgcttgaagtatgccctcaacgcccgtgaggtcaactccatcctcatgcagcgcctcgtcaaggtcgatgccaaggtccgcaccgacagcaccttccccactggcctcatggacgtcatctccatcgagaagaccggcgagaactttcgtctgatctacgacaccaagggacgctttaccgtccaccgcatcaccgatgaggaggcacaatacaagcttggaaaag

SEQ ID NO: 40620 - DNA, 278 bp, Glycine max
ggcattgaatgtcccaaggatgagaaacttcctcgtcgcaaaatttttgacaaacctaagacgcgctgcttcactattctccctatggagtttaatcttgtggtccgtcaaaagtttttaaattttgtgaggttcattatgaagaaaagggacaaacttagttgtcaagttggaatcaacccatactccatggaatggactggtttggccaatagattactgagtaagggcaatgatattctgtgttgcgattatgctagttttgatggtttgattac

SEQ ID NO: 40621 - DNA, 128 bp, Glycine max
agctaatctagcttaaacaattagacggtataaattgatgctgtctgcagaattagatggtcttgctgaacaagccttatatttggttggtgatatggaggaagctactgcgaaagctacgacacata

SEQ ID NO: 40622 - DNA, 403 bp, Glycine max
ctttcggaaagacccacggtgctgctccttcggagaacactggcccagaccccaactctgaggatcttgcaacacaaggatttggctggatgaacaagcacggtcgcggtaacggacctgacaccatcaccagtggtctcgaggtcacctggactggcacacccaccaagtggagtaacaagtaccttgagtacctctacaagtacgagtgggagctcgagaagagccctgctggtgccaaccagtgggtcgctaagaccgatgacaagatcatccccgacgcctacgaccagggcaagaagcacaagccaaggatgctcaccaccgacttgtcgatgcgcatggatcccgcctacgaaaagatcactcgtcgttggttggaccacccagaggagcttcacga

SEQ ID NO: 40623 - DNA, 399 bp, Glycine max
  unsure (1)..(399): unsure at all n locations
tgtcaatctcgtaaatgtgttacgagaattgtatttgcacaggccagaggaagctcgccaattgagaaggaaagctctctctcgtattgaatggctgcaaaaagctgatgtgcctaccatagcacagattgaagagttccattcgatgcagaggatgatgaatgctcctgattcaaatgataatattgatttactgttgagcattgatttgttgggtttacaaggagcaagtaaagcttttccaaacaaaattgtttttgatgataagcttgtgttggctaacacacaagaattctttgatggaaattttccagtggattcttggttacccaattttgtgaattgtctntatcctgtaagtcaattcccttcagaagctgtcngtgaaatgttacatgt

SEQ ID NO: 40624 - DNA, 410 bp, Glycine max
tgataatattgatttactgttgagcattgatttgttgggtttacaaggagcaggtaaagcttttccaaacaaaattgtttttgatgataagcttgtgttggctaacacacaagaattctttgatggaaattttccagtggattcttggttaccaatttttgtgaattgtctttatcctgtaagtcaattaccttcagaagctgtcgttgtaaatgttacatgtggtagtggacgtggtggtttacccaccactgcttggattagttctgcagttaacaatcgctcctcagatatcaacaaaaggattcgcacagcacttgggaaaggtaagaaaattgtttttcttactagagttgatccttttccagtagctttactggctgttctttttggcgttaagaatgaaattc

SEQ ID NO: 40625 - DNA, 312 bp, Glycine max
gtgcatatggattcaatcctggtgtgcaaggggcttgaattttgggcaccattgctcaggccatttgacagcaaactgttaggaatcaaatggcaacagtgagaacaccattgaattttgattctaaccagcatagcttttgtcagttatctatcgaccttctcggcggaggaatattaatggacaaaactggagattggatcacacttatacaaaatactgcaattcactactagatgagagttgctgcttgaaagaaaggctagttaatggtcaaaatagagatgtctgggaatgcaacattgaaaagga

SEQ ID NO: 40626 - DNA, 415 bp, Glycine max
tgggactcggtccgctttcacagatcgtcaatatgtttcctggcggggtgggtggcctcggcgaattcatgaagcaagatggtgtagaggaagctggtgggaaaagcatgaagggcatgatgtgtataatggattcaatgacgcagaaagagttggacagtgaaggaccacccaaaatgttcccagaagagggtaccaggatagcaagaatagccagaggatgcgggaagaccccagaagacatcaacgatttcatcaaccaatacagaaccatgtcaaaaacacttaagaacataactggtaacaaaggcctgatgggcatgctgagcggcatgggcggtggcggtggagcaccaggcgggcagccaggtggaggcatgatgaacccacaaatgatgagtcaactttctaaagg

SEQ ID NO: 40627 - DNA, 371 bp, Glycine max
aaaaaaaaaaatttttttttaatataataaaaaacaaaaatagagagggaaaaataaaaataaaaaaaaaacaaaaaataacatttcaaaaataaattataaaaaggggcgcccccctccttttaacctcgtcaccccgggatttatttccggaccgtaccctccaggcttcccacctttccttataatgattcgtattacaccttcccgtaaccatggtcataactgtttcctgtttaaaattgttaccccctcccatttccccacatcttcctacccgaaaccataaagtgtaaaccctgggttccctaatgattgacctaactcacattatttcctttgccctaactgcccgttttccaatcagaaaa

SEQ ID NO: 40628 - DNA, 399 bp, Glycine max
gagctggggtttaactttgcttattgcaatgccttgaaattagtaatgaacttcatagtgtcttcgaatcacaaagggatttttttccggacattcacacctgatcattttgaaaatatggagtggcttaatgggggaacttgtaagagaacgacaccaattaaaggtgagatggaaatgaaatatttgagaaagatgctccgtgacgttgagttagatgaggttggaaaggcagctactgaagcttaaaaaaatggggtgagtttaaagcttgtggatgttgctccattttcactattgagacctgatgggcatcctagtccatacaggcaatttcacccatttgaaaaagaccaaaatgcttctaaagttcagaatgattgtttgcatttgtgctta

SEQ ID NO: 40629 - DNA, 390 bp, Glycine max
ggagattggatcacacttatacaaaattctccaattagtaagtggtggagagttgctgcttggaagaaaggctgtttaatggtcaagatcgtgatgtctgggaatgcagcagtcaaaaggagtgattgggcctcattggtacaagtgtttttaacaaacagcaacagttcagagcattttgatgcatgtaagtggacaaaatcagaaccacattcctgggaattgatcttcccaatagaggtatgtgagcctaataatggttttgaaatgtggagttctgagtgggcaaatcaaacttcatggcatttgagtttccttattgacaatcccaaacagtctacagcttttgatattctctagggaatctctcaagattctgaaattgctggt

SEQ ID NO: 40630 - DNA, 377 bp, Glycine max
acaccatctaagagctatgacgcccgacgcacgcaagctcggaattcggattgaggttgggcggccatatctgcatgcaatggaggatgatagctctggggttgcaatgccaggtagagctgtcattggtagcaaattgacaaccataaacaatatgtgtgcatatgggctcaatcctggtatttcaggttctcgtcttttgggcaccattcctcagtccatttcacagcaaactgtttggatcaaatgggcacagtgagaacaccattgaattttgattctagcaagcagagcttctgtcagttttctatagaccttctcggtggaagaatcttagtggacaaaactggagattggatcacacttatacaaaattc

SEQ ID NO: 40631 - DNA, 353 bp, Glycine max
gtttcgtgtaataatctggaaatgcaagaagcttatcttgtcgatgggggaaatgtgttaccagaattgtatttgcacaatccaaaggaagctcgcccattgagaaggaaagctctctctcgtattgaatggctgcaaaaagctgatgtgcctaccatagcacaaattgagagagttccattccatgccgaagatgatgaatgctcctgaatcaaatgataatattgagttactggtgagcattgatttggtgggtttacacagagcaggtaaagcttttccaaacaaaattgtatttgatgataagcttgtgttggctaacacacaaagaattcttttgatggaaaattttc

SEQ ID NO: 40632 - DNA, 191 bp, Glycine max
tctggatttccgctcacagttatttgcaataacatttttaatgggatgctcattagatatagctatgaaaaattactgggccaggctaaagctccaagtatggttttaccatccttcaaaaattttggttctttggggggggatggggaagataacctaattaggggtcattaatattgcaagccttactt

SEQ ID NO: 40633 - DNA, 388 bp, Glycine max
cagagcttttgtcagttttttattgaccttctcggtggaggaatcttagtggacaaaactggagattggatcacacttatacaaaattctccaattagtaacttgttgagagttgctgcttggaagaaaggctgtttaatggtcaagattgtgatgtctgggaatgcagcagtcaaaaggagtgattgggcctcattggtacaagtgtttttaacaaacagcaacagtacagagcattttgatgcatgtaagtggacaaaatcagaaccacattcctgggaattgatctttccaatagaggtatgtgggcctaataaatggtttggaatgtggagttttgagtgggcaaaataaaacttcatgggcatttgagttttcttattgacaa

SEQ ID NO: 40634 - DNA, 376 bp, Glycine max
ctcgtattgaatggctgcaaagagctgatgtgcctaccatggcacagattgaagagttccattctatgcaaaagatgatgaatgctcctgattcaaatgataatatcgatttactgatgagcattgatttgttggctttacaaggagcaggtaaagctttctcaaacaaaattgtttttgatgataagcttgtgttggctaacacacaataattctttgacggaaattttccagcggattcttggttaccaatatttgtgaattgtttttatcctgtaaggcaagtaccttctgaaacttaacgttttaattggacattaagtcttttattctgaaattttttccctaaaaacttttgaaggggcctctttttttt

SEQ ID NO: 40635 - DNA, 395 bp, Glycine max
aacacaaagacatcatcatccatggctgcctccgtctccactgtcggagctgtcaacagagctcttttgaacctgaatggttctggagctggagcttcagctcccagttcagccttctttgggaccagcttgaagaaggttattgcctcaagggtccccaacagcaaggtttccggtggaagcttcaagattgttgctgtagaagagaagaaagagattgaagagacccagcagaccgacaaggacagatggaagggtcttgcctatgatatctcagacgaccaacaagacattacaagaggaaagggtttggttgactcccttttccaagctccacaggatgctggaactcactatgcagtcatgagcttctaccagtaccttaacactggact

SEQ ID NO: 40636 - DNA, 342 bp, Glycine max
ggcaaaccccgagtatgtagacaagacctatctttctgtcaaaggtggtcttgcacgaggcgagttccgtcctgacgcctcagaggagaacttgagggcttccgtcaccaccatcaacgacaccctgggtggcaaaaagaagatggatctgtttgaaatggctcgagtggacaagtcgcggtctatcgaggaaacaatgaagaccttgctcaagttgcgggacgaggggcacttcaaagatatcgggttgagcgaggtgtctgcaaagaccatccgtgctgcagctgcagtggcacctattgctgctgttgaagtggaatactctccttggtcacttgatat

SEQ ID NO: 40637 - DNA, 419 bp, Glycine max
tcaaccgcaaacctcaccgttctggtcgtaggaagaaaaacaaaagaaggtgggaccccaattatccaaagccgaataggagtggctataacttcttctttgctgaaaagcattacactctcaaaactctctacccaaacagagaaagggagtttaccaaaatgattggccagtcatggaacagtcttagcccagaagaaagaatggtttatcagaacattggcttaagagacaaagaaaggtacaagagagaattgacggagtacaaagagaagatgaagcttaggcagacctcagaagttggacgtccatagaatctcattggtacccgtttgtggaggcgaaagaatggcttagaaaatttttataatcttgtgacttttacgtgcatattggtgtggataatgggccactggact

SEQ ID NO: 40638 - DNA, 321 bp, Glycine max
ctcgagccaaatcatctctaggaagaacaagttgttgagaacgaagaaggtgaagcaaatggctgccttaatgatctctttcccagctgttaccactgtcaaccgtgccggtgccggcatggatgttccatttactggcctcaagtacatggatggttttccttccatgatgtccaacattgacattaccttcattgttagcaacggtggatgagtgcaatgtatgcttgataggtcaccatatggcaagaagaagtttgagactcttttccacctgccagaccttgatgatgcacaattggttaaagaagtattattcct

SEQ ID NO: 40639 - DNA, 247 bp, Glycine max
gaggaatactgcctcgtcacaggcaatggctatgtcatataatggaaacccgtgctctgatgcatggagaaaggaatatctgtaacgggctggatttcactgcgaggtcattggggtcactggatggcctgccaccacagtgcacgatgttcgagatacaattgagaggcttataagcttttaagaatgctggtccaacacctatggcggcttaaattcacacacaggctactggctaaatttgtgg

SEQ ID NO: 40640 - DNA, 421 bp, Glycine max
tgaatgtggaattctttctggatttacgctcacagttggggtggatagcatttgtggggagatgctcattacatatagctatgaaaaattactgctccaggctaaagcttcaagtatgattttacaatccttcaaaaatattgattttatgtgtgtttatagcgatgattacataattagtgttcaataatatgtcaagccttactttattgtttttatattgaaatatcttttatctatatcattacattaccattactgttgtgattgattaaatcttattcttacttttcatatttagaaattgttttcttaatttttgtaattttctcaaaattatactctttaaacatatgactatacttctttctttgctttctattttaatatctaggcttttttttttgttattatattttaa

SEQ ID NO: 40641 - DNA, 221 bp, Glycine max
gcccccgtccgtaagctcggatttcggttcggggccaaacttgggattgggtcacacttattccaaaatcttccattagtaacttggtgagaggtgctgcttggaagaaaagctgttttatgggcaaaaatgggatgtctggggatgccgcagtcaaaaaggggggttgggccttattggtaccaggggtttttacaaacagcaacaggaccaagcatttt

SEQ ID NO: 40642 - DNA, 420 bp, Glycine max
ccgtccgtaagctcggaattcggttcgagattgaccttttcggggggggattttaaggggccaaacctgggaatgggtcccacctaatccaaaatttccaaattggtaactggtgagagttgctgcttggaagaaaggctggttaatgggtcaagattgtgatgtctgggaatgcagcagtcaaaaggagtgattgggcctcattggtacaagtgtttttaacaaacagcaacaggtcagagcattttgatgcatgtaagtggacaaaatcagaaccacattcctgggaattgatcttcccaatagaggtatgtggtcctaataatggttttgaaatgtggagttctgagtgggcaaatcaaacttcatggcatttgagtttccttattgacaatcccaaacagtctacagtttttgata

SEQ ID NO: 40643 - DNA, 426 bp, Glycine max
cccccgtccgtaagctcggaattcggttcgagttcaggttttcggcttttgggcaccattccctaatccattttacagcaaactgtttggaatcaaatgggaacagggggaacaccattggattttgattctagcaagcagagcttttggtaggtttctattgaccttttcgggggggggatcttagtgggcaaaactggggattgggtcacacttatacaaaattctccaattagtaacttgttgagaagtgctgcttggaagaaaggctgtttaatggtcaagattgtgatgtctgggaatgcagcagtcaaaaagagtgattgggcctcattggtacaagtgtttttaacaaacagcaacagtacagagcattttgatgcatgtaagtggacaaaatcagaaccacattcctgggaattgatc

SEQ ID NO: 40644 - DNA, 372 bp, Glycine max
ctctccgtacattaaatgtacagactctttcttcatagcatgtggaaatatggttgctgataccattaattttgaggctttatcgcacaagctggtgcaggttggagagatgtaagaaaaagttgtattgtaatactcacacgaggaatttcttacagcttggtcaactgaggtgcgtcctgcaacaactgtggtggctggtgggagatcatatttgtatgcaatggtgcatgatagttgagtgtctacaataccaggtgactatggcattggtgtcaaggtgacaaccataaacaatatgtgtgcatatgggctgaatactgggatattaagttctcgtattttgggcaccatttctcagtccatttcaca

SEQ ID NO: 40645 - DNA, 329 bp, Glycine max
cacatgacgctgaagatctcgcaagacctcgacggcacgtcggacatccaaaagttcacgcagatgcgggtacagctgcaagccgtctcgctccggatgcagacgttgaggagcaacgagcagatggcaacggcgatgaagggtgcgactagggctatgggacagatgaaccgaagtctcaatctttcacaaatccaaaagatcatgaacgacttcgagaaagaatcgtccacgatggacatgaaagaggagatgatgtcggacgctgtcgacgacgcgattgacggtgaagacgagggcgagggcgaggagatggaaagcgacacgat

SEQ ID NO: 40646 - DNA, 193 bp, Glycine max
tgttgccactaggttcatgtataaccactacataacaatagcgagtcctctagatcaattcgaaataagaaacctatttagtattgatacaccattgttagcggatattaacatatttattacaaatataggactatatattacaatcgctgcgattatagctttttacttaagggttgtagctactaacctt

SEQ ID NO: 40647 - DNA, 337 bp, Glycine max
gatgtagccttccaagtgcatggagtagaaaagtgtgaattcagagattttacgttggtcactcggtgcgtctgaacaactctggtggctgatgggtgtccatatttgtatgcaatggtgcatgatagttcagtgtctacaataccaggtgattttgtcattggtgtcaagttgacaaccataaacaatatgtgtgcatatgggctcaatcctggtatttcaggttcttgtcttttgggcaccattccttagtccatttcacagcaaactgtttggaatcaaatggcaacagtgagaacaccattgaattttgattctagcaagcagagcttttgtc

SEQ ID NO: 40648 - DNA, 374 bp, Glycine max
gccttgaagacatggcagtgttttggagggctttagcatacgagagacaactcgtggccttgtgctcggtgactgtgacaaactctctagagaagcccgaacattctctgcgcagaaccatggagaaatacagagcttattgcagattaattctatgttgcaatagttcttctagagttacagaagcaatccgctctcaatgtcttaatgtgcgaataaatgcaccaagtgaagaacagattgttgaagttatagaattcattggtaagaaggaagggctgcaacttcctgctggttttgctgctaccattgtggaaaaatcaaattcaaatttaacgagggccatattgtcatatgagacttgtcgtgtccaa

SEQ ID NO: 40649 - DNA, 355 bp, Glycine max
gttcccaggacctattgtgttttaaatccacaaaatccttttgtgttaaataggtggatgggaaaattgactttcccccaaggcacttcccgaagtgttaagagaatgcctctttctatagggggaggagctggtgcaaagaatgctattctcatgaatatgccaaatgctgatctttcaatgtggagatattttgatggagatctcgtctttgaagtttctaagatgacttctccctacattaaatggacagactctttctttatagcatttggaaatttggatgatgataccatcaattttgaggctttatctcacaagctggcgcattttggagagattcatgaaaacgttg

SEQ ID NO: 40650 - DNA, 348 bp, Glycine max
catggcccccgtccgtaggttgggatttcggttgggggggatgcttatttaattggttttgaaaaatactggggccgggttaaagttccaagattttttttccaatccttaaaaaatttggttttttggggggggattggggtggttacctaaattggggtgcaggaaattgtcaggccttactttaggggttttaaattgaaaagctttttggctgggcttaacataaccattcctgtggggtttgccaaaactggggcaactttgcaatttaaaaaggtggcaaatggggatttttttaagggaaactttaagcagttgtttaatggtttggggggggttcctggg

SEQ ID NO: 40651 - DNA, 436 bp, Glycine max
  unsure (1)..(436): unsure at all n locations
aaagagganggacgtcgcatgcacgcgtacgctaggaattcggttcgaggtcaagttgacaaccatatttaatttgtgtgcatatgggctcaatcggtggtatttcaggttctcgtcttttgggcaccattcctcagtccatttcacagcaaactgtttggaatcaaatggcaacagtgagaacaccattgaattttgattctagcaagcagagcttttgtcagttttctattgaccttctcggtggaggaatcttagtggacaaaactggagattggatcacacttatacaaaattctccaattagtaacttgttgagagttgctgcttggaagaaaggctgtttaatggtcaagattgtgatgtctgggaatgcagcactcaaaaggagtgattgggccttattggtacaagtgtttttaacaaacagcaacag

SEQ ID NO: 40652 - DNA, 277 bp, Glycine max
cccccgtccgtaggctcggatttcggttgcggaggatttggaaatggtgggtattcctttattcccgctttttttggttcaccaggttcttgccaatttttttgaaatggcggattctttggatggacctggaattggggtttcttttccttggtccgttggttaaattcataaaaggaattaggcatggccctcttgttgagtatgctctggctatttgaaaatttccacacctcttttaattgtccgaatgatgtgtgaagtgtgtgttattttt

SEQ ID NO: 40653 - DNA, 298 bp, Glycine max
atggtattgacaaaactagtgcaactttgcaatttagaaagttagcagattgtgattttctcaagagaaactttaagcagatgtctaatgttttgggggtggcttctggggacaaggcgaggttatgggcacaacttcattatgtttcgtgtaataatctggaaatgcaagaagcttatcttggcaatctcgtaaatgggttaccaggattggatttgcaccatccaaaagaagcttgcccattgggaaaggaagctctcttttggattggatggcttgaaaaaggtgatgggccttc

SEQ ID NO: 40654 - DNA, 461 bp, Glycine max
  unsure (1)..(461): unsure at all n locations
cgcatgcacccggacgcaagctaagaattttattcgagattggccttcttggtggaggaatctcagcggacaaaactggagatgggatcacacttatacaaaattggtgcaattagtaacttgttgagagttgctgcttggaagaaaggctgtttaatggtcaagattgtgatgtctgggaatgcagcattcaaaaggagtgattgtgcctcattggtacaagtgtntttaacaaacagcaacagtccacagcattttgatgcatgtaagtggacaaaatcagaaccacatttctgggaattgatcttcccaatagaggtgtgtggtcctaataatggttttgaaatgtggagttcttagtggggcaaataaaactttatggtcatctgagttttctttattgacaatcccaaacagttttacaagttttgatattttttttggtaatttcttaaaaattt

SEQ ID NO: 40655 - DNA, 404 bp, Glycine max
attgaaggtgaagtcttgcccttctctcttcaactccgagacacgagacatcatcaggcatggcgtgcctccgtctccactgtcggagctgtcaacagagctcttttgaacctgaatgggtctggacctggggtttcagctcccagttcatccttctttgggagcagcttgaagaaggttattggctcaagggtccccaacacaaagatgtcctctggaagcttcaagattgttgctgtagaagagaagaaagagattgaagagacccagcagaccgacaaggacagatggaagggtcttgcctatgatatctcagacgaccaacaggacatcacatgaggaaagggttgggtgacttcatattccaagctccacaggatgctggaactcactatgctggcatg

SEQ ID NO: 40656 - DNA, 378 bp, Glycine max
ggcaacagtgagaacaccattgaattttgattctagcaagcggagcttttgtcagttttggattgaccttctcggtggaggaatcttagtggacaaaactggagattggatcacacttatacaaaattctccaattagtaacttattgagagttgctgcttggaagaaaggctgtttaatggtcaagattgtgatgtctgggaatgcagcactcaaaaggagtgattgggcctcattggttcaagtgtttttaacaaacagcaacagttcagagcattttggtgcatgttagtggaccaaatcagaaccacattcctgggaattgatctttccaattgaggtatgtggacctaataatggtttttaaaacgagttgtt

SEQ ID NO: 40657 - DNA, 402 bp, Glycine max
  unsure (1)..(402): unsure at all n locations
gtttgattgggcctcattggtacaagtgtttttaacagacaggaacagtacagagcattggggtgcatgtaagtggacaaaatcagaaccacattcctgggaaatgatcttcccaatagaggtatgtggtcctaataatggttttgaaatgtggagttctgagtgggcatatcaaactnnanggcatttgagttnccttattgacattcccaaacagnctacagtttttgttatttttttggtaatctctcaagatttttaaattgctggtaatactcttatgccagcttatttttttttcacaggctaactgctttatcttttgaaaattgcgaattctatgctatatcatgaattattttttccttttccttttttttttttatattaataatatatctt

SEQ ID NO: 40658 - DNA, 190 bp, Glycine max
cgtaagctcgttatttggctcgagaattacttataacacatagcacaaagcaaagctcatcccttgaggggagagaatgtcaacaggtggggggtggctctctaatccccatccttggctggcaaggccgtgaagctgggcccatcatccccagaagtgggaagggtgagcatgaggaagaccgtcacca

SEQ ID NO: 40659 - DNA, 400 bp, Glycine max
  unsure (1)..(400): unsure at all n locations
acctcgaattttgcttctagagcttatagctaaaatcaaggtcacgaacataaatgtcctggtggtcttttttgctacgaggggggggcaccatggcaatgccatccttactatatgttccctctcctaatgaacactggctatggtgcccgtactccggaggtgaaatgcgcaaattggaggcttgctgtggaagcacacanncatctttggctttgagaccattcctgaagagtgcgtttaagcaacaaatgaatacatccatggggaacaatatatatcacactccaaaacagttaaccaacaagcttacttttatgccagagacctcgaagtccatcccaaggacacatttgtgttcagtatagatggcaccttactctctaatattccatactac

SEQ ID NO: 40660 - DNA, 343 bp, Glycine max
attaaatgtacaggctatctcttcatagcatgagaaaattagggtgataataccatcaattttgaggctgtttcacatacgctggcgcagtttggagagattcaagaaaaagatgtattgaaattttcacaggaggaaattcttacaggtcggtcacataaggtgcttcctgccacaactctgttggctgacggcggtacatatctgaatgctatggtgcatgatagttgatagtctacattaccatgagatattggcatagtggtcaagctgtcaaccatagacaatgtgtgtgcatatgggctcaatcctggtatttcaggttctcgtcttttgggcacca

SEQ ID NO: 40661 - DNA, 262 bp, Glycine max
  unsure (1)..(262): unsure at all n locations
cgccggacgcacgcgaacgaaagcncggaaaacggcacgtggtggccacagttgatatccctcagaatacaggaatatggggggcctgtgctaagggggggggggggtaagaggagcgccagatctgatatttacaccatttgctttcaagactgagaattgaggaatcctggttggacaaaagcaaagactaatgcaataaagccaaacccaggttcagatgcatggagtttgaaatatcagaagcgtactggaataaata

SEQ ID NO: 40662 - DNA, 408 bp, Glycine max
  unsure (1)..(408): unsure at all n locations
gacacaagagctgagttgtgacatgccctgcacccgtacctaagctttggattcgagtaacagcataacaaagcgggttactgtctgttcaagctaccatgtctgtgtctctttcttagtgggtccttgccagaagttaaaatggcccaagaaactttcctattcacatctgaatcagtgaacgaggggcaccctgacaagctctgtgaccagatctccgatgctgtgctcgatgcatgcttggagcaggacccttgacagcaaggttgcctgtgaaacctgcaccaagaccaacatggtgatggttttcggagagatcacaaccaaggccaacgtggactatgagaagattgtgcgtgacacatgcangaacattggtttttgctctgatgatgttggtcttgatgc

SEQ ID NO: 40663 - DNA, 221 bp, Glycine max
gtttctttctatagttgttggcgctgcggcaaagaatgctatggtcatcaatatgccagaggcggcgctttcaatgtggagacattttgctggaaatctcgtctttgaagtttctaagatgacttctccctacattaaatggacagtctctttcttcatagcatttggaaatctggttgttgagaccatcaattttgaggcttttccccacatgctgttgc

SEQ ID NO: 40664 - DNA, 237 bp, Glycine max
caataaccggtccttaaccggcgtcggatttgaaccctgggaagaggttaagaaggagctggaccttgtttccactgacccacacgcttaccttacgtcgacagaagtacacccatgagtctgaggctactattaacgaacagatcactgtgccgtacaatgattcaaacgttgatcatgcgatgattgcctacttgggtaggcacaaagcagcgcttaaagttattgccaagtttt

SEQ ID NO: 40665 - DNA, 257 bp, Glycine max
tgatattctgtgtttcgattatgctagttttgatggtttgatgaccaagcaagttatgagcaagatggcataaatgataaacagtctttgtggaggtgatgaaaaataattgcgcgtaacgactcacctgatgttggcttgactattataaaatttattcactttttaataatttgttttattgattgttaagtttgttttttttttattattttttaataattatttttactttattatatatatatattcttttt

SEQ ID NO: 40666 - DNA, 402 bp, Glycine max
agctcgaattcggctcaagcggttctagaatgaacactggctatggtgcccgtactccggaggtggaatgctcaagttgggggggtgttgtggaagcacacaacatctttggctttgagaccattcctgaagagtgcgttgaagcaacaaaggaatacatccatggcgaacaatatagatcagactccaaaacagttaaccaacaagcttacttttatgccagagaccttgaagtccataccaaggtcacatttgtgttcagtatacatggcaccgtactttcttatattctattctacatataacatttatctttggttggagcaatttacttttccctttttgaggcaaggtttatcttggtaatatacatttattattcccattgaatttattctatat

SEQ ID NO: 40667 - DNA, 310 bp, Glycine max
aaaagccttagccttccctacaactccaaacacaaagacatcgggatccatggctggctgcgtgggcactgtcagagctgtcaacagagctcttttgaacctgaatggttctggagctggagcttcagctcccagttcagccttctttgggaccagcttgaagaaggttattgccttaagggtccccaacagcaaggttttcggtggaagcttcaagattgttgctgtagaagagaatatagagattgaagagacccagcagaccgaccaggacagatggaagggttttgtctatgatatctcatacgac

SEQ ID NO: 40668 - DNA, 403 bp, Glycine max
gtcatttaatccaaacccgtgttctgatgcatggagtttggaatttctgaagcgtactggatttcattgcgatatcatttgtgtcactggatggactgccaccccaatgcaggatgttcaggttacaattgattggtttatttcctctcaggaatgtgttcccaggacctattgtgttttaaatccacaaaatccttttgtgttaaataggtggatgggaaaattgactttcccccagggcacttcccgaagtgttaagagaatgcctctttctatagggggaggagctggtgcaaagaatgctattctcatgaatatgccaaatgcttgtctttcaatgtggagatattttgttggagatctcgtctttgaagttctaagatgacttctccctacattaaat

SEQ ID NO: 40669 - DNA, 256 bp, Glycine max
aaaattctccaattagtaacttgttgagagttgctgcttgggagaaaggctgcttaatggtcaagattgtgatgtctgggaatgcaacagtcaaaaggagtgattgaacctcactggtgcaagtgacaacaccatacagtagccattcatgagcatgctatacacacaaggtggcacaaagcggtcctaccaaccatcaagccccttgattgctgtcacctcactgccgttatttaccattgttttttttgccttc

SEQ ID NO: 40670 - DNA, 415 bp, Glycine max
gaggttggtggtccaagccccccgacctaagcttcgaattccgcttgagggccggtttaggcgttgaagggttctccggactggcccaacaatggtgtggaactttggtaccgggtctttggttttccggggggggggaacatggtgagagacctcttccccaacggggttgggaaaaggatgccggtgcccaaggtgatggcgattccctttctggttggggcctactttgccattgaaatgtgccttgggagtttggtgggttacgggtggctcaagcttaacacttagaaggcagaggccatgattccagcaactgcctttggactcatttgtggagaaggccctgtggctcttcccgctttcaattcttgcttttggcaaagttaacccctcctattttcatgaaattttc

SEQ ID NO: 40671 - DNA, 392 bp, Glycine max
gagcttttgattgtcaatttctgtctgcatctcctcgtctcgtccttcatttgactgtacagctccaactagttggttgcgctcctctttctccttttacattttaatttaaataaaaacttcaaaatgtccaacattggaatcaacggatttggccgtatcggacgtttggtcttgagagcatctttggaacgaggagctcaagctgttgccatcaatgatcccttcattggtctcgattatatgatctaccttttcaaatatgattccactcacggacgtttcacgggtgaagtgaaagcagaatgagacttcttggccgacaatggaaagaaacatcatgtcttctttgagcgtgacccaaagccattccatgggccaaagctggagct

SEQ ID NO: 40672 - DNA, 218 bp, Glycine max
gtctgggaatgcatcagccaacaggagtgattgggcctcattggtacaagcgttgttatcgaacagcaacagctcacagcattttgatgcatgtaagtggacaaaatcagaaccacatttctggtaatcgtactttccaatatatgtgtgaccagctaaagcagggcaaacaacatggacgaggattacaaggtgaaaaagtctatcaacttggggag

SEQ ID NO: 40673 - DNA, 402 bp, Glycine max
cgttattcatctggtctttgcgtctgcccttcgaattgctattgcgccaggatagcaaccatcatgtcatttcgttttccagcaaggacactctggcaagctgccccgagattcgcgaatataccacgagtagctccccaaacaacacgttgggctcgcagttacgcagttgcatcggatcaaaatcggacagccatagtaacaggctctgctcgtggaatcggcaaggccattgctcttcgactagctaacgatggatatgatgtctgcatcaacgacatagaagccaacaaatctgaagccgacgaagttgtgaaacagatacaaggcttagggcgcaagtctttctcatatagcgccgatgtatcgaacctgagccaggtccagggcctagtgaaagcg

SEQ ID NO: 40674 - DNA, 244 bp, Glycine max
aagctcggaatttgtctcgagcacagattatcactttgcagttttgggattggtctacatgttgataatggagttatagactaagccgattgaatcattcactggtcacgcgaatgttaagaactttgtggggcaatcagtctctgatggttacattgccactggttcagagacaaatgaggtgcttatataccacatgggcttccccatgccagccatgcctaccaagtctcagaacacagac

SEQ ID NO: 40675 - DNA, 318 bp, Glycine max
acgaggcacgcgtacgtaagctcgagctcggaattcagctcgagctcgagccgtttcgtctcgaggcaaaagctgtcatggtgcaggtactaaatgttggtgtagttgtgtcatctacagggcgcggtacaccgagatcttaagccagcgaatcttttgcatgctaaagaggatgaatgggctgagttgaaagctatagacttagggttatcacattatgtcagaccagatgaaaggcttaatgatattgaaggaagtgcatattatgtggcccctgaagttctgcatagatcttatagcacaccagctgatgtgtgg

SEQ ID NO: 40676 - DNA, 301 bp, Glycine max
ctagcatgtaggactttattcacttaaatacagcgcattactatgtgcaatgagtgtgtttagatatcaaaaacactgataatactctcatgccagctttttctgttccacaagctactcgccagaacttctgaaaatgcggaatcctctgcatgatctggaatttgtgttcactttcgcttgatcgatctgtaaaactcaatgggggcgccccccccatgaccgtcttgttcccccgggatttaattctgtgccggtccccacaggcttcccaaattttccataatgaggtgcgaataag

SEQ ID NO: 40677 - DNA, 498 bp, Glycine max
gttctcaatcaagttatgagcaagatggcagaaatgataaacagtctttgtggtggtgatgaaaaattgatgcgtgaaaaggacgcacctgctgttggctttgttgttcaaaggatgggcaaatttgtaaagaaaaggatgttttggaggagtttgaaatgtgggaaatcccctttcttggaatttcccgcttcacaggttatttttgcaattaagcaattttttaaatgaggatggctcatttagaatattagcctaatgaaaaaatttacttgcgcccagggcctaaaagcttccaaagtattgttttttaaccaatcccttccaaaaaaatttttggtttcttttggtggtgtggtatcggtggatggataactttaaattaggtgttcaatgaatattgtcaaggccttacttttagtgggttctaaaattgaaaagctttcttagctagtcataacatcaccattacttgatggtattgacaaaactagtgca

SEQ ID NO: 40678 - DNA, 251 bp, Glycine max
ggttgatcaataaatacccaagacgattgaagcctgattgagagaaataaattatcctcagtgcaatgatgttcaaactcaaaaagaaacaaatgtgaataaattgaatgttgatcaagaataaacttctaacagttccaaggaagctctgcaattgagaaagaaagatatttctcttattgaaagcatacataaagctgccatgcctaccatagcacaaattgcagattttcattctatgcacatgttta

SEQ ID NO: 40679 - DNA, 343 bp, Glycine max
tgataacttaattagtgttcatgaatatgtcaagccttactttagtggttctaaattgaaaagctttctagctagtcataacatcaccattactgatggtattgacaaaactagtgcaactttgcaatttagaaagttagcagattgtgattttctcaagagaaactttaagcagatgtctaatgttttgtgggtggcttctgaggacaaggcgagtttatggtcacaactttcatatgtttcgtgctataatcttggaaatgcaaagaagcttatctttgtaattctcgtaaattgtgttactatgaattagtattttgcacatgtctcataggtatagctc

SEQ ID NO: 40680 - DNA, 271 bp, Glycine max
gcccattctggtggttacttttccgaataccattgtgcacattgaggcatacatgaagggaagggtggagcttttgagtaccactaccaatggtgaatttgttcaagggaaagatctcaacatgggacatgttaatgtaccatctgctgctgaagccttacatccagttacacttcaactccattagtggatatctggtttgaaaaagacagagggataattgaggagtatcttggaaggatctctatcgttcattatatcgttgagtaca

SEQ ID NO: 40681 - DNA, 252 bp, Glycine max
ggttacaattgaatggtttatttcctctcaggaatgtgttcccaggacctattgtgttttaaatccacaaaatccttttgggttaaaaaagtgggtgggaaaaatgacttttccccaaggcactttcccgagggttaagaaaatgccctctttctatttgggggggggagctggtgcaaagaatgcttttctcatgaatatgccaaatgctgttctttcaatgtggggatattttgttggagaactcggttt

SEQ ID NO: 40682 - DNA, 343 bp, Glycine max
attcattccctcaaatacgcttgccgccaagagctttagaggctgctaaacaggctggaaaggttccagatgtttactactgcctcaagcttttggaagccactggcatgtccactgttcctggttcaggatttggtcccaaagaatggtacaaacttatacatttattctcacgattatccccttttcttttcctttctttagagtgattccacatgcctattcctatggttttcatgcaatgagaatgtgctttagctaggccatatatatttctgccgtatatatatcttgaacttccagagctaccacatatatgaggtaaaaagcacatattccactg

SEQ ID NO: 40683 - DNA, 266 bp, Glycine max
gcttgacgcttatcttgacaatctattacatgtgcaactagagtagggggtgcactaaccagaggaggggggacaacttacaaggaaagctctctctcgcattgaatggctgcaaaaagcttatgtgcctaccatagcacatattgaagagttccattccattcataagatgatgaatgcttctgatttaaactataatatttatttactggtgagcattgaatctgttgggattacaatgagcatgtaaatcttttccaaaacaa

SEQ ID NO: 40684 - DNA, 339 bp, Glycine max
caagctggtgcaatttggttagattcaccataaatttgtattgaaggtttcacaagaggaatgggttgcagcttggtcaactcaagtgcgtcctgcaacaactctgttggctgatgggtgtccatatttgtatgcaatggtgcatgatagttcagtgtctacaataccatgtgattttgtcattggtgtcaagttgacaaccataaacaatatgtgttcatatgggcttaatcctggtattttaggttctcgttttttgggcaccattccttattccatttcacaacaaactgtttggaatcaaatgctaccagtgtgaacaccattgaattttgattc

SEQ ID NO: 40685 - DNA, 365 bp, Glycine max
ggctctttctaccacagggggagctagctcttatgacgctaaagtcatggatatggccaatgcttgcatgataatggggagataaaaaaggaccgatctcacactatgaaggaagtatgctggctcctacctacaggaacagtacaaacgatatcttcatagcattggaagggctgattgatgataccatgaatattgaggctactacatacaagctgcagccaaccggagagactaaggaaaaggctgaattgaaatggttacaggaggtattaatcacagcttggtcaactgaagtgcgttctgcaacaactatgttggctgatgggtcgtgcatattagaatgcaatggtgcatgtaagatc

SEQ ID NO: 40686 - DNA, 485 bp, Glycine max
  unsure (1)..(485): unsure at all n locations
aagagcttatgacgntcgcatcgcacgccgtaccgtaagctcggatattcggcttcgagcttttatgctcgaatcggcttcgagaaggcaaactgtnnttggaatcaaatggcgaacagtgagaaccaccattgagatttntgattcttagcaagcagagcttttttgtcagttttctattggaccttctcggtggaggaatcttagtggacaaaactggagattggatcacacttatacaaaattctccaattagtaacttgttgagagttgctgcttggaagaaaggctgtttaatggtcaagattgtgatgtctgggaatgcagcagtcaaaaggagtgattgggcctcattggtacaagtgtttttaacaaacagcaacagtacagagcattttgatgcatgtaagtggacaaaatcagaaccacattcctgggaattgatcttcccaatagaggtatgtggtcctaataatggttttgaa

SEQ ID NO: 40687 - DNA, 400 bp, Glycine max
tttaatccaaacccgtgttctgatgcatggagtttggaatttctgaagcgtactggatttgattgcgatatcatttgtgtcactggatggactgccaccccaatgcaggatgttcaggttacaattgattggtttatttcctctcaggaatgtgttcccaggacctattgtgttttaaatccacaaaatccttttgtgttaaataggtggatgagaaaattgactttcccccagggcacttcccgaagtgttaagagaatgcctctttctatagggggaggagctggtgcaaagaatgctattctcatgaatatgccaaatgctgttctttcaatgtggagatattttgttggagatcttgtttttgaagtttctaagacgacttttccctacattaaat

SEQ ID NO: 40688 - DNA, 318 bp, Glycine max
ccaggacctattgtgttttaaatccacaaaatccttttgtgttgagataggtggatgggagagtggactttcccccagggcacttcccgaagtgttaagagaatgcctctttctatagggggaggagctggtgcaaagaatgctattctcatgaatatgccaaatgctgttctttcaatgtggagatattttgttggagatctcgtctttgtagctcctaagatgacttcttcctacattaaatgttcagtctctttctttatagcattctcggaacatttggctgatgatgcccataaattttgtaggctttttccc

SEQ ID NO: 40689 - DNA, 365 bp, Glycine max
gcttgtcataacatcaccattactgatggtattgacaaaactagtgcgagctttgcaatttagaaaggtagcagattgtgattttctcaagagaaactttaagcagatgtctaatgttttgtgggtggctcttgaggacaaggtgagtttatggtcacaactgaattacgactcttcccaacatttgaacatgcacgaggcttatagtttcaatctagaaactgtttcaccctatttccacatgttcaacttagtaactatcgtctgaatagaccagatttgttttagcaattgtttatcactattaaaatatttccaaatgcacttatcttttgttgccctcttgtaagcactttctttgtaaa

SEQ ID NO: 40690 - DNA, 381 bp, Glycine max
gttctttcagagcatattcatgttctcatcatattattcatatgtaaaatagtgtttggtaggcctccaagctgtgataatgatcatgttcttttataaacagtttcaggataacattgaactcttttgtcagacaaggcgcaatattaataccgttcttaatgaaatgagaacgatgcctggcataatgagccaaatgcccccttttcctgttttcatgaatgaggaacttgcaagtagtatattacccaataaatctgaggcagcaaattattgaccccatttaagattgccaactcagtgcacaagtctggagttgttgacatttttgaatggaaatcttagctgaatttttttgggtgctacatgcatttgttgagc

SEQ ID NO: 40691 - DNA, 198 bp, Glycine max
gtaagctcggaattcgtctcgagcaaatggcaacagtgataacaccattgaaatttgattctagcatggggagctattgacagtgggctatcgaccccctcggtggaggaatcttagtggacaacactggagactggttcacacttctacaaaattctccaattagtaacctgttgcgagttgttgcttgtatgaaag

SEQ ID NO: 40692 - DNA, 327 bp, Glycine max
agaaaaagggggccacagttggaattcttgagaatacaggtatatcaggggcctgtgctatgaatagtggtttagggggctcgccagttctgatatttacacccatttgttctaagactgtgaattgtggaatctgcttgacaaaagcatgactatgttatttaatccaaacccgtgttctgatgcatggagtttggaatttcttgaagcgtactggatttcattgcgatattcatttgagtcactggatggactgccactcccaatgcatgattgttaggttacaatctgattggtttattttcctctcaaggaatgtgtttccca

SEQ ID NO: 40693 - DNA, 262 bp, Glycine max
agcttgtgttggctaacacacaagaattctttgatggaaattttccagtggattcttggttaccaatttttgtgaattgtctttatcctgtaagtcaattaccttcagaagctgtcgttgtaaatgttatatgtggtagtggacgtgtcgaacctttcatttctctctgtcttgaacctttttcagttctttacactaaacccatcttcatgcactcctttatgctcctcaagctcctaaatacattgtggtttgagagaac

SEQ ID NO: 40694 - DNA, 326 bp, Glycine max
aggaagtcctcgttttgcacagctaagtagtgccatatttgggttattttattgtggatatcttccctctttttggcttaaacttcgatgtggtttagcagctccagccttgaacacaagaataggagcaacatggcctatacttcttggtggccaagctcattggacagttggtcttgtggcaactttgattaccataagcagcgttattgcagcggatacatttgcatttcttggtggcaaggcatttggtagaacaccacttaccagtatatgtcccaagaagacatgggagggtactattataggcttttggggggtgtata

SEQ ID NO: 40695 - DNA, 157 bp, Glycine max
ggcaagcttttgtgttcatacatgagaagcaaattggtcatgctgtatatgcagaggttccagaacgttatgatgaaagaaacgggcgatatacacgaattataagaaccctaccaaggcagtgtgataatgcacctatggcatatatagaacttgt

SEQ ID NO: 40696 - DNA, 338 bp, Glycine max
  unsure (1)..(338): unsure at all n locations
aagggttctactaaccattgtgtactctagagagtcgtggaagaagggtcaatccccaggactcttggtaagctacggggcatatggagaagatctggataagagctggtgttcagatcaccttagtttactggaccgtggttgggtagtggcattcgctgatgttagaggtggtggtggtggaggtnctttatggcataaatntgggagtggattaaacaaacttaatttaatatttgaatttgtatactgtggcaactaccgggggaaggggggttatgttcagagtgatcttgtttagtgctatggaatggagtgcaggctgcctttttgttggt

SEQ ID NO: 40697 - DNA, 361 bp, Glycine max
acagtcttttatgcaaactgtttggcagaccaaaggggacctgagcattccaccaacaaatgatttcaagaatcatcaagctccagcagttggaatgaacactgacattcaaaaggtatccgagtttggttttgataagtcaaaaagggtcaattttgatccttttgatcttccaagtgatgttagggcacttgcacgaattgtatactctcctcatggtggtgaaattgccattgcttttcttcggggtggagtgcacatcttttctggtccaaattttgcacctgtagacaactatcagattagtgttggatctgcaattgctgctcctgctttttcttcaacaagctgctgttcagct

SEQ ID NO: 40698 - DNA, 374 bp, Glycine max
cccatggcccccgtccgtaagctcggaaattcggctcgggtggctatgtaaatttaacggggccaggctaaagctccgggggggtttttacaatccttaaaaaattttgtttctttgtgtgtgtatggtgatgataacttaattagtgttcatgaatatgtcaagccttactttagtggttctaaattgaaaagctttctagctagtcataacatcaccattactgatggtattgacaaaactagtgcaactttgcaatttagaaagttagcagattgtgattttctcaagagaaactttaaacagatgtctaatggtttgtgggtggcttctgaagacaaggcgagtttatggtcacaacttcattatgtttc

SEQ ID NO: 40699 - DNA, 340 bp, Glycine max
ttaggatattctttttgcccatacagatcatacttgggaaggaacttaagtaccgagagaaagggtgttttcattaatccagctttcattgagccatttggtcttaccttaattgaggcagctgctcatggtttgccaattgttgctactaaaaatggaggtcctgttgatattcatagggtacttgacaatggtctgctcgtagatccccatgatcagcagtctattgctgatgctcttttgaagcttgttagcaacaaacaactttgggcaaaatgtagacagaatgggttaaagaatattcatttattttcatggcccgagcactgtaagacttacc

SEQ ID NO: 40700 - DNA, 398 bp, Glycine max
agcatgacggccctgcacgccttccaaacctcgaatttcgttcgagctccaaatttttgcctactgcctgcttttaaaggcagtaatttaatctgaagatagaaatatcatcatgggagaggtggcagtaatgcattctgagcctctgcagtttgattgcaatgccatgaaccatatcactgagaaagatgtatataatctattgtcaaacgaagagcacatacttggagaagaatcaagtcaatcatcaaatgacaaaaagatcaatgatttgagagagagaggatacatgaaatgtcaacattaccgaagaagatgccgtattaaggccccctgttgtgatgagatttttgattgccgccattgtcacaatgaggcaaaaaataatatcaacattg

SEQ ID NO: 40701 - DNA, 368 bp, Glycine max
ctcccatttcaacccactccgtctattctccaccgcgcaccgtcaacaactctcaccatgtctgccccacgcgctacctctccctccaacacggcctcttcaggctcgacaaccgcgcgtcctgcgtcgccaaagcccccgggtggccctgcgactgttatgcgaaggaaggctgccgctgaccgcgccgagaagaccgcaaacctgcgtccaagcagcacaagggcggccggtgccggtggtagctcaagcactatgctgaggctatacactgatgagtctcccggtctgaaggtcgaccctgttgtggtcatgaccctgtccgttgtcttcatcttcagtgtcgtcgctctgcacgtcatcgccaa

SEQ ID NO: 40702 - DNA, 361 bp, Glycine max
ctcaatgtttatatatatagaaggagatctcgggtcggaagtttctaagatgacttctccctacattaaatgtacagtctttttcttcatagcatttggaaatttggctcatgataccatcaattttgcggcttttccccacaagctggtgcactttgtatagattcaggaaaaagttgcattgaaattttcacaagaggaatttctcacaacttggtcaactcaggtgcctactgcaacaactctgttggctgatggctctccatatttgcatgcaatggtacatgataattcattatcttcaattccaggtgatactatcatctgtgtcaagttgacaaccatgaacaatatgcatgca

SEQ ID NO: 40703 - DNA, 357 bp, Glycine max
ttcattatttactcctataccaaatgtcacaaccggggtttcttacatcttggtcaacacaggtccatcctccaacaactttaatggctgatgggtcatcatatttgtatgcaatgctacatcatagttcattgtctacaataccaggtgattttgacattgatgtcaaggtgacatccataaacaatatgtgtccatatgggctcaatcctgggatttcaggatctcactttttcagcaccattcctcagtccatttcacaacaaactgcatggaatcaaatgccaacattgagaacaccatagaattttgattctagcaagcagagcttttgtcagctttctattgaccttctcg

SEQ ID NO: 40704 - DNA, 418 bp, Glycine max
agagcatgacggccatgcacgcctaccttaacctcgaatttcggttcgagtgggaattgtttttcccaataaaggtatgtggtcctaggagtggttttgaaatgtggagttctaagtggccaaatcaaacttaatggcatttgagtttccttattgaaaatcccaaacagtctacagtttttgatattctcttgggaatctctcaagattttgaaattgctggtaatactcttatgccagctttttctgttccacaggctactgccagatcttctgaaaatgcggaatcctctgcatgatctggaatttgtgttttctttcgcttgggtcgttgtttaattcaataaaggaaattaggcatgaccctcttgttgagtatgctctgcctatttgaaaatttccacacctcttttaattg

SEQ ID NO: 40705 - DNA, 312 bp, Glycine max
aaaagcttatgtgcctaccatagcacaaattgaaggggtggattccatgcaaaggatgatgaatgctcctgattcaaatgataatattgatttactggtgagcattgatttggtgggtttaccaggagcaagtaaagcttttccaaacaaaattggttttgatgataagcttggggtggctaacacacaagaattctttggtgggaattttccagtggattcttggttaccaatttttggggattgtctttatcctgtaaggcaattaccttcaagagctgtccgtgtaatgttacatgtggtagtggacgt

SEQ ID NO: 40706 - DNA, 359 bp, Glycine max
gcttcttctatttctctagaatgttttaatgtctgagtactctaggtttccagtttgctgacctgaaattcctgttttctcttggcagaacttgatcagttacttgaagatgcacctttgccattcataatgcagcatgctgccaagatttctagtgttaggaaaagagtttcatcactgaattcacttctaaaatccatacaagggcggattgataatatagatcgtatgctgtcttttggcaccactcatggtatagagaaaaacaaccactgaaggttctgggtgaaatgtcatcagcttaatcagcctccattctttccaaatgtactatgcaatgcccccttaaccccttaaat

SEQ ID NO: 40707 - DNA, 262 bp, Glycine max
ctgggttgaaaggaattgtaacattatctcgttaaatcatctacagatttggcaacaaaatcatacaattcctttcaacccagccacataatttaattcaacctggcctgcatggatgcgaagtacaaaaatagacctgagtagcaatggaatcaagctcatcaaagaagaggacacgtggagctgattgtttggctgggttgaaaggaattgtatgattttgttgccaaatctgtagatgatttaaggagataatgttaca

SEQ ID NO: 40708 - DNA, 335 bp, Glycine max
cttggttaccaatttttgtgaattgtctttatccggtaggtcaattaccttcagaagctgtcgttgtaaatgttacatgtggtagtggacgtggtggtatacataacacttgttgtatgagtgtttcgctctattattcatgtcccaactgtaccacagaggactaggtcgcgtcactggcacggacacttagtcgtacggcggactagaggcgttgccttttcaaggtgtttactgtctagacttgttggcgttaacagtggaaggttgggttgtaactccactaattctatactgactcgactttctacgaactgtaagagtccttaaatttc

SEQ ID NO: 40709 - DNA, 424 bp, Glycine max
  unsure (1)..(424): unsure at all n locations
actagctacgacgcacgcacgcacgcctaaagcagctatttcggctcgagcggctctatttttgaagagttgaatgtggaatcccgtgtggattttcgatcacagttatttgcaatancatttttaatgagatgctcattagatatagctatgaaaaattactgcgccaggctaaagctccaagtatgtttttacaatccttcaaaaatttagtttctttgtgtgtgtatggtgatgataacttaattagtgttcatgaatatgtcaagccttactttagtggctctaaattgcaaagctttctagctagtcataacatcaccattactgatggtattgacaaaactagtgcaactttgcaatttagaaagttagcagattgtgattttctcaagagaaactttaagcagatgtctaatgtttt

SEQ ID NO: 40710 - DNA, 305 bp, Glycine max
  unsure (1)..(305): unsure at all n locations
gcgtgcgaagctagctatnaatttggctcgagcgatcaatgatactactacttcttcaatcacagcagatctattcaaccacataattactactagcaatcatgcaaatcttcgtcaagacccttactggcaagaccatcactcttgaggtcgaatccagcgataccattgacaatgtcaaatccaagatccaagacaaggaaggcatccctcctgaccagcaacgtctgatcttcgccggtaaacaactcgaagatggccgaaccttgagcgactataacatccataaggagtcaacccttcac

SEQ ID NO: 40711 - DNA, 363 bp, Glycine max
ccacaataacttctccatctccatctaccaacaacgtggcccgcactaagcagaccgcccacaagtccactggtggcaaagccccccgcaagcagctcgcatccaaggcagctcgtaagagtgcgccgtctaccggtggtgtcaagaagcctcaccgctacaagcccggaactgtcgctctccgtgagatccgtcgctaccagaagtcgactgagctcctcatccgcaagctgcccttccagcgtcttgttcgtgagattgcccaggactgcgagtccgatctccgctttcagtcctccgccatcggtgctcttcaggagtccgacgaggcctacctcgtctacctcttcgaggacaccaacc

SEQ ID NO: 40712 - DNA, 246 bp, Glycine max
atcatttccacattcctgggaatagaacttcccagtggaggtatgtggtcctaataatggtactgaaacgcggagctcttagtgggcaaatcaaactatatcgcattttattttccttattgacaatgccaaacaggctacagtttttgatattctctctgcaatcctttaagattgtggaattgctggtgatactcttatgccagctgtttctgttacacaagctactgccagatcttctcaaaa

SEQ ID NO: 40713 - DNA, 393 bp, Glycine max
aagagcatgacgtcgctgcacgcgtacgaagctcggaattccgcttgagaattctttctaaattggagttaccactagtgccatggggggtagcacttcccaggatgtgaaccatgccgtccttgctgtggggtatggagttgaaaatggcgtcccatattggctcataaaaaattcatggggagaaagttggggtgagaatggctacttcaaaatggaattggggaagaacatgtgtggtgttgcaacttgtgcgtcttatccagttgtggcataaattgcataagaatatggtccctggtgactaccaccttgtcatgcttcagagtttaaagataagtgtcattgtataatgaaaattgctcctagttgggttggtatgatgtattaaat

SEQ ID NO: 40714 - DNA, 389 bp, Glycine max
ctcggaattcggctcgggctcgagtcgctcgagccgctcgagcggctcgagatggttgtcttctaaaaaaataaaattaagaaattttcatggtaaccattcgtgcagatgaaattagtaaaattatccgtgaacgcattgagcaatataatacggaagtaaaaattgtaaatacgggtaccgtacttcaagtaggcgacggtattgctcgtatttatggtcttgatgaagtaatggcgggtgaattagtggaatttggagagggtactataggcattggtttggatttgggattcaaaaatggtggtggtggaattaatgggtgatggtttgatgatacaagagggaagttcagtaaaagcaacaggaagaattgctcagatacctgt

SEQ ID NO: 40715 - DNA, 365 bp, Glycine max
ccatcattgagaccatgaagaagcagggcatcaagtgccatatgaaggctgagatcgagaagatcctccctgctgagtccaactcggcgcactgcggctccgttcagctcaagggcgccccgtccctccccgccaacctgatcattatgggcacgggtgtcgggccatctacgtcgttcctgaaggactcgggcttcgagctcgagaaggacggcggaatcgccgtggacgagtacctccgcgtcaagggccaccagaacatctacgccatcggcgatatcgcccactacccgcagtaccccgccaagttccagcgacgggtcgagcactggaacgtggccggcaaccacggtcgagaggtggcg

SEQ ID NO: 40716 - DNA, 363 bp, Glycine max
acttctctctcgtcggactcgaccgcggacaaagctcgaccgtcgattactgcaacgttcgcgacagcgcgcacatcgtaaccttacaacacacaccgaccgccaaacatggcagaggctcaggcgactcccactttcaagctcgtgcttgtcggtgacggaggtactggaaagaccacattcgtcaagcgccatttgaccggagagttcgaaaagaagtacattgcaacacttggtgtcgaggtccacccacttggctttaccacaaacctcggccagatccagttcgatgtgtgggacaccgccggtcaagagaagtttggtggtctccgtgatggatactacatcaacggtcaatgcggt

SEQ ID NO: 40717 - DNA, 322 bp, Glycine max
gctttttcaaacaaaattgtttttgatgatgaggtggtgttggctaacacacaagaattctttgatggaaattttccagtggatttttggttaccaatatgtgagaattgtctttatcctgtaagacaattaccgttagaaagcttgccttgtaaatgttacatggtggagtggacgtagttggaatgtcaggctttttttgtataggatttggaaatttgggtggttattccattaaatttgagggtttttcccaaaagctggtgcaggttggagagattcaagaaaaagttggtttgaaatttttacaagaaggattttt

SEQ ID NO: 40718 - DNA, 373 bp, Glycine max
gtttgaatgtctagggttttaacaatttaaatatggagggtccaaggcaaaaaacagatacatgagttcatatttcttgtgaaaaaatgccatcagtactcagttacctatgattaaagatgcagagaaaaaagctttaaaagcatacactaggtcatccaaatactagtgaacttcaactttctggaattgagattgagccacctgtataattctgtattgttgtgcatctaaatactacactcctcttttcctccccataatcattaacctcaatttacatatcaaataggcagctgatccttctaatattagtatcatcttgaccccctcatttagacctagttttgcaggcgggtaagttggctgatct

SEQ ID NO: 40719 - DNA, 363 bp, Glycine max
aaacattatgcaacaacaacaacaatagctacagccgtgtataacaacaaccaagtttcttcttcttctttttcttcagatgaaaccaacaataccaaagacgacaagcactatagaggggttagaagaaggccatgggggaagtatgctgcagaaatccgtgaccctaatagaaaaggctcaagggtgtggcttggaacctttgacacagccatagaagctgctaaggcttatgacaaagctgctttcaagatgagagggagcaaagccatattgaacttccctttggagattggatcagatcagtctaaagaagagtcatcatcatcatcatcatcagtttcaagcagcagcatcgtcatc

SEQ ID NO: 40720 - DNA, 422 bp, Glycine max
agaagagctatgacggcgcatgcacgccgtcctaaggctcggaattcggctcgggtgagttttgtaattgaagttgaagtcttgcccttcgcggttcaactccaaacacaagacatcatcatccatggctgcctccgtctccactgtcggagctgtcaacagagctcttttgaacctgaatgggtctggacctggggtttcagctcccagttcatccttctttgggagcagcttgaagaaggttattggctcaagggtccccaacacaaagatttcctctggaagcttcaagattgttgctgtagaagagaagaaagagattgaagagacccagcagaccgacaaggacagatggaagggtcttgcctatgatatctcagacgaccaacaggacatcacaagaggaaagggtttggttgact

SEQ ID NO: 40721 - DNA, 372 bp, Glycine max
atcaattcgtactgcactaggtcctgttgtcgatgggataaatagccatgcaaacccccaacttgagtttcatggagttaaaattgagcttggatggttccaagcaacagcttctggttactatcagcttggtatcgtggtagcagttggggattatacccttcttgatttgcaccagtctgatacttgggttggcacagatgaattaatgaggaaaaatgtggcacatggaagaaagaatgttaagcagctgcagcatagttggccatacataagcaattcattatctcttaaaaggataactggaggaattaatggtggcctaataaatgatgctaccttaaaatcattggactttcgaagggacttttt

SEQ ID NO: 40722 - DNA, 285 bp, Glycine max
cctcaatttatttcacagcaaactgtttggaatcaagtggcatcagtgagaacaccatttaatattgattctagcatgccaagcttttggcagttgtatattgaccttctcgcagggggaatcttatgggacaaaactggagattggatcacacttatacaaaactcttcaattagtaacttgctgagagttgctgcttggaagaaaggctgcacaatggtcaagattgtgatgtctgggcatgccactttgaaaaggagtgcacgggccagattgcaccaagtg

SEQ ID NO: 40723 - DNA, 388 bp, Glycine max
  unsure (1)..(388): unsure at all n locations
aagagctangacggaccgggcacgcgcgcgtaacgtaagccttgaaattcggctcggggttttgtttggccctaatgggtccaagtgtgggaagcagacatcaacagtacaaagcattttgatgcatgtaagtggacaaaatcagaaccacattcctgggaattgatcttcccaatagaggtatgtggtcctaataatggttttgaaatgtggaggactgagtgggcaaattaaacttcatggcatttgagtttccttattgacaatcccaaacagtctacagtttttgatattctcttgggaatctctcaagatattgaagaggctggtaatactcttatgccagctttatttgtatcacaggctactgccagatcttctgaaaatg

SEQ ID NO: 40724 - DNA, 342 bp, Glycine max
gccaaataaggcgccgagttcgagagttttgaagagcgggttttatgtggggtttgaatctctataagaggccgaaactcagtggtgctatgcttggagcgattttgccgctggctgcagtgcatactttggggaaccttttcactaatatgagtcttgggaaggtggccgtgtctttcactcacactatcaaagccatggagcctttcttttcagtcatcctttctgccatgttccttggagagtttcctacaccgtgggtggttggttcccttgtgcctattgttggtggagttgcactggcgtctgttaccgaggcctctttcaattgggctggatttt

SEQ ID NO: 40725 - DNA, 393 bp, Glycine max
  unsure (1)..(393): unsure at all n locations
aagagctatgacggcgcatgcacgcctaccgtagcttcgaatttcggttcgggtttttattttcaaaaggagaaaagggtttgtttcgggggtttggaaatttcagcccccatcaaaaaaaaagccccataatcttcgaatcgaaggcatttgattgaaaggtcgaaactttagcatctgggatcgcgcaattggngttttttttggttaaaagggtatcttcggaattcatggcaaaactgtacgtgaaggcggtgccaccggcggatctgaacaggaacacggagtggttcacgtaccctggcgtttggaccacttacatgctcatccttttcttttcttggatcctcgttctctccgtcttcggttgctcccccggcatcggttggacca

SEQ ID NO: 40726 - DNA, 397 bp, Glycine max
gagctagaccgcccatggcccccgtccgtaagctcggaattcggttcgagctttaaagctccagggtttttttaaacgcataacccgcgccgaaaaacacgtacgccgtaaagttcgcagttccactcagccaagggatgcgacttggtagtgtcaggttgggtcgggtgatgaggatccgacccgttcgcgcagcttcagagcgcatttcggagaaggtggaggagagcataaagaacgcgcaggaggcgtgcgccggcgacccgacgagcggcgagtgcgtggcggcgtgggacgaggtggaggagctgagcgcggcggcgagccacgccaaatacaagcaaaaggaaaaggactccgacccgctcgagacctactgcaaggacaatccggagac

SEQ ID NO: 40727 - DNA, 222 bp, Glycine max
ttgatttactggtgagcattgggtgggtgggtttacaaggggcaggttaagctttttcaaacaaaattggttttgatgataagcttgggttggcttacacacaaaaattctttgatggaaattttccagtggattcttggttaccaatttttgggaattggctttatcctgtaaggcaattaccttcagaagctgtcgttgtaaatgttacatgtggtagtg

SEQ ID NO: 40728 - DNA, 393 bp, Glycine max
atagcccgacgaggcacgcgtacgtaagctcggaattcggctcgggattcattttttggaatgggttttttttacaagagcgagtgctaggtaccgaacttagtcaatgagctagaatgggttataaagatatctatagatatatatagatatatttatctatagatatctttagaaaaaaaaaaagaaaattaacaaataagacgtatcattttatgtatagtagtggggaattatgggacaaaaaataaatccgcttggtttcagacttggtacaactcaaagtcatgattctatttggtttgctcaaccaacaaattattccgcgaatatacaagaagataaaaaaatacgagattgtatcaaaaattatatacaaaaaaatataagaat

SEQ ID NO: 40729 - DNA, 366 bp, Glycine max
attcgagagaaagattgaatctgggcagttttggcctgggtaggtatacttgcatataaaaataaagataaactcgaagacaagcttgtcactgttgaagacatagttcgccagcattgggctacttatgggcgccattattatactcgatatgactatgaagtatgatacaatcgcattttctcctactttgttataattggttttgaaaatcagttagtgacctcaattttttttccttaaagaatgtggatgcaggtgcagcaaaagaactgatggcatatttggtcaagctgcaatactcactttcagaagtcaatcaagatgctaattttagtatactaacattattttaaatatgagttt

SEQ ID NO: 40730 - DNA, 455 bp, Glycine max
gcgcatgccccccgtccgtaagctccggaattcggctcagaagttttgttaggagatcttgtcttttgaagttcctaaaaggcctcctgccgactttaattgtccagcctctttcttcataccattggaaaattgggctgatgataccatcaattttgaggcttttccccacaagctggtgcagttaggagagattcaagaaaaagtcgtattgaaattttcacaagaagaatttcttacagcttagtcaactcaagtgcgtcctgcaacaactctgttagctgatgggtgtccatatttgtatgcaatggtgcatgatagttcagtgtctacaataccaggtgattttgtcattggtgtcaaagtgacaaccataaacaatatgtgtgcatatgggctcaatcctggtatttcaagttctcgtcttttgggcaccattcctcagtccatttcac

SEQ ID NO: 40731 - DNA, 389 bp, Glycine max
  unsure (1)..(389): unsure at all n locations
ctcgacccgggacaaatctgtttattggatcacccttatacaggattggccaattagtaacttgttgagagttgctgctaggaagaaaggctgtttaatggtcaagattgtgatgtctgggaatgcagcagtcaaaaggagtgattgggcctcattggtacaagtgtttttaacaaacagcaacagtacagagcattttgatgcatgtaagtggacaaaatcagaaccacattcctgggaattgatcttcccaatagaggtatgtggtcctaataatggttttgaaatgtggagttctgagtgggcaaatcaaacttcatggcatttgagtttccttattgacaatcccaaacagtctacangttttgatattctcttgggaatctctc

SEQ ID NO: 40732 - DNA, 462 bp, Glycine max
gagctatgacggcccatgccacccgtccgtaagctcggatttcggctcgagctggtttttcaggttttggtttttgggccaccttccctaagtcggtggaacagctaactgtttggattcaattggcaccagtgagaacaccatggatttttgattctagcaagcagagcttttgtcagttttctatagaccttctcggtggaggaatcttagtggacataactggagattggatcacacttatacataattctccaattagtgacttgttgagagttgctgcttggaagaaaggctgtttaatggtcaagattgtgatgtctgggaatgcagcagtcaaaaggagtgattgggcctcataggtacaagtgtttttaacatacagcaacagtacagagcattttgatgcatgtaagtggacaaaatcagaaccacattccctgggattgatcttcccaatag

SEQ ID NO: 40733 - DNA, 389 bp, Glycine max
cgcccacccgtactatctcgcacgcacatcccacagtcgcccaagatggcctcccagagcgtgcaatgcttcggcaagaagaagaccgcgactgctgtcgcccactgcaaggccggaaagggtctcgtcaaggttaacggaaagcctctttcccaggtccagcccgagatcctgcgattcaaggtttacgagcccatcctgatcctcggtgttgacaagttcgctgatgtcgacatccgcgtccgcgtctccggtggtggtcacacctcgcaagtctacgccatccgccaagccattgccaaatccatcatcgcctactaccagaagtacgtcgacgagcactcaaagaaccagctcaagcaggctctgatccagtacgaccgcacact

SEQ ID NO: 40734 - DNA, 443 bp, Glycine max
accggtacgtaagctcggatttcggctcgagagctttagtcagtttttttttgcccttctcggtggaggaatctgagaggccaaacctggagttgggtccacacctataaaaaatcctccatttagtaacttgtggagagttgctgctagaaaaaaaggctgtttaatggtcaagatagtgatgtctgggaatgcaccagtcaaaaggagtgattggacctcattggtacaagtgtttttacatacagcaacagtacagagcattttgatgcatgtaagtggacataatcagaaccacattcctaggaattgatcttcccaatagaggtatgtagtcctaataatgagtttgaaatgtggagttctgagtgggcaaatcaaacttcatggcatttgagtttccttatagacaatcccaaacagtctacagtttttgatattct

SEQ ID NO: 40735 - DNA, 406 bp, Glycine max
aacctcgaattccgcttcaagtggaatttagcttgttatttcatcaaatttgaagcctttcccgagaaggctgttccatttggaaaagattcagaaaaaactggcttggaattttcaacaaaaggattttcttccagcttgtccaactcaggtccgtcctgcaacaactctgttggctgatgggtgtccatatttgtatgcaatggtgcatgatagttcagcgtctacaataccaggtgattttgtcattggtgtcaagttgacaaccataaacaatatgtgtgcatatgagctcaatcctggtatttcaagttctcgtcttttgggcaccattcctcattccatttcacagcaaactgtttggtatcaaatggcaacagtgagaacaccattgaattttgattct

SEQ ID NO: 40736 - DNA, 394 bp, Glycine max
  unsure (1)..(394): unsure at all n locations
gcaaaaagctgatgtttctatcttagcacagattgaagagttggattggatgcataggatgatgaatgctcctgattcaaatgataatattgatttactgttgagcattgatttgttgggtttacaaggagcaggtaaagcttttccaaacaaaattgtttttgatgataagcttgtgttggctaacacacaagaattctttgatgagaaattttccagtggattcttggttaccaatttttgtgaattgtctttatcctgtaagtcaattaccttcagaagctgtcgttgtaaatgttacatgtggtaantggacttagggatctcccaccacttgttggtttttgactgctccctacatttgtttctgtattatgaacaaaataattttcac

SEQ ID NO: 40737 - DNA, 404 bp, Glycine max
ctggtgcaaagaatgctattctcatgaatatgccaaacgctggggtttcaatgtggagatattttgctggaaacctcccctttgaagtttctaagatgacttctccctacattaaatgtacagtctctctcttcatagcatttggaaatttggctgatgataccatcaattttgaggctcttccccacaagctggtgcagtttggacagattcaagaaaaagttgtattgaaattttcacaagaggaatttcttacagcttgaccaactcatgtgcatactgcaacaactgctgcgactgatagagcgccatatctgtatgcgatggtgcatgatacctcagagtctacaataccaggtgatttcgtcattgtgccaagtcgcaaccataaacaatatgtgtgc

SEQ ID NO: 40738 - DNA, 310 bp, Glycine max
agtggtcctaattcttttagctcactaacatgccataacaggagcattacttgtggtgttgacaaaacgcaaacaaccttgcaatttataaagttagcacatggagatacgttcaacataaactataagcatatatataatgtagagaaagaggctcctgaggacaaggcgagcttatagtcacaacctcactatggatagtgtaatgatctctaaacacaagaagcttatgttagcaatatcaccaatgtgttacatgtattggatcttcactgcccacaggaagatcaccaatctgaaatgaaagctc

SEQ ID NO: 40739 - DNA, 322 bp, Glycine max
tgaagaccaatctctttttggacagcaaaaacggcgagaaaggaaacaacttatccgggtatgtgaaccctcgttttgctggggagaatttccccacatcggtttttccctgtgtggtgggaaggccaatgctccgttacgaagaatcactcaccgagcaggcgcttaaggatattgttgttggagaaaggtgtgcagacttgcggcatcaacttgatatatcttatcctgtgaacaacagcattgagcaaaactgggatgatatgtgccatgtttgggatcatgcgttggtcaatgaatcgaagattaacccttaggactg

SEQ ID NO: 40740 - DNA, 390 bp, Glycine max
cacacttctttttgttctcaagaattaactccaattcttgctggatttcactccaacatgctccaagaagaaacttttccgttttcgccatgtccggcgatgatgcaaagcggagtgttccattgaaggattaccgcaacatcggcatcatggctcacatagatgctggaaagactactacaacggaacgcattttgtactatactggaaggaactacaaaattggagaagtgcatgagggaacagcaactatggactggatggaacaagaacaagagagggggattaccattacttctgctgcaaccactacattctggaacaagcaccggatcaacattattgatacttctggtcacgttgacttcaccttagaagtggagcgtgctc

SEQ ID NO: 40741 - DNA, 352 bp, Glycine max
  unsure (1)..(352): unsure at all n locations
ggaaatagaaagcctcacatttgaagctacgcanttgaagagtgatgctggtggtgaggtggcaaatcagccagtgcatatgccgttgattttgcctaaagttcctggtcggttctactattattttggaaaaccattggaaatggaagggaggaaacaagaactgagagacaggaagaaagctcatgagatttatttacaagtgaaatctgaggtagagagatgtattgcttatttaaaggtgaaaagagaaagcgacccctacagatgtatagggcctcgactattataccaggctacacatgagtttgagtcagaagttccaacatttgaaatttgatggtttgcacaa

SEQ ID NO: 40742 - DNA, 439 bp, Glycine max
aacctcggaattcgcctcgagttaagattttccaagtatatttctggtcacatattattaaaatggctgactttgataggaataggctaataaataatgataataataataatccatcacatgggaaaggtgtattgaaaagatgctgttgaatttaccgatgaagttcctagttgggccaccttgtacaactaaatataatgcactatgtttctataaagattttgatatatggagatcctatctaatttcgtatgatattaaactatcatcatctgatgcgatattacctgatatatctctggagacgatgggggcttattgtatactgagttactttacaagtgatgaatgaaggacctggacacatcccaatgcacaagattcctgaaaacatgcagaaacagttagaatggtgtagtgaagcgcctttttacac

SEQ ID NO: 40743 - DNA, 388 bp, Glycine max
  unsure (1)..(388): unsure at all n locations
gcgtacgtaagctcggatttcgtctcgagctccaatcgattttttatctcccnctaanatagaaagaacagaaatagcttatatgcctaccatagcacaccctgnnncgttccattcgatgcagaagatgatgaatgctcctgattcaaatgataatattagatttactgacgagcatggacttgctgggtttacaaagagcatgtaaagctattccaaacaaatatattcttgatgataagcttgcgttggctcacacacatgaatactcacatagaaattttccggtagactcttagttaccaatttttagtgaatggggctttatcctgtaaagtcaattatcctatataagcctttcatttataatatgttaccattttggtac

SEQ ID NO: 40744 - DNA, 297 bp, Glycine max
  unsure (1)..(297): unsure at all n locations
gcgtacgtaagctcggttttcgtctcgagataaaatactttttctaattatggaatatnnctattaggaaagacatatccaatgactatacattcattctatnnccgngcaaatagaggaaaaactcgatcgaaaaatggtggtttaattctatgttgtttaataggaagttagaatacacgtatcaattaagtaaatcaatggatagtcttggtcctatcgaaaataccagtctaaggaaagaccctaaaattctaaccgatatagaaataaaaattcacagggatttggattatt

SEQ ID NO: 40745 - DNA, 364 bp, Glycine max
gttgacaaccattatctctatgtgtgcatatgggctcaagggggatgtttcaagttctcgtcttttgaacaccattcctcagtccatttcacatcaaactgtttggaatcaaatggcaacagtgagaacaccattgaatttcgattctagcaagcagagcttttgtcagttttctattgaccttctcggtggaggaatcttagtggacaaaactggagattggatcacacttatacaaaattctccaattagtaacttgctgagagttgctgcttggaagaaaggctgcataatggtcaagattgcgatgtctgggaatgcagcagtcaaaaggagtgattgggcctcattggtacaagtgttt

SEQ ID NO: 40746 - DNA, 381 bp, Glycine max
ctggctcaacgttgatcactgttccatgctgttaaagcctccggtctggctcaacttcagattttccccacaaacgagctttttccgggcacgaaactcgaggaattcgcgcatggcgcctccaatcctctcgctcgctcttccctcgaacaccggtcgagttctcagcattcaatctcacaccgttcaagggtatgttggtaatatatccgctgtcttccctctgcaactactgagatatgatgtcgatccaattaattccgtgcagttttcgaatcatacatgatatccgacgtttaagggtcaggttttgaatggacagcaactctgggatctaatcgaaggccttgaaggaaatgatttattgttctatactcactt

SEQ ID NO: 40747 - DNA, 408 bp, Glycine max
ctcgagccgaatcggctgagcggctcgagcggctcgagcggctggagctccaatctacaaggagaatggatgaagcgatgaagaggcaatgcaaagttaacctgtacggaactgcttttcccatgaaggaggagcttgacaggcaaatcctgtccaggttccagcggcctcctggaccaattccttcttcaatgctgggtttggagactgttacaggaagtgttgatcactttggttttgaggattgtctaaatgacccccgtgagtcagagactttccggccattagacatgcatcatgggatggaagttcgccttggtctatctaaaggaccagtgtacccaagtattatataattaaatttgactagtattctagtaccaaaaaacaagattttgtgatcgaaag

SEQ ID NO: 40748 - DNA, 232 bp, Glycine max
gaaactgacaattcaaaatggatgattactaccttactagtgtcaaataaatatttcatgtgtttttatccaagtaattagcaagttgttcagaaaacgttaaactccaaaaaacataacatttaaaaaaaagttatttgagttgctagaatccaataaattataacccataaaggttgtaactcatttctttttgctaggggaggtgcccagaatcaggcttgttataaac

SEQ ID NO: 40749 - DNA, 387 bp, Glycine max
tttttccaaggctcgcgtaattgagatcgaagccggaaacaaatttattgacattaagcagtttttcttgttcaactttttcaaaagcattttgttttcttaatattatagggatgtttaaatatatacacacattttgatttattttatactatagtagttatttatccttcgaatccttaggcaaagtagatactttgcagattggacataatttcctcaaagatataccattttttaatgcagtttacatggttgtcatgcccatatgttttaagtgtttcaacatctttcatgtttttgtactctttcagacatattacacatttttccttctttgtgactttgtttatatgaacaatattttgtttattgttaaaaattttt

SEQ ID NO: 40750 - DNA, 159 bp, Glycine max
aaaaaaaacacacacttcacacatcattacgacaattaaaagaggtgtggaaattttcaaataggcagagcatactcaacaagagggtcatgcctaatttcctttattgaattaaacaaacgaacaagcgaaagaaaacacaaattccagatcatgcag

SEQ ID NO: 40751 - DNA, 255 bp, Glycine max
aaacacactcattgcacatagtaatgcgctttatttaagtgaataaaatacttcatactagtttacaaatgcaaaagggcactcattaaccagatttttgggacttttacaggtcttaagaagttgcgtaagtattggattagtggcgtttgaacttaaaatttatttctttaacgccaaaaagatcatccagttaatgctttggaaaaggatcaacttttgttagaataaacattttttttatctttttcaaat

SEQ ID NO: 40752 - DNA, 356 bp, Glycine max
  unsure (1)..(356): unsure at all n locations
gaacgcctaatttcaggagaggggttcttttaatttatatctcatcaanaattcaaacttttagaaaaatgactgaacctataataacatttatttatttatctccacatatcctccctcgacaactataactaatttacttcacatgtttccattctatggcttcgtttaaaaacatcacttgatcattttcaagggtctcatcacagcattgtcttcatggccccatacacggctatgctcttcccaaccaggctctgtggttgcattaaacacatatgaaacattggtgtgaatgtaagaaaacctcacggcaatcttcgtcacatgcccaggtattatcttgaacacattct

SEQ ID NO: 40753 - DNA, 189 bp, Glycine max
gctcataacgttaatcagccccaagagaaagatttgctggagggaaaggggtcctttgatattaaatctcgctctagattggaaaaagttttctttacaaaagcacaatttgtgagtgggaaaaccttcatatttgttttaaatggtgctggttcacactttttataagattttccttcaaaggaagat

SEQ ID NO: 40754 - DNA, 266 bp, Glycine max
gttgacaaccataattcatttgtgtgcatatgggctcaatcctggggggtcaggttctcgtcttttgggcaccattcctcattccatttcacagcatactgtttggaatcaaatggcaacagtgagaacaccattgaattttgattctagcaagcatagcttttgtcagttttctatagaccttctcggtggaggaattctagtggataaaactggagatcggatcacacttatacaaaattcttcaattagtaacttattgagag

SEQ ID NO: 40755 - DNA, 418 bp, Glycine max
  unsure (1)..(418): unsure at all n locations
gtggcaaccgtaagggcgacaagggttacttcatcgagcccacaatcttctccaacgtaaccgaggatatgaagattcagcaagaagagatcttcggccccgtctgcacaatctccaagttcaagacaaaggccgatgtcatcaagattggtaacaacaccacatacggtcttgctgccgctgtacacacatccaacctcaccactgccattgaggttgccaacgcgctccgtgcaggaactgtctgggtcaactcctacaacactcttcactggcaacttcccttcggggggtacaaggagtctggtattgggcgcgagttgggagaggcggcgctggacaactacatncagaccaagaccgtgtctattcgtcttggcgatgttctgttcgggtaagcgctatgctggtttttagc

SEQ ID NO: 40756 - DNA, 277 bp, Glycine max
attctcatgaatttgccaaatgctgtactttcaatgtggggatttttcgttggagatctcgtctttaaagtttctaatatgacttctccctacattaaatgtacagtctctttcttcatagcatttgcaaattcggctggatgatccatcacttttgatgcttttccccacaagctgtcgcagttcggagagattcacgaacattgtgttttgaaattctcacaatacgaatattttacagcttggttcattcaggtgccttctttatcaacttttg

SEQ ID NO: 40757 - DNA, 349 bp, Glycine max
tggaaatgcatgaagcttatcttgtcaatctcgtaaatgtgctacgagaattgtatttgcacagtccataggaagctcgccaattgagaaggaaagctctctctcgtattgaatggctgcaaaaagctgatgttgcctaccatagcacagatcgaagagtttcattcgatgcagaggatgatgaatgctcctgattcaaatgacaatattgatttactgttgagcattgatttgatgggtttacaaggagcatgtaaagcttttccaaacaaaattgtttttgaagataagtttgtgtggctaacacatcagaaattctttgtggaaatttttcagtggtttcttggtt

SEQ ID NO: 40758 - DNA, 393 bp, Glycine max
ctagatcagaaccacattcctgggaattgatcttcccaatagaggtatgtggtcctaataatggttttgaaatgtggagttctgagtgggcaaatcaaacttcatggcatttgagtttccttattgacaatcccaaacagtctacagtttttgatattctcttgggaatctctcaagattttgaaattgctggtaatactcttatgccagctttttctgttccacaggctactgtcagatcttttgaaaatgctggatcctctgcatgatctggaatttgtgcttttctattgcttgttcgtttggttaattcaaataaaaggaaaataggcctgaccccttttgttgagaaatgcctctgcctaatttgaaaaatttccacacccttttttt

SEQ ID NO: 40759 - DNA, 283 bp, Glycine max
tttggaaggatgtcttacgttgctcataacgttaatcagccccaagagaaagatttgttggagggaaatttttcctttgatattaaatcttgctctagattggaaaaagtttcctctacaaaagcacaatttgttagtggaaaaaccttcaaatatgatataattggtgctggttcacattctttagaagattatcctgaaaaggaagatcaagataaacccataatgattgatgccagattgagacaaagaatatatctctaatacaatgaggttcaggctc

SEQ ID NO: 40760 - DNA, 335 bp, Glycine max
gcacgcgcgcgtacgctcgcaattcggttcgagatggctgttttcttgaaatgtggcaacttgtttgtctatttggattctcttgctgcaacacccatcttctcagattcctgcttcagctcaaatgctatagccaccaccaatatccttgatttatccaaggatcctcgggtttttgaatggctggttggtatcaggaggaagattcatgagaattcagaactggggtatgaggaatttgtcaccagtctgctgattagagttgaattggttgaactgggtatcttatataaacaccccgttgcactcacggttgtagttggctttatagggac

SEQ ID NO: 40761 - DNA, 384 bp, Glycine max
gtttttaacaaacagctacagtacagagcatttcgatgcatgtgggtggacaaaatcagaaccacattcctgggaattgatcttcctaatagaggtatgtggtcctaataatggttttgaaatgtggagttctgagtgggcaaattaaactttatggcatttgagttttcttattgacaatcccaaacagtctacagtttttgatattctcttgggaatctctcaagattttgaaattgctggtaatactcttatgccagctttttctgttccacaggctactgtcagatcttctgaaaatgcggaatcctctgcatgatctggaatttgtgtttccattcgcttggtccttttgttctaatttaaatataggcaaatttggca

SEQ ID NO: 40762 - DNA, 208 bp, Glycine max
ggatcttccagctgacctgagagctcggccacaagtccgacggggagaccgtccggtggcttctggagcacgccgagccggccatcattgaggccaccggcaccggtacagttccggccatcgcggtctccgttggctggacgctcaaaatcccaaccaccttatcgtacgagaaagaagccgttttctacgcctcaaacaagaagcg

SEQ ID NO: 40763 - DNA, 289 bp, Glycine max
  unsure (1)..(289): unsure at all n locations
atgcacgcgnacttaagctcggtattctggttcgagggctgcacaagctagtgtttcatcatcatctcttaccttctcaggcgaggctacaagacaaagtctcggaccaagatcactccaatctccatttggctttttaagaaaagcctacttttcttgttaaggctgctgttactccccctgtcaagcaaggatcagacagacctttgaggtttgcatcaaagctaactttctcctacttgcatgggacacttcccggtgactatggacttcgaccctctcgtgactt

SEQ ID NO: 40764 - DNA, 265 bp, Glycine max
gctactaaactggaatttggctcgagtacagtttgttcaccttatgtcgctctgtacaacttgtgggtgatgttgccatatttgtatgcaatggtgcacgatagttcagtgtttcaataccaggtgattctgtcattggtgtcaagtcgacaactataaacaagatgtgtgcatatgggctcaattctggtatttcaggttcttagcattttgggcaccattcctcagtccattttacagccaatctgtctggaaccaaatggca

SEQ ID NO: 40765 - DNA, 377 bp, Glycine max
cacaaaagcaatgactatgtcatttaatccaaacccgtgttctgatgcatggagtttggaatttctgaagcgtaccggatttcattgtgatatcatttgtgtcactggatggactgccactccaatgcaggatgttcaggttacaattgattggtttatttcctctcaggaatgtgttcccaggacttattgtgttttaaatccacaaaatccttttgtgttgaataggtggatggggaaactgactttcccccagggcactttccgaagtgttaagagaatgcctttttctatagggggaggagctggtgcaaagaatgctattctcatgaatatgccaaatgctgttttttcaatgtggagaatttttgttggag

SEQ ID NO: 40766 - DNA, 369 bp, Glycine max
gaattttgattctatcaagcacagcttttgtcagttttctattgaccttttcggtggaggaatcttagttgacaaaactggagattggatcacacttatacaaaactcttcaattagtatcttgtagagagttgctgtttggaagaatggttgctaaatggtcatgattgtcatgtctgggaatgctgtattcataatggtgttattgttccttattggtacaagttttcttaacaaacatctacatttcagatcttcttgatgaatgtaagtgtacaaaattttatccacatttctgtgaattgactttttctaattgtggttatgtgcgtcctaattattcgtttcgaaatgcggagtttttattgg

SEQ ID NO: 40767 - DNA, 359 bp, Glycine max
ctcgagccgttgaaattttcacaagaggaatttcttacagcgtggtcaactcaggtgcgggctgcatcaactatgatggctgatgggtgtccatatttgtatgctatggtgcatgatagttcagtgtctacaataccaggtgattttgccattggtgttaagtagacaaccatgaacaatatgtgtgcattatgggttcaatcctggtatttcaggatctcgtctttatggcaccattccttagtctatttcacagtttacttgtttggaattaaatgggcaccagtcgagaacaccattcgtattttgattttttgcaaagtaaagctttttgttaaatttttctgattgaccctttc

SEQ ID NO: 40768 - DNA, 328 bp, Glycine max
caaaatccttttgtgttaaataggtggatgggaaaattgactttcccccagggcactttccgaagtgttaagagaatgcctctttctatagggggaggagctggtgcaaagaatgctattctcatgaatatgccaaatgctgttctttcaatgtggagatattttgttggagatctcgtctttgaagtttctaagatgacttctccctacattaaatgtacagtctctttcctcatagcattaggcgatttgtctgatgataccatcaattatgaggcttttccccacaagttggtgcagggtggggagatgtacgaaaaaattgtat

SEQ ID NO: 40769 - DNA, 285 bp, Glycine max
attgaagttaaatgccttagccttccctacaactccaaacacaaagacattatcatccatggctgcctccgtcttcactgtcggagctgtcaacagagctcttttgaacctgaatggttctggagctggagcttaagcttccagctaatccttattttgggaccagcttgaataaggttattgcctctagggtccctaatagcaaggtttccgttggaagctttaacattgttgctgtagaagagaagaaagagattgaatatacccttcataccgactatggac

SEQ ID NO: 40770 - DNA, 190 bp, Glycine max
caaggatcatgttaagtttttccaatcaaaattgtttttgaggatgagcttgtgttggctaacacacatataattcttctatggaaatttttcagaggattcttggttaccaattatggtgaattgtctttatcctgttagataattaccttcagaagctgtccgtgttaatgttacatgtggtagtgga

SEQ ID NO: 40771 - DNA, 383 bp, Glycine max
ggcttgcaattgaagttgaagtcttgcccttctctcttcaactgcaaacacaagacatcatcatccatggctgcctccgtctccactgtcggagctgtcaacagagctcttttgaacctgaatgggtctggacctggggtttcagctcccagttcatccttctttgggagcagtttgaagaaggttattggttcaagggtccccaacataaagatttcctctggaagcttcaagaatgttgcttgttgaagagtacaaagatattgaagagaccctatttaccgacaaggacagatggaaaggtcttgcctatgattttttagacgaccaacatgacattacatgaggatagggcttggttgactcccttttcaagctctcac

SEQ ID NO: 40772 - DNA, 142 bp, Glycine max
acttccaagcatatgtcaccggagaaggtcctgttgagaacctagcaaaacatctcagtgacccttttggcaacaacttgtttactggtattgtcgggtttgctgttagagctccaactgtgtaaattatttgtggtttata

SEQ ID NO: 40773 - DNA, 284 bp, Glycine max
gaagagtttacttcataatattagttggatcttctgcataatcatattcaatatgattttctcaagaggcaacaccgccacgtctgccatattgctgctccttggaatattatcttccactggagtagaatttacgggggcacaatctgttggtgtgcgttatggaggaaattgaaacaatctaccaacaaagcaagcagcggccggatcttctcaaatcctacacaattggctaatatcggtcaacctatccacactaaggattccttttatgcccctcaaag

SEQ ID NO: 40774 - DNA, 331 bp, Glycine max
gctccgaattattctcgagcaatcttttaaacctctttctagaattgcttttgcacaaaacagagcgaattttgtcatttactaatgaaagctttatatcgtttagaatagcttcaaaaagctgatttacctaccatatcacaaattgaagagtgccattcaaagcatatgatgataaatgctccagattcaaatgataatattgattaactcaacatcaatgaaacaattggttaacaaggtacatattaaattttttatcaaacacaaattgtttttattgatcggtattaaataggcattacacactttatttctttgatgcaaattt

SEQ ID NO: 40775 - DNA, 409 bp, Glycine max
  unsure (1)..(409): unsure at all n locations
gcaattgaagttgaagtcttgcccttctctcttcaactccgggcacaagacatcatcatccatggctgcctccgtctccactgtcggagctgtcaacagagctcttttgaacctgaatgggtctggacctggggtttcagctcccagttcatccttctttgggagcagcttgaagaaggttattggctcaagggtccccaacacaaagatttcctctggaagcttcaagattgttgctgtagaagagaagaaagagattgaagagacccagcagaccgacaaggacagatggaagggtcttgcctatgatatctcagacgaccaacaggacatcacangaggaaaggggtttggttgactcccttttncaagctccacaggatgctggaactcactatgctgtcatgag

SEQ ID NO: 40776 - DNA, 273 bp, Glycine max
  unsure (1)..(273): unsure at all n locations
aaaaagacgcacgcgngcgaaagacaggaatacggctcgagggaaaggcacactgttttcaaacttattggctcaccttctgggtgtgttttttacactgaaggaggtcaattgaccaatacaattctgcgttaatcttacactgatgtactgcttgatgagattgagaaagcccatcctgatgtgtttaacatgattgcttagattctgtaagatggaagactaacagacagtatggtcagaacattctatttcaagaacacacttcttata

SEQ ID NO: 40777 - DNA, 364 bp, Glycine max
gttgggtttacaaggagcaggtaaagcttttccaaacaaaattctgtttgatgataagcttgtgttggctaacacacaagaattctttgatggaaattttccagtggattcttggttaccaatttttgtgaattgtctctatcctgtaagtcaattaccttcagaagctgtcgttgtaaatgttacatgtggtagtggacgtggtggtttacccaccactgcttggattaattatgcagtttacatttcgattcttatatttcaacataaacattcactacagcctttgggaaaggtaataaattttgtttctcttactagactttactccttttccatattctttcactgtcttgttattttt

SEQ ID NO: 40778 - DNA, 385 bp, Glycine max
ctcgagccgaatcttttcccgattactcaccacatgacactgcgggctgtttgatatcggatggcgacacggataacaccattgtattgtggttctagcaagcagggctgttgtcaggtttatattgacctcttcagtggcggcttttatgtggacacaactcaatataggatcacacttatacagaagtgtccaattgggaacttattgggagttgctgctgggcagaaaggactgctaatggacaagattgtgatgtctgggaatgcaatagtcaaaaggagagattgggcctcattggtacaagagtttttaacagacaggaacaggacagagcattttgatgcatgtgagtggacacaatcagaaccacattgctgggaat

SEQ ID NO: 40779 - DNA, 401 bp, Glycine max
tacaactacaaaggttgttgtaggagataagatattgaagtggtggctaagttcctaacacgtgcagtgaacaatggcctctgcatcagcatctcttctcaagtcttcacttgttcttgacaagtctgagtgggtgaagggacaaacacttcgccaaccttctgctgcatcagttgtgagatgcaaccccaccaccccatcaggcctcaccatcagagctggttcctatgctgatgagctcgttaagaccgcgaaaacagtggcttcaccagggaggggtgtgtgtgccatggatgaaatcaaaactacctgtgagaagcaacgggctccaattgttctagatagcactgaataatagccgcctggcataccgtaccctccttgtgacagtttcaggactt

SEQ ID NO: 40780 - DNA, 321 bp, Glycine max
gccagccgtgctgatattgctcacattgatattgcttcaggtgagattggtaagaacgagctgccgtatgtgtactgctgggctgattagaatgtggcattctaggggattaatcgcatgatccagagcagaggggttgcaaggaatcttgattttagaggttggagggaagaactgaatgagcagaaacgatagttaccttttagttataatacttttgagaaagagatttctgctcagtatgctatacatgttcttgacgagttaaccaatggtgaagctattgtgagtaccggaattggacagcaccagatgacggct

SEQ ID NO: 40781 - DNA, 207 bp, Glycine max
aaagccttagccttccctacaactccaaacacaaagacatcgtgatccatggctgcctgcgtctccactgtcggagctgtcaacagagctcttttgaacctgaatggttctggagctggagcttcatctcccagttcagcctactttgggaccagtttgaagattgttattgtcttaagggtctctatcagtaaggttttcagtttg

SEQ ID NO: 40782 - DNA, 210 bp, Glycine max
gctcaatcctgttatttcatgttctcgtattttgggcgcggggtcttattccatttcacggcagactgtttggaattaaatggctacagtgagaacactattgaattttgattctagcaagcagagtttttgtcagttttttattgatcttttcaggtgaggtttcttagttgacaaaactggagaatggaccacacttttacaaaattc

SEQ ID NO: 40783 - DNA, 351 bp, Glycine max
gttttgtgggtggctcttgaggacaaggcgagtttatggtcacggcttcattatgtttcgcgtagtaatctgcaaatgcaagaagcttatcttgtcaatctcgtaaatgcgttacgagaattgtatttgcacagcccagacgaagctcgccaattgcgaaggaaagctctctctcgcatagaatgggcgcacaaagctgatgtgcctaccatagcacagattgaagagttccattcgatgcagacgatgatgaatgctcctgattcaaatgataatatttgtcttactgttgagcattgatctgttcgcgttacacggagcacgcaaagcttttccaaacaaaattgtttt

SEQ ID NO: 40784 - DNA, 407 bp, Glycine max
gataaacttaattcattttactatcttctttttcgagtgtttattgaaaaatttattcttacatgacctaaattttgtgtttatggagcctaaattgatatatatcttgacctttcaattttcaggaactactatagatgcactcacaaatttgaccaaggttgccaagcaacaaaacaggtgcaaagagttcaagaggaaccaatcctatacaagaccacctactatggcctccacacttgcaagaacttggcaaaccctgagatcatacttgaccctatgtccccttcatcctcatccaagttccttagctttgacaactccttcccaaccccatcaaagcaagagtgcccctttctctcatcttctaatttgccatcatcagtgaaaggtgagtgcaaggagga

SEQ ID NO: 40785 - DNA, 407 bp, Glycine max
tgaatatgtcaagccttactttagtggttctaaattgaaaagctttctagctagtcataacatcaccattactgatggtattgacaaaactagtgcaactttgcaatttagaaagttagcagattgtgattttctcaagagaaactttaagcagatgtctaatgttttgtgggtggctcctgaggacaaggcgagtttatggtcacaactttattatgtttcgtgtaataatctggaaatgcaagaagcttatcttgtcaacctcttaaatgtgttactgagaattgattttgcacattccaaatgaagctcgtctattgagaaggaaaggctctctttcgtattgaatggctgcaaaaagctgatgttgcctccatagcacagattgaagaattccattcgatgca

SEQ ID NO: 40786 - DNA, 387 bp, Glycine max
cacaacttcattatgtttcgtgtaataatctggaaatgcacgaggcttatcttgtcaatctcgaaaatgtgttacgagaattgtatttgcacagtccagaggacgtttgcctattgagaaggaaagctttctcttgcattgaatggctgcaaaaagctgatgtgcctaccatagcacagattgaagagttccattcgatgcagaggatgatgaatgctccctgatccaaatgataatattgatttactgttgagcattgatttgttgggtttacaaggagcaggtaaaggtttttcaaacataattggtttcgatgataacgcttgtgttggcttaaacacaagaaatctttgattggaaaattgtcagtggattcttggttaccaa

SEQ ID NO: 40787 - DNA, 435 bp, Glycine max
aaacgcacgcgggcgtaagctcggaattcggttcgcgcaaaaacaaagaaatatattaacccttcttcaacacaaccatgtcggtgctcttctgctattcagcaatcaccattcactggtcaaactgctctgaagcagctcaatgagttcgttcgcaagaccgttggcgccggcaaaggtcgcacttacattctccgcaccttcaatagtgctccttatagcatttggtatggccctgaccgtcccaagtacttgggtccattctcggagcatattccatcatacctgaccggagaattccctggtgactacggatgggacactgctggattatcacctgacccggaaaccttctccaggaaccggtatctggatgtgattcacatcatattggcaatgcttggtgcccttggcttcacctttcccagagatcct

SEQ ID NO: 40788 - DNA, 404 bp, Glycine max
cgccagttctgatatttacaccatctgctctcaagactgtgaattgtggaatcctgcttgcacaaaagcaatgactatgtcatttaatccaaacccgtgttctgatgcatggagtttggaatttctgaagcgtactggatttcattgcgatatcatttgtgtcactggatggactgccaccccaatgcaggatgttcaggttacaattgattggtttatttcctctcaggaatgtgttcccaggacctattgtgttttaaatccacaaaatccttttgtgttaaataggtggatgggaaaattgactttcccccagggcactttccgaagtgttaagaaaatgcctctttttatagggggaggagcttgtgcaaagaatgctattctcatgaatatgccaaatg

SEQ ID NO: 40789 - DNA, 388 bp, Glycine max
cgccaatggtgaaggaaagctatgtatcccattgaatggctgctgaatgctgaacagtctaccatagcacagattgaaaagctccataacgggcagaagatgataaatgctgaagcttcaaacaatgatatggcactactgctgagcatgaatacagtgagtatacacatgactacgaaagcttaaccaaaccaaattgtttttaatgataagcttgtggtggataacacacaaaaattctgtgatggaaatttaacagtggattcttggtcaccaattattgtgaatagtcaatatccagtacgaaaaataccttcaaaagatgaaatattgaatgttacatgcagcagaggaccagtgtattatcagcactctacaaacattattt

SEQ ID NO: 40790 - DNA, 374 bp, Glycine max
aagaagaggcacgcgaacaaagctcggaatacggctcgagatctctagcaaaaacttatcatctagatctgagttatatcctgtcgaatgtagggttacctaaatggagcaacacataaattatgaattaggagcctcataccaatggttctgttctggatgtatgttttgctaagcagacctcatagatttgtctttcgacattcgaaaatggaaaagcgtggtttaataaggaccatattaaattttacatccatttgattcgagcgtgcactgtgtgaccgtatagcctggtgttacattgtcaaagaaagtacgcgttgacacttggttttcgctcggatcagtatgaatataaacattgtactggaaag

SEQ ID NO: 40791 - DNA, 394 bp, Glycine max
  unsure (1)..(394): unsure at all n locations
ctcgagccgcttgagacttatcttatcccgagtgagtctccaagaataaatttttcactgaaaagaaatcatttttatcattaatattaatnaaaatatgataaaaaaaaaaaaagagagactagagtgccagaaactaaataaaggttatgtgaagttaagaactaaagtgattgatcattacagcagttttgcacctgaaagtcagtttcaagggaggaagtaaagcagtttatatgtcgtctcattatgtggactacatgggacatactttatcaatatatacttcaagttccttgtaagttaagttcttgttaaaatgaaattgatgttgtgcaggcaaaaaagaagaaattggtgtcattcgttaccatatggtacatgtggatgatgt

SEQ ID NO: 40792 - DNA, 357 bp, Glycine max
  unsure (1)..(357): unsure at all n locations
ggaaaatcgactttcccgcacggcacttcccgaagtgttaagagaatgcctctttctatagggggaggagctggtgcaaataatgctattnncatgaatatgccaaatgctgctctttcaatgtggagatattgtgttggatacctcgtctttgaagtttctaacatgacttctccctacattaaatgtacagcctataccttcataacatttgtaaattcggctgatgataccatcaatttctaggctttttcccacaagctggtgcaggttgtgaaagattcaggaaaaagatgtctcgaaatttttacaagaggaattttttacagtttggtcaactcaggtgcgtcctgcaac

SEQ ID NO: 40793 - DNA, 399 bp, Glycine max
  unsure (1)..(399): unsure at all n locations
ctcgagccgattcggctcgagctcgagccgctcgagccgccggagatggcaggacatcaagaaccctggctctgtcaaccaagaccccatctncaagcaatacagcttgccccaacatgagtgtggataccctggtagtgtgtttaaccccttgaactttgcacctactttggaggccaaggagaaggaacttgccaatgggagattggctatgttggcattcttgggattcatagttcaacacaacgtgacaggcaaaggaccatttgagaacctattgcagcacctctctgacccgtggcacaacaccatcatcaatacaattcgtggctactaagtttgtatccaatgacatggataagcctgtgtccttctcgtgtaatcctgaatggatgaatt

SEQ ID NO: 40794 - DNA, 452 bp, Glycine max
  unsure (1)..(452): unsure at all n locations
acaccatagaagagatatgacatgcactcctcccttacctaagctattcagttcgggttgaggcaaacaaaaggctgtttaatggtcaagattgtgatgtctgggaatgcagcagtcaaaaggagtgattgggcctcattggtacaagtgtntttaacaaacagcaacagtacagagcattttgatgcatgtaagtggacaaaatcagaaccacattcctgggaattgatcttcccaatagaggtatgtggncctaataatggctttgaaatgtggagttctgagtgggcaaatcaaacttcatggcatttgagttttcttattgacaatcccaaacagtctacagtttttgatattctcttgggaatctctcaagattttgaaattgctggtaatactcttatgccagctttttctgttccacaggctactgccagatcttctgaaaatgc

SEQ ID NO: 40795 - DNA, 399 bp, Glycine max
  unsure (1)..(399): unsure at all n locations
gcagaagaacaagtagttgagatctaagaaggagaagcaaatggcttcctcaatgatctcttgcccagctgttaccactgtcaaccgcgccggngccggcatggttgctccattcactggcctcaagtccatggctggcttccccaccagaaagaccaacaatgacattacctccattgctagcaacggnggaagagtgcaatgcatgcaggtgtggccaccagttggcaagaagaagtttgagactctttcctacctgccagaccttgatgatgcacaattggcaaaggaagtagaataccttcttaggaagggatggattccttgcttggaattcgagttggagcacggtttcgtgtaccgtgagcacaacatgtcaccaggatactacgatggacg

SEQ ID NO: 40796 - DNA, 363 bp, Glycine max
gcccggattaccacttcttcgacggaaccagcgagaggcagaactgcacagaaaagaaccatatccaatggacctacaacgctggaatccacatgtctggcgttgcagcgttgtggaacatgtcagaaacgaacggtgatgcggaagcagcgggcaggtggcgagagcgcctgggtggcatcattaatggaacagacatcttcttcaacgccgaaggcgccccaggtgtcatgatcgagatggcttgcgagcgcaacggactatgcgaccacgaccaacgctcattcaaagcctacctcagccgatggatgggctacacgatgctgagcgctcccttgacccgcgacaggatcatgccaaaac

SEQ ID NO: 40797 - DNA, 368 bp, Glycine max
gcctttcctaatggagtgctgtgagcgcacggagaacgacaagaagggcgggcacttggctgagcgcatagccgacggccgcctcatccttcgtgagtctgcccagtgcgctgatgaagatgagaaggagttccagaacattactaagcatcgatacttcaacacaaacaatctatggatccgtctggacaagctccaggaagagctcaagcagcagggaggtgtcattcgtctgccgatgatcaagaactcgaagaccgtggaccccaaggactcaagctcgaccccggtgttccagctggagaccgctatgggtgctgccattgagtgcttcgacggggctggtgctgtttgtgtaccacgcaccc

SEQ ID NO: 40798 - DNA, 390 bp, Glycine max
gtcttggagcatcccttgccgccaaggagacgggcgaagagcgaagaactgttctgttcgtcggagatggatctttgcagcttacgctgcaagaaatcggcacgatgcttcgacgcggcgtgcacccgtacctcttcgtcttgaacaacgacggatacgagattgagcgacaaattcacggagagaaggcggagtacaacgacatccagatgtacgaccaccaggccctccttccgttcctggcgggcaagaagtcgaaggtgccgtacgagtcgatcgaggtgcacacgcccgaggagctgtcgaagctgctgaaggacgaggcattcaacaagccggacaaattgaggctcatcgaggtgtacatgccgcgaggcgacgcgccggcgg

SEQ ID NO: 40799 - DNA, 366 bp, Glycine max
ttgatgatgggatgccatcagatgatgatgttcccagagaagctggtatctgatggcataacgtcgtcagcaaacaaccaagtgcagcaagggaagcttccgctcggcaagccaggaaaaatatgacaggaatccatctttggatgatgaacttgccaaaagccaaatccccaacaatatggagtcagctcgctcatactcaagggtgtgcccatctcatgtgctacatttacaaccaagagaggcctttgatgtcacaaatgtacctaacattgtcccaccatatgaacagtcagaatacgctgggaactggcgcacgcatttaactatgcacgatattgctggtcatgacgcgcggggccttca

SEQ ID NO: 40800 - DNA, 376 bp, Glycine max
ctgagttacttctcctgatccatgttcggacgactgaatcagggtgccagacacttggctcgtccaatacccaactttgcgcatcgttccgccgtttcgttccgcccatcgataacgtcatcagtcatggcttcgacacagcaaaagagcctgatccacacggcaggttgtttggttatcggtgacgaagtccttggaggcaagacagtcgatacgaactcggcgtactttgccaaattctgcttctcattgggcatcaacttgcgccgcatcgaagtcattgcagatgatgaaggcgagattgtagaagccgtgcaacgcatgtccaagaactacgacatggtggtgacgagtggcggaattggtcctactcacg

SEQ ID NO: 40801 - DNA, 381 bp, Glycine max
aatttttcatcgccttcacagccgctcgcacctacgcgtccgcgcccaagaagaaaaagatgcctcccaagaagcaagtccaggaggtgaagcttccgctcggcaggccaggaaacaacttgaagaccggtatcgttggcctagcaaacgtcggcaagtcgactctgttccaagccatcaccaagtgctctcttggtaaccccgccaacttcccatatgccaccatcgacccagaagagtcgcgcgtcattgtcccagatgaccgcttcgactggctggtagagcactacaagcccaagtcggtcgttcctgcccacttgaccatctacgatattgctggtctgacgcgcggtgcctccactggtgccggtctcggtaacg

SEQ ID NO: 40802 - DNA, 372 bp, Glycine max
atcgacaacgtttattcaaagatccaagacaaggaggggatccctttttatacagcaacgccttatctccgccggaaagcaactcgaggacggccgcaccctgtccgactacaacattcagaaggagtccacactgcaccttgtcctccgcctgcgcggtggtatgcaaatcttcgtcaagaccctgactggcaagaccatcacgctcgaggtggaatcaagcgacactattgacaacgtcaagtcgaagattcaggacaaggagggtattcctccggaccagcagcgtctcatcttcgccggaaagcaattggaagacggccgtactctctccgactacaacatccagaaagaatcgaccctgcatctcgt

SEQ ID NO: 40803 - DNA, 357 bp, Glycine max
ctgtttcctgtgacttggagaatctttatcaggctgtgaatgatctttgcctttacaaaatggggggaaatctttatcaacgaattacaaaggagtgtgaagagcatatatctgtggcactgcagtctttagttggccaaagcccagatttgattgtttttctatccctagttgagaggtgttggcaggatctttgtgaccaactgttgatgattcgtggtatagccttgtttctggataggacctatgtgaaacaaacaacaaatgtacggtcattatgggacatgggtttgcaacttttcagcaaacatctttctctatcttcagaagtagaacataaaactgttactggtcttc

SEQ ID NO: 40804 - DNA, 431 bp, Glycine max
cgtcgaatgcacgcgtacgcaagctcaggattcgaatcgagtgtggcttccaaaatgtgttcgatctggaatcgcgagtgctgtcacgcgccggaaccttgtcctccctccctcacctccgcaagccgacgcgggaggccgtctacagcgcctccctcgacgccgtgaaggccgtgggctccgtcgcggacagcggaaacctgatttgggggaggcagctgcgcccggagctctgctcgccggtgctgaagaaggaagctgtcctcctccggccatgcctcgccaacgtctactcaccggccgagggtagtgattccgccggagaagcaaaggttgctacggcggagttcatcgacaagtacccggctatggtcaccggatttttcttcttcacgtggtacttcttgaacgagattttcaacatcctcaac

SEQ ID NO: 40805 - DNA, 332 bp, Glycine max
gctggttcacattcttcatatgattgtcctcaagaggacgatcaatgaaaactcaataagattgatgtctgattgagacaaatattagatgctcaatacaatgaggtgcaagctcagatggaaaaaaatttgtttaaattgtctctagatgatgtggaaactcctaaaggttccatgttggatctgaaaattactcaatctaaaattgcactttccaagaacacagttggaggaaccattctgtgtactgatctattgactaatattgtgacaaatggcaattgtaaaacaagtgttgatttgcaccgcactcatcgtattataggaatgat

SEQ ID NO: 40806 - DNA, 406 bp, Glycine max
cagcatatcagaggaggaattaaaacaaaaatttggaacttcaaaggagattatgaaatcagttgcttgtactttggaagggagaacttattcgtataatgatattaatatttcgaacgttgttgacgtagcaagccaagttgctggttgtgcatatgaatatggcactggatggggcaaacagatggcttggatatatggatcagtcacagaggatgtgctcaccgggctgacaatacataaaaaaggttggagatcagaattctgtatgccaagcccaattggcttcacaggttttgctccaggaggtggcccaaattcaatggcccaacaaaagagatgggccacaggattgcttgagatgttcttttgcaagcattgccctattattagcacactttttcat

SEQ ID NO: 40807 - DNA, 396 bp, Glycine max
  unsure (1)..(396): unsure at all n locations
tgaaaacaccaagtgaatctacacttattagagacttgtcattgacgatcaaggaaaaggatagtttactggtaatgggaccaagtggaagtggcaagacttctttgttaagagctatggctggtctatggaaaactggaactggaaagatcacatactatgtaaaaggtggagaatatcctgagcaatccatttgttcagatgtgaatactccagtaaataatgctaatgacacatatgaagcacgtggaaaatgcttaagcagaaaatctggaatttttttccttccgcaaagaccgtatatggttntgggtacccttcgtgaacaattaatgtatccaacttggacagatgacgtagttcctatgtcagacagtactaaaagaaaaaatgcac

SEQ ID NO: 40808 - DNA, 386 bp, Glycine max
  unsure (1)..(386): unsure at all n locations
ctttgggggggtgatgaaaaattgatccttgaaaggccccaccggctgttggcttgttgttcaaggatggcaatttgtaagaaagatgtttggagagttgaatgtggaatcccttctggatttccgctcacagttatttgcaataccatttttaatgaaatgctcattaaatatagctatgaaaaattactgccccaggctaaagctccaagtatgtttttacaantccttcaaaaatnttgtttctttgtgtgtgtatggtgatgataaacttaattagtgttcatgaatatgtcaagccttactttagtggttctaaattgaaaagctttctagctagtcataacatcaccattactgatggtattgacaaaactagtgcaact

SEQ ID NO: 40809 - DNA, 421 bp, Glycine max
cgacgtagccaaacctattcattaccgtcagcatggccccaaagagagtccaatgctgcatctcagtagacatagacgcggtagccggctggctcggctcctacggcggcgaagacagcacctcagacatctcccgcggcctcttcgccggcaccataggagtccgtcgcctgctaaaactcttctccaaatacaacatcaaaaccacttggtttatacccggccactctctcgaaaccttcccagaggaatgccggatgatcgtcgatgctggccacgagataggactccacgggtactcacatgagaatcctatagccatgacgttcgagcagcagactgctataatggataagtgttataagttgatcaaggagtttaccggcaagccgccgagaggaatcgtggcgccgtggtggga

SEQ ID NO: 40810 - DNA, 412 bp, Glycine max
gacaacggcagcatcgtggaggaagcggtagaagacgaatttgccgccggttcactgggaagtaacagatcttggggtgcgaggagcagtcgaagaggatcgggaggggagatgggaagccatagagctaggtttggagagatcgagtctagaggtgctgccttgacaagaaagggccacgagctctacctctccctgctcgctcaagtcccttctatcccgaacgagaccaatgagtcccatcagtccgctctcaaagccgtattccaccaattcccagacgactggccgacaatccgagaacaaggcctcgcatactttcgctactttgtcaagattgatatggaagcttctgtcaccacaatcaagcctggtcaagctaccatgactacggctgatgtaagcgaattga

SEQ ID NO: 40811 - DNA, 325 bp, Glycine max
gccatggaacgctgtgcgacgaggcaaactggacgtggggcgagacctccgttgcccgactgcgctctgctgcccctgattctgaagaggtcgaggccaatctcgcctacgtccgccacgtcaccaccttggaagccgaggagacgtcgggcgcatccttcttcgactgctttaggggcaccaaccttcgccgaaccgagatcaactgcgtggtatgggctgcccaaattctgtgcggcaatgccattctcgggtactctgtcgtgttcttgcaagccgctggtttttgcgagacccagacgctggaccttaacattgctctatc

SEQ ID NO: 40812 - DNA, 321 bp, Glycine max
aaatgaaaggctttctactggcatacatcaccattctgatggtttgcaaactagtgcactttgcaatttaaaagttagcagattgtgattttctaaaaaaaactttagcagatgtctaatgttttgtgggtggctcctgaggacaaggcgagtttatggtcacaacttcattatgtttcgtgtaataatctggaaatgcaagaagcttatcttgtcaatctcgtaaatgtgttacgagaattgtatttgcacagtccagaggaagctcgcaattgagaggaaagctctctctcgatgaatggctgaaaaagctgatgtgct

SEQ ID NO: 40813 - DNA, 360 bp, Glycine max
aaaaaaaaaaaaaattaaaaaaaaaaaaaaaaaaaaaaaagaaggaaaaaaaaaaaaaaaaaaaaaaaaaaaaaaaaaaaaaaaaaaaaaaaaaaaaaaaaaaaaaaaaaaaaaaaaaaaaaaaaaaagggggcggcccccccttagggacctcgtccccccggaaataaattccggcccggtccctgggggcgtcccagttttccttatagggggtcgttttaaacctgggcgaaataagggccatagctgttccctggggaaaattgttttccgttaaaaattccacacaaaatacaacccggaagcttaaagtgtaaaccctggggtccctaatgagggacctaccccacattaatt

SEQ ID NO: 40814 - DNA, 404 bp, Glycine max
cgcatctcaaagccaaagttgatgctggttttaagctgaggggactcatcaacacacatcaccaccatgaccacgccggaggaaacaaagagatttctaaagcattcggacttccagtagttggcggtcgtgattgtgctctcgtctcggagacacccagccatcaatccaatttcaaaattggctccatcaacgtgactgcattgcacacgccctgccacactcaggatagtatctgctttttcttcgaagatggtcaggatcgtgcagtgttcaccggcgacaccatgttcatcggaggatgcggacgctttttcgagggcacgccaaaagagatgcacaaagccttgaatgagactctcgcatccttgcccgacgacactaaggtctacccaagccacgaa

SEQ ID NO: 40815 - DNA, 384 bp, Glycine max
aagagctatgacgacgcacgcacgcgtacgttagcttggaattcggatctagcatccttcaatttttgtttcaggttcgagatccatggtgagggttgaagcagaaggagggaaggggtgtaacggctccttcttccgcgcgtttgacatggacgacaatggggacgagtgcatggatgagtactttcataaacccgagaagaagcgtcgtctctccatgaaccaggttcagtttctggagaagagtttcgaggaggagaacaagcttgaaccggagagaaagaccaagcttgccaaagaccttggtttgcggccacggcaagttgctatttggttccagaaccgtcgagctcgctggaagaccaagacgctggagaaagatta

SEQ ID NO: 40816 - DNA, 202 bp, Glycine max
caacaactctgtttgtctgatgggagtgcatatttgtatgccggggtgcaatgatagtcagcgtctacaataccacgtgattttgtcattggtgtcaagtagtcaaccataaacaatattgtgtgcatatgggctcaatcctggtattttaagttcttgtcttttgggcaccattcctcattctaatttttcagtaaaaatg

SEQ ID NO: 40817 - DNA, 350 bp, Glycine max
cgcctgaaatctattgttgttgcatggcaaacacaaaggtccgggttgacccgttgtatatccgatccaaattaaaaagatgaattttttcaggttagccggtgacatgacccatttggcctgcgttctcgtctttctccttaagatttacactattaaatcctgcgtctgtttcttattgtaaacttaagaactctatgcactcgtttttgcttgtcgttacttagatatctttacttattacgttttcttatattatatctttttttagttgattattttgggaagctaattttctattttgtggttcttgatgttccacaagtgttttttgtagattctttttacat

SEQ ID NO: 40818 - DNA, 347 bp, Glycine max
atcaattatgaggcttctccccacacgctgttgcacttaggcgagattcaagaaaaagtcgtgttgaaattttcacaagacgaatttcttacagctctgccaactcatgcgcgtgctgcaacaactctgtaggctgatgggtgttcatattagtatgcactggcgcatgatagttcagtgtctacaataccaggagatttcgctatttgtgtcacgttggcaaccatcaacactatgtgtgcctctggcctcaaccatcatattccaagttctcatctttagggcaccatttcctaatgcatttcacaacacactgtttcgaatcaaacggccacacatagaacacc

SEQ ID NO: 40819 - DNA, 378 bp, Glycine max
ggagattggatcacacttatacaaaattctccaattagtaacttgttgagagttgctgcttggaagaaaggctgtttaatggtcaagattgtgatgtctgggaatgcagcagtcaaaaggagtgattgggcctcattggtacaagtgtttttaacaaacagcatcagtacagagcattttgatgcatgtaagtggacaaaattagaaccacattcctgggaattgatcttcccaatagaggtatgtggtccttaaaatggtttcgaaatgttgagtttttgagtgggcaaatcaaacttcatggcatttgagttttcttattgacaattccaaaacagctacaattctatgatatttcttgggaattttttactattt

SEQ ID NO: 40820 - DNA, 396 bp, Glycine max
ggatcttgcattgctgcaaagttatcgggtatttactggtggtacaagactgcaagtcatgctgccgaattaaccgctgggtattataacccatgcaatcgtgatggttatgctgcaattatgacaatgttaaagacaaatgggatcaacttaaacattccttgtgttgacttgcacacattgaaccaacatgagggctttccagagacctttgcagatcccgagggactagtctggcaagtgttgaatgccgggtgggaagttgacctaccagttaccagtcagaatggatttccttgcctaaacagagttggctataacaaggttttggataatgccaagcccatgaatgatccagatggaaggcacttttcatcttttacttacctgaagctt

SEQ ID NO: 40821 - DNA, 382 bp, Glycine max
gtggaactgcttgtcccagagggctttatggtatcttttgtgaggaatgccctgttggtacttataaagatgtcagtgggtctgatagagctctttgtcatgattgtccccctgatgagcttccacatcgtgccatatatatttctgttcgaggtggtgtggcagagactccttgtccatacaagtgcatttctgatagatatcacatgccaaactgctatacagcttttgaagagttggtctacacttttggtgggccatggctcttcggtcttctactcttgggtcttcttatcttgcttgctctagttctcagttgtgcacgaatgaaatatgtagctggcgatgatttaccagctgttacgccctgctcaaatgacac

SEQ ID NO: 40822 - DNA, 399 bp, Glycine max
cgccgatcacggcttctggttcggtctcgagcaagaatacacgctgctcgacgagtttggctggccctacggctggcccaagaacggcttccctgctccccaaggtccttactactgcggtgtgggcactggcaaggtcttctgccgcgacattgtcgaggcacactacaaggcctgcatgtacgccgagattgccatctcaggcaccaacgccgaagtcatgcccgcacagtgggagtaccaagtcggtccctgccccggcatctctctcggcgaccagctctggatgtctcgtttcctgctgcaccgtgtggccgaggaattcggtgccaaggttacttttgccccgaagcccattcccggtgactggaacggcgccggtctgcacaccaacgtgtc

SEQ ID NO: 40823 - DNA, 379 bp, Glycine max
ctctaatgctagctcacaggtgatatatgcgaaaagacatgcatattattcatcggtgttataaattgtctttctggggggcgcgccagtgcatgtatttacaccatcttatgccaagcactgctgatggaggaatcctgcttgcccataggctttctctatgtcattgtgcctaaacccgtggtctgatccatgcagtttggtatctctgaatcgtactggatttcctggcgatatcatttgtgtccctggatgggctgtcaccccaatgcaggatgttcatgtttcaattgattggttaatttcctttcatgaatgtgttcccaggacctattgttgtttaaattcacaaaattctttttgtgttaaataggttgta

SEQ ID NO: 40824 - DNA, 373 bp, Glycine max
tgataacttaattagtgttcatgaatatgtcaagccttactttagtggttctaaattgaaaagctttctagctagtcataacatcaccattactgatggtattgacaaaactagtgcaactttgcaatttagaaagttagcagattgtgattttcttaagagaaactttaagcagatgtctaatgttttgtgggtggcatcctgaggacaaggctagtttatggtctcaacttcattatgttttctcgttattattctttaaatgctaatatgctataacttgttaatcttgtaaatgttgtatcgagatttgttttttcacagtccatatgatgcttgccctatttagtaagaaagctttttttttatttaa

SEQ ID NO: 40825 - DNA, 376 bp, Glycine max
gaaaacctcctatataaggcaaagttgcctttggctgtaaccttaatagcacaggtggcaccgttgggtttttaaggactggcttttttaccatttaattcttaaaaccttattctttttggttcattcataagcactgccatcagcccaaacctcccaacagggtcacagggactaaagaggggtaccaccatgtcggacgatgaaggggaggagaaagagttggatctctcttctgcagaagttgtaaccaaatacaaaaccgcggctgagatcgttaacaaggccttgaagctagttatttcagaatgtaaaccaaaggcgaagattgtggatatttgtgaagaaaggggattcatacattcgagagcaaact

SEQ ID NO: 40826 - DNA, 416 bp, Glycine max
ggaatttggtttcggggccaccagttggcaaaaaaaagtttgacactctttcttacctgccggaccttgatgatgcacaattggcaaaggaggtaaattccctctttaggaagggttggattcctggctgggaatccgagtggaaggtcaattcttggcaaacactttgggttaaatcataaattttttaattcttagtttgtttaaacttattttcaaaaaataatgggcttctctttgctaagtgtgctaaaaagtacctttttggaaaacaaaaacaaaaaaatggttgtgttccaaaatttaaatttatctaacagatttttctatttgagagttatcaatatgtatcaaatctgttcctatctctgaccaaattttatttcttccaaaacaagcaacttggttttgagttt

SEQ ID NO: 40827 - DNA, 421 bp, Glycine max
ttccttaggttcggaattcggttcgagggaatcctgttggcacaaaagcaatgactatgtcatttaatccaaacccgggttttgatgcatggggttgggaatttttgaagcgtcctggatttaatggggatttaattggggtaactggatggactgccaccccaatgcaggaggttcaggtaacaatggatgggttaatttcctctcaggaatgtgttccccaggacctattgtgttttaaaatccaacaaaatccttattgtgttaaaatagggtggatggggaaaaattgactgttcctccgagtgcactttcccgaagtgttaaagagaatgcctctttctatagggggaggagctggtgcaaagaatgctattctcatgaatatgccaaaatgctgtctttcaatgtggagatattt

SEQ ID NO: 40828 - DNA, 204 bp, Glycine max
tttaccttccattgcacccgtccgtaagctcggaattcggttcgagcttacgttgctcataacgttaatcagccccaagagaaagaatttgttggagggaaaatttttcctttgatattaaatctcgctctagatggaaaaagttccttacaagcacattgtagggaaacctcaattgattatgggctggtaatcttaaaattt

SEQ ID NO: 40829 - DNA, 360 bp, Glycine max
ccttccttaagctcggaattcggttcgagctcaagccgttcgacccgcgaaaaaaccaactccttaagttcatggcaccccccaacccaaccgaattttcctttgccatggaaagaaccggccaatgggttttttcccaaaaaatcccaaccgttgtaattgttgcagttgaccaaaccaatttttctttccacaggttatttctggcgggaaagagtaactacgtcaaaaaaagtgataatgggaatcagagggagagtgacctaacaagaaatagagatttccgacataccctggaggatcagaaagctttgaaaaaagcggcgaaattctgtttacggcgttaaacttcgagaatca

SEQ ID NO: 40830 - DNA, 461 bp, Glycine max
gacactctcgaagagctttgacctcgcatgccccccttccttaacctcggaattcggctcgggatgataacttaattagtgttcatgaatatgtcaagccttactttagtgggtcttaaatggaaaggccttctagcctggtccttaaccatcccctttcctgtgggattggccaaacctaggccacctttccatttaaaaaggtagccgattgtggtttttctcaaagaaaccctaaagcagatgtctaaagttttgtgggtggctcctgaggacaaggcgagtttatggtcacaacttcattatgtttcgtgtaataatctggaaatgcaagaagcttatcttgtcaatctcggtaatgtgttacgagaattgtatttgcacagtccagaggaagctcgccaattgagaaaggaaggctcttcttcgtattgaatggctgcaaaaagcctgatgtgcct

SEQ ID NO: 40831 - DNA, 356 bp, Glycine max
ctctagccgcttaattagggttcatgaatatctcaagccttactttagtggttctaaattgaaaagctgtctagctagtcataacatcaccattactgatggaattgacaaaactagtgcagctttgcaatctacaaagttagcagattgtgattatctcaacagaaactttaagcagatgtataatgtttagtgggtggctcctgaagacaaagccagtttatggtcacaacttcattatgtttcgggtaataatccggaaatgcaagaagcttatcttgacaatctcgtaaatgtgttacgagaatttgatttgcacaagccacaggaagctcgctcattgagaaggaaagctc

SEQ ID NO: 40832 - DNA, 421 bp, Glycine max
  unsure (1)..(421): unsure at all n locations
aagagctatgacgtcccatgcccccctacctaagcttcgaaattcggttggagatcttaaccttgttattatatccaaaagaaagatacttcatctgctgcaaggagctaccaggggtgttgaaggccgcctttcacggcaataaaaacctattcaacagttacccaaaattgcaggatgccttggttggggtctactttcactcaaacattccagaattcaacaaggtggaatgttggggccaactgaaggaagcgtcagtaccaacaggtggggtccaggaggaggggtaggcaatttcacagccatgccaaaaagaatgccaatgttgctttccaccgcttacgttgagccctattcagtggtctaaacaagttcccagtcgncattaacgaaccttgtgatgggattgggacccaac

SEQ ID NO: 40833 - DNA, 402 bp, Glycine max
gaaaaaaacaatgtatcatctgttatggctttgggccttaagaggctggatggaactaccagtggggtcgaaagccaaccttcacgtttatgaaaacctattcaacagctacccagaattgcaagatgccttggtttgggtctactttcactcaaacattccagaattcaacaaggtggaatgttggggcccactgaaggaagcgtcagcacccacaggtggtgtccatgatgaggggttggcaattccacagtcatgccaagaagaatgccaatgttgctctccaccgcttactttgagccctattcagtggtctaaacaagttcccaaccgccattacgaaccttgtgatgggattgggacccaacaaaatctataaacagccaaactactacaattcat

SEQ ID NO: 40834 - DNA, 318 bp, Glycine max
gaaagaaacagttagtgattgccggaaaagggacaaatctactgtagttgccaacaagaatgtttctggtcgtaagttgtctctatatgccagcaagaagaagaattctgcaaaatctgttagagagctggatctatctatctgtgaaaagtgcactcccagttactatcttctaccaaaagaatttcaaatcccatcttctagccggagaacaaaacttgatgcagaagtattgaatgaccattggaaatgtgttgctccaagtattaaggattattcttctaaacacatgagcaaaaatcttaatgaaatgacctt

SEQ ID NO: 40835 - DNA, 426 bp, Glycine max
  unsure (1)..(426): unsure at all n locations
cccccttccttaacctcggaattcggttcgaggtgagaccaccattgatttttgtttctaccagccaaagctttggtcggttttttattgaccttttcggtggaggaatcttattggccaaaactggagatgggttcacacttatccaaaattctccaattagtaacttgttgagagttgctgcttggaagaaaggttgtttaatggtcaagattgtgatgtctgggaatgcagcagtcaaaaggagtgattgggcctcattggtacaagtgtttttaacaaacagcaacagtacagagcattttgatgcatgtaagtggacaaaatcagaaccacatntcctgggaattgatcttcccaatagaggtatgtgggccctaataatggttttggaaatgtggagtttctgagtgggcaaaatcaaac

SEQ ID NO: 40836 - DNA, 354 bp, Glycine max
  unsure (1)..(354): unsure at all n locations
ccccccttccttaagctcggaattcggttcgagcagaaccacattcctgggaattgatcttcccaatagaggtatgtggtcctaataatggttttgaaatggggagttctgattgggcaaatcaaacttcatggcttttgagtttccttattgacaatccccaaacagtcttacaggtttttgatatttctctttgggaatctcttcaaaattttgaaaattgctgggtaataactctttatgccaagcttttttcttgttccacaaggcnttactgccagatctttcttgaaaatgcccggaatcctcttgcatgaatctggcgaatttgatcgttttcttttcgctttgttc

SEQ ID NO: 40837 - DNA, 185 bp, Glycine max
ttccatgaagggcttctgtggtggtgattaaaaattgatgcgtgaaaggacccccctgctggtggcttgttcttcagcgattgccctcaagaacattaccatctcttggttagtcctcattacgaatcccttctggatttccgctcacagttatttgcaatagcatttttaatgagatgctcatt

SEQ ID NO: 40838 - DNA, 312 bp, Glycine max
atccaacgactgaggtcaatcttaaagtaagcgttgatcgggcgcgcactcatctggttaggggagagagaaacacggaggccacaggtggtttacttgtgaatacacgattgttatgggactgagctatgcatagcagaataagggggcgcgtcccttgtgagcattacacaagccgctgtcaatactgtgaataggggaatgacggttgcacaaaatcaatgactgtgtcatgtgatgcacaccatgattgtgatgcatggaactgggcatacctgaagtgcactgacagctataacgatagcatctgat

SEQ ID NO: 40839 - DNA, 376 bp, Glycine max
ctcaagactgtgaattgtggaatcctgcttgcacaaaagcaatgactatgtcatttaatccaaacccgtgttctgatgcatggagtttggaatttctgaagcgtactggatttcattgcgatatcatttgtgtcactggatggactgccaccccaatgcaggatgttcaggttacaattgattggtttatttcctctcaggaatgtgttcccaggacctattgtgttttaaatccacaaaatccttttgtgttaaataggtggatgggaaaattgactttcccccaaggcacttcccgaaatgttaagagaatgcctctttctataaggggaggagctggtgcaaagaatgctattctcatgaatatgccaaatgc

SEQ ID NO: 40840 - DNA, 379 bp, Glycine max
ggaagagatacaatttgagcttaggtcttggactgaacaaagttgctgggaaggttttcagaattggacatcttggcaacttgaatgagttgcaactgttgggatgtctagctggtgtggagatgatactgaaagatgtgggctatcctgtaaagcttggaagtggagttgctgctgccagtgcatacttacaggacactattcctatgatcccttccaggatttgagtcacaagtcattcttgtctttacttccttttttctgctctttcggaaattctgtaaaatatatattaccctcttttacactcctttgaagatgaacatacactctacttcaaaggagtgtaaaagagggtaatatatattttacagaattt

SEQ ID NO: 40841 - DNA, 381 bp, Glycine max
aacaaaatggtcaacctttcccaacaaaagcgacttgccgctgctgtggctggtgtcggccagaggaagatctggctcgacccccaggaggctgccgagatcggacaggccaactctcgatcgggtgtcaggaagctgctcaaggatggtcacatcatcatcaagccgaccaccatccactcgcgagcccgaaccagggagctgcacgccgccaagcgactgggccgacacaccggtaccggtaagcgaaagggtaccgccgaggcccgaatgcccaccaaggtgcaatggctccgacgaatgcgagtcctccgacgactgctgaagaagtaccgagagggcggcaagatcgacaagcacttgtaccacacgctctacctc

SEQ ID NO: 40842 - DNA, 385 bp, Glycine max
cagattttagacctcaagaagaaacaagaaagccatgtgcaactattaaagcaaaaggggaagagtgaagaaactgcaaaaagactgcagactgggatacaatatatcaagtctcaaaaagttcagttgcagcataaaatggagcaaggagcagaacaatttcgacaatggaaggcttctcgtgagaaagagctactccagttgaaaaagggaggaagaaaaaatgagtatgaaaggcataagcttgaggctctaaaccagcgtcagaaatggttcttaaaggaagacagaggaagcaacaatggctacgaaaaggctaaaagaattgttggaagcccgcaaatcttctcctcgtgacaactctgtttattcaaatgggcatcta

SEQ ID NO: 40843 - DNA, 389 bp, Glycine max
ggcgaatggaatgctgactgtgttgttggagaaagggtttttgccaaatgatgttacttatgctcatttgatgcagggttatgctcgaaaggaggaggttcaggaagttttaaagttgtattatgaaatggagtacagatgtgtgagtcctggattgtcggttttcgggacgattgttcagtgtttttgtcgttgtgggaaggttgaagatgcagagaagtatttgaggattatgaaagggcgtttggtgaggccagatgtgagtgtgtaccaggcgttgattgatggatacatgaagaagggggagagtgctagggctcttcaccttcgtgacgagatggcttctttggaggtgtaatgtgacattgttgttgtgctaaagagtggtg

SEQ ID NO: 40844 - DNA, 385 bp, Glycine max
caaggagcaggtaaagcttttccaaacaaaattgtttttgatgataagcttgtgttggctaacacacaagaattctttgatggaaattttccagtggattcttggttaccaatttttgtgaattgtctttatcctgtaagtcaattaccttcagaagctgtcgttgtaaatgttacatgtggtagtgggacgtggtggtttacccaccactgcttggattagttctgcagttaacaatcgctcctcagatatcaacaaaaggattcgcacagcacttgggaaaggtaagaaaattgtttttcttactagagttgatccttttccagtagctttactggctgttctttttggcgttaagaatgaaattctgagttctaacgccact

SEQ ID NO: 40845 - DNA, 370 bp, Glycine max
gattcttcagggtatatacacagtggcaatggccaacttctgtcatgttatgtccaatagaggagaatgatcttgggtttcctgtttggcatcctggaaaaaaatccttgtgacagatcccatcatatgtcaatcattacccctgcctatccctatatgaattctagttttaatgattctatgagcacacttcgtgtaatgatgtagcagtttcaatatggcaacaaaatttgtggggaaatataattgagtaaagcttgttggaaggctctgtttgaaaagtacagtgtctttgaaagctataaaaactacttgcaagttgatgctgatgacttgcacaattggaaaggttgggtggaatcatgccttc

SEQ ID NO: 40846 - DNA, 407 bp, Glycine max
  unsure (1)..(407): unsure at all n locations
ttctgttcgagtgcacaaagaatatgataaatttattggagaattgaccagttactttccccatgaaaaggagggtattctcaaattctacggtgaatgctggaagatttttgatgccctgaattcgttggaattgaagtcactagaagagccactctacctttttggacagttttttcagaagccacttgaatgcttgacactagcctattatttgcctcaaaatgctggagccatagctcggaagtacattcaagatccacagttgttgtctttcatagatgcagagtgttttatagtgagcacagtcaatgctttgcagacaccaatgatcaatgctgccatggttctatgtgacagacactgtggtgggattaactaccctctngggggtgttggtgggattg

SEQ ID NO: 40847 - DNA, 409 bp, Glycine max
  unsure (1)..(409): unsure at all n locations
caaaaaaaagcttaagtttaggatgacccaatgcaggaacatgcagggggatctaatagattatgtccccggattccctaaagaatccgacatgaacattgttgaatgcaccatattattgaatgtgccacaaggttacagtgatgtcctgataaaaaatctctacttgtcatgtgatccatacatgcgacttctcatggccaaagaccgtgctttcggagatggctacttcacccttgactatccattgaaaggatatggtgtgtctcaagtgctggaatctggacgttcagattacatgaaaggtgacttaatgtgggggattactgaatgggaagagtatagccngtggccgtcatctatcatacatttcataattgagcacactgatgntccactttgctactac

SEQ ID NO: 40848 - DNA, 344 bp, Glycine max
cttcactactaccactttacccaccaaaccacttatcaatcaacatgtctgacattggacgacaatccctcggtgacaaggccggagccgccctcaagcccgactccgagaagtcttacgttgagcaggccaccgactacgtcaagggcaccctcgactccgttgcctcggccgtgcagccgcaacaagagaagagcacaactcagaaggtcggagacgccctcaccggcgacaacaagaacaaggacatcgcctaaatgtctttggactcgacttgattgatgttgtgattgttagcgaagaagtataagcgacgtgttatgatgcatcgttgtcaactgtga

SEQ ID NO: 40849 - DNA, 417 bp, Glycine max
gttgaatgtggaatcccttctggatttccgctcacagctattggcaatagcatttttaatgagatgctcattagatatagctctgaaaaattactgcgccaggctaaagctgcaagtatgtttttacaatccttcaaaaattttgtttctttgtgtgtgtatggggatgataactgaattagtgttcatgaatatgtcaagccttactttagtgggtctaaatcgaaaagctgtctagctcgtcatcacatcaccattactgatggcatggacaaaactagtgcaactttgcaatgcagaaagatagcagatagtgattttctcaagagaaactctaagcagatgactaatggtttgtgggtggctcctgaggacaaggcaagtttatcggcacaacttcattatgttgcgtgtaat

SEQ ID NO: 40850 - DNA, 404 bp, Glycine max
cacaactggagattggatcttcactttacaaaattctccaatcagagacttgttcagagttgctgcttggaagaaaggctgttcaatggtcaagattgtgatgtctgcgaatgcagcagtcaaaaggagtgattgggcctcattggtacaagtgtttttaacaaacagcctcagtacagaacatcttgatgcatgtcagtggacaaaatcataaccacattcctgtgaattcatctttccaaagtaggactctggtcctgatactcttcttgataactggatctctctctgcccaaagtcaacttaaccacttccgactttacttactgacgatccccaacagtctacagtatttgatattctattgggaatctctcaagattttgaaattgctggtaatactc

SEQ ID NO: 40851 - DNA, 408 bp, Glycine max
agaaaggctgtttaatggtcaagattgcgatgtctgggaatgcagcagtcaaaaggagtgattgggcctcattggtacaagtgtttttaacaaacagcaacagtacagagcattttgatgcatgtaagtggacaaaatcagaaccacattcctgggaatcgatcttcccaatagaggtatgtggtcctaataatggttttgaaatgtggagttctgagtgggcaaatcacacttcatggcatttgagtttgcttattgacaatcccaaacagtctacagtttttgatattctcttgcgaatctctcaagattctgaaattgctggtaatactcttatgccagctttttctgtttcacaggctactgccagatcttctgagaatgcggaatcctctgcatgatctggaa

SEQ ID NO: 40852 - DNA, 418 bp, Glycine max
gcaaaatctgcagcagtagaaaactctaggaaaatatttaataccatgctgcatcataatgttatgtcttggactgctctcatctctggatatgtgcaaagcagacaagaacaggaagccatcaaattgttttgtaacatgcttcatggtcatgttacaccaaattgcttcacattctccagcgtcctcaaggcttgtgcaagtcttcctgattttggcatcggcaaacaacttcatggccagacaattaagctaggactttccactattaattgtgtggggaattctcttattaacatgtatgcaaggtctggaactatggaatgtgctcgaaaagctttcaacatcttatttgagaagaatttgatttcgtacaatacagcagctgatgcaaatgcgaaaagcctggattctgatg

SEQ ID NO: 40853 - DNA, 151 bp, Glycine max
ccttaagctccgaatttcggctcaggtgggaatgcagcagtcaaaaggggtgatggggcctaattggtccaggtgtttttaacaaacagcaccagtccaaacctttttgatgcttgtaggtggccaaaatcggaaccccattcctgggaat

SEQ ID NO: 40854 - DNA, 395 bp, Glycine max
cagaacaacaagtccttaacaactaacatggacaagcaaatggctcactcaaagagctgataccgagctgttacgcactgataaccgtgccggtgcacagcatggtgagctacattcactggactaaagtccatggctggcttgccgatcaggaagaccaacagagtcatatcctgcacagctagcaacgggggaagaatgcaatgcatgcaggtgatgtcaccacttggtacgaagaagtttgagactctatcctacatgacagaccttgatgatgcacaatcagcaaaggaagttgaatacctctttacgaagggatggattaattgcttggaaatccagttggagcacagagtcttgtacctagagcacaacatgtcaccatgatactacga

SEQ ID NO: 40855 - DNA, 320 bp, Glycine max
ttacaagcccccaggcttctgagtgtgaaaaatttgcatagcatatgtagccgccaccctactttgtttgcttgaacttaaactacattccacatatgatattgctttttgagatttcatcatcctgcttttgtggattctgttcacagacttcaatggaaatctatggttgtgaacttatggtcgataattatttacaaggatggagataataacaccagtaccagctacagcaacaacaaacagccaaaaacgcaaccgcgaaatcgccagaacccgacgtatagactccgacctcgatccaccaaggcccgcacctg

SEQ ID NO: 40856 - DNA, 392 bp, Glycine max
  unsure (1)..(392): unsure at all n locations
gttcgagctgacatgtatctcccgacacatctacctcaggaagcacgtcggtgttggtgctctcgccaagctctaccgangtgcccaccgacatggaaacaggccctctcaccacaagtgaccacgtaccggtgtccagagggccgtcctccagtctttggagaagattggtgtgctcgagaaggccactgacggtggaaggaagatcagcgttgacggacagcgtgacttggaccgaatcgccacttcgactttggagagccaggtcgaggaggagtctgacgaggaggaggatgaggaagatgactaggaggagaacgactaggactacgagtaaactctttgctcgatcttaccgcctctatcatcattcatccagcgtagcaacagcg

SEQ ID NO: 40857 - DNA, 488 bp, Glycine max
  unsure (1)..(488): unsure at all n locations
ggaggagctggtgcaaagaatgctattctcatgaatatgccaaatgctgttctttcaatgtggagatattttgttggagatctcgtctttgaagtttctaagatgccttctccctacattaaatgtacagtctcttttcttcataggcatttggaaaatttgggcttgatgatacccatcaaatttttgagggcttttttccccccacaaagcctgggttgcaaggtttgggaagaagatttcaggganaaaaagttggtattttggaaaattttttcacaaagaaggnnaatttcttttacaggccttggngtcaaacttcaaggttgcggtnccttgcaacaaaccctctgttggggcttgatgggggtgtcccattatttgtattgccaaatggtgccatgatagtttcagtgtctaccaattaccagggtgattttgtcaattggtgtcaagttgacaaccataaacattatgtgtgcatatgg

SEQ ID NO: 40858 - DNA, 379 bp, Glycine max
gacagttctgcccttcatgatgatcaagggaacttgatgatcagaagcagccatgtcttgtccaagccatgtgatgaaatatatgtggttggagaaggagagacacttcacacaatcagtgacaagtgcggtgacccctttattgtggaaaagaaccctcacatccatgaccctgatgatgtcttcccgggccttgttatcaagattacaccctcataaacaacatagctagaataatatttgaaagttaattcctatacttgtatgtatctttcttcaatatagaacaaggaaaaaaagatttccttatgggcacccctaaagttttagtagttttgttttgcttgctgtatttactacacttgcttaaacaggaaaa

SEQ ID NO: 40859 - DNA, 438 bp, Glycine max
  unsure (1)..(438): unsure at all n locations
ccggaattcccggtcgacccacgcgtccgcccaaatggagtacaggccctgcaaacattgaccatgacaaattcaagcagtgctcagcagggggcgatcctccagtacgcgcagacctctgacggacagcagatactcgtnccgagcaaccaggtggtggtgcagactgcatcaggagatatgcagacctaccagatccgtaccacaccatctgccacgtcacttccacagaccatggtgatgacttctcctgttacccttacatctcagacaacaaagacagatgacccccaactcaaaagagaaatacggctgatgaaaaacagagaagctgcccgggagtgccggcggaaagaagaaggagtatgtgaagtgcctggagaaccgagttgctgttctggaaaaccaaaataaaaccctaatagaggagctaaagac

SEQ ID NO: 40860 - DNA, 420 bp, Glycine max
cgcccgggaaacttcacactgatgatctacccactaagcctccattggtgccaacatacaaggagtggtctggccttatgcggtccctcttccttgcgactcttactaacaatcagtcaacttttgattctggttctcatggcttcattgcaggagccctaaaaaacacaccgcaccaactcggactattggctccgcctaacaagttacagaatgtattagaaaatgattacatgaagtccctggtcgaaagtccaactgaagaaactagtttgatttatgtgtcccagctggcttcacctatatgcggagaccaggacagtcttgtcacgaacccacccatgccagtgtacggttcagagtataaaaagcaaatggcactttccgggagcctcacatcaacttctctgaagagaacac

SEQ ID NO: 40861 - DNA, 197 bp, Glycine max
ggaattcccgggtcgacccacgcgtccggcaaaatcagccgacttcgtcgggaatgtccttttgatgaatgtggtgctggagttttcatgggtagccactttgacaggcattactgtggcaagtgttgtctgacttactgcttcaacaaaccagaagacaagtagttgtgtatgagttaataaagagaaggaactga

SEQ ID NO: 40862 - DNA, 437 bp, Glycine max
cggaattcccgggtcgacccacgcgtccgcccacgcgtccggcaagctccctcctgtgctcaagactccaaccactctttggtccagagccatgggccctcccactcgccagctcctcaatgctgtactggtcctgctcctcctgctggccaccaaccatcagggtacaggggttgttgtggccagtgagctgcgctgtcaatgcctgacgaccctaccaagggttgacttcaagaacatccagagcttgacggtgacccctccaggaccccactgcgcccagacagaagtcatagccactcttaaggatggtcatgaagtttgtctcaaccctgaagccctcttggttcagaagatcctccaaaagatactgaacaaaggcaaggctaactgacctggaaaggaagaacatgggctcctgtacctcaacgggcaga

SEQ ID NO: 40863 - DNA, 358 bp, Glycine max
ccggaccggaattcccgggtcgacccacgcgtccgcagccagccccatccctccacctgccccactcacacatattcacactcgcctagtgttgctgggcccttgggaggcctggctggagctggtccagctgttctgttctgtggtccctgtccctgggttcagattgctgccctccgcctgtctgaaggaggccaaggcctacccagtacaaaaggctgcctttaaaggcccctactggcttggtagctgccgggatggattgtcttgtcctgctgccctttgctgcgtgggcagcactctgaagcatgcaaatgggtcttgggatccctcccagaaacctgctctgaccagaccc

SEQ ID NO: 40864 - DNA, 445 bp, Glycine max
cggaattcccgggtcgacccacgcgtccggaccatcttgtccttctgagagtaggaactctggggagccatcttcagacggggctcttgtgaaactctgcttgggatgggcagattcggcttgtctgtctcctaaaagacaattttttgaatatgtattatatatttcagttgatgcatagtggagtgacacctaggaacctgcaggtggctgcgtgacacaagagtgagagcgagaggcatctctttgttaaagtttgactgtgtgggagctttctaaggagaaacagatctatctgcatacagcctgcagagtcctgccgtaatttacatgtgtctttacatcttccttgctggcatgaatgttttgtatttggaagtttttttttgagatactacataagaaactgttgaatcattattatcaatgaatggtaagatgattg

SEQ ID NO: 40865 - DNA, 216 bp, Glycine max
ccgtctcgaattcccgggtcgacccacgcgtccgcttttaaacaaataaaatctttgatcactcattttttaaaaaaaaaacaagctaaacagcaggggtacaaagtctacagggtgtggttagatcaatcataatttgtcagcttaccttaagacacatgagtgtccagattgttactcaaggggttttgagctcttgtggttgttcagtcatgt

SEQ ID NO: 40866 - DNA, 399 bp, Glycine max
ggaattcccggtcgacccacgcgtccgaaatgaagatgtttatgaactggcattagaagctttttaaacttcgctgcgatgtgctccatctaccccaagggaggacattgcctgtaggcacaggcatcgcctggcctaggacacggtctggagggctgttggtcaggactgtcaggctcacgtcggcctacttggaggtggactttctcttgattcttaagactgaggtattgactctccttgcttcttggcatccacgggctcctgagtataggcttttagctcctgggcagagtccttgggttgtgtttgacactccaccttgagctttcggcattgtgtgtctggcctggtgtaagcaggtctgaccttgctttctttacagcatagtgttattca

SEQ ID NO: 40867 - DNA, 187 bp, Glycine max
gacccaggcgtccggagttaaggactatggcaaagaatctcaagccaaggatttcatcgaggagtacttcaaatgcaacgaatgaataaataaaattttggctcagaaaaaaaaaaaaaaaaaaaaaaaaaaaaaaaaaaaaaaaataaaaaaaaaaaaaaaaattatatttttatataaataaaat

SEQ ID NO: 40868 - DNA, 372 bp, Glycine max
ggatttcccgggtcgacccacgcgtccgggccgcctgaataaggctgtcattcttcagggctccaaccacctccaactttttgcttagggccacagcagattcacctacactgtccttgtcgatgggtggttcaaaaagacaaattgatggggccaggcaatcatttgattccaaaccgataagccctcttggctggcatttcttgacattggacctcttgacatcgggggtactaaccaaaaatttcgggtggagggtggccccttcttttttaaataagtggactccaccttaatttaaaaaccaaaaccccttgaaaaaaatttttctttggcaattctttcttttaaaaacccaaaaaaaaaacccaa

SEQ ID NO: 40869 - DNA, 420 bp, Glycine max
ggccgacccacgcgtccgctcggccgggtgcgccgccccagtgctctgtgggatactggaagtctcgagcgtcggctccgggttcccagccctcctctggcccgcactcatagaaacattcacacaccccctgcctcccctctcttccctctccgcctcccccttccccccctcgcgataagaagacccggcggcaggagaggggatgaagatggcggacgcgaagcagaagcggaacgagcagctgaaacgctggatcggctccgagacggacctcgagcctccggtggtgaagcgccagaagaccaaggtgaagttcgacgatggcgccgtcttcctggctgcttgctccagcggcgacacggacgaggtcctcaagctgctgcaccgcggcgccgacatcaattacgccaatgtgga

SEQ ID NO: 40870 - DNA, 277 bp, Glycine max
accaacccttccgattaaaagaacatggaatccaatacctttttggacccccgagtctccatggccccttccaagggccggaaacccacttttaaattcaatgcaaggggcaatttgaaagatggctacgatacggcaaggtaatggggaactcggcgaatcacagcgtgaaaagctctcttgctggtgctattgttaaagggctagggggattcgatgaggggacttacatatcaaggttattacaagaatcaagaagaatttgatccaattgtga

SEQ ID NO: 40871 - DNA, 402 bp, Glycine max
aggcctggagggccgtcgacccacgcgtccggtgggaggctcagaaggccttggctatacaaccagtgccatgcggcgcagtcagggtcccatggacgacttccatcagctcacccgcctccatccccaagcagagtgtaggcaagggctgtgactgcctcaggtaattgggtgattttgctccagcaagaggagaggaagcatgtgagtgccacactgaacctttcagaaacagccgtggggtcgggggtgcttgggccaggccaggatacttggtgttaagcctgctctctcttcagtgccccgactcggcttgcaagcaggacctgctggcctacctgcaacgcatcgacctttactgccaccagctgaacatctgcagcaaggtcaaggccgaagtgc

SEQ ID NO: 40872 - DNA, 399 bp, Glycine max
cccttccgcggacccttggggtctcattagtaaaagataccagaatctttcaggaaggacggattgcattagaaatagacagtatatttatagccacaagagcccagcaaggcctcaaagttggggcaggctggctggcccgtcatgttcctcaaaagcacccttgacgtcaagtctccttcccctttccccactccctggctctcagaaggtattccttttgtgtacagtgtgtaaagtgtaaatcctttttctttataaactttagagtagcatgagagaattgtatcatttgaacaactaggcttcagcatatttatagcaatccatgttagcttttactttatgatgccacaaccctgttttatactgtccttaataaatgcacatatatttttc

SEQ ID NO: 40873 - DNA, 428 bp, Glycine max
  unsure (1)..(428): unsure at all n locations
gggccgtcaacccacgcgtccgcttcgatgacaatggcagaaactttaacaaagatggagacctcgttgactggtggactcaacagtctgcaagtaactttaaggagcaatcccagtgcatggtgtatcagtatggaaacttttcctgggacctggcaggtggacagcaccttaatggaattaatacactgngagaaaacattgctgataatggaggtcttggtcaagcatacagagcctatcagaattatattaaaaagaatggcgaagaaaaattacttcctggacttgacctaaatcacaaacaactatttttcttgaactttgcacaggtgtggtgtggaacctataggccagagtatgcggttaactccattaaaacagatgtgcacagtccaggcaatttcaggattattgggactttgcag

SEQ ID NO: 40874 - DNA, 435 bp, Glycine max
aggcttgaagggccgtcaaccaacccttccggttgaaatacaattttttttttttgcagggttccacattttcaacatacacaagaaaggaatgtaaagaagtgcctaggcctcctgttttatagtttggtttggttataaatcttcatcttctttggaatctgcctaagagttatggcaactgatgatgagaaactaagactaccaatgttaagagttgtgaacagatgtgtgtacagcacaaccaaggcagccgtgattggcctcacaaaatctgtggctgcagatttcatccagcagggcatcaggtgcaactgtgtgtgcccaggaacagttgatacgccatctctacaagaaagaatacaagccagaggaaatcctgaagaggcacggaatgatttcctgaagagacaaaagacgggaagattcgcaact

SEQ ID NO: 40875 - DNA, 416 bp, Glycine max
ccacccttccgaaacttttaaggcaacttatttttttacttttaccaataccatgatgtgacaggaatattacctctgtttaagcaaggtaatgtgtaaaatcagtctcggctgtcagaataacttctaaaaggtttttttataaccagttcaagttactgaaaaccttttaaacctttctgaagttcgtttgtataaatggcttctcttggattatcaataaaagccacataggtggcaagttgtagtattatatggctctgtagagtggtgaaccttctagaggaatatatgatttattcacagttcctcaaggcctggggatgatgatcacttatacctatttttgtgcagttacatcatgttgtacattagagatggagagtttaatagctctttaactgctgtcctcatta

SEQ ID NO: 40876 - DNA, 432 bp, Glycine max
  unsure (1)..(432): unsure at all n locations
gggccgtcgacccacgcgtccgctcatcctcctggaaccttgctgtcctgatctgtgatagttcacccgctgagatcccctgagcccaagggtgcccagaacttccctgattgacctgctccgctgctacttggctaacctgacctcttgctgtctctgctcgccctcctttctgtgccctactcattggggttccgcactttccacttcttgctttctctttctctcttccgtcagaaactagaaatgtgaatgaggattattataaaagggggtccgtggaagaatgatcagcatctgtgatgggagcgtcagggttggtgtgctgaggtgttagagagggaccatgtgtcacttgtgctctgctcttgtcccacgtgttttccactttgcatatgaaccgngaactgtgcatagtgctgggatggaggg

SEQ ID NO: 40877 - DNA, 388 bp, Glycine max
aaaataaggggaactacgggggggctttccactagacgtggccgcgaacaagtttttaatgtttaaatatcaccttgatttcaatatggagatgatttagggacaaattttggaggcagggaaagttaggctgttacaataagccaggtgagagtgaagtctgaactcaaagagtggcagctagaatggaaaggatgagatgttatttcgagcgctggtaatttctgctggtgcaatatcagtagcaaagtggaggcaggaggcagactgcagcaggtggagggatgcctgggaagtcaggcagtgatgatgatcaagactgtggcaacagagggaggaaagaagagtggtagctcagaagaggagtgcaatccaaagacagactttt

SEQ ID NO: 40878 - DNA, 402 bp, Glycine max
gggccgtcgacccacgcgtccggaggatggacatactggtgtctgagtgctccgcgcggctgctgcagcaggaagaagagattaaatctctgactgctgaaattgaccggttgaaaaactgtggctgtttaggagccttctccaaattggagcagttacaagaagaaaatttaaaattaaagtatcgactgaatattcttcgaaagagtcttcaggcagaaaggaacaaaccaactaaaaatatgattaacattattagccgcctacaagaggtctttggtcatgcaattaaggctgcatatccagatttggaaaatcctcctctgctagtgacaccaagtcagcaagccaagtttggggactatcagtgtaatagtgctatgggtatttctcagatgctca

SEQ ID NO: 40879 - DNA, 432 bp, Glycine max
  unsure (1)..(432): unsure at all n locations
acccttncgtaggcggatcaaggcttgaagggccgtcaaccaacgcgtccgcccacgcgtccgcccacgcttccgctggttgttgctgtagtggcggagaggatcgtggtactgctatggcggaatcatcggaatccttcaccatggcatccagcccggcccagcgtcggcgaggcaatgatcctctcacctccagccctggccgaagctcccggcgtactgatgccctcacctccagccctggccgtgaccttccaccatttgaggatgagtccgaggggctcctaggcacagaggggcccctggaggaagaagaggatggagaggagctcattggagatggcatggaaagggactaccgcgccatcccagagctggacgcctatgaagcccgaggactggctctggatgatgaggacgtagaggagctga

SEQ ID NO: 40880 - DNA, 280 bp, Glycine max
acccttccgggggccacaaccagttcccggggagagggattgacccaaaaggtgagggtgcacgtcttccttcctgtcccagctccccagcctggcgtaaagcacccctcccctcccccccacccccctggagtgctgccctctggggacatgcggagtggggttcttatccctgtgctgagccctgagggcagagaggatggcatgtttcaggggagggggaagccttcctctcaatttgttgtcagtgaaattccaataaatgggatttgctctctgc

SEQ ID NO: 40881 - DNA, 370 bp, Glycine max
gtcagccttgggcgcatcaccttcagctgcgactgcgagaaaaaaaattactatttcttgcccatcataccttgggcgagcaaaaaattaaatttaaccatgagggaaatcgtgcacatccaggctggtcagtgtggcaaccagatcggtgccaagttctgggaggtgatcagtgatgaacatggcatcgaccccaccggcacctaccacggggacagcgacctgcagctggaccgcatctctgtgtactacaatgaagccacaggtggcaaatatgttcctcgtgccatcctggtggatctagaacctgggaccatggactctgttcgctcaggtccttttggccagatctttagaccagacaactttg

SEQ ID NO: 40882 - DNA, 413 bp, Glycine max
cccacccttccggttccgcagcggcaggtgaagtctatcagaggacgcgcccagccaagtggggggaaccaattcttgcaggcggtcgttcccctttttgcccgggattggactgcgtggaaatgagctgactgaaatcaactagtgacagctcaattcacacactatgcctttaacaggtccaatgaattgtctgtgaaagattacgtcgtcagagtccacatagtaacctatgtggagtgccagtacaatacaaacacttaagtgagctgctgaaacgactgctctcatgagagagtactatgtccttattatcgaccctgggatcaggaaaaactatgtcaataagtcatgctttgaaagaactcatggaaatagacgaagtgagtgaaaatgtattacaagttcactta

SEQ ID NO: 40883 - DNA, 401 bp, Glycine max
gggccgtcgacccacgcgtccggcccactgtgcactccattatcagcaaaatggtcattaatgaggagctgatggcctccctggaccagccaacacatacagtggtgatgcaccgcactgagcccactgcccagcagaacctggctctgcagctggccgagaagctgggcagcctggtggagaacaacgaacgggtgtttgaccacaagcagggcgacctacaggggctactgacgagaccagaaggacggctaccgcaaaaacgagggctacatgcgccgaggtggctaccgccagcagcagtgtcagacggcctactgagctctccactctgtttaccgcctgagccatccaaccttgaagttctaaaccacacctcagtcactaaaggtctgtctaaa

SEQ ID NO: 40884 - DNA, 436 bp, Glycine max
  unsure (1)..(436): unsure at all n locations
gggccgtcgacccacgcgtccggcgcgcgtgagctgagccggtgggtgagcggcggccacggcatcctggtggctgtgggggctacgaggaaagatctaattatcatggacctgcaacagtttcttatgtgcctgtccctgtgcacagcctntgccttgagcaaacccacagaaaagaaggaccgtgtacatcatgagcctcagctcagtgacaaggttcacaatgatgctcagagttttgattatgaccatgatgccttcttgggtgctgaagaagcaaagacctttgatcagctgacaccagaagagagcaaggaaaggcttggaatgattgtagataaaatagacgcggataaagatgggtttgtgacggagggggagctgaaatcctggattaagcacgcccagaagaaatacatatatgacaatgttgaaa

SEQ ID NO: 40885 - DNA, 435 bp, Glycine max
ggcctggagggccgtcgacccacgcgtccggcgcgggacccggtttgtgtaagctggagctgtcgccgggtccgcggggaagtcttggcggtggagccatggtcggccagctgagcgagggggccattgcggccattatgcagaagggggatacaaacataaagcccatcctccaagtcatcaacatccgtcccattactacggggaatagtccgccgcgttatcgactgctcatgagtgatggattgaacactctatcctctttcatgttggcgacacagttgaaccctctcgtggaggaagaacaattgaccagcaactgtgtatgccagattcacagatttattgtgaacactctgaaagacggaaggagagtagttatcttgatggaattagaagttttgaagtcagctgaagcagttggagtgaagattg

SEQ ID NO: 40886 - DNA, 395 bp, Glycine max
  unsure (1)..(395): unsure at all n locations
gtccggnngggatcatggtagatggaaccctccttttactcctctcggaggccctggcccttacccagacctgggcgggctcccactccttgaagtatttccacacttccgtgtcccggcccggccgcggtgagccccgcttcatctctgtgggctacgtggacgacacccagttcgtgcgcttcgacaacgacgccgcgagtccgaggatggtgccgcgggcgccgtggatggagcaggaggggtcagagtattgggaccgggagacacggagcgccagggacaccgcacagattttccgagtgaacctgcggacgctgcgcggctactacaatcagagcgaggccgggtctcacaccctgcagtggatgcatggctgcgagctggggcccgac

SEQ ID NO: 40887 - DNA, 431 bp, Glycine max
gggccgtcgacccacgcgtccggcggaccccagcctctgccaggttcggtccgccatcctcgtcccgtcctccgccggcccctgccccgcgcccagggatcctccagctcctttcgcccgcgccctccgttcgctccggacaccatggacaagttttggtggcacgcagcctggggactctgcctcgtgccgctgagcctggcgcagatcgatttgaatataacctgccgctttgcaggtgtattccacgtggagaaaaatggtcgctacagcatctctcggacggaggccgctgacctctgcaaggctttcaatagcaccttgcccacaatggcccagatggagaaagctctgagcatcggatttgagacctgcaggtatgggttcatagaagggcacgtggtgattccccggatccaccccaactccat

SEQ ID NO: 40888 - DNA, 358 bp, Glycine max
cctggacggccgtccacccactcgtgcgcatgttagaatagtagatcttacccgaggatgacattgatgatgggtccaggaaactgttggcccagttggcagaaaaggatccgaaaatctctgcctttgagctgcaaaccatcctgagaagggttctagcaaaccgccaagatttcaagtcagatggcttcagcatcgaaccatgcaaaattatggttgacatgctaaattcggccggaagtggcatgctggggctgaaggagttctacattctctggacgaagattcaaaaataccaaaaaatttaccgagaaatcgacgttgacaggtctggtaccatgaattctatgaaatgcgg

SEQ ID NO: 40889 - DNA, 322 bp, Glycine max
ggatgaatcaggtgctacatcaactgccgtgttcattggagatgatgagctgctaatttcacatattggtgactcatcagcggttctatgtagatctggaaaagcagaagttctgactagtcctcaccgtccaattgggagcagcaagacttctcttcatgaaattagaagagtcagagaagcaggtggatggattaacaatggtagaatttgtggagacattgctgtatctcgtgcatttggggacgtgcgattcaaaacaaagaagaatgagatgctgcaaaaaggagttcaggaaggaagatggtcagcaaagttcatt

SEQ ID NO: 40890 - DNA, 314 bp, Glycine max
  unsure (1)..(314): unsure at all n locations
cgttaactctttatctgtatgcatatctttgctagaccccaagagacatacttttggcgcttattatacatataaccgccaaatgactaatggatctactgtgactgcaaatcctgagactgttgaaggcatgcttgaaagcctaggtgatttactcaagctcttagatgtttcttctgctgaaaatctcttgctaactacttttggcaagttacaaccacctcttggtaaacatcgtttaaagattgtagagtttatatcagttttagtaactgttggtggtgaagctgctgagaggaaatngattgatcttg

SEQ ID NO: 40891 - DNA, 325 bp, Glycine max
aagcaagctcatcttaaagttttaaaaatggcaccagcctcctccatggttctctctgccccatccttggctggcaaggccgggaagctgggcccatcagcccccgaagtcgggagggtcagcatgaggaagaccgtcaccaagcaggcctcctccggaagcccatggtacggcccaaaccgcgtcaagtacttgggcccattctatgggcgagcccccgtcctacctcactggcgagttcccaggtgactacggctgggacactgctgggctttcggccgacccagaaaccttcgccagaaaccgtgagctcgaagtgatccac

SEQ ID NO: 40892 - DNA, 266 bp, Glycine max
tgacaaccattaacaatatgtgtgcatatgggctcaatcctgggatttgaggttctcgtctattgggcaccattcctcacaccatttcacagcaaactgtttggaatcaaatggccacagtgagaacaccattgaattttgattctagcaagcatagcttttgtcaattttgtattgaccttctcaagcgatgaatcttagtggacaaaactggacattggatcacacttatacgaaattcttcaatttgtaacttattgatagtt

SEQ ID NO: 40893 - DNA, 189 bp, Glycine max
aaattccaaccccaggacataatattccatggttgcctccgcttccactgtcggagctgtaaacaaagcttttttgaacctgaatgggtctggacctggggtttaagctcccagttaatccttttttggagcaactttgaaaaaggtttttggttaaagggtccccacaccaaaaatttcttttggaac

SEQ ID NO: 40894 - DNA, 257 bp, Glycine max
ggcagaatgagtgcaagtgcagaccaaatcagcgaatgcttccagatctttgataaagacaatgatggaaaggtctccattgaggatttgggcaatgcactcaagtctcttggaaagaaccctaccaacgccgagctcaagtccattagagatgaattaagaaccaaagactttgatttggctaccttgaaaggagtttaccgcaagcccatcaagaccccaactgagcaactcaaagagatgggtgatgctttcaa

SEQ ID NO: 40895 - DNA, 309 bp, Glycine max
cttggaccggattatagcaagcagagcttttgtcacttttctattgacggtctcaggggaggaatcttactggacaaaacttgaaattggatcacacttatacaaaatgctccaattagtaacttattgagagctgctgcttggaagaaaggctgtttaatggtcaagattgtgatatctgggaatgcaacaatcaaaaagattgattgggcctcattggtacaagtgtttttaacaaacagcgacagtgcaaatcattttgatgcatgtaaatggacaaaatcagaaccacattccttggaattgatc

SEQ ID NO: 40896 - DNA, 431 bp, Glycine max
  unsure (1)..(431): unsure at all n locations
ctgatgatgctaccaatttctgggattacgcttccgagaacccggagagtgtgcatcagttcatggtcttgttcggcgaccgcggtattccagatggctatcgaaagatgcacggttacattggccatacccacaagctcctgaacaagaacggcgactgggtctacatgcagttacatttcaagtcgaaacagggcactggtttcattactcaagaagactcgttcaactacggaccagattactcgaccaaggacttgtaccaggccatcgacaagggcgatttccctggctgggatgtttgcgtccagaccatgacagccaaggaggccgaagagttgtgggagaagcaaaagatcaacgtgtttgatctgacgcacgtatggncacagggccagttccctcttcgcaaggtcggagagttctttcta

SEQ ID NO: 40897 - DNA, 250 bp, Glycine max
cacaagactacaattagtagctaattgaaagtgacggattggaagaagggcggtcaaatgatgaacattgtgatgcatctgaatgcactgatcaaaacgcatgattgggcctcatggggccaggtgtttttaacaatccactaccatgcaaagcattcagatgcatgtaagtggacacaatcagaaccacatgcgcgggaagtgatcatcccaatataggaatgtcgtcctaataaggcaccagaaatga

SEQ ID NO: 40898 - DNA, 422 bp, Glycine max
ggatgatgaatgcttctgattcaaatgataatattcgtttactgttgagcattgatttgttgggtttacaaggagcaggtaaagcttttccaaacaaaattgtttttgatgataagcttgtgttggctaacacacaagaattctttgatggaaattttccagtggattcttggttaccaatttttgtgaattgtctttatcctgtaagtcaattaccttcagaagctgtcgttgtaaatgttacatgtggtagtggacgtggtggtttacccaccactgcttggattagttctgcaattaacaatcgctcctcaaatatcaacaaaaggattcgcacagcacttgtgaaaggtaagaaaattgtttttcttactagagttgattcttttccagtagctttactggctgttctttttggtgtt

SEQ ID NO: 40899 - DNA, 345 bp, Glycine max
tttttaatgagatgctcattatatatagctatgaagaattactgcgccaggctaaagctccaagtatgtttttacaatccttcaaaaattttgtttctttgtgtgtgtatggtgatgataacttaattagtgttcatgaatatgtcaagccttactttagtggttctaaattgaaaagctttctagctagtcataacatcaccattactgatggtattgacaaaactagtgcaactttgcaatttagaaagctagcagattgtgattttctcaagagaaactttaatcagatgtctaatgatttgtgggtggctcctgaggacactgcgagtttatgggcacaac

SEQ ID NO: 40900 - DNA, 507 bp, Glycine max
gacgttcacgcacgctgccgcatacgtgagctcggaatgcggctcgagcgttaattattcccaagagaaagatttgttggagcgcaagggttcctttgatattaaatctccctctacattggaaaaagtttcctctacaaaagcacaatctgttagtggaaaaacctgcaaatatgatataatcggtgctgactcacattcttcagaagattattctgaacaggaagatcatgaaaaacccagaaagattgatgccagattgagacaaagaatagatcctcaatacagatgaggttcaagctcagatgcaaacaaatttgtttaaattgtctctggatgatgttaaaactactaaaggttccatgttggatctgaaaatatctcaatgtaaaattgcacttgccaagaacacagttggacgaaccattctgcgtagagatctatcggcaaatttttcgacagagggcaattttagagcatgtgttgatatgcagcgcactcatcgta

SEQ ID NO: 40901 - DNA, 523 bp, Glycine max
cagcttgacgtcgcatgcacgcctgcacgcatacgtaagctcggaatgcggctcgaggattttgttattggtgtcaagttgacaaccataaagaatatgtgtgcatatgggctcaatcctggtatttcaggttctcgtcttttgggcaccattcctcagtccatttcacagcaaactgtttggaatcaaatggcaacagtgagaacaccattgaattttgattctagcaagcagagcttttgtcagttttctattgaccttctcggtggaggaatcttagtggacaaaactggagattggatcacacttatacaaaattctccaattagtaacttattgagagttgctgcttggaagaaaggctgtttaatggtcaagattgtgatgtctgggaatgcagcagtcaaaaggagtgattgggcctcattggtacaagtgtttttaacaaacagcaacagtacagagcattttgatgcatgtaagtggacaaatcagaccacattcctgggaatgatcttcccat

SEQ ID NO: 40902 - DNA, 320 bp, Glycine max
atcaagtggtgccttttaccacaccatggaactgtgactctagcaagcgcagctgatgtcagctatgtattgaccttcggggtggaggactcttagaggacagcacgggcgatcggatcacacttatgcagaatactgccattcgtaactggctgagatgctgacgcttggatgaatggctgacctatggtcaagattgtgatgtttggggatgcaactggcaaaaggagtgattgtgtcttataggtgcatgtggcagtaacaaacagcatcagcccagaggcttatgatgcctgtgcgtgtacagaatcagatctaca

SEQ ID NO: 40903 - DNA, 342 bp, Glycine max
cgtctttgaagttgttaagatgactgcttcctacattaaacggacacactgttgcttcatagcatctgaaaatatggctgatgataccatcaataagaaggcttatcctcacaagctggagcgcataggagagatacatgaaaaagtagctgtgaacacacaacaagaggtatgtattacagcatgatgaactcaggggcgagcagcagcaactaataacagctgatgggtgtacatatgagtatgcattggtgcatgatagggcagagtcgacaataccactgggattttgtgattatgtgtcaagatacacaaccatgatacaatatgagtgcatatggg

SEQ ID NO: 40904 - DNA, 221 bp, Glycine max
agttgacaaccatttacaatatgtgtgcatatgggctcaacgctggttttttaggtgctggtctcatgctcaccattcctgagaccattccacagcaaactgtgtggatttaaaaggccacactgagaacaccattgaattttcattctccctagcaaagcatttgtcagatatttattgaccttctcggcagtgtattataaaagaaaacaaatctttaa

SEQ ID NO: 40905 - DNA, 362 bp, Glycine max
ttgaagtttatagccttagccttccctacaactccgggcctttacatcatcgggatggcttcctccgtctacactgtcggagctgtcaacacagctctcttgaacctgaatggctctggagctggagcttcagctacgctacagaggagtctcggtccattgctttacaagaaccccggtttgatgagtacttaccatgtgctacacctgagctggagtatagaagaatgaacattggcagtcgaccgtcaaaacgaaaaccaagcggacgaattgaatcagttggtgcaatcccttggatctttgcttggactcagactagggttcatctacctgtatggcttggctttggggcagcattt

SEQ ID NO: 40906 - DNA, 294 bp, Glycine max
ttggggtggcagtccatccagtgacacaaatgatatcgcaatgcaggatgttcaggttacaattgattggtttatcccctctcaggaaagaccttcctggactcacatacatcctgcaacacaacgccggccccgactgcacccatgtgttcttgcccatccactccatccactccaagcaaccactccaagactaccgaatcggcgagctcaccaccacctcctacaacaatatctcttcatcttcgcaccctttcgtgcatgaaagctcctacatcatccctacgaccccct

SEQ ID NO: 40907 - DNA, 456 bp, Glycine max
  unsure (1)..(456): unsure at all n locations
gctaccacctttatcacctctaaacaaaaaaaccatcaatcacaaggggtaaggagaagggtcacgtcaacgtcntcgtcatcggacacgtcgactccggcaagtccaccaccaccggtcacttgatctacaagtgcggaggtatcgacaagcgtaccatcgagaagtttgagaaggaagccgccgagctcggcaagtcctccttcaagtacgcctgggttctcgacaagctcaaggccgagcgtgagcgtggtatcaccatcgacattgccttgtggaagttcgagacccccaagtacaacgtcaccgtcattgacgcacctgggcaccgtgacttcatcaagaacatgatcaccggtacctcgcaggccgactgtgctatcttgatcatcgccaccggtatcggagagttcgaggctggtatctcgaaagatggccaaacccgcgagcacgctc

SEQ ID NO: 40908 - DNA, 462 bp, Glycine max
  unsure (1)..(462): unsure at all n locations
agatcgagtattacaaatttcagctagtggtcatagtgtcactggtgattgtgcttccaaacacacaaaggtggggagaaaatgggcatgccataatttgtaggattgctcaatctcgcctcagcgattcaaccgcaaatgctgtgaaaaacctgctaccagaatatgcacaaaacgacttaagaaatgtgtgctcatgggctgatcgcgtcaagttttatttgcactggtctgctccattgcactttgttgatacacctgacaacctttgcaattatcaatctgacacggattgcaaggatcacgatggagtgaaagcaagatgtgtagtgggagcgattaagaactacactgatcagctgctcgactatggcatatacactgaatatgacctcacacacgctcttatgttcctttctcattntatgggagatgtgcatcaggctatacatgtggacttta

SEQ ID NO: 40909 - DNA, 355 bp, Glycine max
cggcgtaagctcggaattcgggtcgaggcttttccaaacaaaattgtttttgatgataaccttgtgtgggcgcacacacaacaattctgtgatggaaattttccagtggattcttggttaccaatcatagtgaatagtctgtatcctgtcagtcaatcaccctcagtcgctgccacaggaaatgttacatgtggtcttggacgtggaggtttacccacgactgttaggattagttctgcacttaacaatcgctcctcatatatcaacaaaaggattcgcactgcactttggaaaggtgaaaaaattgtttttcttactagaattgatcctcttccagtatctttactggctgttc

SEQ ID NO: 40910 - DNA, 232 bp, Glycine max
gacagattatcaaactcaacaaacttccttcagtttttgggaagacatgcttttatcatgcaagaagagctaccatcttcatctgaagatcacattggtgatgaaagatatcattttatgtcacttcttttgaacttggcaaatacatttttgtatattgggaacacttacattattgtacctaccgcagacaactatactttgagccttggagcttcaacaagtgtgtgtg

SEQ ID NO: 40911 - DNA, 358 bp, Glycine max
cggctcgagctcgagccgttgatttactgttgagcattgatttgttgggtttacaaggagcaggtaaagcttttccaaacaaaattgtttttgatgataagcttgtgttggctaacacacaagaattctttgatggaaattttccagtggattcttggttaccaatttttgtgaattgtctttatcctgtaagtcaattaccttcagaagctgtcgttgtaaatgttacatgtggtagtggacggtgggtttacccaccactgcttggatagttctgagttacaatcgctctcagatataacaaaggatccacagacttggaaggtagaaaatgtttctactgagtgatctttcagac

SEQ ID NO: 40912 - DNA, 259 bp, Glycine max
aaacatgcaggtgcatttgttcggccggttagtgtggcctttcaggtggtgaatgggttccatttctacgagaatggagtttacactagtgacatttgcggcagcacttcccaggggagttctataaatgattacctggcttttgatagacaaatcaagtgcctaataaaattttgaaaacaaaatggttggctacaagtttatgctttgcgacaatttatctgaaagaggaacactagtgatatactgtttaacacac

SEQ ID NO: 40913 - DNA, 378 bp, Glycine max
caataagcccaaaaccgagtacgtccaaacctttggtcgtaagaagaacgccgttgctgtagcaacctgcaagactggtaacggtctcatcagagtcaacggcctcccccttgacgtccttgagccctccactttgagaattaaggtatatgaacccattctccttttgggtgccaagactttcagcggtgtcgatattagaatcagagttagaggaggtggttacactggtcaagtctatgccatcagacaagcagttgccaaggctatagtcgcttaccaccagaaattcgtcgatgagaactcaaagagagaacttaaagaaagattactacaatacgacagaaccctcttggtcgctgatccaagaagatgtga

SEQ ID NO: 40914 - DNA, 416 bp, Glycine max
ctcgagccgattcggctcgaggagaaagagaagtgtgtagttggtgaagtttttgagaagaatatggaacgaagtggcggaatggtaacggggtcgcatgaaaggaacgaacttgttagagttagacacggttctgacagtggggtcggtgtcttttggctttctttcaacactttttttgcttcatgggacttttgatgaagactatgttttgtgttttttctcaattggctctcagaattttggtctttcactgtgtgtgattgacttcaaagtttgaatttttatgcttgcaatggaaatgggtcatgcaaagtttattttttaaaaatattatgtaggggggggcttgtttttgttttttccttgctttaagggttggggtggggtaatttgtgcattctttttgtgggttg

SEQ ID NO: 40915 - DNA, 371 bp, Glycine max
cgtaagctcggaattcggttcgagtctatccaaagattttgataatgtctagctgtgggtgtggaagcaggtgctactgtggcagcaactgcagttgcaacaagtactcttttgactacgttgagaagatcacaaatgaagactctagttttgggtgttgggccggtgaaggcccaattcgagggtgctgaaatgggtgttgtagctgagaacggtggctgcaactgtggatcaaactgcacttgcgacccatgcagctgcaagtgagatcaacatgcataaccttcaagcagagatagcttgtatacatgtatcaataaataataaagattgtgttggggtttgaagttttaaaataaagtggtcatggc

SEQ ID NO: 40916 - DNA, 360 bp, Glycine max
gaattctttgatggaaattttccagtggattcttggttaccaatttttgtgaattgtctttatcctgtaagtcaattaccttcagaagctgtcgttgtaaatgttacatgtggtagtggacgtggtggtttacccaccactgcttggattagttctgcagttaacaatcgctcctcagatatcaacaaaaggattcgcacagcacttgggaaaggtaagaaaattgtttttcttactagagttgatccttttccagtagctttactggctgttctttttggcgttaagaatgaaattctgagttctaacgccactaatcctatgctgacgcgacttcttgagaactgtaagagtcttaaa

SEQ ID NO: 40917 - DNA, 436 bp, Glycine max
ttcggttcgagttgagatagtgcccatgaatttgacaagccacactttagtggccctggagtgaaaagctctctagctagtcataactatcactcattacatgattggtatgcgacatatactagatgcaacttttgcacatttagaaagtttgcagattgtgattttctcaatagaaactttaagcagatgtctaatgttttgtgggtggcttcctgctgtcatggcgagtttatggtcacaacttggttacgcttcgtgtaataatctcgaaacgccaagaagcttatcttgccaaccttgtagatgtgttacgagaattgtatttgcacaattcaaaggaggcttgtcatatgagaagggatggtctcttttgaaaaaaatggctgcataaagcttttttgcactaccttgcctcagattgtatagtttcatt

SEQ ID NO: 40918 - DNA, 476 bp, Glycine max
ctgtgctatgaatagttcttttagggggcgcgccagttctgatatttacaccatctgctctcaagactgtgaattgtggaatcctgcttgcacaaaagcaatgactatgtcatttaatccaaacccgtgttctgatgcatggagtttggaatttctgaagcgtactggatttcattgcgatatcatttgtgtcactggatggactgccaccccaatgcaggatgttcaggttacaattgattggtttatttcctctcaggaatgtgttcccaggacctattgtgttttaaatccacaaaatccttttgtgttaaataggtggatgggaaaattgactttcccccagggcacttcccgaagtgttaagagaatgcctctttctatagggggaggagctggtgcaaagaatgctattctcatgaatatgccaaatgctgttctttcaatgtggagatattttgttggagatctcgtct

SEQ ID NO: 40919 - DNA, 492 bp, Glycine max
gacactatagaagagctatgacgtcaggttcgcacatacggttggaggttggagatctcgtctttgaagttcctaagatgacttctccctacattaaatgtccagtctctttcttcatagcatttggaaatttgggctgatgataccatcaattttgaggcttttccccacaagctggtgcagtttggagagattcaggaaaaagttgtattgaaattttcacaagaggaatttcttacagcttggtcaactcaggtgcgtcctgcaacaactctgttggctgatgggtgtccatatttgtatgcaatggtgcatgatagttcagtgtctacaataccaggtgattttgtcattggtgtcaagttgacaaccataaacaatatgtgtgcatatgggctcaatcctggtatttaggttctcgtcttttgggcacccattctcagtccattttacagcaaactgtttggaatcaaatggcaacagtgagaacac

SEQ ID NO: 40920 - DNA, 369 bp, Glycine max
acactttctcagtgccatgaagaagaggccagagctccaacaacaccaagactttgaagttctgaaagctgttgcacaggcatggtacagccactccggcacttgcaagcccatgagcgaatttgaagcgcacagaagaaacttcagaggcaagccttcaaggtttaagcttgaagcattgaacaagccacaagcttcttcttccagttctagggacacttctacttactgggattttcagcagtcactttgggactcctatgagcttgtcacagtgtccagaaggattgagactgggttaactttggataacccttttgatgaattgtgtggttcccctccaatccaacaaaagcgcaagcctgagag

SEQ ID NO: 40921 - DNA, 382 bp, Glycine max
ctcgagccgctgtccgccaaggagatctccgaggttatccttgttggtggtatgacccgtatgcccaaggtcaccgagtccgttaagagcatcttcggccgcgaccccgccaagtcggtcaaccccgatgaggccgtcgccattggtgctgcgattcagggtgctgtcctggctggtgaggtcactgaccttctcctcctcgatgtcactcccctgtctctcggtatcgagaccctcggtggtgtcttcacccgtctgatcaaccgcaacaccaccatccccaccaagaagtcccaggtcttctccaccgctgctgacttccagtctgctgtcgagatcaaggtctaccagggtgagcgtgagctcgtccgtgacaacaagc

SEQ ID NO: 40922 - DNA, 196 bp, Glycine max
  unsure (1)..(196): unsure at all n locations
ccaaagcctgcctagaacgaaaaaaaaaaagaagagcaattttccctcaccaaagaagaagaagcaaacaatggccgatcaacttaccgatgaacagatctncgagttcaaggaagccttcagcttgtccgacagggacgggaatggtggcttaacacccaaggggctgggaactggtttgcgttcatgggggcaa

SEQ ID NO: 40923 - DNA, 269 bp, Glycine max
  unsure (1)..(269): unsure at all n locations
cgtagcatgcacagcttacgtaagcgtataattcggctcgtgctcgagccgaatcggctcgngaaaaaaaaaaaaaaaaaaagggaaaaaaaaaaaaaaaaaaaaaaaaaaaaaaaaaaaaaaaaaaaaaaaaaaaaaaaaaaaaaaaaaaaaaaaaaaaaaaaaaggggcggcccccgcctagtgacctcttcaccccgggatttatttccggaccggtccctgcgggcgtaccagttttccttatagggagtcgttttaaagcttgg

SEQ ID NO: 40924 - DNA, 428 bp, Glycine max
acctgttagcaataatttgaatggccaaaggtcaagggtgaataatttagtaataacatatattgttcttaagacaattttggtaagtatcattgctttgtagctttgaaagttctctcaggggtttataatgtgatttttggtgttaatgccgcaatgcttaactattaggacactacctgcaagaaacatcgccaagagctgataagaaaatgcagttatatcatcatccgttggatttggacagccagagggtgagatttgcattggaggaggagggtgtagattatacatcccaccatgtcaatccgataactggcaagaacttggattcctctttcttcaagatgaatcgccatggaagggttccggttttccaaaatggctctcacatcatttacaatactattgatataatccagtacata

SEQ ID NO: 40925 - DNA, 270 bp, Glycine max
gcaaacactattgcctggaaagggctaacacgcaatgacattaggagggaacaagaacaggggattcactgaccaaacattaccagatgagcttgtcaagagaggatcgactgccgaggaaccctgtgccccacaaggtctcatgcttgagatagacgactaccctaatgcatgacgatggacttgaaatattggatgctaataagacatgtgaacatgagcatgtctatgtgtattacccaacaaatgcagcaatataacaggacactg

SEQ ID NO: 40926 - DNA, 274 bp, Glycine max
ctcgagccgattccgctcgagctaaattgcaaagctgtctagctggtcataacatcaccattactgatggtattgacaaaactagtgcagctttgcaatttagaaagttagcagattgggattgtctcaagagaaactttaagcagatgtctaatgtgttgtgggtggctcctgaggacaatgcgagtttatggccacaacttcattatggttcgggtcataatctggaaatgcaagaagcttatgttgtcaatctcggcaatgtgttacgaga

SEQ ID NO: 40927 - DNA, 264 bp, Glycine max
gctgattgtggtcaagattgcgatgcctgtgaatgcaactgccaataagagtgatggtgcctcatagctacaagtgttcttaacatacagcagcattccagagcattgtgatgcatgtaagtggacaaaatcagaaccacattcctgggaattgatcttcacaatagagtttgttgatctaattatggctttgaaatgttgggttctgagtggtcaaaataaactttatggcatttgagatttcttattgacaattccaaacag

SEQ ID NO: 40928 - DNA, 323 bp, Glycine max
gacactatgaagagctatgacgtacatgcacacgtacgttagctcgtatttccgatcgagcgccaactacaacactgcctgtaaccgcttagttgatgtccagtcattggcctcaagtccatggctggttaccgaaccagcaagaccaacaatgacattacctccattgctagcaccggtggaagagtgcaatgcatgcatgcgtggtcaccagttggcaagaagaagtttgagactctttcctacctgccagaccttgatgatgcacaattggcaaaggaagtagaataccttcttaggaagggatggattccttgcttgga

SEQ ID NO: 40929 - DNA, 319 bp, Glycine max
cgagaactaccacaatgcatctaatagcttattcgatgtacgaacatttggggccattggagatggaataactgatgatacagagtcattcaaaatggcatgggacactgcttgccaaagtgaatcgccggtcaaagttatccttgttccccaaggtttctccttcgttattcaatctactattttcacaggtccttgtaaaggtggcttagtactaaaggttgatggcactcttatgccacctgatggacctgaatcttggccaaagaacaatagtaagcgtcaatggcttgtcttttttagaatcaatgggatgtca

SEQ ID NO: 40930 - DNA, 186 bp, Glycine max
ccaaacacaaagacttatattatccgtggttgcctccgtatacactgtcggagcttgaaacagagctcttttgaacctgaatggttctggagctggagcttcagttccaagttcagccttctttgggaccagcttgaagaaggttattgcctcaagggtccccaacagcaaggtttccggtggaag

SEQ ID NO: 40931 - DNA, 435 bp, Glycine max
aatgatattaacaatgaggagcaggcattacaatgtaggagcccgtgggctactttatcacctgatctgttcatgatggagttaagacaagctaaaatgagccttggtaaaactataagtgatctcagggcgatacagtcttctgttgaagctttgaataagaagatgaagaaggataggctttttgttgagaggacccgtgagaagctagcatcaaagtttgctgctgtatctgctcaagaagtggccagaaaagaagcaaggttaactccacctgaagctactgtaggaacaagttgcacttgtcatcatctcctaaatgttgggaggagtttcaaatttgatactggacagtcaaatggaatgagtgaaacaagaatatctgaagtttcaaggcccttgcctgagtttggagagaatggaattagtattaag

SEQ ID NO: 40932 - DNA, 276 bp, Glycine max
tgcacgcgtacgtaagctcggaattcggtcgggtatctatcatgaggctggtcatgctctgagggggctaaatgccacaatatgaccctggacccaagatgtgaattattccttggggccgagcgggaggtctcacatgctttgctcccaacgaagagaggctcaagtatggattgtacagaccaagctaccatgcaaatcatacgggtgatgccctcggcggaagggttgtcgaatagggtataaatggccaggaaaatggcacgcaccggatca

SEQ ID NO: 40933 - DNA, 330 bp, Glycine max
tttgactcggtatgtgatgaattacataagtttgatctctgattacaaggttactttgaatgagcttatagtgtcgaagccctcaacggggtctaggtattctggtgatcctgggatacctgatatggatttgagtgagtttgaggagaagacacctttggatgttcacttgatttggattattgtgatattgcaattcaacttggatgggaagagtaagcactacagggatgcgtctttggctcacctttttgtcatgaacaatgtgcactacattgttcagaaggtgaaggggagtcccgagttgagggagatgataggggatgacta

SEQ ID NO: 40934 - DNA, 384 bp, Glycine max
cgccaatctcacccttcgtcgaccgccgccaacacaccagcctcgacaatgcctcccaaaggatccggaaagaagcctgcggctttcccccaggccacctctaaggcctctgccgccaagaagcaaaagaaccctctcatcgagaagcgtcctcgcaactatggcatcggtcaggacatccagccccagcgcaaacgtcggccgcatggtccgatggcccgcttacgtccgccttcagcgccagaagaagatcctcaacatgcgcttgaaggtcccaccggcgattgcccagttccagcacgttgccgaccgtaaccttgccacccaggctttcaagatcctcaacaagtaccgtcccgagaccaaggccgagaagaaggagcg

SEQ ID NO: 40935 - DNA, 298 bp, Glycine max
aaataaacaaaaagaaaaatgagtactaagtactaataccatataataattattaaaacagaaagaggaggtactacttgtattgggtaacgcgctatggcgggcgaatcgggtggtagtgctacgaacttgaactttgatcttcccgaggaggtggtgcaagtgctaccgtccgatcccttccagcagctcgatgtggctcgcaagatcacttccattgctctatcgacacgtgtcaacaccctcgaatcagacctatcctcacttcgcgcccagatcgccgacaaaaacaacctca

SEQ ID NO: 40936 - DNA, 396 bp, Glycine max
  unsure (1)..(396): unsure at all n locations
ttacgcatgcctcgactgatcgtcgattcttagatggtccagaccattggtttaaatcacnaatccttttggttaataggtggatgggaaaattgactntcccccagggcacttcccgaagtgttaagagaatgcctctttctataaggggaggagctggtgcaaagaatgctattctcatgaatatgccaaatgctgttctttcaatgtggagatattttgttggagatctcgtctttgaagtttctaagatgacttctccctacattaaatgtacagtctctttcttcatagcatttggaaatttggctgatgataccatcaattttgaggcttttccccacaagctggtgcaagttggagagattcaagaaaaagttgtattgaaattttcac

SEQ ID NO: 40937 - DNA, 464 bp, Glycine max
gttaaaccactggtttaacatgcccatcaataaagtcaaaggagctcttaaattggttgaaagctggacttatagaatcatggtttgtgataaccgttagtccaaactatgctaaagaactggtgtcaggtccagacaaaggagtggaattggacaacatcattcgcaaaattgatgatgatggtcgtttggttggaattgtgaatggcatggatgttcaggagtggaatccaaccactgacaaatatatagctgtcaaatatgatgtttcaacagtattggaagcaaaggctcttctgaaagaagccctccaagcagaagttggattgccagtcgacagaaatattcctctcattggtttcattggtaggcttgaagagcaaaaaggttctgatattcttgcagaagccattccccaatttatcaagcagaatgttcagttggtagccctaagaacaggaaaa

SEQ ID NO: 40938 - DNA, 279 bp, Glycine max
gtaagctcggaattcggttcgaggcgtctactcccttacgtcaaaggcaacgtcggtttcgttttgaccaacgacgacctcaagaccatccgtgacatgatcgtctccaaccgagtcgccgctcccgctcgtgctggtgccatcgccttgaacgatgtgtccgtccctgctggtaacactggtatggagcccggaaagacctctttcttccaggctttgggtatccccaccaaaattgcccgtggtaccattgaaatcaccgctgaggtcaagctgatc

SEQ ID NO: 40939 - DNA, 315 bp, Glycine max
attaaatgtacagtctctttcttcatagcatttggaaatttggctgatgataccatcaatttggaggcttttcctcacaagctggtgcagtttgtgagagattcatgaaaaagttgtatcgaaattttcacaagatgaatttcttacagcggtgtcaactaatgtgcgtgctgcaataactatttttttctaattgttgtacatatttgcttgcttttatgcaatatattgcatggtatattactgaagtgatgacgagatcaaatttaatttgaatattgatattgctttggagcatttttgagcaaatgaaca

SEQ ID NO: 40940 - DNA, 329 bp, Glycine max
cggacatggcaagttttgatgacaccatacttggccgaatgaactgtttctgccgagcactgacggcctaaggatattattattatgtgaggcaatgattctagggtggatgggttgacaacgaagcaaggaatcagcaagactgcaaaaatggtccacaaactttggagcagtcataaataactgatgcgaaaaacgacccacatggtgacatgctggtgcaaaaacatgacaatgtgaaaaaaggacaattggctagcaagatcttgaactaggctgttattggaaatgctaacgatgatgctattcataggggaacagactctcat

SEQ ID NO: 40941 - DNA, 345 bp, Glycine max
gggcaatagcggccctcacattgtcctcgccacctacttcggtgacgtggtccacaactgcgatgtcatcgactctgccctgaccggcacctacaccttccacgttgacctcgttcgccacccaaaacagctcatccaggtcattgaccacctcggaccaaagcagatcctctctgccggtgtcgttgacggtcgcaacatctggaagaacaacttcaagaagtccattgagactgttgaggctgccatccagaagctcggcaaggagcgtgtcattgttgccaccttcagctcgcttgtacacaccctacacacgctcgccagcgagaagaacctcgacgagga

SEQ ID NO: 40942 - DNA, 391 bp, Glycine max
acacttgactccatgcacgcgtcgaagctcgaattcgctcggcttattgcaagtggaatcaaaccatactccatggaatggactggtttggccaatagattacttgagtagggcaatgatattctgtgttgcgattatgctagttttgatggtttgattaccaagcaagttatgagcaagatggcagaaatgataaacagtctttgtggtggtgatgaaaaattgatgcgtgaaaagacgcacctgctgttggcttgttgttcaaagatggcaatttgtaagaaagatgtttggagagttgaatgtggaattccttctggatttccgctcacagttatttgcaatagcatttttaatgagatgctcattagatatagctatgaaaaattac

SEQ ID NO: 40943 - DNA, 407 bp, Glycine max
cggctctatgcaatttaaacttcatggcatttgagggtcctggttgacagtcggaaacagtctacagatattgatatacacttgggaatctctcaagattctgaaattgcggtgtaatactatttatgccagctattttctgttgcacaggctactagacatatctattgaaaatgccggagccagtgtataactccgaatatgtgtttacaatccttcgaacatttggtttatttatgtgtggatggtgatcatgacttaattagtgtgcatgaatatgtcaagccttactttagagagtctaaattagaaaagctttttatctgggcataacatcaccattactgatggtatggacaaaactagtgcaactttgcaattggggttgtttgcatattttgattttc

SEQ ID NO: 40944 - DNA, 187 bp, Glycine max
gggattccttctggattttcgctcacaagtatttgccataacatttttaatgagatgctcattagatattactattaaaaaatactgcgcccggcttaaacttccaagatggttttaccatccttcaaaaaatttggttctttggggggggatggggaggataacctaaataggggtcatgaatatt

SEQ ID NO: 40945 - DNA, 237 bp, Glycine max
  unsure (1)..(237): unsure at all n locations
gacgtcgcattgcaccgcccgtacgtnnaagactcggaaatttcggctcgaagtcgaggggttttgggttttctcttttcttcccttggagaaaaagaaaagccaccgctgcgacgccgctcgtgcatttttgaggtgccgctgtcatgtttgggcgtggtggaccaaagaggagtgataactccaaatattatgatattctcgggatttccaaaaatgccagtgaagatgaaatca

SEQ ID NO: 40946 - DNA, 273 bp, Glycine max
ctatgaacacacgctccatgtttcctagtcccaatgagtactcttcttttatgggtgactacactacagccaccagactcgcacattctcaaaggctcatgcacaacagcacatatttgacaagtatggatggggagttgctgccacaatcacccctacggtcctgctttagacaggagttggtttcttttctcttatattgtttgggggcccgcttgcacctggtcttgcaagtcaatgaatatacttcacctatagctattataaatatca

SEQ ID NO: 40947 - DNA, 342 bp, Glycine max
cgccaattgagaaggaaagctctctctcgtattgaatggctgcaaaaagctgatgtgcgtaccatagcacagattgaagagttccattcgatgcagaggatgatgaatgctcctgattcaaatgataatattgatttactgttgagcattgatttgttgggtttacaaggagcaggtaaagttttttcaaacaaaattgtttttgatgattagcttgtgttggcttacacacacgaattctgtgttggaaattttccagctgattcttggttactaaatttttgtgaaattgttttaattctgtatgtcaattacctttacaagctttcgtatgtatatttt

SEQ ID NO: 40948 - DNA, 194 bp, Glycine max
gaacaagtagttgagaactaagaaggagaagcaaatggctgcgtcaatgatctcttgcccagctgataccactgacaaccgtgccggttccggcatggttgctccattcactggccttaagttcatggctggcttgcgcatcagtatgactaacaatgacatgacctatattgctagcaacgggggacgagtgc

SEQ ID NO: 40949 - DNA, 325 bp, Glycine max
acaaaaaacaaaaattaaataaacagggcacaacaaaatctgggcgcactcataaataacaggaactgcgctactttcatgctacatttagcctggcacgataccggaacttactatgcttagaccaataccgtttgacctaacaaaacgattcggatctaggatgagtattgttacgtaacctttaatggctgaaaaaaatctgttggttttttcctagaagctaaagcagattgttctaaaattgcataatcacatctatgccaactatcttgtgttttagcctctgatgtaactaaaaatccatcaattgattttgattatg

SEQ ID NO: 40950 - DNA, 426 bp, Glycine max
  unsure (1)..(426): unsure at all n locations
cacacactcaccaggttaaattatgtgactttggaagtgcaaaggttttggtacgttatatatgtctgcatttcagccccttcctccttaaattattcctcttcattcaacctttctgttttccttggttagattgtagttttacttttccttatttggtcttgacctttgacaggtaaaaggtgaaccaaatatatcatacatatgttctagatactatagagcacctgagctcatatttggcgcaactgaatatactacagccattgacgtctggtctgttggatgtgttttagctgagctgcttcttggacagcctttgttccctggtgagagtggagtngatcaactttgtgagattatcaaggttctgggcactccaacaagggaagagattaagtgcatgaaccctattatacagaattt

SEQ ID NO: 40951 - DNA, 399 bp, Glycine max
gatgaaaaattgatgcgtgaaaggacgcacctgctgttggcttgttgttcaaggatggcaatttgtaagaaagatgtttggagagttgattgtggaatcctttttggatttccgttcacagtatttgccaatcacatttaaagagaactcttttatatatctcttaaaattctcggccacgcttagctccagttgtttttcaattcttcaaaattttgttctctggtgtgttgggatgatactaattaggtcataatattaagcttcttatggtctaataaagctttactatatactacctctgtggatgcaactatcacttcattaaagacaatgattttcaaaactacaatttatgttggtgtctggacagagtatgccactctattcttatattga

SEQ ID NO: 40952 - DNA, 398 bp, Glycine max
ggggaggtggcatcgagctcagcatcttatcacaggagttcgacatcgaaatcgccagtatcaacgtgcaggatcttagagtggaccgcttcaacgagacaaggtcaaagcgctgtatccttgtatactcgggcatccactacgacactatcgcacttgttccgtatggctcgccaacgtatgatccagaaaacgatatcaagcagttcgacgtagacgatgacgtcgtgctcgaggctgcacgacagctctgcggcgagctaaagaagaagaactactttacagacactcaaaaatttagtatcaaatgcaacacttgcgggtggaagggtgcgggcgagcaaggcgccacacagcacgctatggacaccggccacactgattttggtgaagcgagc

SEQ ID NO: 40953 - DNA, 159 bp, Glycine max
ttgaagagtaacattcgatgcataggatgatgaatgctcctgagtgaaatgattatattgattgactgctgagcattgatatgatgggttcacagggagcaagtgaagcttctccaagcaaaattgtttttgatgataagcttgcgttgcctaacacac

SEQ ID NO: 40954 - DNA, 375 bp, Glycine max
ggagcaggtaaagcttttccaaacaaaattgtttttgatgataagggtgtgttggctaacacacaagaattctttgatggaaattttccagtggattcttggttaccaatttttgtgaattgtctttatcctgtaagtcaattaccttcagaagctgtcgttgtaaatgttacatgtggtagtggacgtggtggtttacccaccactgcttggattagttctgcagttaacaatcgctcctcagatatcaacaaaaggattcgcacagcacttgtgaaaggtaagaaaattgtttttcttactagagttgatccttttccagtagctttactggctgttctttttggcgttaagaatgaaattctgagttctaac

SEQ ID NO: 40955 - DNA, 212 bp, Glycine max
  unsure (1)..(212): unsure at all n locations
tcaggttacaattgattggtatattccctctcacgaatgtgttcccaggacctattgtgttttaaatccacaaaatccttttgtgttaaataggtggatgggaaaattgactttactccagggcacttcccgaagtgttcagagaatgcctctntctatacgggcatgagcaccccccaaagaatgctattctcatgaatatgccacatgct

SEQ ID NO: 40956 - DNA, 348 bp, Glycine max
ctttgattctttatctatctcgctcacgaaaaatagctccaggcaacgtcggaaaccggatttgtcaaacccatccgacaaccatggagtaccgcaacaaacttgttctcgctcctatggtccgcgttggcactctcccatttagattactagctgctcaatatggtgcagatatcacttactgcgaggaaatcattgaccacaagatgctaaagtgcgagcgccgaattaacgaactcattggatccactgattttgtggagaaggggacaaacaatgttgtgtttagaacctgtgatgaagaaaaagatagggttgtgtttcaaataggaacatcagatgctgtga

SEQ ID NO: 40957 - DNA, 474 bp, Glycine max
  unsure (1)..(474): unsure at all n locations
ctcgagcctgagctttttctatccacgctcngagcactgtcgttgggggtagtcttaagcggaccgactgttcttcgtgggccacatcatccgaagccagcagtcgaacatgtattgactgtcgtagcacgcgttcttactgggccaaactaacttgacggcaactgaggtcttgtgcagactgtcccaaacagtctacagtcttttgattattcttcttgggaatctctcaagattttgaaattgctgggtatactcttatgccagctttttctggtccacaggctactgccagaacttctgaaaatgcggaatcctctgcatgatctggaatatgtgttactatcgcttgttcgcttgtttaatgcaatacaggaaattaggccatgaccctcttgttgagtatgctctgcctatttgaaaatttccacaccttttttaattgtcgtaatgatgtgtgaagtggtgttattt

SEQ ID NO: 40958 - DNA, 342 bp, Glycine max
agttaatataaattttttattttcgttaaattcccaaaaagggggggttattaataaaataggggtggttatcatctattaagctggcacctccccgaattgtgaacagaatgcctttttctatatggggaggagctggctctaaaaatgctattcttacttatatgccagatgaattacattccagtgttaaaatttttataaggggatttctgtgttaaaattttttattttatcttttactaaaatcattgcgcctggttccttttcataacatttggaaatttggctgatgataccatcatttatctttttgtttgtctcttaattctctctttttta

SEQ ID NO: 40959 - DNA, 417 bp, Glycine max
tgcaattgaagttgaagtcttgcccttctctcttcaactccaaacacaagacatcatcatccatggctgcctccgtctccactgtcggagctgtcaacagagctcttttgaacctgaatgggtctggacctggggtttcagctcccagttcatccttctttgggagcagcttgaagaaggttattggctcaagggtccccaacacaaagatttcctctggaagcttcaagattgttgctgtagaagagaagaaagagattgaagagacccagcagaccgacaaggacagatggaagggtcttgcctatgatatctcagacgaccaacaggacatcacaagaggaaagggtttggtgactcccttttcagctcacagatgctgactactatctgcatgagctctacagacctacactg

SEQ ID NO: 40960 - DNA, 458 bp, Glycine max
  unsure (1)..(458): unsure at all n locations
gagaaggaaagctctctctcgtattgaatggctgcaaaaagctgatgtgcctaccatagcacagattgaagagttccattcgatgcagaggatgatgaatgctcctgattcaaatgataatattgatttactgttgagcattgatttgttgggtttacaaggagcaggtaaagcttttccaaacaaaattgtttttgatgataagcttgtgttggctaacacacaagaattctttgatggaaattttccagtggattcttggttaccaatttttgtgaattgtctttatcctgtaagtcaattacccttcagaagctgtcgttgtaaatgttacatgtggtaagtggacggtgtggtttacccaccactgcttggattagttctgcagntaacaatcgctcctcagatatcaacaaaaggattcgcacagcacttgggaaaggtaagaaaattgtttt

SEQ ID NO: 40961 - DNA, 360 bp, Glycine max
ccgctagacaggatctgttaatactgactagttgtccagttgagcgtccttgacggactgactgcctacgatcttgcccctaatgacccccacctcatagacattctcaccatgaacggcgtcaacatatgcgtcgtcgagggcgaattcctcaacagcttgttcaacatcataagcgactggctgtttcctttactcgtattacacggcctgtatttgctcttccgcagagcccaaggcgggcccggcgggcctcgccgactgggaaggcccatggacttcgggcggaacaagtacaagttccaggaagcttcccagacctgcgtgagcttcgctgacttgacatgcgcggaccaagcg

SEQ ID NO: 40962 - DNA, 280 bp, Glycine max
accagcggctgagccatggtcattattgccgtgcttgggaatgcatctgtcagaaggtgtcattgcaccttattgtgacgagagttttatacacacaacgtctgtgccgagccttttggtgcatgatgctgggctaaatcagaaccacattcatgggaactgatcttgctaatagagggatgtggttctaatgatgcttttgaaatatagcgttcttgatgatcaactgaaacttcatggcattggagcattcttattgacgatgtcaaacaggctacat

SEQ ID NO: 40963 - DNA, 361 bp, Glycine max
aaattgacgagaaaaagaaagaggttgttgttgaaaaaactggaggccctgctgagagctatgatgatttcactgcatccttgcctgaaaatgattgccgatatgctatctttgactttgattttgtgacatctgagaactgccaaaagagcaaaatcttttttattgcatgatggactcgaagaaaacttattactgaggtctccttcggtagcccgcattcgccctaagatgctatatgcaacatccaaggacaggttcaaaagggagctgcagggcatccattatgagattcaggcaacagacccaaccgagatggatcttgaagtcctcaaagagcgtgcaaactgagcacctacac

SEQ ID NO: 40964 - DNA, 372 bp, Glycine max
cgaccatcatcgcacaccaaaatgagttctttagatctgttcgctccctctgcagagactcgtcgtctctcggttaagctcaccaatgatcaattagagaagatcggtatgacaaagcaggaggcagctgattttcaacgtctgagaaaccgtttcttggacaagccccttatggaatgggagagagtcaaacctcttcctgatgatttttgtaaatcggcagaagatctccctgaaccctccccaaagaaagcaaaagagctgctcaacaagttggtttttgtccaactcaacggaggtcttggcacagccatgggcctgaaatccaccaaatcaggacttcagatcttgaaacagggaggatctgcttac

SEQ ID NO: 40965 - DNA, 356 bp, Glycine max
ctagaattcctctatatggtgaatttacaagccagaatgctattattgctgagcggtttattgaaggaggtagcccgtatgtatccaaaaattgtacatgactattggccggtaattttataaattgaagttctaaactgcaacttattatatcattttcaaagcgctgaaaatatcttgtatagctttgcacagattgaaagtaaacaatttaattagcttaggaatataaactaacaactttgcatctctatctagcccttcctctaacttgctttataagtatattgctcctatacggctatactataaatcaaggaatgttcatactaggtttcagcaccaccttaagcaat

SEQ ID NO: 40966 - DNA, 366 bp, Glycine max
gaaaattgaccttctcagaactaagatcaagggagggcgattcctgaatgatctcctccccagctgctaccaccgtcaaccgtgccggtgccggcatggttgctccattcaccggcctcaaatccatggctggcttgcccacgaggaagaccaacaatgacattacctccattgctagcaacggtggaagagtacaatgcatgcaggtgtggccaccaattggcaagaagaagttcgagactctttcctacttgccagacctcgatgatgcccaattggcaaaggaagtcgaataccttctaaggaaaggatggattccttgctggaattcgagttggagcacggattccatttgagttttcttat

SEQ ID NO: 40967 - DNA, 347 bp, Glycine max
tcagaattcggttcgaggtctggttatgcagcagtcaaaaggagtgattgggggtcattggtacaagtgtctttcatgaatgtggtcccacggactattgtgtttttaatgcctaaagctccttgtgtgttaatacggtggttgggaaaatggactttcccccagggcccttcccgaggggttaaaagatggcctttttttttaggggggggagctggtccaaggaatgcttttttaatgattatgccaaatgctgttctttcaatgtggagatattttgttggagatctcgtctttgaagtttctaagatgacttctccctacattaaatgtacaggctctttctt

SEQ ID NO: 40968 - DNA, 356 bp, Glycine max
tttaatttactcaaatcctttaaatcatctaagtcgttcaaaacatacaactctttcaagtcaattatggatgaaatgccggggattgtaggtctttctgaaattgaccttgaagctttgataaagagaaaaagaagatcaccatatgtgaggattgtgagcaagcaaatggttgggattttcatcaccgattgggttcgtcggagcttgcgtaaacaaattcagaatttaaaggtttcaactgttggagttggtgttatgggctatattgacaacaagggatcaatctctgacagcatgtccatacatcagacgtttgtttgactcatatgtactcaccttacgtcaggttaaaa

SEQ ID NO: 40969 - DNA, 221 bp, Glycine max
agggtgtcttacgttgctcattacgttaatcagccccaagagaaagatttgttggaggggaatttttcctttgatattaaatctcgctcttgattggaaaaaggtttctctaccaaagcaccatttggtagtgggaaaacctctaaatattatattaatggggcctggtcacattctttaaaagaattttcttgaaagggaggttcaggaaaaccccaaaa

SEQ ID NO: 40970 - DNA, 370 bp, Glycine max
taaaaatgcctacccgcttctccaacacccgcaagcaccgcggccacgtctcggccggtcacggtcgtgtcggcaagcacaggaagcatcccggtggtcgtggtcttgccggtggtctgaggcaccaccgatcgaactttgacaagttccaccctggttacttcggaaagctcggtatgcgccactaccacttgctgcgcaaccagtactaccgccccaccatcaacatcgacaagctcatctccctgcccgaggcccaggtcgaggcccccgagggctcggtccccgtcattgacctgcagcacctcggcaagttcaagctgttgggcaagggccgcatcgacaagccgttcatcgtcaagacccgctt

SEQ ID NO: 40971 - DNA, 347 bp, Glycine max
ctcctgtgaatcagacctctttcagtgttctccatggggttgttggtcttcgtcaacacattccaaattgcacccaaaaaaagcttttgtttctcgatggatagaaatgcaaaaagaagggttagcaaatactagtttgaactcttatggaatttatgcttatgacacagtttgggcagttgcacgtgcaattgatatattcatcaaagtacacaatactattaccttctcgtttcctgataactataacttatctcatatggtaggaattggtattcagcttgacaagctcaaaatctttgctggtggatctgatcttgtcgccattttattccaatcaaattttc

SEQ ID NO: 40972 - DNA, 384 bp, Glycine max
gtaaaggtgacagaagatctgataggtcagtagtaagtaatgatagcacaaaatctgattctgcattagatgatcatgaagtcgctgaggttgacattccatgggaggaaatcacgctcggtgagcgtattggacttgggtcgtatggggaggtgtaccatggtgaatggcatggaactgaaattgctgtaaagaggtttctagatcaagatatatctggtgaatcacttgaagaatttaaaactgaggtcagaataatgaaaagattgaggcatccaaatgttgttctcttcatgggagctgtaactcgacctccaaatctttcaattgttactgaatttcttcccagaggaagtttgtatagattacttcacagaccaaaca

SEQ ID NO: 40973 - DNA, 358 bp, Glycine max
ggacagcggagttatcttttctactccagattttactggtgactggtgcaaagccatcggttctcttgttcgtggtgcggtcgcctcgtcttctttcgacgatttccacaagcgctctgccgatatcattcattctgctgttttcggtaagggccaagacaagttgatcttctctggaaacaacttggtagtgaccaacatcgatgttcaatccgtcgagccagttgaccaacgtactctcgactcactacagaaatccgtccagctcgctatcgagatcaccaccaagtctcaggaagcagctgctcgtcaagaggccgagcgtttggagcaagaagcacgcggaagattagagcga

SEQ ID NO: 40974 - DNA, 359 bp, Glycine max
gcaagatcgtcaagtccaccaccgagaagcccgctctcaagggcgaccaggtcctcctcaaggtcactgcttccggtctctgcggcactgacctccactacaaccatgccgacatgggtatcggccacgagggtgtcggtatcgtcgaggagctcggccccaactgcaccatcctcaagaagggtgaccgcgtcggctggggttacgagcacgactcttgcggcagctgccaggagtgcctccgcggcaacgagaccttctgcgccaagcgtgtcatgtacggcttcgccgacctcgaccagggcagcatggctgagggcgccgtctggcgcgagtctttcctcttcaagatccccgac

SEQ ID NO: 40975 - DNA, 353 bp, Glycine max
ctgtgatgtctgcaatcatctctctctgtttctttgtgttgctaatcatgacaaacttcttccaggatggagtcattttgcgcaattcacaatagctgtggtcaataaagatccaaagaaatcaaaatattctgatacattacaccgattttggaagaaggagcatgactggggttggaaaaaatttatggagctctcaaaagtgtatgatggctttgttgacgcatctgacaatctgataataaaagctcaagttcaagtcattaaggaaaaagctgacaggccttttcgttgcctggattgtcagtataagagagaacttgttagaatatatttgacaaatgtagaacaaa

SEQ ID NO: 40976 - DNA, 363 bp, Glycine max
acctcttccattaacgggtggtgcctctcttccatctccccagccaaaacctctctcaagaaggccacattaggcccttctgtcttcgcaaccgttagcactccttcttctccttcttcttcttcttcttcttccttcccttctctcattcaagacaggcctgtctttgctgcccctgcccccatcatcaccccaactgtgagagaggatatggcaaaggaatacgagcaagctattgaagaactccagaaattgttgagggagaagagtgaactcaaagccacagctgctgagaaagtggagcagataacagcttctctgggaacatcatcatctgatggcatcccatcatcagaagcctca

SEQ ID NO: 40977 - DNA, 362 bp, Glycine max
cattatctatcagtatacaaacatcaccttgacaccaacacaggcagatcgctttgtcttggcatttcgaaactggctaaggcggcatggcaatggccaaccagaatggtttggcaacagcagcgaccaaccattgccatcaactgttttatcaaaacgtcaggtacaataacatgattcatgattttcattttgaagccccttaatttgaacaacgaagaatgttaacaatacacactttctaactcttttttatcgattaaaattcacttaagacatacaatgaataagttgtgtgcttattcttacccaacaattaagaagtttctggtatcatttcgctgtgctaaccaagaactaaa

SEQ ID NO: 40978 - DNA, 229 bp, Glycine max
gcatcgtttgaatctattccagcgatggcaaaaaacttggatgggggttcttgcaaaatgtaaggaaagaacttatcaaaactgggaacaatgatatagatgttttgaatgggatagctagggatggtgagcagaagcagatatttttgactggaaaactgcggccaaagctgcatgaaattaaagggcctccggtggacaaaccaattgaacaagggattactgagca

SEQ ID NO: 40979 - DNA, 274 bp, Glycine max
gtaagctccgcattcggctcgtgcggaaattttcttgctctgtgggtctaaatatgtggggccttactttagtggttctaaattgaaaagctttctatattttgctttcaattccatggctgttggggttgtcataactggtgcaactttgccctttggtaaggttgcagattgtgattttctcaagagaaactttaagcagatgtctaatgttttgtgggtggctcctgaggacaaggcgagtttatggtcactacttgagtcaaagccatgt

SEQ ID NO: 40980 - DNA, 367 bp, Glycine max
gtgagagtagttcttttgaaagttcagattttgatcactctgctgttgaagaatgtgcagcagatagaagttttacttctgcgtatctggagcgcccctcaagaagtttgcaacagcagcgatcctgcactaaaagtgagaagccaatagatgtactgcgaagagtttgtgggaatgataaatgtgccgattgtggagctcctgaacctgattgggcatcgctaaatcttggtgttcttgtttgcattgagtgttctggtgtacatcgtaaccttggtgtccacatatcaaaggtcaggtctcttacattggatgttaaagtgtgggaaccttctgtcataagtttatttcagtctcttgggaatac

SEQ ID NO: 40981 - DNA, 382 bp, Glycine max
ctgggagaggcctcacatcatggatgtggtgggcatcctgcccatgatggagcacaggattgcttggactattgacgatgctaaatctgggaaccaacctatgagactctatgctcgcgtgtggaactgctgtgactgacccaccgaacgaggttgggtgataactgataggacgaacccacgctatacagcatactacctcactgatagaggcacagagttgtacaactataatttcaatactttctctgatcgctgcatggaatagcaacgagcttgatgcctatagcatacgaagactgagatgcgctcatgaataacttcatgatctatcactgcttgcacgatcttaagcgattcccacaaggcattcccgctgagt

SEQ ID NO: 40982 - DNA, 397 bp, Glycine max
cttccctatctcccgtacaggccgacaatgccatccctgatggagctgctgcctttggccgtggcgttcgccgctgtaatcggtggcttcctctggtacagcagcaacagcggtggaagccgcaaggtgctaaagccgactgagttccaagaattcaagctttcagagaagacagtcctctcgcataataccgccatctaccgccttgaacttccacgccctaccgacatccttggcctccccattggccagcacatttctcttgccgctactatcgaaggtcagccgaaagaagttgtacgctcatacactcccattacatccgacgaagacaagggccatgtcgacctcctcatcaagtcataccccaccggtaacatctccaagcacgtcgcgg

SEQ ID NO: 40983 - DNA, 309 bp, Glycine max
ggtcagttttctatggaccttctcggtggaggaatcttaggggacaaaactggagatcggatcacacttatacaaaattctccatttagtactttgttgagagttgctgcttgtaagataggctgtttaatggtcaagattgtgatgtacgagactgcatctgaccaaaagagcgattgtgcctcacaggcacaagtgtggttaacaaacagcaacagtacagagcattttgatgcatgtaagtggacaaaatcagaaccacattcctgggaattgatcttcccaatagaggtatgtggtcctaataat

SEQ ID NO: 40984 - DNA, 353 bp, Glycine max
ccaaaatcttccatttggtacctaattgaaagttgctgcttgaaaaaaaggctgtttaatggtcaaaattgtgatgtctgggaatgcaccagccaaaaggagtgattggccctcattggtacaagtgtttttaaaaaacagcaacagtacagagcattttgatgcatgtaagtggacaaaatcagaaccacattcctgggaattgatcttcccaatagaggtatgtggtcctaataatggttttgaaatgtggagttctgagtgggcaaatcaaacttcatggcatttgagtttccttattgacaatcccaaacagtctacagttttttatattctcttgggaatctctcaag

SEQ ID NO: 40985 - DNA, 384 bp, Glycine max
attgatttggaaacaatgcagagagttagagaattagttcagtttgggggatttgctgacactgaatatctaaggagaacattggctaaagaatttcagctgatggaattaagctttaaagaggcttttgaaatgccttttaccacaatatcaagaaagatactttgtgaggatatactacctctgtttcctcttccatctttgccaaaatcatcttcttccatgtggattcccacttcagtatcatattatgaggatccctctagagcttcagtgccaccttactcttgtcaaaaccagtttattgattacatatctttccaagtacctgatgagtgtttctcagatattgtaaattgtatatgcatagtcagaggattcatg

SEQ ID NO: 40986 - DNA, 213 bp, Glycine max
gaagatgctggccagcttaatggcaatggggcctaccgagcacaaggccctgccactgtcgctgacatgtacagctgccaagacgtggccagctggagccggtttgggtttgagaatttggcacaagtgcagaaccgaagagcaccctggcttggtgcgctctatgcaccacggtgccgatattgtcaggctctgtgggaatcatatgtggat

SEQ ID NO: 40987 - DNA, 380 bp, Glycine max
cgtcgcgtgtactttcttgcgaaacagaagggcgaaggggcaaacacaacttttttgtttttttgtagagcgagagagaaaaaaatgttggggatcttcagcagttccgtggtgtcgccgccggaggagctggtggctgccggcagcagaacgccgtcgccgaagacgacggcggggaagctgctgaaccggttcgtggagaacaaggcgtcggcggtgtcgctgcaggtgggagaacacgtgcagttggcttacacgcaccacaacgagtcaccgtggcatcccaggtaattaaacgcatcataaaattcagaaattccaccatgcacgaacacgaactctacttaatcgcctaagcgacgtcgtttttgtcacgtcgc

SEQ ID NO: 40988 - DNA, 370 bp, Glycine max
gtttcgtggagcagaggaaacaacagcttcgttgtgtgggatcctcaggctttttccatcactcttctccccagatacttcaagcacaacaacttctccagctttgtcagacaactcaacacctatgggtttagaaaggtagatccggataagtgggagtttgctaatgaagggtttcttagaggacagaagcatctattgaagaacataaggagaaagaagacattaactaatcaacaacaagctcttccaatagaccattgtgttgaagtggggaggtttggatcattagatggtgaagttgatgcattgagacgtgacaagcaagttctcatggtggagctagtgaagctcagacaacaacagcaga

SEQ ID NO: 40989 - DNA, 351 bp, Glycine max
ctcgaaggcgaccgcgctgtcggcgtcaaagtggttcctacaaagcacctggccaatggcgagactccatcgcgtattatcagagcacgcaagcaaatcatcgtgtctggcggaacactgagctccccactcattcttcagcgctctggtatcggtgacccagagaagctccgcaaggctggtgtcaagccgctcgtcgacttgcccggtgttggtctcaacttccaggaccactacctcaccttcgctacctaccgtgcaaagccacatgtcgagtctttcgacgacttcgcgcgcggtgaccctgcgactcaggaacgtgtcttccagcaatggaatattaacggcact

SEQ ID NO: 40990 - DNA, 375 bp, Glycine max
ctccagcccacactcacacacaatgggtcacgcagccgggctccgcgcgggtacgcgctatgctttctcgagagacttcaagaagaagggtatgatccctctctcgacctacctcaagcagtacaaggtcggtgatatcgtcgatgtcgtagccaacggtgcggtccagaagggtatgccctacaaggtctaccacggcgagaccggtatcgtctacaacgtcaccaagtccgctgtcggtgtcatcctccagaagcaggtcggcaaccgatacatggagaagcgcatcaacgtccgcatcgagcacgttcgccactcccgctcacgagaagacttcctcaagcgcgtcaagctcaacttcgccaagcaacaaaa

SEQ ID NO: 40991 - DNA, 364 bp, Glycine max
aaaaaggatgaatctaggcaagccagaaacaagttaggagaaggtggatttggaccggtatataagggaatattggaagatggacaagagattgcagtcaagaggctttctaaaacttcaagacaaggaactgaggagtttaaaaatgaagtaaagttgatggcaactcttcagcaccgtaatcttgtaaaacttcttggttgttctattcaacaagatgaaaagttgttgatctatgagttcatgcccaacagaagcttggattactttatttttgatacaatgcaaggtaaattactagattggactaggtgctttcaaattatagaaggaattgctcgtggacttctgtaccttcatcaag

SEQ ID NO: 40992 - DNA, 243 bp, Glycine max
cgactagatgaagctcgtcaacccgggaattaatgccggaccggtacctggaggcgtaccacctttccttatattgcgtcccgttacagctgggcgtaccaatggtcataattgtgagctgtgtgaaactgtgattcgttcacaatttcacacaacatccgagcgcaaaagcattaagtgtaaagtctggggtgccttatgagtgggctaactaacattaatagcctggggctcactgcccgt

SEQ ID NO: 40993 - DNA, 369 bp, Glycine max
caacaagacaaatattgccagcctcaaccaagaccttcgctccaataccaacagcaagaacccaggcatccatcaaaatgcttttcaacgtcgctgccgccgcagtcgcgctttgcgctgcctctgcatcagctattgctctcccacagaacgctggcagctctgccggatccaatatgtgcgatgcgtcgaccttcaacaacggagcagacctcgacattccacaagcaaacgcccaagattgcactgatctcgtcagcggccttgacacaagccagacctggtcggtgtcgaagagctgggctcgtctttcaacacaaggaacatgtgctttcagcgttcgtgtcatcgctggctctaaggacggat

SEQ ID NO: 40994 - DNA, 378 bp, Glycine max
ggtcattgtagagagtggggactgtgtgtgctgtgaccggtcaacgcagctcctacggcaagcgctcccactcgcactccgattccgacgccggctccaaaaacaagcgccgcaaccccgccgccgacgagtcctcctcctccctcatcaccgctgacgacaccgtcttccgctacctctgccccgtccgcaagatcggcagcgtcattggccgcggcggcgacatcgtcaagcagctccgcgccgacaccaaagccaagattcgcatcggtgacgcgctacccggctgcgacgagcgcgttgtcaccatccacagttcctccgaggagaccaaccatttcgacgagaccgatgatctcgtcttgcccgcgcaagacg

SEQ ID NO: 40995 - DNA, 375 bp, Glycine max
ctcgagccgtggctgcaaaaagctgatgtgcctaccataacacaaattgaagagttccattcgatgcagaggatgatcactgctcctgattcaaatgataatattgatttactgttgagcattgatttgttgggtttacaaggagctcgtgaagcttattcaaacaaaaaagcttttgatgataagcttgcgttggcgtaacacacaataattctttgatggaaattttccagtggattcttggttaccaatatttgtgaattgtctttatcctgtgagtcaattaccttcagaagctgtcgatgaaaatgttacatgtagtagaggacgtggtggttcacccaccactgcttgtattagttctgcagttaacaa

SEQ ID NO: 40996 - DNA, 368 bp, Glycine max
caaagctcatccttgagttaaaaaatggcagcagcttcttccatggctctcatccccatccttggctggcaaggccgtgaagctgggcccatcagccccagaagtgggaagggtgagcatgaggaagaccgtcaccaagcaggtctcctcaggaagcccatggtacggcccagaccgagtcaagtacttgggcccattctctggcgagcccccgtcctacctaaccggtgagttcccaggcgactacggctgggacactgctgggctttccgcagacccagaaaccttcgccaagaaccgtgaactcgaagtgatccactccaggtgggccatgctcggagccttgggctgcgtcttcccggagttgc

SEQ ID NO: 40997 - DNA, 354 bp, Glycine max
gttaaaagccttaacctttccttccacttccaacacaaagacacatatatttcaatggtgtgtctgcgtctccactgtcggagctgtcaacagagctcttttgaacctgaatggttctggagctggagcttcagctccaagttcagccttctttgccaccatctagaagaaggttgtcgccaaggggccccacaacaaggttttcggtggaagcttcaagattgttgctgttgaagagaagaaagagattgtagagacccagcagaccgacaaggacagatggaaaggtcttgcctatgatatctcagacgaccaacaagacatcacaagaggaaagggtttggttgacttcct

SEQ ID NO: 40998 - DNA, 352 bp, Glycine max
atcattacttcataaatgtcgccgacattcatttgagtgcaaaggcgggtttttatgcttctagatacaagagatttggcaacctgtgctatgtcattggtgcattgcaagccttcattgggcatcaaaaccaggacatgagaatcaggttcaatgatggtccatgggagacatgtcctcaagtgacagccctttgcattggaaatgcaaaatactttggtggtggcatgaaaattacaccaaatgctgatcctttcagtagaaatttagaggttgtaactcttcagaacttcaagtggtatgattttgtcttcaaattacataagctatacagtgggacacatctctcagt

SEQ ID NO: 40999 - DNA, 352 bp, Glycine max
atcacataatgcaagccaatcaaatcatgtaagcgatgcttcaggcattgaggaattggaaattgcggttgctgattacaattggtccctcagacatagacaaatcacatctcttaatctgaaatacttggcttcttggaacatggctcttcgtgtggatgtagaaggcaatggaactgattcacgtgggtcaagatgctacttccctaattttgaggagcattttgatgatgttatctatccgaaaggggatccggatgctgtttccctaagcaagagagatgtagatctcttgcaaccagacacattcattaatgacacaattattgatttttacatccagtatctcaag

SEQ ID NO: 41000 - DNA, 370 bp, Glycine max
gtgacatcagagaacacaaatgttcatggtgtcgaacttatacaaaccgctactattactaacgagctagctgctgttggttgcaagaaaggttgattagtccgcacaattgcaccctcaaatatataccttgatatgaacgatatatagtgccaaatttgtacatgtgaaggaaactggctacacctatactatgccaatggacattttgaaataggctatatgcatagcacatctttgaacacaagatctgtgaagacaaggtggtggccgtaatacagataatgatatgggtgaagataatcgctgcaatgagacgccaccacaatgggggacacattatcaccatcatctgccatcagcactttca

SEQ ID NO: 41001 - DNA, 309 bp, Glycine max
gggcgcgccatttatgctatttacaccatctggtgtgaggactgtgaattgtcgaatgctgcttgcacacaagcactgactatgtcatttaatccaaacccgggtgctgatgcatggagcacggaattgctgaagcgtactggatttcattgcgagatcatctgagtcactggatggactgccaccccaatgcaggatgtacaagatacaatggattgggttatttcctatcacgaatgtgttcccaggacctattgtgttttaaatccacagaatccttttgtgttaaataagtggatgggaaaattg

SEQ ID NO: 41002 - DNA, 366 bp, Glycine max
  unsure (1)..(366): unsure at all n locations
caactacaaaggttgctgtaggagataagatattgaagtagtgctaagtgcctaacacctgcagtgaacaatggcctctgcatcagcatctcttctcaagtcttcacttgttcttgacaagtctgagtgggtgaagggacaaacacttcgccaaccttctgctgcatcagttgtgagatgcaaccccaccaccccatcaggcctcaccatcagagctggttcctatgctgatgagctcgttaagaccgcgaaaacagtggcttcaccagggaggggtattttggccatggatgagtccaatgctacctgtgggaagcgtttggcttcaattgngctagagaacactgaagctaaccgccaggcata

SEQ ID NO: 41003 - DNA, 301 bp, Glycine max
ctcgagccgctacggatcgaagtggatgggaaaagaggggggaccccaaggcactgcccgaagagcgaagagagtgcctttttctcttgggggaggagctggagcagagaatgctcttctaaagaatgtgccaaaagctgtagtggcaatggcgatagatttcgagggccatctcgggattgtagttattcacatgacttcttcctacattaaacgtacagtctctcattacataatcactgctaaaatggttgatgataccatcaattatgacgctgtggaccacaaactgatgcaactt

SEQ ID NO: 41004 - DNA, 363 bp, Glycine max
taatggtgtaaaaccatgggctttcttgtgtgacttgagtacaatgcagagaaaaaatggcatcacccaactatatcaacaccgcccacaaaattgattgttttacccgtggcttctgctggcggtttagtttgcttccttgacattggtcatcgaaacttctttgtttgtaacccactgactcaatccttcaaggagttgccagttcgatcagttaaggtctggtctcgtgttgctgtacggatgactacaaatggaaactctgttggttcaggctacaagatcttatgggtgggttgtgatggagaatatgaagtatacgactcactcagaaattcttggagtcgtccgggaaacatgcct

SEQ ID NO: 41005 - DNA, 309 bp, Glycine max
caaaggttgctgtaggagataagattgcagtagtgctaagtgctaacacctgcagtgaacaatggcctctgcatcagcatctctgctcaagtcttcacttgttcttgacaagtctgagtgggtgaagggacaaacccttcgccaaccttctgcatcagttgtgagatgcaaccccaccaccccatcaggcctcaccatcagagctggttcctatgctgatgagctcgttaagaccgcgaaaacagtggcttcaccagggaggggtattttggccatggatgagtccaatgctacctgtgggaagcgttt

SEQ ID NO: 41006 - DNA, 362 bp, Glycine max
gtgttggctaacacacaagaattctttgatggaaattttccagtggactcttggttaccaatttttgtgaattgtctttatcctgtaagtcaattaccttcagaagctgtcgttgtaaatgttacatgtggtagtggacgtggtggtttacccaccactgcttggattagttctgcagttaacaatcgctcctcagatatcaacaaaaggattcgcacagcacttgggaaaggtaagaaaattgtttttcttactagagttgatccttttccagaagctttactggctgttttttttggcgttaagaatgaaatttgagttttaacgccactaattctatgctgacgcgactttttgagaac

SEQ ID NO: 41007 - DNA, 357 bp, Glycine max
aacctcaccacgccatcgccgttttccctcgacacaaccgaagcgctcttccatcgacacctccaacacctccaacactctcttgaacagcagcaatcatggccaactacctcgcctccatcttcggtaccgagcaggacaaggtcaattgctccttctactacaagattggcgcctgccgtcacggcgaccgctgctccagaaaacacgtcaagccgtcgtactcgcagactatcctgctgcccaacctctaccagaacccggcgtacgaccccaagaacaagatgaacccgcagcagatgcagatgcactttgatgcattttacgaggacatctggtgcgagctgtgccagtatg

SEQ ID NO: 41008 - DNA, 296 bp, Glycine max
tccaagcaactacagtgcagacatactgtgtctacaacgctcccaccatgttactgatcataaccaacctgaaaatgccgctcctgaccgtttcgctcgtccctacatactcctactgcttattcgcctggatacattagggcataccatccatcacaatgatccagaccttagtttaagcgttcaacttttaacttccactcacgatggtgattttgttcaaggaaaaacactcccaatggtaaagttaatgtaacatgtgctgctgttggcttgacatcaagttacactccaac

SEQ ID NO: 41009 - DNA, 370 bp, Glycine max
ctcgagtcctttaaaaaaaaaaaaaaaaaaaaaaaaaaaaggattatatataaaataaaaaaaaaaaaaaaaaaaaaaataaaaaattaataactataaaacaacacatttttttattacaaaaatgattacttttaacctcccacaaattctcttcttaaaattttttctcctataacactttttttttcttccctatcactttcttcattcaaattcaaatacctattatttttccaacttaaacaaatccttgtatgacttaaagccatcccctagacaatggaataggacatttaatgaatttatggctcacatacagtttcatagaagtcactatgatgactgtgtttacttcaaatttcctttt

SEQ ID NO: 41010 - DNA, 354 bp, Glycine max
ctagtttcttacaaggctctactctactgcttcaccttctgctctagaaaattcagtggtgatacatggcttcggctactctctctgtagccaaaccagcccttcaggcaaatgggaaaggcttctctgaattctctggcctccgcagctcatcaggcttccttcccttttctagaaaatcttcagaggatttccattctgtcattgccttccagacctatgcagttggaagcagtggaggatacaagaagggtgtgacagaagcaaaactgaaggttgccataaacggatttggaaggattggaaggaacttcttgaggtgctggcacggtcgcaaagactcccctcttgatg

SEQ ID NO: 41011 - DNA, 361 bp, Glycine max
ggtagagcgacacaatggctcagccaaagaagcaagtccccttgccgttcacgtacactttctcctttggcgccatcgccggtgtcacagagctgctgctgctgtacccccttgatgtggtcaagacgaggcagcaattggaggctggtaagggcggtatgggcatgatggcgacgttcaaaaacattatctcgacccaggggacgtcaagattgtacaagggtataataccgcctttactcatggaggcccccaagcgtgctatcaaattcagcgcgaatgggtggtggtctggtctgatcaccaacaacggtcaaagagaaaccacgcaggccatcgctattctcactgggtgcgcagc

SEQ ID NO: 41012 - DNA, 228 bp, Glycine max
cttgtccatctatcccacaactaatttttgattttccttgtttatttatcttcttcctcccttgtttgtttgtttctttgtttctttggcttgacaagaagaagatgatgatgatggacaagggggtgttggatgatgtgataagaaggcttctggaagggaaaggagggaaacaggtgcagctctctgagtccgagatccgtcaactctgcgtcaacgccagacaaa

SEQ ID NO: 41013 - DNA, 326 bp, Glycine max
ggtttctctttctctttctctgtctgctacttcacgttctctcgtttcaatcggacaaaatcatgggcagaaaattcttcgtcggtggcaactggaaatgcaatgggaccactggggacgtgaagaagattggttctactttaaatgaagctaaagtccctggagaagaagtgagagaagttgttgagagccctactttagggatccttcctttcgtaaaaagactgctgcgccctgagttccatgtctcgggccaaaattgtgggcgtcgcaaagtgcgtgcttatactggagaggatagtgctcaaacgcttgtgaatttggga

SEQ ID NO: 41014 - DNA, 345 bp, Glycine max
ctcgacttttgggcaccattcctcagtacatttcacagcaaactgtttggaatcaaatggcaacagcgagaacaccattgaattttgattctagcaagcagagcttttgtcagttttctattgaccttctcggtggctgaatcttagtggacaaaactggagattggatcacacttatccaaaattctccaattagtaacttgttgagagttgctgcttggaagaaacgctgtttaatggtcaagattgcgatgtctgggaacgcagcagtcaaacagagtgattgggcctcattggtacaagtgtttctaacaaacagcaacagtacagagcattttgatgcat

SEQ ID NO: 41015 - DNA, 348 bp, Glycine max
gtggccatatggaaagatgtcacatgcctcacataaacactagttagttgtaacatactggagattagctttttgtagtctataatagtgaaaattttgaagttaaactcaaaagggagaatttgaatatgtataacattgtatgcactaatgtgtggtttatgtgtcgagaacaacagggtttggtaccccttgctggttccaacgacgagtcatggtgccaaggtcttgatggtcttgcctctcgctcggctgcatactaccagcaaggtgcccgtttcgccaaatggtgagtgctaacttccccccctttgtggtggcagcaaaatcattttcataattccatgc

SEQ ID NO: 41016 - DNA, 321 bp, Glycine max
attgaatggctgcaaaaagctgatgtccctaccgtagcacagattgaagagggccattctatgcataggatgatgaatgctcctgattcaaatgataatattgatttactggtgagcattgatttgttgggtttacaaggagcaggtaaagcttttacaaacaaaattgtttttgatgataagcttgggttggctaacacacaagaattctttgatggaaattttccagtggattcttggttaccaatttttgttaattgtattgatcctggcagtcaattacctttagaagctgtcactgcaaatactacatgtggtagt

SEQ ID NO: 41017 - DNA, 397 bp, Glycine max
gacgatggcacgcagtacgtaagctcggaattcggctcggtcgagaacattatgagactgcgcaaagagttaaacagggggtacaacgttacaaagaacttcaagacattatagctatccttggcttggacgaattatccgaagaagatcgcttaaccgtagcaagagcacgaaaaattgagcgtttcttatcacaaccttttttcgtagcagaagtttttaccggttcgccggggaaatatgttagtctagcagaaacaattagagggtttaaattgattctttctggagaattagatggtcttcctgaacaagccttttatttggtaggtaatatcgatgaagctactgcgaaagctacgaacttagaaatggagagcaatttgaaaaaatgact

SEQ ID NO: 41018 - DNA, 319 bp, Glycine max
gaacaatttaagaacccatgtcataacctttgcactgggttattcacagacggtgtttatagatctgggtgcaaactcagggtgtgggatgagcaccatattgatgaagatgaccagcctgtttgaacgagcacaaaatccaccccaaggataacacccttactgcaacactaaaatgtatcacgccaccactgctataccattgtatgatgaccacacctgtgaccaatctgtcataaacgagaagctcgtacatgagcttgagcctagagcctatgatactcatctgatgcatgaaccagcttatgatctcatggat

SEQ ID NO: 41019 - DNA, 356 bp, Glycine max
gacaaatctagtgcaactttgccattgataaagttagcagatagagattgtctcaagagaaactttaagccgatgtctaatgtttcgtgggtggctcctgacgacatggcgagtttatggtcacaacttcattatgtttagtgtcataatatggcaatgcaggaagcttatgttggcaatctcctacatgtgttacgagaattgtatttgcacagtccaaatgaagctccccaattgagaaggaaagctctctctcttattgaatggctgcaaaaagctgatgtgcctaccatagcacagatcgaatagttccattctatgcagatgatgatgaatgctcctgattcaaatgataa

SEQ ID NO: 41020 - DNA, 368 bp, Glycine max
gataaatctctcataaccatttctaaatataatattgcgtatatgcatgatatcatacaagaaatgggttgggagattgttcgccaagaatctattgaagaccctggcagtcgcagccgattatgggatgccgatgacatttatgaagtattaaaaaataataagggaactgagtccataagaagcataagagcagacttgtcagtaattagggagctgaagttaagccctgacacatttactaagatgagtaaactacaatttttgcattttcctcatcaaggttgcgttgatcattttcctcacaggcttcaatctttttcagttgagctaaggtattttgtttggaggcatttcccactaaaatc

SEQ ID NO: 41021 - DNA, 208 bp, Glycine max
aatacccacactgtcgttgaggtgattcccgtaatccatcaggtggtgcattatccgattatcagctcatgcggccacgtgcacggtacaagaaacttgcttaagaatggacctttgccttgaaaagcctttaaaattttttttggaaggttcaaacttgcttgctttgaaaagttaaaaacaaatcttggtcaagactttgatggtt

SEQ ID NO: 41022 - DNA, 368 bp, Glycine max
cgtttcgtgtaattttatcttttaaaagaaaagaggaagtataggagtgacgtggcatgcggatagagagccatgaataccaaaacgatgcgtctcccccctcgtcgcgtgttgacacctactggcacttccaataagcgcaaagagagagatgaaacattcgacaggcccaagcccatacccgccccacccctcaataaattacccaagcccgataggcccatctctttgcccctcaccgaggcgaatccgtcgtccaatcaactgctggcgggctacttggcccacgagtttctcacgaaagggactctactgggccagccgtgggccccacccaaaggaaagtcgttgtccacatcgacggagga

SEQ ID NO: 41023 - DNA, 244 bp, Glycine max
ggcttccttaagtctccttagtgctgctccttgcagctctaatgggatcccctcaagttcttgcaaactatgagaatcccccagtgtacaagccttccactgagataccaccattttatatgcccccacttgagatgcctcctgtttacaaacctccacttgaaaaccccccaatttattagcctccagtagagaagccaccattgtacaagcccacagttgagaaacccccagtgtacaagcc

SEQ ID NO: 41024 - DNA, 225 bp, Glycine max
tgatgcccaaatcattgcccatgcatatgacgggacctacgagagtggaatggaatacagaagcgtgtctgcagttgctggtccatcgatcactcatgatatagacaaagctcctacgtctcaagagattgtaaagattccctagtgagatggaactactcgacactgacaactgctatatgatgatggataaaaggctgctgatcacatctctaatgtatcatc

SEQ ID NO: 41025 - DNA, 424 bp, Glycine max
cctctacaaaagttcaatttgttagtggaaaaaccttcaaatgtgatataattggtgctggttcacattcttcagaagattttcctgaaaaggaagatcaagaaaaacccaaaaagattgatgccagattgagacaaagaatagatcctcaatacaatgaggttcaggctcagatggaaacaaatttgtttaaattgtctcttgatgatgttgaaactcctaaaggttccatgttggatcttaaaatttctcaatctaaaattgcacttcccaagatcacagttggaggaaccattctgctgtatgatttattggcaaattttttgacagagggcaattttagagcatgtgttgatttgcatcgcactcatcgtattaaatgaatgattaaaatggtggccacagttggtattcctgagaatac

SEQ ID NO: 41026 - DNA, 380 bp, Glycine max
  unsure (1)..(380): unsure at all n locations
ttgttccatgttgtttactgcaatttggtatcccttgagcttgagaatttggggtattccacacaattaattccattgccggttaaggattgtttgggagaacaagtttgggaaggtgtgaaacaaagatattggcagctcgatacgtactatcttcctgtctgtcaggccgtagaggaccctgagtgaggcaggaaatggatttcctgcagcttagaaagaactgcaccatgtgcagttaaaatttcaccgtccatgcaagttttttctcttctttatatattaaaattaaaggaataattgaaatctcatgcaggttttttttttaactgtagagaatcntaatccccagtgatgtatggattggatttttaatcaca

SEQ ID NO: 41027 - DNA, 389 bp, Glycine max
accaaatttggttccattgattggtattgatgtttgggagcatgcgtactacttacagtacaagaatgttagaccagactatcttaagaacatttggaaagttattaattggaaatatgccagtgaagtgtatgagaaagagagctcttagtctgaaggagctacttgatatagcaattgagatgacagatttgcagcacggtaagagatgtggaataaaatgatatgatgtaatagatagcactattttatgtagttgtactgaagaacctcgagcatattatatggctgcatttcttgtaccaagttggtcatgtcttatggattttttgatgccctgttaagatactatacctttccagtgatgtatatcttttgcttctagagtg

SEQ ID NO: 41028 - DNA, 432 bp, Glycine max
caaatgaggcgttaaggatcaatgttttattcagacacatacagaacatgttgtccagtcacaccactgtgattgctgaagctggagacacttggtttacttgccagaagctcaaattgccacaaggctgcgggtatgaatttcaaatgcagtatggatcaataggttggtcggttggtgcaactcttggttatgcacaggctgctccccataagagagtgattgcttgtattggcgatggtagcttccagatgacagtacaggaagtgtcaacaatgttacggtgtgagcagaatggcatcatctttctaattaacaatggtggatacactacagaggtagaaattcatgatggaccttacaatgtcataaaaaattgggactatgctggactcgtggaaagaatagataatggtgaaagcaaatgctgga

SEQ ID NO: 41029 - DNA, 204 bp, Glycine max
gaagattccgcatcatagagtataaaagatggcgcggttgatggcagttgttttgtgcgcgttggcggagctactatgctcctagtttgtccctattactttgaagtttcgttggaccgtacccgacccagttctttggttgaagttgtactttcacaacattggcagatttgcaattgaatttaatttatttgcttacaaaaa

SEQ ID NO: 41030 - DNA, 390 bp, Glycine max
  unsure (1)..(390): unsure at all n locations
atcgaggagggtattttcgaggtgaaggccactgctggtgatgctcacttgggaggtgaagattttgataacagaatggtgaaccattttgttcaggaattcaagaggaagaacaagaaggatattagtggaaatgccagagctctgaggaggttgagaacagcatgtgagcgggcaaagaggactctctcttccactgctcaaaccaccatagagattgattccttgtacgagggtattgacttctacacaaccattacccgtgcccgttttgaagagctaaacaagaacaacatcatggacggtactcttatccatcttggcatcccgcaaacacttctccacggtctccatgcacttnctgaataaatccatgtttaagcttttaaa

SEQ ID NO: 41031 - DNA, 408 bp, Glycine max
cgtctggcgatttaatagaaaagacacacacttcgcacttacatacgacttactgatggtgtggacaaatctagtgcgacttggcagtttataaagttagcagattgtgattttctcaagagaaactttaagcagatggctaatgttttgttggtggcttctgaggacaaggcaatgtttatggtcacaactttattatgttacgagttataatctgaaaatgcaagatgcttatcttgtcaacctagtaaatttgttacgagaattgtatatgcgcaatccagacgaagctccccaattgagaaggaaagctgtatctcgtgttgaatggctgcaaacatctgatgtgcctaccatagcacagattgaagagttccattcgatgcatatgatgatgaatgctcctga

SEQ ID NO: 41032 - DNA, 327 bp, Glycine max
tccaattctccccccacgctctcccacgcgcagctgcgtggcgtcgaaagcgatgccgccgcggtccgccatcgcgtagattcggtccccgacgacggcgctggcgtgcatccacttctcccggacctccgtcggactggcgaccctctcccaccggcccgaggcggggtcaaggacctctgcccagttggcggagcgggaccaggtgtcggcgacgcagcctccgaggacgttgatcttgccgtggaggacgccggcggcggcgaactctcgggcgacgcgcatggtgggaccacggagccagctgtggatgcggccggtgaggag

SEQ ID NO: 41033 - DNA, 243 bp, Glycine max
ctcgagccgtcctacagggggataaaatcgaactttcggcagacaaattcattttacgttccccactccactatattcccatccccacacacctctcattgtactcttactgctttcaaaagttgtgacaaatccatgaccgtccatgcctcatctactgctacaccaccaaaaccctcacctactccgacgacaatctctacgatcgccgcatgtgcaccggcctgcacaaaatcatcatct

SEQ ID NO: 41034 - DNA, 382 bp, Glycine max
cggctcgagggggcctcaaaccacggtggtttctgatctgtggtagtctctctaagtcatccctgagcttcatatcaagagcattagacacaacctgagagtactttccatccttgtaatccttcttcctgttcaaaaaccaccgtggtttgaggcactactggggccttcgtgtccgtggtcagcacaccaagactactggccgcaggggaaagactgttggggtctctaagaagcgttaagctattatgttttggcttggatattagattttgtttaggaggcatgtttgaagtacactacatgttttgcatcataccaactttgtatccgttgttaaatggcttgacaatttcaattttgtttgttatttgcatctgaa

SEQ ID NO: 41035 - DNA, 342 bp, Glycine max
  unsure (1)..(342): unsure at all n locations
gagaaacactttcaactctctctctctctctctaagagggtcgacgatccaatgctgaggtcntctcttcccgcacctcgagtcgctcaagccgcaatgttcagcttgattcccgaggattggggcgaacatgttagtccctgggtcaaagagatttctcagtacttcgattgcctcaagagcctccacttccgccgcatgattgtcaaggattccgatcttcagaatctcgctcgtgaccgtggtcacgtgcttcatgctctcaagcttgacaagtgcttcagtttcaccactgatggtcttttccatatcggtcgcttttgcaatgataagctgggttta

SEQ ID NO: 41036 - DNA, 274 bp, Glycine max
cccaaatcgttgccttcctctttcagcaaagttggggggtgttcaatctcttatagatggcgctacactagatgctcataatgccgctatatctgcaatgaaacctgtaataaactgggttgatatgcacatattatcagaaaaagtgattctggagtcactgaagaggggacatgtcatatcggccgatgtccataccatgatggctacacgcttctgtgctgctatgatgccacattttctgccgcatttgcttaccatgggcacacatgac

SEQ ID NO: 41037 - DNA, 335 bp, Glycine max
ctgttctatctcaagcaaacttttgaccaaggggggcagactgtggaagatggacgtacccctgaatcaagcaagaggtatcttagaggagaaagacagatgttgagcaagcaaatgcagaagaagctgtcaaaatctgaaagagagaacctgtacaataattggggaattcgtttgagttcaaagaacagaaggttgcacttggcccatcgcttgtggtcagaatcagatgacttagagcacattagagagagtgccaccattgttgcaaagctggttggttcagtagagccagatcaggcttttaaggagatgtttgggctcaactttgcccc

SEQ ID NO: 41038 - DNA, 334 bp, Glycine max
gtttacataccctatcctccaggcctgggactgtgtgcacatgtaccacaggaacggcttccagcttcaggttggcggctctgaccaatatggcaacatcatcgccggcatagacgctatcaactacgtccgggacaccatcctcgaccctgttgtccgcgaagccgtgtgggaccttgaaaaaccgcaggataactacatgaaggacccttatggtctgacagtccctctattaactacatcctcaggcgaaaagttcggcaaaagcgcggtcaacgccatctggctcagccccgaaatgacacccagtttcgacctgtacggcttttggatc

SEQ ID NO: 41039 - DNA, 338 bp, Glycine max
gtgactgcatctaactggggttagcagaaatgaacggaacttatttgactgctggtattccaactgctgttactcaaagttggaggttgcacttctgttgatagtatatcttgcttatggctctaatgaaggtggtgcactctcatatattcttttgagtataagcagttggtttatggctctatcctggttgtttgctccatatttattcaacccgtctggatttgagtggcaaaaggtggtggaagatttcagagattggacaaattggctactctaccgaggtggaattggtgttaagggagaagaaagctgggaagcttggtgggaagaagaac

SEQ ID NO: 41040 - DNA, 285 bp, Glycine max
ccctattggactgtgtctgcacataccactacctgtgccttttagaccgatatatcctgcaagaccctctccgagccgaccatcacgctcgaagaaactagctctgacaccactgtcaccggataggccaagactcaccacatggtgcgaatacccgccgaccagcatcgtttcattattgtcgaagagcaacttgtggactatcgctccattgacgactacaacatccagaacgagtgtactcttgacctcgacctccaacttattagcggctgcatattttcg

SEQ ID NO: 41041 - DNA, 335 bp, Glycine max
caactctttttctaccgatccagcaccaaatagtagggctaacgcgactctaatccgcgtcccaataatcacagaatcagttgaaaagattgaaattgtctatatcaaaacatatagcctatatctctatacctatataaatacaattgtattctttaaaaaccttggacccctatcgagatctcaacgctttcattcaacaccgttctttacccttgttgttcacttacaggcccaaatcggagggcagtatgtatgatggtgaggaagataaacagctgttttcactttgattagccatgaagtctggagctgattacatttacatttaactt

SEQ ID NO: 41042 - DNA, 316 bp, Glycine max
  unsure (1)..(316): unsure at all n locations
gttgtaactctttcttcttcttttgttgttctgtgggggtgtttgttttttctctcagctnaaaatgtcttgctgcggtggtaactgtggttgcggaagctcctgcaagtgcggcaacagctgctgaggctgcatgatgtacccagacttgtgctacactgagtcaaccaccaccgagaccttggtcatgtgagtggcacctgttaatgctcaatttgagggtgctgaaatgtatttttccctcttattaactattgctgcaaaggtggacctaacttcttctgcatccctctgcacttgcaagttaggtgtttgt

SEQ ID NO: 41043 - DNA, 334 bp, Glycine max
atttgaaattttaataaaccgcgatcacaggttggcgcaccttaaaaccggaaacaaaagcaatcgttacttgatttcaagaatttctcaatttcttcctacttctttgtgtacgatttcttaagggaaagaaaatcactctctgtgctggtcacagacttcgtgaatcattttcttttccactcctagtttatttgctgaacactctcctatttgatataggacttcgtgtcagatttaaactttttctgtttctttctcaggtctctgtttaatttcaagttcaagctggtgaaattttggattagtgctcccactctcctatctggtatag

SEQ ID NO: 41044 - DNA, 332 bp, Glycine max
gcgagatctcaagaaagctccgattctagcaagcaaagcttttgtaaagttgagattgaccttctcgggggtggaaggtgcgtgcacaaatctgccaatcgcgacagacttatacaaaatgctcgagttggctaccacgcgagagttgttggttggaagaaaggcagttgaatggtcatgaccgagatttgtgcaagggctgtacccaaaaagtgtgatagctcctgacgctgacaagtgtaatgaaccatcaggaaccggacagagcattttgctgcatgtaagtggacaaaaacacaaccacattcctgggaattaatctttccaataga

SEQ ID NO: 41045 - DNA, 340 bp, Glycine max
gagactcgttcttattcgtcgctatcttcttcgttcgttgattgcgtgtacaggtgctctctcacctgaaaatgacaagctgcgaaggtaactgtacttgcggaagcacctgcaagtagcggaacgaaatagcagtggctgcacgatgtacccaaacttgagctacaccgagtcaaccaccaccaggaccttggccatacaagcggcaccaggatatgctcaattcgagagtgctgaaacgggtgttcccgctgagaacgatggctgcaaaagtggagctaactgcacctgcaaaccctgcacttgcaagtgaagtgttcgatagctaaaactacaagca

SEQ ID NO: 41046 - DNA, 347 bp, Glycine max
taagctcgaatcgctcgagttggagagttgaatgggaatccctctggattggcggtcacagtatttgcaggagcatttttaatgagatgctcattagatatagctatgaaaaattactgcgccaggctaaagctcaagtatgtttttgcaatccttcaaaaatttgtttctttggtgtgtatgggatgataactaattagtgtcatgaattgcaagccttactttagggtctaattgaaaagctttctagctagtcataacatcaccatactgatggtattgcaaaactaggcactttgcaatttagaaagtagcagattggattttctcaagagaaacttaagcag

SEQ ID NO: 41047 - DNA, 346 bp, Glycine max
gttcataatccaaaaattttcttcttttttcttttgtttcgtatatacatttttcttgttctttttttaatttttttttctggacctggtaagctcgagccggtttggagagttgaatgtggaatcccttctggatttccgctcacagttatttgcaatagcatttttaatgagatgctcattagatatagctatgaaaaattactgcgccaggcttaagctccaagtatgtttttacaatccttcaaaaattttggttctttgggtgggtatggggatgataacttaattaggggtcatgaatatgtcaagccttactttagtgggtctaaattgaaaagctttc

SEQ ID NO: 41048 - DNA, 352 bp, Glycine max
ctcgagccggttaagattaacatgtgtttgcttgctcatctttagcattatcattacattttataatgttgaagacgatgattcctttttcttttgtctctttactagagtgatggaggaacaccatgcagcctttattgagaccgtgccattcaaaacggttgccatgtttaccttattccagacagcttacttgcttctctgctttggtctaacctggataccaattgctggggtcctattcccattgttaatcatgcttctaatcccagtacgccaatatttccttcccaagttttttaaaggagcccatcttcaagagttagatgctgcagcatacgaggaaacgcct

SEQ ID NO: 41049 - DNA, 247 bp, Glycine max
ctgcttcaaaaataatggattttgggcgtcaattgacggttcgagaaggaagaacaggtgggaatgctgttgatgctgagacttttggtggtattgcagaggtcatgcttattgtgcaggtttctactgcaagctttgatgatgcaaaagtagctgctgaattcaagaggcttgctcaggcatttgttgtcggagctacttcgcattgttcgacattaccccttactgctctggttgttcaggatca

SEQ ID NO: 41050 - DNA, 350 bp, Glycine max
caacatgctcactctcaccgcagccgccatggccggtggcgccgccaccatcgccaccggtgacgcgccacttctggctctaaaactatcctccacgctcttgttctctgcctccacggggatgctgatggtgatgaacaaaatacagccttcacaactggccgaggaacaaagaaacgctacgagggtgttcaagcagctcaagtcccacatcgaaacaatactagccattggaaaccctaccgaggaagatgtcaaggactcaatggaaaaagttttggcacttgacaaagcctacccacttcctttgttaggagccatgattggaaaattccccaaaaaatttgaac

SEQ ID NO: 41051 - DNA, 278 bp, Glycine max
ctcgagtttttggaagaaaggctgtttaatggtcacggttgtaatgaatgggaatggagcaatcaaaaagagtgattgggcctcattggtacaagtgtttttaacaaacagcaacagtacagagcattttgatgcatgttagtggacaaaatcagaaccacattcctgggaattgatcttcccaatagaggtattgtggtctctaaataatggttttggaaatgtggagttctgagtgggcaaatcaaactttatggcatttgagcttccttattgac

SEQ ID NO: 41052 - DNA, 190 bp, Glycine max
gctctgtttctgcctctgagtaagcggctgaggaggccgaaccagcgaccttgtgggcatctcgcaaagtttaagtcatcatgggtaaggaaaagactcacatgaacattgtcgtcactggacatgtcgactctgggaaggcaactaccactggtcatctgatctacacgcttggacgtattgtcacgcg

SEQ ID NO: 41053 - DNA, 360 bp, Glycine max
gcgcttcttagtacagaatggctccgcagtgattcaagaagaacagtagtaggattagatttggatcttgaggcactcaattggtgcatggaaaacaacatacctaaagttggggctgatggattttcaagaatttccctctttcatgggaatgttttacaacctcttcagtctaaacttgtaaaagtagatcctcaggagctggtaagcaatatttcattgtcacagaatgaagaaaatcttcagactggtgtgccagaatctgatgctccaacaggctctattgctcaagatgataagtatactaagggaaacataacactgcctggaagagatattgtgtgtgcttttaactacagc

SEQ ID NO: 41054 - DNA, 269 bp, Glycine max
gtgtttgagaaacttggaccaagcttatacggtttgcttcggaaaaacaatggtgggtcatttcccattgatcttgtccgtgagattggcagacaactattggaatgtatagcattcatgcatgacttgcgcatgattcatactgacctgaagcctgaaaacatactactagtttcaccagagtatgtcaaagttcctgactacaagagttcatttagaccaccaagttcttatttaaggagagttcccaaatcaagtgctataaaggt

SEQ ID NO: 41055 - DNA, 360 bp, Glycine max
gtttttacaatccttcaaaaatcttcttactgtgcgggtgtatagtgatgatgactgaataagtgatcatgaatatgtaaagccttactaaaatggctgtaaaaagaaacgctatctaactaggcataacatcaccattactgatggtgttgacaaagctcgggctacttcataatttagaaagtgcgcatattgggatcttatcaagagaaactttaaacagcagtctaatgttttgtgggtggctccttaagacacggcgagtccatggtcacaacttcattatgcaatacgatataatctataaatccaggaatctaatcatggcaacatcttaaaagtgctcactagaattggttt

SEQ ID NO: 41056 - DNA, 294 bp, Glycine max
ggaatttcttacacatcgcacaactaatgtgcgtggggaaacaactctgcgggggtgatcggacacatatttgaatcctatgcggcatgatacctcagtgtctacagtaccaagggactgtgacatttgtgctaacaaaacaaccataaacaatatgtgtgcatatgggctcaaacctggtatgttaagatctactcttttgaggaccattcctcaggacatgtgacagcaaactgagtgaaatctaacctcaacagtgagatcacgatgaaagtttgattctagcatgcagag

SEQ ID NO: 41057 - DNA, 361 bp, Glycine max
  unsure (1)..(361): unsure at all n locations
ctctatcctctcgagccgattcggctcgagctcgggcctcaatttgtgcgagggatgtctnnanagtttaatgtttaatcccttcttgatttccgctcacagttatttgcaatagcatttttaatgagatgctcattagatatagctatgaaaaattactgcgccaggctaaagctccaagtatgtttttacaatccttcaaaaattttgtttctttgtgtgtgtattgtgattataacttaattagtgttcatgaatatgtcgagccttactttatttgttctaaattgaaaagctttttatctatttataacattaccatttctgatgttattgacaaaacttttgctacttttcaatt

SEQ ID NO: 41058 - DNA, 297 bp, Glycine max
aagctcggaattcggttcgagggaaactttttttgcttgccaacccttctattaaggagggtattctgttcccacggcgggcccaaccagaacatgctttccatcaagttttaaatggcctagcacgtaaattgccacacgacagaagtgtattcttgaaaccaggggagaaggccttgaattggactgctggccctttgggggaccttaaacctttgaagcttaccatttaactcactctttagatgcaattataattctttacaaattcttttttattctggcgagtgggggtgt

SEQ ID NO: 41059 - DNA, 357 bp, Glycine max
ggttagatgtaaagtgggaattaacccatactccatggtaaggactggtttggcgaatagaatacttaataaggtcaactatattctgttttggaagaatgctagatgtgatggtttgatcaccaagcaaggtattagcaagatggcagaaatgataaacagggtttgcggtggctatgaaaaattgatgcgtgaaaggacacacctgctggtggcttggtgttcaaggatgggaatttgtaagaaagatgtcaggagagtcgaatggggaattccttcttgatattcgttcacagatatttgtaataggatctttaatgagatgctcattagatatagctattagaaattactgcg

SEQ ID NO: 41060 - DNA, 183 bp, Glycine max
cgcacgcctccgcgagttggtgaacctggtggtgggggctggagacaggaggaaggagtccaaagacttggaagagaatgccgagatgaaaaatatgtatggcctaatctagacctacaagaagaacagccaattcagatggatatcctcttaaataaaccgcgtgaggaacggacagctcta

SEQ ID NO: 41061 - DNA, 342 bp, Glycine max
ctcgagccgaatcggctcgagtgtgatcatcagtgatgaaattgagctacccttggaagatgacttggactactctgacttttccataattgtccatgcctctgacgccatgaagaaaggctacttgctgaatctcctttgttcaatcaagcgtgatgagtggaacaagatgtgggaaagattgaagcagattacacaccactttgagtatcagtatccatcccaacctggggatgcagtgaatatgatatggctgcaagttgaacgtaagatatcttcgataaggttcaatttgcacaggaagaacagataccagagatcttagcttcgtgttaagactaa

SEQ ID NO: 41062 - DNA, 331 bp, Glycine max
atctcctgcaaaagttggtgcaaagcgggaccctcctgttccatattcatctgacatggatcaatctccaaatatcagggctggggatccaggattgggcaatgcctcatggaaagacagagacagtggctggcagatgcatcatgaaaggaatgctgattcaatgtgcacaggccaagctgcttctccaagaggagcttgcgatattgatgctacaactgatgagcttgtagatgattctgtattgaatgatgaagctcgacagactctgtgcaggaaggtatctattgcactttctaggataaatccatatcgaatggccattatgctg

SEQ ID NO: 41063 - DNA, 338 bp, Glycine max
caactctcaacaagttactaattggagaattttggataatggtcaagattgtggggtctgggaatgcagcagtcaaaaggagtgattgggcctcattggtacaagtgtttttaacaaacagcaacagtacagagcattttgatgcatgtaagtggacaaaatcagaaccacattcctgggaattaatcttcccaatagaggtatgtggtcctaataatggttttgaaatgtggagttctgagtgggcaaatcaaacttcatggcatttgagtttccttattgacaatcccaaacagtctacagtttttgatattctcttgggaatctctcaagatttt

SEQ ID NO: 41064 - DNA, 341 bp, Glycine max
ctttgacgtaacctattactctaatttggttcaaaagaaagggcttcttcactctgatcaagaactcttcaatggtggttctactgatgaactggtcaaagagtacagcgacgataccgaagatttctacgaggacttcgcaaactcgatgattaagatgggaaatattcagcccctcactgggaatcaaggtgaaattcgggttaactgcaggaatgtgaactaattcattgcaaaaattatgcaataagtatgtattatatatacatacagaataattcttgagtggtgcacgatttagaatttattatttatatatgtaatggtatgtattctttact

SEQ ID NO: 41065 - DNA, 342 bp, Glycine max
cagatcaggggaatgcatacgttgattcgtgaccgagacatatcaaagcatgatttcgtgttttattcagatcgacttatacgcctggttgttgagcatggtctaggtcatctgcctttcaccgaaaagcaagtggttactcccacaggtaatcatccgcccttgtcctcagtccttgcaatttttatgttctttataactcctcttgtttggggaacaagatttatgctttgtgaactgcaacatgtctgggaaagaagtgacagatcgacagtgggtcacaaatggaggtttatgttgacagtgctaattaactgaaatgaggtttatattgcaggatct

SEQ ID NO: 41066 - DNA, 344 bp, Glycine max
gctgcaatgcctgcagcaatgtctcaagagtggtatggaaagaaggcagatattaactgcgttggagccagcggtcggatattcatatgcttgaactcccctaagctatgtacttatgttctgtgtgatttggtgaccaacaaatggaccgagttgccgaaatgttgcttgaatggagaagtcatggaattcatgtctgccttttcatttgagccaagaatagaggcttctgtatgacactaaagtaccccagtctggtatattgatcttggttttcatcctttttctgtgttctgttagattaattttcttcccacttgtacttgaatttgtcatccaaaata

SEQ ID NO: 41067 - DNA, 338 bp, Glycine max
cgtacattcactccagtttaaccgaccgaatatgttgttgtttggagcgatcggggagaaactctgtaaacatgttggtttaccaggaccttcttacaggtgatgagcttctttctgactcctttcgttacaaggaaattgagaatggaatgctgtgggacgttgaggtgacgaggttagctatgggagtacgccacttatctcactctcagctggcccagaacccttttgtgccactccctaaccatttcagccacagatatattttccatcacaatttctctgaactcctcaaccttcttcttcagaacacgccatggctcaaaatcaatcaacaa

SEQ ID NO: 41068 - DNA, 402 bp, Glycine max
actatagaagtgctatgacgttccactgcacgcgtacgcaagctctgtcgcttcgagagcctatcctcctgttgggtaagagccgcttcgccggcgtcgacatgcgcatccgcgtcaagggtggcggccacacctcccagatctacgccatccgccagagcatcgccaaggcgctcgtcgcgttctaccagaagtatgtcgacgaacagagtaagaaggagatcaaggacattctcgtgaggtacgatcgcaccttgctcgttgcggatcccaggcgctgcgagcccaagaagtttggtgggcgtggcgcacgtgcgaggttccagaagtcttaccgttgaagaagaatggtggtggtgttttcgtgtttttggcttttggtttcggttcatgttttatgct

SEQ ID NO: 41069 - DNA, 361 bp, Glycine max
tctacaccgtgtctttactcttgttcttgttgcagcttggtggttgcattgaatcggagagggtaggtaggtgggaagacgtgtcttgttttgtagctttccccttcgctctctctctctttcccggcgcatgtgccggattagacgccaactgcttccataattcacctcctccaaccaaccaacacaagatttccctctgggagagggtaacagtgatccccagggtgtgcaaatcatgggctaatgcagtaactggaccttactgctggcaagagatagacatcaaggattggagcaaccgatgccagcccgaccaactcgatcggctacttgagatgcttatcacaagaagttgtgg

SEQ ID NO: 41070 - DNA, 356 bp, Glycine max
gccttcagatttagctacctctttatttttattattattatcattcattagtcatttctcgtaccaaacacaacacactcttctcctctcttatcccattacaatgcctgggagtttagaaccggtagatttgggtgttcacataccctaccacttccgatgccctatctcgctcgaactcatgcgagacccagtcactgtctgcaccggtcaaacctacgaccgcgccagcatcgaggcatgggtcagcaccggcaacaccacatgtacggtcacacgcgccactctgaccgacttcaccctaatcccgaaccacacccttcgccggcttatccaagagtggtgcgttgctaacc

SEQ ID NO: 41071 - DNA, 346 bp, Glycine max
atcgctcctcagatctgaaccaacggacacgcacagcacttgtgagaggtaagaaaatagaatttcttactcgagtacatcctcactcagtcgctctactgtctgtgctgtttgacgttaagaatgaaattatgcgatataaccccactaacactatgctgacgcgaccttttgagagctgtcagactctaaaatctttgagagatcagagctctttggcatatgcgaactagcttaatggatgatctacactcaaataaagcgcattactatgtgcactgagcctggttgcatgttcttcccagtgactcatggaatccatgctgtgaggcttggcaatgatgcc

SEQ ID NO: 41072 - DNA, 358 bp, Glycine max
caaatgcgctgggcaataggaaaataaactcgggagcaaaacacaaggccatagctatgcatgttgaagaacgaacctgcgactactgacaacactgcacagtactggttgactgcataggcgtgccaggaaaactgtgattctagtgcgatcgcgaggatgactacaccaaccaggtgttatcgaaacacacgctcacgctgctctgcgactcatgcgatcattccggtgtcaccatactttgtttcaccgacacctttgttctgtgccagaactgcgactgggagaagcacaaccctgcgctcttcgattccctttacgaacgaaggcccctcgaaggcttcactgtgtgcccttc

SEQ ID NO: 41073 - DNA, 348 bp, Glycine max
aactaaaccaaaaccggacacctgaagctggtaggcaccaataggctgggcacatgagtcttatccagagtgatgcagtgtaccagactttatgtgcaccaggtgtctacccatgagaacctgaataacatgaaagaactgagagagatgacagccaaacactcatggacacctcagccaacctgtccagacaaggggcgattattgaacatgctctttaagcttatcaatgccaagaacaccatggctattgctgattacactgcatatgcacttctagccaccgatctcgctgttcctgcagatggaaagatctcggccatggctattaacagggagaattatgaa

SEQ ID NO: 41074 - DNA, 352 bp, Glycine max
ctgaaaaggaagatcaagaaaaacccaaaaagattgataccagattgagacaaagaatagatcctcaatacaatgaggttcaggctcagatggaaacaaatttgtttaaattgtctcttgatgatgttgaaactcctaaaggttccatgttggatcttaaaatttctcaatctaaaattgcacttcccaaaaacacagttggaggaaccattctgcgtagtgatctattggcaaattttttgacagagggcaattttagagcaagtgttgatttgcagcgcactcatcgtattaaaggaatgattaaaatggtggccacagttggtattcctgagaatacaggtatagcatt

SEQ ID NO: 41075 - DNA, 358 bp, Glycine max
ggaatcatcaacctttactctctgatcggatcatgccttgtcggtagaacctgctactgaataggtcgacggtacacaaaggatgacgagggcgccatctaatttgccggagcactattgatgggtttgtccatcaactatacatttctcatgttcggccgattgggagccggcatcggtatcggatacgccctcatgatagcccacgtatacaccgtcgaggtctacccggcctactctcggggctgagtcacatccttcccagaggatcgttgctttaattctatatatatatctccatcgttatatatatatatatgacaatatgattctgcaggttgagattaatggagggata

SEQ ID NO: 41076 - DNA, 148 bp, Glycine max
ctatagaatagctatgacggcacgcgtacgtaaagctcgaattcggcttcaggtctgcttcttttggaaaagattaacaataaaagggtggagcactttttatagcaaagatgtttgggatctttcacaaggggcaaaagataaaagg

SEQ ID NO: 41077 - DNA, 365 bp, Glycine max
ggagaatgttaatcgcgatatctcgggaaaatttgcgggttggttgaataagcgagataggagattattgagtttaccagtgtcggcaattcaggcagatataaccgtttctaagactggtaacggaacagtgaagaccattgccgaggcgattaagaaagcgccagagcatagtactcgccggttcataatttacgtgagggcaggaaggtatgaggagaataatttgaaggtggggagaaaaaaaacgaatgtgatgttcataggtgacgggaagggcaaaactgtcatcacagggaaaaagaatgtgatagatggcatgacgacattccactcggtatccttcgctgctagtggcgctggat

SEQ ID NO: 41078 - DNA, 341 bp, Glycine max
  unsure (1)..(341): unsure at all n locations
gaaggtggcccgcaaggtgagaacatttcaggaacttcatgacatggactctctggagcgagctgacctgcttattcaaacaggtgggttatcttctacggaagtgcaagacattgagacggtactggacatgatgccttccttgacacttgaggtaacttgtgagactgaaggtgaagagggtatacaagagggtgacattgtgaccctccatgcttggataaatgttaaaagggggaatggcctgattggagcccttccttaatgaatgggccanacacancatgnaggatggctacctgtttctgcaatggatgcggtagctaagattgaagaggttc

SEQ ID NO: 41079 - DNA, 366 bp, Glycine max
ctcgagccgattcggctcgagcaaagaggggatccaaagaaaaccttcggttagcagtccctcattgggtggtcctactaccattgctgctagacaaagtggagctggaatctcttggctttttccatttgtggacggacatccacctttgggttggcaagatactgcagcatatcttgttttacctattcttcttgtcgtttctcaatacgtttcaatggaaatcatgaaaccacctcagacagatccttctcaaaagaatcaacttcttattttaaagtttcttccactcatgattggctacttctcattatctgtcccatctggactaacaatttactggtttataaacaatgtcctgagcac

SEQ ID NO: 41080 - DNA, 367 bp, Glycine max
  unsure (1)..(367): unsure at all n locations
aaatgatatcacaatgaaatcatttgtgtcactggatggactgccaccccaatgcaggatgttcaggttacaattgattggngtatcatcactcatgtaagtaatccatccatctatcgtatgcatagctatttattacaaaatttaataatattacactttccaacaacccctgacacagtaatcttgggttccaaaagaaggagaagatgaacgtggatctggaatcattggcagaggcaacttctggggccataggatcactgatcagcaccactattctctacccacttgacacctgcaagaccaagtaccaggctgaggctcgttcctcaggtcgaataaaatacaggaatctcactgatga

SEQ ID NO: 41081 - DNA, 415 bp, Glycine max
  unsure (1)..(415): unsure at all n locations
cgtcgcatgcacggcgtccgtaagtctcggaattcggtctcgaggaaaaagtctttctagcctggtcataattatcanccattacgtggnatggtattgaccaaaacnttagtgcaactttgcaatnttagaaagggttagcagattgtgattnttctcaagagaaactttaagcagatgtctaatgttttatgggtggctcctgaggacaaggcgagtttatggtcacaacttcattatgtttcgtgcaataatctggaaatgcaagaagcttatcttgtcaatctcgtaaatgtgttacgagaattgtatttgcacagtccagaggaagctcgccaattgagaaggaaagctctctctcgtattgaatggctgcaaaaagctgatgtgcctaccatagcacagattgaagagt

SEQ ID NO: 41082 - DNA, 305 bp, Glycine max
gaatctggcttacatgttgcttatgatagcctagcggatcaattatgcgctggcgaccaggaggatactactacagttaatactgcatgaccaccaaatgaaccattaacagagagtcgttatcaacttggcacactgtaccaccggtacttccaagcactctctcgcaagtatgggcctctaatgatgctgcaattaggccaaactccaaccctagcggcctcatcagctgacgtggccagagaaataatcaagacgcatgatgttgttttctccaaccgaccacaacctacgggtgctaaaat

SEQ ID NO: 41083 - DNA, 348 bp, Glycine max
ctgctgttggcttgacatcaagttacactccaactccattgttggaatctggtttgcaaaaagacagagggttaattgtggagtattttggaaggatgtcttacgttgctcataacgttaatcagccccaagagaaagatttgttagagggaaatttttcctttgatattaaatctcgctctagattggaaaaagtttcctctacaaaagcacaatttgttagtggaaaaaccttcaaatatgatataattggtgctggttcacattcttcaggagattttcctgaaaaggaagatcaagaaaaacccaaaaagattgataccagattgagacaaagaatagatcctc

SEQ ID NO: 41084 - DNA, 363 bp, Glycine max
atagaagaatatgtggtggctgcaaccaagagataatgtatggaaattgtttgggctgcatggatacttattttcacccaaattgttttcgctgtcactcttgtggttaccccattacagagcgtgagttttccttgtcagggaagcatccatatcacaagtcatgttttaaagagttgaatcatccaaaatgtgaagtttgcttccaatttattcctataaatgctgctggtttgattgagtataggtgccaccccttttggtcccaaattattgtccatctcatgaatatgataatacagctcgctgctgtagttgtgaaagattggagcctttgaacataaaatactatagactagaaga

SEQ ID NO: 41085 - DNA, 362 bp, Glycine max
cttagttgtcaagttggaatcaacccatactccatggaatggactggtttggccaatagattactgagtaagggcaatgatattctgtgttgcgattatgctagttttgatggtttgattaccaagcaagttatgagcaagatggcagaaatgataaacagtctttgtggtggtgatgaaaaattgatgcgtgaaaggacgcacctgctgttggcttgttgttcaaggatggcaatttgtaagaaagatgtttggagagttgaatgtggaatcccttctggatttccgctcacagttatttgcaatagcatttttaatgagatgctcattagatatagctatgaaaaattactgcgccaggc

SEQ ID NO: 41086 - DNA, 361 bp, Glycine max
atttgtaagaaagatatttggagagttgaatgtggaatcgcttctggatttccgctcacagttatttgcaatagcatttttaatgagatgctcattagatatagctatgaaaaattactgcgccaggctaaagctccaagtatgtttttacaatccttcaaaaattttgtttctttgtgtgtgtatggtgatgataacttaattagtgttcatgaatatgtcaagccttactttagtggttctaaattgaaaagctttctagctggtcataatatcaccattactgatggtattgacaaaactagtgcaactttgcaatttagaaagttagcagattgtgattttctcaagagaaacttta

SEQ ID NO: 41087 - DNA, 361 bp, Glycine max
cacgaaccatgattctcaatcgggacagaaaatgcatccttctatgtatgatgatcgtgttggggcaatgtacaatcttagacagaggttgaaatgtgacaagagagttttattgggaaaaactacatctggaggagtctccttagcttcatctggaggaacacatgtggatttggagaggaccccaagttctcatgctgaagatcgtgctgagaaattgttacctgactccggtactgctcactcaagccttgatagatgtgccagagtgcacatccctttggggccaaaccatcaagctgaagtgccagaatggactgtcataacttatgaggttgattcaaagtggttggggacccaa

SEQ ID NO: 41088 - DNA, 365 bp, Glycine max
acgaaagacgtttgtagagaccaatgcgcaatccgttgtggattatcgctcacagaggttggtaatagcttctttaatgagaggctcattagatctacctatgaacaatgactgcgccaggctacaagctcgcagtatgtgcttacactcccacaaaagttttggttgtttgggtggggatggcgatcacaccttaattagtggacatgaatatgtcaggccttactttagtgccaataaatgggaaaggtctctatcctgtcagtaaatcaccattactggctgtcttgacaaaactagcacgactttgcaaactagaaagttagcagattgtgattttctcaagagaaactttaagcagatgt

SEQ ID NO: 41089 - DNA, 356 bp, Glycine max
gttggaatcaacccatactccatggaatggactggtttggccaatagattactgagtaagggcaacgatattctgtgttgcgattatgctagttttgatggtttgattaccaagcaagttatgagcaagatggcagaaatgataaacagtctttgtggtggtgatgaaaaattgatgcgtgaaaggacacacctgctgttggcttgttgttcaagaatggcaatttgtaagaaagatgtttggagagttgaatgtggaatcccttctggatttccgctcacagttatttgtaatagcatttttaatgagatgctcattagatatagctatgaaaaattactgcgccaggctaaagc

SEQ ID NO: 41090 - DNA, 380 bp, Glycine max
gcacgaagggccctttgggacattatgttgtcaattgagcagagggaagagtcttacggaaatgagcgccctgtgccactgatcaagaggtactgtcgaacagttgaggaggaactctccaaaatttgcggtgacattgctgactattatagaccaacatttgattccttcttgcgcatcatcagaagctagtgttttctactataagatgaaaggtgattattttcggtttcttgctgagttcaagactgaccaacataggaaagaggtccctgaacagtcactgtaaggatacgatgctgatttatccactgcaaacacagatcttccatgaacacatacaatatgtattggacttgcactcaagttatgtgcctttt

SEQ ID NO: 41091 - DNA, 377 bp, Glycine max
caaagatggctaggtctagtgcttatcctttgttcttgatttcttccattctgtttatttcttccatgattgttttgttcagggatgtgatggatcattgctgctagatgggagtccaagtgaaagagaccaaccagccaacggaggcatcagaactgaggccttgcaaaccattgatgacatcagagctattatccataaggagtgtggaaggatcgtttcttgcgcagatatcactgttttggcagcacgtgattcagttttcctgacaggaggtcccgattatgcagtgccactaggaagacgagatggcctgagcttcagcacatcaggaacaagtgatctccccaaacccttcaacaccaccggcgtgaccc

SEQ ID NO: 41092 - DNA, 367 bp, Glycine max
tgtatcggctgttcaagaagggcctagaaagggtgaggccacattgcgcccaagggtttattctcactacggtgaggctcaagctcagccggacacatgttggtgtaaagcgcctataggttgtgcacaagctcctaatggtgataggtgctatctccagattattcattgtaccagtgcactccccaagaacactgaatgcatgaccgtactgcgtgaggttacattggcacacccatggaccatgatgacaacctgtgcaggcgaagggcagtacttgaacatacttcttaagctcaatgatgccaatggcaccctcagaatgggtgtctgcacttgctattctcttattggcaccggttttgat

SEQ ID NO: 41093 - DNA, 268 bp, Glycine max
aagagctatgacggcgcttgccccgtcgtaagctcggattcgctcgggggggcttgggatgcccggtggtccttacttatttggcggtgatctggttggaggcttggagaaaaaacctgcttctgggacgtattaaaacctaatattttatctgggggcctgtggatctgggggtatctttggagggcttctttccggagatttcaatatttatgccaccccagctttcaatgccgaagaaaggaggtgggggacatattggccttgg

SEQ ID NO: 41094 - DNA, 366 bp, Glycine max
accatctgtattacccctgatattgaaacgggcgtggcattctggcacctgttgtttttatgatggcagagatgacacagctaatgggcttatgtggctaacgggaggacctggagaccaagctctcaattgcctgaattataaaggttctgggttggtgacatggatgcagcatataatggacccaacattacttggaaatgatcataatcagcaataccaagccatgaatgcatctggtgttgcagaacttagggagtggagacttaatgagacaacaaatgatgaattttcaacagcctttcaattatcttcaacaatcaggaaaccccaatcttcctttgcagcttcagcaaccgcaagcag

SEQ ID NO: 41095 - DNA, 364 bp, Glycine max
ctcgagccgtgcggttgacgtatggcttcttttcctccgtcgacgagctgatagtgcggcaatgaacgataccgacatccttgccgtttggtcgatgaatgcaacgtgcgacgctctggcgtgcgatgaggacacatatcgtctgctgcagccattttgggatttcctacgattgaactacgggcatattcttcggtcaccactattcccgcctttcttcgctttgtccatcgactacatctgggtcgccgtgttcacatttatcgacgtatgctgcacagaagtgccgttctttaagcaagccaagatacagaaggaccgaaaagtgacgtgggacctcataaaggagtcactgcatctacaa

SEQ ID NO: 41096 - DNA, 361 bp, Glycine max
  unsure (1)..(361): unsure at all n locations
cggctcgagctactatccccataaagaggtagtaggaataactgttgtgcttcagattgtcatcgttgaatatcttgggaagttcactaaaacagccaagcttaattggaagcagtggctcatttctgttattatagcatttatcagctggcctcttgctgtggttggaaaactgatacagtaccaaantgttacatnggtacaacccttcttgaggcccttgatcagatcaatgagcccaagaggccatcggacaagcctctccgattgccccttcaggatgtctacaagattggtgggataggaactgtgcctgttggacgggttgaaaccggtgtcttgaaacctggaatggtggtta

SEQ ID NO: 41097 - DNA, 364 bp, Glycine max
cagttcttggagagtattaccgtgagccagaaagatctgcaccattaccatttcatctaataaagtatttaattcagagtatgagacaagaccacttcgtaagtgacactggagatgtggtttattatcagactgattctctgcaccttcactcgcaccgagactgagtttcaatttttgggttatttattggattctagctactcaaattactttttttttaatgttacgtttttggagttttaacgttttctgaacaacttgcaaattacatgcatagagagacaggaattcatagtgggcctcaatggaatatttatttgaaattagtaaggtggtaattaataaatattgaattgtcagt

SEQ ID NO: 41098 - DNA, 362 bp, Glycine max
cacctttcttggggcaactgaaggaactcaccttgttctatgcctggcagaatcagctccatggaagcataccaacagaactctccaactgtgagaaacttcaagcaattgatctttcacataatttcctcatggggtccattccaagttcactgtttcatctagagaatttaacacagttattgttgttatcaaatagactttcaggtccaattcctccagatattggcagttgcaccagcttggtcaggctaaggttgggatcaaacaacttcactggccaaattccaccagaaataggctttttaagaagtttgagctttcttgagttgtcagataattcactcactggagatataccc

SEQ ID NO: 41099 - DNA, 351 bp, Glycine max
gcacaaagcggggtactggacgcacaagctgccagcggtctctatctaacttagtgcctacacgccagaaggtaaaatgggccaagaaactatcctattcacatgtgaatcagggaacgaggggcaccctgacaagctctgagaccagatctccgatgctgagctcgatgcatgcttggagcacgaccctgacagcaagggtggctgcgaaacctgtaccaagaccaacatggagatggttttcggagagatcacaaccaaggccaacgtggactatgagaagattgtgcgtgacacatgcaggaacattgcctatggctctgatgatgttggtcatgatgctgacaactg

SEQ ID NO: 41100 - DNA, 340 bp, Glycine max
  unsure (1)..(340): unsure at all n locations
tgacactgtgggcagnctggctataatatgaccatgtgtgatggtattgacaaaactagcgcaactttgctatttataaagctagcagatcgtgattttctcaagagaaactttaagcagatgtctaatgttttatgggtggctcctgaggacaaggcgagcttatggccacaacttcattatgactcatgcaataatctgtagatgcaagatgcttatcttcgtaatataggaaatgtgttacaagaattgtattctcacacaccagaggaagctcttcaattgagaaagaaagctctctctcgcattgaatggttgcaaaatgctgatgagcctacca

SEQ ID NO: 41101 - DNA, 359 bp, Glycine max
aaaagacaaaatatagtgaaaccttaactatcagaacctatttaagtatgcagggttggatattgacaatcttcagaacttggagagctgtctttttgttcttttcccatacttctcgtacatgcttgcagaaggtcttggactgtctggtattgtgtcaatattgttcacaggaatgggcagccaatgtgttctcttgtgcttatctagtcaacttgatcagacctgcctatcgacaaataccgccaaaacaccagaaagcactttggtatagtggacttcgaggggcaatggcctttgcccttgctctgcaatcaattcatgatctgccagaaggacatggacagaccatcttaact

SEQ ID NO: 41102 - DNA, 364 bp, Glycine max
ggtttggactatatggaaagaattcctcttgccacatctgagggttttcctcatgtgctttcacgcaaaaatggcgaaaaaggcaaaaggagatttgtctctggggatggtgaagagatgacattgattccaggaaccagtgttgaagaggcttacaacaagctaatagttgaacttgagaaaaggggtcctacattgggtggcattggatggtccaagggttaaaaaccttcttggcgcaaaaattttggccaaacttaaaacccgctgtttaactattttccttatggagttaaatcttgtggtccgtcaaaagtttttaaattttgtgaggttcattatgaagaaaagggacaagcttagt

SEQ ID NO: 41103 - DNA, 361 bp, Glycine max
cgctctgtttctgtctctgagattgcggatgaggagtccgaacgagcgaccttgttcgattatcgcaaagattaaggcatcatgggtagggaaaagactcacatgaacatcgacgtcaatgcacatggcgactctgggaagacaactaccactggtgatttgatctacaagctgggaggtattgacaagcgagtgattgagaggttcgagaaggaggctggtgagatgaacaagaggtcattcaagtatgcctgggtgcttgacaagctgaaggctgagcgcgaaagaggaattaccattgatattgctttgtggaagtttgaaaccaccaagtactactgcacagtcatcgatgcccccg

SEQ ID NO: 41104 - DNA, 364 bp, Glycine max
atcacatggaaacgaaaaagccctaactacgcacgcactcattcttgagaaagctcggtatttattcaagcatggcactatcttgtggagtatattgcacatccaaattgatctatggctggcaaatacttctgcaaaaggagcatgctattccagttcgtcactttgctaaagagtctgccccttctgcccttaacggagatcagatgctgaagaacatttttgtggaggtgaagaacaaatttgagactgccatacgaatattaaagaaggagaagatcaccattgacccaaaagatccagctgctgtttctcattatgcaaaggtcatgaaaacagttacagagaaggcaagcttgttgtc

SEQ ID NO: 41105 - DNA, 335 bp, Glycine max
gattggtttatttcctctcaggaatgtgttcccaggacctattgtgttttaaatccacaaaatccttttgtgttaaataggtggatgggaaaactgactttccctcagggcacttcccgaagtgttaagagaatgcctctttctatagggggaggagctgttgcatagaatgctattctcatgaatatgccaaatgctgctctctcaatgtggcgatatcttgtcggagatctcgtctttgcagcagctaagatgacttctccctacattaaatgcacagtctctttctttatagcatctggaaattcggctgacgacaccattaattttgaggc

SEQ ID NO: 41106 - DNA, 318 bp, Glycine max
gtcctacaggctctgccagattccaacatggggtgggtgctagatctttctaacatggacctgcaatatgtaacttccagccaagacaacgcacacagatgggtgcgcgacaatgtgataaactattggaatgtcagagtcaggcacattactgtggcaaaagaaaagaagccttgcgactcattttcacagttcgtatggcctgcgatgcaaaacattcaaagagcactctctaaggctggacttggaaaccaaatgaagggtgccactgcccttgagtctggggcattggcaggatcctaccctccatcgagaggc

SEQ ID NO: 41107 - DNA, 428 bp, Glycine max
  unsure (1)..(428): unsure at all n locations
atagatatgacgatgacatgcaccgcgtaccgtaagctcggaatntcggcttcgaggaggaaaactttaagtcagatgtcttaatggttttaatgggtgggctcggctgaggacaacaggcgagtttaatggtcacacacttcattatgntttcgtgcacataatctggaaatgcaagaagcttatcttgtcaatctcgtaaatgtgttacgagaattgtatttgcacagtccagaggaagctcgccaattgagaaggaaagctctctctcgtattgaatggctgcaaaaagctgatgtgcctaccatagcacagattgaagagttccattcgatgcagaggatgatgaatgctcctgattcaaatgataatattgatctactgttgagcattgatttgttgggtttacaaggagcaggtaaagcttt

SEQ ID NO: 41108 - DNA, 357 bp, Glycine max
cgttaatcagccccaagagaaagatttgttagaggggaatttttcctttgatattaaatctcgctctagattggaaaaagtttcctctacaaaagcacaatttgttagtggaaaaaccttcaaatatgatataattggtgctggttcacattcttcaggagattttcctgaaaaggaagatcaagaaaaacccaaaaagattgataccagattgagacaaagaatagatcctcaatacaatgaggttcaggctcagatggaaacaaatttgtttaaattgtcttttgatgatgttgaaacttctaaagcgtctatgttggatcttaaaattttctcaatcttaaaattcactttcca

SEQ ID NO: 41109 - DNA, 156 bp, Glycine max
gtgaggttcattatgagtagagaatggacaagcttagttgtcaagttttaatcaacccatactccatggaatggactggtttggccaatacgttacttagttagggcattgatattctttgttgcgattatggtagtttttatggcttgattacca

SEQ ID NO: 41110 - DNA, 429 bp, Glycine max
  unsure (1)..(429): unsure at all n locations
aagagctatgacgncgcatgcacgccgtccgtaggcttcggaattcggttccggggcaatgctgggggcaagaaacctttttcttcagcactgatgtgggaaaagcatggtctttgaggctgacatagtgtttgtctctgtcaacaccccaaccaaaactcagggtcttggagctggcaaagcagcagatttgacatattgggagagtgcagctcgcatgattgctgatgtctcgaagtctgacaagatcgtggtggagaaatccacagtccctgtcaaaactgctgaagccatagagaagattctgacccacaatagcaagggaatcaaattccagattctatcaaaccctgaattccttgcagagggaactgcaatcaaagatctctttaacccagaccgtgttcttattggaggcagggaaacccc

SEQ ID NO: 41111 - DNA, 277 bp, Glycine max
gttctatgaatagttcttttagggggcgtgccagggctgatatttacaccagctgctctcaagactgtgaattatggaatcctgcttgcacaaaagcgatgactatgtcatttaatccaaacccgtgttctgatgcatggagtttggaatttctgaagcgtactggatttcattgtgatatcatttgtgtcactggatggactgccaccccaatgcaggatgttcaggttacaattgattggtttatttcctctcaggaatggggtcccaggaccta

SEQ ID NO: 41112 - DNA, 380 bp, Glycine max
tttcggttcgggaggggaaaggccaaggtaatacatggataatactcgtcagcattgtgaagaataatattaaagtgaaaagcatatttttgatatgttcgattcactgcaaattgtttgttctagtaattccaaggaggcatccagttctcagaaactttctcaagggggaatccctttggcaaatggagatgctctcatgcaaaaaccacctccttgggcttatccattacggacagcacaagaggtgtaccgcaatagcaacgataggatgtccagttcaactgctcatgcaattgaccaggcgatgactcatgtatctgaggcaaaaatcaaatttgttagtgtgaatttttctgtggaaatgcagttaaatggtc

SEQ ID NO: 41113 - DNA, 371 bp, Glycine max
ggtttgcgcagatccctacctctcctttcaagatgcagatcttcgtcaagaccctaaccggaaagaccatcacccttagaggaggaaagcggtggcaccatcaatagcgtcaaggccaccatccaatacatggcaggccttcccctggagcagcaccgtcttatcttatacggagagcaattagaggtcggccgaaccctggccatctacaacatccagaaggagtcaacccttcatcacgttctccgactacatggtggcctgcaagatcttagtgaagactctcactggcccaaccatgaccgtagacgtccatagatttgacaccattgactgccccatggccaagatccaagacaaggaggccatcc

SEQ ID NO: 41114 - DNA, 348 bp, Glycine max
caattgcacacattcatcttttatgacagtgcttttggtgaaatcagaatagatctggttcttgcaatactagcctaacatgacacatccaaggtatagattattgttgatgaacaatgggattaatactagcacactggttttctaagtgattcttgcatcgagaaagcaggcaaggggcatgagcgggacatgggatttttgttatcacaaagtgaaattcttctgagagaaaacgtttctacatatgaactatacctgaatctgtaatcatcagacacatgggttgctgaatacaggaggtggatggacaaaggggtgcaggtaaagccatatcataaagctaca

SEQ ID NO: 41115 - DNA, 295 bp, Glycine max
ctgaatcctggtattccaggcactagtctttagagcaccatatctaagtcaatttcacagaggactgtttgtaatcagacggcaacaggggggacagcattgaatttcgaatctagcaagccgagcttcaggcaataaactattgaccttaactgtagaggaatgttaacggacataactggagattgcatcacacttatgccaagatcttcaattagtgactcgacgcgagttgctgattggaaaaaaggaccgttaacggtcaagactgggatgtctgcgaatgcatgaatca

SEQ ID NO: 41116 - DNA, 351 bp, Glycine max
aaggagcgtcaggtcatgctcccagcgctcgcgtcggcggatttcgagtcgcacaatgtctcgctcgacggggatttcagcttccagatatttttgagggtcacccatagagacctaaaggagcatttctccaaagaaggaaaagtttctttatgtttttttgtggtggagccccgtacaccgatttctcgcggttttgctttttttacaatggaatcttcttaagattcccagcgctttaataaagatctcaatcaatcagttttagagggtcgttacatcactgttgagcgggtaatggatttttctatggtagtagatgttaaaacaaatgcactcgtcatttttttc

SEQ ID NO: 41117 - DNA, 414 bp, Glycine max
agaagagctatgacggcgcgtgcacgcatagctaaaattcggaattagaatagagtgtaatgttgtccatttgttggttttgaagtgtgggggtctgatggggaataccttacttcatggcatttgagttttcttattgacaattccaaacagtctacagtttttgatattctcttgggaatctctgaagactacgcaatcgctgacaatactcttatgccagctttttatgttccacaggctactgccagatcttctgaaaatgcggaatcctctgcatgatctggaattcgcgttttctttcgcttgtcactgcgttcctctattccttattgtctaggcatgaccctcttgttgagtatgctctgcctatctgaaaattttcacaccttttttaattgtccgaatgatgtg

SEQ ID NO: 41118 - DNA, 358 bp, Glycine max
ctcgagctcttcgagccgtttccataaccttagtcgtgggtttctttcatcgggggccgtaaccgtatccagggaaaaatatggcggaagaacacagatgccaggcaccgcgcttctgcgccaacaattgcggtttctttggcagccctgccacgcagaatatgtgctccaagtgctaccgcgatttccagctcaaggagcagcaatcttccaacgccaagatggttctcaatcagtcgctggttccttcaccgccaccggcggtgatttctcagccgtcgtcttcttcttttgccgcagaagaaacgtgattagccagggctgaagacgcgatgaacgaggccatcgaggatatggc

SEQ ID NO: 41119 - DNA, 283 bp, Glycine max
acagagtacagtttttgatattctctcgggaatctgtgatgattttgaaattgctggtaatactcttatgccagatatgtctggtccacaggctactgccagatcttgtgaaaatgcggaatcctttgcatgatctggaattcgtgttgtctctcgcttggtcgcttgtttaattcaatataggaaattaggcatgaccctcttgttgggtatgctctgcctatctgaaaatttccacacctcttttaattgtcgtaatgatgtgtgaagcgtgtgatatttt

SEQ ID NO: 41120 - DNA, 239 bp, Glycine max
atagaagtggacgacgatgcaccgccgtcctaaggttcgaaattcggttcgggggaaaacaaattagtgatgtgtcataggcttaaatttgcagagctgcacaagttgtgcgtgccatgaaatccgtgaaacaacagctttcatggatcaattgtgggctgtggatggaaccaaggctcaggcacttgctatttgccactcacatacttttgaattgcagcatgaaatgctatagcaac

SEQ ID NO: 41121 - DNA, 385 bp, Glycine max
ctagagagcgagtacgtatctgctcattagagccttgcggtgcttatgaataaaatcaacaggattttcagcccaagcaccggaaggctctagagagcgagtacgtatctgctcatttgcatgagtggattgacctcatatttgggtataagcaacgaggcaaggaagctgttacagcaaataatgttttcttttatactacctatgaagggacagtggatcttgataaaatctctgacccagtacaacagcgtgccatacaagatcagattgcttattttggacaaacaccatcccaacttctgactgttcctcacttgaagaaaatgccattagcagaagttctgcatttgcagacaatattccgcaacccaaaagaagtcaa

SEQ ID NO: 41122 - DNA, 229 bp, Glycine max
ggagatttgtctctggggatggtgaagagatgacgtggggtccaggaaccagtggtgaagaggcttacaacaagctaatagttgaacttgagaaaagtgtttctacattggttggcattgaatgtcccaaggatgagaaacttacttgcattaaaatttttgacaaacctaagatgcgctggttaactattttccctatggagtttaatcttgtggttcgacataagtt

SEQ ID NO: 41123 - DNA, 318 bp, Glycine max
cattgccagggttggaaagacctctttgatgaatcagtgtcctcacgcggcgagcgtcgcactttctcaccgcttttctgattcgctttgattcattataatgatttattataattatattagtgcatctgtaaagatgattagatttgtgtttgtggttaatttgatgatatttttttatagctttttatttttataattttatatgtcctttattttttttattttatttggaatttagttctgtgtggaccttagctaactgggtagatacgtgcacaagaagtttagtcagcaatataaggctaccattggggc

SEQ ID NO: 41124 - DNA, 360 bp, Glycine max
atttcttaactcatttcacagcaaactgtctggggggaaatgtcaacagggagaacaccatagaattttgattctagcaagcagagcttttgtcaattatctattgaccttatcggacgaggaattttagtgcacaaaactggagattgcatcacacttatacaaaactctccaataagtaacttgctgacagtcgctcgctactaagaaagagttgcttaatggtcaacattgtgatgtctgataatgcagcagataaaaggagtgagtgttcctcattggtacaagtgtgtataacaaacatctacagtacagagcatggtgaggcatgtaagtggacaaattcagaaccacattcct

SEQ ID NO: 41125 - DNA, 272 bp, Glycine max
aaggaatggcaactggatctaccttgtgacaaaattcctagtgtcttgactacaactgatgagagattggtaggcacagaacatgagggatatgatccttttcttggtggaattcaaaaatatgccactcccatgatgcccctagatgaagaaattctttctaagggtgcacaagatatggttgaggaatggtttgattgtgttgatgaggaggattcctttgaggaagtttctttaagtgcagcacttaatggggttgagggtttggacta

SEQ ID NO: 41126 - DNA, 350 bp, Glycine max
actgcactaagttgctgcagctcttcctttttctttgtaacatgtacaggctgcctaactgtttatttctggaatgattaccgagtcctatactcccatgccatatcactgtatgaaccagaatgtttatttacattgtttgttgggttctgcctcagtcattgcaagtgttgcttttttcagaaatccagttgctccagaggtgcagggcaatggaagaggaaatgagaggatagtagacctacatgggttgcacgcaagtgaagccattcatgtgctgaaacaatgagttgagtgtgctgaaaagcactgccatagctgccgagcagcgtttgcaggtttatattctt

SEQ ID NO: 41127 - DNA, 206 bp, Glycine max
cgcatattgacttaatcctggtatttcagggggtggctttttgggcaccattccttactccattttacagcaaactgtttccaatcacatgacaacagtgccaacaccattgaactacgattctagcaagcaacgcttctgctaaaactctatctaactcatcgcaagtggctctttcttgagcaacactgtttctaccactcact

SEQ ID NO: 41128 - DNA, 358 bp, Glycine max
caaaaagactgcgtaccggcgttaacctaaactaagagagagagaggtcgtagactgccactcgaatcgcttactcatcactcttatactgggacggaaagtgaacaatagatatggtctgaatcgagcttattggatgcacataccacaaagctcttattgtgataaataggatatctgggagaacagctcgtctttcaaggccctaagctgactgctacgatacatgaaaatttcaatcggtttcgtcatagcatctacaaatgggggtgacgacaccatcaattttgaggcttttccatacaagctggttcactttggagagattcaagaaaaagttgtattgtaactttcacaa

SEQ ID NO: 41129 - DNA, 359 bp, Glycine max
gcccgaatagctcatgatcagcattttctttatcgttaagttttttctcctcctcactagtctttgaatttcttctgtccgggtattaggaagaaaaaaaaaggctttagagtttagtggtgaaggtagaggatcttgagattaataaataaagggtgatatttatggctgatgcatttgatgaagagtgtgattatctcttcaaggctgttttgatcggagactctggagttgggaaatcaaatatgctctcaaggtttgcaaaagatgaattccgcttggattccaaacccaccataggagttgaattcgcttaccggaacatcagggttggagacaaactcatcaaagctcaaata

SEQ ID NO: 41130 - DNA, 395 bp, Glycine max
tgcacgcgtacgtaagctaggaattcgttcgggtcgagattcattgctaactttcattataacttaatttgtgccaaaaatggtcaaatccttaatacttgcagtactgtttgcactttcacttcgcgttgacagtgacgtgtcaaaagagattcaactgagcaatggtcgtaaaatgccaattataggattggggacatgctgtggcattagttcgtctacgatgtaccgtatggttaaggacgccattgaaattgggtatcgacatattgacacagcatatatctatcacattgagatggaagtgggacaagcagttaatgagtttattactaatggcacacttaagagagaagatatttttatcactactaaagtatggaatactttccact

SEQ ID NO: 41131 - DNA, 319 bp, Glycine max
  unsure (1)..(319): unsure at all n locations
accataccttttacgcgctgctnaactattctccctatggagttaaatcttgggggtcgccagaagttttaaaatcttgtgagcgggattatgaagaaaagggacaagcttagttgtcaagttggaatcaacccatacttcatggaaaggactggtttggccaatatattactgaggaaggtcaacaatattctgagttgcgattatgctaggtttggtgggttgactaccaagcaagttattaacatattctctcaagggatgcacaagatgaattccgcttggattccaaacccaccataaatggacacacctgctt

SEQ ID NO: 41132 - DNA, 347 bp, Glycine max
aatgcctctgctgctaaggacagacttgaacgcgagagcctcacagacaccagccagcttcattctcacgaccagtacataattcacattattactatcaagaccaacaacacatgcgctataaacgacagggctatcggcattactaaagaacgagtggataataacactctaactattgcaaggtctgtgaccaaggaatacatggaagccctggctgctggtgctgatgtgagcatgattggacagtttgctgatggatcctactatgcttatcttgtaactgacaaggctattgctaccacaaagcacaatgatgatgagcagtatgtctgtgagtcccatgc

SEQ ID NO: 41133 - DNA, 384 bp, Glycine max
ggatttcggttcgggaatggaaaggctttttgcctggccataatatcaccattccggatggtatggccaaaactggtgcaactttgcaatttaaaaggttagcagattgtgattttctcaagagaaactttaagcagatgtctaatgttttgtgggtggctcctgaggacaaggcgagtttatggtcacaacttcattatgtttcgtgtaataatctggaaatgcagaagcttatcttgtcaatctcgtaaatgtgttacgagaattgtatttgcacagtccagaggaagctcgccaattgagaaggaaagctctctctcgtattgaatggctgcaaaaagctgatgtgcctaccatagcacagattgaagagtttcattcgat

SEQ ID NO: 41134 - DNA, 367 bp, Glycine max
tctgcatccatcggaaaagcgcaggccagcgagttcgggactcactctattgagtcctccggcaacgagttcgccgcgttctccggtggcacaaccggaaccttgtcgctcgccgttgcactgagctccgagaaggccgttgtcgcggcggagtccaatagctcgaagaagatcgtggataccttcggccagcggacttctatttacagaggtgttactaggcaccgatggacaggaagatatgaagcgcatctatgggacaatagttgcagaagggagggtcaagccagaaaagggcgtcaagtttatttgggtggatatgataaggaagaaaaggccgcgagagcttatgatttggcagctctaa

SEQ ID NO: 41135 - DNA, 357 bp, Glycine max
cgataaactccttaagcagatggaggctgcacaggcccaaaaaccattctattatagagaacaccttcatacaggcaaatcaatgaaagtacaagtcaccaagcgtccataggcacaacctgatcgagggtatacatggctaacggatattaatgacacctatcaagaaggatatagatgtgaagagatatgcatcaagaaagaagcgtttgagggagaagagaatgacttgagcaaaatctctaggaacaagaactgattttagcatttgaaagctgcgaaagaacattccagtactactacgttgctgagccaagaagcatgagcaatacactgacgcacgagtgcagaatcttg

SEQ ID NO: 41136 - DNA, 406 bp, Glycine max
aagagctttgacggcgcatgccccccgtccgtaggctcggaattcggttcgggctaaatggaaaggctttttacctggccataatatcaccattcctgatggtatggacaaaactagggcaactttgcaatttaaaaagttagcaaattgtggattttctcaagagaaactttaagcagatgtctaatgttttgggggtggctcctgaggacaaggcgagtttatggtcacaacttcattatgtttcgtgtaataatctggaaatgcaagaagcttatcttgtcaatctcgtaaatgtgttacgagaattgtattttgcacagtccagaggaagctcgccaattgagaaggaaagctctctctcgtattgaatggctgcaaaaagctgatgtgcctaccatagcac

SEQ ID NO: 41137 - DNA, 186 bp, Glycine max
agacaagctatagttgagaggaacacataaactcatactctatggaatggactgtagtatatcaatatattactgagtaagggcaatgatattctgtgttgcgattatgctagtttagagggaaagattactaagcatgcaatgagcaagatggcataaatgataaacagactttgtgggggtgat

SEQ ID NO: 41138 - DNA, 305 bp, Glycine max
cccttctgctgagggtggaggagaagatgagggagttgatgatgcagctgataaggttgatgacattgatgacacattcaaacttcatgagcaccccgcattcgataataagcaatttggaaccttcattaacaggcttatcaagagtctgactaccaatcttgatgctaacctacaagagatggttaagaagcacatcgagcgaacgactaagtaccctctctataaaattgaagatattcaactactggttggcgtgagcatgggtgatgatcctggctcgggctatgcctactacaacgaca

SEQ ID NO: 41139 - DNA, 286 bp, Glycine max
aacacaatgtcaaggtcaattcgtgcaggggttgtttggatcaactgttattttgccttcgaaaatgacattccttatggaggatgtaagatgagtggatttggaaaagattctggattggaagccctacacaagtacctacatgttaaatccgttgtaacacccatttacaattctccttggctttgaattcctgtgtcttgggtgtgtgaatggtgtaaactatactattcaagacacgagtttctatcaatatcctttggctaagcaaataaaaatggggaca

SEQ ID NO: 41140 - DNA, 375 bp, Glycine max
cacaaacatattttccctcccaaatatttgtgctcaaaaaacacacttctcatcaagacatagttgataaacatatgggcactctagtgggacatgtggctccaggttttggtttcttgttgataggtttgtggcacctctttaaccacatcaagctccacgcccttaacccaaagtcctacaagggcccatcatggttcccaagtgccaagttcagatacatagagcttgtgctcatcatggttggctccacagcctccgtagccatggaactcttcataggccctgagcggcaccaacctcttgacccagatggaaccattccctccaaccatctccacaacttcgagcactcttcaatctccatcaccttct

SEQ ID NO: 41141 - DNA, 364 bp, Glycine max
  unsure (1)..(364): unsure at all n locations
atcattgccaccgaacaccaaccttgcttccccttctttctcttcatcctcttcttctcccagggaagaatggaatgttccttctcatgggaaaaattctccggcgaccaccactttacctacttctnctncgncgncgncttctncttcaccgncgncgnagttttgggaaactccggttgataaaagtgttacttttaggaatgagagtgaggagactccaaagccaaagttaaaagctttgcattgggataaagttaaggccagctcggacagggtcatggtttgggatcgcctgagaccaagttcttttcagttgaacgaggacatgattgaaacacttttcatggtaaataatcataat

SEQ ID NO: 41142 - DNA, 415 bp, Glycine max
gaagagctatgacggcgcatgccccccttccgtaggctcggaattcggttcgagcgccccccgcgagcagcgtgatttcgagattggaagatttggcgaaggcggtgaagttcgacgtgaagaagagcgagactaaggtgaggttgcagggtcaagaaaaagggcgaaaaggtaaactcgctattgctgcggacttgtacgccgtgacgccgtcgtttttggtggtggaggttaagaaggacaacggtgacaccttggagtataaccagttctgtagcaaggagcttcgtccagctcttaaagatatcgtgtggaggacttctcctgcagagaatcctacactcgcttgaagaacaaccaagactcccatgctaattgtcgttcctttgtagttgtttttgttaattcttgtttc

SEQ ID NO: 41143 - DNA, 388 bp, Glycine max
ccttccttaagttcggaattcggttcgagcgatattctgtgttgcgattatgctagttttgatggtttgattaccaagcaagttatgagcaagatggcagaaatgataaacagtctttgtggtggtgatgaaaaattgatgcgtgaaaggacacacctgctgttggcttgttgttcaaggatggcaatttgtaagaaagatgtttggagagttgaatgtggaatcccttctggatttccgctcacagttatttgtaatagcatttttaatgagatgctcattagatatagctatgaaaaattactgcgccaggctaaagctccaagtatgtttttacaatccttcaaaaattttgtttctttgtgtgtgtatggggatgataacttaa

SEQ ID NO: 41144 - DNA, 359 bp, Glycine max
attttgttggagatctcgcctttgaaggttctaagatggctcatccctacatgaaatgtacaggctgtttcttcataacattaggaaatatggctgatgacaccatcaattctgaggcttttccccacaagctggtgcaagttggcgagattcatgaaaaagttgtattggaattttcacaagaggaatttcttacagatcggtcaactcatgtgcgtcctacaacaactctcgtggctgatgggcgtacatatttgtatgctaaggtgcatgatagttcagtgtctacaataccaggtgattatgtgattggtgttaagttgacaaccatacacactatgcgtgcatatgggctcaat

SEQ ID NO: 41145 - DNA, 357 bp, Glycine max
gtttggactatatggaaagaattcctcttgccacatctgagggttttcctcatgtgctttcacgcaaaaatggcgaaaaaggcaaaaggagatttgtctctggggatggtgaagagatgacattgattccaggaaccagtgttgaagaggcttacaacaagctaatagttgaacttgagaaaagtgttcctacattggttggcattgaatgtcccaaggatgagaaacttcctcgtcgcaaaatttttgacaaacctaagacgcgctgcttcactattctccctatggagtttaatcttgtggtccgtcaaaagtttttaaattttgtgaggttcattatgaagaaaagggacaagc

SEQ ID NO: 41146 - DNA, 310 bp, Glycine max
gaaatgcacgacgcttacattgccaatctcgacaatgagatacgagaattgtatttgcacagaccaaaggaagctcgccaattgaaaaggaaagctatctctcgtattgaatggctgcaaaaagctgatgtagcctaccatagcacagattgaagaggtccattctatgcagatgatgattaacgctcctgattcaaatgatactatagatctactgaagagcattgatctgaagggtttacaaggagcaggtaacagctttttcaaacaagcatagatgtgatgataagctagtgtaggctaacacaca

SEQ ID NO: 41147 - DNA, 335 bp, Glycine max
gcgccctatagtggaaaatggcaggaagcaccattaacagaggagaaagatgggctctcaatggaatgactgctcttggcaccgacggaactcgtgggatcgggcactgcatagtgagtgactcggttgcgtgtggcgctgaagtgcacacctggttcaagacccaaacagagctcatcaaaagcttaccacagtggcagaggctggagagtcaggcaactgtgccgctctgtgacatgtacttaccacccctgagagagaagctcatccacgacgctgcattcgccttcgatggcatgcttaacatgtacatgaacagtgttggtataaacatt

SEQ ID NO: 41148 - DNA, 357 bp, Glycine max
ggatattgtctctggcacgcgtgtaaagtcccactggtgctaacccaattgggggccccttctacaaagcgcattgcggttagtcatccacgatctcgtgttggggtattttactgtggaccaccagcgctaaccaaacagcttggtcagttagcttcggatttctctcacaacacaaacaccaaatatgatttccacaaagaaaatttctaataaggatggacactgtcgagggcaagatggtcttccactttatatcccaccatgtccttgttgataataattgtaggaataataattacggatttgtataattgcgaaagtgaatcacgagatgtgcgagtagtgactagtaag

SEQ ID NO: 41149 - DNA, 346 bp, Glycine max
gccaagaatgctgttgtcatgaatatgccaaatgctgatctttcaatgaggggatattttgttggaaatctcgtctatcaagttcataagatgacttctcgctacattaaatgtacacgctctttattcattgcatttcataatctggctgatgacaccattaatatcgaggcttattcccacaagctggggcaattggtagcgattcaggaaactgctgaattgacatgttgacaacaggaatttgttacagcttgatcaactcaagtgcgtactgcaacaactgtgctggctgatgggtgcccatattcgtatgctatggtgcactgatatgactaccgtctac

SEQ ID NO: 41150 - DNA, 358 bp, Glycine max
agaaggtggaggacaaacttgtgagtctacagagaaggtttctatggggtggagattgtgaacaaaagaaaatagcctggatcaaatgggagacaatatgccttccaaaagaagatgtcggcttgggagtcaaagatatcaactcgtttaatttatcattgttgggcacatggaagtgggacttattccagcagcaaggggaattgtgggctagggtacttgaatcaaagtatggtggctggagggcgctaaatgaagcaactagagacaataccggatctatatggtggagggacctaaagagggtggctcaacatctgcaacatgaggccataatgaagaacacaacattatagaa

SEQ ID NO: 41151 - DNA, 241 bp, Glycine max
ggcgagttgatggtcacaacttcattatgagaggagcaataacacggaaatgtactacgtttatttaggtactttgaaaacagagtttcgagagttgtataggcacaatgcaaaggaagctcgccaatcgctaaggaaagctttatctagcattgtatggacggtaaaccgctgatgtgggttccataacacaaattgttaagttatatcatgcgcaaatggtgctgaatgctcatgattt

SEQ ID NO: 41152 - DNA, 352 bp, Glycine max
cccttaacaacacatccatcactgggcgcacgtgagagactttcttgttgcgaacctccttattcttcttctgccccaacaaatgaaaacacacacacaacttccaaacccaccataacagaccctgcaatcactccttccaaatgagggcttattacgaagctatgtatctttttggtacgttacttgttcctaatatctgaccactaccctatctagcccgaactccgaagctcgatcctcatgaacgactgaatgagcctagcggtgctcttcatgacggacaagatgatccccgaagcgtcccgctacgtccagaagctgaacctgtttgggtatgacatcaacaaga

SEQ ID NO: 41153 - DNA, 365 bp, Glycine max
ctggtccaatcacgaaatcagataaactttctccacaattatgccataaaggcagtgcaagaagctgggaatacaaggacttttcaagtagagatggacaaacaaagctgaaaaccaatgtgttttttgcttcctttgaccaaatgagtgaacgagcctctggtgagagtgcgtgcacggttttagttgcactcatagcacactggctccacaccaaccatggcatgccaaacaagagcacaattcgaaagactcatcacacaaggttcatctgaatggagaaagctatgcaacggtgattactactcaaagctcttcccggataagcattttgatctagagacaatcatagaagccaatctgag

SEQ ID NO: 41154 - DNA, 415 bp, Glycine max
agacctacgacgatgcatgcacgcgtactttagcgtggtgcctttggctcgagaacagactctcatgctcatgtaattatggagagcagaagggttcatatatgaattggaattatttgataccttattaggcctatcctgaagccaaaggaaatgagatcggaattcctcggtgaattccaattccacattttcaagaaataaggaggcaaaaatgttcatatatgaattggaattatttgctttcttattaggcctatcctgaagccaaaggaaatgagatcggaattcctcggggaattccaattccacattttcaagaaataaggcggcaaaaatgttcatatatgaattggaattatttgctttcttattaggcctatcctgaagccaaaggaaatgagatcggaattcc

SEQ ID NO: 41155 - DNA, 431 bp, Glycine max
  unsure (1)..(431): unsure at all n locations
agggagagacaangcttgcantgcctgcagnngtcgactcttagaggatccctctcgngtggaattcccaattccatccattttcaagaaatanaggaggcaagaaatgttcatatatgaatntggaattattntgttttcttattnaggcctatccntgaagccaaaggannaatgagatcggaattcctcggggaattccaattccacattttcaagaaataaggaggcaaaaatgttcatatatgaattggaattatttgttttcttattaggcctatcctgaagccaaaggaaatgagatcggaattcctcggggaattccaattccacattttcaagaaataaggaggcaaaaatgttcatatatgaattggaattatttgttttcttattaggcctatcctgaagccaaaggaaatgagatcgga

SEQ ID NO: 41156 - DNA, 320 bp, Glycine max
gctagagcagctattgctgtctttgcttctctatggagggcccactatctatctagagcaagaccgcctcttcctgctgcaagccaaactccaactctccgaccaccaaaacgccctattcgactggaaccaccgcgacgccacccgatgcaactggaccgccgtcacgtgcgacgccgcaaccggaggcgaagccactatcgacttctccaacctccaactcttcggacctgaccgcgacaccaccctttgccgactcccctcgctcgcctgcctcaactttttctacaacaaccttaacgccaccctccccgccgacg

SEQ ID NO: 41157 - DNA, 342 bp, Glycine max
atcaccattactgatggcattgacaaaactagcacacctgtgtaattaataaagcgggtagattgctatcctctcatgagaaactctaagcagatgcctaatgttttatgattggctcctgaggacaacgccagtttatggtcacaacttcattatgatacgtgcaatactctgaaaatgcaagatgcttatcttgtcaatctcataaatgtgttacgagaattggatatgcacagtccagaagaagctcgccaattgagaatgaaagctctctctcgcattgaatggctgcaaacagctgatgtgcctaccatagcacagattgaagagctccattccctg

SEQ ID NO: 41158 - DNA, 298 bp, Glycine max
acctcgaattcgtctcgagcccaactcattaacctctacacacaatcactaacaggggggatttttataactcatgggctcctacatatttaccatatcactgaccaaaaaatcttcaacattcttaaacacatgctgaatcaaattcacctttatccaaaccaaaatgttcacatactctcagtcacaaacaaatataaccttactgcaaataaatattgttcctctcatacacacaattcatttccttatcaaaattcaattcctttcatataaactatctctaaatatcccacca

SEQ ID NO: 41159 - DNA, 354 bp, Glycine max
ggactcgacgtttcagtctccgccaacgcggctaaacgcgattgattcgcttgttcttcccacatatcctccaaaacaaccacaaaaatgaagcacctcgctgcctacctcctccttggcctcggtggcaacaccagcccctctgccgccgacgtcaaggccgtccttgagtccgtgggtgttgaggctgactctgagcgtctcgacaagctcatctctgagctcgagggcaaggacatccaggagctgatctccagcggctccgagaagcttgcttccgtcccctctgccggtgccggtggtgctgccgccgctggtggtgctgccgctggcggtgctgcccccgccgaggag

SEQ ID NO: 41160 - DNA, 372 bp, Glycine max
gtatgatccttgggatttgccagggaattgtgatctagcaagagaggcactttttcagcccgaaggaagcaaaatatcgaaatggtaatcgcatgaaccgaacaacaaagtgtggctattggaaggcaacaggatcagacaaaagaatatcatcttcaacgtgtaacaatggtattgtcggggtacgaaaaacattgatattttatgaaggcaaattaccaaaaggcttcagaactcactgggtcttgcacgaatatcgtctcgtcagtgtagaaactggtgctgccaactcatactataataactatgtgaacgagataggagattgggttctgcgtcgcttatcgatgaagaaaagaagtctagaaagtg

SEQ ID NO: 41161 - DNA, 428 bp, Glycine max
agagctatgacggcgcatgcacgcgtaccgaaggctcgaatttcgcttgaggttcaacccgttcgtaaaaaaaagtttgggggtttggggggtaaccttggtgtgcatacaaaatggaggagcaaaatggtaggggtaagttgagccaagggcttcgcaaagtgaagccttaccttgctatattgtcccttcaatttggctactcagggatgtatatcatcactatggtttccttcaagcatggaatgagtcattggatactctcagtgtatcgtcatgtagttgccgctattataatagtcccttttgcacttgtccttgaaagaaaaataagaccaaagatgactcttcccatcttcctgaggatagtggcacttggtttccttgagccagtgctagatcagaacttgtacaacatggggatgaat

SEQ ID NO: 41162 - DNA, 376 bp, Glycine max
cggctcgagtaaccataaccatgtcagacgaggaacaccacttcgagtcaaaggctgatgctggggcatcaaagacatttccccagcaagctggaaccatccgcaaaaatggttacattgtcatcaagaacaggccatgcaaggttcctttttctttttctctttttctttttaaataaatatgatatattgacatctctttgaattttggagtttgatcgagtttacactgaatttaattgaaagttttgtttttgttaagtggattataacaattgatgtgaataatcagaccccatttggtgattttttatgaaattgagtttcatgtgaaagttgtctctctctgtggtttttccacttgtggggggatttt

SEQ ID NO: 41163 - DNA, 425 bp, Glycine max
aagagctatgacggcgcatgcacgccgtccgaaagctcggaattcggttcgagatctaatctgaaattgtgctctcaattgaagcaatggaaggaacagctgctccagtgccttatgtccaagaaattgcaaaggaggcattgaccatagtgcctgagcgttatgttcgaccagttcatgaacgtcctatattatctaactctacacctttacctgaaattcctgtcattgacttgagcaaattgttgtctcaagaccacaaggagcatgaactcgacaggcttcactatgcatgcaaagaatggggtttctttcagctaattaatcacggagtggactcttcattggtggaaaaaagtgaagagaggtgctcaaggattattcgatcttccaatggaagagaagaaaaagtttgggcagagaga

SEQ ID NO: 41164 - DNA, 372 bp, Glycine max
atctaaactaaaattgcgctctcaatcgaaacaatggaaggcacaattaatccagagccttatgaccaagaaattgcataggaggcatcgaccattatgactgagcgctatgtacaaccagatcatgaacgttctatattatataactttacacctttacctcaaatggctgtcattgacttgagcaaacagttgactgaagaccacatggagcatgaactctacaggcttcactatgcatgcaaagaatgggtgatcttttcagctcattaatcacagagtggactctacattggtggaaaaagtgaagagaggagctcaaggattattctatcttccaatggaagagaagaaaaagtctgggcagagaga

SEQ ID NO: 41165 - DNA, 371 bp, Glycine max
gcggacaagaatgaatggttattttggaaagttaattgcgttttttgatggtctcattgaagaaaggttgcgtttaaaggcatcagacaatgaatccaaagcatgcaatgatgtgttagatactgtgctggaactcatgcttgaagagaattcacaagtgacccgccctcatgttttgcatttggttcttgatttatttggggctggaatagacacaacatcaagcacgatagaatgggcaatggctgagttgctacgcaaccctgaaaaactagaaatagttagaaaagagcttcaacaagtccttgccaaaggtgaacaactagaagaatcacatatctcgaaccttgcttacctacaagcagtggtga

SEQ ID NO: 41166 - DNA, 371 bp, Glycine max
gagccccatttcatggctgggaaactctcattagcgctggggctttcctctctaaccctatccccccaagttcttgcaaactatgagaatcccccagtgtacaagcctcccactgagaaaccaccagtttataagcccccagttgagaagcctcctgtttacaaacctccagttgaaaaccccccaatttataagcctccagtagagaagccaccagtgtacaagcccccagttgagaaacccccagtgtacaagcccccagttgaaaaaccaccagtgtacaagcccccaggtgagaaaccaccagtgtacaagcccccagttgaaaaacccccagtttacaagcccccagctgaaaaacccccagcgta

SEQ ID NO: 41167 - DNA, 346 bp, Glycine max
aagacatttttcatgcttgctgatcaaattatcagcgtggtttttttcattcattcaaaatcgcttcttcatcgctatatcaaaccggataattttctaatggtattaggaaggcttgcaaaccagttttatgctattgattttggtttggctaataaatacatatatagttcaacacatcaacacattccttacagtgaaaataataattttactgaaacttcaaggtatgccatcatgaacactcaccttgtcattgaacaaagcataatagatgatcttgattctcttgattatgttttgacgtacttcttgagaggaattctctcttggctgtttcttaaat

SEQ ID NO: 41168 - DNA, 311 bp, Glycine max
aaccaagggtaaagggccatgatgcataaactcattgcacttgtgaaggcatacactaacgtgtaatcaaaggtggacgattgtgttctacgtgaagggaaggcactagatgttgacccgcttactgcgatgcatgaaaccacataaaggacatctataaccttgcaaaccaagttaattgctgttagtgctaatataggaccacttaaggagtgcatgtatatcgatccaaaaagggcctaagctattcctacataaaaagactctatgacaagaacagcatctacaaaggctatatatcgcacaacaac

SEQ ID NO: 41169 - DNA, 355 bp, Glycine max
ctttgttccacacaataggccacatatcagcctgtgtttcattctccaaggttgctgtttcctttacacatgtcatcaaatctgcagaaccagttttctctgtcatgttttcttcagtccttggagataagtaccccattcaggtttggctttcaattctgcccattgtgcttggttgttctttagctgctgttactgaggtgtctttcaatgtacaaggattgtggtgtgcccttattagcaatgttggttttgtgttgaggaacatctactctaaaagaagtctacagaatttcaaggaagttgatggcttgaacttgtatggatggattaccatactttcattgctttatct

SEQ ID NO: 41170 - DNA, 354 bp, Glycine max
gctaattcccacagattgggttcttcctacggcggcgctgccccttaccgatcaagagatgggcttagcacccgtcccgttggtgcctcggaggagatccaattgcgaattgatcccctggacttggacgatgagatcaccggtcttcatcgccaagttagaaggttgaaacatgtatgtatctattcactttgtacttgttaattctttgtttttgttggtgggcatgtatgaaatttcaaaaaggtgttactttttttatgaagatgagaccttttagtatctgaaatatgtttatcacgggagtggagtggatgcatttgaagaaatgaggtttcgttgattagacaagac

SEQ ID NO: 41171 - DNA, 359 bp, Glycine max
ctcaatttgcttaattatagaggtgtgaattgttgtttgaaagtcacaagcaatggtgaaggacactgcgtattatgacatattaggtgtcaattatgatgcatctgctgcagagatcaagaaagcttattatgtcaaggctagaattgttcaccccgataaaaatcctgaggatcctaaggccgcagaaaactttcagagattccatgatggaccctacaactgtatttggaatgatttttggaagtgaattttttgaagaatatattggacaacttgcactggcttctttagcatctatagaaattgaggaagactcacaggatcctgaagttttgaggcagagaattcaagaaaag

SEQ ID NO: 41172 - DNA, 327 bp, Glycine max
aaaaaaaaaaacgggaaaaatgtaaaaagtgaacaacaaacatccataaagtcaccagacagaggagctcgttgccgccggcagccgtacaccgtcaccgaagatgacggcggcggcgctgcggaagtggttcgaggagaagaacccctccgcagtgtcggtggaggtcggagagcatgtccagctcgcttatacccaccagaacgagtcgccgcttcagcccatatcctttgctgtgaaggatgaggtattctgcttgtttgagggagcccttgacaatttgggcaacttgagacaacaatatggattggccaagtcaaccaatga

SEQ ID NO: 41173 - DNA, 382 bp, Glycine max
gaagcatgcgcacttacgtcgagcaaatggcaacagtgagaacaccatagacactcgtatctctatcactgaaagctttagttgcatttctattgaccttctcggtggaggaattttagtggacaaaactggagattggatcacacttatacaaaattctccaattagtaacttgttgagagttgctgcttggaagaaaggttgtttaatggtcaagattgtgatgtctgggaatgcagcagtcaaaaggagtgattgggcctcattggtacaagtgtttttaacaaacagcaacagtacagagcattttgatgcatgtaagtggacaaaatcagaaccacattcctgggaattaatcttcccaatagaggtatgtggtcct

SEQ ID NO: 41174 - DNA, 340 bp, Glycine max
acagaagttgtagaagctaaggctggaaagggttctgcaactttgtcaatggcctatgctggtgccctttttgctgatgcttgcctcaagggcctcaatggagtcccagatgttgtcgagtgctctttcgtgcaatccactgttactgaacttcccttctttgcttccaaggtgaggcttgggacggttggtgtggaggaagttctgggcttggggcacctctcagattttgagcaacaaggcctcgaaagccttaagcctgaactcaaatcatcaattgagaagggaatcaaatttgccaaccagtaattgaacatgttatcacatacatgtctggtag

SEQ ID NO: 41175 - DNA, 319 bp, Glycine max
aaatagctgcagggagaagggcgttttattttgatggcgagcagtttgctgtgaaattgactgatgaatggtgcccaatagtactagaacctgaaataccatgattaagcccatatgcacacatattgtttggaattaaatggcaacagagagaacaccattgaattttgattctagcaagcagagcttttgtcaattttctattgacctttttggtggatgaattttagtttacaaaactggagattggatctcacttatacataattcttcaattagtaacttgtatagagttgttgcttggatgaaaggctgttta

SEQ ID NO: 41176 - DNA, 402 bp, Glycine max
gaccctatatagagagctatgacgaagcatgcgcacttgcgtaagagtcggaatgctcatccgagaccggaagcaggaatggggatcgaactgactgagcgcagtgtgaacggagagaggaccaaaataacacaacccaagtgcaatgatatctatcttaagctcttggtcaagctttatcgcttccttgttcggagaactggcagcaaattcaatgccgttatactcaagagattgttcatgagcaaggttaacaagcccccattgtctttgtcaaggttgattaagtataccaaggggaaggaagataagattgctgtggtggtgggcaatataaccgatgatattcgtgtttatgaagttccagccttaaaggtcacagcacttaggtttacagagact

SEQ ID NO: 41177 - DNA, 361 bp, Glycine max
cagctttgcacacactctcctttgtgaacaacccgggttcttcacccttctgcacttccaccccaaccttatttgtagccatagtccttgcattaaggatatgatcagcatctacctgcggcagcaacactatctgacacttatttactagtgcctcggttaatgaaccagcaccacaatgcgtaatgaagcagcctactgaagggtgttccaaaatcaattgttgttgtatccatccactgtggacaattcctctcccttcaactctttctttgaacccttctggtagagcagcttcaattgtctcaaacccaattggaacttttagaacagccaaaaaaggaagccctgtaagttcaag

SEQ ID NO: 41178 - DNA, 261 bp, Glycine max
gagagttgctgcttggaagaaaggctgtttaatgggtaagattgtgatgtctggagatgcatcagtcaaaaggagtgattgtgcctcattggtacaagtctttttaacatacagcaacagtacatagcattttgatgcttcgcagtggacaaaatcggaaccacattcctgagaattgatcttcctaataaaggtatgtactcctaataatggctttgaaatgactggcctcttttcaggcaaaaaaaactttatgccatt

SEQ ID NO: 41179 - DNA, 325 bp, Glycine max
agagcttgacggacgatgcacgcgcgcgtacgcacgctcggcattcggctcgagcttatcatccgccttcgctatcctcaaggctcagcggaagaaatgggctgcaactaccttcaagaggtcactggtgcaggtgctaggaaaaatgcagggaaatttgctgttctacacctccgatttgataaggatatggcagcccattcggcctgcgattttggtgcgcgaaaagttgaaaaactggcccttgcaccgtatagacagcagactcggcacgggagggaagttaactctcacttgcatgatttatagttctcgaggggagggg

SEQ ID NO: 41180 - DNA, 339 bp, Glycine max
aaacagtctttgtggtggtgatgaaaaattgatgcgggagaggacgcacctgctgttggcttgttgttcaaggatggcaatttgtaagaaagatgtttggagagttgaatgtggaatcccttctggatttccgctcacagttatttgcaatagcatttttaatgagatgctcattagatatagctatgaaaaattactgcgccaggctaaagctccaagtatgtttttacaatccttcaaaaattttgtttctttgtgtgcgtgtggcgagggtaacttaattagtgctcatgaatatgttatgctttattttagtgagtactaaattttttagttttt

SEQ ID NO: 41181 - DNA, 258 bp, Glycine max
caattatgtaaagattcgaggcttggcatcacctcgtttacttgttggatgggtagctcacagtgcaagtcttggtatgaaagattccttgggacccttgaaagctttagctgctgctacagttataaatgtcgctggttgtgtacttttgtgcacctatttaggttatggaattgtacgggctgcgccgggctacaatggttccacaagttgctgcttcttacatgaacatgcaaaatctaaatatgtaactatata

SEQ ID NO: 41182 - DNA, 361 bp, Glycine max
ccacgattcctcactcttcttccatagcctgcggtctgcgactctaatcttctgggctgcagtgagatgaaccctagctccaattggctccattagatacctctttcctgcatcttatatatcccattctttctcattcacacagcatcatgggcgtcaaacgttttgctgaaggtggcatagcttacatcatcgcctgatgtcacacacacccacttgatctcatcaaggtccgcatgcagctacagggggaaaacaatcagcccaaaccgctgcataatctacgacccggactcgccttacaaaccggctcgaccctacacgtggcagctgcacatacgccgacccgtgagggccccat

SEQ ID NO: 41183 - DNA, 360 bp, Glycine max
gagcacgcttgaccacatattccttcccttgaaagttcccgtttgctcaacaacacttccaccgcaaccatgaaggccaccaccctcgctacttttgctctttccgccgtgagcgctctggcagcgcccaccaagaccttcgccaagcgtgccgccatcactgacggccccgacgtcggctatgccaccctgaacggtggcaccactggcggtgctggcggttccaccaccaccgtctccagcctggcccagttcaccgctgccgccgaggctgatggcgccgccgtcattgtcgtctccggcaacatctctggcgccgccaaggtccgcgtcggcagcgacaagaccatcatcggcaag

SEQ ID NO: 41184 - DNA, 359 bp, Glycine max
gagcgagcagtttcaaagagaggatttgggattgggaaggcgagggattgcgctgcgtctcttcctcttctctttcgattcatccctcattcataatcttccaatccaacaacctcagcctcacactcacacatacacacatctgaacgcgtatcgtccctcccatggcttcaaagcgcatcctcaaggagctcaaggacttgcagaaagacccaccaacttcttgcagcgctggtccagtagctgaggacatgttccattggcaagcaacgattatgggtcctgctgatagtccttatgctggaggtgtattcctagtcactattcactttcctccggattatcctttcaaacctccc

SEQ ID NO: 41185 - DNA, 363 bp, Glycine max
  unsure (1)..(363): unsure at all n locations
atagaagagcnatgacggggcgggggcgcgtaagtaaaggnnnnatttngtttgagaattcttttaagctctactaaaaaaagatacgtagggactttttnnaaaggtgggggggttatttaaaaaaacattgtttttgtaattgaaaaaaggagagggtttcggcgtggcaaaaagggtaaggagttgaaatattcttgtggcgacatggagatagagattgcgatcctcacccactttcggtgcccggtaaccttggacatgatgaaggaccccgtgaccgtttccacgggcataacctatgaccgcgacagcatcgagaagtggatcgagttcgggaaccgcacgttgccggtcaccaaa

SEQ ID NO: 41186 - DNA, 357 bp, Glycine max
gaatgaatcacatggacttatagttccccttatttaggtaacagcacaggatatttcaacaatgattcgctgtggacaaaagaccatcatctttctcatcaataatggaggttatacaattgaagttgagattcatgatggtccatacaatgtgataaagaattgggactacactcgctttgtggagctatccataatgggcaaggcaaatgctgactgccaaggttagtataaatttaataatgattaaatatggtttagtccttataaatatggttaaatttggttttagttctctaatttttttttcattgattttgttcttaaacaaaatttaaattttatatactatgataa

SEQ ID NO: 41187 - DNA, 340 bp, Glycine max
tgacactctggaggctttctttctgttgcctatacccatgcatgcagatttgctggctggattgatgtctggtctcgacaaatctctccaacagtacattttgaaagccaaatctggctgtggtagccatagtagcttcatcccaactttgcctgcattgactaggtgttcaacaagatcaaaaatggtgtttttaggaaaaatgaaaagcacaagtgactcagaggaggaaagcccatgttggaaccactaatggagacaattcagttgataaaacccagatgtgtgtttgcatcaatactatgcagcgcattcgcatggagttaggggttttggaaaa

SEQ ID NO: 41188 - DNA, 140 bp, Glycine max
ttaagattttatctaaaagcaattatggtgaccaagatgcagttgcatggactgatttagcagcaactttagactgatcggcagcgtacatagataaatggggtaccatacgactgcatctacaacaaattctggcgtgt

SEQ ID NO: 41189 - DNA, 228 bp, Glycine max
gtctttgaagtttctaagatgacttctccctacattaaatgtacagtctctttcttcatagcatttggaaatttggctgatgataccatcaattttgagggcttttcccacaagctggtgcaggttggaaaggattaaggaaaaagtggattggaaattttcccagaaggaatttttaccagcttgtcaaattaagggccgtctggaacaaccttggtggctggatgg

SEQ ID NO: 41190 - DNA, 222 bp, Glycine max
cttggaagaaaggctgcttaatgataaaaattgtggtgtctgtgaatgcagcagggaaaaggagtgattgtgcctcattgaaaccaggagttttaacaaacagcaacattgcacatcattattccaatgaatgtattacaaaattcttaccacattcaccatgataggggagttgaatgatgtatgtttgttctaataactggtttaaaatctgtttttttt

SEQ ID NO: 41191 - DNA, 354 bp, Glycine max
aaaaatgacccaggtggaccctctggaagaagccaattttgatcaggagctcaaggctgtagtacaggagagtatggaacagcgaaggcaggagctacgaggtcgtcctacattgaacatgatgattccaatgaatgtatttgagggatctgccaaggatcaccatgggaggggagttggtgggaaagtggtgatgaggccctggatgaggaactggaggaaacaaagaggttcaggtgagagttcttgtgaagcgtggaaacaagcagcaaacaaagcatatgttcatcccacggaattcctcactggtgcagagtacaaaacagaaagaagcagcagagcttcaagagaaag

SEQ ID NO: 41192 - DNA, 354 bp, Glycine max
ctcgagccgattcggctcgaggcttctaaagcctctccctgcaggtgttgaaatcgatgaactccctaagcaaattgatgatacacagtacccaaaaacattcttctataaagaagaccttcatccaggcaaaacaatgaaagtacaattcaccaagcgtccctatgcacaaccttatggtgttatacatggttaacggatattaaagacactctaaagaaggatatagttttgaagagatatgcatcaagaaagaagcgtttgagggagaagagaagttttgtgcaaaatccttgggaacagtaattggttttgccatttcaaagctgggaaagaacattcaagtactttcaa

SEQ ID NO: 41193 - DNA, 360 bp, Glycine max
ttgcaaaaagacagagggttaattgtagagtattttggaaggatgtcttacgttgctcataacgttaatcagccccaagagaaagatttgttggagggaaatttttcctttgatattaaatctcgctctagattggaaaaagtttcctctacaaaagctcaatttgttagtggaaaaaccttcaaatatatataattggtgctggttcacattcttcaaagattttcctgaaaaggaagatcaagaaaaacccaaaaagattgatgccagattgagacaaagaatagatcctcaatacaatgaggttcaggctcagatggaaacaaatttgtttaaattgtctcttgatgatgttgaaac

SEQ ID NO: 41194 - DNA, 318 bp, Glycine max
ctttgttgggagctataagctagtgtatcgggaggagaatatgaaatgcttagggagcttagtggctgcagtactttcacaaacacgggcatgccatcatgcatgctaccaaaggcttcctctcctgaagaaaactagctattgggagacggattcggaggtaaaatgctcaagttataggctcgcgtgggaagcacacaacatccgagcctttaaaaccattcctgaagagtgcgttgaaccaacaaaggactacattaatggcgaacaatttagatcagactctaaaacagttaaccaacaagctttcttttatgc

SEQ ID NO: 41195 - DNA, 375 bp, Glycine max
gtaattgacttacaggatagagacaattaccttctgaaggtaattgacttacaggatagagacaattaccttcagaagctgtcgttgtaaatgttacatgtggtagtggacgtggtggtttacccacctctgcttggatttgttatgcggattacaatcgataataaagcgtcaacaaatggattcgcactgcacttgggaaaggtttgaaaattgtgtttcttactagagttgatccttttccagtagctttattggctgttcttttgggggttaagaatgagattctgtgttctgacctcactaaccatatgatgtctcgactttttgagaactgtacgaacctaaaatatcttgacggtgagcgttcttttg

SEQ ID NO: 41196 - DNA, 326 bp, Glycine max
  unsure (1)..(326): unsure at all n locations
cgagctctattttttttntaanaagacttctccctacatggggtatacagaatctttctggggagcatatggaaatttggctgattacaccatcaattttgaggcttttccccacaagctgatgcattttggagagataaactccaaatatgtttttacaatttctcaaaaaaaattttttttagcttggtcaactcatgtgcttccctaatcgaatctattgactgatggatgcccacatttgaatgctatggagcatgataatttattgtctacaatactcattcgatttttttattggtgtgacaaaactagtgcaacttttc

SEQ ID NO: 41197 - DNA, 429 bp, Glycine max
taagagagccggacgtgcacgcaccgtacgcacgcttgcaactcgagggtttttgctgtggtcgttgaggatttattagcaaaaggaatgaaaaatgctcaaaatgcaattatctccggatgttcagctggaggattggcttctattctaaattgcgatcgattcaaatcactactacctgcaacaactaaagtgaaatgccttgcagatgctggtttttttatcaatgtaaaggatgtctctggagcacagcgcattgaagagttctacagtcaagttgttcaaacacatggctcagcaaagaatttgcctacatcctgcacttcaagactcagaccagggctgtgctttttccctcaaaatgtcgtgtcccaaatcagtaccccaatcttctttgtaaatgcagcctatgactcatggcagatcaaa

SEQ ID NO: 41198 - DNA, 375 bp, Glycine max
gttcacattcttcagaagatttttctgaaaaggaagatcaagaaaaacccaaaaagattgatgccagattgagacaaagaatagatcctcaatacaatgaggttcaggctcagatggaaacaaatttgtttaaattgtctcttgatgatgttgaaactcctaaaggttccatgttggatcttaaaatttctcaatctaaaattgcacttcccaaaaacacagttggaggaaccattctgcgtagtgacctattggcaaattttttgacagagggcaattttagagcaagtgttgatttgcagcgcactcatcgtatcaaaggaatgattaaaatggtggccacagttggtattcctgagaatacaggtatagcat

SEQ ID NO: 41199 - DNA, 362 bp, Glycine max
tgggcaagcagcatttctacggaagttccctgagaaagtggccaatactttctatgatagtataccggatcccttatattggccaacatttgttgttgctgttgctgctgccattatagctagccaggcaatgatttcgggagcattctctattatatctcaggccctaagtctaggttgtttcccaagagttagggtagtgcacacttccattaaacatcagggtcaggtgtatattcctgaggtcaactacatgttcatgattgcatgtattgtggtctgtgctgccttcaagaccacagaaaagattagccatgcatatgggattgcagttattggtgatatgatgatcacaacaacac

SEQ ID NO: 41200 - DNA, 375 bp, Glycine max
ctccaaggtttttccataactccaatccctcatcgcccaagtcgccatcgagtttttcacttctcaaatcaactctacgactatccaaaagtcgatgtggaatctgtatgcagagcgcgaggagtgggcaaggaacagcaattttcacagcggaatgctctcacacgtttcacttcccttgcatagtgaagaagcacccgatcgtcacgtgccccgtgtgcaacactagctggaaggagcttccggtgctctccatcaacaacaacaacaacgacaagagcgacaagagaggcttcaaggtctacaacgacgacgagcctctcatgtctccaacttcactctctcgcttcaatcctattcccgagtcagaaaacg

SEQ ID NO: 41201 - DNA, 368 bp, Glycine max
tatacaagagctatgactatgacatgcacgcgcacgcgtacctaagcttggaattcgggtggaggtgctgagagcgaacttaggcaatctgtaagatgtgtagcgagaattgtatttgcacagtccagaggaagctcgccaattgagaaggaaagctctctctcgtattgaatggctgcaaaaagctgatgtgcctaccatagcacagattgaagagttccattcgatgcagaggatgatgaatgctcctgattcaaatgataatattgatctactgttgagcattgatttgttgggtttacaaggagcaggtaaagcttttccaaacaagattgtttttgatgataagcttgtgttggctaacacac

SEQ ID NO: 41202 - DNA, 352 bp, Glycine max
aaagccacgagcacgcatgcacgcagtccgtaagctcggatattcggctcaaggtttgttgtgagctatcacctagtttttcgggaggagaatatcaagttgttggttttctttgtagctgcaatatttttggtagcatggccatgccatggcgcatgcttcctaacgtttcctctccgcatgataactggctatggtgagcgttcttcggagggtaaaagcgcaagttttaggctcgctgtgttatcacacaacatccgagccctttataccattcctgaagatgtgcgtgggtcctactatggactacatttatggcgtacaatttagatcagactctaaaacaattacc

SEQ ID NO: 41203 - DNA, 373 bp, Glycine max
cctggacctagtggaaaatttctcgctgccggtcccttcgtataccatctatgaaatcttgggcgttccatccgaggatctgaagttcttgacgaagcaagccgccgtccgcagcaacgggagcgcaactgccgctgaggcttcaaacgccaatcaagagctcctcaactacatggcttctctggtggacaagcgcatccagaagcctcaggatgaccttataagtcacctccttctcgtcgctggcaacgcaaccatggtcaacatgatcaacctgggcataatcgagctcctccaccatcccacccaactcgccgacctccgtgccaaccccaccggcctcgcccccgccttcgtcgaagagctttgccgc

SEQ ID NO: 41204 - DNA, 344 bp, Glycine max
caaacccatttccttgatatcttagttatctaattacgtcaattaatcccttaattgcgagcatcatggctgaggagaaacaccaccaccactttcaccaccacaagggcgatgatgtgcctggcgaggatgattataagaaggtggagacgcaccacatgcatgttgcgcaccttggggaacttggtgctgcagctgccagtgcttatgccttgcatgagaagcatgaggccaagaaagacccagagcatgctcacaggcacatggtagaagaggagattgcggcagcagctactggtggcgctggtggttttgtcttgcatgaacaccatgagaaaaaggaa

SEQ ID NO: 41205 - DNA, 163 bp, Glycine max
cgaggatggcaatctgaaagaaagatgtttggagaggggaatgtggaatcccttctggacctccgctcacagctattctctatagcatcttgaatgtgctgctcgttacatgtagcttttgaacattactgcgcctagctatggcttcacgcatgtctctaca

SEQ ID NO: 41206 - DNA, 371 bp, Glycine max
aaggctacaattggtgactatttaggtcaacatgaagagtttccccttgctgtgatggatgcttatgtagattccatgaaattttctggatttaaatttgatactgcaatcagggagtttcttaaagggttccgacttcctggggaagctcaaaagatagatcgaatcatggaaaagtttgcagagagatactgtgcagacaatcctggcctttttaaaaatgcagatacagcttatgttctagcttatgctgttattatgttaaatactgatgctcataacccaatggtgtggcccaagatgtccaagtcagattttgttcgcatgaatgccagggatgatccggatgaatgtgctcctaaagaactact

SEQ ID NO: 41207 - DNA, 377 bp, Glycine max
aaaacctctcaatctataaacacactttccaagaacacagctataagaaccaaactgggtatggttctattaacaaaaaccttgacacaaagcttcaatatagaacgtgtggataccgaggacactgagaatattcatggaatgattgatacaatacccacagaagaaattgcgtgtagatcatgcatagaatgtgaactgctgctatgaataagatattttaggggaaggcgaccaggtctgatatttacacgcatctgctctcaagactgtgaattatggaatcctgcttgcacaaaagcaatgactatgtcatttaatccaaacccgtgttctgatgcatggagtttggaatttctgaagcgtaccggatttca

SEQ ID NO: 41208 - DNA, 447 bp, Glycine max
  unsure (1)..(447): unsure at all n locations
cttgcatgncctgcaggtgcgacttctagagtgatccccctccggggaaatttccaattcccacatttttcaagaaaatanaggaggccaaaaagggggcatatattgaatgtggaatggatttgttttncttattaggcgctatncctgaagccaaaggnaaatgatgatcggatattcctcggggatattccaaattccacatntttnctaagaaataaggaggcanaaaatgttcatatantgaattggaattatttgttttcttattaggcctatcctgaagccaaaggaaatgagatcggaattcctcggggaattccaattccacattttcaagaaataaggaggcaaaaatgttcatatatgaattggaattatttgttttcttattaggcctatcctgaagccaaaggaaatgagatcggaattcctcggtggtaccga

SEQ ID NO: 41209 - DNA, 367 bp, Glycine max
cgtgtttcaaatcagaatactcgtggggtgaagaatattcatactgctgctgctgaacgcagtcacttagttaaaaattccacattgatgaattattctgttaggccttgttctcaaaacaagacattggggagggatgctcataatctgctggagtattttaagaagatgcaggctgagaatcctggtttcttctatgcgatacaacttgatgaagagaatcgtatgtctaatgtcttttgggcagatgcaagatcaaggacagcatacagttattacggagacacagttcatctggacacaacatacaaggtaaatcaatatagagtgccatttgctccttttactggggtaaatcatcatggtc

SEQ ID NO: 41210 - DNA, 374 bp, Glycine max
caccacccgtcagcaattcgagcaggatgtcgaccttcgagcccgtgatcgttatcgacggcaagggtcacctgcttggccgcctggccagcaccgtggccaagcagctgctcaacggccagaagatcgtggtcgttcgctgcgaggccctcaacatctccggagagttcttccgcgcgaagttgaagtactcggctttcctgcgcaagcagacccgttacaaccccacccgtggtggccccttccacttccgcgctccctccaagatgttctggcgcaccgtccgcggcatgattccccacaagaccgcccgtggcgccgccgccatggagcgtcttaagaccttcgagggtgtcccccagccctacgaccac

SEQ ID NO: 41211 - DNA, 334 bp, Glycine max
cacttagagcttgacacgcatgcagcgcgcctcgtctcgtcgtattcgtctggaggtgcaggctctatgttatagcttttggaaatttggacgatgacaccatcaatcaggtggctcttctccacaagctgctgcagcatggagagattcatgaaaaagttgcgttgaaattttcacaagaggaatttcttacagcttggtcaactcaggtgcgtcccgcaacgactctgttggctgatgggtgcccatatttgtatgctatggtgcatgatagttcagtgtctacaataccaggtgattttgtcattggtgttaagttgacaaccataaacaa

SEQ ID NO: 41212 - DNA, 401 bp, Glycine max
  unsure (1)..(401): unsure at all n locations
cgtcatgcgcacgcgcacgtgagctcggtattctgctcgagcgaggagtctcctcaagctatgacaaagtcatcggttggagcattctatttaatgatcccaagacttgctttctttctgacattcacatattatggctgctacaggacgcatacctaatactcactacttacaactggatgacaacctggcgacaccagctgaaactgggaatctggtccagtctacagacattggaaaggtgcgtttgtacggaaccgacccggccataataaaagctctggcgaacacggggatcggaatcgtgatcggagcggcgaacggngacattccggggctagcctttgaccctaacttagcgaaaacgtgggtgaacaccaacgtcgtaccgtactaccctg

SEQ ID NO: 41213 - DNA, 360 bp, Glycine max
caggccaaaaagattgatgaggagatccttcaggaagtggtgaaaatgggatttgacaggaatcaattggttgaatctcttgggaacaggatacaaaatgaggtttgtgcctttgattttgtctttctatatctgccagataatcccttactaccatccatatatttcagggtactgtggcatactatttgttattggacaaccgatttcgtgtttccagtggctatcttggagctgagtttcaagagaccatggattccggttttaatcaaatgcattccagtgaacttgcttcttcagttgttggaaaccgctttccaggctacatggaatatccaggagtaggatcgaggcaacagt

SEQ ID NO: 41214 - DNA, 350 bp, Glycine max
aaagcattgaattcaaaaactaagttcatttcttgtgctttgctttattcctcaaaaccaaacatgtcgaacacatgcagcaactgtgactgcgctgacaagactaactgcaccaagggaaacagctatggtgttatagtagagactgagaagagctacatttagactgatgacatggatgatccagcatctgagcatgtttggaagtgcatgtgtggtactaactgctcttgctactgactgcacattgctgacattattgaatagcaaactgaatggaatgaaatgggaacagcgagaacaccattgaattttgattatagcaagctgagtttatgtgaactgtctat

SEQ ID NO: 41215 - DNA, 354 bp, Glycine max
ttccttttcttgtcctgagtttcttgctttctcattttcgttcacaaacgtcttcattcatgccattttgcaaccacgatgacgcctccgtcttgcttagcttcaagagctcatttactctcgatagctcttctctctctaatccttggtgtgagtcttgtcatccaaagacagaatcatgggaaaatggtacgaattgctgcctgtgggaaggggtgagttgtgacaccaagtcaggtcacgtaattggcatagaccttagctgcagttgccttcaaggtgaatttcatcccaacaccactctcttcaaactcattcatcttcaaaaactcaaccttgccttcaattattttt

SEQ ID NO: 41216 - DNA, 358 bp, Glycine max
ctcgagccgaatcggctcgagcggctcgagcggctcgaggtatgtgaattctgcttgcagctgatggcgcaaattctgctccatgggactcttcatgccactatctatgaagtcgataagctcaaaattggtggaggcaactttttaaccaagatcgtacaaaacatcgaggagactgttggtattggaaaaggtgtcactaaactatatgcaaccattgatctagagaaggcacgagtggggaggaccagaattattgaaaaagagattaaaaatccaagatggtacgagtcctttcatatttattgtgcccatatggcatcaaacatcatatttacagtgaaagatgataatccta

SEQ ID NO: 41217 - DNA, 355 bp, Glycine max
aaatatttatatgtacgtatatacatacatacacacagagacatggagaacaataatcatcatgccatggctgcaggtgctagtagtgattcaaacactagtgatcacaccaccccaatatcttcttcttgtgttaatgataacaacaacaataagttatacaaaggggtgagaaagcgaaagtgggggaaatgggtttctgaaatcaggcttcccaatagccgtgaacgaatatggctagggtcttatgactctcctgaaaaggcagcacgagccttcgatgctgccctttactgtctacgtggccgccatgccaagttcaatttccccaacacaccttgcaacatggacactg

SEQ ID NO: 41218 - DNA, 346 bp, Glycine max
agagaataacgttggtgaaagaacgacgatgacggacgcagcgtccgattcacgaaacgatgcagccgtgcaagccaccaacgacgacgcttccgccagtaaattggatacatgaaagatgattatattcatttatttgtgagaaggcctgtgaggagatctccaatcattaatcgtggttactttgctcgttgggctgcatttcggaaacttctctatcagtttcttgatgttgagaaaaagacagatggagatgccccaattaagaagcagatattatcacttggagcaggctttgacacaacatattttcagttgcaggatgaggggaaaacaccatatatgt

SEQ ID NO: 41219 - DNA, 357 bp, Glycine max
gcgactccggcaggtgtcgcaggagctcaagcgcatgacctcgtccaagaagttcgatagggtcgacagggccaagtctggtgctgctcgtgccctcaaagggctcaagttcatgaccaaaaatgttggaaccgaaggttggtcccaggtggacaaacgctttgatgagttggccgttgatggcaaattgcccaaaacgcgcttcagtcagtgcattggcatgaacgagtcgaaggagtttgctggcgaattatttgatgcattatctcgtcgccggggcataacatcggcttccataagcaaggatcagttgcgcgaattttgggaacaaattacagaccagagctttgattcaag

SEQ ID NO: 41220 - DNA, 260 bp, Glycine max
  unsure (1)..(260): unsure at all n locations
gacaatttaaacaaatttgtctcttgatgatgttgaaactcctaaaggttctatgttggatcttaaaatttctcaatctaaaatggttcctccaactgngttcttggcaagtgccatcgtcgattgagaccaattaggatccgacctatctattttgggagtctaagcgtacaacttggccgcatgtttaggcacctgtccacgagcctgacatctgtcttccgtacgcgtcccttcgccagtattacaatcttattttt

SEQ ID NO: 41221 - DNA, 332 bp, Glycine max
aaccagaaccacattcccgggaattaatcttgccaatagaggcatgtcttgctcctaatggcatctaaatgtggagttctaaccgggcaaatcaaactacatggcatcagagaagccctattgacaacacccaacagcctacaccgttccgataccctctcgacaatctctcacgatcgcgaaactgctggatatactcttatgccacctttttctgatccacatgctactgccagatcttatgcaaatgctgaatcctctgactgatctcgagcccaggctatctttcgatcgttcgctcgatttattccataaaggacaattcgcatgac

SEQ ID NO: 41222 - DNA, 275 bp, Glycine max
gggcacgcgtacgtaagctcggaattcgggattagcctttgattctttccctcaacgctgtcgccgatctcgcccaccatgaatgcaacaccactcaactcggtcttccccctaccttgctcagaatgaaacgaacccagaatcaacaattccgtgaccttcagcacatacattctcagatcgaatggggacagagcggagcagctacactcgtcagagaccaagcaagctggggcgcatgttgcgcgttctcaggtactggtgctattgtaggc

SEQ ID NO: 41223 - DNA, 408 bp, Glycine max
cagacctttgtcaaacactggcattcaagctgggtcaaatactccggctgctccgcatcatcgtcggaggcccaagtcaacaaaaaggccttcaagaaggaggccgtcaagctggagaagcttcgccgacgccaggaaatcgccgccgtgttcgacgccacggccaacctctccgtcgacgaggaggaccccctcggcgggaactactgctacgtgccgctggtggagctgcagtccaagacgccgtctgacgttggcgagtggacgcgcgtggaggcgctcggcggcgcgctggagaacaattcggtgttgatccgagggagggcgcaggcgattctccccgtcgggaagaagatggcgtttctggtcatcagagagaacggtttcacccgtcaatgcttggtcaag

SEQ ID NO: 41224 - DNA, 203 bp, Glycine max
tcaggaaaatgttgttttgaaattttcacaggaggaatggctcacagcttggtcaactcaggtgcgtcctgcaacagctttggtgtgtgcggggtgcacatatgtgtgcgcaggggcgcgagagagtacagtgtacacaacccggggagattgtgacatgggtgtcaagtagacacccatacacaatatgtgcgcatatgggc

SEQ ID NO: 41225 - DNA, 409 bp, Glycine max
ggctccctacaactcctggccctttgctccacacacaaccctctctctccaatgctctcattgctgctctcaagagagcacaggctcaccagagaagggggtgcattgagcaacaacagcaacaacagcaaccacctcttctcaccatcaaggttgagcttgaacagctcatcatttctatccttgatgaccctagtgttagtagggttatgagagaagctggtttttcaagcactgttgttaagagtaatattgaagacacttcttcttcagcaccttctgttttctacaacagttctggtggtggtgttttctcttctcctggctcaccttctcccagtgagaagaataatgttttcaggcagaaccatttcttagctgcttacacttctaatgagtttagtagtac

SEQ ID NO: 41226 - DNA, 448 bp, Glycine max
  unsure (1)..(448): unsure at all n locations
gcttgacgcgatgcacgcgtcgtagctcggaattcggctcggggaccacgcatgaatattgatgatgggcgtgttgtagcacttattgctcngcacttggggggaaccattgacagtccaatgtccaggaacacaaactcgaagtttctggctatgtctctgcctggtgatggccttatccgctcatgggaggatcaaacaccggaccaatcaaccttggaaacccaggtgaattacaatgactgaacttgctgagaccgtgaaagagcttattaatccaggtgtggagatcaagatggtggagaacactcctgatgatccgcgacaaagaaaaccagacatcacaaaagcaaaggaattgttgggctgggagccaaaggtcaaagtgcgtgatggtcttcctcgtatggaagaggattttcgtctgaggcttgaagttggcaaaaag

SEQ ID NO: 41227 - DNA, 393 bp, Glycine max
agaaggagtttcaaaatggattacctctgacgaaatccatagcatgacatactctgaagggaacggaactggaactagctaaccagttcccaaccattgaaggatgcacgcactgatcccactacagacctgagaaatgcatcgcccactatttgtgcctggaaccagacttgcttcacgagcaacgcagaggtcgtggacaccaacggccaaccctatatacacaacaccatgctgatgacttgaatcatctacacagtggccgcgattgacggtaccttcaaggtctcatcacatcgaacctgctaattgcaggagcatgacggaataaactatactgctggcacctatgcagctcccgggggagagcgtgtgccattcctctttaccatt

SEQ ID NO: 41228 - DNA, 321 bp, Glycine max
gaatgctcctgattcaaatgataatattgatctactgttgagcattgatttgttgggtttacaaggagcaggtaaagcttttccaaacaagattgtttttgatgataagcttgtgttggctaacacacaagaattctttgatggaaattttccagtggattcttggttaccaatttttgtgaattgtctttaccctgtaagtcaattaccttcagaagctgtcgtcgtaaatgttacatgtggtagtggacggtgtggtttacccaccactgattagtttagttctgcatttaacaatggctgctcatatatcaacaaaaa

SEQ ID NO: 41229 - DNA, 379 bp, Glycine max
cgagcaccagttttcccatcattgcaattgccataataggaataatggccacagcattcttgcttgtgagctactacatctttgtgatcaagtgctgcctcaattggcatcgaattgatgttctgagacgtttctctccatctagaaggcgtgaagatccaccaccaacatactcaccagccacagatactcgtggactagatgaggcactgatccggttaatcccagtgactcaatacaaagcacaacaaggggatgatagagactttggagagagaagattctgcgaatgcgctgtttgcttgaatgagtttcaagaagatgagaagctgagggttataccaaattgcagccatgtgtttcacattgattgcataga

SEQ ID NO: 41230 - DNA, 378 bp, Glycine max
atcaaagaggatccatctctgatgcgtgccattctttcttcaagctggtctttatttgatggattagaaaaactttcaagcatggcagacatagacggatcctgcatcaatgcattacccaggcgctcagccatggtcataaaattaggattctgcataacctgttgcatggttgaaaaatattgttgattatcgaagctagggatagcatcttgtggagctccttgaaaaaagaatggcacgcatcaaagaggatccatctctgaaacatattttggaggagatagagactggcggtcctgctgctatgatgaggtactggaataatgaggaggttttgcagaagttgggacaagccatgggtcttgccaattcggg

SEQ ID NO: 41231 - DNA, 371 bp, Glycine max
ctcggggcttacctcattcagaaccaatttcagtctgctggtaactctagtgctcttttcctaactgctgcagctcaaaatctgctgtgtctcaaattagcagaggagcttggggtgatagttccaaacccatgggttacttggtttaaagcagctagtttacctgccattgtttgtcttcttcttacgccattgattttgtacaagctctatccccctgtaatcaaagacacaccagaggctcctgccctggctgccaagaaactggaaagtatgggccctgtcactaaaaatgaatggattatggtcggcacaatgcttcttgcagtgtctttgtggatctttggagacactattggcatagcaagtgc

SEQ ID NO: 41232 - DNA, 395 bp, Glycine max
atgccgcgtacgagctggaattggtcggggagacagtgctgctgagaagacgtgcgtgccgcgcaccgacaaccccgatgactcccacgactccaacgacaccgggatccgcgcgtaaagctgacaacgtttggaggagcgtcttcatcctgggagcaactccgccacaaagaccatcggtgctcagatgtttgcaaaccacttcccaacactcccactgctacgactggctgacagtggggagaccagaagcaggcaccgctgaaaggataagctaagaaaaccgtgggttgcatgtaaatattgtcgtttttcgttaagcacctgccacgtttgaatctactactaccattatgcgtcggaaattaattgctctgttgctgactcaaatatat

SEQ ID NO: 41233 - DNA, 373 bp, Glycine max
aggtgacttaccgacaccggacccatctccggcgacatctcaccgatctccggcgaatccccggtccccactttcttccctcgaaatgaatcccgagtatgattatctgttcaagctccttcttattggagactctggtgttggtaaatcatgccttcttctgagatttgctgatgattcgcacatcgagagctacataagcaccattggagttgattttaaaatacgtactgttgagcaggatggaaagaccattaaactacagatcgtctgtatttgataggcctttgtgtctctgtatctattgtgggacacagccgggcaagaacgatttaggacaatcaccagtagctactatcgtggggcccatggg

SEQ ID NO: 41234 - DNA, 286 bp, Glycine max
  unsure (1)..(286): unsure at all n locations
aagagctatgacggngcatgccccccgtccgtaggctcggaattcggctcggggaaaaattgatgcgtgaaaggacacacctgctgttggcttgttgttcaagaatggcaatttgtaagaaagatgtttggagaggtgaatgtggaatcccttctggattttcgctcacaggtatttgtaatagcatttttaatgagatgctcattagatatagctattaaaaattactgcgcccggcttaagctcccagaatgtttttaccaacctttaaaaaatttggttcttt

SEQ ID NO: 41235 - DNA, 379 bp, Glycine max
tgaagagctggttgaatagatggcatcatggatctaggtggaggcattggaagggcaccactattatgagcataatattgtacaggaacacaaggaatattcattcccacaccacatatgatctcagttcacttctgttctagttccacgaccttatgttcttctttgtgctccaccatcatttatgtctatgatgcatacaccatttcaggcttatggctttgctatagttcgagctacaaatgatgttgaacctccagttcacgaaaaacatataagagctatattttcagctatctcagctacaagacccagggctgatgttgcctattgtatacacgcacttgccaggcggttatcaaagacacataactgggcg

SEQ ID NO: 41236 - DNA, 378 bp, Glycine max
cggctcgagctcgagccgaatcggctcgagcaataactgtgaaaatatggaatctcttttggtttcaggggcagagtcatttaagagtctatgctctttgataatttcccaatgccccaactttgtatcattctgtagagaaggattgcctgcgcccaacttgattactttcatggttattggctctgacaagttgaagtcgttgcctgatgagatgagtactcttctcccaaagttagaattgctccacatatcctactgcccagaaattgagtcgtttccagaagggggtatgccacctaacctgagaacagttgtgattgagaattgtgagaaactactgagcggcctagcatggccatctatgggcatgcttac

SEQ ID NO: 41237 - DNA, 308 bp, Glycine max
ctcgagccgaatcggctcgagctcgagcggctctagcggctcgagctcgagccaaatcggatgcagagctattgatgcttaaggaattcccaacacttatcagtcaagcaacacatttgctggctactacctagccaacatgctacaagctggaaacacaaatgcccccagaaacaaagataatattctaggagattgtacaaccaaatctgtttataacacaggaaacgatatctgaacttattcaattaaatctgcggatgatacaagaaccttgaacgaaattgtttacatttgaccaccaaata

SEQ ID NO: 41238 - DNA, 420 bp, Glycine max
gattgcattgtggtggaatgttttagtgcacaaaggtaaaaaagaaaaggggggtgaagattcgattggcaaggctcgggtgccggaaccacccattctatcgtgtggttgttacggatagcaaaacaacaagagatggcaagcaacttgaagttttaggtttctacaatcccgtcgcaggcaaggatgatgacaaaagaatgagcctcaaactggagagaatcaagtaagtatgtaatttccatatatttgtttaactcaaagattggaattatattacccatgtgaaatgtttctttatgaatttaataataggacactagaactttgattcccccttgtgttgtttaggtattggctttccgttggagctaagccttcagagcctgttgagcatcttctatttagagcaggtttagg

SEQ ID NO: 41239 - DNA, 256 bp, Glycine max
ggcgggaggggggaaagtttatcaaaccctacccaacggacctgacttggtagggcattgcacccacacacttgtaacaacttgtggtaattttggtcctggggcaaaagtttaaagtaacggcaattgtactgctaaaggaggatcccctaaggctcgcgttgttgcctacaaaacatgcttgaataaacttgattaaagggggtgctattatgcagatattctagaaacatttgatcatgccatttattaaggg

SEQ ID NO: 41240 - DNA, 413 bp, Glycine max
aaaaggtagtggtaggtgtgatgacaaaagcactgctcctccttgcattggttgggtggaaatgatggcaccagtgttttctaaaaagtcttggcagtgtgtatggcatttgatccagaatgacttaatccatgcctggggcctggataggcagcttggctattgtgcacagggagatcgaatgcaaaatgttggtgtggttgattctgagtacatagttcatctgggtctgcctactcttgggggctcaaatggcaatgaggcaccatcaggctcctcaggagataatagagctaaagtaagcaacataggaattaggataatgtagatttatgcacctttagctccaattctcacccttgacaaaggaatatactacatgcaggttaggatgcagtcatacattgaaatgc

SEQ ID NO: 41241 - DNA, 236 bp, Glycine max
ctggtgcaaagaatgctattctcatgaatatgccaaatgcttttctttcaatgtggagatattttggtggagatcctcgctttggaggttctaaaatgacttctccctaccttaaaatgtccggctttttcttcatagcatttgggaatttggcttgttaccccctcaaatttgggggtttttcccacaagcttgtgccaattggggaggatcaaggaaaaagtgtatttgaaatt

SEQ ID NO: 41242 - DNA, 412 bp, Glycine max
ctcgagccgcccgtatcatacaataattagtttctccaaaacaaattatttttaatccatttcatgtgttgtcaaaaaaaaaaagttccatttcatgcatgtttgaaaacataaaaatttgaaatcagcaattaaactgatcaaataaaactccttgtaggaattgatgcttgcaacaattgacaatccatcaaatgcttttgaatgggcacttgctgaaatgataaaccaaccggagttactccaccgagccgttgaagaattggatagtgtggtaggaaaagagagactggtccaagaatcagatatacctaaactcaactatgtgaaggcttgtgcaagagaagctcttcgccttcatcccattgcaccttttattcctccccatgtctctatgagtgacacactggtg

SEQ ID NO: 41243 - DNA, 366 bp, Glycine max
tggacatactgggaagtggtaaaatactggctaacaggtgagttgaacaagaaacagcagtggctgttgggctgtttggtgttgagtgcagtgaatgagttgaagaagaagataaagaaaacaatgaaaagaggcatcatgagttcgaatctgtttctgtttccaattctcttttcatttgcctttctgtcctcgcccgtcctctctgcttcggatctgatcctcgccaaagttgaccgtcgcattgatctgacttcacagattgtgcgcatcactacttcactaaaagtacagaatacgggatctgatgttgtatctgagattttgctgtcctttcctgagaaccagacaagtaacttggcatac

SEQ ID NO: 41244 - DNA, 418 bp, Glycine max
ctcaacacgactgatgttaaggacgaaactagtgcagagttgctgtttagaaagaaagcagattgagattcaataaagagaaactttgaacagcagtataaagaaggggggatggctcctgatgacaacaagagtttataacaaccactaacttatcataccagttagaatcatgtaagtcaacaagcttataacgacaatcctgggaatggatcacgcgaatagagttttgacagcccaaaaaaggctttgcaatgtggagggaaaggtctctatatcatacaatatcgcaatagagcttacttacctacacataccaaacagtgaacagtttcagatgatgcataggaagatgaatacgactgagtaaaatgataatatacttctacggcagagcattgagttgcacaggctacaa

SEQ ID NO: 41245 - DNA, 407 bp, Glycine max
  unsure (1)..(407): unsure at all n locations
aacgnnccaggcacgcgtacgtaagctcggaattctgctcgagggcttgttcatcagccaccctgctcaagtcggggcgggttctttacaagtctgggtgggtcaacggacaaacccttctccaaccttctgcatcagttgtgagatgcaaccccaccaccccatcaagcctcaccatcatagctggttcctatgctgatgagctcgttaagaccgcgaaaacagtggcttcaccagggaggggtattttggccatggatgagttcaatgctacctgtgggaagcgtttggcttcaattgggctagagaacactgaacctaaccgccaggcataccgaacccttcttgtgacagttccaggccttggtcagtccatttctggtgccattctctttgaggaaacactc

SEQ ID NO: 41246 - DNA, 369 bp, Glycine max
tattaacatcagtcatatataacagggaaattaaatcgtcttttaatggctctttcaccactcggcatgcttctggtcattgccaccatcttactcccattcaatattgttgtggccaaggaatttgttgttggcgatgatcatggatggacaataggctttgattacgcagcttgggctgcagataagaccttccaggttggggacctacttgtgttcaagtatgctgttggaaaacacaacgtgttcaaagtgaatggaacagcatttcagagctgcacgattcctccagcaagtgaggcattgaccactggaagtgatcgtattgtgttggcaattcctggcagaaaatggtacatatgtggtgtt

SEQ ID NO: 41247 - DNA, 373 bp, Glycine max
  unsure (1)..(373): unsure at all n locations
gagttacaaggcttttggaccctgccccaatgattggagcgtggcacagaaactcattttaaaagggtgtgagcctttaccaagaagaaggtgctttgctaaaacaatttctaaggtgggtcttcttcacccttttcccacctcgctttggaaagctccagtcaacaacactgttaactggagtggtttaggttgcaagaattttgagtgtttgaagggtaagaagttgagtagagattgcattggttgctttgatttggttaatgggtatgagaatcaaaggtttgtgaagtctaggagtaagaatgattntctaattgatgatgttttggcatcgggaagtggtggaattcggattggacttgatgttgga

SEQ ID NO: 41248 - DNA, 373 bp, Glycine max
ccgttatatgaggaaaacaagggagcttggatgctgggttttttgcttggccatggcggccaaaacaatttttttttatcggtttaagatggccaaggtggtttccacaattccaacaattgggtttaatgtcgaaacagcggtgtaacaacatttaaatttaagtgtggggtttttgggggcgaacacatgtctcgccctatttgaggtgttacttttcaaatactcaagcaataatctatgttgttgattcaagtgacgttgataggcttgtgatagctaacgaggagttccatgcaattttggaggaggaagaactaaaaggtgcagttgttctcattttcgcaaacaagcaggacctttctggtgcact

SEQ ID NO: 41249 - DNA, 436 bp, Glycine max
gaagtagctatgaccgtcgcatgcaccgcgtacgtaagcttcggaattcggcttcgagctctgagtatagacgtcgtcggtagctgaagcatggtataagctctccactttcctgaactagttttaacatacaatctttcaagtacacctccccagcttccatttaagaatggagatcactagaataggccaatggttaagtcttctgatatgtgtactactattactgcagacagaaggggttcctgtgggaatcacttttgttgaaaatgcagtggcaaaaggggctgtttgtttggatgggagtcctccagcttaccacttccacaagggatctggagcagggattaacaactggatagttcactttgagggaggaggatggtgcaacaacgttactacttgcctttcccgtagggacactcgattaggttca

SEQ ID NO: 41250 - DNA, 373 bp, Glycine max
ttctatactgaacaggtacatcctgacctgagcaaggcagacaagaagcgcctgtgtgggattctagactgccaaagattgtccccagaagtgcgtgcccatgcagtaaaaaacgagcttctgccattaagaaccgttgtgcaacttctctattttgaacaagacaaaggctctaaggcaaccacaagtcacaaactgccaaagccacatgagatactgctgggagcaaaacatagaccagctacagctacaactaaagaagaattcaatagagaagaaattagagaaagggaccaccacaaaactaaaagatctgatggtaagttgttggccttggacttggaaaaaaagatggctataagaggagaagaca

SEQ ID NO: 41251 - DNA, 417 bp, Glycine max
acggacgatgcacgcgcacgtaagctcggaattcagtctcgaggtggaattccttctggatttccgctcacagttatttggggtagcatttttaatgagatggtcattagatatagctatgaaaaattactgcgccaggctaaagctccaagtatgtttttacaatccttcaaaaattttgtttctttgtgtgtgtatggtgatgataacttaattagtgttcatgaatatgtcaagccttactttagtggttctaaattgaaaagctttctagctggtcataatatcaccattactgatggtattgacaaaactagtgcaactttgcaatttagaaagttagcagattgtgattttctcaagagaaactttaagcagatgtctaatgttttgtgggtggctcctgaggataaggcg

SEQ ID NO: 41252 - DNA, 311 bp, Glycine max
  unsure (1)..(311): unsure at all n locations
accaatttcaaatgcacatcttcgctctgcactcaattccgttctgcgggatgctcctcatccacagatgcatcatgcatatttgacgtcatatatgcatgatgcatctgtgacgtcaaatacggtgacaattccatctcccgcggcttcttgagtcaggagcgccttaccatcaccgccaccgacatcgtccacgacttcctctttggctgtggccaagacaacgagggcctcttcaggggcaccgccggcctcatgggcctcagccgccaccccatttnctttgtccaacaaacctnctcaatttacaa

SEQ ID NO: 41253 - DNA, 258 bp, Glycine max
tcactatttatgccaacgtagactatgtgaagatcgtccgtgacacatgccgagaagttggatacatttttgttgatggtggtcttgatgctgtcatatgcacggtgttgttgaacattgaacaaaaaagtcttgatattgtccagcgtgtgcacggatacttaaccaagcgcccaatggagggtggtgctaccgtcctgtgtaatatgtttggttatagcactgatgaaacatgttaacacatacctgtgagtcatg

SEQ ID NO: 41254 - DNA, 394 bp, Glycine max
  unsure (1)..(394): unsure at all n locations
agactgtgaattatggaatcctgcttgcacaaaagcaatgactatgtcatttaatccaaacccgtgttctgatgcatggagtttggaatttctgaagcgtaccggatttcattgtgatatcatttgtgtcactggatggactgccaccccaatgcaggatgttcaggttacaattgattggtttatttcctctcaggaatgtgttcccaggacctattgtgttttaaatccacaaaatccttttgtgttaaataggtggatgggaaaactgactttccctcagggcacttcccgaagtgttaagagaatgcctctntctatagggggaggagctggtgcaaagaatgctattctcatgaatatgccaaatgctgttctttcaatgtggagatat

SEQ ID NO: 41255 - DNA, 371 bp, Glycine max
  unsure (1)..(371): unsure at all n locations
cctatctttgcttanttttcctgcattaattattctctccctgggattaccaagctctgcaactgggcttctcaacatggagtatcgtctcctacccatttttactttactcaatcttgcactggtggcaanccatgctgctttacctcctgaagtttactggaagtcggngctncctactacgccaatgccaaaagccatcactgatatccnnaaccccgattgggtggaagagaaaagtacctcagtgaatgttggaggcaagggcgtaaacttgcatgcaggaaaaggaggaggtggcaccaatgtcaacttttgtggaaatggatcagtttggtgcttgatcgtgctttctggtcttaagggaaagc

SEQ ID NO: 41256 - DNA, 405 bp, Glycine max
attcggttcgagggagccgtaaagaggttctggaaagcagatctggcagtgacaacatggatggtggttctggtgatgattttgatgctgccgacaacccaccgaggaaaaaacgctatcaccgacacactcctcagcaaattcaagagcttgaatcgctcttcaaggagtgtcctcacccggatgagaagcaaaggcttgaactcagcagaaggcttaatttggaaacgaggcaagtaaagttttggttccaaaatcgaagaacacaaatgaagacacaattggaacggcacgagaactcgctgctaaggcaagagaatgacaagcttagagctgaaaacatgtctatgagggaagccatgagaaatcccatatgctcaaactgtggaggtcctgctatgatcg

SEQ ID NO: 41257 - DNA, 288 bp, Glycine max
tttcggctcgaggaaattttaataaacctgttttcacaggttgccgcaccttaaaaccggaaacaaaagcaatcgttacttgatttcaagaatttctcaatttcttcctacttctttgtgtacgatttcttaagggaaagaaaatcactctctgtgctggtcacagacttcgtgaatcattttcttttccactcctagtttatttgctgaacactctcctatttgatataagacttcgtgtcaaatttaaactttttctggttctttctcaggtctcttgttaatttc

SEQ ID NO: 41258 - DNA, 215 bp, Glycine max
cgaaagctggaaattcggttcgagcccgaagtgttaaacgatttcctcttgctatagggggcggagctggggcaaaaatggctactcacaagaatatgccaaatgcagctctttcaatgcggagatgttaggttggagatctcttctttgaaacccataaaacaacttctcattacattaaatgtacaacatataacttcattgcatcctggaat

SEQ ID NO: 41259 - DNA, 375 bp, Glycine max
ggaaaaagtttctttcaaaagcacaattgtagtggaaaaaccttcaaatatgatataattgggctggtcacattctcagaagattttcctgaaaaggaagatcaagaaaaacccaaaaagattgatgccagattgagacaaagaatagatcctcaatacaatgaggttaggctcagatggaaacaaatttgttaaattgtctttgtgatgtgaaactcctaaggttccatgttggatcttaaaatttctcaatcgtaaattgcacttccaagacacagttggaggaaccattctgcgtagtgatctattggcaaatttttgacagagcaatttagagcaagtgttgatttgcagcgcactcatcgataaaggatg

SEQ ID NO: 41260 - DNA, 417 bp, Glycine max
gaattcggtctcggggaaattatcggaaaatctctgacgcttatctggacaatctcgaaaatgtgttccgagaatggtattggcacagtccagaggaagctcgccaattgagaaggaaagctctctctcgtattgaatggctgcaaaaagctgatgtgcctaccatagcacagattgaagagttccattcgatgcagaggatgatgaatgctcctgattcaaatgataatattgatctactggttgagcattgatttgttgggtttacaaggagcaggtaaagcttttccaaacaagattgtttttgatgataagcttgtgttggctaacacacaagaattctttgatggaaattttccagtggattcttggttaccaatttttgtgaattgtctttatcctgtaagtcaattacct

SEQ ID NO: 41261 - DNA, 397 bp, Glycine max
ctccagccaaatcttttttagagcgcaatatcaatggttatgatttttgggtcattggtcatggtttcggccagtggacagatgctagcagaaaaacatataatctagtggatgccctgactagacacactgcacaggtgtatccaaaatcctggactactatattggtgtctttggataaccaaggcatgtggaacttgaggtctgcaatatgggaaaggcaatatcttgggcaaaagttctatcttagagtgtggaatgcacagaaaagccttgctaatgaatatgacattcccaataatgttctgctttgtggcaaagctgttggacatcacccttagtatatatatcggtgtattttctggtcatgagggcttgactacacaactagaattat

SEQ ID NO: 41262 - DNA, 236 bp, Glycine max
aattttagtggttaaaactggagattggatcacactgatgcaaaattctccaattagtgacttgttgagagttgctgcttggaagaaaggttgtttaatggtcaagaatgagatgtgttgaaatgtatcaatctaaaagagggcttgggtctgatttggggcaagtgtttctgacaaacaccaacacagcagtgcatatgtgatgcatgttggtcgacgaaacaagcaacactttt

SEQ ID NO: 41263 - DNA, 347 bp, Glycine max
gggtgagaaaagcaagattttgatcataggaggcaccggctacatcggcaaacatatagtggaagcaagcgcaaaggctggaaatcccacttttgctttggtgagggaatccacactctctgacccctccaaggcacaactcatccacaattttgaggctttgggcgttaatttggtccgcgtaagacttctctcaaactatttaatcttaatttcatttcagtctactaattaatggcaatggcagggggatctgtacgatcatgagaagttggtgaaagctatcaagcaagtagatgtcgtcatatccacgctgggtcacctgcagcttgccgatcagctcaaga

SEQ ID NO: 41264 - DNA, 288 bp, Glycine max
cacgcgtacgtaagctcggaattcggttcgagaattgcagtggtctaaacacgccattggatcacacttgtgcaaacttctccaattagggactcgttgtgagatgctgcttgaaagaaaggttgtttaacggtcaacactgggatgtctgggaatgcatcaaccacaaggagtggttcggcctcactgggacatgtgtttttatacaaacagcaacagcacctcgcattttgatgcatgttagtggtcacaatcagaaccacattcctgggaattaacctctcccaa

SEQ ID NO: 41265 - DNA, 355 bp, Glycine max
acagaaacgattcattatttgtgagttacatctcttacaataagattattcatggttttctattctcctgttatgttattacttcaatattccttgatgtagaccaaaaagagatgttcttatgcttcccatgggctggcacgatgccggaacttacgatgctaagaccaagactggtggacctaacggttctatccgtaacgaggaagagtattctcacggtgccaacaatggctagaagaaagctattgatttctgtgaggaagggaaggaaaaacatcctaaaatgtcatatgctggtctttaccatttttcaatctaaaattgcactttccaagaacgggggtcccacaat

SEQ ID NO: 41266 - DNA, 398 bp, Glycine max
  unsure (1)..(398): unsure at all n locations
agagctnngacgnngcaagcacgcgtaccttaggctcggatttcggttcgggggcagaatatttctctgaagtgttctcaaagcctctcagatctcttccttatgattcgcctgggcaaacatttgtgggttttgagaagcctgagggattgtcaattgctggaaaattttctaacgttctgaaatttattgttaaagaggttgacccaaccactggtgagacagaagatgatggcgttgaagatgaataccaactagaggatttagaggttgtcaccgcagactacatgttgaaagtgggagtgtctaatttcaggagtgcatgggaaagcattggccctgactgtgagcgagtggatgaatatggtcttggccccagggagagtttggctgaagct

SEQ ID NO: 41267 - DNA, 344 bp, Glycine max
ccaaatttctggctcttagtggctctgctgctggctggatccttattgtcgcctcatccttgttctggtatattggtcgcacgcaaaagaccaaaagcctacgagcaatccaacttccctcagatgaaaacgccaaactcatggcggaccatgtcccagcttcgttgtacttctccgatgtctcctacacactagagggtcggcagattctttcagaaatcgttggtggagcacaaccgggacaagttctagcgatcatgggcgcatcgggcgcaggaaagtctacccttctggacttgttggcccggaaacagaaacgtggcgcggtcactggccaaatactg

SEQ ID NO: 41268 - DNA, 387 bp, Glycine max
  unsure (1)..(387): unsure at all n locations
acgncgcatgcacgcgtacgttagcttcggattccggctcaggctctgggtctggcaaaatcgtcccccaaccattgttatggtttggtccgttcttcttgcttcaatattctccttgctgtgggtgaggattgatcccttcacctctgactccaacaaattaaccaatggtcaatgtggcatcaactgttagttctcttgtatgattcattttgtgttgttattcccttttgcttggagatacacaaggttgctgtcgtgtatatagcaagaattttcagcctatcaaagttgtctggaggattgaacccctgaaatagatgggaatgtaccctctctgtttctattatttatctacatgttccttacaagaatagtcagtagtaa

SEQ ID NO: 41269 - DNA, 346 bp, Glycine max
gtctgcattcatctatcaggatggaaagattctaattgaggttgatcatctacaagatgtccctggcccatacattcagataaagggtgctaataaagatgcagtagcagcagcaggttcaatgcttaaattggatggttcatatactactaagggatgtagctctgcttcagattcctcatcaagtagggtagtctctccaattgaaggagttattgaggaaatgcaatcaaagattagaaggcttgaaaggtggctagcgataaacacggttctatggacatttctgatgtctgcccttgttggttattcgctgtatcaaaggaagcgccaataatgatctttg

SEQ ID NO: 41270 - DNA, 325 bp, Glycine max
cgcaacttctggatagcacaaagaaaacccaacactgcctcaccaagagcgtgcaaagggcagagggaaaaagacgaatttgtgtcactgtaggcacaggattgcctgccttatgcattatcaagagccttcttgtacatggatatgctgttaataccactataagatctgacccacgacgcaagagagatgttagctttcttacagacctacctggtgcatcagagaacgccaaaatattcaacgcttatctcagcgacccatagagtattggttcatcacctgaggggtgggtgggtatttttgacactgacaccccaattga

SEQ ID NO: 41271 - DNA, 365 bp, Glycine max
aacattcaatgcattaactgttgactgaacaaagttatggaggtaatgaggttgcacgaatactttcgcctctcactacaaatacacatctcatctcatccgtctctcacttttaatttttctctgcaatctgaaccttccggatttcgtttttctttgttccggtagccagccagccagccatggtgctcttcaatgtttcacgcgttgagaccactcccttcgatggacagaagcctggaacctctggtctccgcaagaaggtgaaagtattcgtgcaacctcattacctccataactttgttcagtcaacattcaatgcattaactgttgaaaaagttagaggtgcaccgctagttgcatct

SEQ ID NO: 41272 - DNA, 358 bp, Glycine max
atttttattttggtttctgattgcaggcagatgttggtaacagtggcacaattgactatggagaattcatagctgcaacattgcatttaaacaaagttgacagagaagatcatttagttgcagctttttcattttttggtagaagtgggaggggctacatcactcaagatgagcttcaagaagcttgcgaagaatttggcattgagaatggctggttggagggaatgatcccaggagctgatccggataatgtgaggaccttttataggaacggaattttatactacccggtgaatggaatggtaatcaacattcttaacaagggtttatttggtatttgggttttttattctcataa

SEQ ID NO: 41273 - DNA, 359 bp, Glycine max
gtgcattgtaacatggggaagcaagttggttttgaggatggtcttagatatttcgacgaagatggtgatggaaaggtttcaccttcagagctgaagcacgggctgcgaatgatgggtggggagcttttgatgaaggaagctgagatggcaattgcggcattggattctgatggagatgggttgctgagtttggaggatttgattgctcttatggaagctgggggagaggagcagaagttgaatgacttgaaggtggcttttgagatgcatgacacctaaagctgtggtgttatgctcaagcaactgccaagggaggttgctctagaatactctgaggcacgtaaagccacgggcttgac

SEQ ID NO: 41274 - DNA, 362 bp, Glycine max
attcaaagttcatttggtctctgctcttgaattcttctatgatatggaagcaaaaggctttgagccaaatgtgatcacatacacaatattgataaatggtttctgcaagcaagggcgatttgaggaagctgctgaaattgtgaatagcatgtcagccaagggtctgagtctgaatacagtacggtacaattgtttgatttgcgcactgtgcaaggatgggaagattgaagaagctttacagatttttggtgaaatgtcaagcaaaggatgtaaacctgacctttatgcatttaattctttaataaatggactttgcaagaatgataagatggaagaggccttgagtttatatcatgacatgt

SEQ ID NO: 41275 - DNA, 365 bp, Glycine max
ctacaaaacagcgttgtgtcactgctcatcaaacttcgtcttcttcttcttctttctctttattcgctccctgtctctctgcgtgtgcgtgaaaaagaagcaaaaatgcattccggtcacttacttctcgaggaacccattcgcatggtttccatcctcgaaccatccaagcctaatttctttccggcaatgacgaagatcgttggtaccctgggtcctaaatctcgatcggtcgaggttatttctgcttgtctcaaagctggaatgtcagtggctcgtttcgacttctcttggggtgaccctgaatatcatcaggaaactttggagaatctgaagaatgctatcaagactactaagaaactctg

SEQ ID NO: 41276 - DNA, 367 bp, Glycine max
cttccacttatataaacaaaaggatgtgctcatcacttgggaaaggtaagaaaagcggctgtgtgactagactggatccgttctcagttactttactgactgtgggtttggaagcacagaatgaaaggcgcagtataaacgccgctaatgctattctgaccctacttcgtaaaaactggtagagcctcaaatatgtggaggacgagatgcactatggcatatgggaactaacatgtaatgtttgatatactcagacaaagcgcatgactatctgcaatgagtgtgtttaaatacttactagacattgctctcaccaacaagcttttcactgagggaactgatattcactggcatggaatcagacagg

SEQ ID NO: 41277 - DNA, 366 bp, Glycine max
gatccatcaactttgccaaagtacccaccaattaaggagtttgatgccaaacttcgtgaagaggaagctagaagacgaagagcagcaaataaaggatatgaacatgaatcagttgggagaaattttagagagtccaaagctgtgccaatacctgatgctaatgctgagtttcaggcaactatgaggagacaaggacagtgtaattccaagtgcactattgagaagtacaatcctcaagaggatggcgattacggcttccaccatgaacctgaaaagtcaagagcactcaatgtattatctcattctggccagttaatgcatccaagtgtatatgtatcctcacgcaatatgaatttgaaagaggaa

SEQ ID NO: 41278 - DNA, 355 bp, Glycine max
tggaagattagtctttgattgatttcgtagatcaaggaggaaagtggaatgggttgtttgtcgcacttcaatccgcgggaggacgagaagctcaatcccaatcctcagcaggaaaaccaccagcatgaacatgtacatgaacatgcacctaagccccctgttccttctcgtatatccagattgccgccctctgcctctgcctctgcctctgcctctgcagtaggagcagacaatttcctacaaacagcacaacatcaggttcggacagcacacatctcttctaaattgtggctcaaacattcagtatccgtgagctcgcaaccgtaacaaaaaactttaagccccaatttctttt

SEQ ID NO: 41279 - DNA, 357 bp, Glycine max
aaatacacatatcaaggttgatagtatatttgtccagacctgctttgacatgctttatgatagtaaccccatgcttatcagctctggacaaatacacaatcaaggttgatagtataactgagagaagaggaggtctgaatccaagttctcttcaccagttgcaattacatggtccacatgtcggacaagcagcaaaaattgggttgatttgttctgttattgccctcacagaagcaatagcggttggtcgatcttttgcttccatcaagggataccatcttgatggcaacaaagaaatgttgtcaatgggaatcatgaacattgcaggatctttgacttcatgctatgtggcaactg

SEQ ID NO: 41280 - DNA, 378 bp, Glycine max
  unsure (1)..(378): unsure at all n locations
agaagtgctangacgatgcacgcacgcgtacgctagctctgaatttcgagtgcgattatccttttattcgcaccgaaaccagtgagccatggccgtccgaaagaacaagcgcatctccaaggggaagaagggtggcaagaagaaggcagctgatccctttgccaagaaggattggtatgacattaaggctccttctgcttgtcaagtgaaaaatgttggcaaaaccctcgtctctcgtactcagggtaccaagattgcttttgaaggactcaaacgtatagagtgtgaggggtcttcttgtctgctcttaaaggggatgaggatcatgcattcaagaagattaggttgagagctaaagatgtgcaagggaagaatgtt

SEQ ID NO: 41281 - DNA, 364 bp, Glycine max
taaagagcatgtacaccctccctactactaccagtcagcaccaccaccatgtgcggcggcaccacctccctattactataaatctcctccaccaccatgcccctctcctcctcccccctactactaccactccccaccaccaccatctccctctcctcctcctgcctactactaccattctccaccaccaccatctccatcaccaccacctccatactatgacaaatcccctccacctccatcttcatctccaccacctccttactactatcaaagtcctgctccaccatctcccactcctcatcctccctactactacaaatcccctgcaccaccaacgtcgcatcctgcaccttaccactat

SEQ ID NO: 41282 - DNA, 355 bp, Glycine max
ttttagggggcgcgccagttctgatatttacaccatctgctctcaagactgtgaattgtggaatcctgcttgcacaaaagcaatgactatgtcatttaatccaaacccgtgttctgatgcatggagtttggaatttctgaagcgtactggatttcattgcgatatcatttgtgtcactggatggactgccaccccaatgcaggatgttcaggttacaattgattggtttatttcctctcaggaatgtgttcccaggacctattgtgttttaaatccacaaaatccttttgtgttaaataggtggatgggaaaattgactttcccccagggcacttcccgaagtgttaagagaatg

SEQ ID NO: 41283 - DNA, 351 bp, Glycine max
cctcatcttattttgctcctgctaagtcacgaatgcgttggacaccagaacttcatgaggcgtttgtggaggctgtcaaccaacttggggggagtgaaaaagctactccaaagggcgtgctgaagctcatgaaagttgaaggattaactatatatcatgttaaaagccatttgcagaaatacaggacagctagatatagaccggagtcatctgaaggagttatggagaaaaaaacaagttccgttgaagagatggcatctctagatttgagaactggtattgagatcaattgaagctctacgactacaaatggaggttcagaagcggttgcatgaacagcttgagattcaa

SEQ ID NO: 41284 - DNA, 360 bp, Glycine max
  unsure (1)..(360): unsure at all n locations
tttcagcttgatgatgcacatattttctgcagggagtgccggataaaggatgaagtgcggaatggctagaatnncatcaattatgtctataagatatttggtttcacgtatgagctgaagctttcaacgaggccagagaattttctatgagatattgtaactcgggacaaagcttaaagtgcttttaatgaagctttttatgattttggttatcctattctttttaattaattttcttcttttttttttttttttatactttttttatgtgggttgcgctatttataaaacattacatttttccattttttcatttatttttattttttctctaatatctttgtttttattctttttttt

SEQ ID NO: 41285 - DNA, 378 bp, Glycine max
  unsure (1)..(378): unsure at all n locations
gtaaagctggaatttggcctcgcgcagacactttttaaaatttttggacacttgaaaggggacaaaataaaaaccacattcttgggaattaatcttcccaataaaggtttgtggtcctaataatggttttgaaatgtggagttctgagtgggcaaatcaaacttaatggcatttgagtttccttattgacaatcccaaacagtctacagtttttgatattctcttgggaatctctcaagattttgaaattgctggtaatactcttatgccagctttntctgttccacaggctactgccagatcttctgaaaatgcggaatcctctgcatgatctggaattcgtgttttctttcgcttgttcgtttgtttaattcaata

SEQ ID NO: 41286 - DNA, 372 bp, Glycine max
atttcaattgtagctagtcattatgtatagttagagagtattagtcttttaactctcgcctttcaaaaaaaaaaaaaaaagaggtgataattcgttatggtgtttgttgtcttgattatacaatatagatcgttgacattattatttctttatgactaattttcaggtgacaagtctatgatcaagacgagatatatgtacctaaacgaagagatcttgaaagagaatccaaacatgtgtgcttacatggcaccttctttggatgctaggcaagacatggtggtggtagaggtaccaaagctagggaaagaggctgcagtaaaggccataaaggagtggggccagccaaagtcaaagattacccacttgatc

SEQ ID NO: 41287 - DNA, 410 bp, Glycine max
ccccgtccgtaagctcggaattcggttcgagatggagtttgtattttctgaagcgtactggatttcatggggatatcatttgtgtcagtggatggactgccaccccaatgcaggatgttcagtttacaattgattggtttatttcctctcaggaatgtgttcccaggacctattgtgttttaaatccacaaaatccttttgtgttaaataggtggatggggaaactgactttcccccagggcacttcccgaagtgttaaaagaatgcctctttctataggaggaggagctggtgcaaagaatgctattctcatgaatatgccaaatgctgttctttcaatgtggagatattttgttggagatctcgtctttgaagtttctaagatgacttctccctacattaaatgtaca

SEQ ID NO: 41288 - DNA, 381 bp, Glycine max
gagagaactgactactgtccaaagaaaaattgcagatgtgcaagttgaacttcaagggcgaaaggatgacaaaaatgttgcacatttgactcatgtgagtgaaatggaaaagaagattgagacattggcaaggattactactatactcaaagatgttattcagaacaaggatcgcattatagctcgcctacagcagccgtattcccttgattgcattcctgttgaagcagaatatcagaagcaattctctggactactgataaaagcggctagggattatagggctttgacaccatcacaggcgcatttttagaggggtgagaaaatttcaaggaacctccttcagtttggggggaaatgcttcggcccattcctgtagct

SEQ ID NO: 41289 - DNA, 347 bp, Glycine max
agagttgtatgtggaatcccttctggatttccgctggcagttatttgtaatagcggggttcttacaaattgccatccgtgaaaggacacacctgctgttggcttgttgttcaaggatggcaatttgtaagaaagatgtttggagagttgaatgtggaatcccttctggatttccgctcacagttatttgtaatagcatttttaatgagatgctcattagatatagctatgaaaaattactgcgccaggctaaagctccaagtatgttgttgcaatccttcaaaaattttgtttctttgtgtgtgtatggtgatgataacttaattagtgttcatgtatatgtcaagc

SEQ ID NO: 41290 - DNA, 320 bp, Glycine max
catttctccatttccattttctctctcacttttcaagaatcgtaagctatgggaaagtctgacccaactgtgagtgctgattaccagaaggccgttgagaaggcgaagaagaagctcagaggcttcatcgctgagaagagatgcgctcctctaatgctccgtttggcatggcactctgctggaacctttgacaagggcacgaagaccggtggacccttcggaaccattaagcaccctggcgaactggcttacaaggcttacaaccggcttggcattggttgtagggttttggaggcaattaaaggcggagttccttattt

SEQ ID NO: 41291 - DNA, 436 bp, Glycine max
  unsure (1)..(436): unsure at all n locations
aagagcnangacggngcatgcacgcggacctaaagttcggaattcggttcgagctctgcattacatttcgagattccaaccatcgatctgaatgttcaaccttaacctctaagaatgtcttacgcttatctcttcaaatacatcatcatcggtgacaccggagttggaaagtcttgtcttctacttcaattcacggacaagcgctttcagcccgtccatgacttgaccatcggtgttgaatttggtgccaggatgatcacaattgataacaagccaatcaagttgcaaatatgggatacggctggtcaagaatcattcagatctattacaaggtcttattacagaggggctgcaggtgcattgcttgtttatgatataaccaggagggagacatttaatcatttggctagctggttggaagatgcaagacagcatg

SEQ ID NO: 41292 - DNA, 173 bp, Glycine max
tgaaattttgagttctaacgccactaaccctatgctgacgcgacttcttgagaactgtaagagtctcaaatatctggttgatgagtgtccttttgcatttgtgaactagtatgtaatattttattcacttaaataaagcgcattactatgtgcaatgagtgtgtttaaatata

SEQ ID NO: 41293 - DNA, 409 bp, Glycine max
  unsure (1)..(409): unsure at all n locations
gtccgtaagctcggaattcggttcgaggtcagcgtgcttcctttggtatcggtaccttcaacttttggtgggcctacaccactcccatcattggtgccatcattgccgacgagtaccttggccgcttcaacaccatcttcatcgccattgccttctcgattctcggccacatcttcctcatcatctctgctctgccctccgttctcgccagcggtaaggctattgctcctttcatcctcggngtcattacccttggtttcggtactggtgcgtttaaggccaacatctctcctttgatcgccgagcaatacaagcagaccaagccccgtgtcatcaaggaccccaagactggcgagcgtgtcatctctgatcccaacatcaccatctcccgtatcttcttgtacttcta

SEQ ID NO: 41294 - DNA, 360 bp, Glycine max
  unsure (1)..(360): unsure at all n locations
atagaagagaaggnacatggcacgcgtccgtaagctcggaattcggttcgagcctaaaatttacaaggtaatccgaagccatccatcaactgttgagatctatgagaagaagcttttggaatcaggggagttgacacaagaagaaattgataggatacacaagaaggtcacatcaattctaaatgaagaatatttggctagcaaagaatacattccaaaaagaagagattggctttcagcgtattggcttggtttcaagtcacctgaacagctttcacgtatccgaaacactggtgtgaaaccagagatcttgaaaaatgttggaaaagcaatcacaaccatcccttgaaatttcacacc

SEQ ID NO: 41295 - DNA, 349 bp, Glycine max
acgtggcacgcacgcgtacgttcggaattcggttcgagcgggtcgagcaatcattgtttgttgaaggaagaggaatctggagaaatggcaggggacagcaagagcaagattctgttcatcggagggactggttacatcggaaaattcatcgtggaagccagcgccaaagctggccacccaacttttcttttggcgagggatgccactctctccaaccccgcaaaatcacccctcatcgacaatttcaaaggcctcggtgtcaatcttcgcttatgagatctatacgatcaccaaagtttggtgagtgctataaagcacgtcgatgtgcggatttctactgtgcgacacc

SEQ ID NO: 41296 - DNA, 354 bp, Glycine max
gctggggtcaaaggtgatgagagaaatggaaactacaatataatatcaggcacctcaatggcatgccctcatgttactgcagcagctgcctatatcaaatcatttcatcctgattggtctcctgcaacaatcaaatcagcattaatgactactgctaccccaatgagcattgcacttaatcctgaagctgaatttgcttatggtgctggacaaatcaaccccatcaaagcattgaatcctggcttagtatatgatgccaatgaaattgattatgtcaagtttttgtgtggacaaggttatgatactaaaaagctaaggagtattacagctgataatagcagttgtacacaagcc

SEQ ID NO: 41297 - DNA, 356 bp, Glycine max
cttctggtaatcacgaagaagagcagacaacccatgttgcgtcgtcgtttaacgggaatttggcacccgacgcttcgcccaccgcgctcgccatgaagcacaaccccggcatagccctcgattggactctccaagagcaaactattctcgaagaaggactctctctgtttgcatctgaacctaacctcacacgctacgcaaagatagcacaaaatctaaataacaagacagtccgggatgtagcactgagagtcaggtggatgaataaaaaagaaaattgcaagagaaggaaggatgattttccaaggaaaagtaaagataaaaaggtattgctttcatttatttgatgtcatgta

SEQ ID NO: 41298 - DNA, 383 bp, Glycine max
ccccgtccgtaagctcggaattcggttcggggaaagaggagtagatgacaggctcagcagatccattggggatatcattcggtgagatgctcatcgactttgttcctgacacatctggtgtctccttggctgagtcttgtgccttcatcaaagcccctggaggtgcccctgccaatgttgcttgtgccatatccaaactgggcggcaatgctgccttcgtcggcaagatgggagatgatgagtttggaaggatgctagttgacattttgagaaaaaatggggtgaacacagatggtgtttgctttgatacggaggcaagaactgcattggcttttgtgacattgaggaaggatggagagagggagttcatgttctatagaaac

SEQ ID NO: 41299 - DNA, 414 bp, Glycine max
gaagagcatatgacgtcgcatgcgtacctacggctgggatttcggttcgagaccaatgtttttaccgaggtcgcggaggatcggcagggagcaagttccgcatgtcactgggtctgccggtggcggcgacggtgaactgcgccgacaacaccggcgcgaagaatctctacatcatatcagtgaaggggatcaagggaaggctgaaccggttgccgtcagcttgcgtgggtgacatggttatggccaccgtcaagaagggaaagcctgatctccgtaaaaaggtgctccccgccgtcatcgtccgtcagcgcaagccgtggcgccgaaaggacggtgtttacatgtacttcgaagataatgctggggtcatagtgaatcccaagggtgaaatgaaaggttctgctatcactggtc

SEQ ID NO: 41300 - DNA, 354 bp, Glycine max
tgatcattacaaaagtccttttccaaaattctgaatgtcaccaataataaaaaaaggaaataaacccagccgttaatgtttttcctcaataaggaaactccaccaacaaaattcaaacgcgcccctcactctcactccccatgccgacgcccgtggcagccgcgcgccaatgcctaactaccgacgccgcgcgcgccctcgacgaggccgtctccgtcgcccgccgccgcggccactcccaaaccacgtcgctccacgccgtcttcgaccttctttccctcccatactaacccctcctccgcgacgcctgctcccgcaccagaaactgcgcgtattccccacgccttcagttca

SEQ ID NO: 41301 - DNA, 353 bp, Glycine max
ctttttaacaaaaagaagagcctcctgttgtgtctgtttctatccgtagacgtaggctcctccgacgtggccaccggacccgcccacaacattacccgtatgctggccgcacaccccggctggtacaccttcaaccactacctctgcgccacccacctggccgaagtgatcaacctccgtcagaccatcaccggcctgaccctctacaatgccatcatgtacttcctgctcgacaagcacctctccctccccaccatcaaaaacgttctctaccttcacatcctcgtcgactacttcggcgccaaaaagctccaccagatcaacaacagcaccaccctcgtctccttcatgtt

SEQ ID NO: 41302 - DNA, 349 bp, Glycine max
ctgaatcttatgcgggagataaaaatatcataaaatttgatggtgatcacaactcctctcgaccacagttcttttataattcaatttccattttcttctacaatgtcctccaccctcctcacactcctagagtttgtaagcttgagaaatattttgattttggggatttgaagactggttctgctgtgaatgagagtctattatatgggatactctctagtctacagtcagcaactactgatgctgcgagttcatcttctgctcctccaaacacttcaaattcaatcacagcatcagttagtgaacttatttcaaaagttgctccagtaatcgccgctgagtccatgat

SEQ ID NO: 41303 - DNA, 241 bp, Glycine max
ctcccattatgcccctagatgaagaaattctttctaaggttgcacaagatatggttgaggaatggtttgattgtgttgatgaggaggattcctttgaggaagtttctttaagcgcagcactcaatggtgttgagggtttggactatatgtaatgaattcctcttgccacatgtgagggctttcctcatgtgcttttacgtagaaattgcgatataggcaagaggttgatttgtttctgtgt

SEQ ID NO: 41304 - DNA, 383 bp, Glycine max
atggaagagcgatgacgatgcatgcacgcgtacgctagctcggcgtctcgaggttcaaggatgtgcaatttgtaagaaagatatttggagaggtgaatgtggaatcccttctggatttccgctcacaggtatttgcaatagcatttttaatgagatgctcattagatatagctatgaaaaattactgcgccaggctaaagctccaagtatgtttttacaatccttcaaaaattttgtttctttgtgtgtgtatggtgatgataacttaattagtgttcatgaatatgtcaagccttactttagtggttctaaattgaaaagctttctagctggtcataatatcaccattactgatggtattgacaaaactagtgcaacttttg

SEQ ID NO: 41305 - DNA, 273 bp, Glycine max
aaaatttttactgatctggcgctttttccgtttctggtcactggtatgtttcttgctcgttaagcatatggcataaatgtccaagtacatatttgaagaaagtcgttactttgaatcatatgctgtagataaacggaattgaggctccagagaatatgccaaaatgtattaataattgtcacaacttggaaggcttttggaaaaactggcatgcttccttcaacaagtggcttgggaggtatatatacatttctcttgggggatctaagaaaa

SEQ ID NO: 41306 - DNA, 376 bp, Glycine max
gagaaaagtaagatgccaagcaaaggtgattggaactattgtaacagttgctggggccatgttgatgacattgtataaagggcaagtaatcagtttcttggggtctaagtacatgcatcaccccagaaactatgtacctgaaaacaccactgattctggtgaaaaggattggtttaagggctctattcttctaatactagccaccctttcatgggcttctttcttcatccttcaggcagtgacattaaggaaataccctgctcagctctccctcacagcacttgtgtgtgccttgggtacactgcagtcaattgcagttacctttgtcatggagcacaaaccctctgtttggaccattggctgggacatgaacctt

SEQ ID NO: 41307 - DNA, 377 bp, Glycine max
ctgtaagtctataatactcgtccatagtaattctatctggctcgagcaggattacctcctgtgataaatacctgtgccggttaagtcagagttgtggtgatcagtgatcgagccacagcaagagccatgtacaagggaagattaggaggcaaggctcagcttggatatgttgaaactgaccctttgggtcgatatggacgtttcagggacattctaagcaaaggagcagtgaaggtagtgtatagggcctttgatgaggtcctaggaatagaggtggcttggaaccaagtcaagcttggtgatgtgtttcattcaccagatctacttccgaggctttattcagagggtcatcttcttaagaacttggaacatgactt

SEQ ID NO: 41308 - DNA, 341 bp, Glycine max
cacatagtaactattattctctgtacagtaattgccgaatctgcgggggttttctaataatggccaaagacgttgagcaggtcacagagcaaggtgaatactccgcgaaggactaccatgaccctcctgcggcacacgtgatcgacccagatgagctcacaaagtgatccttgtacagagccgccatagctgagttcatagcaacactcctttttctctacatcaccgcggtgaccattattggctacaagagacagagggacaccaaaatccccttttacaccgaatgggacaacaaggaatacccggcatcccttgggccttcagaggcatgatcttca

SEQ ID NO: 41309 - DNA, 336 bp, Glycine max
cttttgcatttgtgaactattatgtagtattttattcacttaaataaggcgcattactatgtgcaatgagtgtgtttaaatataaaaaaaaaaaaaaaaaaaaaaaaaaaaaaaaaaaataataaaattgatggatatgaagtcaacccaaacagtataaaataatgaatacaaagaatgaaaaaaaaaaaaaaaaacaggggacgaccaccaataaagatactaagaatccgaaaaaaaatagtaaacgggaacaagaaggtaacacatttaactatataggattcacataaaatgttggctaaaaaaaaagaaatattaaatcgggtataaaat

SEQ ID NO: 41310 - DNA, 399 bp, Glycine max
agcttgacgcgatgcaccgtcgtaagctcggaattcggcttgagggttgagccacacaaaatttcattgggcttgtcaatggcaaaaaaacctgtgaaatactctctggttgacgcgtttactgagtcagtgttcaaaggaaaccctgcagcagtgtgtttcttagaagagaagaggacaaaagtgggtgcaaggagtagctgcagagttcaatctatctgtgacatgttacttaactcgcatcaccgagtcccatggaacaacctcttatcctcgttttgatctcagatggttcactcctgttagtgagattaacctttgtggacatgcgaccttagctgctgcgcacacaatattttcatctggtttggtggacaccgatgttgtcgaatttgtggc

SEQ ID NO: 41311 - DNA, 470 bp, Glycine max
gtggtggagtcttgggatgtgtgtaaatcaaaaggtgggaggaagaagaagaagaaaggggatgcagaagaagtggaagaaggggctgaggctgaggctgggtgttgggttaggttgaggtttattgggagctgcatttcttcaagatccaaggttgatacctcagtcagtgccagtggcatcagtactcattatgctgaaagtaaatcaactaatgatactagtagagaccaaccaacagctccagcagtctcttctacaaccactagtaatgcagaaagcaattcgtccacttccaagcttgaagaagagcttaaaattgcttccaggctgcgaaagttctctttcaatgatctcaagtcagcaacaagaaattttcggcctgagagttttcttggtgaacgtgggtttggttgtgttttcaaggcgtggatcgaagaaaatggaactgctccagtgaaacctggcac

SEQ ID NO: 41312 - DNA, 383 bp, Glycine max
ggggattgttgatgcgctgtctgcacggatgctgaacacattgtgcgggttgtgtgggagcatggctcacaacctcatgcacatgaccaaggctgatctgctgtatcaactgcatgaccaaaacgccgagcactgtttgaaccctttcgctaacgaacgcgtgtgcgctattatcatgattaggatgatctacgtggagcggcggatcagagccaaaaccaaggccaaggtttttgagcagttgctggcttcgattcagtacccagtcatgaaggaaaacgcctttgatgctgtttatgagtcgcagaacactcaggagcagatccaggcgtatgcttatgatgtgactcgtgctattgctgctagaatgaacttggatgaac

SEQ ID NO: 41313 - DNA, 490 bp, Glycine max
gacgcgatgcaccgacctaggctcggatttcggttcgagcattccaatcggcacatggttaatttatatagttcacgttctctttgggcgttgccatttttgagaagccattttcttgctgggatgactacaactggtcagtcaaagtcaattaatgcttttattcaacgatttctgagtgcacagacacgccttgcgcactttgttgaacaggttgctgttgctgtggattttaaagatcaaactggagaacaacaaaccatgcagcagaatctccaaaatgtttgcctcaaaacaggggcccccatggaatcacacgccgccacaatcctcactccttttgccttctcaaagcttcaagaacaacttgtgttggctgcacattatgcgtctttttcaattgaagatggttttcttgtgaggcaccacacaaaagctgagggaggccggaaagtttattgggcccctcaagaagaattatagttgtagc

SEQ ID NO: 41314 - DNA, 403 bp, Glycine max
cgagggatacctcagttggaaatttggtgggaagggctgattcttacttgagtgaagtggcactcaagactatttcaggggctgtgtcaatcttacacatgtcggaacgcttccttccgattgcagagaaggcaaaactggtgagtagatgcatagatgctattgcattcatagcctccaaggagactcaattctgttcacctatgagaggtgacattattggtactgatggcatggcttctcaccaaaggccagtggttcattggtgggctgaggatctcacagttctcagaattgacatctttcaaagagttctgattgcaatgatggccagagggtttaaacagtttgctcttggccccatcattatgctctatgcacagaaatctctgcgaggtttggt

SEQ ID NO: 41315 - DNA, 317 bp, Glycine max
cggctcgagtggagatattttgttggagatctcgtctttgaagtttctaagatgacttctccctacattaaatgtacagtctctttcttcatagcatttggaaatttggctgatgacaccattaattttgggcttttcccacaactgtgcagttgagagatcaggaaaagtgattgaattttcacagagaatttacactgtcaactaggcgtctgcacacttgtgctgatggggtcatttgatgcttgtcatgatgttaggttacatccaggatttgtcattggtagtggcacctaacatattggcatatgctaatc

SEQ ID NO: 41316 - DNA, 405 bp, Glycine max
gttctttgtcatgtttcttttccagctgctggatgagagaaagagaacaaatgtcttacggtttcttgaagcaattaatcagaggcttgacatttcagatggattgaaaagattaaaatgtcgtacacttatttttgttggggacagttctcctttccattcagaggctctatacatgacttcaaaactggatagaagatatagtgccttggttgaggtatgtgtaatgtgtaagggtgtagatgtgtagcatgcatgtatatatgacaagaaagcatagcaaatagggatatggataaacgttcaggtgaacatttgcaaaattgatttaattcaatacaaaagttacataaaattgctttttaattcaattaaatttagattcagaatcaatttttcaacgtg

SEQ ID NO: 41317 - DNA, 275 bp, Glycine max
ctcgattcggctcgggtaatacatccttcaaatagttgtcttcggcgtgatggggagtactaactgctcatgaatatgtcaagcctactcagcgttctaaatgaaagctgctcacggcaaatatcaccacactgacggatgacaaactagtgcactagcacttagaaagtgagcagattgagattttctcatgagaaacttcaagcagatgtctcatgtgttgtgggtggcttctgaggacaaggcgagcttatactcacaactccattatggat

SEQ ID NO: 41318 - DNA, 430 bp, Glycine max
agagcttgacgtcgatgcacgcgtccgtaggctcggaatccggttcgaggttctttcaatgtggagatatttggtgggagatctcgtctttgaaggggctaagatgacttctccctacattaaatgtacagtctctttcttcatagcatttggaaatttggctgatgacaccatcaattttgaggcttttccccacaagctggtgcaggttggagagattcacgaaaaagttgtattgaaattttcacacgaggaatttcttacagcttggtcaactgatgtgcgtcctgcaacaactctgttggctgatgggtgtccatatttgtatgctatggtgcatgatagttcagtgtctacaataccaggtgattctggcattggtgttaagttgacaaccataaacaatatgtgtgcatatcggcttaatcct

SEQ ID NO: 41319 - DNA, 443 bp, Glycine max
  unsure (1)..(443): unsure at all n locations
ccggatttcattgtgatattatttgtgtcactggatggactgccacggcaatgcaggatgttcaggttacaattgattggtttatttcctctcaggaatgtgttcccaggacctattgtgttttaaatccacaaaatcctnttgtgtaaaataggtggatgggaaaactgactttccctcagggcacttcccgaagtgttaagagaatgcctctttctatagggggaggagctggtgcaaagaatgctattctcatgaatatgccaaatgctgttctttcaatgtggagatattttgttggagatctcgtctttgaagtttctaagatgacttctccctacattaaatgtacagtctctntcttcatagcatttggaaatttggctgatgacaccatcatatttgaggcttttccccacaagctggtgcaggttggagagatt

SEQ ID NO: 41320 - DNA, 272 bp, Glycine max
  unsure (1)..(272): unsure at all n locations
ttaccttcagaagctgtctttttaaatgttacatgtggtagtggacggcgtggtttgaagttgacgttacaatttatagctttattnactatcacgaatgtattctcaaaacctatcgtgttctaaatccacaaaatccgtttgtgttaaataggtggatgggaaaactgactttcccttagggctcttccactcgtgttaagagaatgcctcaatctatttggggaggagctggtgcatagaatgctattttcatgcatataccaaaagct

SEQ ID NO: 41321 - DNA, 396 bp, Glycine max
ggggaaaatttttctttggatataaaatctcgttctagaggggaaaaagtttcctttacaaaagctcaatttgttagtggaaaaaccttcaaatatgatataattggtgctggttcacattcttcagaagattttccttgaaacggaagatcaggaaaaacccaaaacgattgatgccagattgagacaaagaatagatcctcaatacaatgaggttcaggctcagatggaaacaaatttgtttaaattgtctcttgatgatgttgaaactcctaaaggttccatgttgggatcttaaaatttctcaatctaaaattgcactttccaagaacacagttggaggaaccattctgcgtagtgatttattggcaattttttgacagagggcaattttag

SEQ ID NO: 41322 - DNA, 460 bp, Glycine max
ctcgagccgaatcggctttagctgccactccaatgcaggatgttcggcttacaattgattggtttatttcctctcaggaatgtgttcccaggacttattgtgttttaaatccacaaaatccttttgtgttgaataggtggatggggaaactgactttcccccagggcacttcccgaagtgttaagagaatgcctctttctatagggggaggagctggtgcaaagaatgctattctcatgaatatgccaaatgctggtctttcaatgtggagatattttgttggagatctcgtctttgaagtttctaagatgacttctccctacattaaatgtacagtctctttcttcatagcatttggaatattggctgatgacaccatcaattttgaggctttttctcacaagctggtgcattttggagagattcatgaaaaaggtgtattgaaattttcacaagagga

SEQ ID NO: 41323 - DNA, 387 bp, Glycine max
  unsure (1)..(387): unsure at all n locations
cggcccaggcacgcgtacgtaagctctnaattcggctctaggctttaataaactcaaagccatgaagtttggttgcccacttataactccagtttttgatattctcttgggaatctctcaagattttgaaattgctggtaatactcttatgccagctttttctgttccacaggctactgccagatcttctgaaaatgctgaatcctctgcatgatctggaattcgtgttttctttcgcttgttcgtttgtttaattcaataaaggaaattaggcatgaccctcttgtttagtatgctctgcctatctgaaaattttcacacctcttttaattttcttaatgatgtgtgaagtgtgttgttattttaaaaaaaaaaaaaaaatgtctt

SEQ ID NO: 41324 - DNA, 394 bp, Glycine max
cacgcgtacgtaagctcggaattcggttcgagcagctacctccctccaacagggcaaggttcttctctgcctcgacgacggcggtgtccatgccgagcaggagcctcagcttctcggtactaccgagaacgagctgggcatccgcaaatggatcgaggagcagggtcacactctcgtcaccacctcggacaaggagggccccaactccaagtttgagaaggagctcgaggatgctgaggtcatcattaccactcccttccaccccggctacctcaccaaggagcgcctggccaaggcgaagaacttgaagctttgcgtcactgccggtattggttccgatcacgttgatctcgacgctgccaacaagaccaacggtggtttgaccgtcgctgag

SEQ ID NO: 41325 - DNA, 401 bp, Glycine max
atgcacccgtccgtaagctcggaattcggttcgaggcacaaagtgtgttagctggtactggaacagctgcagtggcagtgaaatatgggggacctatggatgtggccaggcaagttctcaggtcagaagggggcgtaaaaggtcttttcaagggcttggttcccaccatggcacgtgaagtacctggaaatgctgcaatgtttggtgtatatgaagcattaaagagattacttgccggtggcactgatacctcaggactgggtagaggttctctgatgctttctggaggcttggctggagctgctttctggctcgcagtttacccaactgatgtcgttaagagtgtgattcaagtagatgattacaaaaacccgaagttctctggttcaattgatgctttc

SEQ ID NO: 41326 - DNA, 316 bp, Glycine max
gcgtccgtaagctcggaattcggttcgagatcatttgtgtaattggggggactgccaccccaatgcaggaggttcaggttccaatggatgggttaatttcctctcaggaatgtgttccaagaacctattgtgtttaaaatcaacaaaatctttttgtgttaaatggggggatggaaaaactgactttcccccagggcacttcccgaagtgtaaagagaatgcttttttctataggggggagggagctggtgcaaagaaatgctatttctcatgaaatatggccaaatgcttgttcttttcaaatgtgggaagatat

SEQ ID NO: 41327 - DNA, 361 bp, Glycine max
gtatgtggtaatgttggatcaggcaagtccagtttactttcttgtatagtaggggaagtaccaaagatatctgggaccctgaagatatgtggtacaaaggcttatgtttctcaatcaccatggatacagagtggcaagatagaagacaacatattatttggtaaagagatggatagggaaaagtatgataaggtgctagaagcatgttccttgacaaaagaccttgaggttctaccatttggtgatcagaccactatcggagagaagggaatcaatttgagtggtggacagaagcaaagagtgcaaatagcccgtgctctataccaagattctgatgtatatctgtttgatgatcccttca

SEQ ID NO: 41328 - DNA, 399 bp, Glycine max
acggccatgcacgctacgtaagctctgaattctgctttagcattgttttatatgttaactctgatacaccgcgtgaagcttgcttattacttcaacattcctggaatctacagtgttgactcaatccaaacccttccttctgaaagtactcctgcatccatagccacctccgtagtgccaacttctctccatgatttcattgaggttgtttttcagaacaacgaaaatgccatgcaatcttggcatcttgacggttatgacttttgggtcgtgggttatggtttttggtcagtggacaccagccaaaagaaaaacctataatctatttgatgctcttaccaggcacactacacaggtatacccatatgcttggactacaatattggtgttcttggacaa

SEQ ID NO: 41329 - DNA, 399 bp, Glycine max
cacgcgtccgtaagctcggaattcggttcgagctcaccattttaaactaaagggtgatccttaatcttcggctgccttatctgaaagtgaagagtcaggggtggctgatgttaaaccaaaagaaaagggtgggaaagcagaagagatagaccagaaatctggacaaaatgttcaaaaggtgtctaatatggtattgccaacaagaaagaataagcttgtttctggggaagaacatggagatggtgttcggaggcaagggaggacaggacgcaatcttgctgccacaaggtcaatgattccaatgacatctgagaagcttgggaatataggaactgcaaaacaacttagaagtgcaagactaggatctgataagaatgaaagcaaggcaggtcgtccacc

SEQ ID NO: 41330 - DNA, 297 bp, Glycine max
cacattcaataacaccattagaaccacttcggggagtggtgatgctgccttctttagctttcactccggctcatcatagagaaagccatgccccagacgaagatcattgacgtgctgtttgaccacacactccaatgatatgataattgagagagcttgtaaagcctgagcctcaaagagttgaaatcgatgatcacactatgcaaatataagaaacacagtacccgaaaacctgctgctataaagaagaccttcatacaagcaaaacaatgaaagtacaattcatcaagcctccct

SEQ ID NO: 41331 - DNA, 482 bp, Glycine max
  unsure (1)..(482): unsure at all n locations
agctcggaattcnactcgagcctatgaccggaaaactatgagtgatgaaagacgatggcacggagttaacttcgttggtgttttaccgattttgcggcgcttccnacncatggcggacagttcattcagtacaacatatttggaaacctcttcgaggttacgacgaagtaccgtcctccgatcatgcctatcggacgcggcgcgtacggaatcgtttgctcactgttgaataccgagacgaacgagctggtggctgtgaagaagatagcgaacgctttcgacaatcacatggacgctaagcgtacgcttcgtgagattaagcttcttatgcatttggatcatgaaaatgtaatctggttgagagatgttattcctccacccttgcgtagagagtttaatgatgtctacatagccactgaactcatggatactgatcttcaccatatcattcgcttcaatcaaatactgttagaggagcactg

SEQ ID NO: 41332 - DNA, 369 bp, Glycine max
  unsure (1)..(369): unsure at all n locations
cgcacaatgtcacaatngttgtctctaaacagatagctaagcgttgttgtgtattcatacgatatgagggctccatacactgatactattaacaacctaacctttcatccaaaacaggtaatcgaagggcgagatggaggacgtgacgccatgaacatactgtgatccagggattaacggaaaagaatcaggacggattgtgatggatctatctggaaaagcagatccaaaagactgcagaaagcttaagagctctctgcactgtgaaaaagtggactgtttaaacaaacaagcctgtacatgtcacagggtgcgcattccatataataattcctagttttatgctccaaggaggtgattatacacatg

SEQ ID NO: 41333 - DNA, 314 bp, Glycine max
gttgaaagaaggaaccaagatgttaccatggctgaacagagagcctgatgcatactggaaaggtaatccagttgttgctgaaaccagacaagatctcatgaaatgcaatgtttctgaaaatcaagattggaatgctcgtttatatgtacaggattggggacgagaatcacaagaggggtacaagaactcatacttggcaagttaatgcactcacagatataacgtgtacatctgaaggttctgattggtgcgcatgtaaaaatgctatggtgcatgatgactcactgactacactaccaaatgatattgctatt

SEQ ID NO: 41334 - DNA, 419 bp, Glycine max
ttggaagaaaggtagtttattggacaagatggggatgtctgggggtggagcattcaaaaggagtgattggacctcattggtacaagtgttggtaacatacagctacagtgcagagcattttgatgcatgtatgtggacaaaatcagaaccacattcctgggaatcaattttgccaatagaggtatgtggtcctaataatggttttgaaatgtggagttctgcgtgggcaaatcaaacttcatggcatttgattttgcttattgacaatcctaaacagtctacagttattgatattctgttgcgaatctctcaagattgtgaaattgctggtaatactcttatgccagctattgatgatgcacaagctactgccagatcttgtgaaaatgcggaatcctatgcatgatctggaattcgtg

SEQ ID NO: 41335 - DNA, 259 bp, Glycine max
gttaagcatgtcgaccacgtcaccaacgatcgctacaatacttgtctggatcttcctcttgagttacaggttcatgtacacgctcccgatcccagtgctagtgttagtgtgtttggcgtctcagcagaatcaatgcagtgttcctatgattcaaaaggaaacagtgtccccactattctactgctaatgcaagagcgattatactcacaaggtggcctaaaggctgaaggtatatttcgcattaatccaaaaaacagtc

SEQ ID NO: 41336 - DNA, 532 bp, Glycine max
  unsure (1)..(532): unsure at all n locations
gagctatgcaggaaagtattttccagagctggctgaactcatccgtgatggaacaaggacccctccctctatattgatctcaagggtattctgttgggtaaccctgaaacatctgatgctgaggactggatgggtctggttgattatgcttggagccatgctgtgatatctgatgaaactcatcaaacaatcaaaacaagttgtgactttaacagtactgatccatggcacaatgaagattgtagccaagctgtggatgaagttctcaaacaatacaatgaaattgatatctacagtctctacacctctgtctgctttgccagtacagcaagttctaacgatcaatccatgcaaacttccacgaagcgttcatctaaaatgatgccaagaatgttgggtggctatgatccatgcctngatggctatgctaaagcattttataataaaccagatgttcagaatgctcttcatgccagcgatggtcacaatctaaagaaatggagcatttgcaacgacaagatattcaatgact

SEQ ID NO: 41337 - DNA, 321 bp, Glycine max
  unsure (1)..(321): unsure at all n locations
caaggaattcaaattccagggagtgattgtactttgcacctcgttggaaaagaaaggccctcctgttgctgttcctgttttaggagagggaaccacaccaacttggaagatttgtgcccntgactttatttcatgcttttttttgattttttatctcacaacatatagaccgggaaaaatacacttttttttttttaaacctccaattatgcttttacaattcttcaaaaattttgtttctttgtgtgtgtatggtgatgataacttaattagtgttcatgaatatgtcaagcccccncttttttttttttttaatttaat

SEQ ID NO: 41338 - DNA, 297 bp, Glycine max
ccctgcactcaaaaaggcagccattgttatatcttgtgctgatccaactgatccacctcggagtgcatctgatattgttttaaaagaacctagtcttagtgttattttaagtgcagtgttgacaagccgagctatcttccagagaatgaaaaattatacaatttatgctgtctcgattacaattcgtatagtacttggtttcatgttactggctctcatatggaagttagattttccaccttttatggtgcttattatcgccattctaaatgacggtactatcatgactatttcaaa

SEQ ID NO: 41339 - DNA, 371 bp, Glycine max
gtttaacctttccggttggtttggccaaacctggggcaccttggcagtttagaaagttagcagatggtgattttctcaaaagaaactttaagcagatgtctaatgttttgtgggtggctcctgaggacaaggcgagtttatggcacaactcattatggttcgtgtataatctgggaatgcagaaagctatcttgtcatctcgtaatgtgtacgagattgtattgcacagtcagagaaagctcgcattgaaaaagaagctctctctcgtttgaatggctgcaaaagctgatgtgctccatacacagatgaagagtcattcatcagagatatgatgctctgttcaatgtatatgactctgtgacatgattgtg

SEQ ID NO: 41340 - DNA, 446 bp, Glycine max
aagagcttgacggcgatgcacgcgtcgtaggttgggatttggcttgaggctcaagccgaatcggttctagattgactttgtcatttaatccaaacgggtgttctgttgcatggagttgggaatttttgaagcgtcccggttttcattgggatatcattggtgtcactgggtggactgccaccccaatgcaggatgttcaggttacaattgattggtttatttcctctcaggaatgtgttcccaggacctattgtgttttaaatccacaaaatccttttgtgttaaataggtggatgggaaaactgactttcccccagggcacttcccgaagtgttaagagaatgcctctttctatagggggaggagctggtgcaaagaatgctattctcatgaatatgccaaatgctagtctttcaatgtggagatattttgttggagatctcgtc

SEQ ID NO: 41341 - DNA, 463 bp, Glycine max
  unsure (1)..(463): unsure at all n locations
gcttgtcgncgcaagcccgccggcggtaggctgggatttcgcctcaagtcatcatcggcctcgtcaagttcgccaatgttgacatccgcgtccgggggaccggtggtggtcacacctcgcanatgtccgctgtgcgccaggctatctccaaggcgatcattgcctactacgccaagtacgtcgacgagcactccaagaacctcctcaaggccagcctcgtcgcctacgaccgaaccctcctcgttgcggaccccagacggtgcgagcccaagaagtttggtggtaggggtgcccgtgcgaggttccagaagtcttaccgctaaactggatgctttggcgctttgcgtttgctacttactttggggctggcatggtcacggaatttagagatggccgtcaattgggtgtatggatcaaggatgcatctcggaatcaaaaacagccgcgatacccattcctgcga

SEQ ID NO: 41342 - DNA, 405 bp, Glycine max
cactgtttcacctacttgacacaatattcctcacccctagcaggaatggcttcctatctcagccgcgccgctccgcgcgccttctccagctccctccgcgctgctgccgctgcccgcccagggctccgcaccgctcagcgccccgcagcaccgctcttccgtcgcttcttgcagacgcccgctgagcagccccgcctgcgcctgggttcgaccggtaccgccctctcgtaatcaacattgggtgggcaattggatgaagctgacggtggtcgccccccacagctcctaacttcacggccaagacaacccatggcgatatcgaattccacaaatggatcggcgacagctgggccatcctcttctcgcacccagccgacttcacgcccgtgtgcaccacggagctgg

SEQ ID NO: 41343 - DNA, 329 bp, Glycine max
ctcgagcctattcggctcgagtaagatttgaaatgtgggtgaaccgcgatcacaggttgccgcaccttaaaaccgggaacaaaagcaatcggtacttgatctcaagaatttctcaatttcttcctactgctacgtgtacgattttttaagggaaagaaaatcactctatgcgctggttacagacttaatgaatcatcgtcttctccactcctagcatagtggctgaactccttactatttattttaggactccctgatttatgtgtaacccgaactgccgcttccgtatttactatgatcgcctcaagaccttgttgacctaccggagc

SEQ ID NO: 41344 - DNA, 368 bp, Glycine max
gttgcaggacactagcattgttactcctgagaaccaccctatccatcttcatggctacgatttctacatcgttgctgaggggttcggaaacttcgacgccaagaaagatacggccaaattcaaccttgttgatccacctttgaggaacactgtggccgtgcctgtaaatggatgggctgttattcgatttgtcgctgataaccctggtgcctggcttttgcattgtcacttggacgttcacatcggatggggtttggctacggtgttgttggtggagaacggagttgggaagttgcaatccatagagcctcctccgctggatcttcctctttgttaggatatcatttcaaaataatcgttggtcccca

SEQ ID NO: 41345 - DNA, 336 bp, Glycine max
agctgatgcaatgactggtgatatgaccaccatgccagacactggcactggaatgaacccatctaggagtgtagaagctgctgttatatacaaccaaaatacgccatggtacgaccaatggaccttttgtgtaggaaccataattggggcagtcattgcagactccaaccaccaggtgatttttagagccagggcagcccaggccgtagagtcattcaagagtaacccccataaatgagaacactatgtatttatgacaactggtctagctgaaagacgatcatgagcaacattgagggctatatggcaagcataattatgtgcaatgcttcatga

SEQ ID NO: 41346 - DNA, 383 bp, Glycine max
gggagaccgctggatgcctgcacgccgactctagagatcctctggctgaaggccaatttcacattttcaagaaataacgacgcagaaactgttcatatatgaattggaatcattcgctttcttattaggcctatcctgaagccaaaggaaatgagatcggaattcctcgacgaattccaattccacattttcaagaaataaagcggcacaaacgttcatatatgaattgtaatcattcgctttattatttagcctatcctggacccaaaggaaatgatatccgaattcctcgccgaagtccaattccacattatgaagatataaggaggcaaaaatgctcatatatgaattgtaaatatctaggctcttattaaggctatcct

SEQ ID NO: 41347 - DNA, 378 bp, Glycine max
atttgaagtatgataaaaatgtctccagcctatgggaggaactatgggaagaatacacaagtggggaacgaatcactctccacttgtacttgggagaaattgtttcacttatttgtgagggcatgtcatcatcatcatgggcaagtaaaagaaaatctgccgaggctatatgcaggcttagtgaagttttgggtgaatctctttcttctcaccatgaggttttgcttcagtctctcatgaaggaaattcctggtcgcctatgggagggtaaagagatgctattgctagcagtaggtgctctatgtacatcctgccataaagcaattttggctcaaggttcctcatcttccattgccattctgaatttggtatcatctg

SEQ ID NO: 41348 - DNA, 377 bp, Glycine max
ggctgaagttcaaaagctagaagctgatagatttcaacttgcaactgagatagccactactggtgacagttctctgtttctacctgttaacctgaagagacttatctggaatgctcagaagacatttaaggttgacttccgaaggccttctgatatgcatccaatggagattgtggaagccattgataagctccaggagcgacttaaggttgttcctggtgaagatctcttgagtcaagaagctcagaagaatgctactcttctgttcaatattctgctccgcagcacttttgccagtaaaagggtcttggaggaatacaggctttctcgtgaggcatttgagtgggtagtgggagaaatagaatcaaggttcttgc

SEQ ID NO: 41349 - DNA, 378 bp, Glycine max
cggctcgaggtttgatcaatggtttcttccctctcctcatggataatggaaaaccaaacccaaaacttaaattgaagttccagttatggttcaagccggcagaattagaaccaagttgggcgaagatgttgagcaatgactgggaatttcaagggctgagggaggctaccttcccactaaggtccaattgtcaggtcaaactttaccatgatgctcaccattcttctgcttttcaacctccatttgatctatgtggagctccaaaaaagctatgggaggatgtctataaagccattgagggtgcaaagtatttagtttatattgcagggtggtccttcaatcccatgatggttctggttagagatcctctcacagaaa

SEQ ID NO: 41350 - DNA, 344 bp, Glycine max
gtatgctctgcctatctgaaaatttccacacctcttttaattgtcgtaatgatgtgtgaagtgtgtgttattttaaaaaaaaaaaaaaaaaaaaaaaaaaaaaaaaaaaaaaaaaaaaaaaaaaaaaaaaaaaaaaaaaaaaaaaaaaaaaaaaaaaaaaaaaaaaaaaaaaaaaaaaaaaaaaaaaaaaaaaaaggggcgccccccccctaataacctcttcaccccggaaataaattccgacccggaccctgaaggcgacccaattttcctaataagaaggcgattaaaaccttggcgaaaaaatggcaaaaactttttcctgggaaaaattgttatccctt

SEQ ID NO: 41351 - DNA, 376 bp, Glycine max
ctcgagccgattcggctcgaggttgggtttacaaggagcaggtaaagcttttccaaacaagattgtttttgatgataagcttgtgttggctaacacacaagaattctttgatggaaattttccagtggattcttggttaccaatttttgtgaattgtctttatcctgtaagtcaattacctccagaagctgtcgttgtaaatgttacatgtggtagtggacgtggtggtttacccaccactgcttggattagttctgcagttaacaatcgctcctcagatatcaacaaaaagattcgcacagcacttgggaaaggtaagaaaattgtttttcttactagagttgatccttttccagtagctttactggctgttctt

SEQ ID NO: 41352 - DNA, 376 bp, Glycine max
aggagagttgtctctcttctcattaatagaaatcagcgtggcatatctgatagatcaatcagctatgccaatgatgtgaaacataaccaaacttggctttccgaaatagaagaggaagccaaaaaggggatacctcttgatatgtacctcattctaggagttgaacattctggttcggcatctgaaatcaagaaggcctatcacaaagctgcacttagacatcatccacacaaggctggccaatctttggcaagaagtgacaatggagatgatcagatatcgagggatattgttgcagaaatcagcaaagatgccgctaggcttttcaaaataattggagaggcatatgcagttctgtcagacactggcaagcgtt

SEQ ID NO: 41353 - DNA, 362 bp, Glycine max
atcggaactggttcggatcaaaatgacatcagggggggtgctggtgacctaatgcaggatggtatagcctccctagtcatctcccttgattcttgggaactttttgttgagcaatcataagcctacaaggagagtgttttccctgctgctgcttcagccagagttagctttgttgcatgatcaacatttggttgggagaaaattgttggagcaaatggaaaagcaattggcattgttcgttttgttgctagtgctccatctggatagattttacaaagaattttgtttcactaaagtagcttctaactgctcccagttatgagcttttttattactttttattttttttgccttctgttttt

SEQ ID NO: 41354 - DNA, 377 bp, Glycine max
ctcgagccgcattggttggaataactggagtgatatcggaaatccagaaagagaagaagggacgagatgtttacattctgggttcagctaatgttgggaaatctgctttcatcaatgctttactaaaaacaatggctataaatgatccagtggctgcatctgcacaaagatacaaaccaatacaatctgcagttcctggaactaccttagggccaattcaaattaatgctttcctaggaggagggaaattgtacgacactcctggagttcatctctaccataggcaaactgcagttgttcattctgaagatctacccatccttgctccacaaagccgactgaggggcctgtctttcccaagttctatattatcttca

SEQ ID NO: 41355 - DNA, 374 bp, Glycine max
ctaagatccactcaatcaatggaacagtcaatatgttgtactaatatctggcaagtctattgaagggtgaatgatggcatgaacattgctattaactctaaaatcagggaacgagggacacacactcaagctaagagaccaaatttacaaggctactgtaaacacatagattgaacaagacccatacagcaaggttgccagaaaaacatgcaccaagactaactaggtgatgggcattcatagcgatcagcagcacagccaaactggactccccacagatatgacgtgacacgttccggaccatggggtatgggtgaaactatgtgggactaggtgctgacaactgcatggtcctagtgacacattgagcagga

SEQ ID NO: 41356 - DNA, 387 bp, Glycine max
taacagtggtgatgggagaaatataaagagcggagatgtccacaactaggctggagaaggaagaggaattacctcaaggacagggcccaatcgatctttgttaatcatcttcgagctatgaagagagaatatgatgagtttaacgtttggatcaatgcacttgtggcaaaagctcaaaacgttcctcaaggaggatactattatgcaatatggtgacaccatggcctggaaataatactattgatcatcctggattgattcaagtctttcttggtcacagttgaaagtcatacatactgaacgaaacgtgcttccaagtcatcgtttatgtttcccgtgagaaaaggcctggattccaacaccacaagaaagctggtgctatgaatg

SEQ ID NO: 41357 - DNA, 376 bp, Glycine max
tggttgtggggggttcaatacggtggcgtttagcgaagaggtatgcgatgatgtgagggcgttgttgaggaggtatagggaagggtgggcaatgacacagtgctccgacgccggaatattcctgacgtggaaggagcagccggtggtgtgggccagtgcatggagggccttgacgtagagtagaggagaatgacttgacgtgagtaaggtgttgagggacggattcccacgtgctctctgttccggaaacacgtgcccaacgctgagggttctttttttcttttttcttttaaggtaattaattaatggctttttttacttccctgtttgagtttgctacgtaaggcagtgggaataattggaaaggtttgagggt

SEQ ID NO: 41358 - DNA, 407 bp, Glycine max
ggctgatttaaaccctgatccatcagacatactctctcctgtggatgctgatggccatggcactcacactgcatcaactgttgcaggcaatctggtcccaaatgcaaatctcttcgggttggccaacggaactgctcgtggcgccgtgccatcggctaggttggcaatttacaaagtttgctggtcatctagtggatgtgcagacatggacatacttgctgcatttgatgctgctatacatgatggtgtggatgtaatatctatttccataggtggagggaatcctagttatgttgaaggctctatatcaattggtgcattccatgccatgaggaaaggtataatcacagtggcctcagctggaaattctggtccaagcctgggaactgtaaccaatactgcaccat

SEQ ID NO: 41359 - DNA, 347 bp, Glycine max
  unsure (1)..(347): unsure at all n locations
ggagttccgcttggacgttgcttctctttctcatctggttcctctcctcaacaacaacaagcaccactgactacgcttgcaaattctcccagtcccaccccttctgcgacacttccctccccactctcacacgtgcgcgctccctcgtgtccctcctcactctccctgagaagatccttcttctctccaacaacgccttcttcatcccccgcctcggcattcccgcctaccagtggtggtccgagtcccttcacggcctcgccctcaacggccccggcgtcttcttcgccggcgccgttcccttcgccaccagcttnccccaggtcattcttttcgncgncttcttt

SEQ ID NO: 41360 - DNA, 311 bp, Glycine max
agagctctgacggcgcctggccgccttccgtaggctcggatttcggttcaggggattcaattgcattttcattggtgcaacgggagggccggcggccccaatgcaggatgttcaggttacaaaagattggttattttcttttaaggaatgtttacccagaacctattgtgtttaaaatcaaaaaaatccttttgtgtaaaataggtggttgggaaaattgactttccctcagggcactttccgaagtgtcaagagaatgcctatttctatagggtgaggagctggtgcaaaaaatgctattgtcatgaata

SEQ ID NO: 41361 - DNA, 157 bp, Glycine max
cttcaacatgtaccttggttgaagatgatagcgggacgaatactacgagcagggttgataccagtgccggtgatagggatggtgctgttatcatctttaacaaggaccttggttgggatgatcactggatcttatgggtgggaccttttattggtgc

SEQ ID NO: 41362 - DNA, 351 bp, Glycine max
acgatgcacgcagtcgtaagctcggaatttaggctcggaggaaatggtctttatattttcaactatttgagactgccacagggtttatcactgtgttagtagttgcatttatgatgcaagaaggaacctcaaattattttaaagggttgatgcttatactatgctatctaatagttgctgccagttttttcgtacatgttgaccctaaaagtggtgatgactaaatatttagtgtaggtgtggcagttgcaatgctgcttttttttaccactttttttaacaaaaaggtagttagctgggattttttaatagggttcaggatagtatttttgttatttatcaatttttttt

SEQ ID NO: 41363 - DNA, 378 bp, Glycine max
tgattcgtttttcctacaaaacgtgagagaagaatcggacagacacgggttaaaacgcctacaaagcatccttctttcacaaatacttaagaaggaaatcaacttagcaagtgagcaacaaggcacttcgatgataaaaaataagctcaagggaaagaaggttctcttagttctagatgatgttgatgagcacaagcaattacaggcaattgttggaaaatctgtttggtctgagtctgagtttggcaccagattggttctgatcatcaccactcgggacaaacaactcctaacatcttatggggtcaaaagaacacatgatgtgaaagaattgtttttgatagatgctttttaattgctttatctgaaaggttttta

SEQ ID NO: 41364 - DNA, 348 bp, Glycine max
gagcttgacggcgcatgcaccccgtcctaagctcggatttcggctcgagccaaaccctcatcaacaacaacattcttcgaacaagggcagaattaccaaaagccccataaaacccattttttcctcgccctcgacgaagtcaaatgcgtagccaacatagcattacccatggtgctaaccgggttactactctattctcgctccgtaatctccatgctcttcctcggtcgcgtcggtgagctcgccttagctggtggctctctcgccattggattcgccaacatcacgggctattctattctctcgggcctcgccatgggcatggagcccatttgcggccaggctttc

SEQ ID NO: 41365 - DNA, 378 bp, Glycine max
  unsure (1)..(378): unsure at all n locations
gctttagtgntccactaccaatggtgattttgatagtaagatttatctcgcaatggttaatgccaacgtagcatgtgctgctgttggcttgacatcaagttacactccaactccattgttggaatctggtttgctaaaagacagaaggtttattgtggatgtattctgtaaggatttcttttctttttttttacttttatttatcttttattcttcttcttcctcattgattctttatttccttattttttattttttttaccatttattgttaggtggtggattcgttcattcattttttttctattcttattttccttttactatctttctttattttttttaatttatttaactttatttcatattattttatta

SEQ ID NO: 41366 - DNA, 221 bp, Glycine max
  unsure (1)..(221): unsure at all n locations
gcgtacntaagctttttattcttctctagcggtnctgtcaaaaagtcgncaaaggaaatcacagccctttttgttactacaagtgcaccaatccatggtgcacggtcaggaagcatgtggagagagcatcacatgacctttaatctgtaatcacaacatacgatggataacatatccatgatgttcctgctgcttgtgccagcattcacgttaactcttat

SEQ ID NO: 41367 - DNA, 374 bp, Glycine max
gaaagatttgttagagggaaatttgtccttgggtgtgaaatctcgctctagatgggaaaaagtttcctctacaaaagcacaatttgtcaggggaaaaacccgcaaatacgatataattggtgctggttcacattcttcaggagattttcctgcaaaggaagatcaagaaaaacccaaaaagattgataccggattgagacatagaatagatcctcaatacaatgaggttctcgctgcagatggtaacaaattattttaaatggactgctgatgatggtgaaactactaaaggttctatgctggatcttaaaatttcttaatctaagattgcactaaccaaggacacagtcggcggaaccattctgcgtaatgtt

SEQ ID NO: 41368 - DNA, 347 bp, Glycine max
aattttggtttttcaggttacaattgattggtgtgtgggctcttaggaatgtgttcccagcacctattgtgttttaaatccacaaaattcttttgtgttaaataggtggatgggaaaactgactttccctcagggcacttcccgaagtgttaagagaatgcctctttctatagggggaggagctggttcaaagaatgctattctcatgaatatgccaaatgctgttctttcaatgtggagatattttgttggagatctagcctttgaaggttgtaagatgacttctccctacattaaatgtacagtcttttttttcatagcctttggaaatttggctgatgacaccc

SEQ ID NO: 41369 - DNA, 365 bp, Glycine max
cgagcgagtagtttcaaagagaggatttgggattgggaaggcgagggattgcgctgcgtctcttcctcttctctttcgattcatccctcattcataatcttccaatccaacaacctcagcctcacactcacacatacacacatctgaacgcgtattcgtccctcccatggcttcaaagcgcatcctcaaggagctcaaggacttgcagaaagacccaccaacttcttgcagcgctggtccagtagctgaggacatgttccattggcaagcaacgattatgggtcctgctgatagtccttatgctggaggtgtattcctagtcactattcactttcctccggattatcctttcaaacctcccaagg

SEQ ID NO: 41370 - DNA, 360 bp, Glycine max
aaccaacatatccaatatatttgacacaggccctttatccattgcaggagccagtaactcatagcctatggatgacaagctagtcaaagaccaagtcttactcgtaccagtaacctgtggttgcactggaaaccgctcttttgccaatatctcctatgagatcaaccaaggtgatagcttctactttgttgcaaccacttcatacgagaatctcacgaattggcgtgcagtgatggatttaaaccccgttctaagtccaaataagttgccaataggaatccaagtagtatttcctttattctgcaagtgcccttcaaagaaccagttggacaaagagataaagtacctgattacatacgt

SEQ ID NO: 41371 - DNA, 355 bp, Glycine max
  unsure (1)..(355): unsure at all n locations
tcactattttctttacggagccaaatcgtgtgacgcgagaggcgtttcaaatttgcgtatggtggacactgaggaaacactactgggccatttggaacgtgctaacgcagcaacttactacgttggaggacctgggggatggaccttcaacactaatgcttggcccaatggaaaaagatncagagctggtgatatcctaatcttcaactatgactcaacgacccacaatgtggttgctgtggacagaagtggatacaacagcttcaagacaccagggggtgctaaagtgttcagttcagggaaggaccaaatcaaactagcaagagggcagaactactttatatgtaactaccct

SEQ ID NO: 41372 - DNA, 346 bp, Glycine max
tttctgtgtcctatttttagagtaaaaactggcggttgtggtaataattagcttgtttacacaaaagaaaataaaataacttacgattaaagtattgaagaaagagctattaatcaaactgctgttttctgtatgcaatgtaagtaaaaccaagcatttcaagggagactctcattgctttcttttttgtgttaactactatctgtttcttttggttagggaaggaatattcttgaaatagaccatcccgaaggtccattcagcacgaaggaagcacctgctgttgtcaaatcttactatgataaaaggatagtcggatgcccaggatgtgaaggtggtgagtacc

SEQ ID NO: 41373 - DNA, 379 bp, Glycine max
ctcgagctttcattaactatgaccctcagcgtgacaagcgtggctcgggcaccgtcaagcttccccgtgtcccgcgtcccaacatgagcatctgcattcttggtgaccagcacgatatcgaccgtgccaagcacggtggtgttgacgccatgagcgccgatgatctgaagaagctgaacaagaacaagaagctgatcaagaagctcgctcgcaagtacgatgctttcatcgcttccgacaccttgatcaagcagattccccgtctcctgggtcctggtctttccaaggccggcaagttccctacccccgtctctcacgctgagaacctgtcggacaagatcacggaggtcaagtccaccatcaagttccagctgaagaa

SEQ ID NO: 41374 - DNA, 404 bp, Glycine max
ctacgacggcacgcgcacgcaagcctcgaattccggttcagggggtttttctatggcttttttttacctaatgaaccaggacaaaatcctgttggaaggctggtcctatttgaaagatccaaaccttgaagggggttttcctttaaacaaagcatatggaatgacagcctttgaataccatggaacggatccaaggtttaacaaggttttcaacaaggggatggctgatcactctaccattacaatgaagaaaattcttgagacctacacaggctttgagggacttaaatccctggttgatgttggtggaggaactggagctgtatacaacatgattgcctcaaagtttcccacctgttaagggcattaattttgatttgtcacatgtaattgaagatgcccca

SEQ ID NO: 41375 - DNA, 233 bp, Glycine max
ggtgattaaaaaaagcaaaatggtgaaaatttgctgcattgtagctggatatctggggggtcctactatggcagccattgcacttaagtgcccatccatggaaggggctggcgctgatatgtctaaatgccgcattgcagactggaacagtgaccagctgcctatctatgaacctggccttgatggtggttggaaacaatgccgcggcaagaacctgttatatagcactgatg

SEQ ID NO: 41376 - DNA, 412 bp, Glycine max
cggctcgagctcgagccgaatcgtctcgagcggctcgagtttggaaaatggcagtgagagtaacatatggcatgcaactgaaagccatttgaatgaatattcttcacaaggtttgcgcactcttgtagttgcctccagggatctttctgatgctgaacttgaggagtggcaaagcaagtatgaagaggcaagcacttcattgactgacagagctactaaactacggcaaacagcagctcttatagaaagcaatttaaagttacttggagcaactggaattgaggacaagctacaagagggtgtaccagaagcaattgaggctctacggcaagctggaatcaaggtctgggttcttactggtgataagcaagagacggcaatttcaattggtctttcttgcaaacttcttagt

SEQ ID NO: 41377 - DNA, 316 bp, Glycine max
atcaattcggatggtgatcttgaagtttatactttggctgttgagaaggttccaaaggaatggaagctcgatcctgattgggatggagagacaaaacatccacatgagttgagtcatttgagaaggtttcccagcaaatggagggcagccattgcccaccaggatccagttcgtacggtcaaaattgttgaccatttcgttattggacggacagataagaatgactgtgctactactgcacctaacggaccagttcaatgatttgttgatttggtttggtttatcctgtttgtaacattatttaggaagcaatttg

SEQ ID NO: 41378 - DNA, 457 bp, Glycine max
  unsure (1)..(457): unsure at all n locations
tatgacgtctgatgcacgctgcccgcagccgtaagctcggaatgcgggtcgagatatacgtggatgggaaaactgactttgcctcacggcacttcccgaagtgttaagagaatgcctctttctatagggggaggagctggtgcaaagaatgctattctcatgaatatgccaaatgctgttctttcaatgtggagatattttgttggagatctcgtctttgaagtttctaagatgacttctccctacattaaatgtacagtctctttcttcatagcatttggaaatttggctgatgacaccatcaattttgaggcttttccccacaagctggtgcagtttggagagattcangaaaaagttgtgttgaaattttcacaagaggaatttcttacagcttggtcaactcaagtgcgtcccgcaacgactctgttggctgatgggtgcccatatttgtatg

SEQ ID NO: 41379 - DNA, 467 bp, Glycine max
gcatgacgtccattcccccctacctaagttcgaatttcggttcgaggggttttgttgcatgaagtttgtaatttctgaagcgaaccggatttaattggaatatcatttgtgtcactggatggactgccaccccaatgcaggatgttcaggttacaatggattggtttatttcctctcaggaatgtgttcccaggacctattgtgttttaaatccacaaaatccttttgtgttaaataggtggatgggaaaactgactttccctcacggcacttcccgaagtgttaagagaatgcctatttctatagggggaggagctggtgcaaagaatgctattctcatgaatatgccaaatgctgctctttcaatgtggagatattttgtgggagatctcggctttgaagtttctaagatgacttctccctacattaaatgtacagactctttcttcatagcatttggaaatttg

SEQ ID NO: 41380 - DNA, 442 bp, Glycine max
gtttgattgtgttgatgaagaggattactttgaggaagtttctttaagcgcagcacttaatggtgtcgagggtttggactatatacaaagaatatctgtatccacatctgatggatcatctgatgtgctataacacacatatggtgaacctgtcagacggggaactgatattggatatcacctaaaggaaacagctgtggcgtactcgcaggagtctaaacttaacgaattgctgaagagatactctgaatttattaactctactatctatatttgggcaagcaaagaggatgatgtgcaggttcccgctgatgaatatgactccagtgatgaacactatttatctgtaagcagtttcaaggaggaaagcgaagatcaagatgctgataaaaattgagacgaagaaattatgcccaagacaaacacggttgaagaaacaact

SEQ ID NO: 41381 - DNA, 414 bp, Glycine max
  unsure (1)..(414): unsure at all n locations
agagaaacaaaaaatggaagaagggagaatggtggctttggaaggaaggaggtgtgagaagtaaacaaacaatgggatgaaggtgcagttccaccaaatgcaacattgcagattactcttgaattagtttcatggaaaactgtttcagaagtaactgatgacaagaaggtcataaagaagatcctcaaggaaggggaaggatatgagcgtccaaatgagggggccattgttaaagtgaaactaattggtaagctacaagatggtaccgcttttttgaaaaagggccatgatgaaaaagaagagctgtttgaattcaaaacagatgaggaacaagttgttgatggacttgatagagctgtattgactatgaaaaanggtgaggttgcgtngttgaccattgcacctgattatgct

SEQ ID NO: 41382 - DNA, 455 bp, Glycine max
gcatcacctagtgaccagaggcctctgcctcatagggtgaatgtcacagttgctggtgtgttaccaccttttcatgttcttaacaaggtgtcacaacttggatttgatgtgaacattggatatggcatgacagagactttaggtcctgtgattgtaagaccatggaaccccaattcggatggcgaacacacaaagctgaattatggtgtttcggagtttaggcaagatgttgatgtgaaggatcctgaaactggtgaaagtactcctcatgatgggaaaaccataggtgaaatcatgttcaaagggaatgctttgatgctggggtaccttaagaattcacaagcaaatgataaggcttttaaggggtggatggataggactggagaccctgctgttagagaaccaaatggttctataactatgaaagatagagccaaaggatgtcatatattcta

SEQ ID NO: 41383 - DNA, 300 bp, Glycine max
atgcacgcgtacgtaagctcggatttcggctcgagccatttgctttcatgtttatatagggcattgagagagttgaacatttcaatgtcctatctgaagatggaagccttttgacaatgcccccttgggtcaacccttggctgtttttggcaatgtcagtatcatttggtctgcactttttgatcttgtacgtgccattcttagcccaagtatttggtatcgtgcctctgagcttcaacgagtggctattggatttggttgttgcacttacggccatttttattgacgagattctgaaat

SEQ ID NO: 41384 - DNA, 304 bp, Glycine max
gactacgttacagatgctatctccgacgcttggtaaagtcacctgctcaggctgttctcggggccgcggtacactggctatggtgcccgtactacggaggtgaaatgcgcaagttggaggcttgctgtggaagcacacaacaatctttggctttgagaccattctctgaagagcgcgttgcagcaacaaaggaatacatgcatggcgaacaatttagatcagactccagaacagcttaccaacacgcttacttttatgcccgagaccttgaagtacattccaaggacacatttgtgttcagtat

SEQ ID NO: 41385 - DNA, 346 bp, Glycine max
gagaagtttggtaatgggaaaccaagtttggagctggttatgtgtgtacatgttacagcagcaatatattgcagcttgggtcaatatgctgaggcaattccgattcttgagcgctcaattgagattcctgttattggggaaagccaacaacatgcccttgctaaatttgctggtcacatgcaactgggagacacctatgctatgctgggccaacttgagaattcaataatgtgctacaccactgggttagaagtccagaagcagattttgggagagacagacccaaaggttggtgaaacttgtcggtacgtggctgaagctaatgttcaagctttgcaatttgatg

SEQ ID NO: 41386 - DNA, 412 bp, Glycine max
gacgcgatgcacgcgtacgtaagctcgaatcggtcgagcactgcacccttctctctcgcggtcgccgaatctttctccgcatccgcaacctccgccgtatgcgcctttgattcttcaaccgatggatcggccggcgaccggacctggcgtggacatgccgatcatgcacgatagcgaccgctacgatttcgttcgcgatatcggctccgggaatttcggcgtcgcaaggcttatgagggataagcagacgcaagagcttgttgctgttaagtatattgaacgcggagataagattgatgaaaatgttaaaagagaaatcattaatcacaggtctctaagacatcctaacattatcaggtttaaagaggtcattttaacacctactcatctggccattgtaatggaatatgca

SEQ ID NO: 41387 - DNA, 466 bp, Glycine max
ggacgtggtagttcccatatttctaaacatgagccgggtacaggccctgaagcgtctgaatcggcccatgaagttggacccggctgggctcatacaacaaatcaatttgctatgacaaagccgggcctggaccatatccgtttcatggggctatgcggttcaaattttccggggcatcttctcagcccgggaaatggagatgccagcaaggacattcctgaactggtacaagcgggcggattacacagcgtatccgttcaacacgcggccggtcagccgccatgtttgtcagaaaccgtttgtttattacttgtctagggcagtgtatgatgagggtgctaatgaaactgcaagtcaatatgtacgggttcagcaaaacccggaatgcaattggaaaatggaggatccaacccaaatcaaagtggtgcatgtttataagaaacccgacccgcatttgtgggacaag

SEQ ID NO: 41388 - DNA, 163 bp, Glycine max
tgttggtcgagataactagaatcagtgtgatgaaaatgaaggtcgctggtttcttcgttgctacaatttggggagcatggcattgccatgcgtacgatatggtgcctttgtcgatggacactggctatggtgcccgtactccggaggtgaagtgctgctgttg

SEQ ID NO: 41389 - DNA, 429 bp, Glycine max
taattccaatatcactttatgtgtccatagaacttgtgaaagttctgcagagtattttcatcaaccatgaccaggaaatgtattatgaagaaacagataggccagctcgtgcacgtacatctaatttgaatgaagaacttggtcaggttgatacaatattgagtgataaaactggtactttgacatgtaactcgatggagtttgtcaaatgttcaatagggggcattccgtatggccgtggtatgacagaagtggagaaggcacttgctaggagaggaaaagatgtggaatctgaagttgatgggggatcatctgatttgttgggtcagagtaatgactttgtggactctcggcatccaattaagggctttaactttagagatgagcggataatgaacgggcaatgggttaatgaaccatatacagact

SEQ ID NO: 41390 - DNA, 411 bp, Glycine max
ccaagggtaccttccctgaggtctacgtccccaccgtcttcgagaactacgttgccgatgtcgaggtcgattgcaagcacgtcgagctagccctttgggatactgcaggccaggaagattacgaccgtcttcgcccgctttcctaccctgactcccacgttatcctcatttgcttcgccatcgattcccccgattcgcttgacaacgtccaggagaagtggatctccgaagtcttgcacttttgccagggcctgcccatcatccttgtgggctgcaagaaggacttgcgctacgaccagaagacgattgaggagcttcacaagactttccagaagcctgtagctcctgaacaggccgaggatgtccgcaagaagattggtgcccagaagtacctcgagtgctccgcaaaga

SEQ ID NO: 41391 - DNA, 349 bp, Glycine max
gtgtgtatggtgatgataacttaattagtgttcatgaatatgtcaagccttacacacacaaagaaacaaaatttttgaaggattgtaaaaacatacttggagctttagcctggcgcagtaatttttttacaatccttcaaaaattttgtttctttgtgtgtgtatggcgatgataacttaattagtgttcatgagtatgtcaagccttactctcgtggtgctgaattgagaggctttgtacgcgtgcatactatgaccattactgatggtagtgacaaaactagtgcaactttgcactttagaatgctagcagattgtgattttctcacgagaaactttaagcatatgt

SEQ ID NO: 41392 - DNA, 319 bp, Glycine max
gcacgaatatcttgttgtttggagcgatccgagaaaaactctgtaaacatgttggtgtaccaggacctccttacaggtgatgagcttctctctgactccttccgttacaaggaaattgagaatggaatgctgtgggaagttgaggggaagtgggttgttaaaggagcagttgatgtaaacattggtgcaaacccttctgctgagggtggaggagaagatgagggagttgatgattcatcagaaaagggtgttgacattggcgtcacatatcgcctttaggagcccccccactgctgtcagaaacagcttgttacatgca

SEQ ID NO: 41393 - DNA, 329 bp, Glycine max
ccaacttgacaactaagcttgccccttttcttcataatgaactggtttggccaatgggttactgagtaagggcaacgatattctgtgttgcgattatgctagttttgatggttcgattaccaagcaagttatgagcaagatggcagaaatgataaacagtctttgtggtggtgatgaaaaactgatgcgtgaaaggacacacctgctgatggcttggtgctcaaggatggcaattcgccagaaagatggctggagagttgaatgtgggatcactactggatgtccgctcacagatgtctgtaatagcatgtttaatgcgatgctcatta

SEQ ID NO: 41394 - DNA, 214 bp, Glycine max
ccttgattgtttttcaaggcctgactgcaacatagatggtgcgatgcttttgggtggtactgatcataccaatcctgtaaatgcagttcgtagtatttttggtgcgcctttcaaaggcggcaggcccattccggtggttacatttccgcataccattgtgcggattgtaccaggcatgtatttaagggttcagcttttgagtaccactaccaat

SEQ ID NO: 41395 - DNA, 358 bp, Glycine max
ggtgtcaagtgggctatcgcccgcagcgccactgctgttggtctccctaccatcaggggcaaggatggcaaggtcaccatcgatgctggtccgccaatggagttccccgcccctttcggccgtgagatgagcaaggaggaggctttcatcgccgagatggatgctaagaccggtgcttctcttaagctgactatcctcaacgcttctggccgtgtctggaccctcgtggccggcggtggtgcttccgtcgtctacgctgacgccattgcctcggccggcttcgccagcgagctcgccaactacggtgaatactctggtgctcctaccgagacccagaccttccagtacgcccgcactg

SEQ ID NO: 41396 - DNA, 311 bp, Glycine max
  unsure (1)..(311): unsure at all n locations
caggctactgccagatcttctgaaaatgcggaatcctctgcatgatctggaatttatgttttctttcgcttgttcgttcctttaattcaataaaggaaaataggcagagcattctcaacaagagggntgaaccttacttccttaaaccaatcagaggagcggacaagcgaacgctaacatgagactctggacctgctgagtcaatacattaatgagaagggtagcttcggagatcttacccacggcaagacatcatttagttcacctgtgaccacttgtgtatctgatacaaccatgaacttgttttctac

SEQ ID NO: 41397 - DNA, 360 bp, Glycine max
  unsure (1)..(360): unsure at all n locations
gaagagcangacggcgcatgcacgcgtgctagagacatgggttcggggttttcttccaacttgtttgagcaagatggcanaaatgataaacagtttttgtggtggtgatgaaagattgatgcgttaaaggacacacctgctgttggcttgttgttcaaggatggcaatttgtaagaaagatgtttggagagttgaatgtggaatcccttctggatttccgctcacagatatttgtaatagcatttttaatgagatgctcattagatatagctatgaaaaattactgcgccaggctaaagctccaagtatgtttttacaatccttcaaaaattttgtttctttgtgtgtgtatggtgatga

SEQ ID NO: 41398 - DNA, 365 bp, Glycine max
cgtacgtaagctcggaattcggctcgtttgattagccattatgtttgcacacgatatcatccttgatgttttggaaaaattctaagatggcggtgaggattctaaaatacttcaatgtgattggatcagacccagagggcagattgggtgaggctccaagacctgaacttcgtgaacatggccctaaggcttacccttgctccactgcaaataatgctgttacacactgtccctgcttacttaaataattattaccagacaccggatggaacatgcatacgagactacattgatgtaactgatttggttgatgctcacgtgaaggctcttgagaaggcacaacctgctaaagtagggatctacaa

SEQ ID NO: 41399 - DNA, 332 bp, Glycine max
cctaattatttgaattatctatatcaatggacagtgccctttggaagtggctaaatttggaagggggtggcctacccctcgcaaggactttatgatacggaaacagcactgcctaatattagaaagctgacaggttttgatcatgggaattcgttcactaatctcttgtcgtggatccacatcaaatgaggaatcttgcacacaagcttctcaacaagtattgtttattgcaatattattttaaataacattcttggcaacattttttattttctgtaatttatgaaacactacatcttgtatcaattattgttaatgtggtgggggtaaat

SEQ ID NO: 41400 - DNA, 395 bp, Glycine max
atccgatctgcgaaattatctagaagtcaagacttccacaagaaccaacgtatcaaacttcacacagcaccgccaaaatgggcaaggacgataagactcacatcaacgtcgtcgttatcggccacgtcgattccggcaagtctaccaccactggtcacttgatctaccagtgcggtggtattgacaagcgtaccattgagaagttcgagaaggaagccgctgaactcggcaagggttccttcaagtacgcatgggtccttgacaagctcaaggccgagcgtgagcgtggtatcaccatcgatatcgctctctggaagttcgagactcccaagtaccaggtcaccgtcattgacgctcccggtcaccgtgatttcatcaagaacatgatcactggt

SEQ ID NO: 41401 - DNA, 320 bp, Glycine max
tttttaacgacttgcttataagatataactatgaaaaagtgctgttccatgctagagctaggaggatgcttatacaatccttaaaaaatttagcttctttgtgtgtactatggaaatgataacttaaataccgttcatgaatatgtcaagccttactttattaatcctaaacaaaaaagctttctatctggtgataatatcacccttactgatgagctagacaaaacgtgtgcaactttgcaaatccagaaaagctagacaattgtcatttttttatatataaactttaaaaaaatctcttatgttttgagggtgcttcc

SEQ ID NO: 41402 - DNA, 318 bp, Glycine max
ctggaatttgggctcgagtttttaaggagacgcttattagatatagctatgaaaaattactgggccaggctagagctccaagtgtgtttttacaatccttcaaaaatttggtttctttgtgtgtgtatggggatgataacttaattagtgttcatgaatatgtcaggccttactttagtggttctaaattgaaaagctttctagctggtcataatatcaccattactgatggtattgacaaaactagtgcagctttgcaatttagaaagttagcagattgtgattttttcaagagaaactttaggcagatgtctaatg

SEQ ID NO: 41403 - DNA, 348 bp, Glycine max
  unsure (1)..(348): unsure at all n locations
caaaagttattaaattttgtgattaccattatcaaaaaaaactgcgtgcggggttatcaagttggggtcaggccatactccatgcaatgcaacagatgggccaacagatgactgattaagttcaaccatattctgtgttagcattattctaatttttattgtttttttacctagcaagntatgagcaaaanggcaaaaatgataaacactctttgtggtggtgatacaaaatttatgcgtgaaaggacacacccgctgttttcttgttgatcaaggattgtaatttctaagaaagatgttagacgagttgaatttttaatcccttcaaaatttcctttcacagatatt

SEQ ID NO: 41404 - DNA, 201 bp, Glycine max
tttttaaccattttctttttacatataactatcaaagagtgctgttccaatcttgagctggaggtgtcctaatacaatccttcacaaatttacttctttatatttctttggaaatgataccttaattaccgtccatcaatatgtcaagccttactttatagaccctaaataaaaaacctttttatctggtcataatatcac

SEQ ID NO: 41405 - DNA, 225 bp, Glycine max
aaaaatttcaaaaattttctaaaattttgtggacgatttcttaagggaaagaaaataactctctgtgctggtgacagacttcgtgaatcattttcttttccactcctagtttatttgctgaacactctcctatttgatataggacttcgtgtcagatttaaactttttctggttctttctcagttctctgtttaatttcaagttcaagctggtgaaattttggat

SEQ ID NO: 41406 - DNA, 449 bp, Glycine max
  unsure (1)..(449): unsure at all n locations
gcatgcacgccgtacgtaagcttcggaatntcggcttcgaggcggnnaaaattgacttttcctcccagtggcactttcnnccgaagtgttaagacgaatggcgctctttctattagggggacggagcgtggtgcccaaagaatgctattctcatgnaatatgccaaatgctgttctttcaatgtggagatattttgttggagatctcgtctttgaagtttctaagatgacttctccctacattaaatgtacagtctctttcttcatagcatttggaaatttggctgatgataccatcaattttgaggcttttccccacaagctggtgcagtttggagagattcaggaaaaagttgtattgaaattttcacaagaggaatttcttacagcttggtcaactcaggtgcgtcctgcaacaactctgttggctgatgggtgtccatatttgta

SEQ ID NO: 41407 - DNA, 406 bp, Glycine max
agttaatgtagcatgtgctgctgttggcttgacatcaagctatactccgactccattgttggaatctggtgtgtgcaaaaagacagagggttaattgtggagtattttggaaggatgtcttacgttgctcataacgttaattagccccaagagaaagatttgttggtaggaaatttctcctttgatattaaattctcgctctagatttggaatatgtttatctctacaaatgcacaagtttttcgtctttttttctttttaccctaataatatttttttatctttttcaccactggttttgggtgtgggtgggggtgtattttttctcttctttttttttaaactctcttttttttcttctcttcctattctctccactccatttttttttttttctttcttccta

SEQ ID NO: 41408 - DNA, 291 bp, Glycine max
gcttggagcagttccctgacagcaaggttgcctgtgaaacctgcgaccaagaccaacatggtgatggttttcggagagatcacaaccaaggccaacgtggactatgagaagattgtgcgtgacacatgcaggaacattggttttgtctctgatgatgttggtcttgatgctgacaactgcaaggttcttgtcaacattgagcaacagagtcctgatattgctcaaggtgtgcacggtcacctcacaaagaggtctgtggagattggtgctggtgaccaatgtcatttgttt

SEQ ID NO: 41409 - DNA, 375 bp, Glycine max
  unsure (1)..(375): unsure at all n locations
cgactgccgcacctgctgttggcttgttgttcaaggatggcaatgtgtaagaaagatgtctggagagttgaatgtggaatcccttctggatttccgctcacagttatttgcaatagcatttttaatgagatgctcattagatatagctatgaaaaattactgcgccaagctaaagctccaagtatgtttttacaatccttcaaaaattttgtttctctgtgtgtgtatggtgatgataacttaattagtgttcatgaatatgtcaagccttactttattggttctaaatcgagaagctttctancttctcataatatcaccatttcctgtggtatttgtcaaaacttgtgcaactttgcaatttagaacgtttgc

SEQ ID NO: 41410 - DNA, 363 bp, Glycine max
aaaaagtaggtaaagtgcataggagcactagctaaacagtacgtagtgatcataagcaagcatactgatgattaatatggcaaccatggaagacatgagcaacatgagtggtgaaattacacttccagggttccgattccacccaactgaagaagagcttctggatttctatctcaaaaacatggttgttggcaagaaacttcgttacgatgttattggtttcctcaacatctatcagcatgatccatgggatttgcctggtttggcaaaggttggggaaagagagtggtacttcttcgtgccaagggacaaaaaacatggaagcggtggaaggccaaaccgcaccactgaaaaagggttctg

SEQ ID NO: 41411 - DNA, 225 bp, Glycine max
  unsure (1)..(225): unsure at all n locations
gaaccagacatttanttaagttttcagcttttgagtaccagtacgaatggttattttgttcaggggaacaatctcgcaatggttaaagttaatgtagcatgtgctgttgttggcttgacatcaagttacactccaacttcattgttggttattgtctcgcaaaaagacagattattaattgacgattattttttattttactttttttctttctttctacctttt

SEQ ID NO: 41412 - DNA, 342 bp, Glycine max
attgaggagtttattcttatgccaaatgtagccaatcttcgaaaggttggtgaccaattgtgtgatgaagaactatatgaggctgccaaaatcatatttgcctttatatctaactgggccaagttagcagttacacttgtgaagttgaaacagttccaaggtgcagttgatgcagcaaggaaagctaacagtgcaaaaacatggaaggaagtttgctttgcatgtctttgactcatactactctctttttctttccatatatcatgtctcttttattttttctactttgcgtgggggggggggggggttgttatttttttttttctcttttattcttcctct

SEQ ID NO: 41413 - DNA, 362 bp, Glycine max
cgcgaaaccggcgaaacacgccgccggcaaggtccgcatcctctgcgatggacggcgccggcgccactgacggcatcctcgccgcgaagtccctcgcgcacctagaggcctgtcttcgccggaagtcaggcgacgcgaacgcgcgcgtcgacgattgcttcgacgccggcgtcggctccggggtcggcggaggaaagaatactaaccacaaatctctggtcggcagaactatctaagcttgcagctaatgccttcttggcccaaaggatttcatctgtcaatgccatgtgagcgcgtgggggaggctaccggggcaaatgttcaacaggtgtcctattctgttggaacagactcaaggattg

SEQ ID NO: 41414 - DNA, 389 bp, Glycine max
gatttgttgggtttacaaggagcaggtaaagcttttccaaacaagattgtttttgatgataagcttgtgttggctaacacacaagaattctttgatggaaattttccagtggattcttggttaccaatttttgtgaattgtctctatcctgtaagtcaattaccttcagaagctgtcgttgtaaatgttacatgtggtagtggacgtgtggtttacccaccactgcttggatcagttatgcaggtaacaattgcttcttagacatcaacaaaaggattaggacagtacggggggagggtaagaaaatagtttttcttactagagttgatcctttccagtagctttattggctgttttttttggcgttaagaatgtaattctgagttcta

SEQ ID NO: 41415 - DNA, 343 bp, Glycine max
cttagttgtcatgttcgaatcaacccatactctatggaatggactggtttggtcaatagatgactgagttagggcatcaatattatgtgttgcagattatgctagttttgatggttcgattactaatcaagttatgagcaggatggtaacaatgataaacacaatttgaagtggtgataaaaaattgatgcctagaaaggacacacctgctgatgctttgtcgttgaagaatggatataagtaagaaagatgttatgagagttgaatgtagactatgttctgagttttcgatcacagctatttgttataacactatttatgagatgcgtattatatatagcta

SEQ ID NO: 41416 - DNA, 324 bp, Glycine max
acgcgtacgtaagctcggaattcggcttgagctgcgaattatttaatactgcttgcacaaaagcaatggctatgtcatttaatccagacgggtgttctgatgcatggagtttggaatttctgaagcgtaccggatttcattgtgatatcatttgtgtgactggatggactgtcaccccaatgcaggatgttcaggttacaattgattggtatatttgctatcaggaatgtgttcccaggacctattgcggtttaaacacacaaaatacttttgtgttaaataggtggatgggaacactgactgttccttagggcactttccgaa

SEQ ID NO: 41417 - DNA, 308 bp, Glycine max
cttgacctgtatgagacagcagaagccgtcgaagaaggtatcaacaaagacctcgacgctacccgcataggcaagttcgccgacatcaagacttccacacgggaaaccatcttactggcgatgatcgggctcgtcgaccacaagaagctgaagcccggtgacctcatcggtgtcaacaaggattcggatcttgttctagacacgctccccgtcgagtacgatagcagagtgaaggcaatggaagtcgacgagaagcccaccgagaagtacacggacgtccgaagactggataagcagatcgaggagat

SEQ ID NO: 41418 - DNA, 367 bp, Glycine max
  unsure (1)..(367): unsure at all n locations
gcacgcgtacgtaagcttcggaattcggcttcgagagaaagatctattctgaaggctcctttccgttatttccattcagcggattccatggttggcgacgagggcgtgcacggcaatggcggcggtggaccgttgcccgcccttgactttgacggaatacctccaacttggtgtgcgggacaatcaacacgcttccccgcttctggcaggggatcgcattttccacctttcctcgccatcctctacnggaatcgtcgcccgccgtcgctctcgttcaattagtgcgaatacaattgagagtgccggaatatggttggaccacgcagaaggtctttcactttctcaatttcattgtgaatggggttag

SEQ ID NO: 41419 - DNA, 191 bp, Glycine max
acattgcacgcgtccgtaagctcggaattcggttcgaggggcacaaaggttttagagcttgatagtagaaatgtaaaagcactctatcggagggcacaggcatatcttcatcttgtggacttagatctagctgagaggatattaagaaagcccttggattgagccaacaacaggttgaagaggagtcaaaa

SEQ ID NO: 41420 - DNA, 389 bp, Glycine max
aaaagaatcagattagagaaggtttcaattcccttcttgagcaacactggagtgcaactgaagaatctacacaagttctactttttcatgtgcaatgtgaatgaagcattcaaaaatatgcaccattcaagtttcaaaagtgttcccaaatttggaggagatgaacattgactactgtgatatggtggaattgccaattgggctctctgatattgattccctaaagaagctaagtatcacaaactgtcacaaactttctgcacttcctgaaggaattgggaagttgggcaatctggaatcactaaggcttacttcatgtactaaattagaagagttaccagaatcaatcacaagtcttagtgaactgaactttcttgacatctttgact

SEQ ID NO: 41421 - DNA, 323 bp, Glycine max
  unsure (1)..(323): unsure at all n locations
ctgatggacagcctcttctagcttcgggaggttcatctggtgttataagcatatggaatctggaaaagaaaaggctccaatcagttgtaagagaggctcatgatagtgtgatcacatccctacatttttttgctaatgaaccagtgctaatgagttcatcagcagacaactcgattaaaatgtggatttttgatacaagtgatggtgatcctcgccttttgcgcttccgaagtgggcatagtgctcctcccctttgcataaagntttatgccaatggaagacatattctttctgcaagtcaagatcgtgcctttcgccttttc

SEQ ID NO: 41422 - DNA, 415 bp, Glycine max
gtgctatgaatagttcttttagggggcgcgccagttctgatatttacaccatctgctctcaagactgtgaattgtggaatcctgcttgcacaaaagcaatgactatgtcatttaatccaaacccgtgttctgatgcatggagtttggaatttttgaagcgtaccggatttcattgtgatatcatttgtgtcactgggtggactgccaccccaatgcaggatgttcaggttacaattgattggtttatttcctctcaggaatgtgttcccagaacctattgtgttttaaatccacaaaatccttttgtgttaaataggtgatgggaaaactgactttcccccagggcacttcccgaagtgttaagagaatgcctctttctatagggggaggagctggtgcaaagaatgctattctc

SEQ ID NO: 41423 - DNA, 401 bp, Glycine max
caggaacgtcaaaggttcctttggagggttttaaggccttgcaaggcatctctggtccacaaaggtttcagattcacaaggcatatggagctcctgatcgacttccatcagctcatacttgcttcaatcaacttgaccttcctgagtatacctctaaggaacagcttcaagaacgtttgttacttgccatccatgaggctagtgaagggtttggttttggttgacctgtattttggtgcgatattttttttgcactgctgttccaccattggtgtctccaacttgtcatttggagaaggagtttgtgctgctattctgttgtgggcactattggtaagcatcccaatgagtcgatgaggcattctgatgttggtgatcaatttattctgatgttctcccag

SEQ ID NO: 41424 - DNA, 398 bp, Glycine max
cagaaagctctaagtggaaaaactaatgccgttgatggtgccagaagggttagagtacgcgagcgaggtttggccattccaggccctgaagccaatgtagagatccaaaataacgtagataggtggagagttgtgacccatgcaaatgcaaaaagtaagagtgagaaatttccacctcctgatcaggatggagctgttggatatccgctggatgattcaaacaaaagagctggttcatttggagccactgaaacttgctctgcctctaccatatttgattcaaaatcttggggatcggttacaagtcatgatgctgcaagagacaaagggaggaaaactagtaaagcagattcccagatggcatcatcttggaaatttatgcgttcattcaagctatc

SEQ ID NO: 41425 - DNA, 417 bp, Glycine max
aggaaacagacagtggggagagaaataggttgatagtgttgatcattatcatcgcagttggaggttgcttattggcactatgttgctgcttctacattttcagcttactaagatggcgcagaaggatcaaagcggcagtgtcaggggagaagaaaaagagtccaagaacgagttccggaacaagccagagccgtagcagcaccgacacaaacggtccaaaactcgtcatgttcaacaccaagatcactctcgcggaaacaatcgaagcaacgaggcaatttgacgaagaaaacgtgctgagcagaacaagacacgggttggtattcaaagcctgctacaacgacggaatggtcttttccattcgcaagctccaagatgggtcattagacgaaaacatgttcagaaaagaagcagagt

SEQ ID NO: 41426 - DNA, 336 bp, Glycine max
ctatagccctgcacaattgctctcttgcagataggattccggttctggccaatatcatcctgagcgggctacaattaattgtcctgttcatcatccactaattcacatgactgaaagaaattatgctagaacgccagatgtactcattgaatatgatgcatgtacaattgcaaatgattgactatcattggatgtcgccaacgatggaaatcacaaacaaatcgttggttttcatgttgctggacgcaacggaagactgtgatatgcttaattgataccatatgttgaacctgttgaacctgctcaaaacgctagacactactctgactttttaac

SEQ ID NO: 41427 - DNA, 403 bp, Glycine max
gtttgaaatttcttattcttaccggatttcattgtgatatgatgggtgtcactggatggactgccgagcccaatgcatgatgttcaggttacaattgattggtttatttcctctcaggaatgtgttcccaggacctattgtgttttaaatccacaaaatccttttgtgttaaataggtggatgggaaaactgactttccctcagggcacttcccgaagtgttaagagaatgcctctttctatacggggaggagctggtgcaaagaatgctattctcatgaatatgccaaatgctgttctttcaatgtggatatattttgttggagatctcgtctttgaagtttctaagatgacttctccctacattaaatgtacagtctctttcttcatagcatttggaaatt

SEQ ID NO: 41428 - DNA, 317 bp, Glycine max
catgaataaaatctggtgttgtatgtgagaggcatgcacagacagcaaggcctgtctttcttaccactagagatatatttcaaaaacagaaataatgttgaataatacgattgtgccgttgtgacaaataaaaaaaaaaaaaaaaaaaaaaaaaaacaaaaaaaaaaaaaaaataactcaaaaattttaaaatgaaaaacaggaaaataattatgcttaattaattttatggctgaataaacaaaaagaaacgctagctacaaatagctccaacgaaactcttataaagcaacaaatagtaggggggggggggcttc

SEQ ID NO: 41429 - DNA, 417 bp, Glycine max
cttgggaatctctcaagagaatatcaaaaactgtagacggcctgtggtggatgcttaagcgtcttaacacacctgaagatcataatgtccgcgctccactcgtgcgcataaataaaaattctgagtgaaatggtcctacatcaacaatagctgttccaataccacaaaggccctgtcatatgtggcgaaaactccgtctatcttatatgatacggaaacttcaagcctttccagctagccatcatgtttcgattacatcaccgaaactttcatatgacaaattcacagcctatccattcgctgtctcgagatggaaaggcacccaataatactaccaactgataaaggcagcgccaaaactttccctaactctcggtacccaaatgctctgcgagaactactccctaggaaaatcac

SEQ ID NO: 41430 - DNA, 334 bp, Glycine max
tctgcactgaagaaatacatgattgagaacaaattagccagtgaacaagagttgaagaccatagagaagaagatagaggagattgttgaggatgctgttgagtttgcggatgagagccctcatccaccccgcagccagcttctagagaatgtctttgctgatccaaaaggttttggaattggacccgatggcaagtacagatgtgaggacccaaaattcacccaaggcacgtcgcatgtctaatgtttttcatgtctgacatctggcatctatctgtttggagttttcagttttagattcatgttctttttcttatacttactagaggatcaaa

SEQ ID NO: 41431 - DNA, 379 bp, Glycine max
ttttagggggcgcgccagttctgatatttacaccatctgctctcaagactgtgaattatggaatcctgcttgcacaaaagcaatgactatgttatttaatccaaacccgagttctgatgcatggaggttggaatttgtgaagcgtaccggatttcattgagatatcatttgtgtcactggatggactgccaccccaatgcaggatgttcaggttacaattgattggcttatttcctctgatgaatgtgttcccaggacctatagtgttgtaaatccacaaaatgcttttgtgttaaataggcggatgggaaaactgactttcccccatggcacttaccgaagtgttaagagaatgcctctttctatagggggaggagct

SEQ ID NO: 41432 - DNA, 381 bp, Glycine max
tgccaatttctcatattctaaatccatcgcggagataagaacagcttgtcatagctttggaccttctgggttgaagtcgcccccgaaacaaggggttactctagggtacacttgccggcttcaaagccccgaacggcacaaatccattgtgcggccggatttgcttgacatcagtctgctgaatgtggtgcaccattttcagctgagggtggggtttaggtaccacaacatgcctgaaggtactgctatagtaaaccactacaagtaccaggtatgggagaccttcaaagccaagttcttcagaagggttgctacctatgtggtggactggcaggaggaccagaacaaagggtcgaaggatagagcaccgggattaggaac

SEQ ID NO: 41433 - DNA, 300 bp, Glycine max
agaggccattcgagttggatccgaagggtgatatagtgaagcaaatattggcgaaggcgatacatctggcggaccaagtgaccaaagacgacgactgagccagctgcttcaagcatgaatgcagtgagctgaaggctaacacggagaatctggcggggctgctgcttcaggcggctcgtgcgagttacgatctatacgagcgtaccacgcgctcgatgatcgacgaaacaaaacacgtcctcgacaaggcgctcggcttggccctcaagtgacgcggcaacggcctcatgaagcgcgttt

SEQ ID NO: 41434 - DNA, 323 bp, Glycine max
ctaaagtgagaaagaaaaagggtgggaaaagaggcagacgtgttcttgggagctaacaaattctcatagaggcaacacgatcggaactgcgggtcatagccaagacagatggaaatggtctacacatatacacacccgcgctccactattggagccgtaccaacttactttttggtccttgtaccgagacataatagtctagtttgtagccacttttgtctatgtttacataaccatcttaaaactgatgggtgttaattagttcagattgaagcgtgctactgtttgcattcaaggcattgcttgggccttgggtggcatga

SEQ ID NO: 41435 - DNA, 369 bp, Glycine max
ctgaaatggccgctagaagagtaactaaaagtgcagttaactggactgcattaagcgaaagggttcctgaacaccagcgtgcccaatttctagcgttcaaagctaaatctgatggctatctgaggcgtgtattggccaaccccgaacaaccaccagcgatagattgggcatactataaatccaaagtaccagttgctggaatggttgaagattttcagaaacagtatggagctttatcaattccttaccctccagacactcttaaatcccaacttgatagcttggagaaggaaatcaagaatgatatagaaaagtttaaaactgaatccaatgctcgtatttctgagtacaagaagcaattggctcaca

SEQ ID NO: 41436 - DNA, 367 bp, Glycine max
cggctcgagaatggtggccacagttggtattcctgagaatacaggtatagcattggggtgtgctatgaatagttcttttagggggcgcgccagttctgatatttacaccatctgctctcaagactgtgaattatggaatcctgcttgcacaaaagcaatgactatgtcatttaatccaaacccgtgttctgatgcatggagtttggaatttctgaagcgtaccggatttcattgtgatatcatttgtgtcactggatggactgccaccccaatgcaggatgttcaggttacaattgattggtttatttcctctcaggaatgtgttcccaggacctattgtgttttaaatccacaaaatccttttgtg

SEQ ID NO: 41437 - DNA, 171 bp, Glycine max
gtccatatttgtatgcaatggtgcatgatagttcagtgtctacaaatatggacaccgagccgcctaccgtgctgttgcccgacgcacctgatttgtccaagctgtgagaactttgttggctgatgggtgttcatatttggttgccctggactatgattgttcaacgtgtac

SEQ ID NO: 41438 - DNA, 231 bp, Glycine max
  unsure (1)..(231): unsure at all n locations
ctcggatttcggctcgagatggacgacgccttctnctctacccctacttcttctgccccttccgatcccccctacgacgttcccctatacctggtgccccttcccgtgccaacctatttcactcggcggcttccccctacctgctgggcccccgatgaaacccttgccctcatagacgcctaccgggacaagtggtacttccttaggcgcggtaaccttaaagccacccac

SEQ ID NO: 41439 - DNA, 294 bp, Glycine max
catgtggcagctctacaaattattattgatcgaaccccaagtcctgactgcaacataattaatgcaatgctataggaggatacttaccataccagtccttaaaatgcaggtgaaaaggtttttgttgcgcctttcacaggccgaaggcccatacgactggctacatatcacaataccatcttgcagatggaaccatacatgaatacaagagttcagctcttgagtaccactaccaatggtgattttgatcaaggaaaaaatctcacaatgtgtaacagcaatgtaccatgtgct

SEQ ID NO: 41440 - DNA, 368 bp, Glycine max
gttgagggtttggactatatggaaagaattcctcttgccacatctgagggttttcctcatgtgctttcacgcaaaaatggcgaaaaaggcaaaaggagatttgtctctggggatggtgaagagatgacattgattccaggaaccagtgttgaagaggcttacaacaagctaatagttgaacttgagaaaagtgttcctacattggttggcattgaatgtcccaaggatgagaaacttcctcgtcgcaaaatttttgacaaacctaagacgcgctgcttcactattctccctatggagtttaatcttgtggtccgtcaaaagtttttaaattttgtgaggttcattatgaagaaaagggacaagcttag

SEQ ID NO: 41441 - DNA, 319 bp, Glycine max
  unsure (1)..(319): unsure at all n locations
agcttttccaaacaagattgtttttgatgataagcttgtgttggctaacacacaagaattctttgatggaaattttccagtggattcttggttaccaatttttgtgaattgtctctatcctgtaagtcaattaccttcagaagctgtcgttgtaaatgttacatgtggtagtggacgtggtggtnaacccacctcttgcagtgtttggtctggaatgaacaaaggatgagaaaccttcttctaacagaatttttcacaaacttgagacgcgctgattaactgttctctctatggagttgaatcctttttgtccgtcaaa

SEQ ID NO: 41442 - DNA, 369 bp, Glycine max
gttttaatataattgaaggagttgctcgtggcttactctatcttcatagagattctagattaaaaatcatacatagagatttgaaggcaagcaatatcttgctagatgcagagatgaatccaaaaatatcagactttggtttggctagaatatataaaggcgaggatgaagttaataccaaaagagttgttggcacatatggctacatgtccccggaatatgcaatggaaggactgttttctgagaaatcagatatctatagctttggtgttttgttattggagattattagtggaaaaagaaacactagttttcgtaatgatgaccagtctctcagccttataggatatgcgtggaatctatggaacg

SEQ ID NO: 41443 - DNA, 339 bp, Glycine max
ctagagccgaaattgcaataatccgggataacaggttggcgtaccttataaccgggaacaaaagcaaacgatgcttgctttcaagaatttctgaatttcttgctactactcagtgtacgatctctcaagggaaagaaaatcactctctgtgctggtcacagacttcacgaatcatgtacgtttccactcctagattatttgctgaacactcttccattggatgtaggacttcatgtcagatgtaaacgttagctgtttcttgctcagatgtctgattaatttcgaggtgcagctggtgaaattttggattagtgctcccactgtcctatctggtatagg

SEQ ID NO: 41444 - DNA, 370 bp, Glycine max
cggctcgagcaagaatatattatttctgtctcaaaacttgccatgatttcatgataatgaattttagaagactgataaatgatataggaacctcttttcccttttggtgtattaaggcttgttggcacagtgcaattgtcataaaatgaagtttgctgataaattaatgtatctatctgcagctgagcaactacaactcttttgagggagttctttattgtaagccacactttgaccaactgttcaaaagaacagggagccttgacaaaagctttgaaggaacaccaaaaattgccaagccagagaaaaatttggaagagaaacctgcagcagccaaagtctcaagtatgtttggaggaacaagggacaa

SEQ ID NO: 41445 - DNA, 407 bp, Glycine max
tagcagagacgtgacgtgcactgctcccgtacctaagcttgggattcgggttgcgctcgagacggatatgctaatggggtcttatcagttactcgagcactatgggactgggacatgaagttacctaagggtgctccctcacctttgattgcagagcctgagtttcggcaagtggttctaacagatgatgatgaattcctcatcattggatgcgacggcatctgggatgtgatgtcaagtcagcatgctgttagccttgttcggaaaggcctgaggcggcacgatgacccagagaaatgcgccagggacctggttatggaggcattacgtctcaacacattcgacaatctcactgtgatcattgtatgtttctcttcccttgaccacgcggagccagagccatcccc

SEQ ID NO: 41446 - DNA, 254 bp, Glycine max
actcggctcatgtccctaatgcaccccaatagcaagatttggtttacgggaaatcttcctttgagattaaatctcgccctagaacgggaaaagatttctctacacaaacacaacttggtagtgggaaaaccttcaaatatgatgtaattggtgctccgtcacaatcttcaagggattttcctggaacaggggatcacgaaataccctaaaagatttattccagattgtgtcaaagaataggtcctccattccat

SEQ ID NO: 41447 - DNA, 380 bp, Glycine max
gcagaggattccgcatgatctggaattcgtgttttctttcgcttgttcgtttgtttaattcaataaaggaaattaggcatgaccctcttgttgagtatgctctgcctatctgaaaatttccacacctcttttaattgtcgtgatgatgtgggaaaatcattctggagtgacttggagtactgtaaaaacaccaagaattggtattgctacgggaagacggtggctgaacaagcagcatgggatgtagcaaaagagagaggggtggacttggttgtggtgaacccagttttggtgattggaccattgttgcaaccaaccattaatgctagttcacttcacatcctaaagtaccttactggctctgtcaaaacttatgtaaa

SEQ ID NO: 41448 - DNA, 350 bp, Glycine max
gctgcgtcctcctactatacttggagtcagagaacatgtgttcactggcagggtctcatctacagcgtcatttatgtgcaaccaagaaactaggtttgtgactttggggcagcgagtcttagcacatccattgaaggtccgcatgcactatggccataccggtgtttgcgctagactattgcacataacccgtggtggtatcaggatggctttccgtgtgatcaacattagtgaggatatgtatccaggattcaacatcaaccttacgtcacggaaatatcacacgatatggatatcttcaggttggaaagggatgagatgctgcgctcaatcagatggcactatttgaa

SEQ ID NO: 41449 - DNA, 336 bp, Glycine max
aaaaaggagggtttgttgggttggttaatggccaaaagggggggaggtgaaacaccttaccctttgtgaaatacttgagagtgcgcgtggaaactctttcccgcaacacttcctttaccctcggtttcaacttgttgattctccgcttctcccaagagggtaggggttgtgttctcgacaagttctaggtgacagagcgcgtcattttctgtgtctaaaactttcagaaagccgatcctttttagggtaaccccaatgctcactttcagaatgacccttgattgggtagtgtagattcagtagagatcgcgatggctcttgaggaagagattgggg

SEQ ID NO: 41450 - DNA, 360 bp, Glycine max
cgcacgaatatcttgttgtttggagcgatccgagaaaaactctgtaaacatgttggtttaccaggacctccttacaggtgatgagcttctctctgactccttccgttacaaggaaattgagaatggaatgctgtgggaagttgaggggaagtgggttgttaaaggagcagttgatgtagacattggtgcaaacccttctgctgagggtggaggagaagatgagggagttgatgatgcagctgttaaggttgctgacattgttgacacattcagacttcaggagcatcccccattcgataagaagcagtttgctacctttatgaagaggtttatcaagaatttgactcccaagctcgatgc

SEQ ID NO: 41451 - DNA, 422 bp, Glycine max
gacgccgcatgcacgcgtacgtaagctgggcactcggctcgagggagatgagccaccgcggcaaagagtttctctccataatccaaaaggccgaatcggatctccgcgccctcctccagatccctccggaatactccgtcctcttcctccagggcggcgccacctcccagtttgccgccgtccccctcaacctctgctcctcccccgactccgccgtcgactacgtcgtcaccggctcctggagcgacaaggccgccaaggaggcgcagaagtactgcaagcccaccgtgatctggtctgggaaacccgaaaagtacacaaagatcccatcttttcacgatttggagcagaacaacaattctgggtatcttcatatctgtgccaatgagaccatccatggggtggagttcaaggactaccct

SEQ ID NO: 41452 - DNA, 430 bp, Glycine max
gagctatgagcacgcgtgcgtaagctcgaaattcggatcgaggcaagagggccgagttcggcaaggacctgcactggtactcgccgtggcctaacaacgtgcgctccatgctgtcgacgacgcgcgagagccactcgcgcgtgcgccgcatcttttcccatgccttctctgacaaggccctgcgcgaccaggagcccctcatccagcggtacatcgaccttctggtgcagcgcctgcgcgaaagggccgagcagggcgttgatgtggacgtcgtgcgctactacaacttcacgacgttcgacgtcattgcggacctgacgttcggcgagtcgttcgggtgcctggagagcgatgactaccatgcgctggtgcgcggcgcgttcgcgttgatccaggcgctgagcttcaagttggcgctgcgctactacaa

SEQ ID NO: 41453 - DNA, 399 bp, Glycine max
ggcacaaggtctttcagtgggttcattccttgtagaagaagataagttggatcttgctacatcactacttgcaaaagccaaggaaaagggggtgtctctcttgttaccaagtgatgtggtgattgcagacaaatttgcccccgatgcaaacagcaaggtcgtgccagcatctgccatccctgatggctggatgggattggatattggtccagattctgttaaatcattcagtgaagcattggatactacccaaaccatcatattgaatggaccaatgggatgtgttttagttttgccaagttttcctgtttggtctaatggtctttttctaaatatctaattttttttctaatttttttgtttttttccccctttttttcgtgttatgatttttttttt

SEQ ID NO: 41454 - DNA, 382 bp, Glycine max
ataataattttcatctaaaaaaaaaccaccgttgaatttgacagtcccggcgaggcatgttcttgctccgagtccactcagtggaagaggagcaccctctggatccccgaaccatcttccaatcccaaaccaacaaccctaaattcagccaacgcagaggcgcgctccacttgttccgaacctcttcccactcctctccctcttctcttctcttcatcctcgccgtccccaactacctctccttccacgacttcattcccttctgtgggccccacctcgaccgtcttcaccaccttctctttatcaggaacgacggaacagaagatcgctatagcgtcttgatcgagttcgccgatcactttgccgccgacgcattttatac

SEQ ID NO: 41455 - DNA, 293 bp, Glycine max
aaagaattctgcgaatttaagagggttggaaggtgtggctggtgggagattgatttcctctcaggaatgtggtgccaggacctattgtgtttttaaatccacaaaatccttttgtgttaaataggtggatgggaaaattgactttcccccagggcacttcccgaagtgttaagagaatgcctctttctatagggggaggagctggtgcaaagaatgctattttcatgaatatgccaaaagctgctctttcaatgtggagatatttaggtggagttttcgtctttgtaggtttt

SEQ ID NO: 41456 - DNA, 379 bp, Glycine max
aaaagtggagagaaaaaagatgcagaagaagttattacatgacattggaggtaatgcaatgcttgcaatggtgtacggcaaaaccataaaaagtaataacaagggaaagactaacaatgaagttgaactatttgcttttgataccatcgttgttgccacaaacaatttctcagctgcaaataagttaggagagggtggttttggtcctgtttataagggaaatctaagtgatcagcaagaagtagcaataaagcgactttctaaaagttcgggacaggtgctaatagtgtttacgaatgaagtcaatctaatacgcaaacgaagattcactaatctggtaaagcttttagggttcttgattcagagagatgaaagaata

SEQ ID NO: 41457 - DNA, 352 bp, Glycine max
gttttaacaccattgatttttgattctagcaagcaaagctactggcaattttttattgaccttctgggtgtagtaatttaaatggacaaaactcgccatcgaatcacactcatacaaaattctccaattagtaactacgagtgacctgttgcttgtaagaaaggctgtctaatggttaaaattgtgttgtttgcttatgctccttttatcacgagtagaggttttttactgatcccataaggttttagacacatcatcttttcatagtagattttttcatcataatggtctctgtctttacttcattacttttttttgttctgcgtaatagagtgtatttggatcttataat

SEQ ID NO: 41458 - DNA, 393 bp, Glycine max
aatctggtttgcaaaaagacagagggttaattgtggagtattttggaaggatgtcttacgttgctcataacgttaatcagccccaagagaaagatttgttagagggaaatttttcctttgatattaaatctcgctctagattggaaaaagtttcctctacaaaagcacaatttgttagtggaaaaaccttcaaatatgatataattggtgctggttcacattcttcaggagattttcctgaaaaggaagatcaagaaaaacccaaaaagattgataccagattgagacaaagaatagatcctcaatacaatgaggttcaggctcagatggaaacaaatttgtttaaattgtctcttgacgatgttgaaactcctaaaggttctatgttggatc

SEQ ID NO: 41459 - DNA, 389 bp, Glycine max
  unsure (1)..(389): unsure at all n locations
gagaatcacaaattccagaaagatggcaaataaggtcaacgggtagaggacccagctttgggccttggtcatattaccaatcaaatcaaactagtgcataatataaagcatgtatatgtgtggcatgcaataacaggatattggggtggtgttagacccggngttccgggcatggagcactacgagtcaaagatggtcttccctgtctcatctcctggagttgagtctaatcaaccagatgaagctttgacaacaattgccatcaatgggcttggccttgtgaatcctgagaaaagttttcacttttatgatgaactccactcatatttggcatcttttggtattgatggtgtcaaagttgatgttcaaaatatccttgaaactcttgg

SEQ ID NO: 41460 - DNA, 377 bp, Glycine max
gaggaagttgcccttaagaggaagtacaatgaggaagccagaagcgtgtaataataatactaaaaacaatagcaacaagaagcttagaaaggggttgtggtcacctgaagaagatgacaagctcatgaactacatgctaaaccatggacaagggtgttggagcgatgtggcaagaaatgctggcctccaaaggtgtggcaaaagttgtcgccttcgatggatcaattacttgaggcctgatcttaagagaggtgcattctcaccccaagaagaggaactcatcatccacttccattcccttcttggaaacagatggtctcaaatagcggcgcgtttgcctgggcgaaccgacaatgaaataaaaaacttttggaatt

SEQ ID NO: 41461 - DNA, 369 bp, Glycine max
  unsure (1)..(369): unsure at all n locations
ggtgttttctattaaggtgtagtaatcatttggttagtggcagatcaacaagggtatgttcttgcagcagctactgggttcagaagatacacttactctgaactgaaacaagccacaaagggtttcagcgaagagattggaaggggtgctggagggacagtgtacaagggcgtgttatcagataaacgcattgcagcaattaaaaaattgcacgaatttgcagaccaaagagagagtgagtttcttactgaagtgagcatcattggaaggctcaaccacatgaacttaattggcatgtgggggtattgtgtagaaggaaagcatangatgttggtttatgagttcatggaaaatggctctttggcacat

SEQ ID NO: 41462 - DNA, 375 bp, Glycine max
gttttctacaaccaaattacccccaagtgtggcgcatatagactacatcatgagctatcagctcgagcaaggtcacaacccaggtactcaggaccagcagcccccgggactacagtctgagctcaagggccccaagccccaggacgagaatcttcccactgaggatggcggataccagatctacaaggcggccggcaagcttgagggcaagaaggcacttattactggcggtgacagtggcattggtcgcgcggtcgcaatcctgttcgccatggagggcgcagacagctttattgcctacttgccccaggaagagtacgacgcccaagagacgaagaagaaggttgaggagaagggacggaaatgccacctgtt

SEQ ID NO: 41463 - DNA, 375 bp, Glycine max
aaaattgatgcgtgaaaggacgcacctgctgttggcttgttgttcaaggatggcaatttgtaagaaagatgtttggagagttgaatgtggaatcccttctggatttccgctcacagttatttgcaatagcatttttaatgagatgctcattagatatagctatgaaaaattactgcgccaggctaaagctccaagtatgtttttacaatccttcaaaaattttgtttctttgtgtgtgtatggtgatgataacttaattagtgttcatgaatatgtcaagccttactttagtggttctaaattgaaaagctttttagctggtcataatattaccatttctgatggtatttacaaaaactagtgcaactttgcaat

SEQ ID NO: 41464 - DNA, 344 bp, Glycine max
  unsure (1)..(344): unsure at all n locations
cacgcgaacgaaagcccggaatccggctcgagggggagaagcggaacctttaaaaacggcggagggaaaacgcgaaagaaancccggcgaccaagggggggagaaagaaggagngcaacagagcaaacaaggctgcgagaataggaaaggggcttgatgagtggccaaatgagtaccagaggcaggatggcacaaccgatgcgcattggatagaaagagatggtggcctcatgctgctgaatgctcagcttctacttaccaaggagagctttgagaattgcaagatgcaagggtgttgcatcgcacaagacgatgcaaatgcagcggggctgatagctgatgtg

SEQ ID NO: 41465 - DNA, 346 bp, Glycine max
  unsure (1)..(346): unsure at all n locations
acgncgcangcacgcgnacgnaagcncggaanncggcncgagccgggaaccagngnngaagaggcnnacaacaagcnaanagnngaacnngagaaaagggnnccnacaggggnnggcanngaagggcccaaggangagaaacnnccncgncgcaaaannnnggacaaaccnaagacgcgcngcnncacnanncncccnanggaggggaancngggggnccgncaaaaggggnnaaannnngngaggggcannangaagaaaagggacaaacnnagnngncaagggggaancaacccanacnccanggaaaggacgggnnnggccaanagannacggagnaagggca

SEQ ID NO: 41466 - DNA, 267 bp, Glycine max
cttttcttttctccctatggagtttaatcctggggggcgtcacaagtttttaagatctgtgctgttcattatcaagaaaagggacaagcttagttccctagttagaatcaacccatactccatggaatgtactggtttggccaatagattactgcgtcaggccaactatattctgtgttgcgattatgctagatttgatggtttgtttaccaagcaaggtttgatgcaaaatggcatcaatgataaacagtctttgcggtcctgatg

SEQ ID NO: 41467 - DNA, 359 bp, Glycine max
ctcgagcctattttggctcgaggaacaaaaaaaaaaacggggttcgctcttctcttcgaataaaccacaaaaccaacaaacgagaagaggagtgagagaagatggggttgtcgttcaccaagctgttcagcaggttgtttgcgaacaaggaaatgaggattctgatggtaggtcttgatgctgctggtaagacaaccattttgttcaagctcaagcttggagaaatcgtcaccaccatccccaccatcggatttaatgttgagactgtggagggcaagaacatcatcttcactgtttgggatgttggtggtcatgacatgatccgtccttttaggtagcttttttttttgtattcttag

SEQ ID NO: 41468 - DNA, 365 bp, Glycine max
cggaataaaaaaacaagtttaattactattatggcgccgagggatcataagacaagcaacgctaaggctaacggtaacggtaacagcggggtgaaggaggtgcattttcgtggagtgagaaagaggccgtgggggagatacgccgcggagatcagagatcccggcaagaagagccgcgtatggctcggaacctttgacacggtggaggaggcagcgcgtgcctacgacgccgatgcacgagaggttagtgggcctaaagacaagataaactttgggctaagtttggaaaatgttacgaactcttgctacagctagagcagtatcgttgggttcttcagtctctgcctctaattttactgcaattg

SEQ ID NO: 41469 - DNA, 369 bp, Glycine max
atcgatacgtattggtgaagtatccaatagtattggtgtcgggtacgtgaaaaaaattgaagtattcgctcttcatgaacagaccttaagtttgcgttttttttttaaaaaaaaatggcagtaagatatattgttcagtaaactagaattattggttctttccttgtagatcccaactaattcatctggcctcattgagtatagagctcatcctttctggctacaaaaatactgcccatcacatgagcttgatggcacttctcgttgttgtagttgcgaaagaatggagccaagggatacaaaatatcttttgcttgatgatggtcgaaagctatggttagagtggctagactcattaattatggatac

SEQ ID NO: 41470 - DNA, 292 bp, Glycine max
cgtttatttcgcattatgctgactgttgtctgcgtgggtgtttctgatgatagttattgttgacacttctgatttgcatgttcttcatcacacgagtttttcgttgaatttatgcaatcgcagctgaaaataaaaacttgctgattgtgaggatattcaaccactcaattgcaattatgggacacgaatggtgaaagcccgatttgctggggatcgatgctcccagggctgttttacccagcattgttcgtcatccccgtcacacgggagtgatggttgtcatgggccaaaa

SEQ ID NO: 41471 - DNA, 359 bp, Glycine max
gcattattttggaaacgccaaacagtctttgtggtggggattaatgattgatgggtgaaatgacacacatgatgttggcttgttgttcaaggatggcaatttgtaagaaagaagtttgtagagttgaatgtggaaacaattttggatttccgcttacagttatttggaataccatttttaatgagatgctcattagatatagctatgaaaaattactgcaccaggctaaatcttcaattatgtttatacaatccttcaaaaaacttgtttgttagtgtgtgtatggtgatgataacttaattagtgctcatgaatatgataagccgtactttagttggtctctattgaaatgctttcta

SEQ ID NO: 41472 - DNA, 370 bp, Glycine max
cgggttcgcaaaaagacagagggataatggtggcgtatttgggagggatgactaacgaagctcataacctatatcagccccaaaagaaagaataggtagagggaaattgttcctttgctattaaatctagctctatattgtaaaaagtctcctctacaaaagcacaatggggtagggtaaaaacctcctactatgaaacacttggcgctggatcacattcttcaggagattttgctgtaaaggaagatcatcgaaaaacccataaggacagataccagattgagacatagacacgaccctcaatgcaacgcggtgcactcccacatggaaacagagttggttaacttggctcttgacgacatgacatctc

SEQ ID NO: 41473 - DNA, 372 bp, Glycine max
cgtatatatttgtactaagtgtagcagcagctacaaacgctttaccatataacgtaagtaacgtctctgctgggtgtaccatttctcaattttctgaagttaacaacgttgtgaaaaattgcaagagtatcgtggtaaaaagcctttcagtacccgcaggaaaaacattagagctggctctacacatccggaacaaccttaacgtttcaaggtacaactaccttccaatatcagcagtgggatggtccgttaatacacattcatggcagcaacttacgggtatatggatcaggagcaactctagatggtcttggtggaaaatactgggatggacaaggtgataaaggtattaagaaacccaagttctttaga

SEQ ID NO: 41474 - DNA, 325 bp, Glycine max
caacgatattccgtgttgcgattatgctagttttgatggtttgattaccaagcaagttatgagcaagatggcataaatgataaacagtctttgtggtggtgatggaaaattgatgcgtgaaaggacacacctgctgttggcttgttgttcaaggatggcaatttgtaagaaagatatttggagagctgaatgtaaaatcccttctgtatattcgctcacagttatttgcaatagcatctttaatgagaagctcattagatataaatatgaaaaattactgcaccaggctaaagctgcataaatgtcttttacaatacttcaaaaa

SEQ ID NO: 41475 - DNA, 371 bp, Glycine max
cacattccgaaccaagtttgtgttgtaagttcttgcattatcaagtgaagttgcagttccaccagaagaaggccatccactctcagacacaactatgttcagtgaccatcctccagatttctccaacgcagcataaacagcatcaaccatagcatcaaaaaggcctggtagaccccttgaaacttatgtgtttgccatgtttgaagaaaatcagaagcagccagagtatgagaagttttgggggctcttccttccaaataaacagctcaaatactctattaatttgaattagttattagaagtatatatagtttataagaaataagggctatgatttcaagtgaagcttccataattgacctagaagaggc

SEQ ID NO: 41476 - DNA, 349 bp, Glycine max
  unsure (1)..(349): unsure at all n locations
ggtgcgtttcgcaacgtctctgnaggctgatgggtagccatattggtatgctatggagcatgatagttcanngtctacaataccaggtgattttgtcattggtgttaagttgacaaccataaacaatatgtgtgcatatgggctcaatcctggtatttcaggttctcgtcttttgggcaccattcctcagtccatttcacagcaaactgtttggaatcaaatggcaacagtgagaacaccattgaattttgattctagcaagcatagcttttgtcaattttctattgaccttctcagtggaggaattttagtggacaaaactggagattggttcacacttattcaaaat

SEQ ID NO: 41477 - DNA, 345 bp, Glycine max
ctcgagcttaatcggctcgagcggctcgaggtagcaggagctgagctagtttccggggccgcttcacccaccgtagcaaccatgatcattcccgagaagaaccgtaaagagatctgcaaatacctcttccaagagggagtttgctttgcgaagaaggacttcaatctggcaaagcacccagagattgatgtgccgaatctgcaggtgataaagctgatgcagagcttcaaatccagagagtatgtgagggagacatttgcgtggatgcactattactggttccccaccaacgattgaattgagttcctcaagacataccttaacccttctttccaaattgtccct

SEQ ID NO: 41478 - DNA, 287 bp, Glycine max
  unsure (1)..(287): unsure at all n locations
tgctgattctctcatttaggctttcgaaggatggagagctgatagtaacactgtcatggtaatttggggtcatanaactgtgtatcagaggcagcaaatcagaagagtttatgaggaaatttaccaggaggatcttgtgaagcgcctagagtctgagatcaaaggagactttgagaaaaccgtgtaccgatagatactggaacctgcatatcgtgatgctgttttggccaatgttgccatcaatagtggcaaaaactacaatgtcattgtggaaattgccactatcc

SEQ ID NO: 41479 - DNA, 300 bp, Glycine max
  unsure (1)..(300): unsure at all n locations
gaaattcttcacccattttcttcgnagccaaacactgtgaaatagtcagttatgtcgtggcaagagtatcanaatcatcacctactgtgtgaaatcgaaagtaaccacctcactcacacccctatcatctgccaagacggaagcctttgcgctcagaacaccaacttccctcaaatcaaacctgaagaaataactgccatcaataatgactttaatgagcctagatcacttgctccaactggattgtctatcggaggcaccaaatacatagtcatccaaggtgaacctattactgtcatt

SEQ ID NO: 41480 - DNA, 391 bp, Glycine max
cacccgtccgtaagctcggattccgcctcaagaaggtttttaaaggtttagtcctgagtggccaaagaggacttaggggcttttgagtgtccttatggccattcccaaacagtctacagtttttgatattctcttgggaatctctcaagattttgaaattgctggtaatactcttatgccagctttttctgttccacaggctactgccagatcttctgaaaatccggaatcctctgcatgatctggaattcgagttttctttcgcttgttcgtttgtttaattcaataaaggaaattaggcatgaccctcttgttgagtatgctctgcctatctgaaaatttccacacctcttttaattgtcgtaatgatgtgtggagtgtgtgttatttt

SEQ ID NO: 41481 - DNA, 281 bp, Glycine max
  unsure (1)..(281): unsure at all n locations
cgtacctaagctcggtattcggctctatgattntgttcggagcctcaancaaccgagactgcatgcagattatctagcggccaaggaacaacaanncncctaatctgccatggatatgagccatgaatcaagtgtgagcatgcaagcagcctaatggctgtaaattcgcaatgtatgataatcatgtagataacaattagttataccctcggatcatagcatgtgatgaaattgataacaggttattttgttgcacaatattgaaattttttttgcctttt

SEQ ID NO: 41482 - DNA, 268 bp, Glycine max
atttggaaaaggagcaaggtgaaatatgaactgtacaaaaaatcgggtcttatcaaaatcgaccgtgttctttactcatcatttgtgttttctcacaattataggtttatcccacatactatttatgaggactgagatcccctatatgtctttattattattctttatcctattcctttcttaatgattatagcaaggccaaaatcaatttgttcttaattactcatttattttatcaatttgtatgataagtttatttattattatt

SEQ ID NO: 41483 - DNA, 306 bp, Glycine max
tcgcctcaaggcctttctttcaagcttccccccgaagtgttaagaggatgcctgtttctttagaaagaggagcgagtgcacagaatgctcttctaatcaatatgccaaatgctggtctctcaatgtggagatattctgttggaaatctcaaacttcgaagtctctaagatgacttcttcctacattacaaggacagtccctaacttcattgcttttggaaatttagctaatgccaccatcactctataggctcttacccaccaactggtgcagtttgtagagactcacataaaaaccaaatccaaa

SEQ ID NO: 41484 - DNA, 369 bp, Glycine max
ctcttgggaatctctcaagattttgatattctgtggggaatctctcaagatttggaaattcctgttaatactctaatcccacctttttctgttccacaggctactgccaaatcttctgaaaatgcggaatcctctgcatgatctggaattcgcgttttctttcgcttgttcgtttgtttaattcaataaaggaaattaggcttgaccctttggtgaggatgctccggccttcttaaaatttcccacccccttttaaatggctgaaaggtggtggaaatttgggttattttcaaaaataaaaaattaatactttatttcttaaattaattatatttctttctttacttacttgtttttttttttcttttt

SEQ ID NO: 41485 - DNA, 369 bp, Glycine max
gataaacattctttgtggtggtgatgaaaaattgatgcgtgaaaggacgcacctgctgttggcttgttgttcaaggatggcaatttgtaagaaagatgtttggagagttgaatgtggaatcccttctggatttccgctcacagttatttgcaatagcatttttaatgagatgctcattagatatagctatgaaaaattactgcgccaggctaaagctccaagtatgtttttacaatccttcaaaaattttgtttctttgtgtgtgtatggtgatgataacttaattagtgttcatgaatatgtcaagccttactttagtggttctaaaatgaaaagctttctagctagtcataacatcaccattactga

SEQ ID NO: 41486 - DNA, 188 bp, Glycine max
aacgggcattgtttccttgcatgctctggaaccaattgtcaccaaaatctcagctgggacacctttcagttcatgggatttgaaattaaatagtggtggaaggaatcgtccattttgcatagcgagaattttgtatcactgtatttttgttaatgtattggattgctttataggcttttttaatttac

SEQ ID NO: 41487 - DNA, 385 bp, Glycine max
caaatcttctcaggtgtttgatggtcatggaggacctgaagctgcagcttatataaggaaaaacgtgacaaagttcttctttgaggatgtcaatttcccacggacatcagaagttgataacgtatttttggaagaggtagaggattccctcagaaagacatttcttttggctgattcagctttggccgatgattgcagtgtgaatagttcatcaggcaccacggcccttactgctttgatatttggaaagtatgtccatattcatacttcacattcttggttttcctttatttgcacacttttagcagcttactagcttacatttatctactttacgcttgatgtaatatgtgcagtttcatttaatcaaatccagtttctcgtg

SEQ ID NO: 41488 - DNA, 399 bp, Glycine max
tgtgtgtgtatggtgatgataacttaattagtattcacgagtgatgtaaaaggttgtttgggtgtggtaataacacatacaattgtggtttagaccaaatttgtgccattaaattatgttgaaagctagacccttggaaccttactttcagaaactttatacccgatgatttatgtgtcgtgggtggcatccttccgacaaggccaaagatatggtcacaacttcatctttgttcgtgtagtaatatgcaaatgcatgatgcttatattggtaacctcctaaatgtgtcacgagaattgtatttgttcagaacagaggaagctcgtcaattgagaaggaaagctctttctcgtattgaatggctgcaaaaagctgatgtgcctaccatatcacagattt

SEQ ID NO: 41489 - DNA, 405 bp, Glycine max
tattaccaaacatatcttatttgaaagatgggttcgaagatggctatagtgatcgtagccttgttcgccatgctccttttcatctcccctgaggtggcatgcaggaatttcaaagaggagctaggtgaggttgtcaaagagactaatgaggagagtgatgccagattagccggtagtagtggtggtgaccttgataagtcttattgtcctgtccacttgcccttgatggagtatagaaagtggataggaaattgccgttgtggctgttgtcagtggaccacagagccggaagtttgcctatattgctgtccagaaagtcacgttcctgatcttccgagccgaccgcgagcttattaacaattgagacaatgtatacagttctacgtactaaataatatatttcat

SEQ ID NO: 41490 - DNA, 297 bp, Glycine max
atggaatttcttttcttagtcatctcttttaccattctggggggggttgctattgcaggagggagccctatccatccattgctacctgacgcaaattattgggaagctatttggccaaacactcccattcccactgcactgctagagcttttaaaacctctccctgcatgtgttgaaatcgatgaactccctaagcaaattgatgatacacagtacccaaaaacattcttctataaagaagacctttatccttgctaaacattgaatgtacaatttaccaaccgttcctatgcacaa

SEQ ID NO: 41491 - DNA, 402 bp, Glycine max
gttctatctctgccacatggcatgccaagttggtggtggaattgcaggtttatatgaagtcacctttctttacaggcttacccctggtgcttggcccaagagctatagtgttaatgttgctcaaatgagttgtgagtgcgtctaggttttcgttggccacaagggtatgattttgtctttggcaatgtctcctggtggtttctatatggtatctagcgatgaagatggcatcatcatgatgtgggatctctctagtagccgttgtctcacacctttgattgggcacacatcatgtgtctggtccctcgctttcagttatgaaggttctattatagcatttggatctgctgattgcactgtaaaattgtgggatgtaaatacgagcaccaaggtttctagggc

SEQ ID NO: 41492 - DNA, 394 bp, Glycine max
ccaaaagcaatgttttttacaccttcaaattcttcaattgggcggtccctttttatattgggcgagcgccctctccctcgcttagtcccaatctttcatctgacttaactacacgccaggtcgccgacaaccttccttcgcctgaggacactgtctgccttctcaaatccaccaccatctgaaatgtccgtctctactgcgccgttcccgccatcattaaggccctttccaactccagcatcttaattttcatttgtcccttcaactgtgacattgttatgttcgccggctgattctaacgctgtcacttagttgttttacacgaacgttttgttcttctaccccttcagcaacatcacttctgatcacccttgtaaacctatatttttcacct

SEQ ID NO: 41493 - DNA, 397 bp, Glycine max
ctggcttctccttcgtttgtgctcgccggaaaattttaccacggattggatcaacaatgagtgcggcatcgcgagaagaggattcgaatgaggaggagagggacgaggaagcgaaccggcttctagaagaagaagaagaagcagaatcatcatcagaagagggggagaagatcctggtggcggatttggagttcgacagggtggacgatgggagcgttccttctcctttctcgtggaagaagctctggctgttcacggggcctgggttcttgatgagcatagcgtttttggatccagtgaatctagagggggatctccaggctggggccatcgcgggctactcgcttctatggctcctcatgtgggccacctttattggcctcttgatccagctttt

SEQ ID NO: 41494 - DNA, 376 bp, Glycine max
tttagaggaagagctcaaaaacaaagcaacaaacaacaagaagaagaacaacgttggtggggaatcagaccagcccccttacaatgatggtgccaactctgatgttgctgaagaaactgagccagaggaagatgatgactccaagttggaatctaacaaagatttggatcttggccctcaattcactctcaaggaacagcttgagaaagacaaagatgatgaaagtttgagaaaatggaaggagcaacttctgggaagtgttgacatgtctgtcgttggaagtgaatgcaaagaccctgaagtgaagatattgagcctcattattacaagcccagataagcctgacctcaccctgccaattccatttactactgat

SEQ ID NO: 41495 - DNA, 391 bp, Glycine max
gaaggaaactgctatttaatcacaatttaatggcactgaaaggagtgagggaggtcgcatatgagcctctaccgggaggcccaaacacaagcaatcataatgagcctaaaaaatccaaggaaacgacggtgagactgagacatcacaaaggatcagttcttgaaaatgttcgttggaaagcacttggagttcttatcactgtctgggtccttatacttgcctgcgagattgcaaaaagtcacacaacaacttgttcagtggaatactggatacttaatctactacaggtccctgtggcattaggagcgacttcatatcaagctgtgcttttgtacacaggcaagagagtgatagcatccaaaggagatcaaagaacacaatggctagcgca

SEQ ID NO: 41496 - DNA, 387 bp, Glycine max
gtttgattacctttcttgttatgagcaagatggcagaaatgatgagacagtctttgtggtggtgatggaaaattgatgcgtgaaaggacacacctgctgttggcttgttgttcaaggatggcaatttgtaagaaagatatttggagagttgaatgtggaatcccttctggatttccgctcacagttatttgcaatagcatttttaatgagatgctcattagatatagctatgaaaaattactgctcctggctaaagctccaagtatgtttttacaatccttcaaaaattttgtttctttgtgtgtgtatggtgatgttaacttaattagtgttcatgaatatgttaatgccttcttttgtggttctaaattgaaagttttctagctt

SEQ ID NO: 41497 - DNA, 377 bp, Glycine max
gtgcttattggtgccttatttacaatccatcaccacttaggagtgagcggctggtctatactatgactggtcagcccatatgctctgggttggggaacgaaccatgcagattgatggggcccatgtggagtatttaagaagagtagctaatcccttgtgaataaaggtaagtgacaagatggatccaaatgagctcggtagactcattgagattttgcatccccaaaacaaaccagggagaatcactgtgattacgaggatggtagctgcaaatattacggcgaagctttcacatctcatgaggccacttctcttagcatggcgcattgttacacaggctcagagatgctatgcatggacacaccattaaagctcca

SEQ ID NO: 41498 - DNA, 286 bp, Glycine max
aggtaccttgttttctttttgccgagggcattctgaagctggcaccactgaccatgaaccgtggtgttttggggaagagtgtgaagaaatttgccgattggcattgaagaggcactaccgtatgatcccacttatttacactcttttttattgtgctcatacaaggggcactccagtttcaacccctactttctttgctgatccaaaagatcccagactgtggaaacttgaaaattctttttcgcttggtccagtcttagtgtatgcaagcactttacttagacag

SEQ ID NO: 41499 - DNA, 325 bp, Glycine max
ctaagacagaaggttttatttttagtatcatgcaaggatctatggcagggctcataacgcaaatggggccgaagagctatatttgttagaggcaaatttttcttttgatattaaatctagctctagatcggaaaaagttatctctactaaatcccaacatgttggcggaaaaaccttaaactttgatgtatttgaggctggcccacattacaaaggagattctcttgaaattgataatcaagaacccccctatgagattgttaccatagtgcaacacataattgagacttggtaccactaggtttattctctccttgcatctaat

SEQ ID NO: 41500 - DNA, 381 bp, Glycine max
ggcacaaccaattactgatcccatgctgtgaaagaacatttacgttctgttatgaacctttgttaattatctagatcaatacactgtggatggagtgcataatcttgccgacaaatccccgatgtgtaatctgctaaatttcagaactgcagtgtcatactgacatgaagtccgtgaaacagcatcttacatggatacattggaagagcatggcgatcgaaccaatactcatgcacgttgcatatatggcactcaaatacttactgaatgaatcatcaaatgctctattaacttattggtgttgatcctggaactaaccctgttagacatttacttggtagccagggcctatgatcgattctcaagttatatgttgacact

SEQ ID NO: 41501 - DNA, 331 bp, Glycine max
aaggacacaccttttttttgctcgttgttcaaggatggcggggggggagaaagatgttcggcgagttgcatgttgaatcccttctggatttccgctcacagttatttgcaatagcatttttaatgagatgctcattacatatagctattaaaaattactgctccaggctaaagctccatgtctgtttttacaatccttcataaattttgtttctttgtgtgtgttatggagatgactatcttaattagtgttcatgaatatgtcaagctttatatttgttgtcctttattgaaaagcttcctaactgttcactatattcaccattactttt

SEQ ID NO: 41502 - DNA, 377 bp, Glycine max
  unsure (1)..(377): unsure at all n locations
atatcaacaaaaagattcgcacagcacttgggaaagggaagaaaattgtttttcttactagagttgatccttttccagtagctttactggctgttctttttggcgttaagaatgaaattctgagttctaacgccactaaccctatgctgacgcgacttcttgagaactgtaagagtctcaaatatctggttgatgagtgtccttttgcatttgtgaactagtatgtaatattttattcacttaaataaagcgcattactatgtgcaatgagtgtgtttaaatttttnnaaaaaaaaaataaattttaaaattatatatttttttttttgtttttttttttattttttatatttntantttttttttatttatttttt

SEQ ID NO: 41503 - DNA, 146 bp, Glycine max
gcgtatttggtcagcctaagtcctattgaatgaggcatcatggagggtgataatcccgtccggttgatcatttgcgttttacgatacgctttctaagagtcaagttgtttgggattgcagcttaaaatgggaggtaaatttctcct

SEQ ID NO: 41504 - DNA, 369 bp, Glycine max
tattcttcaatggggtgtacccaacaagattgaagaatatcttccttatccttctcagtaagtgtggggagatcaacaacaacaccaggaaggttaaggaagatattcttcaatggggtgtacccaacaagattgacatgattgctctttcatttgttcgcaaaggctcagatcttgttaatgtccgcaaggttctggggccacatgcaaagactattcagttgatgtctaaggttgagaatcaggaaggagtcctgaattttgacgaaatcctgcgcgagactgatgcattcatggtggcacgaggtgatcttggaatggagatcccagttgaaaagatattcctggcgcagaagatgatgatataca

SEQ ID NO: 41505 - DNA, 344 bp, Glycine max
gttgaccttgactctttggaagctttggcagatgagaacactgtggccattgttttcatcagtcctagtagtccatgtggaaatgtgttcacgtacgaacatttgaaaagggtatatataattataagctcaaacttgaaaacatatgtatttgagttgagaaaaaaacaaaaggttgtgattttttcatgactcttattttaggttgctgagattgcgagcaaacttggaatctttgtgatttctgatgaagtttatgcccatgttacttttggaagcaaaccgtttgtacccatgagggagttttcgtcaatagtgccagttattaccattggttctttctc

SEQ ID NO: 41506 - DNA, 300 bp, Glycine max
acgcgacgaagctcgaattcgcttagcttggtatcatttttcgggagggaactgaaatccgggggagggaagttaaatgggggagacggcaaatggccctggtgagccaagaacctgtgctgtttaatgacaccatccgagccaattttgcatatggaaagggcggcgatgcaccagaggcagaaattatagctgcagcagaactcgcatatgctcacaactttacttgtagtttgcaggaaggttatgacacaatagtaggggaaagagggattcaactatctggagggcagaagcagc

SEQ ID NO: 41507 - DNA, 367 bp, Glycine max
tcttgcaaaccttacaccattctctgatagcaatcaaagtcctcgtaatatgtaccaatgtcagatggcaaaacaaacaatgggtacaccatcaacatctttaagacatcgaacagataacaaattatatcgattacaaacaggccaatcaccaatcgttcgatctaaactttacgatacccttggttttgatgggttcgttagtggcacaaatgcaatcgtggctgtaatttcatatacaggatatgatatggaggatgctatgattataaataaatcagcacatgaacgagggtttgcatacggtactatttacaaatcagaagtaattgatcttaatgatgaacgtgtgcgtggagaacctatt

SEQ ID NO: 41508 - DNA, 237 bp, Glycine max
  unsure (1)..(237): unsure at all n locations
aaattttgnattatagtttttgtatggagatgataacttagggagtgttcatgaatatgtcaggccgtactttagtggttctaaattgaaaagctttctagctagtcataacatcaccattactgatggtatttacaaatcttgtgcaacttttctatttaaaaagttagcagattgtgattttttttaatagaaactttaatctttattctaatgttatttttcgtggctttcttt

SEQ ID NO: 41509 - DNA, 345 bp, Glycine max
  unsure (1)..(345): unsure at all n locations
ctcgtcgcgatgttacttttagctgaatccgagcgaactgggtacccatacgtgactggatcgtgtgntatctctatcaaatacaaagatgggattctaatggccgctgacatgggaggttcgtatggatctacccttcggttcaagagtgttgagcgtatcaagcctaatgtaaagcattcttttcttggtgcttgcgtgtgtgattaagtactttcatgagattttgttttacctttgaagaggttattactatatgacaacatgttgtatcatttgtaatatcttatatttgtcgtaaggggtgttcataatataattttatctctatctatcttattttta

SEQ ID NO: 41510 - DNA, 303 bp, Glycine max
  unsure (1)..(303): unsure at all n locations
aaataatgttactttatttctgacagcccatatcanattgggtgattaataaggctgaaaagggggctggaccaatccaacctgggaattactggtatgattctcgagctggattttggggtgtcatgggtggtccatgtcttggaataattctgccattcatagaatagttccggcatccaatgccagataaatgtgctgttggaaatactgactgtttatgtaatggtttatatctttaccaaaaagatttatttatgcttttttgtagaggactctcccgagattgctatagaaatttta

SEQ ID NO: 41511 - DNA, 397 bp, Glycine max
ggacaccataaaatttttttctgcagagcacaagaccatgagaaaggccacaacattgagcatcgcgggtaccacagtgttctatttactctgtggatgcatgggttatgcagccttcggagataatgcacctggaaatctcttgactggttttgggttctataacccttattggcttctggacattgccaaccttgcaattgttatccacctagttggggcatatcaggtattatattacatatgatccttcaatgctagttatctgttgtgaagtctacatattgacgcaagaattatgatgggctcaagagcttctgagcaggcagcagtagacaagaaatgaaaaataagagagaattgatcgaatattaacttataatgatcttgccttaat

SEQ ID NO: 41512 - DNA, 390 bp, Glycine max
agttttagtgcattttttttaaccgcaaagattcatttagggaagcttttggtggccacaggggtggccacaataagcccaagttcgaagctgaagaactcaatgaagaagccaagaagactaatcccataatgcacgagtgtccaatttgtggcatgtaatactttctgggccatgcactggggggtcacatgagaaaacacagaggtgccattagtgagaacgacaataataatgaagctgtgtcttctattaagcaagcaattgcaaaagctccggtttagaaacgatcgaatagcatgatgggttatgtgcttggagattgacctgaattttgtcgcctttgtagaatgacttgatagtgtttttttgaatcattgcttcttgagt

SEQ ID NO: 41513 - DNA, 308 bp, Glycine max
tttttaatgagattttttttagatatagctatgaaaaatggctgcgccagtttaaagctccagggatgtctttacaatccttcaaaaattatgattctttgtgtgtgtatggtgacgataacttaattagtgttcatgaatttgtcaagccttactttagtggttctaaattgaaaagctttctatctggtcataatatcaccatttctgatggtattgacaaaacttgttgcatcttttcaactttgaaatgttgcagattgtgatttttttaagaaatactttaatctgatgtttaatgttttatt

SEQ ID NO: 41514 - DNA, 187 bp, Glycine max
aaagaatcgatccttatttcaatgaggttcaggctcagatgggaacaaatttgtttaaattgtgtcttgatgatgtttaaactcctaaaggttccatgtttgatcttaaaatttctcaatcttaaattgcactttccaaaaactcatttgtaggaaccatcctgctttatgatctattttcacattt

SEQ ID NO: 41515 - DNA, 243 bp, Glycine max
ctggttatacttttatttcagcttattctgttccacaggctactgccattatcttctgaaaatgcgggatcctctgcatgatctggaattcgtgttttctttcgcttgttcgtttgtttaattcaataatggaaattaggcatgaccctcttgttgagtatgctctgcctatctgaaaatttccacacctcttttaattgtcgtaatgatgtgtgaagtgcgctttattttaaaaaataaaat

SEQ ID NO: 41516 - DNA, 377 bp, Glycine max
ctagttctagatttttatctgctcgagcggctcgaggtttgttgttgtaactcgttcttcttgttttgttgttctgtgtttgtgtatgttttttctctcacctgaaaatgtcttgctgcggtggtaactgtggttgctgaagcttctgcaagtgcggcaacggctgcggaggctgcaagatgtacccagacttgagctacactgagttaaccaccacctagacctttttcatgggagtggcacctgttaaggctcaatttgaggttgctgatatgtgtgtgcccgctgagaactatggctgcaaatgttgtccaaaactttttcctgctattccctgtcacttgcattgtgaggttgtttttgttgatgctattttt

SEQ ID NO: 41517 - DNA, 360 bp, Glycine max
catatacctgtgtttatctactaaaaggggttcaattctagctagttacattacatctgacgcgaccatgaacatggcgatcgagcttatgttactggatttcgcagttctatcatgtttagacaagtctattatattacatgacaacgctcatgcggatagggccacaaggcgcaccgacaacgaggagatgtcaatgctcgcggagtgtctagtgaaacacgacaaggtgtacaacgcgctccgggagatggagaagaggtcaaaaatctataagaacaatctgcactttatcgttgaacaaaactctatgaaccgatcttacaagttgcgacacatcgtgtaaaatgatctcaccaa

SEQ ID NO: 41518 - DNA, 321 bp, Glycine max
gcgacgaagctcggaattcgctcgagcagagctttgtcaatttttattgaccttttcgtggaggaatttgagtggtcaaaactggagattggatcacacttatacaaaattcttcaattagtaacttgttgagagttgctgcttggaagaaaggttgtttaatggtcaagattgtgatgtctgggaatgcatcagtcaaaaagagtgattgggcctcattggtacaagtgttttaacaaacagtaactgctcatagcatttttgtgcatgtaagtggtcaaaattcagtaccacatttctgggaaataatctttccaatat

SEQ ID NO: 41519 - DNA, 456 bp, Glycine max
  unsure (1)..(456): unsure at all n locations
acaagagcctangactgcacacgcacgcgtgacttgagctcggaatcgggctcgtgtttgaagtttttaagatgacttctccctacattaaatgtacaggctctttcttcatagcatttgggaatttggctgatgacaccatcaattttgaggcttttccccacaagctggtgcagtttggagagattcaggaaaaagttgtattgaaattttcacaagaggaatttcttacagcttggtcaactcaggtgcgtcctgcaacaactctgttggctgatgggtgtccatatttgtatgctatggtgcatggatgttcagtgtttacaataccaggtgattttgttatttggtgttaagttgacaaccattaaacaaaatttgtgccatattgtgcttcaatctcgggtatttcatgtttttaggctttttggggcccccattctcttgttttttttt

SEQ ID NO: 41520 - DNA, 205 bp, Glycine max
accgacagaccgtccacaacctgaaggtatgaagttcttcgtttcccccgtcgtgcagagctccgtcgaggtcaagaatgcccaggatctgcccaagctggtcgagggtctcaagcgtctgtccaagtccgacccttgcgttctgaccatgatcaacgagttcggtgagcacgtcgttgccggtgctggtgagctccaccttgag

SEQ ID NO: 41521 - DNA, 390 bp, Glycine max
ggcttttccccacaagctggtgcagtttggagagattcaggaaaaagttgtgttgaaattttcacaagaggaatttcttacagcttggtcaactcaggtgcgtcccgcaacgactatgttgggttgatgggtgcccatatttgtatgctatggtgcatgatagttcagtgtctacaataccaggtgattttgtcattggtgttaagttgacaaccataaacaatatgtgtgcatatgggctcaatcctggatttcaggttcttgtctttgggcaccattccttagtccatttcacagaaaactgtttggaatcaaatggcaacagtgagaacaccattggattttgattcttgcaagcagagcttttgtcaaatttctattgaccttctc

SEQ ID NO: 41522 - DNA, 352 bp, Glycine max
ctgaaacaaagattgagggcaatgaatatgaggctgacctcaatctacgtggcatttcaaactatttttctagtaatggtggcaaatgggcttatagcagcactggagtatttctaggaaatgataaagctgattatgtagcaacaaatcagttttacttgaatattagtggtcctgattacttcaaaacagcccgcatggcccctctgtatcttaattactatggcctttgtatgctgaacggcaattataaagtgaaacttcattttgctgagatagcattctctgatgaccaatcatatagcagccttggaaagcgtgtattcgatgtttcaattcaaggttttaaata

SEQ ID NO: 41523 - DNA, 370 bp, Glycine max
ggctgagtttcactgaatcaaacatagtgtcatcactgacagaaaataatattattggcagtggcggatatggtgcagtataccgtgttgcagttgatggtttaggctatattgctgtgaagaagatttgggaaaacaagaagttagataaaaatcttgagagctcatttcacactgaagttaagatattgagcaacattcgccacagaaacattgtgaaattgatgtgctgtatctctaatgaggactctatgctccttgtctatgagtatgtggaaaaccgtagccttgacaggtggctgcaccggaagaataagtcatcagctgtgtcaggttcagtccatcaatgttggtcttgattggccaaaga

SEQ ID NO: 41524 - DNA, 377 bp, Glycine max
tgatggtgcatatgattttggcatgattcaagaagcagatattggtgttggaattagtggggttgaaggtatgcaggcagtgatggctagtgactttgcgattgcccaatttcgatttttggagaggctcctggtagtccatggacattggtgttacaagagaattgcacaaatgatatgttatttcttctacaagaacattacatttggtctcaccatcttctattttgaggccttcactggcttctctggtcaatcggtttatgatgactggtacatgatattgttcaatgttgttctgacatcgttacccgtcatttcactcggtgtttttgaacaagatgttccgtcagaagtttgtttacagttttctgcac

SEQ ID NO: 41525 - DNA, 374 bp, Glycine max
agtggctgcaaatagctgatgtgcctaccattgcacagatggaagagttccattcgatgcagaggatgatgaatgctcctgattcaaatgataatatagatttactgttgagcattgataagatgggtttacaaggagcaggttaagcttttccaaacaaaatcgtttttgatgataagcttgtgttggctaacacacaacaattctttgatggaaattttccagtgaattctaggttaccaatttttgtgaattgtgtttatcctgtaaggcaattaccttcagaagcatgtcgttgtcaatgttacatgtggtagttgacgtggtgggattctcatatgcatgtagtgagggtttcctcgttcacagcatga

SEQ ID NO: 41526 - DNA, 398 bp, Glycine max
gcgtccgtaagctcgaaattcggttcgaggttttaaaagaaagattttttttaggaagagtgttacccctccaggaagatgggtatttttaggggggccatgcacaaaaggcgtgccactggtggcaagaagaaggcttggtgaaagaagagaaagtatgagcttgggcgtcaggccgcaaacaccaagttatcaagcaacaaaactatccggaggattcgtgttcgaggtggcaatgttaaatggagggcattgaggttggataccggcaattactcatggggtagtgaagcagttactcgcaagactcggattctagatgttgtttacaatgcctcaaacaatgagcttgtgcgaactcagaccctgttcaagaatgctattgttcaagttgatgc

SEQ ID NO: 41527 - DNA, 400 bp, Glycine max
cacctctccactcactcttctgtcgtccgttccatcgccgtcaccatgtccaccgctcctccccccactgccaccggctccagcaaggtcgacgccgccaaggccaagcttgctgccatgcccgcgcctgacgcgcccactggtctcggtctctactcgcgcttcgctttcgctggtgccgtctgctgctccgtcacccacggtgctctgacccccgtcgatgtcgtcaagacccgcatccagcttgaccccgtcacctacaacagcggtctcatcggtggcttccgcaaggtcatcgccaacgagggtgctggcgccgactggactggtttcggccccaccgccggtgggtactttcttcaaggtgccttcaagttcggtggattcgagttcttcaagc

SEQ ID NO: 41528 - DNA, 202 bp, Glycine max
gttgttttttcaaaggggagatattttgatggcgatctactacatgaagcaggtgagatgacttctccctacattaaatgtacaagctttttgttcataacatttagaaatttggctgacgaccccatccactttgatggcttttctctccaaactgcaccagcttcatataggtctcaataatgttttccaaagttaccta

SEQ ID NO: 41529 - DNA, 258 bp, Glycine max
atggctcgtctcgcgatcgcttacgacgacgagctccacgtggccctatacgacttcaccgcgactgctcgttcctgcaggacctttataatcatcttctactagttccgcaaccctaactacaacacctttgccaccatcaccgagatccgattcttcacccctatctacatcaccaacaaacccaccggaaaacccttcttctactacgaatcttattttctccacgcgactcatctactttagcccgagctgcgt

SEQ ID NO: 41530 - DNA, 368 bp, Glycine max
ggcttgtgggatgaagaaaatagaatacgcgaagtgatgaaaagcaagggattgaggaaaaaccctgggtatagttggattgaagttggacacaaagtacacatgcttcttgctggtgaccaatcacatccacaaatgaaagatattttggagaagttggataaattgaatatgcagatgaagaagtctggttacctccctaagactaactttgtgttgcaagatgtggaggaacaggataaggagcagatattgtgtgggcacagtgagaagttggcagtagtattaggactactcaacacaagtccaggacaacctcttcaagtgattaagaacctgagaatctgtgatgactgccatgctgtgat

SEQ ID NO: 41531 - DNA, 407 bp, Glycine max
  unsure (1)..(407): unsure at all n locations
acgggggggggggggnacgtaagctcggaattcggctcnagatttcaataattccattctctctgtgnatgggctgccggttccttcaagaggcgggtcttcaacaagaccctcaccggcaagaccatcacccttgaggtggaaagctctgacaccatcgacaacgtcaaggccaagatccaggacaaggaaggaatccccccggaccagcaacgtctcattttcgccggaaagcaacttgaggacggccgtacccttgctgactacaacattcagaaggagagtactcttcacctcgtcctccgtctccgtggtggcatgcatatcttcgttaagacactcaccggcaagaccataaccctagaggttgaaagctccgacaccatcgattacgtcaaggccaagat

SEQ ID NO: 41532 - DNA, 395 bp, Glycine max
cctgcttttgtgctctcttcttctgtccaaactccaaacttaactcgtcgctttcttcatacttcttaccttctagtgataatgggaacgaatctcagcactcccaaaactgagaagtcttctgatgatggtgaaaatgagcatcttagatatggtttatcatctatgcaaggctggcgtgcaacaatggaagatgcacatgctgcacatcttgatctggatgcatccacttccttttttggtgtttatgatggtcatggaggtaaagtggttgcaaagttttgtgccaagtatcttcaccagcaggtgctcaagaatgaagcatacatagctggagatataggaacctctcttaaggaatcatttttcagaatggacgacatgatgcgtggtca

SEQ ID NO: 41533 - DNA, 245 bp, Glycine max
ggttcgctggcgctcctgcatcatgttttccacccaggaccacgccgccgtcgctattgtgcgggtctgtgccggcgtcttcgcctggaggggtgagaccctacaagtgtactgtgggtgcaccgagcgcggcatcgactgcagcccggtcgactgacgtgcgctcctcaacgacgtcggtgagcgctgtgcgcccatctttcactagcggcggctcgggctaggtgcatctatgagaagaccgg

SEQ ID NO: 41534 - DNA, 394 bp, Glycine max
cggctcgagcaactcttttcctttttgcagctccctttaacccaaccaatttgccatgtcaagtttggaggaaccacttggtcttgacaagttaccaagcatgaataccattgacaggattcagaggttctcgtcaggttcttgccgtcctagagtagataacttgggcatgggaaactgctggattgaaggacgaagttgcagaacatctaacagctgcaagtgagtcaagtattgcaacttaagttaaggacttgatacattttactgatctatcattcaacatccttttcccctcttttatgttctaatccctgctgttgtatagtcttaaatctgctacctgcctactatgtccagaatatctttctatctctgcgcagcgaagatgatg

SEQ ID NO: 41535 - DNA, 397 bp, Glycine max
aatggctgcaaaaagcttatgttcctaccatagcacagattgaagagttgcattcgatgcagagagatgaggaatgctcctgattcaaatgataatattgatttactagtgagcattgatttgttgggtttacaaggagcaggtaaagcttttccaaacaaaatttgttttgatgataagcttgtgttggcttacacacaagaattctttgatggaaattttccagtggattcttggttaccatattttgagaattggttttatcctgcaagttaattaccttcagaaatctgtcgtagtatatgttacatttgtttgtggtcgtttttactcttcttttctcaatttttattttttttttttcttattttctaacttttacactttttttttttca

SEQ ID NO: 41536 - DNA, 375 bp, Glycine max
ttgttagaggtttaaccttcaaatatgatataattggtgctggtcctcattcttcaagaggagttggtgcaaaggaagatcaacaaaaacccaaaatgattgataccagattgagacaaataattaatcctcaatacaatgaggttcaagctcagatggaaacaaatttgtctaaattgcctcttgatgatgttcaatcttctaaaggttctatgtaggatcttaaaatttctcaatctataatagcactccccaagaacacattttgaggaaccattcatcgtagtgatttattagcaaattttttttacagaatgcaatcttatagctagtgttgtttagcatcgcactcattgtattaaaggtattattaaa

SEQ ID NO: 41537 - DNA, 394 bp, Glycine max
acgggatcggaggctaatctattaggcgctgttctctcgtcttctacaaaattttctgttcgatctcaaccaaggttgttccttccaccgccatgagtttcatcttcggaaagcgaaaaacacccgcagagcttctgcgggaaaataagaggatgctggacaaatcaatcagagaaattgagcgcgagcggctaggcttgcaaacgcaagagaagaaattgattgcggagataaagaaaagtgccaaacagggccagatggtacagtgactgtgtgttaattgtgtattatttgccttttgtttttaatggtatgtatggtgaacatgtcttactgcgaatatgttagtttagctgtttttcgatgcaagtttaaaacacccaacctctgctgt

SEQ ID NO: 41538 - DNA, 373 bp, Glycine max
gatgataagcttgtgttggctatacacacaagaattctttgatggaaattttccagtggattcttggttaccaatttttgtgaattgtctctatcctgtaagtcaattaccttcagaagctgtcgttgtaaatgttacatgtggtagtggacgtggtggtttacccaccactgcttgtattatttctgcagttaacaattcgtccttatacatcaacaaaatgtttctctcagcacttgtgaaaggtttgaaaattgttttttcttactagagttgacccttttccagtagctttattggctgtactttttggggtttataatgaaattctgagttctaaccccacttacccttttctttctcatctttttga

SEQ ID NO: 41539 - DNA, 397 bp, Glycine max
aaagaatcaaacagctacaacttgaactgttcataacccacaccaaaagttccaaaccccaacccgaaaaatcacacacaccccctttggaattgggatccatcgccatatctctgattaggttagataagattccctatgggcacttccattctcgacgccctgaacgtccgcgtggaaggttccggcgataagtaccttttcctggcccacggcttcggcacagaccaatccgcgtggcagcgcgtgctcccttacttcacccgcaactacagcgtcattctctacgacctcgtctgcgccggcagcgtcaaccccgaccacttcgactaccgccgctacaccaccctcgacgcctacgtcgacgacctcctcaacatcctcgacgccctccgcg

SEQ ID NO: 41540 - DNA, 396 bp, Glycine max
aggcgaaagactttatgtgtggaattgataattagggttgatagtgtcacctaaataatcgatgacatgttcaacgatctatagatgaataaggtgctcataaattgcaacgaccatgacaccatcaccaacctgaagaagctggcggcgggtcatactggcacaagagccgacacgattctcatgcataattgatactccatatacaaggatcacatgactatcaaggattacgagatccaccactgaatgtgtctcgaactctactacaactaaacacatggagtgtaagatgcatgatatattactatgatctgggaatgagatgaggctgcaaatgtaattttcactcgcgaaagagcctatgatttgaataatgtacatcctgcaatgata

SEQ ID NO: 41541 - DNA, 338 bp, Glycine max
gctcctgttttgaaggctgtaattgagaaaaccaatgtgaacccaagtgaagttggggatattgttgtaggtagtgtataggctcctggagctcaaagagctagtgaatgccgactgactgcattttatgctagttcacccgaaactgtgcctggctggaccgcatataggcattgaccatctgagcttcacactgctcttaatgtaaatgccgctactaagcctgatacacatctcgatccgctgatcagtcaagcatgcaaaggatactctacacagatttgttcaatcttgggtcgaaagatgctccagactactgcttgatggaagaaatatac

SEQ ID NO: 41542 - DNA, 436 bp, Glycine max
gcacgcctacataagctcgaaattcgtctagagtatattacttctacaaggctaccacatttaaaactccctctttctacattaaatcaaaaacaatcagggcttctttacattccatcacattttcaccaaaaactggccctttaggaattggaatgggccttttcaatcggagcctttgttggcaacttctaccaggattttgacgtaacttggggagatggtcgtgccaagatactcaacaacggcgatcttctcactctttcccttgacaaagcctctggctcggggtttcagtccaaaaacgagtatctctttggcaagattgatatgcaactcaagcttgtacccggaaattctgcaggcactgtcaccgcctattatttgtcatcaaaaggatcaaattgggatgagattgactttgaattcttgggga

SEQ ID NO: 41543 - DNA, 399 bp, Glycine max
caccttcctcttcgaccagccctctcgctcacttttcctctccctccacgcccgtcccttggataggcatttctcagctcggcatctctcggctcgccaccactccaggatccagctgctgacgctgcccgctgtcaccatgccttcgcaccagcctgccgccggcgaggcggctgttaagcccgagttcctctcgagccagccctccgctatggcgaagccctcggagcccaaccgcaaccccaagtacgacccgaccaagaagcacatcaccgaatatcccatgacccgccagaactggtacaagcacgtcaactggctcaacgtcttcttcatcggcggcatcccgctgatgggctgcatcgccgctttctggactcctctgacattcaagacgct

SEQ ID NO: 41544 - DNA, 398 bp, Glycine max
cacactcattcagtgccagaatggcactacggcgcttggtgatgaccctttatgccatcttcactcttgcacttgcgagagaaagccatgccacatacaaagacttttggcctgctgtttgggcaaccactcccattacaagttcattgagagatcttctaatgcctgtccctgcaagtgttgaaatcgccgatcaccctatgcaaattgaagaaacacaagacctggaaaccttcttatataaagaagaccttgatgcatgctaaacagatgaaagtacaattcagcaagtcttcctttgaacaaccatggggtgatggtccatgggttaagggaattaaagacactactgaagaaggatatagctttgaagagctatgcatcaagaaagaaaccat

SEQ ID NO: 41545 - DNA, 397 bp, Glycine max
  unsure (1)..(397): unsure at all n locations
ctgcaattcactctgtacaattcttcgttcgttctctgcagctatatcctttttgagcttcaatggcggacgctgaaaccttcgctttccaggctgagatcaaccagcttctaagtctcatcatcaacacattctacagcaatgcttctgatgctttggataagattcgattcgagagcttaaccgacaagagcaagctcgatgctcagccagagctcttcattcgtcttgtgcctgacaaggataacaagactctntccattattgacagcggcattggaatgaccaaagcagatttggtgaacaacttgggtaccattgcgaggtccgggaccaaggagttcatggaggcgttgcaggccggtgctgatgtcagcatgatagggcagttcggtgt

SEQ ID NO: 41546 - DNA, 344 bp, Glycine max
cttatctatgactcatgttcctatttttgcaagactttgttctggggaccttaacagcagcaatgatgtcaaaatgagtgtttgggagatccatgtaaatggctggaggggatctcccacagtataagacattttttcttcattgtaattgaatatgcagaagtgtaatcatccatgtttcattgactgttgtctgatgagaaccttatataaatataagatactgcatttcatatacagggatttgctataccaaaagaggcacaaggaaaagttgcaaaatttgatttccatgggcagccagcagagctcaagcatggcagtgttgtgattgctgcaatcac

SEQ ID NO: 41547 - DNA, 266 bp, Glycine max
ctgatactgtcagacttaggcgtatgacacgagagaaactgatcctttagctgacctacagaatatgtataacagcactcacaaaggtacgaccttaggggcattgatgatgggagtgcctggagcagtagctggccttaatgcagacgggatgaagcatgggcgaatggcatgggaaaccgtactgcaaccagctatagcacctgctggagagggttgtggtgctaatggtactgtgctggaggacatggctcatgctgccaaaa

SEQ ID NO: 41548 - DNA, 314 bp, Glycine max
ggctctcttgagaagattgctaggtacttcgaagttggatgatgcattatctccgaaagggaatactcatgctaccgaatggacccaaagttggagagggctaacatcgaccagaacacaatgggcgagtttgtcatccgtggtatcacatacactggacactacgagcctgttgagggaatgtgtgatattctcgacgccttctagaaggagaccggcgacgatattgccatccacgtagatgcagcatgtacgtggctttatagccctcttcacccactcggaagctggcaagaagtggcactctgagctac

SEQ ID NO: 41549 - DNA, 360 bp, Glycine max
aacgatattctgttttttgattatgctagttttgatggggggggtaccaagcaagttatgagcaagatgtcataaatgataaacagtctttgtggtggtgatgaaaaattgatgcgtgaaaggacacatttgctgttggcttgttgttcaaggatggcaatttgtaagaaagatgtttggagagttgaatgtggaatcccttctggatttccgctcacagttattctcactaacatttttaatgagaagcttattagatatagctattgaaaaattactgtgccaggctagagcttcaagtatgtttttacaatccttcaaaaattttgtttctttgtgtgtgtatggtgatgataactt

SEQ ID NO: 41550 - DNA, 395 bp, Glycine max
atttgctgtgttttttatattgacaggtactattactttagctcagcttttcgtctacattgctgaactaaacactgaaatcagacaaaaggaacttgtcaagtgggtacttacaaggaaagtgaccaatttagatttggaggctgcagatcttgatgaggatgggactgttgggtttgttgagcattctttcaaagtcatatatattgttatactaccaatgataaacatggctttattcatttttatctcttttcttttgtttctcatagggctgcggaattcgttatttataagctcaaagagatggggaagattagtcaagaagatatatcacttgtgatgcacgagtttgaacagcttgatgttgatgattctggcacactatcaacttc

SEQ ID NO: 41551 - DNA, 398 bp, Glycine max
catacatagcgcttattattcctaagatactcatcataccgagcctgatttttcagatcattttacacttgatcgcaccatcagaggcgcaaggcccattcgactggttacatttcctaataccatcgtgcagattgaaccacacatgaattcaaggtttcagcttttgagtaccactaccaatggtgattatgttcaaggaaaagatctcgcattgtttaaagtctatgtatcatgtgctcctgctgtcttgacatcaacttacactacaactacattgttgtaatctggtttgcaaaaagacatatggataattgtacaaaatttctgtaaggatgacttacgttgctcattacgttaatcacccccaaaaaaaagatttgttctagggaaatttt

SEQ ID NO: 41552 - DNA, 401 bp, Glycine max
cgtcgtgccccggaaaaccgtctccctgcagcgattgatgacggcttctttgcactcctctggctagattccgtagccagaagaaatgcagaggagccgtggctcaaaaaacatggcaattttggccgtgtttttcttataggagatagctcaggtggaaatattgtgcatgaagttgctgtccgtgccggggaggctaagttggacctgctccatctcgccggaggaatcccgatacatccggggttcatgcggtcgaaacggagtaggtcagagttggagaaaccacaatctccattcttgacgttggacatggtggacaagttcatgagcttggcattgccattgggttctaacaaggaccaccccattgcatgccccaatggaggcggcgctccgcc

SEQ ID NO: 41553 - DNA, 373 bp, Glycine max
taaaggttctatgttggatctttaggagtttcaacatcatcaagagacaatttaaacaaatttgtttccatctgagcctgaacctcattgtattgaggatctattctttgtctcaatctggtatcaatctttttaaattgcctcttgatgatgaggcaaccacaaatggttctgtatcctttctcaaatactgctgttgcatgagctgaattcagcgctgtacccgggtaaacagcctatgtgcaaccgcattgacacaactattcattgcactaggatgctttagatgcatcttatgttgttcagatatatgctgttctagaaacgatggctgaaatatcaattttgttgtttgatcgtggcattttactgc

SEQ ID NO: 41554 - DNA, 301 bp, Glycine max
agattgtgaactccgtcgtcgagggcgtcacgccctcctacgcgcttgagtcccgcctcggcgactgtggccgtgccgcggcgattcggcgcggggcgctgcagcggctgacggggcggtcgcttgaggggctgccgctggaggggtttgattatgactccattttggggcagtgctgcgaaatgccggtggggtatgttcagattccggtgggggtggcggagccgcttgtgtttgatgggtttgaatacactgggccgatggccacgacagaagggtgccttgtggctagtaccaatag

SEQ ID NO: 41555 - DNA, 359 bp, Glycine max
ctagatttgacagaagatggattagatggaagtgattagaaatagaggggttcctgctgatgttcttgcaaagcgagctcatgaaatttgaaaaacatgttgctgggcggccgcctcatagttcgctttcctacccgggacttaattccgtaccgctccctccaggctgaccgatttcccttttaggcagagactttatgctttgggcaatcaagggcaatctccttttgctgcgtaaaatgtttatccgcttataattccacacaaaatttcgtgcgggaggcataaatgtaaaagcctggggggcctaaggagtgggctaacttactttatttggttcgcgctaattgcccgctttc

SEQ ID NO: 41556 - DNA, 234 bp, Glycine max
gcttgttgcgagctttaagctagttgatcgagaggcgaatacgaaggagctggttatgtttgtggctgcagactgtatggtagcatggccattccatgtagcctgctaccaaaggttgcttatacgaatgacaaccggctatggtgggcgcgcttcggaagtataatgcacgaggagcaggctcgctgaacacgcacacatcatgcgctcctttactaccattactgcagagtg

SEQ ID NO: 41557 - DNA, 386 bp, Glycine max
tgtcgaagaggcttacaacaagctaatagttgaacttgagaaaagtgttcctacattggttggcattgaatgtcccaaggatgagaaacttcctcgtcgcaaaacttttgacaaacctaagacgcgcttgttcactattatttctatggagattcaccatcgcgatccgtcatatttgtcagattccgacaacgagaaaaccaacgcttctgactccttgaagtgaaaagttttcaggcttttctgctgagaaaagcccattcaccatgttcttggtggcggaaaaccggccgacgtttttctctggagaaacaagaagatatctgcatcgacactcggagttgcgaccgctatatgggttctgtttgaattgcttgagtaccacc

SEQ ID NO: 41558 - DNA, 365 bp, Glycine max
  unsure (1)..(365): unsure at all n locations
accaaatatctcaacaaaatagcgaaggttgatgtggaagcaaggacaatgactgtggagagtggtgtgacaatgaagcancttataaatgaggctgcaaaggtagggttggccttgccatatgcaccatattggtggggtttgaccattggagggcttatgggaactggtgctcatggaagcactntgtgggggaagggtagttctgtccatgattatgtggtggagcttaggattgttagggctgctggtcctgaagagggttatgctaaggctgagagcctcaatgaacaacatgaagatctcaatgctgccaaagtgtcacttggtgtgcttggagttatttacaggctactctgaaacta

SEQ ID NO: 41559 - DNA, 199 bp, Glycine max
gacgtcgactgcacgcgtcacgtcagctcgggcttcggctcgaggtaaggctatatccaactggaattctaaacacgactgggattgactgagtgacttcgataattgccacagagtgtgtacaaactcctctgaccaacagaggatgccagcgggtggagggagatctgcccctgactgctcatgcgggatagacaca

SEQ ID NO: 41560 - DNA, 406 bp, Glycine max
  unsure (1)..(406): unsure at all n locations
gcagacttaacaacagcacaaagcgggttactgtctgttcaagctaccatctctctctctctttcttagtgcctccttgccagaagttaaaatggcccaagaaactttcctattcacatctgaatcagtgaacgaggggcaccctgacaagctctgtgaccagatctccgatgctgtgctcgatgcatgcttggagcaggaccctgacagcaaggttgcctgtgaaacctgcaccaagaccaacatggtgatggttttcggagagatcacaaccaaggccaacgtggactatgagaagattgtgcgtgacacatgcaggaacattnggtttgtctctgatgatgttggtcttgatgctgacaactgcaaggtcctcgtcaacattgagcaacagagtcctgatatt

SEQ ID NO: 41561 - DNA, 399 bp, Glycine max
cgtctgcgtacgctgtcctaagctgtgtgtgcgcacacattcgtgttttggtgatattacggaattggtttgatttatattgttaaacatgggcagaagacagaataaatatcaacaatacacatccgaggatctacctgaaagaggacccgtggagagcctgatctactggcgcgattccaagaaatccggtccagtgttcggaggagtactcgtcgttctactcgctcttacatatttctctctaatcagtgttgtagcttacgtttcactcatcacccttggcataactttagcgtttagaatttacaaaagtattgtacaagcagttcaaaagactggcgatggacattcattcaaagaatatctggaactcgatgtgtctctaccccaagaaaa

SEQ ID NO: 41562 - DNA, 404 bp, Glycine max
gagaaggtttttcattttattcatgatcaagtttattatggggacggcttatcataaaagagttgaaccttggacttttatacaaaaccttggtgaggctgtttttatacctgccgggtgtccccatctagagcaaccttaatgcacgacctcgagccgcaccattctttcttctcctttcgaagcactgccaaataaaaatggagtggcctgcgtgtacggacgaatacgaaaagctcataattcggatgaacactcccagggttgtcattgacaattccgttttctcctcagctacgctagtcaaggttgacagcgccagaaggcatggtattctattggatgctgtagaagtgctagctgacctgaacctttcaattaagaaagcgtatatttctgctgat

SEQ ID NO: 41563 - DNA, 406 bp, Glycine max
attttccctaaagaaggaagagtccctttaagttatgagaaaacatatgaaatatctcttggcattgctcggggtattgcatatttgcatgaaggttgtgatgtgcaaattctacattttgatatcaagccacacaatattcttctagatgagagcttcatcccaaaggtttcagattttggacttgcaaagctacatcctgtgaaagataggtctcttgttttacctgaagcaattggaactttgggctacatagctccagaattatactacaaaaatattggtggagtatcatataaggccgacgtttatagttttggaaagcttttgatggaaatggcaagtagaaggaggaactcagatcctcttccagatcaactttcaagcaatgattactttccgtttt

SEQ ID NO: 41564 - DNA, 371 bp, Glycine max
ctcgagccgctttcctcgaggacctactcccaacctagagtagccagatgggaaagtaaaattaaaccttgctcatatatggatttctcggatataaaatgagccacttcaaaagtttattattttggtccaaaatactattaatctccataggctacatgggtccctaagtttgccaatagattgataagtcaagcattcctgggccattcatctattttcattgtaaaaaaaagtggaccttatatattcataacttgtttcgcaacacaagataagcaattagaggttcttgcgattagtgctcatacaggaaatggaatgcagtctctaacagtggttgggaaactagataaatacagggggcgggc

SEQ ID NO: 41565 - DNA, 342 bp, Glycine max
  unsure (1)..(342): unsure at all n locations
aattcacgatttttacttacactnaaancaggagaatcggtctgtgacttataccatcatcatggccatgttgaaaatgatgaatcatggcatccgctgccttaaaaattgttcagaagcttgtacactgtaacacgtatgttaagattcacagcaccttttccacttcttgcatatcccgtgtaccttgtaagttgttgtgctttgaccttaatttgaacatcaattactcttcatccttgttagaaaaaattacatggtgtttgtttgtcattttaatccaatcgttgttggattcttgtcaagatctgttctcactttgatcctagcagtgacttgttt

SEQ ID NO: 41566 - DNA, 437 bp, Glycine max
  unsure (1)..(437): unsure at all n locations
ccgtccgtaggctcggaattcggttcgagcttcgtttaaatctttttttttttttttgcgctttttgcaaacggaccatttaatttccaaagggatcaacaggtcgaaggagaaatggggctgacattcacgaagcttttcagccggcttttcgcgaagaaggaaatgcgaattctgatggttggtcttgatgctgctggtaagaccactatcctctacaagctcaagctcggagagatcgttactacaattcctaccattgggttcaatgttgagactgtggaatacaagaacattagcttcactgtttgggatgttggtggccaggacaagattcgtcccttgtggaggcactacttccagaacactcagggtcttaattttgttgtagacagcaatgatagggacaaggtntgtgaggccagaaatgagttaca

SEQ ID NO: 41567 - DNA, 406 bp, Glycine max
ctgttggcttgttgtttacgggtggcaatttgtaagaaagatggtgggagagttgaatgtggaatcccttctggatttcccctcacagatattcgcaatagcatttttaacgagatgctcattagatatagctatgaaaaattactgcgccaggctaaagctccaagtatgtttctacaatccttcaaaaattatgtttctttgtgtgtgtatggtgatgataacttaactagtgttcatgaatatgtcaagccttactttagtggttctaaattgaaaagctttctagctggtcataatatcaccattactgatggtattgacacaactagtgcaactctgcaatttagaaagctagcagattgtcattttctcaagagaaactttaagcagctgtctaatgttt

SEQ ID NO: 41568 - DNA, 181 bp, Glycine max
aaacacactcattgcacatagtaatgcgctttatttaagtgaataaaatattacatactatttcacaaattcaaaaggacactcattaaccaaatatttgagactttttcagttttcaagaaattttgttagcataaggttagtggcgctagaactcataattttatttttaaccccaaaa

SEQ ID NO: 41569 - DNA, 409 bp, Glycine max
  unsure (1)..(409): unsure at all n locations
ccccgaccgtagcttnggattgggattcggccacggacatcatagagcttgtagaaaccaacccgcgatctccagcacctgggttgatgaagccaaggacatatggggatccagtggggcaatagactacaaggcctgcgagacccacttatttcgacagtggagccgagactacatagctcgacctgcagcctacataagaacggaagacaggaagtaaaagcacatgaatctagtgcaccaataatcatatcatcatacagtcccttgtgtggaactaaaaggtaacagtgagaacaccattgtatataccaactaacgagcagagggtttggcacaaatctatggaccttctcggtggaggaatcttagtggacaaaaccggggattggatcacacttatacaaaa

SEQ ID NO: 41570 - DNA, 286 bp, Glycine max
cgatttctcatctcacgggccacaatattccctaagggcaagggagcagataacaccttggtggccaagttctacaaccatctcatctacgagataatagcacatcgctcaaagccatctgtcacacttctacatttacacctcccacaggctcattgacgatgaatatctggagacttctcacacctcaagaagtccaggacttccgtaactatgctgactatcgctttacgacatttgttgatctcgtgcagcactgcgtcaccctcaatgaaccatattgcta

SEQ ID NO: 41571 - DNA, 252 bp, Glycine max
gaaacatggcttccttaagctccttagtgctgctccttgcagctctaattctatcccctcaagttcttgcaaactatgagaatcccccagtgcacaagccgcccactgcgaaaccacctgtttatacgcccccaggtgagaagcctcctgtttacaaacctacagatgaaaacacctcaaaatacaagcctacagctgagaagccacctgactacatgcccacacttgagaagcgcacagtgcacaagcccc

SEQ ID NO: 41572 - DNA, 248 bp, Glycine max
ctactgcttttttgaaggagagcaggttattctgtatcagcaaggataaagtcaggtggagaggctgtagttgcagctgaaccagctgctgacattccaggcgagcctatggatatcatgactgccttgcaacttgtgctcagaaaatctatggcttatggtggtcttgcacgaggccttcacgaatgggcaaaagtgattgagaagcatgctgcacaactctgtgttctaacataagactgtgacca

SEQ ID NO: 41573 - DNA, 362 bp, Glycine max
agttcatttacatccaccccatgtcccaaaacctcatccaaagcctccagtgcatccccatccaccttatgtcccaaaaccaccagttgtgccagttacaccaccatatgttccaaaaccaccaattgtgaacccttcctatgtcccaaaaccgcctgttgtgccagttacaccaccttatatccctaaaccaccagttgtgacaccaccatatgtccctaaaccaccagtggtgccagttacaccaccatatgttcctaaaccaccagtggtgccagttacaccaccttatgtgccaaaaccacccattgtgaaaccaccaatttgtttatccaccaatttgtgccaaaaccaccaaattg

SEQ ID NO: 41574 - DNA, 420 bp, Glycine max
gagtttccaacatcgctcctaatatcatttctgagaaccaaagaggattcatcaaagggagatcaattttcgattgcatcaacactacttcagaggtcatcaaacttctctcttttatggggagcgtgatgttggtgaaatttgttattcacactatgctagcttactcatttcatgtttacctgtggccatgtgacctcttaggcgtgtggactagtggattagaaactttctctggagtggtgatgtggatattaggaagcatgttattgtcgcttggagttcgatttgtaagccttttgaggaaggggggcttggtttgcgctcgatggctaccattaacaaagcaacaatgctaaagctgggttgggatatgctctcaactgatttgcagtgggctaaaattttaaaagctcatgt

SEQ ID NO: 41575 - DNA, 411 bp, Glycine max
cgaaaatgatgatgtaaatagagcagtgacccaaagattgcttcagaaactaggttgtgttgtaactcctgttgcttcaggatttgaatgccttactgtcattggacctgcaggatgttctattcaagtcattcttttagatcttcacatgcctgatttagatggctttgaggttgccacgaggattcggaagtttagaagtggtaatcaacctatgattgttgccttgactgcaagtgcagaagaagatttgtgggaaagatgcatgcaagttggtattaatggagttatccgcaagccagttttgttgcatggaattgctagtgaactcagaagaatcctcatgcagggaaataatgtcctttgagaatggaatggagggtgcaagttgtaacacttaagcatctcaag

SEQ ID NO: 41576 - DNA, 461 bp, Glycine max
  unsure (1)..(461): unsure at all n locations
agctcgagaattcaggcttcgagttagaagttttgatttctagcaaanncagagctttttggcgaattgttctatctgacgcttctcaggtgcgagagaattttacgtggacgaaaactcgagagattgcgatcacacgtgatacaaatattctccaattagtaacattgttagagagttagctgcttggaagaaaggttgtttaatggtcaagattgtgatgtctgggaatgcagcagtcaaaaggagtgattgggcctcattggtacaagtgtttttaacaaacagcaacagtacagagcattttgatgcatgtaagtggacaaaatcagaaccacattcctgggaatttattcttcccaatagaggtatgtggtcctaataatggttttgaaatgtggagttctgagtgggcaaatcaaacttcatggcatttgagtttccttattgacaatcccaaa

SEQ ID NO: 41577 - DNA, 340 bp, Glycine max
aattaacagctcttgctgaaaatgactatttggtttacaattccattcgggtaatcattgaaattgaaaacccgaatggaattgtgacacttttcaattttcttgtcacggcaacctgggacgaagtaatgacaagctacaaggaattaactgggacttcttggacctatttgtacttcattagcttctacttaattactgttttgctgcttttaaacttgattattgcttttgtcttggaggcattctttgccgaaatggaacttgagtcatcagaaacttgtgaaggaaatgacaaggaagttgaaggagataaatatcgaaagcggtctattggcac

SEQ ID NO: 41578 - DNA, 262 bp, Glycine max
ctcgagccgtgaatatgtcaagccttactttagtggatctaaattgaaaagctttctaactgggcataatatcaccattactgatggcattgacaaaactagtgcaactatggaatttagaaagctagcagagcgtgattttctcaagagaaactataagcacgatgtctaatgttttgagggtggctcctgaggataaggcgagtttatggtcacaacttcattatgttgcgtgtaataatctgggaatgcaagaagctta

SEQ ID NO: 41579 - DNA, 223 bp, Glycine max
gaatgatggggaggttgattaggggtttggaggaaagaggggtttttgaggatgttagtgttattatggttggtgatcatggaatggttggtacttgtgataagaagttgattctttcttgatgattttgcttcttggattcaatatcctaaagattgtgtcgttactcatacttctttgcttgcaatatccccaccttttttttatgttcctttttatttta

SEQ ID NO: 41580 - DNA, 365 bp, Glycine max
cgctgcttcactattctccctatggagtttaatcttgtggtccgtcaaaagtttttaaattttgtgaggttcattatgaagaaaagggacaagcttagttgtcaagttggaatcaacccatactccatggaatggactggtttggccaatagattactgagtaagggcaatgatattctgtgttgcgattatgctagttttgatggtttgattaccaagcaagttatgagcaagatggcagaaatgataaacagtctttgtggtggtgatgaaaaattgatgcgtgaaaggacgcacctgctgttggcttgttgttcaaggatggcaatttgtaagaaagatgtttggagagttgaatgtggaat

SEQ ID NO: 41581 - DNA, 263 bp, Glycine max
ctataacctacctgactttgttcgatttcaacaacggcacctaatgcctacttggtcatgtattacttgaagggcaaggaccatgatctgcttatcgacaatgctgcaggcattggctctgctggaaggggtgttgtcgctgctgatgaggtcaacagggacacttgtcaagcgggtgctcagcatgattgtagagaacatcgaattcaacaggccagctcttacggagctgctactaactgctcctggtgctcttcaatatc

SEQ ID NO: 41582 - DNA, 300 bp, Glycine max
  unsure (1)..(300): unsure at all n locations
gagatcacaggtgctactacattgctaccatactgggcgggactcaagagtggctacggcactgactatgcttaagaaacacctggtaaattataaagggcatgtctcagctgctttagttcgttggaatagaacaggagatttggcatgagcctcttgttgagtatgctctgcctatctgaaaatttccacacctcttttaattgtcgtaatgatgtgtgaagtgtgtgttattttaaaaaaaaaggcctaaaanncatcacacacaatctaaacattaaaaaaaaaaaaatgggcggg

SEQ ID NO: 41583 - DNA, 389 bp, Glycine max
gcgtagtagtagttccttagcggtcaatcaaccgcttccgggggaacaagctatgcctcccgctctgcctgttatgcaggaagctgctaatcgggctctgccctacccctatcaaaataatgagattatagggggggacagtgttgaatccatccaacggaggcttttggggagattcccctctccttcagcccatgagattcaaatggcccggattgaagccgaaaacctattcgaggtcaaggtcgatatttgtcaggtcatggcgggccttcatccaagcggtgattggatgggacggggggctagagctctggataatctttgtaccgtcactggagaggagtccttaagtaagcttcctcgaatgctggaggacctacagactg

SEQ ID NO: 41584 - DNA, 432 bp, Glycine max
caaaaattgcgcaacagctgccaggcagaacagacaatgaaatcaagaactattggagaacaaggattcagaaacaagcaatatatgcgaaatttgaggatcacagaagagcaggatttgtagaatttgtcaagggtctacagatgacaagatgtcttcataaatcacaagaatcatctccttcggccatgtcaacccaagaccaagcaattcctttaccttttgatggtgttactgttcctcattattcatcatttgggattgggacaacaccaacaatacaaatcacttgccatggagatctcaatcatttgaatcagcatgagcagaactcagactctgaacaccacaatagttcatgcatttcctcttcagaatcagcaaatatcccaaatatgagtcagccttttggatacactactagtcaatttc

SEQ ID NO: 41585 - DNA, 465 bp, Glycine max
  unsure (1)..(465): unsure at all n locations
gaaaggacacacctgctgttgtcttgtcgttcaaggatggcaatttgtaagaaagatgtctggagagttgaatgtggaatcccttctggatttccgctcacagttattngtaatagcatttttaatgagatgctcattagatatagctatgaaaaattactgcgccaggctaaagctccaagtatgtttttacaatccttcaaaaattttgtttctttgtgtgtgtatggcgatgataacttaattagtgttcatgaatatgtcaagccttactttagtggttctaaattgaaaagctttctagctggtcataatatcaccattactgatggtattgacaaaactagtgcatctttgcaatttagaaagttagcatattgtgattttctcaagagataccttaagcagatgtctaatgttttgtgggtggctcctgaagacaagctagtttattgtcacaacttc

SEQ ID NO: 41586 - DNA, 416 bp, Glycine max
attggatcacacttattcaaatttctccaattagtaacttgttgagagttgctgcttggaagaaaggttgtttaatggtcaagattgtgatgtctgggaatgcagcagtcaaaaggagtgattgggcctcattggtacaagtgtttttaacaaacatcaacagtacagagcattttgatgcatgtaagtggacaaaatcagaaccacattcctgggaattaatctttccaatagaggtatgtggtcctaataatggttctgaaatgtggagttctgagtgggcaaatcaaacttcatggcatttgagtttccttattgacaatcccaaacagtctacagtttttgatattttcttgggaatctctcaagattctgtaatcgctggttatactcttaagccagctttttttgtttca

SEQ ID NO: 41587 - DNA, 313 bp, Glycine max
gaaattttgataaaccgcgatcacaggttgccgcaccttaaaaccggaaacaaaagcaatcgttacttgatttcaagaatctctcaatttcttcctacttctttgtgtacggtttcttaagggaaagaaaatcactctctgtgctggccacagacttcgggaatcattttcttttccactcttagtttatttgctgaacacttttctatttgatataagacttcgggtcagaattaaacttcttctggctctttctcaggtctctggttaatttcaagttcaagctggtgaaatcttggattagtgcttccac

SEQ ID NO: 41588 - DNA, 388 bp, Glycine max
ccggggcgtgagagctgtccccgtctagccattgattgggaaaagaccacgcttcaaagatgagtaagcttcagagtgatgctcttagagaagctatcttaagaatcatgactgatttcaaggcaaagaacatgaaatttgaggagaccattgaactacaaattgggctgaaaaactatgatccccataaggacacggcgcgtagtggctctgttaaatctgctgagattgctcgacccaagaagaagacatggctgcttggggaggcccaacacgtttgagaggctgagaagatatgattggactacatgggacttgcggcctttgagaagcttaacacaaacaagaaattggtgagagaactaggcaaaaaatatcatgccttttt

SEQ ID NO: 41589 - DNA, 399 bp, Glycine max
catggatgccacgaacaatcttagtgatgacttcatgattggttcaggaggttcaggcaaaatctacaaagctgaattggccactggagagacggtggctgtcaagaagatttcatcgaaagatgaatttctgttgaacaaaagcttcttaagagaagtcaagaccctagggaggattaggcatagacatctggtgaagctaataggatattgtaccaatagaaacaaagaagcaggttggaatctgctgatatatgagtacatggagaatgggagtgtatgggattggcttcatgggaaaccagccaaggcaagcaaagtaaagaggagaattgattgggagacaaggttcaaaattgctgtgggattagctcaaggagtggaataccttcatcacga

SEQ ID NO: 41590 - DNA, 378 bp, Glycine max
tatcaatattggtgttggcgacttttcttccctgacaaaatttgcgcaggaaaataacatcaatttggttataccaggtcctgaacaaccacttgttgaaggtatcgagttagcctttaaaaagattggaattccatgttttggaccttcacctaaggctgctatgatagaaggatcaaaggcatttgcaaaagattttatgaaaaaacatcaaattccaacagcagcttatgagaatttttcagattacggaaaggcaaaggcatatctggaatcagtatctcataaagttgtcataaaggcttcgggtcttgctggtggtaagggagtcctaatttccgccgacatacaagaagcattggttgcattgaaagaaat

SEQ ID NO: 41591 - DNA, 300 bp, Glycine max
ctaaactggggagaaccccgtgcgcgagctaatagctgatgatgcctggctgaatggccgaatcataactactggtcaacaacgtggcgctgcaatgatcaaagctagaaggctgacaagtgcactaatagatggtagtgctgctagtgaccatattaaaaactgggttcttgtaactaccaatggcacctgattataaatgggaggatattctgatgggaactacaatgtaccagctggacttatatattcattccccgtgacttgatgccaaggggaatgggcaatacgtcaaggact

SEQ ID NO: 41592 - DNA, 413 bp, Glycine max
catttcgccttgtctaaacttgagcaaaatgcaggccatccagcgctccgcctttgctggggccaacaccagggtgtctgtgcgctccaggcagacaaccgtggtggtgcgggctgtgcaggacgtccagggcacagttgtctccacctccatgcagaacaccgtggtggtcaatgtggagcgtcttgcaccccatcctaagtacttcaagcgcatcaggcaaagcaagcgcttcttggcccatgtggaggacagctctgcatgtggtgtaggggactatgtgcgcctggagggctgcaggcctctcagcaagaacaagcgcttcaaggttgctgaggtgctcagggcagcagacaagaactaaagcagcccagcactagcctggatgctgcagcacctacacagtcatgaac

SEQ ID NO: 41593 - DNA, 407 bp, Glycine max
cagaatgctgacattcctatgtctgatgccgtttcggatgaatttgcatttggaagcaacgtgttggggcttgtcaagccttgggaaggagaaaggatccatgaggaatttggatcagatgatcttgaactcacacttggtaactcaaagaccagatgaagtcacaaatatgaattgaatgtgataatgtaaacattgacttttgttggttttgatcagtagatatgttagaaggtaagtgaggtggtgagtgcaagcagttgttttcttttatccttttatatatttttattttggtgactttcccttttcattctatagatctccagtaatatacatgcttatttagatgtggagtggatttgcaacccattcatttcatcgtggtacgtgttgttaaaccttaa

SEQ ID NO: 41594 - DNA, 461 bp, Glycine max
  unsure (1)..(461): unsure at all n locations
cagaatgctgacatttctatgttttatgccgtttcggatgaatgtgcatttggaagcaacgtgttggggcttgccaagccttgggaaggagaaaggatccatgaggaatttggatcagatgatcttgaactcacactttgtaacttaaagaccagatgatgtcacaaatatgttatgaatgtgataatgtaaacattgacttttgttggttttgatcagattatatgttagatgtgaagtgtggttgtgagatcaagcatntgtatgtcttttatcttgttataataatattatttgtggtgacttttttttattcattctatattatttcctttaatttataagtcttattttacattgtttagttagattttgtattcatttaatattattgcatttatgtgtatgataaatcattatttatttttatactatttatttactttttttgataatgtttt

SEQ ID NO: 41595 - DNA, 465 bp, Glycine max
gaaactttgttcattctgttgtcagtctccatctgcccaactccccagccccacccctttatttgcatgtcctattaaatgaaaccgaaacaaaccaaaaacaaaaatgtgagctaattgatctatagtcaaacatttttattcttcaagtgttattctttgtaggctgtttacaatgttatttgttatgatgataatccacggttgagaactggcatggaacttttaaggaccacaaaagaaattgagtcgcaagtacacaaggtctcagcgccattattgattcttcatggagcagaagataaggtgactgatccattagtgagcaaatttctttatgagagagcatctagcaaagataagactttaaagctctatgaaggtggttaccactgcattttggaaggggaacctgatgacagaaatattgctgtacatgatgacattggcttgtggcttgattta

SEQ ID NO: 41596 - DNA, 439 bp, Glycine max
cctcagtctgtaaagatgaaaatttaatttatcaatttgaacagaagcctcaagcatatatagacataagcccttcatataccacctgtcaaggagtattatttaaattttcatctttacagactgaggctcccacagagaaaagcgaaaaaaaacggtttatataattgacaagcgtcacatatttgacctcttgagtggtttgtaaaggacaactgtcacatatttggactggaacctgtgagtgagtcccagggcaacaacagactttaaggccaaatttttctctatgaagacatgatttaacacaacatgttggggctttgaagaggaacctatgtctgtaaagatgaaaatttaaataatactccttgacaggtggtatttgtagggcctatgtctatatatgcttgaggcttctgttcaaatggtataatta

SEQ ID NO: 41597 - DNA, 248 bp, Glycine max
gttcatgtatgtatgcaatggtgcatgatatttcattgtctacagtaccaggtgattacggcattggtgttaagtagacatctatatacactgtgatggcatatcgcctcaatcctggtatagcagagcaccgctcataggagcaccatctcattagcgcatgggtgactcaaactggacggaacagaagggccgcagaccgaacaccaatgattgatggttctagctagcaacgctttagttaggtc

SEQ ID NO: 41598 - DNA, 314 bp, Glycine max
cttattgagtactttgaggctattgcaggagttcctaagattaaagatggatgtaatccagccacatggatgctggagatctcttctcctgttgttgagtctcagcttaacgtagactttgcagaattatatactaagtcagacctttatcaaaagaaccaggaagttatgaaggtcctttgttcctggtactggtgtgcagagttccttaataacttcctggttcttttcgaagatagtctgggccaactcttctgcaccgtgcctttgcttgaataatgaattgtcaggggtaaatttatgtggtgatccct

SEQ ID NO: 41599 - DNA, 454 bp, Glycine max
ccccccccccgcctagctcggtattcggctcgagcagattattatcctttttgggaattgatcttcccaatagaggtatgtggtcctaataatggttagaaatgtggagttctgagtgggcaaatcaaacttcatggcactcgagttttcttatagacaatcccaaacagtctacagttttgatgttctcagggaatatctaagatttgaaatcgctggtgaactcttatgccagctttttctgttccacaggctactgccagagcttctgaaaatgcggaatcctctgcatgatctggaatttgtgtgttctttcgttaggtcggttgtttaattcaatctatgaaattagacatgaccctattgtagagtatgctctgactatttgcaaatttccacacctattttaattgtcgtaatgctgagtgaagtgtgtgttttgttattaaatatt

SEQ ID NO: 41600 - DNA, 267 bp, Glycine max
gcaagttggctggaatattcccttttgtatgccaatccccacaaggaccatgtgcttatagggaacaagtgtgatctgtctcatcgacgggcattgagcaaagaggagggagagcaatttgcaaaggaaaatggacttttttttttaaaggtttttgttaggaccgttaaaaatgttaaaaaggttttataatggcctgttgaaagaatttttaaaaaattaaagaaggggatttttatgtgtccaatgagttcatttggttttaaa

SEQ ID NO: 41601 - DNA, 476 bp, Glycine max
gacacagcatgagcgctacgtgcacgcgtgcgtaagctcgtaagccggctcgagagctggtggacatcttgtgaccactacggattgttacaggaagactagaatattcattgagacttttcttccaaagatggggatcacgaccactgtaattgatccagcagatgttggagccttggaatctgcattggagcagcacaatgtgtctctattcttcactgagtcgcctaccaatccattcctgagatgtgttgacattaagctggtttcagagctttgccacaagaaggggactttgctctgtattgatggtacatttgcaacaccattgaaccagaaggcccttgcccttggcgctgatctgattctgcactccttaacaaaatacatgggtggacatcatgatgcccttggtgggtgcataagtggttcaactaaggtggtttcgcaaattcggactttgcaccatgttttgg

SEQ ID NO: 41602 - DNA, 375 bp, Glycine max
ggcaaatgggaaaagagaagagttcaggcaggattatcgaaatttgaggaaggctttatgtatgggctatgcgaatcagctggctgaaagaaagatgcatcacaatggttatcgaactttgggtttccaagctcaagtagtccaggtgcatccgtcatctgtgttgagtcttgatgacctggggaagttcccagactatgttgtgtaccatgaactaattgctacgccacggccgtacatgagaaatgtatgtgctgttgagatgagatgggttatacctattattaacaagctcaagagcctggatgtgtacaaattaaggtaggtaaactatcatggcattgatgtgtacagtttttttgctttttcattttt

SEQ ID NO: 41603 - DNA, 401 bp, Glycine max
  unsure (1)..(401): unsure at all n locations
ctgatatcgatgagaatatcattaactgtccacggagggcaactggctatactgtatctctactgattttgaaatcacgggaaggctaanagagacattatgactcgctcacacactacgggctgataatatttgatttggcagtaacctcagcatgatactggtatgtatgcaactgtttgccttgttcttcgagaggaatgcaataaaggctatatggcgcgaccctgttggcaggggttcgatacctatcaagatcaatgccaccccactgtattcgtcgccaaagacctttgacgtgccggcctcttgtacttcatttccaacgttccaaaaaatggaagacccccgctggtgtagtcgctgatcttcgaagcgagcgcgagaacggtgctccccgt

SEQ ID NO: 41604 - DNA, 316 bp, Glycine max
cttgttcccaaccactactacttactcacagcagatgtcaattgcatcgatgcgcatggctaccatcggtagcatcaaggcccgccagatcttctacagaagtggcaatccaactgtcgtggaggatttgacttgctccgacggcacttttgacagagctgctgtgccaagtggcgcatacactgggattgatgaggccctcgaattgagagaaggaagatctgactacctcggcaagggtggatgataggctgctggcaacgcgaacaccgccatcggccccgacttgattggcggaggccccactgagcaaact

SEQ ID NO: 41605 - DNA, 394 bp, Glycine max
gaagcaaaaaggcttctagaagaagctgttgttcttcccttgtggatgcctgaatatttccagggaatcaggagaccgtggaaaggtgtcctcatgtttggacctccaggaactgggaagacacttcttgctaaagcagttgctactgaatgtgggaccactttctttaatgtatcttctgctactttagcttctaaatggcgtggggagagtgagcgcatggtgaggtgtttgtttgatcttgcaagagcatatgcaccaagcacaatattcattgatgaaattgattctctatgcaattctaggggggcttctggtgagcatgaatcgtccagaagggtgaagtctgaacttctagttcaggttgatggtgtaagcaatagtgccacaaatg

SEQ ID NO: 41606 - DNA, 415 bp, Glycine max
gaggatattggaacttatacaatcaattctgtggatgatccaagaaccttgaacaaaattctctacattagaccaccagctaataccttgtcgtttaatgagcttgttactctctgggagggaaagattggtaaaactcttgaaagaatctatgttccagaagaacaactcctgaagcaaattgaaggttagtaagtgatcattattcaggttatgtgctggatttaacagtgataacttatttccttcttttttcagagtccgcaccacccgtgaatgtgatcctgtcaattaaccactcttcttatgtaaagggggatcatactaactttgaaattgagtcttcttttggagtggaagcttcagctctatatcctgatgtgaaatacatcactgtggatgagtaccttaatca

SEQ ID NO: 41607 - DNA, 414 bp, Glycine max
gtttattactttctttaactgaccgaatagactgctgacaacagaggaagtatgtgatctttcatgtcactctctgtgctgctcttctatctgaattaccaggtggcttgcctgtcatccaaccctgaagggaacgctttgcatgcttggagaagcatgatttgtgatcccaacaatgtggtgcagagtttggacccaacactggtttattcctgcacttggtttcatgtttcttgtgactccaacaatcatgtgatccgcttagacttgggcaacggttacttttctggaactctgggcccggtacttggccagctacagcatctgcagttcttggtgctttacttgcatgagttatcagggatgaattcttaagaacttggtttcttgaaatcactcatttacatggttttg

SEQ ID NO: 41608 - DNA, 407 bp, Glycine max
catgggtactgcaagaggtcttgcatttcttcacgaagaacatgtgccacacattgtgcacagagacatcaaggcaagcaacatactacttgacagagacttcaatccaaaaataggagattttgggttggctaaattgtttccagatgacatcactcacattagcacaaggatagctggaacaactggttacttggcaccagagtatgcaatgggtggccagttaaccatgaaggctgatgtataccagtttggggttcttatacttgaaataatcagtggcaaaagcagtgcaaggacaaactggggagggtccaacaaatttctattggaatgggcttggcaactgtatgaagaggggaaactgttggagcttgtggatccagacatggttgaattccccgaga

SEQ ID NO: 41609 - DNA, 399 bp, Glycine max
cgcgcagagattattttcttcatggctggagagctagacctagcttcatatcactgcactcaccatgacatgaggtcggaggcgaatgctgccaacaccaactcatgcgaaaatggcctcaacattggatacatgagtgctaacgaccgcttgaactggggtgcggtggtggaggctatggacgagagccacactaacgaggacaagcgcatgctaaaggagctccacaagtccgtggtctagctcgggggtgagacccggaccactttgcaagactgggtaatggccgtccaccaccagacagtgaaagccgagctaccggagcccttgcaaagccgctttaaggacagccttgactgggcgatagagagcccgaacgaaggcgctggcaggttccgg

SEQ ID NO: 41610 - DNA, 435 bp, Glycine max
ctcgagccgcttctggcttctgctgttaataacaaaaaaaaaaaggaagacataataacaaattatgcttatgatgattgatttaatgaaaaccctagttattatcagaaaaattagaagacacatattccctcacttccctcgcgatcacatccatcatcgctgcccatgcccggtacggtaacaggtgggccaccatagcccgattattaccgggccgaaccgataacgccgttaagaaccactggaacttcacgctcaagcgcagagccaagggtattaacgttaatgttaatgatgccgacaactaggatgacccgttgaccgtattgactcttgctcctaccggtattgctaatgccactttgaccgaagactccgtaccggaccacctgttcttgtctgaaagtgcggtttaagggtttttgtatattt

SEQ ID NO: 41611 - DNA, 480 bp, Glycine max
atttttgtgaattgtctttatcctgtaagtcaattaccttcagaagctgtcgttgtaaatgttacatgtggtagtggacgtggtggtttacccaccactgcttgtactaccgatgatcttaacaaacgcttcttatatattaacaaaaggtttcgcacaagacttgggaaaggtaagaaaaccggttttcttactatagtttatctctttgccagttatttttactgtcttgttcttttcgccttttatagaaaggatatttctcagttttttaccccctcttatatcctattttttcctcctacctcttatgatatacctgtaataaagtcctttaaattatcttgcatgtattgtgcaactctttttttccatttttgtcttcctatttttttccttattttttttttactttttattttaaggcgcttttacatttgttcttaataggtgttttttatatatttttcattaattttt

SEQ ID NO: 41612 - DNA, 442 bp, Glycine max
agagtatgacgcacgcgtacgcatgctcgagattcggatcgagctcgagccgaatacggattgaggaatctcaaagacagagacgactgccattaacgaagagtaacaaccaaactaactagttggccacaaagaacttgtttacaaatgtctatcgtgagggcgcatcactctataggtatatactcttgacctgggtgtgcgcgctagagcatgagagcttgaaggagctacgagagttgacggaaaaacacccttggaacctgatggctacaccacctgacgaaggacagcttctaggcatgctgcgtaagcttatcaatgccaagaacaccatggaaataggcgtgttcactggttactccttgctttccactagccttgccctcccttttgacggaaagatcttagctatggatgttaaccgggaagattatgaatt

SEQ ID NO: 41613 - DNA, 360 bp, Glycine max
cgtttcccttccaattatctctgtcaccgtggattctctctccacttgtgtcaaaactcaagcgtgggtttttgggaagtgggtagcttgtggggtggtggtttaaactttgatccgaggaactggcaagatctctagtctcttggaaattgggtttgtgcagatgaagtccactatggctcagaatcagagtaactgggaagctgataaaatgcttgatgttcatattcatgattatttgatgaaaagaaaattacatgccgctgcaaaagcttttgtcgcaaaaagaaaagttttcacggatccaagtgcaattgatgcgcctggaggatttctctatgagtggtggtctgtgttttt

SEQ ID NO: 41614 - DNA, 440 bp, Glycine max
cgaagcccctgccaatgggggaggccattgcgtttggaaagacggttacggaccacatgctccgcgtcacgtggacggcggagagcgggtgggacactccccgcataacgccgtacggccccattgttctggatcccgttgccagcgggctgcattacggcttcgagtgcttcgaggggatgaaggcataccgcgacgcggcgggacgtctccgacttttccggcctgagctcaatgccgcacggctgaataggtctgcggcgcgcatctctctgccgacattcgacgaggccgagttcgtgaagttggtgcgcatgttcgtgaagattgaagggcggtgggtcggaaacggcccccctcactcgctctacatccgacccgttctcgtgtccactacggcctcactcggcgtctccgcgcccacgtccgcactcctttac

SEQ ID NO: 41615 - DNA, 355 bp, Glycine max
attaaagcgaactgggaaaagttgcagattaaggtggctaaattatctaaagccagatgtaaaacggggaaatttaaccccacaagagcaacttataatcctcgaactccactcaaagtggggaaacaggtgcttatcttgtgcatttgattcttgagctccacaggttttaaattgtggtccaggttgagcttacagtcggcgttttatcgcgatttctttgtattgcgagaaattgtagacaaatgcgaccaatgcagacttgaaacggtcacaaagactctcaaagccttgaggtcgcgggcaaaatcgtgatcacaaactgttttttaaaacctgtctttttaaaaatgct

SEQ ID NO: 41616 - DNA, 379 bp, Glycine max
ggtaaagcttttccaaacaagattgcttttgatgataagcttgtgttggctaacacacaagaattctttgatggaaattttccagtggattcttggttaccaatttttgtgaattgtctctatcctgtaagtcaattaccttcagaagctgtcgttgtaaatgttacatgtggtagtggacgtgtggtttacccaccactgcttgcattaggtctgcagctaacaatcgactctaagacattaactaatggattcggacaggactctgaaaacgtaagaagattgtggttattactagagtatatcctttttcagaagctttattggctggtctcttttgcggtcaaaatgaaatattgagtactagcgccgcttaccc

SEQ ID NO: 41617 - DNA, 399 bp, Glycine max
gaatgaaggacttatgctagttgtggctactttgtggcaagatgtgttgtggagtgtcttgacactgttgtgcatacatgtggccatgatgctttcggcaggctattttagagttcgaaatgctttgcctggacccgtgtggatgtatccaatgtcgtatatagcctttcatacttactctattcaggggctattggagaatgagtacctaggaacctcctttgcagtggggcaggtaaggaccatatctggctttcaggctctccaaaatgtgtacaatatctcccccgacagcaattcgaagtggaaaaatttgttggttttgtttctaatggcaattggttaatcgaattttgttttcattttattgtttttcttcatggggagaaaaatatccct

SEQ ID NO: 41618 - DNA, 394 bp, Glycine max
tgctcctagttgctgcatatttctaatacattcatcaagtgcatgttttctccgttgccccctacattaagatggctgttgaatattatgattttgggcctcacaagatccaccatagttcagtgttctatacaagtaatctttcttttgcctttgtcaacttgcgtcctgctgtgacaggtcatgtgcttgtctgttcaaagcgtgaagtgaagcgtgttgctgatctcacagatgatgagactatagatttatggcgcatagcaaagaaacttggtaggcagctagagagctaccataaggcatcatcacttagctttggtatccaaatgaatgaaaaagagaaagagttgaatcgagcgcttaaggtggatgtagaaaggaaagacaggag

SEQ ID NO: 41619 - DNA, 399 bp, Glycine max
aatttttgggtattctatatcatgtcagacaaagggcttgctttcatattcagaaaacttggctttaacgtccagacaccaacaggttcattcactgctggtctagtaggggattcctcaccattttctgtactacctcagatcaaaccatctgtgaccttcataatggttcttcttgccttatctccttgccttttcaaggcttggaagaatccacagccacagatgattagtagatggatagcctatgcttatacatgtggctttctttttgggtggcatgtacatgagaaggcatcactccattttgtaataccacttgcaattgttgcggcacaaactctggaggatgcaagacattactttttgctgtcaatagtatcttgctattcaattttt

SEQ ID NO: 41620 - DNA, 447 bp, Glycine max
cccaaacgtggctcctgatagcatgatagctgcatctatcatggatatgtattaaacgatgggggatgctcttgcccagcaatacgggggctatgctgctcacaagactgagtttccagagaggcacggaaagaggaaagcaacaacgcactcaagagaatttttacagtccatagaacgatactatagcaaggcttacacagagggtgaaaaacaagacgcattaaacttgtttttaggttacgttcaaccacaggcagggaaacctgcgctctgggagctggattcagattattatctccatgtatctgggattggggatgatctaatacctgagaagcgttgtgaaccaaatctcagctcttctggaagaggtggaatgatattcacgcctataccagcttgcagagaagactactctagcataaagacgacatcatttgacaa

SEQ ID NO: 41621 - DNA, 266 bp, Glycine max
cggctcgagtggagattggatcacacttatacaaaattctccaattagtgacttgttgagagttgctgcttggaagaaaggctgtttaatggttaagattgtgatgtctgggaatgcaccagtcaaaaggggtgtttggccttaattggaccaagggtttttaccaaccaggaccggtccaaacctttttgttccttttaaggggccaaaaatggaacccacttcttgggaattggctttcccaaaaaggggtttggggcccaaaa

SEQ ID NO: 41622 - DNA, 347 bp, Glycine max
ttcttccaaacttggagtttaagtattctgatccagatattcatgaagatttatatcagctcataaaatattccagtggagaaatttgcacaaccgaacacgtggataaagttatgaaggtttggacaacatttttagaacccatgctttgtgttccttgtcggccccagggtgcagaggatacagaagatgttgtcaaggctaagaataatcatgtcaaaaatggcactgcaactgttgctgaaagtgactgtagccctgttgtgggtgctatcataatgaatccaaagcatataaatgtttccagaaatggggatgattgtatgccattagatcaatcaacttct

SEQ ID NO: 41623 - DNA, 430 bp, Glycine max
  unsure (1)..(430): unsure at all n locations
cggtctttcggtctacagagagtgtggaggctttttaaaacgaggactgcttttgctaacctgagcccagtgcataggatatcattaaaactaggttgatgactatcattatcatacgcgtgcacctgtgctgtgatgagaacagctgacatagtgaggcttgtacacagccgccatagctgagttcatagcaacactcctttttctttacatcaccgtgttgaccattattggctacaagagacagagtgacaccaaaatccccggtaacaccgaatgtgacggcgttggcattttgggcatcgcttgggccttcggtggcatgatcttcatgcttgnttactgcactgncggaatctctgggggacacatcaaccctgcggtgacattcgggttgttcttggacgcaggtgtctttgggagggcgttg

SEQ ID NO: 41624 - DNA, 417 bp, Glycine max
cagatcttcgagctaaatttgcagaaatggcaactcaaatatttggggaaatgcttttttaccctgggacagattgctcttgcttaacagaattcccttccccggaatcactaaaaaatcgagttattatatcaacgaaacctccgaaagaacgttttaagtccaaccgtatcaaggacaatcctatgctgaatgaaagtgattcatctgaagaagaaacatggggaaatgaatctccagactccaacaagaacgaagtggagactgaggacacgaatggaagcgatcgtgatgagggaaatgtaagtgcatgtgaatgtgaccataaaccatatcaggagtgttcacctgattacaaacacataattactatccataatacgaagctcaagggatgcatgaaggataaattgaaaa

SEQ ID NO: 41625 - DNA, 342 bp, Glycine max
ggatggactgtcaccccaatgcaggatgttcaggctgcaattgattggtttatttgctctcaggaatgtgttcccaggacttattgtgttttaaatccacaaaatccttttgtgttaaatacgtggatggggaaactgactttcccccacggcacttgccgaaatgttaagagaatgcctctttctatagggggaggagctggtgcaaagaatgctattctgatgaatatgccaaatgctgctctttcaatgtggagatatttttgtggagatctcgtctttgaagattctaacatgactgcttcctacattaaatgtacaggctctttcttcatacgcatt

SEQ ID NO: 41626 - DNA, 427 bp, Glycine max
gaagaatacacctggttgtcagccagatgtacagacttattcaatcctcctaaaatcttgcttacaggtttttgcctttgacaagattcagagtcttttatctgatatgaccaatcgtggaatcaaacctaacacagttacctacaatacccttattgatgcttatgggaaggcaagaaagttttcagaaatggaatctatacttgtggaaatgcttgctgaccggtattgccaacccgatgtatggactatgaattcaacactcagggcatttggcaacattggacaaattgaaacaatggagaagtgttatgagaagttccaaaatgctggaatccaacctaatgttcagactttcaacattctcttggattcctatggcaaggctcaggattacaagaaaatgagtgctgtgatggaatacatg

SEQ ID NO: 41627 - DNA, 452 bp, Glycine max
  unsure (1)..(452): unsure at all n locations
cctgagctctttgatacttgtgttcttgagggtgagactattagggagtggcttttctttgataagcctagaagggcatttgagagtggaaacagaaagcagaggtcactgccggattacagcgggcgagggtggcacgagtctagaaagcaagtgatgaacgagtttggagggctgaagagatcctattacatggatcctcaacctttgaacctttttgagtggcacctttacgagtatgaaatcagcaagtgcgatgcgcgcgccttataccggttggaactaaagctcgtcgacgggaagaagagctccaaggcaaagatagtagtaacaagtgattcagttgctggtctgcagaagcacattggaagcctctctgctaaaggtagaaccaagcttggcatangaggtgggtttattcagcttctaacagagttgctctacaactaaat

SEQ ID NO: 41628 - DNA, 424 bp, Glycine max
tttcgaccattgcagcatcaagcatgtaaagcagctttggcaaagcaagattcttttattcttatgcctactgggggcggtaaatctctttgctatcagcttccagctactcttcaaccaggtgttacagtagttgtatctccattactttcactcattcaggaccagattataacactaaacctcaagttcggaataccttctactttcttaaattctcaacaaactgcttcccaggtcacagctgtgctccaagagctaagaaaagacaaaccatcatgcaaacttttgtatgtgacacctgagagaattgctggcaaccaatcgtttcttgagattctaaaattcatgcatcagaagggacagctagcaagttttgttgttgatgaagcacattgtgttagccaatggggacatgattttc

SEQ ID NO: 41629 - DNA, 237 bp, Glycine max
tttatatcgaccttctcggtggaggaattttactggacaaaactggagattggatcacacttatacagaattctacaattagtctcgggtcgagagttgctgctcggaagaaaggctgcctaacggtcatgattgtgatgtctggcaatgcagcaggtaaaaggagcgatcgtgcctcattggtacaagtgttcttaacaaactgcatcggggctgagcatcttgatgcatgtaagt

SEQ ID NO: 41630 - DNA, 440 bp, Glycine max
  unsure (1)..(440): unsure at all n locations
tgacgnngcacgcgcgcgtacgtaagctaggaattctgctcgagctcgagccgaatctgttcgagggaagggtggattcattgagagggtgaaggatttcattcatgacattggtgagaagattgaggaagctattgggtttgggaagccaactgctgacgttactgcgattcacattccatcgattaatcttcacaaggcagatcttgttgttgatgtgctcatcaagaacccgaatccggtgccaatccctctgattgacatagattacttggttgacagtgatcaaaggaagctagtttctggattgataccagatgcgggtaccatcggtgcacatggagagcagactgtcaaaattcctgtcactttgatttatgatgacatcaagcaaacatatgctgatatttaacctggaagcttcattccttattaggtga

SEQ ID NO: 41631 - DNA, 414 bp, Glycine max
attccacaaaacccttttgtggttaaataggtggttgggaaaactgactttcccccagggcacttcccgaagtgctaagagaatgcctctttctatagggggaggagctggtgcaaagaatgctattctcatgaatatgccatatgctgttctttcaatgtggagatattttgttggagatctcgactttgaagtctctaagaagacttctccctacattaaatgtacagtctctttcttgatagcattgggaaattcggctgatgacaccatcaattttgaggcttttccccactagctgatgcagttaggagagactcaagaaaaagttgaattgtaattttcacaagaagaatttcttacagcttggtcaactcatgtgcgttctgcaacatctctgctagctgatgggtg

SEQ ID NO: 41632 - DNA, 409 bp, Glycine max
gtaagctcggatttcggctcgagcctttactaacccatctctttctgcttcactatcctccctaaggagggtattcttatgaaccgtcagaagcccaaaatctctgtgaggttcattataatgaatcgggccaagcttatttctcaagctgatatcaacccatactccatgtattggactggtctggccaatacgtcactgacttagggcatctattttctgtgatgccattttcctagtttcaatggtttgattaccaagcaagttctgagcatgactgcttatatgataaacagtctttgttgtgtcgatgaaaaattgacgcttgtaatgacacacctgctgttagcttgttgttcaaggacggcaatttataataaagatttttggagagttatatgtgattcct

SEQ ID NO: 41633 - DNA, 414 bp, Glycine max
gctgtcttggtcagcatagccggggttgtgatgacaactctggggaaaacatgggctgcagatgacgcgatatcaagtgcttccaatggacaacgctctcttgttggagatctttttggccttctctctgccatgtcatatggtctatttacagtgcttctcaaaaaaatttctggtgaagaaggagaacgagttgatgtgcaaaagttgtttggatatgtaggattgtttacacttgtagcactatggtggcttatttggccattgtcagccttaggaattgaaccgaagtttacaattccccattcagccagagtggacgaagtggttcttgccaacggatttggcactttgtgttgtatggacaactccccttgtggccactttgggcatgtcacttaccattcctcttgc

SEQ ID NO: 41634 - DNA, 414 bp, Glycine max
gcaaaatagatcagcttaaccagggatgagatgacaactggaggggaaaacatgggctgcaaaatgaagcgatatcaaatgcttaccaaaggacaacgctatcttagaaggagatctttttggccattatatatggggtggcctatggtctatttacagtgcttctcaaaaaaatttctggtgaagaacgagaacgagtccatgtgcacatgttgttgggatatgttggattgtggacacttgtagcactatggtggctcatgtggacattgtcagcctttggaattgtaccgaagtttacaatcccgcattcaaacaggagtggacgaaggggctcttgccaacggattcggcactttgtgttgtgtggacaactccccccgtggccaatttgggaatgtcacttaccattcc

SEQ ID NO: 41635 - DNA, 381 bp, Glycine max
agtttttaaatttagtgaggttcattatgaagaaaagggacaagcttagttgtcaagttggaatcaacccatactccatggaatggactggtttggccaataggttactgagtaagggcaacgatattctgagttgcgattatgctagttttgatggtttgattaccaagcaagttatgagcaagatggcagaaatgataaacagtctttgtggtggtgatgaaaaattgatgcgtgctacaacaactctgttggctgatgggtgtccatatttgtatgctatggcgcatgatagttcagtgtctacaataccaggtgattttgtcattggtgttaagttgacaaccataaacaatatgtgggcatatgggctcaatcctg

SEQ ID NO: 41636 - DNA, 381 bp, Glycine max
ccctgatgccagtagtgcgttattgtgatgttgacgaaaatgggggtcgacacttggccctttgtcgtgtcataatggggtacatggagattcttaggcctggcactgatcagtttcatcccaagagttgtgaatatgataatggggcggatgccattgaatgtccacacctctatgtggtgcggtataggaacatgaacaccgacatctatacggatttcgacgattgctctaaagcatggtatgacactgcaagtcattattgtggtagtgaaggtaacaatgtggaggtggactacacagcttgtgactgttactatggagagcatactgaactttttaatgatgttctgaacgtactagctcttagtgtggaccatg

SEQ ID NO: 41637 - DNA, 414 bp, Glycine max
aacataaccatccctcttcttcctacccatttatgcacccacatccacacactatacatgcacacaacaacaacaacaacaataacaatttccacagcaatacaccttgttttgtcgaggagggtcctagccgcctgcttgtggggggagcattgcaagaggatgcaaggcttgcgttgtttaggcttgatagtggcgaggttcttcagtatcaagtgtttgttaaagcagacagggtttctccctttgaccttgcagctagttggagggcttatcaggataaattccgtccttcatctgtgagatggattccggatgtgagcataaattcagcacctcagaccggtggggagaaatagtgttctgtgggtttggaacttgatcttgagcattatgttgtcccaactcccgcaa

SEQ ID NO: 41638 - DNA, 409 bp, Glycine max
  unsure (1)..(409): unsure at all n locations
tgcacgcgtacgtaagctcggatttctnctcgagactgtaatcaatgggttttttatgacggccctcgacttctaagaggcgtgcattttggtagcaggatatggccatgctgacgatatgttccataatcgagtgaacactgcctatagggcccggactcctgaaagagaatgcgcaagttgcaggctggctgtggaaccacacaacatcttttgctttgagaccatttcctgaagagtgcgttgaagctacaaaggaatacatgcatggcgaacaatatagatcatgctccaaaacatgcttaccaacatgcttacttgtattccagagacctcgtagtccatcccaaggacacatttgttgacagcatatttggcaccgtaccctcttatattccatactacataa

SEQ ID NO: 41639 - DNA, 393 bp, Glycine max
ccctctaactggattggtcgagcggctcgagcgatatttggttggaatctgttgaggtgaaccaacaagatacagagcaaatatacagcttggggggtaaaatgatctaaaggaccattgctgtggcttgtggtcaaggatggcaatttgtaagaaagatgttgggagagttgaatgtgagaatcccttctggatttccggttacagttatttgcaatagcatttttaatgagatgctcattagatatagctatgaaaaattactgcgccaggctagaactccaagtatgtttttacaatccttcaaaaattttgtttctttgtgtgtgtatggtgatgataacttaattagtgttcatgaatatgtcaagccttactttagtggttctaaat

SEQ ID NO: 41640 - DNA, 391 bp, Glycine max
cgaagggagagatactttctggtgggataattcttgacaaacctatgacgcgctgcttcactattctacctatggagtttaatctgagtgagccgtcagaggggtgtaaattctgagaggtgcattgtgaagaaaagggacaagcttagttgtcaagtaggattcaacccatactccatggaatggactgggttggccaatagattactgagtaagggcaacgatattctgtgttgcgattatgctagatttgaaggctcgattaccatgcatgtgatgagctactgggcagaactgatactcagtgtttgtggtggcgatgcataattgatgcgtgtaatgtcacacctgctggtgacttgatgttcaaggatggcaatgtgtaagaaag

SEQ ID NO: 41641 - DNA, 381 bp, Glycine max
ctcgagccgattcggctcgaggagcaatgtcactacatactttcacccaatgttactcagttcttattcttactaaatttccttatcaacactgaaaaagatgtgaacatactagttgataagaaaattatagtcaattggatgggtgatgctaatgctgtagttaaaatgtttaacagtctttgctcaaatgttatagtgtcatacatgagtgaagagtattgtactctctaccatgatttgattaaattccatgaaaaccctcgcaacaagtacaaggctatcttttatcatgagtacttcaacactccatggaaaaaagcatctacaactgctgcagttctactacttttgtttactttaattcaagctatatgttca

SEQ ID NO: 41642 - DNA, 387 bp, Glycine max
ggttagaacacaaggtttcattgcccattgggtcctgcaagttggccttgcctctctgggaacaagttgtcgacgaggtgtacgaattatccaagattgagaaaagcgttgaaagcagaaggagaataaaacgcgaagcgtacgcaacagtgctgcattcttcggaagcgtacgtttgcggcgcaataacactagcgcaaagcctgctccaaacaggtaccaaacgcgaccttatcctcctgatagacaagttcatctcggttcgtaaacgcgaggccctatccgaagcgggttggaagatccgaatcatcacccggatccgaaacccgaaggccgagaaaggaagctacaacgaatacaactacagcaagttcaggctatggcagc

SEQ ID NO: 41643 - DNA, 237 bp, Glycine max
aacacgagaaaaatcttgctttgacagaagaggaaaagatggaagtgattagaaattgaggccttcccgctggtggtcttgccaagcgagcttcatgatttggaaaaccatgtggctcatgaaggcctaagggatcaaattcctgctgttgacaggtggtattctactaaggttaataggtttgcaaaaattatgaaccttagacaaagtgttgttggtgatcttaaacttcttact

SEQ ID NO: 41644 - DNA, 366 bp, Glycine max
gtgagtgggcagagagatggtttcaaagtaatgtccacatgggtgaatggtttgagcttatgacaaccatttcctgcgatttggtcgtggtctgggtcgcaaatttcaggggtggcttggcttgggatccttataacatgtccttcatcttcaacatttatttcagtcttattgttattggcttactagtttatgggggtgaagctttaataatgttcaaagcttttcctctaattaatgatgattctatatttattacactcttaattttcatgccattttctttattcttggtattattgatacttattctgcctttaagtttcacaatgaaagttttttttccaatttttacattttgtatac

SEQ ID NO: 41645 - DNA, 304 bp, Glycine max
ggatgctcctacatgattaaaggttggctacacttttctgagggtggtcttttttacaaagaccttggtaactctgtcaggggggcacactatgtgtttctgtcactgttcatctttccagaacataatccacatctttaatgttactcatgatgtatacccttcattatattcatcatttgcatcaaatctgatattaatattgtccacttaataatcagtcataactatgcttgctcctctatggacccttcaacaacaacttttgagatgtacatattacatagttgatcctccatcataa

SEQ ID NO: 41646 - DNA, 384 bp, Glycine max
ggaaaagtactttttttttttaaaaaaattatcttatttgagtgtgatcgatggcatacccaaacccttatccggcgcaaccgtatccctccacctccgtgccgatgccggcggtgcccaccgccgtgatcggcccccagttctgtgcgccctacccgctggatctggcggtggtgaagaaggtgatgacgctctccgacggtaactttgtggtcaccgacgtcaacggcaacgtcgtcttcaaagttaagggatcgctcatgaccctccgtgaccgccgtattctggtggagacctacaggaaactgtgtagttccctacggcggcaggaaacgaccgcgcatgatcgttggcaagctttgtgccacgtgtgtttgcacatct

SEQ ID NO: 41647 - DNA, 382 bp, Glycine max
  unsure (1)..(382): unsure at all n locations
ctcgagccgggaaaaagttgtgttgaatctctccaaactgcaccaggttgtgtggtaacanctttggtgaagtctataaactttctcctacttctgtctctactagcctttgctcccttatgtcactgtaaaaagaaaataggaggttacctctaccctcaattctacgacggttcatgccccagagctcaagagattgtccaatccatcgttgccaaggcagtggcaaaagaaccccgcatggctgcttcgttgctcagactacatttccatgattgttttgtcaagggctgtgatgcatcggtgctgctagatagcagtggaactattatcagtgagaagaggtcaaattccaaccgtgattcagcccgaggatttgaag

SEQ ID NO: 41648 - DNA, 438 bp, Glycine max
aagagctatgacgtccgcatgcacgcgtgacgtaagcgtcggaagtggattaggcgctattttgagggctttcaactccattgtaacatctctgattacaactggcatcttttggattgcacaccctggtgggcctgcgattttagaccaagttgagcaaaagttgggtctcaaacctgagaagatgaaggccactagagatgtgcttagtgaatatgggaacatgtcaagtgcttgtgttcttttcatcttggatgagatgaggaggaaatctgctgaaaatggacataaaaccacaggtgaaggacttgaatggggtgtgttgttcggttttggacctggacttaccattgaaactgttgttttgcatagtgtggccatctgagatgcctcatatattatttcattattgtgtaccacttttcaaacttgcttggg

SEQ ID NO: 41649 - DNA, 384 bp, Glycine max
ctcgagccgttcttttttttataagaagaagaggagagggaagaggatgtttatgacaatggaggggatgattgacagggatgtgagtgattgacacaggagctgccctaagtgttccagtaggtggagcaactctaggacgaattttcaacgtgcttggagagcccattgataatttaggtcctgtagatactcgcacaacatctcccattcatagatctgcgcctgcctttatacaattagatacaaaattagccatttttgaaacaggaataaaagtagtagatcttttagctccttatcgtcgtggaggaaaaataggacttttcggtggagctggagtgggcaaaacggtactgattatggaattgatcaataacattg

SEQ ID NO: 41650 - DNA, 349 bp, Glycine max
acacaaataactcggtgtcagtgtgagcagttgataagagagatgatgatcaacgtgaaggaatcgaccatggtgcggacggcggaggaggtggcgcggcggatggtgtggaactccaacgtggacctggaggtacacaattggcacacgcccagcgtatatttctataggcacaatggcgccacacacttttttgacagcaaggttatgaaagaggcactgaccaaggggctggagcccttgtaccaaatggctgggcggatcatgcatgatgacgacggacgagtggagatagactgggacgggcatggggtgcttgtcacggaggtcgtcactgggggcgtgatct

SEQ ID NO: 41651 - DNA, 537 bp, Glycine max
ctcggaattcggttcgggtccaaatggcatccccattgctactataccaagagtaacctcactgctgcacaaaacaaaacaaaaacttactaaactaacatggctttggggaacaacagtcaccagcttctgtcgaaaattgcaaccaacgacaagcatggagaaaattccccatactttgatggatggaaggcctatgattcaaacccattccaccccacaaaaaatcctcagggtgtcatccagatgggtcttgcagaaaatcagctgtgctttgatatgattcaagagtggataaggaacaatcctaaggcctccatttgcactgctgaaggagtgaaccagttcaaatatattgcaaactttcaagactatcatggattgccagagttcagaaatgctgtggcaaatttcatgtcaaaagtgagaggtgggagagtgagatttgatcctgaccgtatattgatgagtggaggggccacaagagcaaacgagctaataatgttctgtttggctgatgctggagatgcttttctg

SEQ ID NO: 41652 - DNA, 523 bp, Glycine max
ctcaagccgattaaccttttgtgaatatgctaactactaaccctcggcccactagcaagagcataaagctccatcgatacaacagctacatgaaaagactcaacagcaccaagctcatcaacgcctcctccaaactcctcttccacgccactctctagctcgcactcatacaaggcttcctattcaccttcaactaccctcccctattcgccaccgactacacccaccggcacctgcacgcacactcccactcctttatatgatacaacaccgtctaaggctcaaagcaacacgtccgacactccgcctccccccgccgtcccaacggccttaccgtgcttgtcactggagctgccggcttaatgggcagccactgctccctggccctgaagaagcgcggcgacggcgtactggggcttgacaacttcaacaactactacgacccttaccttaaacgcgcccagcaggcaatgctctggaaacaccaagtgttcatcgtggaaaggtgaccctcaacgacacc

SEQ ID NO: 41653 - DNA, 620 bp, Glycine max
ggttgaaataaaatttgttttaaaaggggacttttatgccaaatacgggaaaataccaaatggaattccttaattggttaaataattattatttaaaaaaaaagggatttaagtattgtattcataaggaccaccctaatggattaattgtgttgtcactttttgttttattgttaatcacgtggatagtcgacactcggtagtggtgccggacagcaacattttctacattatagccttgctccgatttattccaccacccccaaagggaccacctacagaactgttggtggaacaaaaccatgagattattcacttatgctacaacagaggctttgatttcaagttatatctccctcactaccagtcacaggagaactggatgcgacactatggagataagtggaccagattcgtcgagagaaaggccaattctgatcccttggctattattgcacctggacagaaaattttttcccgaatccctcaaaccttgtctatcacataaatattatttagattaatatatcggtttttcttttttcttctcaacccactgagatcattttggcctggattcatttttttttcttctttctcttgactccccctttcttttg

SEQ ID NO: 41654 - DNA, 566 bp, Glycine max
cataaagtatgttaaagggtcagagggaaaaatgaatgccttcaaagcttgtgttgttaaagtgggcagtgttgatacaaaggttggtttgtgtttgggtgttcctactaggtggaactccacatttgtgatgcttcaaagtgtacttgcataccgatgtgtttttaatactcttgctattgaagatgcaaattatgtgacttgtcctacagctgaagaatgagtaagagctgaaaagatatgtgaatttttgaagccattttttcatatcactgagttgatgtatggttcttcctatccaacatctaatttgttttttttcacaagtgtggcaaattgaatgttggttggaaaaacatactaggcatgaagattagaagattagggaaatggtagataaaatgaaagacaagtttgataaatattggaatgattatagtgatgtgcttgctcttgggaccattcttgatccttgttataagatgtcatttttgaagttctgttatacaaaacttggtcttagtgaagtatcttgccaagcaaaaatgaaagtcttgaagcacaag

SEQ ID NO: 41655 - DNA, 495 bp, Glycine max
aagaaaatttgaagaaactgaaagaggtgaataggaatcttcgtaaggagattaggtatacagatctttcttcacttcgatcgatctccttgagaatgggagattgtatgaacgatctaggcatagaagatctcaagctccttgaggaagaaatggacaaggctgccaaggttgttcgtgagtgtaagggatatcaagtgtgctaatatactggttgatgtaagtgggcaagtcaagcttgcagattttgggttggcaaaggcaacgaaatttaatgatgttaaatcaagcaaaggctctccatactggatggcccttgaggtttttaacttaaagaaccaaggtggttatgggctagcagttgatatatggagcttagggtgtacagttttggagatgttgacaaggcagcctgcttattctgagttggaaggagagctacctcctatagcacacaaacacgtgattcaactcatactttctcacgcaagaaac

SEQ ID NO: 41656 - DNA, 369 bp, Glycine max
ggatgggaaaactgactttccaccaggtcacttcccaaagtgttaagagaatgcgtctctctatagggggaggagctggtgcaaagaatgctattctcatgaatatgccaaacgctggtctttcaacgtggagatatcttgttggagatctacacttcgaagtctctaagatgactcattcctacattaaatgcacagacactgtattcataacacccaggagattttgctgaagacaccataaaagctgaggcttctaagcacagacccgcgcaccctgtagagattcaggaagatgttgtatcgacaccctcacacgaggtgtttcatacacctagccaaactcaggctcttcttgtaccaaccctg

SEQ ID NO: 41657 - DNA, 382 bp, Glycine max
gacccattgagatgctgtcttgttctttaaggagatgaaggaagtgggagtgacgcctgatgttgttacgtacaatagtttgatggatgtttattgcaaggggagggaaattgagaaggcctataagatgcttgatgaaatgcgtgaccaggatttttcgccggatgtgatcacgtatacttgtatcatcggcggattggggttgattggacagcctgataaggctaggaatgttttgaaggagatgaaggagtatgggtgttaccctgatgctgcggcttacaatgctgccatcaggaacttttgcattgcaaagaggcttggtgatgctcatgggttggtggaggagatggtgaccaagggtttgagtccgaatgcaacg

SEQ ID NO: 41658 - DNA, 365 bp, Glycine max
ctcaagccgtaaggttttaatttttgagtaccactaccaatggtgagtttgttcaagggaaagatctcgcaatggctaaagttaatgttacatgtgctgctgttggatcgacatcaagttacactccaactccattgatacgaatctggtttgcaaaaagacagagggtataattgtggagtatttaggaaggatgtattaccttgctcataatcgttactagctcccaagagaaagatctgatagaggaagatctttccttcgatattaaagtatcgctctagataggaaaacggttcacttacacaaacacaattcggtagcggaaaaaccttactatatcatataattgatgctggctcaca

SEQ ID NO: 41659 - DNA, 444 bp, Glycine max
agaagtagactgtgacatgcacgcctccctaacctcggcttgcggctcgaggaattatggaatcctgcttgcacaaaagcaatgactatgtcatttaatccaaacccgtgttctgatgcatggagtttggaatttctgaagcgtaccggatttcattgtgatatcatttgtgtcactggatggactggcaccccaatgcaggatgttcaggttacaattgattggtttatttcctctcaagaatgtgttcccaggacctattgtgttttaaatccacaaaatccttttgtgttaaataggtggatgggaaaactgacttttcctcaaggcactttccgaagtgttaagagaatgcctctttctatagggcgaggagctggtgcaaagaatgctattctcatgaatatgccaaaagctggtcttttcaatgtgggagatattttg

SEQ ID NO: 41660 - DNA, 418 bp, Glycine max
cttatgctgacggtttcgcgttctacataagaagcacttttgttgtttgctctgtcaatagtgaaagtgaagcgcgtggagaagtcggttacaacaaaagtgcttcttatgctgacggtttcgcgttctacatagcccctcatggctaccagattcccccaaacgcagctggtggcacttttgcactcttcaacgtcacctccaatcccttcattccccgtaaccatgtgctcgcggttgagtttgacacatttaatggcacaattgaccctccctttcagcacgttggcatagacgataactctctcaaatccgtcgctaccgccaagtttgacatcgacaaaaacctcggaaagaaatgtaacgctttggtaaactataatgcttccaacaggaccctctttgtgtctggtctttt

SEQ ID NO: 41661 - DNA, 448 bp, Glycine max
atcagggtcgaattgatgacaacataaatacaatcaagaaccggcttcaagtatttgagtcattaaatcttcccgtgattgactattatgctaagaaagggaaactttacaggatcaatgcagtgggaacagtagatgaaatttttgagcatgttcgaccagtttttgaggcatgtgagcacgaggctagatgatagctgtttgaattggatgagagcactgtaaagttggctaatgtttggatttagtggggacccatcatagttaccagttgattacaggatctgatccgaattcatagctgatttgctttggaatttggtagatctctaaaactcatccgctgaagtatttcaaaatgatattacacatgtccacctttcacaggagatggctcttgttgcctttttttttttttttcttttcctccttataatgcctaacgtgc

SEQ ID NO: 41662 - DNA, 423 bp, Glycine max
gcaagtttctttggaagcacaaagtgtcagagtaagacaaaacagaactcaaattcttctgaacgaaaagctcctttaaaaacatcagcatcaaatgttggcaaacccatttccaatagcctcaagtccttcaccttcaatgatctaagagaggccactaagaacttcaggcaagaaaacttaattggagaaggagggtttgatttgtctacaagggatggatagatgagaacacatgcactccaacaaaaccagggactggaattgtagtggccatcaagaaacttaaaccagaaagctttcaaggccacagagaatggctggcagaagtcaattatctaggccagcttcaccacgaaaatatggtgaaacttattggttactgcacagatggtaaaaacaggcttctaagttatgagttat

SEQ ID NO: 41663 - DNA, 385 bp, Glycine max
atcacaaatccaagaccaccattgaattttggtcctgacacgcggagcttttgacaatttcctatcggcctactcgatggaggaattatagtggccaaaactggagattggattgcacttatccaagattctcctattcgtaacttggcgagagtcgcagattggaagaccggctgattaacgttcgatcttgggatgcctcggaatgcaactgtcaaaaggcgtgactgggccataacgggacaagtgtttttaacatacaggggctgtacagatgattttgatacatgaaagtggtcgaaatcagaaccacatgcctgggaattgatcttctctatcgaggtttgatgacctaataacggttttgaaatttcgagttctcagt

SEQ ID NO: 41664 - DNA, 335 bp, Glycine max
gggatttcatcgaagacaacagtgatggattgctcttaggcgcgggctgttttggattctaagatgaaccacaaggatgcaggaatgtgcgacaacttaaagcttgatgttgctgcacttatccttggttatcatgacgattgctcctacgcagatcaacatcgttctcacatttgtgttcacgacattaatagggcgcgctttctttgcaagccaaaacctcgctaagtcacacaaagccagcctgtagttacagcagtttggaacagtgcacagaagctctgatcacgtaactatgctggagtgcatgaagcaatccgggcatttaattggac

SEQ ID NO: 41665 - DNA, 339 bp, Glycine max
cacaccacagtaataataatcttgaacttttagcatggcacgtggagtatattgcaaaatccaaggattctacgctgagggggttggattgtgcattgatccgcacgctggatcacatgtatgccatgtcatacgacgctgcacgggacaacaggacatgcttggatgcaacgctgttatacgttcgagacgccgaagcaatggctggcacacctgcggatgtgaaggaatatcctaactcctacgtattcgagatacgacatgccaggggtgaaatctgtggacatacatgatcaggttgaagaccacaacctccttctgatgaagggagagtaagag

SEQ ID NO: 41666 - DNA, 447 bp, Glycine max
gcttccttaagctgcttagtgctgatccttgcagctgtaatgctatgctctcaagtacttgcaaactatgagaatcccccagggtacaagcctcccactgagaaaccaccagtttataagctcccaggtgagaagcctcctgtctacaaacctgcagttgaaaacccgccaagttataagcctgcagtagagaagccaccagtgtacaagcccccagttgagaaacccccagtgtacaagcccccagttgaaaaaccaccagtgtacaagcccccagttgagaaaccaccagtgtacaagcccccagttgaaaaacccccagtttacaagcccccagttgaaaaacccccagtgtacaagcccccagttgaaaaaccaccagtgtacaagcccccagttgagaagcccccagtttacaagcccccagttgagaagccaccagtttac

SEQ ID NO: 41667 - DNA, 401 bp, Glycine max
atcgcaaaaccaagaataccattgaattttggttttagcacggggagcttttgacaatttgctatcgacctcatcgctggaggaattatagtggccaaaactgtagattggattgcacttatacaaaattctcctattcgtaacttggtgagagacgctgattggaagaaaggctgtttaatgatggatcttgtgatgcctctgaatgcaaaagtaaaaaggggtgatggagcctcaatgggacaagtgtttttaacatacaggtgctgtacagagtattttgatgcatgtaagtggtcaaaatcagaaccacatgcctgagaattgatcttctcaagcgaggtatgagtgcctagtaacggttttgaaatgtggagttgtgagtgggcatatgaaacttc

SEQ ID NO: 41668 - DNA, 403 bp, Glycine max
atggcaacagcaagaacaccattgaattttgattctagcacgcagagcttttgacaattttctatcgaccttctcgatggaggaattttagtggacaaaactggagattggattacacttatacaaaattctccaattcgtaacttggtgagagtcgctgattggaagacaggctgtttaatggtcaatattgtgatgcctgggaatgcaacagtaaaaaggagtgattgagcctcattgggacaagtgtttttaacatacagcagctgtacagagcattttgatgcatgtaagtggtcaaaatcagaaccacattcctgggaattgatcttcccaatcgaggtatgatggcctaataacggttttgaaatgtggagttctgagtgggcatatcaaacttcat

SEQ ID NO: 41669 - DNA, 280 bp, Glycine max
atggtgaagataactttattagtgatcattaatattgcaaggctgagtttattggaactaactaggaaagttttctatctaggaataatatcgcctttaccgatgggttggactaaacttatgcaactttgtcctttacaaagctaggagagagtgattgtttgaaggcaagcttgaatcacatgtctaatggtgagggggcggcttctgaaaacaaggcggggttatggtgccatattcattctggtccgtgtaataatctggaaatgcacgaagctta

SEQ ID NO: 41670 - DNA, 466 bp, Glycine max
gccattgatccagggtttctgtagaacttttggaatgagacttcccagtggggagaggcgagaatggttgaagcctatcatgttcagcgcaggcattggacagattgaccaccttcatatatcaaagggagagcctgacattgggatgctggttgttaagattggaggcccggcttatcgtattggtatgggaggcggggcagcctcaagcatggtcagtgggcagaatgatgcagagcttgatttcaatgctgtgcaacgtggggatgctgagatggctcaaaaactatatcgtcttgtgcgtgcttgtattgagatgggggataaaaacccaattatcagcattcatgatcagggagctggtgggaattgcaatgttggtaaggaaattatatatccaaagggtgctgagatagatgttcgagcaattgtggttcgcgatcatacaatgtctggtctagaaatt

SEQ ID NO: 41671 - DNA, 286 bp, Glycine max
agcgggaaaccaagactaccattgaattttggtcttgacacggggggcttttgacaagttgctatggtcctcctcgatggaggaattatagtggctaaaactgtagactggactgcacttatccaagattctcctattcgtaacttggtgacagacgcagattggaggacaggctgtttaacgatggatcttgagatgactctgaatgcaaaagtacaaaggggtgacggagcctgaacgggacaactctttttaacatacaggtgctgtactgatgtttttaata

SEQ ID NO: 41672 - DNA, 226 bp, Glycine max
accgcaaaaccaggactaccattgaattttggtcttgacacgcggggcttttgacaagttgctatcggcctcctcgctcgaggaattctagtggacaaaactgtagactggactacacttatacaaaattctcctattcgtaacttggcgacagacgcagattggaagacaggctgtttaacgatggatattgagatgactctgactgcaaaagtacaaaggagtg

SEQ ID NO: 41673 - DNA, 420 bp, Glycine max
agcgcaaatgcgggattaccattgaattttgattctagcacggagagcttttgtcaattttctatcgaccttctcgatggaggaattatagtggacaaaactgtagattggatcacacttatacaaaattctccaattagtaacttggtgagagtcgctgattggaagaaaggctgtttaatggtcaagattgagatgtctgggaatgcatcagtcaaaaggagtgattgggcctcattgggacaagtgtttttaacatacagcagcagtacagagtattttgatgcatgtaagtggtcaaaatcagaaccacattcctgggaattgatcttcctaatcgaggcttgtgttcctaataatggtgttctaaatgtcgcgttttgattttctttatttaactttagtcatacttattctttt

SEQ ID NO: 41674 - DNA, 349 bp, Glycine max
ccccagtactcaactctctccctcacacacttacctatccttacatcatagcaaaaatgggtgtcaccgacagaatcattcagattggaggccagatctctggcaacccgaccgctggcggtcgcgagaagatcctccagaagaaccctgacgatatcgttgtcaccgccgcctgccgaagcgcattcaccaagggaggccgcggcggtttcaaggacacccccgctgctgatctcatggctggtgttctcaaggccatcctcgaccgctcaaagatcaaccctgctctcgtcgaggacctatgtgtcggaaccgctctcgctttttccagaggcgcaactgagatgcg

SEQ ID NO: 41675 - DNA, 369 bp, Glycine max
cggcaaccgctacatcgagaagcgcatcaacgtccgcatcgagcacgtccgccactcccgctcgcgtgaggagttccttgtccgcgtcaaggagaacgccgccaggaggaaggccgccaaggccgagggcaagagcgtccagctcaagaggcagcccgctctgcccagggaggccaggaccgtcagcatgaatgacaacatcccggagaccatcactcccatcccgtacgagaccacgatctaaagaggtgaaaaggttggagggagtggtcgaaagtgggtcggatacaagatgggcatggctctggcgccggttacttaaggacattatgctttaatcctggaaaaaataaagattctggattcccc

SEQ ID NO: 41676 - DNA, 309 bp, Glycine max
tttccgaataccattgtgcagattgaaccagacatgaattcaaggtttcagcttttgagtaccactaccaatggtgattttgttcaaggaaaagatctcgcaatggttaaagttaatgtagcatgtgctgctgttggcttgacatcaagttacactccaactccattgttggaatctggtttgcaaaaagacagagggttaattgtagagtattttggaaggatgtcttacgttgctcataacgttaatcagccccaagagaaagatttgttggagggaaatttttcctttgatattaaatctcgctct

SEQ ID NO: 41677 - DNA, 191 bp, Glycine max
ggaatatcctacggtgacgggagaagtggttggcgtttaccagccgagccacgaaggatatcaacaaacacagaagcagatgcacaaccaaaaagcttgggcagaaatgtatctcttaagcttaactgatgtgttggttactagctcatggtctacttttggtatgtggctcaagggcttggaggtttaaa

SEQ ID NO: 41678 - DNA, 168 bp, Glycine max
gagcttgtcccgctgccgcgtcgtagctcggattgagggtcgagaataagacagagggttaattgtggagtattttggaaggatgtcttacgttgctcataacgttaatcagccccaagagaaagatctgttcgacggatattcgtcctttgacatcgaatctagctc

SEQ ID NO: 41679 - DNA, 418 bp, Glycine max
ctcaactttcttcccctttccttcatttgcttactcccattcgcaaaccctaacggccaacgcagcaagttgaattttcagaatcgattcgtccaagtttgattcgaagcaaaaagaagcgaaattggagttttagggaaagaagaaggaaaaaaaatggcgtacggtggtgcaggtcccgtaggtggttcgggttcggcatcgacaataaagcaagtcaaattggagagagaaagcgaactgagaatagaagttggtaacgacgcacctcttcgccttcgactccttaacggcactgcagagatttttggcaccgagcttccacccgaaatctggctcaattttcctcccaggctcaagtttgctgtgtttacttggtatggtgcaaccattgaaatggatggtgctactgaaactg

SEQ ID NO: 41680 - DNA, 413 bp, Glycine max
  unsure (1)..(413): unsure at all n locations
tgaagagctcacacggcagttctgcactctcctgggtcagtcctatgagaacccactgagtgtagcagttgcagcaggagttgaggggttgcctacactgttaaagcttgcaaatgtaatggcagcaaagaagcaggagtggcaggaaatgaagcagttgccggtgccggttgaattgggtaaggagtttcagttccattcgatttttgtttgccctgtgagtagggatcaaggaagtgaagaaaatcctccaatgctgctgccatgcttacatgtcctttgcaaacaatcaattatgaagctatcaaaaaacagcacccgaacattcaagtgtccatactgtccagccgaagctactgttgcaaactgcaaacagctgtatttctgatgatgtttatgtatnttatctcttc

SEQ ID NO: 41681 - DNA, 409 bp, Glycine max
accatcaattttgaggcttttccccacaagctggtgcagtttggagagattcaggaaaaagttgtgttgaaattttcacaagaggaatttcttacagcttggtcaactcaggtgcgtcccgcaacgactctgttggctgatgggtgcccatatttgtatgctatggtgcatgatagttcagtgtctacaataccaggtgattttgtcattggtgttaagttgacaaccataaacaatatgtgtgcatatcggctcaatcctggtatttcacgttctcgtcttttgggcaccattcctcagtgcattttacaactaactgtgttggattaaatggcaacagtgagaacaccattgaattttgattctagccagcagagcttttggcaaatttctattgaccttctcgggg

SEQ ID NO: 41682 - DNA, 387 bp, Glycine max
ctcgttggttcaatacattacacttgcacagttccactgttgtcacttttgcaatgaacacagggctcgttgcaggtgcagccttgcttgcactcttggctatcaccttctccttgttgaaccctcaaaccctgttttctccgcctcatgttccgggctcgaaggatcaccttcacgctgctcggttgctccatgtcaccggagccgtcgggccggagagtcttgtcttcgacgccgacggcggagggccctacaccggcgtcgccgatggccggattctcaagtgggaaggggaagagcgaggttggactgaatttgctgtcacaagttccaataggtcggactgtgtacgcccatttgcaccagagttggagcacatttgtggga

SEQ ID NO: 41683 - DNA, 408 bp, Glycine max
ggctacctcagaaaaaaagggacttgaagattacagacctgaagatatatcgctctctcttctacgaatgatttcatacaatattgcccagatagcctacttaaatgcattgcggtttgggttgaagcgtatcttttttggaggattttttataaggggtcatgcctataccatggatgctatttcttttgcaattcatttctggtctaatggggctgcacaagcaatgttcttgcgacatgaaggatttcttggagcattaggtgcatttatgagttatgaaaagcatggtttagatgacctaatggtgcatcagttagttgaaagattcccaatgggtgctccatatacaggaggcaagattcatggccccccacttagggatttgaatgagaagatttcatggat

SEQ ID NO: 41684 - DNA, 370 bp, Glycine max
gccagatgtgcccggttttgatgcattatcatccaacgtgtagcagtaatttggggggataataaaaggaataatgtgcctgttttattgagttcttgcttgttcaatttgcctttttatgatccataaaaaaaaaaaaaaaaaaaaaaaaaaaaaaaaaaaaaaaaaaaaaaaaaaaaaaaaaaaaaaaaaaaaaaaaaaaaaaaaaaaaaaaaaaaaaaaatggggcggcccccccttattgagctcgtcaccccggaatttaattccggcccggtccctgcaggcgtcccagttttccttatagggagtcgttttaaaccttggcgtaataatggccatagttgtttcctgtgtaaaattgttttcc

SEQ ID NO: 41685 - DNA, 458 bp, Glycine max
gcgacccaagcgctatgccgtcgcatgcacgcgcacgtacgctcggatatgcggctcgagatttagatggaaatctaatcctggattcttctaagatgactgctccctacattaaatggacagtctctttcttcatagcatttggaaatttggctgatgacaccatcaattttgaggcttttccccacaagctggtgcagtttggagagattcaggaaaaagttgtgttgaaattttcacaagaggaatttcttacagcttggtcaactcacgtgcgtcccgcaacgactctgttggctgatgggtgcccatatttgtatgctatggtgcatgatagttcagtgtctacaataccaggtgattttgtcattggtgttaagttgacaaccataaacaatatgtgtgcatatgggctcaatcctggtatttcaggttctcgtcttttgggcaccattcct

SEQ ID NO: 41686 - DNA, 321 bp, Glycine max
ccgacagtgattgggcaggttcaacagatgacatgaagagtacctctggctatgctttctcactaggatcgggaatgttctcttgggcgtcgaagaagcaagctacagtagcacaatcaacagcagaagcagagtacgtggcagttgctgaagcaacgagtcaagctatatggcttcgtaggatacttgaagacatgggagaaaaacaagataagcctactaaaatcaactgcgacaacaaatcagcaattgcaatggcgaagaatccagtttatcacaacagaacaaaacacatagccatcaagtatcactttatcagag

SEQ ID NO: 41687 - DNA, 428 bp, Glycine max
acgcgtacgtcgcttgtattcgggggtgaacaaaactttaaccccggtgcggtatatacccagaggggactaattctatacgcaagaggatactgaagccgcagggaaccaaaccattattatggcgttaccggaataatcgacccatcatcaattagatcgaaatgaaggttgaggacgggcttccgacaacgaccgcggttacaaagaaggaaaacttggattcgagtctgtttggaaaaggcaggtacaaattctgggcgttagcggccatcttgctaatggcgtactggtccatgttcaccggtaccgtctagctccgctggtccggcactctcaattacctttgcaacgacatcgacactcccatccacgacgacctatatgttcttgaaatggatgagagggagaaggttgtgaggcacatg

SEQ ID NO: 41688 - DNA, 406 bp, Glycine max
tctattctttgaaaccaaagttcaaactctgtcttccctgggttctatttcgaaatcaacgacgatgagttccacagaggcagcagccacagagaagaaaggtggaagagggaaaccgaagacttcaaagtccgtttcccgttcctccaaagctggccttcagtttcccgtcggccgtgtcgctcgctacctcaaggccggtcgctacgcccagcgcgttggctccggttcccctgtttatctctccgcggttctcgaatacctcgctgccgaggttcgtcattttcttcctttaattttcgatttgtcttttttgtgtattgtgaccttaatgtgttttggggctttaggttttggagcttgcggggaacgctgcgagggacaacatgaagacgaggatcgttcc

SEQ ID NO: 41689 - DNA, 219 bp, Glycine max
tggttaccaatttttgtgaattgtctttatcctgtaagtcaattaccttcagaagctgtcgttgtaaatgttacatgtggtagtggacgtggtggtttacccaccactggttggattaggtctgcagttaacaattgctcctttgatattaacaaaaagattctcacacaactttggaaaggggagaaaaatgtgtttcttactcaagatgatcctttt

SEQ ID NO: 41690 - DNA, 416 bp, Glycine max
gtgtaagcttagatgatctaaatccgccacttctttcacaggccatctaatttgtacacaaccggaacaaggaaaagaagaaaggttcacactgataaagaaggaagcgagacaaggtggcacaaaacaggaaaaacaagaccagttttcgtaggtggtgctgtgaagggtttcaagaaaatccttgtcctctacaccaactatggaagacaacagaagcccgagaagaccaattgggtgatgcatcaataccaccttggtactagcgaagaagagaaagatggagagttggtggtttcaaagattttctaccaaacacaacctcgacaatgtggtaataattccattataaagcatgatctttatgatgaagaaagattgatgctaaccaaatagtgtccatatgatgatgccat

SEQ ID NO: 41691 - DNA, 385 bp, Glycine max
tgggattttttagttattgaattggatatatttatcctcatacatgatcttaggagacatttgtttttggtaaccactcgtcccaagcctaaataagttaaaacacagaagaaaatgcagaagcggagggcagggaggaagaagttccacgagacacgacacccggtgtacaagggagtgaggcagaggaacgggaagtgggtaagcgagctgcgacaacctaacaacaaaaacgcgcgggtgtggctcggaacattcgcgcaccccgacatggctgctatagcgtacgatgttgccgccttggctttcaagggcgacagtgcttccttaaactttccgaacgccgccacctcggttccccgccttaactcgcggacgtgttccg

SEQ ID NO: 41692 - DNA, 427 bp, Glycine max
  unsure (1)..(427): unsure at all n locations
ttttccattcanttggnattatacatacataacataacatgccaataagtcctaatttgtttatttaacatgccaataagagcttcatatgccttttcatcatacaataaccaaaggctaagtttagttctgtgttcttttttcacttaggacaccgatgcagaggaggagctcaaagaggctttcaaggtttttgacaaagatcaaaatggctacatatcagctagtgaggtatacattttatttttcttttcggtggctttagttttctttctttgatgtcaacgtcatttctaatattcattaacatacaaaaaaattgataaagtcagggtttctgctaacgtgaacaatgcaggtagggccaacaggccagtatatgttgcaaattagtttacagctatattttctttttctttgaagtgtc

SEQ ID NO: 41693 - DNA, 424 bp, Glycine max
  unsure (1)..(424): unsure at all n locations
acgcgtacgtaagctcggaattctgctcgaggnaaangngtcaggtantttaaagangnaccgcgnaccaagggggcattatttcaactgtgatgaattcaatattgctccaatcgactctagagaagatgggtgttcagactcgtgtacaaacttcagttgccatgcaggagtttgctgaaccatacaataggcagcgggccatcagacatcttgagaaaggaagggttgttatatttggtggcatttggttttggtgctggcactcctcttaactcaaccgacatagctgcagctcttcgtgcttcagagcttaatgctgaagcagttctaaagggtactaatgtagatggtgtatacgactgcaactcacgagacaacaatttcacttttgagcacatatccttcagaaagcttaggtcaa

SEQ ID NO: 41694 - DNA, 412 bp, Glycine max
  unsure (1)..(412): unsure at all n locations
cagagcttttggnattagttctatggaccttctcggnggaggaattttagtgttacaaaactggagattggatcacacttatacaaaattctccaattagtaacttgttgagagttgctgcttggaagaaaggctgtttaatggttaagattgtgatgtctgggaatgcagcagtcaaaaggagtgattgggcctcattggtacaagtgtttttaacaaacagcaacagtacagagcattttgatgcatgtaagtggacaaaatcggaaccacattccctggaatcgatcttcccaatagaggtatgtggtcctaataatggttttgaaatgtggtagtctgagtgggcaaattaaactttatggcatttgagttttcttattgacatttccaaacagtcttcagtttttga

SEQ ID NO: 41695 - DNA, 441 bp, Glycine max
  unsure (1)..(441): unsure at all n locations
ctcgcagtttcngttcntcatgactcagntttcgctctttggaaatacccacccactcaaaccccgcagccacgatgaaccccgagtaagttgtcctcgccgcaccctggatgctgaagctactggaggctccaggcagccacgcccgctggtcatgctaatcgcggaccgctcccagatacgactacctcttcaagctgctcctcatcggagactccggtgttggcaagtcttgcttgctacttcggttcgctgacgatacctacactgagagctacatctccaccatcggtgtcgacttcgtgcgttccccggtgttcggcgcgggtcagcctgaccgcagagctgacaaccatacagaagatcaggactattgagctggacggcaagaccgtgaagctccagattgtaagctttcccagccgacccggagaaggtggt

SEQ ID NO: 41696 - DNA, 303 bp, Glycine max
  unsure (1)..(303): unsure at all n locations
cgtaagcncggaanncggcncgagccagagntttagatgantacaacaagcgaacagnngaacgcgagaaaagagttccaacatgggccggcccccaaagacccaaggatgagaaactacctcgtcgcaaaatcaccgacaaacctaagacgcgcggctgcactattcaccctatggagtgcaatcaagaggcccgacaaaagtgaacaaacccagcgaggctcataatgaagaaaagggacaagctaagctgacaagttggaatcaacccacactccatggaatggactggactggccaaca

SEQ ID NO: 41697 - DNA, 367 bp, Glycine max
  unsure (1)..(367): unsure at all n locations
atgcacgcggacgtaagctcggaatncggctcgaggcgganccggcatttttatgcgatgaccncacgngnggcaccnncacaagattgtcgagggaagcagggagtacgcagagnacctccacctaccgaggaagaggctcaccgattctggtgctgcgaggaaggagattcaggacgaaactgatagagagacaggacgaaccaaacaaatttcgagtgttcccattcatcttagtatatactctcctaatgttgttaacttgacgctcattgatcatcccggccttacgaaagtagctgtagagggtcaaccggatagaattgtgaaagacatcgaggatatggttcgctcctacatagagaag

SEQ ID NO: 41698 - DNA, 426 bp, Glycine max
gagttccattcgatgcagaggatgatgaatgctcctgattcaaatgataatattgatctactgttgagcattgatttgttgggtttacaaggagcaggtaaagcttttccaaacaagattgtttttgatgataagcttgtgttggctaacacacaagaattctttgatggaaattttccagtggattcttggttaccaatttttgtgaattgtctttatcctgtaagtcaattaccttcagaagctgtcgttgtaaatgttacatgtggtagtggacgtggtggtttacccaccactgcttggattagttttgcagttaacaattgctttttagatatcaacaaaaagatttgcacagtacttgggataggtatgaataatgtttttcttaccataagtgatacttttttcagtactttactggct

SEQ ID NO: 41699 - DNA, 380 bp, Glycine max
aaacatacttggagctttagcctggcgcagtatgtttttacaatccttcaaaaattttgtttctttgtgtgtgtatggtgatgataacttaattagtgttcatgaatatgtcaagccttaatttagaaccactaaagtaaggcttgacttcaacgggtacactatactcgtattggtcaaccttgtctcccaaagttgctgtgaacaaaaagcttggcgatttcatagcatactcggcaagcgcaggtgcaccagtttctgttgcagttgcctcacttgctgccgctgctagcggtgcagattgctcatctctagctgctccggagaaaatgaatgttagaacttcaagaagtgagttattatattttgggatttttttt

SEQ ID NO: 41700 - DNA, 438 bp, Glycine max
ctctgagcaggaaatgaaggctggatatgaaaaagctaagtctaatcctggctatgctcgactccaacagaatgctaaggttattggtacatgggatgatcacgattatggattaaatgatgcagggaaagaatttcatggaaaaataaccaaccaaaagttgcttcttgatttcttggatgaacctcaagatagcccacggcggaaacaggctggtgtatatgcctcatatacgtatggtcctgtaggtagagatatcaagattgtcctcttagataccagatatcacagagaccctgtaggaagtgatggaaccattttggggaattcacaatggttgtggttggagacagagctcaagggtccaccaacagctcttaccataattggatcttctattcaggttatatcaaatctttcagctaccattcatccatt

SEQ ID NO: 41701 - DNA, 367 bp, Glycine max
agattacgctgctttatttcatgatggaggaggtcaaactgcccgttcctaaagtcgacatcggggaggctcataattaataaactactttctgctgaacaagagcatgcttgacaccgtgctctacaccagggacaggtacctggatactggtgttatcattttccctgacaaggctaccatatttctaaacgttattgacgactgctagtccaaagaatagaacattcgcttacaggacaacatatggagctttgactacacgccgctcaagaagactgccatgaccacatcactttgttgacactgactatatgaaagccgcagttacagacccttctgtcgtgttcacaatcgacctttacac

SEQ ID NO: 41702 - DNA, 435 bp, Glycine max
ctcgagccgaatcggttttagcttcgttttaagaaaaagagcatggtggaggaaaagcgcgtgggaggtttgctagcgaaattgcgatttatttattaccaaagagaagaaaaaaagagaaaagaagaggcgaatggcagatcagagcgagcattcgaaaacggcgtcgcctccggaggaccaggaccgtcccgttcgagtgtacgcggatggcatctacgatctcttccactttggccacgctcgctccctcgagcaagccaagaaatcgtattcatcaatcatttcccaatcctttgctttgcctccgagatctgataatagatttcatttatatcaatccatttattaatagaaggcatttcttcaaggttccattcacatacactcttactttggtattttaggtttccgaatacatacttgcttgttggg

SEQ ID NO: 41703 - DNA, 433 bp, Glycine max
ccatacatgaattcaaggttttagcttttgagtaccactaccaatggggattttgttcaaggaaaggatggggcaatggttaaagttaatgtagcatgtgctgctgttggcttgacatcaagttacactccaactccattgttggaatctggtttgcaaaaagacagagggttgattgtggagtattttggaaggatgtcttacgttgctcataacgttaatcagccccaagagaaagatttgttggagggaaatttttcctttgatattaaatctctctctagattggaaaaagttttctctacaaaatcacaatttgttagtggaaaaaccttcaaatatgatataattggtgctggttcacattcttcagatggtttttctgaaaaggaagatctagaaaaacccataaagattgatgccagattgagac

SEQ ID NO: 41704 - DNA, 433 bp, Glycine max
cggcaacattgtcatgtctggtggtaccaccatgtaccccggtagctccgaccgtatgcagggggggatcactgctcttgccccatcctccatgaaggtcaagatcatcgcgcctcctgagcgcaagtactctgtctggatcggtggttccattcttgcctcgctctccaccttccagcagatgtggatctcgaagcaggagtacgacgagagcggtccttccattgtccaccgcaagtgcttctaagcgtatcctgcgtataactctcgagatcatgacaagcctgttagcggagatatcgatgcatctgcgctgtgttgccacggggatttcagtaacggttgttcacaaaagcgagctttcagttgggtgatcagttacggaggagctcaagccattatggagtgaagtaggatcataagaatgtagctt

SEQ ID NO: 41705 - DNA, 440 bp, Glycine max
ggtaatccagctgctgctcttcgtgttacccgtagaagagcagtagatcgcaagaagcaagcaacagaaaagaatgtgttccaatgctatgtttttggttctaaaaatgctgggaagtctgctctgttggattcattattgggaaggcctttctcaaacaattatactccaacaactgttgagaggtttgcagcaaattccattgaattaatagggggaaccagaaaaactcttgtgttgcgggagataccagagagtgaagtatcgaatgttttgtcaaataagggttatttggcagcatgtgatgtagctgtttttgtctatgacagctcagatgaacattcatggaagaaatccagagatttgcttgagaaggttggtagacaaggagatctaactggttatagagtttcttgtcttcttattgccgcaaaggatga

SEQ ID NO: 41706 - DNA, 397 bp, Glycine max
caaaactagtgcaactttgcaatttagaaagttagcagattgtgaggttctcaagagaaactgtaaggggatgtctaatgttttatgggtggctcctgaggacaaggcgagtttatggtcacaacttcattatgtttcgtgcaataatctggaaatgcaagaagcttatcttgtcaatctcgcaaatgtgttacgcgaattgtgtttgcacacaccacaggaagctctccacttgtgaaagaaagctctctctcgtattgaatggctgcaaaaagctgatgtgcctaccatatcacacattgtagagttccatctctatgcacaggatgatgaatgctcctcattcaaatgataatattgatctactgctgagcattgtttttttgggtttacaaca

SEQ ID NO: 41707 - DNA, 406 bp, Glycine max
  unsure (1)..(406): unsure at all n locations
acgncggggcgcgcgtacataaactcggaattcttctcgaggattactgttgattatttttccattggaaaggaaacaagcggaaggcttttaatgggagcggggaggttccctttatcatcatttcttgtccaaaacaaggatgcttctatttcatctcttccatttgatgagttgattgataattcttatggatttgcatgattatttcctgaacacaaatattaaattgttaaaaggctgtaagagatgaaacatatattttgaattacaggagattttgtaaactataccccttcattaaagaaatcatatattggtattttctgtttccgttgcttacatatactattttaaactctttttatattttccttacttaacctttttcttaatgttattatta

SEQ ID NO: 41708 - DNA, 418 bp, Glycine max
aataatttgtgggatgttttatatctgggctgagttctaaaaaaagtgggaacaaccatgggtgtggggcagtgcaaacataccaaatgtctctaataactcgctggtcatgttatcatcatatcaatttttggaaacaaggaattgatagaattctccttaatcttcttattgaaaatattcaagaccaattgtctcagcctctcttttcattgtaaaaacaaatatccatttcaaaagagggattaaaagccaattatcatcttgttcttattagttatctgtggtacattcttgggtggcttactatatattgttgagaaaatatatacccttatactcattaaatcaaactctacatcaacttactaaatacatattcatgctttaaatttgcgtatacactttaaaaatgttt

SEQ ID NO: 41709 - DNA, 404 bp, Glycine max
gcagttaaaaggtgtgattttgcctcattggtacaagtctgtttggcaaacatcaacggtggagagcattttgatgcttgtaagtggacaaaatcggaaccacattcctgggaattgatcttcccaatagaggtatgtggtcctaataatggttttgaaatgtggagttcttagtgggcaaatcaaactttatggcatttgagtttccttattgacaatcccaaacagtctacagtttttgatattctcttgggaatttctcaagattttgaaattgctggtaatacttttatgccagctttttttgtttcacaggctactgccagatcttcttgaaatgcggaattctctgcatgatcctgaaattgtgttttctttcgcttgttcggttgttaatttaataa

SEQ ID NO: 41710 - DNA, 359 bp, Glycine max
gggtttacaaggagcaggtaaagcttttccaaacaagattgtttgtgatgataagcttgtgttggctaacacacaagaattctttgatggaaattttccagtggattcttggttaccaatttttgtgaattgtctctatcctgtaagtcaattaccttcagaagctgtcgttgtaaatgttacatgtggtagtgggcgttgtggtttacccaccactgcttggattagttctgcagttaacaattcgtccttatacatcaacaaaaggatttgcacagcacttgggaaaggggaggaaatgtttttcttactagaagtgatccttttccagtagctttattggctgttctttttggcgt

SEQ ID NO: 41711 - DNA, 330 bp, Glycine max
  unsure (1)..(330): unsure at all n locations
catgcgccggcgaagctcgaattcgctcgaggctgcattaactgattttcttttttgctgaatactaacccagatgcgaatattgcaaaggagccgggaccttntcatttaagttcaaaaagccttctagaatgttacacacccattgtagttcctgtatactgttgaccttagtataaaagataaaatataggcaatagcaaattcatattgagccagttgtgtttattactcacaacatgctgagaagcacattgagatttttaccaagcaacgattttcaggtctttcaatatgcattgctaatactcagtattctttcttatacaa

SEQ ID NO: 41712 - DNA, 425 bp, Glycine max
agtttcgcatgttctgttttttacatagttatttcaatgcgtttggttgatacttatgatggcaaggcttaaaatacatttcataaaatttttgttgcacctttcaaaggcttaaatcccattcattttgttacattttctaataccatttttcagattgaaccatacattaattcaaatttttatctttttattaccactaccaatgtttatttttttcaatgcaaagatctctcaatttttaaaaataatgtattatgtgcttcttttgtctttacatcaagttacactccaactccatttttataatctcgttttcaaaaatacactattttaattgtttagtttttttgaaatatttcttacatttctcattaacttaatcaccccctaaaagaataatttttataataaaaatttttctt

SEQ ID NO: 41713 - DNA, 409 bp, Glycine max
ctcaggaatgtgttcccaggacctattgtgttttaaatccacagaatccttttgtgttgaaggggtggatggggaaactgactttcccccagggcacttcccgaagtgttaaaagaatgcctctttctataggggggggagctggtgcaaagaatgctattctcataaatatgccaaatgctgttctttcaatgtggagatattttgttggagatctcgtctttgaagtttctaagatgacttctccctacattaaatgtacaatctctttcttcatagcatttggaaatttggctgatgacaccatcaattttgaggcttttccccacaagctggtgcagtttggagagattcaggaaaaagttgtattgaaattttcacaagaggaatttcttacagcttggtcaac

SEQ ID NO: 41714 - DNA, 310 bp, Glycine max
cgacggcagatacaaattttgttactaaacacgagaaaaatcttgctttgacagaagaggaaaagatggaagcgattagaaatagaggtattcctgctgatgtccttgcaaagcgagctcatgaatttgaaaaacatgttgctcatgaaagcctcaaggatcaaattcctgctgttgacaagttgtattctactaaggttaataagtttgcaaaaattatgaaccttacacaaagtgttgttggtgatcttaaacttcttactgttatgccttaattacattgcgtatcggtttcattgattttaatatt

SEQ ID NO: 41715 - DNA, 464 bp, Glycine max
  unsure (1)..(464): unsure at all n locations
aaattcggctctagatcaaaaccataaagtttttttttctctgaaagatcccaacattggggggcttttaaatctcgctggcatcgacctacaatatttatctttcaaccaaaacaactcaaacagatggttgcaagacaatgtcagaaacttttggaatgtcacattcaactacattactgtgggaaatgaaatcaaacctttgcactcattttcacagtttgtagtgcctgcaatgcaaaacatccaaagagcaatttctaatgctgtccttggaaaccaaatcaaagtttccactgccattttagtctggtgcattgtcagaatcataccctccatcaaaaggctcatttacgtctgattatagaacatcatatcttgatggtgtcatcagatttttagtgaacaacaatgccccactattgtntaatgtgtacccttacttagcttacattgaaaaccct

SEQ ID NO: 41716 - DNA, 252 bp, Glycine max
tcggctcggccttacatacaggtgaaaattaagatgggagaccgggttcagcctgagaaagggccatattgactaaatgaagaactgcggagcattccttgggaagaaaattaatgatgctgggcactgccacttacttaatgatgctaagcaggcacaagatgctgggtattgtggctaagtgctgatataatgacctctgtgtgcatggatggtggcagaaggggcagaaaaattttgtttgcctggggg

SEQ ID NO: 41717 - DNA, 387 bp, Glycine max
ttgatttgttgggtttataaggagcaggcaaagcttttccaaacaagattgtttttgatgataagcttgtgttggctaacacacaagaattctttgatggaaattttccagtggattcttggttaccaatttttgtgaattgtctttatcctgtaagttaattaccttcagaagctgtcgttgtaaatgtcacatgtggtagtggacgtggtggttaacccaccactgtttgagttactcctataatgaacaataagtgctaattaaaaaacaaaaggattcggacatgaattgtgaaaggtcacaatatattatttactaattatacttgaatatttatatgaagctatactggataaacaaaaattgggttaagatttgaaaatt

SEQ ID NO: 41718 - DNA, 431 bp, Glycine max
  unsure (1)..(431): unsure at all n locations
cacgcgnacgtaagctcggaaatcggctcgaggtacagcacaacaacatcttgtttctgactacggaactaacagtcgaacacttgtctacaagccgatggaggcggacgcagaaagcctattcaaacagggaaccaccgagagcgagcggtggctggagaagccggtgatcgcactcggagtcttcctcatgctcgtatcactcgccggcctcgacagaacgcgctgtcgcgcgacgtggctcctctggctctacctcctcgacatgttcgcactcataatccatctgttcagctctcaccaacttcgcctgcgatgacaccaacaagggcgctggcaaagatgtgtctaatagagaggataaggcagataggcttgcggatgactccaacgggatgcaaaagagggtgaacaacactaatacgtggaac

SEQ ID NO: 41719 - DNA, 442 bp, Glycine max
cttcaggtagcttttttttttattattccaattcataaccgggaggatattattggtcagtgggcggggacttatattcaaataacaatactaaagtttgctcaatcactattcctcattctattgctataaagaacactcaccctaccttcaccaatcacctacacacttctttcattgagcctcatctccttatcctcactgatccaagaacagatcaccatcctattaaagaagctccttttgccaatattcccaccattgctttctctgacacttattctcctatcaggtatatggacataccaattcctgccaacaacaacacaaaacacagcattgcttgtcttttttgcctcacttcaactattgcattccatattacgcgtacaattctacctcacctaaaacgggatgatacggttcatttattcttttatac

SEQ ID NO: 41720 - DNA, 470 bp, Glycine max
aactcaaattctttctacaccataaaatttttttttcacaacaagaaataatcggggggcgtatatatacacgcccgccggcacttatacttctaaaactatctcatgaatttgaaaaacatatttctcatgaatcccttaacgatcaaattcctgctgttaacaaattgtattctactaaaattaataactttgcaaaaattatcaaccttatacaaaaccttgtttgtcgatcttaaacttcttacttattggaaattatatgatcataaacatattcctttatctaatattactgcaagggaaaatcatttacttcaaatacccttaatttcacagtaggaaattctctcttctactccaactcatttcaaaacttcaatgatcagttaatatagcaaaccttaatctacttctatccatgtgctatctatagaaataatcatttatactttcctcaagtcctcatt

SEQ ID NO: 41721 - DNA, 434 bp, Glycine max
  unsure (1)..(434): unsure at all n locations
cgccaattgagaaggaaagctctctctcgtattgaatggctgcaaaaagctgatgtgcctaccatagcacagattgaagagttccattcgatgcagaggatgatgaatgctcctgattcaaatgataatattgatctactgttgagcattgatttgttgggtttacaaggagcaggcaaagcttttccaaacaagattgtttttgatgataagcttgtgttggctaacacacaagaattctttgatggaaattttccagtggattcttggttaccaatttttgtgaattgtctttatcctgtaagtcaattaccttcagaagctgtcgttgtaaatgtcacatgtggtagtcggcgntgggtttacccaccactgcttgtattagtgctgcatgatacaatcgctcctgagatctgaaccaaaggagtcgcaca

SEQ ID NO: 41722 - DNA, 447 bp, Glycine max
cgatcacttaattagtgttcatgaatatgtcaagccttacggtagtggttctaaatggaacggctgtctaactagtcataacatcaccattactgatggtattgacaaaactagtgcaactttgcaatttagaacgttagcagattgtgattttctcaagagaaactttaagcatatgtctaatgttttgtgggtggctcctgaggacaaggcgagcttatggtcacaacttcattatgtttcgtgtaataatctggaaatgcacgaagcttatcttgtcaacctcgtaaatgtgttacgagaattgtatttgcacagtccacaggaagctcgccaattgagaaggaaagctctttctcatatcgaatggctgcaaaacgctgatgtgcctaccatagcacaaattgaagagtttcattcgatgcagaggatgatcaatgctcctga

SEQ ID NO: 41723 - DNA, 272 bp, Glycine max
gtcatgattgcgatgtttgcgaatgcagcagtcaaaaggagtgagtgggtcttattggtgcaagtgtttttaacaaacaactacattgcatagtatttttatgcatgtaagtggacaaaatcagaaccacattcctgggaattgatcttatcaatagaggtatgtaactctaataattgcttagaaatgtggagtacttattggtcatatcaaactttatggaatttgagtttccttattgacaatgccaaactatctacagtttttgatat

SEQ ID NO: 41724 - DNA, 492 bp, Glycine max
ttaccaagcaagttatgagcaagatggcagaaatgataaacagtctttgtggtggtgatgaaaaattgatgcgtgaaaggacgcacctgctgttggcttgttgttcaaggatggcaatttgtaagaaagatgtttggagagttgaatgtggaatcccttctggatttccgctcacagttatttgcaatagcatttttaatgagatgctcattagatatatctatgaaaaattactgcgccaggctaaagctccaagtatgtttttacaatccttcaaaaattttgtttctttgtgtgtgtatggtgatgataacttaattagtgttcatgaatatgtcaagccttactttagtggttctaaattgaaaagctttctagctggtcataatatcaccattactgatggtattgacaaaactagtgcaaacttttcattttataaagttagcaaattgtgtatttctcatgagaaactttaagcatttgtctaat

SEQ ID NO: 41725 - DNA, 514 bp, Glycine max
  unsure (1)..(514): unsure at all n locations
gcttggaagaaaggttgtttaatggtcaagattgtgatgtctgggaatgcagcagtcaaaaggagtgattgggcctcattggtacaagtgtttttaacaaacagcaacagtacagagcattttgatgcatgtanagtggacaataatcagaaccacattcctgggtattaatcttcccaatagaggtatgtggtcctaataatggttttgaaatgtggagttctgagtgggcaaatcaaacttcatggcatttgagtttccttattgacaatcccaaacagtctacagtttttgatattctcttgggaatctttcaagattttgaaattgctggtaatactctcatgccagctttttctgttccacaggctactgtcagatcttctgataatgcggaattctctgcatgatctggaattcgtgttttctttcgcttgttcgtttgtttaattcaataaaggaaattatgcttgaccctctagtgaggatgctctgcctatctgaaaaatttcac

SEQ ID NO: 41726 - DNA, 424 bp, Glycine max
tgactcttttctctgctgcaagcctcccatcttcgtttgctacgccactctggacacgaccgtgacaactgtttgatccaagaacagacacaatgcccgccgacactgtaagaaagaccatcacctgtaaggcagctgttgcctgggaagacggtcaggacctgtccattgaggacatcgaggtcgccccgccaaaggctcacgaagtccgcattgagaattactacactggtgtttgccataccgatgcttacaccatgtccggaaaggaccccgaaggtgctttccccatcgtcttggggcacgagggtgctggtatcgtcgagtccggcggcgagggtgtcaccaattgtaagcctggtgaccacgttgttgctctttacactccttgatgccgcgagtgcaagttcttgaaatcccgaaa

SEQ ID NO: 41727 - DNA, 522 bp, Glycine max
caaagattcagggtgggaatgggacttcaaatggcggagaccgttgttcgacaatgagatagatatggcagtatcatttctacaagaacttgaggggaacagaattcggtcccacagggctgaccagtgggtttgggtggcagattctagtggccaatatacggttaggagtgcctacaatgtgcttagagaggacttattacaggaggaccaggacggagagttcaaggagctatggaaggtgaaggttccatctaaagtaattgtgtttgcatggaggttactcaaagataggctaccaacaagagacaatttgaggagaaagcatgtggagctacaagattttatgtgccctttctgcagaacaatagaggagagtgcaggtcatttgttttttcactgcagcaaagtgtttcctatatggtgtgaaatgctgtcctgggtaaatctgggtggggtctttccacatcacccaagacttcattttcttcagcacatatatggagcattttgaggaataca

SEQ ID NO: 41728 - DNA, 319 bp, Glycine max
ctcaccgattgctagattggaacttcgattctcagtcatctcttttaccaatctgtggggtgttgctctagcaggagagagccatgttcatgcatcgctacctgaggtatgatcattgggaagctgtatgctcaaacgctcccatactcactgcactgcgagagcttttaaagtctctccctgtaggagttgtaattgatgaacttcctatgttatcgttgatacacagggcccaaaaacattctattataaagaagacctctattcaggcatatcattgaaagaacaatttacctagctgtgcctatgcacaacctta

SEQ ID NO: 41729 - DNA, 197 bp, Glycine max
  unsure (1)..(197): unsure at all n locations
gtctctttcttcatagcatttggaaatttggctgatgacaccatcaattttgaggctttttcctgaatctctccaaactgcaccagcttgtggngaaaagcctnaaaattgatggngtgatcagccaaatttacaagtgctttgttgaaagtgaccacgttcatgatttggcgacttcgtactcgtgccttcgacgt

SEQ ID NO: 41730 - DNA, 310 bp, Glycine max
  unsure (1)..(310): unsure at all n locations
accaaatcagaaccacattcctgggaattggattttccaataaagggatgggggcctaataaaggttttgaaatggggaggtctgagtgggcaaatcaaacctcattgcatttgaagtttcttaatgccattcccaacagctccattttgatttctttgggaatttcagaattgaatggtgtatctttatccgcttttgtcaagctctgcgacttgaagcgatcttgtgacggatggttcttcctgtcgtgtatcnaagaatagtacttgtagatcttgcatgaattcactttatgcatgggaggggatt

SEQ ID NO: 41731 - DNA, 501 bp, Glycine max
gcttatcttgtcaatctcgtaaatgtgttacgagaattgtatttgcacagtccagaggaagctcgccaattgagaaggaaagctctctctcgtattgaatggctgcaaaaagctgatgtgcctaccatagcacagattgaagagttccattcgatgcagaggatgatgaatgctcctgattcaaatgataatattgatctactgttgagcattgatttgttgggtttacaaggagcaggtaaagcttttccaaacaagattgtttttgatgataagcttgtgttggctaacacacaagaattctttgatggaaattttccagtggattcttggttaccaatttttgtgaattgtctctatcctgtaagtcaattaccttcagaagctgtcgttgtaaatgttacatgtggtagttggacggtgtggtacccaccactgcttggatagttctgcagttaacaatcgctcctcagacatcaacaaatggattcgcacagcact

SEQ ID NO: 41732 - DNA, 461 bp, Glycine max
caaatggcaacagtgagaacaccattgatatttgattctagcaagcagagcttttggcaattgtctattgaccttctcggtggaggaattttagtggacaaaactggagattggatcacacttatacaaaattctccaattagtaacttgttgagagttgctgcttggaagaaaggttgtttaatggtcaagattgtgatgtctgggaatgcagcagtcaaaaggagtgattgtgcctcattgttacaagtgtttttaacaaacagcaacagtacagagcattttgatgcatgtaagtgtacaaaatcagaaccacattcttgggaattaatcttaccaatagaggtatgtggtcctaataatggattcgaaatgtggagttctgagtgggcaaattcaaacttcatggcattttgagtttttcttattgacaatcccaaacagactacaatttttgatat

SEQ ID NO: 41733 - DNA, 281 bp, Glycine max
aagcccccaattgggaggcctcctgtttccaaacctccagttgaaaaccccccattttataggcctccaggtgggaagccaccagggtccaagcccccagttaagaaacccccatggtacaagcccccattggaaaaaccacacgggtccaagcccccagttgagaaaccaccagtgtacaggcccccagttgaaaaacccccatttccaggcccccagttgaaaaacccccagtgtacaagcccccagttgaaaaaccaccagtgttcaagcccccagtt

SEQ ID NO: 41734 - DNA, 491 bp, Glycine max
ctcgagccgaagcggctcgtgagtgcttattatttgtaatatatataagtcactcaagcttctaggatttgtgccagctacatgaaaatgggaagcaacttcaggtttttgagtctttgcctcttggcattgattgcatcaacccatgctcaacttcagcttggtttttatgccaagagttgcccaaacgctgagcaaatcgttttgaaatttgtccatgaccatatccacaatgctccatcactagcagctgcattgataagaatgcacttccatgactgttttgtaaggggatgtgatgcatcagtccttctgaactcaacaaccaatcaagctgaaaagaatgctcctccaaatctcacagtaagaggctttgacttcattgacagaataaagagccttgttgaggcagaatgccctggtgtggtctcttgtgctgatatccttactttgtctgccagagacactattgtagccacaggtggaccatt

SEQ ID NO: 41735 - DNA, 496 bp, Glycine max
ggacctcccaatggtttattctcttttcgactgccaggccgagtttttgaaccggaaagggcaccccgaattggcgttggaaatagcgaaaagaagtgtcatctcagccccaagcgagtttggcacctgggcaagattagcagagatctacgttagcctggaacagtgggatatggctctcttaacgctcaattcttgtcccatgtttacttaccaggacaaggacgcaccccgcatgccggagccgctccgtgttgccctccccgtgatgccggaaagcgtttgcgatgagattgatgacactgcgggtgtctcggatgcggacatggtgcatccaacgctgcgcaagctgcatgcggctggcttcaagggcacttttttgaaggcttacatgcttctgaccaagatcacaaagaagattggttgggatcagctgctcaggatacgaaagcaagttttcgtcatggaggaggaatacaggcatgaaaagaacatg

SEQ ID NO: 41736 - DNA, 512 bp, Glycine max
gtttgctccagccacaatggctcatttcaactcccttaattctcaagaatggaatgcccgcatagacagttttaatattccaaattcccctcaagttcagactctaagaaaccggtcagcggcaattgatggtgaaattgacagggttcttagtaacacattagattccacaagaaactcaaatgcatcaaaggaggagacaaatggtatgcctcctttaacaaaggaggaaataaatggcagtccttcaaaagatgatggaatagtagataaaccagtagaagcacatgtcttgcttactttagaagaaaaggactatacaagtgttagatggaaatatatactgtggaaatcctgcgtatacataatcacattaggaatgttgattgcaatgcttctaggtttgaatatgtcatggactgctatttcagctgcactagctttggtagttcttgatttcaaagatgctaggccaagcttagagaagtttcctattcactcttgatattctt

SEQ ID NO: 41737 - DNA, 297 bp, Glycine max
ccagagaattatcttcacagtggcttgtcctgtcaatagagggtggctttaacgagggctatgagtaagagcatatgcgagcagcaccataccagatatttataccaccagttctcatgacagtgaagtatggaatactggttgctcaaaaacaatgacgatgggatttaattcaaacccatgctctgatgcaaggagcttggaatattttaagcgtaccggatttcattgaaaaaaaaaaaaaaaaagcggtcggctgcgtacgagcttgctgaccggggaagtaataacagaccg

SEQ ID NO: 41738 - DNA, 377 bp, Glycine max
tgctattctcatgaatatgccaaatgctgttctttcaatgtggagatattttgttggagatctcgtttttgaagtttctaagatgacttctccctacattaaatgtacagtctctttcttcatagcatttggaaatttggctgatgacaccatcaattttgaggcttttccccacaagctggtgcagtttggagaaattcaagaaaaggttgtattgaaattttcacaagaggaatttcttacagcttggtcaacttaagtgcgtcctgcatcaactctgttggctgatgggtgtccatttttgtttgctttggtgcatgatagttctatgtctacaattccaggtgattttttcattggttgttagttgtcatcca

SEQ ID NO: 41739 - DNA, 337 bp, Glycine max
ctttatccttttcgactccatactcaaaaccgggtcagactcatacaaaacatctacaacaatatacttggctataggcgctagctcggaagaaaggttagtaccaggtcatgatctgcctgtctgggaatgcacctttcataatgaacgattggtactcagcgacacataggtgttaaactgacagcagccctgccaaacattgtgatgcctgtttgatgacataaatcaaaccacatgcgtgggtatgtataccgccaatataggcatcgggtgcttataataccattgccatgcggagttcggagtgggcaaaacaaacgtcatggcctttgag

SEQ ID NO: 41740 - DNA, 361 bp, Glycine max
tattgatctactgttgagcattgatttgttgggtttacaaggagcaggtaaagcttttccaaacaagattgtttttgatgataagcttgcgttggctaacacacaagaattctttgatggaaattttccagtggattcttggttaccaatttttgtgaattgtctttatcctgtaagtcaattaccttcagaagctgtcgttgtaaatgttacatgtggttgtggacgtggtggtttacccaccactgctttgtttagttctgcatttaactatcggtggtttgatattaactaatagattcgttcatcactagggctaggtctgtaaatttgtttttttacaagagatgtttctttttca

SEQ ID NO: 41741 - DNA, 403 bp, Glycine max
  unsure (1)..(403): unsure at all n locations
ggaatggactggtttggccaatagattactgagtaagggcaacgatattctgtgttgcgattatgctagttttgatggtttgattaccaagcaagttatgagcaagatggcagaaatgataaacagtctttgtggtggtgatgaaaaattgatgcgtgaaaggacacacctgctgttggcttgttgttcaaggatggcaatttgtaagaaagatgtttggagagttgaatgtggaatcccttctggatttccgctcacagttatttgcaatagcatttttaatgagatgctcattagatatagctatgaaaaattactgcgccaggctaaagctccaagtatgtttntacaaatcttcaaaaatttgtttctttgtgtgtgtatggtgatgataacttaatta

SEQ ID NO: 41742 - DNA, 337 bp, Glycine max
tgtttatattttgttggagatctcgtctttgaaggttctaatatgactacttgctactttaaatgtacagtctatttcttcatagcatttggaaatttggctgatgacaccatctattttgaggcttttccccacaagctggtgcagtttggagtgtatcatgaaaaagttgtgttgaaatattcacaagaggaatttctttcatgatggtcaacttaagtgcgttccgctactactctgttggctgatgggtgcccaatattgtttgctatggtgtcatgatatatcaatgtctacattaccaggggattttgttatttgcttatatctttttttc

SEQ ID NO: 41743 - DNA, 438 bp, Glycine max
gcagacttaacaacagcacaaagcgggttactgtctgttcaagctaccatctctctctctctttcttagtgcctccttgccagaagttaaaatggcccaagaaactttcctattcacatctgaatcagtgaacgaggggcaccctgacaagctctgtgaccagatctccgatgctgtgctcgatgcatgcttggagcaggaccctgacagcaaggttgcctgtgaaacctgcaccaagaccaacatggtgatggttttcggagagatcacaaccaaggccaacgtggactatgagaagattgtgcgtgacacatgcaggaacattggttttgtctctgatgatgttggtcttgatgctgacaactgcaaggtcctcgtcaacattgagcaacagagtcctgatattgctcaaggtgtgcacggccacctcacaaagag

SEQ ID NO: 41744 - DNA, 132 bp, Glycine max
cgaggccttccgccgaatccgcgagggccccgccttgatccgcaccaagggcaaggccggaaccggcaccataatcgaggccgttcgccacgtccgttccgtaatgagcgacataagggttttccgaaccat

SEQ ID NO: 41745 - DNA, 333 bp, Glycine max
cctgaacatcctgcatggggggggcggtccttccattgccccaaaggatgggttattttcttgtaaggattgtgttccaagaacctatggggtttaaaatccacaaaatcttttggggtaaaataggggatgggggaaacggcttttccccaaggcaccttccggaagggtaaaaggatggcctttactattagggggggggcttgtgccaaaaattgtattcttaagaaatatgcaaaaggctgtcttttaatggggagaatatttggtggagaatctgtcttttgaggttttaaaatggcctctccctacataaaaggaccggcttttttt

SEQ ID NO: 41746 - DNA, 239 bp, Glycine max
tcttgataggtctcgtgggggcaactacttatattggcgctggactatgtgcggacgttgactcatgcacctgcccaaactggctgcctatagtaaagaaaggtgtggtcaatgccattcataaagaaccgcgcatggctgctttctttctacgattgcacttacatgactgttctgtaaacagttgtgatgcatctatactggttgatgaatcaagcatcttgattggggagcaaaca

SEQ ID NO: 41747 - DNA, 249 bp, Glycine max
atcttggaaggatgtcttacgctgctcatttcgctaatcagccccaacagaaagagtggtcggagggaaattcttcctttgatattaaatctcgctctaggctggaaaaagtttactatacaaaatcacaatttgatagtggaaaaaccttcagaaatgatataaatggtgctggaccacactcttcataagattgttctgaaaagcaagatcaagaaaaacccacaaagattgatgccagatggagac

SEQ ID NO: 41748 - DNA, 281 bp, Glycine max
  unsure (1)..(281): unsure at all n locations
aaaagaagcaaagaccaactggtgttaatttggcatgggatcttcaacccttttttgggaaggaggaggagcacttgtggtggaaaccaccaaagggggaggggatttggtggccaaggatgtaaattgagcttctgtgcaagtttccagacaactcttgctatgactttgactactctcagagcacaatctggtcccctttgcttncaagaccttacagtcctatggatttggatcttatcactccaaagaagcttttctatgacatgggtttgggagct

SEQ ID NO: 41749 - DNA, 459 bp, Glycine max
aacgcttacccattatgaaaaaaatcctgtgaaagggcaaacaatattgtatgtgggggatctctcttatgcagatgattttccatatcatgacaacaccaagtgggatacctggggaagatttactgagagaattgcagcttatcagccttggatttggactgcaggaaatcatgaaattgattttgctccagaacttggtgaaaccagaccattcaagccttacacttgtcgttatcatttaccgtacacagcatcaaatagcacatctccgttgtggtactctataaagagagcttcaacatacatcattgttttatcttcttactcagcttttggtaaatacacgcctcaatacaaatggcttgtaaaggaactgcccaaggtgaacaggacagagacgccatggctgatagtcctaatgcatagtccaatgtataataggtatgtgaatcacta

SEQ ID NO: 41750 - DNA, 486 bp, Glycine max
  unsure (1)..(486): unsure at all n locations
ctctcttcggtcagaaacatgaatttggaaacgcatccaggaacggcgtcgtattggtgctacagctgcacccgtttcgtgcacctctctgtccaaagcaccatcgcctgcccccactgtcaaagcggtttcgtcgaagagatccgcgccggcgccggagccgaagcctggccacgccattgactaagatctttctccgaagatcctcttttgctgcccagacagggcttacaccggcggatgagagaagctgcccacagccgctaatagtacaaccccgttgtggtactctgtggagagagctacaacatccacgacggcgaccactactgactcagcacgttcgagctcttctacgacgacggcgacggcaccggccttcgccctcttccttccaccatgtcggagttgctcctctgctctggctttgacagacttctcgaacagttngtgcagatcgagatgaacggatttcggcggccggag

SEQ ID NO: 41751 - DNA, 389 bp, Glycine max
tagagctccttgttgtgaaaagatgggattgaagaagggtccttggaccccagaggaagatcaaatcctcatgtcatacatccaaaaacatggccatggaaattggcgtgccctcccaaagcttgcagggttattaaggtgtggcaagagctgcaggctaaggtggattaactatttaaggccagatatcaagagaggaaatttttcaagcgaagaagaggaaattatcattaagatgcatgagttgctggggaacaggtggtcagcaattgcagcaaaattaccaggaagagacctggagacttgaattgctagtagatggcattgaccaagaaatattgaactgggttaaggatggaaaatacattttcttgttctgaggggatgat

SEQ ID NO: 41752 - DNA, 411 bp, Glycine max
ggggatcttaggattcattgtgagagaaagccacaaaagcctatggtggtatataggaggatgggggaactgactttgccccagggcacttcccaaagtgttaaaagaatgcctatttctatagggggaggagctggtgcaaagaatgctattctcatgaatatgccaaatgctgttctttcaatgaggagatatttcgtaggagatctcgtgtttgaagttgaataagatgacttctacctacattaaatgcacaccctctgtcttcatagcatttggaaattaggctgatgacaccatcaattttgaggcttttccccacaagctggtgcaatttggagagattcaggaaaaagttgtattgaaattttcacaagaggaatttcttacagcttggtcaactcaggtgcg

SEQ ID NO: 41753 - DNA, 438 bp, Glycine max
  unsure (1)..(438): unsure at all n locations
tgcacgcgcacgtaagctcggaatncggctcgaggaaagcacanagcctangactgatttgtaaancaacgaggagaaagagaaggcaggttaggatttatacaatacaactttttcgcagatctgttgaganatgccctttcaagaagccctcatcacatcctcagacaatgaactacataacagggtgacgacggaggcaagttcgagatacaacctagaggactcaacattgtgtggggaaatgattctcgatactggaaaattccagaacaaggtcctgcggagctgatccaagtttcatggttggaggtatccggcgtggtaaacttaccaggtgtcaagaaatatagggttgaattcgaagtgagagttaaagaccatgggttcggttggagtggcacggacgtgctagtgatggctaagaattgggaaaac

SEQ ID NO: 41754 - DNA, 314 bp, Glycine max
ggtttacaaggagcaggtaaagccaacacataaatgctcaacagtggagataagcttgcgttggctaacacacaagaattctttgatggaaattttccagtggattcttggttaccaatttttgtgaattgtctctatcctgtaagtcaattaccttcagaagctgtcgttgtaaatgttacatgtggtagtggacgtggtggtttacccaccactgcttggattagatttgcagttaacattcgtttgtcaaacatcaacaaaaggatttgcacaatctccttgcatatggtataaaattggtattccttact

SEQ ID NO: 41755 - DNA, 311 bp, Glycine max
  unsure (1)..(311): unsure at all n locations
ctcgagccgcccttttaatgatttgttagagggaaacnncnccgtcgatattaaatctcgctctagatgggaaaaagtaacctctacaaaagcacaatttgttagtggaaaaaccttcaaatatgatataatgggggctggttcacattcttcaggagatcttcccgaaacggaagatcaagaaaaacccaaaaagattgataccacattgagacaaagaatagatcctcaatacactgcgcgccacgctaaaagggcaacaaatttgtttaaaccgtatgtagatgatgttgaaacccccaaagggtcta

SEQ ID NO: 41756 - DNA, 348 bp, Glycine max
  unsure (1)..(348): unsure at all n locations
tgcacgcggacgtaagctcggaatncggctcgagaatnagaaagaaattcgttttgttagnngaangnggaaccccggcgggatttccgttcacagttatttgcaacaccatttctaatgagacgctcatgagatatagctacgaaaaattactgcgccaggctaaagctccaagtatgattttacaatctttcaaaaattttgtttctttgtgtgtgtatggtgatgataacctaattagcgttcatgaatatgtcaagccttactttagtggttccaaattgaaaagcttcctagctggtcataatatcaccatttctgatggtatcgacaaaactagcgcatttt

SEQ ID NO: 41757 - DNA, 424 bp, Glycine max
agagggcggtgtctttgtatctttcttttagggggcgcgccaggggtgatatttacaccatctgttctcacagaccgcgaattgtggaatcctgcttgcacaaaagcaatgactatgtcatttaacaccaaacccgtgatctgatgcatggagtgaggaatgtctgaagcgtactggatttgattgggatatcatttgggtgactggatggactgccaccccaatgcaggatgttcaggtcacaaccgatcggtttattgcctctgatgaatgtgtgcccaggacctattgtgttgtaaatgcacaaaatactcttgtgccaaataggtggaggggacaagcgactgtcccacagggcacttacgcgagtgtctagagaaggcctgtatctatagggggaggagctggggcacaaaatgctatt

SEQ ID NO: 41758 - DNA, 420 bp, Glycine max
gcttaggagagtattaacttatcttcttccgcttagtatggagaaccatttttgtgctgttgacgaccctcatagccatgctcatgccttttttcaacgatgtggttggaatacttggcgcttttgggttctggcccttaacagtttatttccctatcgacatgtatatttcgcaaaagaagattggacgatggactagtcggtggattggacttcaattacttagtgtcagttgcctcatcatttcattgttagctgcagttggttccatggcaggggttgttttggacctcaagacttataagccatttaaaactagttattaagtgagatttaaagaaggtcgtagaaatagaagtgtttaagcttgatgatattatagaaaactaatgataagttggtttgtgaaatttaagtata

SEQ ID NO: 41759 - DNA, 440 bp, Glycine max
  unsure (1)..(440): unsure at all n locations
cacgcggacgnaagctcggaaancggctcgagccaggaccnanngtttcttctattcacaaaanccnnncgngnnaaanaggttgattggaaaattgactctcccccacggcacttcccgaagtgttaagagaatgcctctttctatagggggaggagctggtgcaaagaatgctattctcatgaatatgccaaatgctgttctttcaatgtggagatattttgttggagatctcgtctttgaaggttctaagatgacttctccctacattaaatgtacagcctccttcttcatagcatttggaaatttggctgatgataccatcaatttcgaggcttttccccacaagctggtgcagtttggagagattcaggaaaaagttgtattgaaattttcacaagaggaatctcttacagctgtgcaactaaggtgcgttcttg

SEQ ID NO: 41760 - DNA, 291 bp, Glycine max
  unsure (1)..(291): unsure at all n locations
gagaggaaagcacnccctcngcctcgattgtcngcaaaaagcngangggcccagcttagttcagaaagaagaccgggccccccacagcacggatgacgaatgctcctgattcaaatgacaatattgatctactgtagagcacagattcgatgggcttacaaggagcaggtaaagcttttccaaacaagactgtttttgacgataagctagcggtggctaacacacaagaatcctttgatggaaatcctccagtggatgtcttggttaccaatttctgggaattgactttat

SEQ ID NO: 41761 - DNA, 444 bp, Glycine max
  unsure (1)..(444): unsure at all n locations
cacgcgnacgtaagctcggaatncggctcgagaggaacttttctcctttggngnacgncaaggcncagaaagcaaaagcctactgcaagagatatcacgccaagttcaagagaagaagagagggaaaaaccgattaccgtgccaggattcggttgattaatcaggacaagaacaaatataacactccgaaataccgatttgtggttcgctttagcaacaaggacattgttgcacaaataatatctgctagcattgccggcgatttagttcttgctacagcatattcacatgagctgccacgatatggtcttgaagtaggacttacaaattatgcagcagcttattgcactggtctcctgttggcccgaagagtcctcaaaacacttgaaatggatgaggagtatgaaggaaatgttgaggctactggagaggattattcagtgg

SEQ ID NO: 41762 - DNA, 416 bp, Glycine max
ctcgagctgatatctgctcgagcggctcgagctcgagccggtcaaaaacaactacttcttgcgaacaaactgcacgaaaccgtttggccaccctcgcagctcacttgcttccctccgacgccacctccgccgccgcgatcctccacccccaccggctctccggccccaccggagacttgccgccggcgaacctgaagggcacccttaccgtcgtcgacgagaggaccggcaagaagtaccagatcgaagtcaccccagatggcaccgtcagagcctctgacttcaagaagatatcatctgggaaaaatgacaagggactcaaactttatgatcctggctatttgaacactgctcctgtcatctcaaggatttcttacattgatggtgatgctggaatccttagatatagaggatat

SEQ ID NO: 41763 - DNA, 428 bp, Glycine max
  unsure (1)..(428): unsure at all n locations
tccttaggctggaaattcggttcgagctcaagccgaattttttttttttttgggtggcaanaagcctagtttggatggttggattaccaagcaggttatgagcaagatggcagaaatgataaacagtctttgtgggggtgatgaaaaattgatgcgtgaaaggacgcacctgctgttggcttgttgttcaaggatggcaatttgtaagaaagatgtttggagagttgaatgtggaatcccttctggatttccgctcacagttatttgcaatagcatttttaatgagatgctcattagatatagctatgaaaaaatactgcgccaggctaaagctcaagtatgtgttacatccttaaaaaatttgttcttgtgtgtgatgggagatacttaataggtatgatatgcagctacttagggtctaatgaaag

SEQ ID NO: 41764 - DNA, 346 bp, Glycine max
  unsure (1)..(346): unsure at all n locations
gtaagctcggaatncggctcgagctcgagccgggcttaagtttttggaaaaccncggggggggctgggggggcttaatgaggcacctacctatgaccagcccccatacaatggcttcttcaatgatggggcttcttgggagtccacatatggggacttcttcctctcttggtattccaatcagctcatagctcatggagattgcctcctttcattggcatcttcaacttttggtgactctggggtgacaatctatggaaaactcccacttatgcactcttggtatgggactcgatcccatccttcagagctaactgcanggttctataacacagctaacagggatg

SEQ ID NO: 41765 - DNA, 441 bp, Glycine max
  unsure (1)..(441): unsure at all n locations
cttgctgttttnttgnttttggaagaaaggntgnttaatggtcaagattgttatgtctgggaatgcaccactcaaaaggagtgattgggcctcattggtacaagtgtttttaacaaacagcaacagtacagagcattttgatgcatgtaagtggacaaaatcagaaccacattcctgggaattaatcttcccaatagaggtatgtggtcctaataatggttttgaaatgtggagttctgagtgggcaaatcaaacttcatggcatttgagtttccttattgacaatcccaaacagtctacagtttttgatattctcttgggaatctctcaagattttgaaattgctggtaatactcttatgccagctttttctgttccacaggctactgccagatcttctgaaaatgcggaatcctctgcatgatctggaattcgtgtttt

SEQ ID NO: 41766 - DNA, 397 bp, Glycine max
  unsure (1)..(397): unsure at all n locations
catgcgcgcggacgtaagctcggaatncggctcgaggcgaaaggcggnttttcattttatttaagaaaaaaaggcggcnaaggcacatgaagagtagagagcgtgggccacacaacacganggagnnncacaacatcaaaattagtcaggttgagttactggttacatatgaagggcaaagatttgttgttaatgatctcaaattactgatggatcaatttcatcgaaccgagtttactggaacttggcgaagactcttctcgcgagttaagaagcacatcatctggggagtcctaaagtctgtaactggaatgcatggtcggaaatttaaagacaaaggtcagagtcagccccctggtgctggtgttcctgaaattgatcttattttaagtgacaa

SEQ ID NO: 41767 - DNA, 435 bp, Glycine max
ttaagttttatatcttgttctctctgattggttggaaagattggacacgtttcatcaaaaggatggctacaatagaaggatcacaggttaacgttaccaaagaagtgatttcaactgtctttacaataactgcaaggacagcccttggcagcaagagcaggcaccatcagaagctaatatcggtggtaaccgaagccgcaaagatttctggaggttttgacttgggagatttgtacccttctgtgaaatttcttcagcacatgtctggcttgaagcctaagcttgagaagttgcatcaacaagctgaccagataatgcaaaacatcatcaatgagcatagagaggctaagtcaagtgccacaggagaccagggagaggaggaagttcttttagatgtgctcttgaagaaggagtttggcttaagtgatgaaagta

SEQ ID NO: 41768 - DNA, 436 bp, Glycine max
gaatattacatcgcttttggtatttagatcggcagcaggcgaatggggaaccgcccgagtctctgcgatgtggactatttcatattgcataccctagcgcaccagaaacatcaaagacagagttgagatcaatatacagtcagttatgtcaggatgatatgcctatggttagaaggtcggctgcatcaaatcttgggaaatttgctgcaactgttgaatatgctcatttgaaggctgatgtcatgtcaatttttgacgatcttactcaagatggtaattgaatacatatttcttgttctttgtagatggaaagtgtctgtcatttgtctgttacatatttacatgtgtgattgtgttgtagagtctcctgaatgtactttactcctttaatatgcaattgtaatcttggaacagatcaagattctgtcagattgtt

SEQ ID NO: 41769 - DNA, 324 bp, Glycine max
gaatcggtatgggtggtgtaacaggaacgccgcgagatgcaaacgtgaaatcaaaggttgctggagacaccacgaacacccaggacggtgtgagcgtcaaggacaatgccaaggccatcataagaggggcacacagacgcacacaggagcaagactctgagcacttgcatatcaaacgtcaactcatcactgacaaaaactgctaaaggaagctcaagggggacgaccacttcaacgacgactaaacatgcagacggattcgcaccgttctgaagcacgaggagaaactactcatacgcgcaaccaaaggatatcgatacaaaa

SEQ ID NO: 41770 - DNA, 446 bp, Glycine max
gttggaaagggtgtaagatatatgtctcttataactatctccgaggataattgtatatctatgcatgattgggtacaagaaatggcctgggagattgttcgtcgcgaagaccctgaaagtcgtagttggttgtgggatccaaatgatgacatttatgaagcattggaaaatgacaagtgtactgaggccattagaagcatacgaattcacttgccaacatttaagaagcataagttatgccgtcacatatttgcaaagatgagaagactacagtttttggaaacttctggggaatatagatataatttcgattgcttcgatcaacatgatattcttgctgaaggacttcaatttttggcaactgaactaaaatttctttgttggtactattaccctctaaaattgttgccagagaatttttctccccagaaacttatatgaatatg

SEQ ID NO: 41771 - DNA, 261 bp, Glycine max
  unsure (1)..(261): unsure at all n locations
agagtangacaccgcacgcacgcgtatttaagctcggaattctgctcgagannacggtgcagtgatttgncagcaacgaanangacgcacggtttatttcaaatgattgtggttcattccttgnngccaaggttggaaatcacaaacaaattgtcggtttccatgttgctggaagcaaaggaagactgggatatgcttcattgataccatatgttgagccagttgtgcaagctcaaagtgctgaagtttactttgactttt

SEQ ID NO: 41772 - DNA, 427 bp, Glycine max
  unsure (1)..(427): unsure at all n locations
agctcggaanncggctcgagcncgagcttaanttggctcgagncncncnancncncacgcacactttctttctctggctgtctcacccagatctaggagcaatggcgagcgctcccactccacgcgaagagttcgtgtacatggcgaagctggcggagcaggccgagcgctacgaggagatggtggagttcatggagaaggtctccgcctccgccgagagcgaggagctgaccgtggaggagcgtaacctcctctccgtcgcctacaagaacgtgatcggcgctcgccgcgcctcctggcgcaacatctcctcaatcgagcagaaggaggagagccgcggcaacgaggaccacgtcgccgccatccgcgactaccgctccaagatcgaggccgagctctccaacatctgcgacggaatcctcaaact

SEQ ID NO: 41773 - DNA, 397 bp, Glycine max
  unsure (1)..(397): unsure at all n locations
aagagtagaaanggatcacgcgacgtaagctcggtatncggctcgagccgaaaataggttggtttttgcnaacacgaaaggacgggacggtatattatgacctatgtctgtgccaactggacgcgnnnncaatagacaagcactttatggctacagtccaccatctatgcccaaattaccaaaatcatcatcctgctgttgctgcccctcaaagaagcaaaccaaagacgtctcagagctttatagagatgcaaagagggaagaacttgatgccgccatttttaattctcagggagattgacaactatgattgaatacgagaggtcaaatgctgatttcacaaatggaccttggagaaaaacattaggctttcgtcccacctcgttctcaattgaaa

SEQ ID NO: 41774 - DNA, 365 bp, Glycine max
  unsure (1)..(365): unsure at all n locations
gccaggcacgccttgnnatancattacaccncgacncgnncacgcgacccgttgctgctcttcttcgacctctcaagccggaaaagcataaagatggcagggacattcctatgtacctaagagtcggggaacgagggacaccctgacaagcgatgcgaccaaatctgcgatgctggactcgacgcttgcctcgagcaggacccagacagcaaagatgcctgcgaaacatgcaccaaaaccaacttggtcatggacttcggagaaatcacgaccaagggcaacgttgactacgagaagatagtgcgtgacacctgcaggaacatcggcgtcgaatcaaatgacgcgggactggatgccgacgactg

SEQ ID NO: 41775 - DNA, 472 bp, Glycine max
  unsure (1)..(472): unsure at all n locations
gcatgcacgcggacgtaagctcggaatncggctcgagtnnctgaagcngattggttttcattgcganancannngngncaccggatggactgccaccccaangcaggacgnncaggnnacaanngancggnnnatnncctctcaggaatgtgttcccaggacctattgtgttttaaatccacaaaatccttttgtgttaaataggtggatgggaaaattgactttcccccagggcacttcccgaagtgttaagagaatgcctctttctatagggggaggagctggtgcaaagaatgctattctcatgaatatgccaaatgctgttctttcaatgtggagatattttgttggagatctcgtctttgaagtttctaagatgacttcttcctacattaaatgtacagtctctttcttcatagcattntggaatttggctgatgataccatcaatttgaggcttttcccacaagct

SEQ ID NO: 41776 - DNA, 367 bp, Glycine max
  unsure (1)..(367): unsure at all n locations
agcggcncgaggaaagccgagggattcaacggcccgaggggcagcacccncaacnaancaacggcncggagagccnccgcnnccaaggcnncgaagggggcgacaagnanncngggctttgtctccacgtcaagatcataaaacatcttttcaaacattgggacaatgaaagagtcaatagtagggtttgaacccaataaaaaagagggtaggtcccgtggtgcaagcaacaatggcaatcctggtaattcaatgaaacacgaggggtctttgattttgtctttgatgtattcaccgcgttcgtgaaagtagtaatagaagatgtcgagtatcgtagctggttgagtccacagcatcgctgttggga

SEQ ID NO: 41777 - DNA, 450 bp, Glycine max
  unsure (1)..(450): unsure at all n locations
cacgcgnacgtaagctcggaatncggctcgagcggaaggacgccttacgttgntataacgnnaancagccccaagagaaagatnngttagagggaaaccgtgcctttgatattaaatctcgctctagattggaaaaagtttcctctacaaaagcacaatttgttagtggaaaaaccttcaaatatgatataattggtgctggttcacattcttcaggagattttcctgaaaaggaagatcaagaaaaacccaaaaagattgataccagattgagacaaagaatagatcctcaatacaatgaggttcaggctcagatggaaacaaatttgtttaaattgtctcttgatgatgttgaaactcctaaaggttctatgttggatcttaaaatttctcaatctaaaattgcacttcccaagaacacagttggaggaaccattctgcgtagtgatc

SEQ ID NO: 41778 - DNA, 224 bp, Glycine max
  unsure (1)..(224): unsure at all n locations
gaagagntagacgacgagcacgcgacgtaagctcggaancggctcgaggccaagagtggagtgatttatgagggagagcgnngacgcgccgggttgatttgtatgtatagggatcccatgcacaagaggcgngccactggtggcaagaagaaggcatggagaaagaagagaaagtatgagcttgggcgtaaggccgcatacaccaagttatcaagcaacaaaac

SEQ ID NO: 41779 - DNA, 372 bp, Glycine max
  unsure (1)..(372): unsure at all n locations
cgcggaacgttgttgncttttaaannnngcgaggnacancaggaaggaaaatgtacaagctnagggggcaccccggaancaacccanactccanggaagggactggnncggccaanagannaccgagnaagggcaacganannccgcgncgcgaaaacgctagttttgatggtttgattaccaagcaagttatgagcaagatggcagaaatgataaacagtctttgtggtggtgatgaaaaattgatgcgtgaaaggacacacctgctgttggcttgttgttcaaggatggcaatttgtaagaaagatggttggagagttgaatgtggaatcctttctggatttccgctcacagttatttgcaatagcattt

SEQ ID NO: 41780 - DNA, 119 bp, Glycine max
  unsure (1)..(119): unsure at all n locations
cncaaaagtttgtttgcttgtgacagacacggagcnggacgagggggagttaccacnnngcatgacgccaancaaaaggaggagangagacgaaagcagcaacagcaanancgcgaggc

SEQ ID NO: 41781 - DNA, 310 bp, Glycine max
gcagtttggagagattcacgaaaaagttgtattgaaattttcacaagaggaatttcttacagcttggtcaactcaggtgcgtactacaacaactctgttggctgatgggtgtccatatttgtatgctatggtgcatgatagttcagtgtctacaataccaggtgattttgtaattggtgttaagttgacaaccataaacaatatgtgtgcatatgggctcaatcctggtatttcaggttctcgtcttttggcaccattcctagtctattcacagacacttgttgaataatgcacagtagacaccatgatt

SEQ ID NO: 41782 - DNA, 311 bp, Glycine max
gttatgagcacgatggcacaaatgataaacagtctttgtggtggtgatgaaaaattgatgcgtgaaaggacacacctgctgttggcttgttgttcaaggatggcaatttgtaagaaagatgtttggagagttgaatgtggaatcccttctggatttccgctcacagttatttgtaatagcatttttaatgagatgctcattagatatagctatgaaaaattactgcgccaggctaaagctccaagtatgtttttacaatccttcaaaaattttgtttctttgtcgtgtgaatggtgatgataacttaaata

SEQ ID NO: 41783 - DNA, 300 bp, Glycine max
  unsure (1)..(300): unsure at all n locations
tttgcaaatttttgnnatagaacganacaactctacgccttgggcgtttgtttttctgaccaaacgggccttgcttagctctcacaagcaagcattatcaacaatgaagaaaattgtgttaaaggtggacttacatgatgacaggatcaagcgaaaagctatgaagacagcatctggcctttcgggggttcaatcagtttctgttgacattaatgacaagaaaatgaccttattgggggatgttgatccagtgagtgcagtgtcaaagctacgaaagcggtgcacactgaaatagtctca

SEQ ID NO: 41784 - DNA, 315 bp, Glycine max
  unsure (1)..(315): unsure at all n locations
accgcacgnnnttttngttttttggagcganccgagaaaaactctgtatacatgttggtttaccaggacctccttacaggtgatgagcttctctctgactccttccgttacaaggaaattgagaatggaatgctgtgggaagttgaggggaagtgggttgttaaaggagcagttgatgtagacattggtgcaaacccttctgctgagggtggaggagaagatgagggagttgatgatgcagttcgataaggtcgttgacattgttggcacattcagacgtcaggagcaactccgcatttgatacgaatcagtttg

SEQ ID NO: 41785 - DNA, 223 bp, Glycine max
accttcccatacataaccttggcactatcatcatggagatcaatggagagggtgcatccccacacagcataaattctatcaagttcaagggacctgagaaacagccttatagaacttgggaccactttcaacccccacaaaattggatgaacgatccaaatgcacctatgtactacaaaggagtgtaccactgtgtctaccaacataacccctatgcaccaac

SEQ ID NO: 41786 - DNA, 264 bp, Glycine max
  unsure (1)..(264): unsure at all n locations
gaagaggnaagacgacgcgtgcacgcggacgtaagcgcggaatacggcncgaggaanaacnnttgtgtgggtttnncnaaancagacggaacaagggcgggtcttttggggagcgggggcggcccccacgcaagcagaataggcctgggtggcacctaaaatataccttgtttttctgcggggcggatgaatcttatcatctatgctatacataatgatatactaatcgggtattgaacttatctctggctcagcaagtatgat

SEQ ID NO: 41787 - DNA, 360 bp, Glycine max
gctctgtttttcttccttttttcaaggaacgttactaccatcccaaagattcaccgcctgctacggatgatcccgcgcaagacttggagactcaactgcgcaagattgcggacgggttactatcgggtcgctactccaagcctgacagtgatgtgatcgcgtcggaagatacccccgaagttcctcaccaaaagggccttgctcctgctatgctgaagcatcttatcggcagaggccacccggaattctctaccatgaggcagcaggactcgttcgaactgcttcttcaccttctcaagctcgtcactcgcacaccttatcctgcacctttcaaggaccctgtcgatgctttccggttcg

SEQ ID NO: 41788 - DNA, 189 bp, Glycine max
  unsure (1)..(189): unsure at all n locations
acaggggagacagngaaccgaaaagcttaccgtgaggacgatgcgcaactcgcacaaacaagacgggatcgcgtgcaacaagcagacaactacaagcaactcaaaaagggcgcgcatgaagcgagcaatacacggaacagaggcagacaagagagcgacgagacggccaaggacactgagcctagcgag

SEQ ID NO: 41789 - DNA, 292 bp, Glycine max
  unsure (1)..(292): unsure at all n locations
caaagcggaaggattatttgagtttgggnnaacacccgggcgctactgcatggatatcagatgtggagcatacaaaaacgggtggagctttgacatggagggcctccctgcagatctcatgcgcaggggaatggcggtaccagacccaacacaaccaaatggtgtaaagctcctaattgaagactacccttatgcaacggatggacttctgatctggtctgcaattgagaactggggccgcacctatgtgaaccactactaccgccatgcaagcctgatttggaatgacaaa

SEQ ID NO: 41790 - DNA, 369 bp, Glycine max
  unsure (1)..(369): unsure at all n locations
cggcacgtggngttttttttctctctcgaaacaganctggagtactgttgttgcacacaaagaaagaagaatatcatggggatactgcacgacgacgtagtgataatcagagagccagagaaagaaggtgaagcaaccgtcataaccgtcaattgccccgacaagaccggtctgggttgtgatttgtgtcgcatcattctcttcttcggccttagcattgtccgaggagacgtttccaccgacggaaaatggtgctacatagtattctgggtggtggggaagcaaaggacgaggtggagtttggtgaagaagacgctaattgaggcgtgccctacttgtttttcagcttctggaaatttctattaccgt

SEQ ID NO: 41791 - DNA, 369 bp, Glycine max
atcctatcggagtttagtaaatgaaagaaagaaaaccctagcttaccttttcaactttcaagatgcaaatctttgttaagacactcactggtaagacaatcacccttgaggtggagagttcagataccatagataatgtaaagtccaagattcaagacaaggaagggatcccaccagaccagcaacgtctcatttttgctggcaagcagcttgaggatggacgtacacttgctgattacaacattcaaaaggagtccactctacacttggtgctccgtctccgtggtggaatgcaaatctttgttaagaccttgaccggaaagacaatcacccttgaggtcgagagctctgacaccattgacaatgtta

SEQ ID NO: 41792 - DNA, 346 bp, Glycine max
  unsure (1)..(346): unsure at all n locations
gtgtgtgggtcggngtggatcgtcgtgctaccggtgaagcggcagggtgacctatccgtggaggttgcacgagtgagaatgcaggcatgagtagcgaatgaagggtgagaaacccttccgccggatgaccaagggttccagggccaggctaatccgccctgggtgagtcggggcctaaggcgaggccgagaggcgtagtcgatggataacgggttgatattcccgtacccgcaaaggagcgcccaagacgaaccccgttgtgctaaccacgtgaagcgccggcgaccttcgggtttatggtgtggagcctgggaacctggtgggtagtagtttagcgatggggtga

SEQ ID NO: 41793 - DNA, 355 bp, Glycine max
caaaactcgtgctttgttttatcaatgcacgcagcagatcgcgattttctcaagagaaacaataagaccccccctatacctactggatctgctaatttgcctgaggcgagattatggtcacaacttgattatgctacgacccataatgtaacatctgctgaagcttatcttgacaatctcgcaaatgtgttacgagaatcgtattggtacatgacacatgactctcgccaattgagaaggaaagctctctctcgtattgaatggctgcaaaaagctgatgtgcctaccatagcacaaattgacacgcaacatttgatcttcacgatgatgaatgctcctgattcaaatgataata

SEQ ID NO: 41794 - DNA, 293 bp, Glycine max
ccacacacctcagccttcacaccgtcaccatgggtaaggaaaagactcacatcaacgtcgtcgtcatcggccacgtcgactctggcaagtcgaccaccaccggtcaccttatctacaagtgcggtggtatcgacaagcgtaccatcgagaagttcgagaaggaagcccgtgtgctcggcaagggttccttcaagtacgcctgggtccttgacaagctcaaggctgagcgttagcgttgtatcaccatcgatatcgcccctttggaagttcgagaccccgaagtactattttac

SEQ ID NO: 41795 - DNA, 271 bp, Glycine max
  unsure (1)..(271): unsure at all n locations
atgcacgcgcacgtaagctcgaacttcggctcgagataaaagggcaccctcggttttgtatagagaaggccgctntccatagggggagtagctgttgcacagactgctatcctcatgaatatgccaaatgctggtctttcaatgtggagatattttgttggagatctcgcctttgaagtttctaagatgacttttccctacattaaatgtacagtctctttcttcatagcatttggaaatctggcttgatgacaccatcaattttgtggct

SEQ ID NO: 41796 - DNA, 425 bp, Glycine max
  unsure (1)..(425): unsure at all n locations
gcatnngtttttcctgcttatgacaccatcaattttgaggctttggcccatttgtctggtgcagtttggccagattcaggaaaaagttgtattgaaattttcacaagaggaatttcttacagcttggtcaactcaggtgcgtcctgcaacaactctgttggctgatgggtgtccatatttgtatgctatggtgcatgatagttcagtgtctacaataccaggtgattttgtcattggtgttaagttgacatccataaacaatatgtgtgcatatgggctcaatcctggtatttcaggtttttgtcttttgtgcaccattcctcagtctatttcacagctaactgtttggaatcaaatggtaacagtgtgaacaccattgaaattttgattcttgcaagcagagcttttgacatatttatattgac

SEQ ID NO: 41797 - DNA, 324 bp, Glycine max
  unsure (1)..(324): unsure at all n locations
acgcgaacgtaagcccggaatacggctcgaggccccacttttccctcgtttacaagacgggaacaacagcgaccgggcaagtttcaaaaggaggaagacgccccacacangccgactgaccccagagacagagaacgagggacaccctgacaagctctgcgaccaaagatccgatgctgtcctcgacgcttggcttgaacaggacccagacagcaaggttgcctgcgaaacatgcaccaagaccaacttggtcatggtcccccgagagaacaacacccaggccatcgttgactaccagacgatcgcgcgagacacctgcaggaa

SEQ ID NO: 41798 - DNA, 308 bp, Glycine max
  unsure (1)..(308): unsure at all n locations
cggctcgagtcncgtgncttatcggctcgaggggttttggtgatgaataatctgaagcatgaattacatgagcatgagcttgtgttgacgcgccgcagggtgtattactgtgatgcttgcaatgaagagggacatatatggtcctactactgtggagattgtgactttgatctccatccaaaatgtgcattggaaaaggaggacaaagaaggaagcaatgatgatgccaaggaagaaaagtccaaagatgaatgggtttgtgatggagaagtctgcaaaaaagcttaaaagcttgattgttaagggtt

SEQ ID NO: 41799 - DNA, 386 bp, Glycine max
  unsure (1)..(386): unsure at all n locations
atgcacgcgtacgtaagctcggaantcggctcgaggagccngancaacctccngttattttggccancaagcacaaccagcagancccttacatccactttcgcaaggactggcagcgctatgtccgcgtgcacttcgatcaggccggcaagaagaagagcaggcgcaacgcccgtcaggctaaggccgctaccgtcgctcctcgcccggtcgacaagctgaggcccgtcgaccgttgccctaccaacaagtacaaccgccgtgttcgtgctggacgtggcttctccctggctgagctcaaggctgctggtatttcccgcaagcttgcgcgcaccatctgtatcttcgtcgacccccgccgccagaacctctccgaggagtccctg

SEQ ID NO: 41800 - DNA, 389 bp, Glycine max
  unsure (1)..(389): unsure at all n locations
gggagattttttttcatctagctggngcagnncggagagantcaggaaaaatttgtattgaaattttcacaagaggaatttcttacagcttggtcaactcaggtgcgtcctgcaacaactctgttggctgatgggcgtccatatttgtatgcaatggtgcatgatagttcagtgtctacaataccaggtgattttgtcattggtgtcaagttgacaaccataaacaatatgtgtgcatatgggctcaatcctggtatttcaggttctcgtctttcgggcaccattcctcagtccatttcacagcaaactgtttggaatcaaatggcaacagtgagaacaccattgaattttgattttagcatgcaaagcttttggcagttttctattga

SEQ ID NO: 41801 - DNA, 437 bp, Glycine max
  unsure (1)..(437): unsure at all n locations
atgccgccacgtagctcgaancggctcgagcaaaacngngatttatctggattanncngacccacaanagcaagggaagcttattttagattctatcaaaccctgaattccttgcagagggaactgcaatcaaagatctctttaacccagaccgtgttcttattggaggcagggaaaccccagagggccaaaaagctattcaaacattgaaggatgtttatgctcaatgggtccccgaagaaagaatactgaccacaaatctttggtcggcagaactgtctaagcttgctgctaatgccttcttagcacaaaggatttcatctgtcaatgccatgtcagcactttgtgaggctactggggcaaacgttcaacaggtgtcctattctgttggtacagactcaaggattggacccatagttctcaatgccagcgttggt

SEQ ID NO: 41802 - DNA, 282 bp, Glycine max
  unsure (1)..(282): unsure at all n locations
cgacgtaagctcgtaattctactcnagagaaatgatttttgaggacgaaatgacatatcgtgcgggtgtttttttctatcttgaccaacacttatcattatgttgtaagatcattttacggaccaagtgatatcatggtgtgaatgttttaacatttttttttttgtttaagctagcttattatgcaaaggatttgttttcatattatttcaagcacaacaactttttcagttttattcgacagttaaatacctatggatttttaaaaattgttccatacaa

SEQ ID NO: 41803 - DNA, 350 bp, Glycine max
aatcctccctagacccatcctattgcaaatccggggtcgcgtgtttaaacggtaacgtttaccactatagtcgattctctgtcaaaaaatcactctcacaagcccgcaagttcttaaacctagttgataaatacctccaacgtggttcttctctttccgccaccgcaatccgtgcacttcaagattgtcgcactcttggagaactcaacttcgattttctttctagttcctttcaaacagtgaacaagacaacgaggtttcttcctagttttcatgctgatgatatccaaaccttactcagcgccatcttaaccaaccagcaaacatgcttggacgggttcaaagacaca

SEQ ID NO: 41804 - DNA, 385 bp, Glycine max
acccattctaagaatcccataacaacaaggcttgtcacgtgggggcaaaaactgaagagaggagcgaagaccttatgtgggaaaaatgggtcgggttaccttccaatagggtcggatccgctttgtgacagggctccggcggtgccgaaggggcacttggcggtgtacgttggggaggaggacggcggtttccggcgcgtattgattccggtgatctactgtaaccaccctctgttcagcgatttgctgagggaagcggaaaaagagttcgggtttgaacaccccggtgggatcacgataccgtgccgacttaccgagtttgaacgggttaagacccgtatcgcgtccgggtcgggtcaacgcgggaggacccggagattgggtt

SEQ ID NO: 41805 - DNA, 276 bp, Glycine max
ctcgagccgaatcgtttcgagctttaagtgcagcactggggggggttgatgtgtttggactatatgcaaagaattcctcttgccacatctgagggttttcctcatgtgctttcacgcaaaaatggcgaaaaaggcaaaaggagatttgtctctgtggatggtgaagagatgacattgattccaggaaccagtgttgaagatggcttactacaagctaatattagaacttgagaaaagagttcctacattggttgcatttgaattttcccaaggttt

SEQ ID NO: 41806 - DNA, 308 bp, Glycine max
cccttcttcaacatgccaaacgacagcgttctgagtctgttgcttcttcgataccctgttcacatgccttctctctgctaattcccacgatgaccatattttcctaccgagtcaactccatgacgatgactcagtgagttgcactgctaccgacccaaaccttaactacaagccggtgatcggaatcctgacccaccccggcgacggtgccttttgttggttcagcaacgcctccttgggttttttacattactatcttctatttttttatcggggggggtggtgtttcttgatttatttcatttttt

SEQ ID NO: 41807 - DNA, 264 bp, Glycine max
cccatctcagcccttcaagggggcgccgctgattttttaacttgacatgaccattcagaccgtttttctcatcaagaccctcaccgttcttggcgccgaggtttgctggttctcttgttacatcttttccacttattactacttccacgtcttcatttttcgtttctgttccgtcttttttaacttgtggtagttgtgtaacatttttttcaatctattatggataatctctattccttattatgctcttcatgtttaattttt

SEQ ID NO: 41808 - DNA, 330 bp, Glycine max
ctcgagctgtttgcacagtccagaggaagctcgtcgtcggaaaatgaaaagctctgtgtcgcatcgaatgcttgaaaaaggctgatgtgcttcccatagcacaaatggaaaagttccattcgtggcaaaggatgttgaatgctcctgattaaaatgataattttgatctactgttgagcattgattggttgggtttccaaggagcaggcaaagtttttccaatcaggtatgttttcgatgataacttgtgttggctaacacacaagaatgcgtggggggaaattttccagatggtttttttggataccaaattttgtgaatatgtctttt

SEQ ID NO: 41809 - DNA, 436 bp, Glycine max
cacgcgtccgtaggctcggaattcggctcgttctagggctaatatccatcgcagggggagaaagggagaggcgcgaaaatgagcggagcgaaggggaagaagaagggagcgagcttcgtgatcgattgcgcgaagccggtggaggataagattatggacattgcttctctggagaagttccttcaggagaggattaaggtcggcggcaaggccggtgcactcggcgattccattaccgtcaccagggacaagagcaagatcaccgtcacctccgacagcaacttctctaaacggtatctgaaatatttgaccaagaagtacttgaaaaagcacaatgtgagggattggcttcgcgtgattgcatccaacaaggagcggaatgtctatgagttgagatacttcaacattgctgagaacgagggtgaagaggaagact

SEQ ID NO: 41810 - DNA, 219 bp, Glycine max
cgtacataagctcttaattccattcttgcataatattaattccactaaccctatacaaacccggcggctttattacaatgggggtgtcaaatatcattatgataactgtctcttttgcaattgcgaactagaatgtaatattttattcacttaaataaagcccattactataagcaatgaatgtcgttttaatattattataaaaataaaaacttatat

SEQ ID NO: 41811 - DNA, 205 bp, Glycine max
ctcgagccgtttcttctcgaggaatcccttctggatttggcggcacagttatttgtaatagcatttttaatgagatgctcattagatatagctatgaaaaattactgcgccaggctaaagctccaagtatgtttttacaatccttcaaaaattttgtttctttgtgtgtgtatggtgatgataactgaattagtgtttatgaatt

SEQ ID NO: 41812 - DNA, 326 bp, Glycine max
ctcgagccgttctagccgctcgagccgccatactccatggaatggactggtttggccaatagattactgagtaagggcaatgatattctgtgttgcgattatgctagttttgatggtttgattaccaagcaagttatgagcatgatggtagaaatgataaacagtctttgagggggtgatgaaaagatgaatcggaaaggactcacctgctgcaggcttgacgatcacggttggacttatgagagaatgaaggttgtggagtttgatcaagagcctgtgaggcgcgttgtctatgaagagatagttgtttatttacaactatcgtt

SEQ ID NO: 41813 - DNA, 319 bp, Glycine max
cgggtttcctatatttcacgggcattaatttcgttcgggcagggttgctgctattctctgtgtgtgttttgcacccacagcagcaggacctggaattcctgagatcaaagcttatcttaatggtgttgatactcccaacatgtttggtgccacaacattgattgacaagataattggaagcatcggagctgtctctggaggtctagatttgggaaaagaaggaccgttggtgcatataggaagctgcattgctttcttactaggccaggggggcgttggcaattacagtaccaaatggcacttggcttcgatattttta

SEQ ID NO: 41814 - DNA, 370 bp, Glycine max
ctttgagtgtgcaggttggagagaagtgtgaacagtgcggagaagacaagggagagtgcaagtaaaagatataggagttttcatatcccttgggagtggatgctggacacaggcctcattggtcagatgaagctgagttcattgaagttagcaagggaattcatgaaaagggtaaccaaagagttggaatctaatgaagtctcaaaagaagataacctcttggtacaaggagttaggttcgcattcagagtacaccaggtaggtagattacacatttgcactacctcagatattcacaaaaggaacattaatttaaatttgttcatgtcatgaaccaccaaaacattcagtttgcaggtggctttgattc

SEQ ID NO: 41815 - DNA, 334 bp, Glycine max
ctcgatccttttcggctcgagcaattagtaactgggggggagttgctgcttggaagaaaggttgtttaatggtcaagattgtgatgtctgggaatgcagcagtcaaaaggagtgattgggcctcattggtacaagtgtttttaacaaacagcaacagtacagagcattttgatgcatgttagtggacaaaatcagaaccacattcctgggaattaatcttcccaatagaggtatgtggtcctaataatggttttgaaatgtggagttttgcgtgggcatactcaaacttcatggctatttgtagtttcttatttgacaaattcccaaaccagtc

SEQ ID NO: 41816 - DNA, 229 bp, Glycine max
agtgtctacattaccaggtgattttgtcattggtgttggtggggcaaccataaacaataggcgtgcatatgggctcaatcctggtatttcaggctctcgtcttttgggcaccattcctaagttcattttacagcaaactgtttggaattaaatggcaacagtgggaacaccatcttatttaggttttagcaagcagagcgattgtcaattttctattgaccctttcggt

SEQ ID NO: 41817 - DNA, 388 bp, Glycine max
gttctgcttacttttttatttttattgagtcaatgggaggccgttttggttaatcaacttgatttaaaggctcgccaacacatgttcaaggtgcacctaggagatactccccataacttggctgaaagtgattttgaacatttggctcgcaagacagaggggttttcaggttcagatatatctgtctgtgaatcctgaggatatgtggatcctatgtggaccaaagtaacagagtgcagtacaaactacaattcatgatcttgcggcgaaaggacttgcttctaagatcctgccgcctcctatatcgagaacagattttgacaaagtacttgctagacaaagacccaccggtagcaagtctgaccttgatgttcatgagtgattcaca

SEQ ID NO: 41818 - DNA, 378 bp, Glycine max
atggcatgttcttctccccttttcatgtatttgatattttttaggacattggaggatgtgatatacagaaacaggaaatccgtgaggctgtggagctaccccttacacatcatgaactatacaaacaaattggtattgatcctccccgtggtgttttactgtatggaccccctggcactggcaaaacaatgcttgccaaagctgttgcgaatcataccactgctgctttcatcagggttgtgggatctgagtttgtgcagaagtatcttggtgagggtccacgaatggtccgtgatgtatttcgtcttgctaaagagaatgcccctgcaattatatttattgatgaggttgatgcaatagccactgctagatttgatg

SEQ ID NO: 41819 - DNA, 266 bp, Glycine max
cgcgaactaagctctaatttcacttcttagctatctttttttttttatatggcactctactcgtcgcagctgttcctatctgattgcaggtcatccaaccatctaccgatctcaattctcaaccttaacctctcataatgtcttactcttatcttttcaaatacatcatcattgttgacaccgtatttgagtagactagactatcttcttcaatatacagacaagcgcattcattcctatccatttcttgaccatagttatttaat

SEQ ID NO: 41820 - DNA, 404 bp, Glycine max
  unsure (1)..(404): unsure at all n locations
gcaggcagcgcgtacgtatagctcggaatntcggcttcgagcctcgagctcttttatcggctcgagcccattattcttcatgactgancagcatgcttcttctgtggggcataacaggggtcatcttttcatgatcccgagggttgagccctcctctatcccatcagtgatgtgagcctcggataccttgaatcagaggtcagctcttctatgaggaacaacacgcacttgtcacgtctttcattgttgctttcaacacttgtgttcttctccactttcacacatgccttctcttcttctgtgtttccggaatcgaatcctattaaacctaggcactcacgtcttctcaggagtgctgtgcaacgagaaactcctacatctcagttgtctgaactatggtcacc

SEQ ID NO: 41821 - DNA, 387 bp, Glycine max
ccaatatattacattctctatgaggatacacctacctcgaccggtaagatacaaatcttcgtcaagaccctcaccggcaagaccatcactttagaagtggaaaggtctgacaccatcgacaacgtgaaggtcaagatccatgacaaggaaagaatccccccggaccagcaacgtctcattttcgccggaaagcaacttgaggacggccgtacccttgctgactacaacattcagaaagagagtactcttcacctcgtcctacgtctccgaggtggcatgcagatcttcgttaagacactcaccggcaagaccataaccctagaagttgaaagctccgacaccatcgataacgtcaaggccaagatccaggacaaggagggtatcccc

SEQ ID NO: 41822 - DNA, 215 bp, Glycine max
taagctcggatttcggttcgagcctcgagccgattcggttcgagccatgatgtgctggggttgaagctgaataggctgagtgtgcagggggagaagggtgggatgagatcttatgagttggatagtgctgattctttttgggttgcgaatgggtcgttggagtttccgtaggttgcggtggagattgagacgcatttgaataattataagaagga

SEQ ID NO: 41823 - DNA, 409 bp, Glycine max
ctcttttatttatggtacatggagcactgttgaggggagctgcatggttgtcagggatgtaaaagatgtttgtttccattcatacttctcggttatggatgacctgcgacaaaaaggacctccagatgcaaaatactatgagatcaggctactttatattcctggtgctttaatagcttcagttattggaatcattgtcgatgtgccagttatatcatttgttgccctatgcaagggtccatacatgctatttaaggggtggcatcgattgtttcatgaccttattggccgtgaaggccctttcctggagaccatatgtgtaccttttgcgggtcttgctatccttttgtggccattggctgttgctggggcaatttttgcatccatgttagcaagtttctttcttggt

SEQ ID NO: 41824 - DNA, 305 bp, Glycine max
gaagagaaaaaacggggcaggcacgcgtacataaactcggaattcggctcaagcatcattttttttccaagactagagagatcacgttttgtttttttttaagaaccagtccgtcacatctttcttgatctctccatctcgggacttcataatatcatctgatggaaagaaaacacttgtctcttagcttgagggcaagacagttgatctttatttctgcgtgaagtcattcttatcatgcattgactttaccctaaagcttgtgtatgtttattagaagctcaaagcccattttgagaactttt

SEQ ID NO: 41825 - DNA, 391 bp, Glycine max
caacacttactccacgtcctccaaaccctcatctcccaatcttgcaaacccaaagccttcatcctagacttcttcaaccactccgctgctgatgtcacacgaaccctaaaaatccccacctactattacttccccaactccgcgagttgcgtcgctctcttcctttacaccccaaccatccactacaacaccaagaaaggcttttccagttacagcgacacgcttcgccgcatccccggtttgccgccactgtcgccggaggacatgcccacctccctcctcgaccgccggagcttcgagtccttcgccaacatgtcgattcaaatgagaaaaacagatggaataatcgttaacacgttcgagaagctggagaataaagctttcttcgcgt

SEQ ID NO: 41826 - DNA, 410 bp, Glycine max
cgagccgtttaattgtggagatatttggttgaaaatgtggggtttgaagtttttaagatgactcttccttacattaaatgtccagcctttttcttcatagcattgggaaattgggctgatgacaccatcaattttgaggcttttccccacaagttggtgcagtttggagagattcaggaaaaagttgtatggaaattttcacaagaggaatttcttacagctgggtcaactcaggtgcgtcctacaacaactctgttggctgatgggtgtccatatttgtatgctatggtgcatgatagttcagtgtctacaataccaggtgattttgtaattggtggtaagttgacaaccataaacaatatgtgtgcatatgggctcaatcctggtatttcaggttctcgtcttttggg

SEQ ID NO: 41827 - DNA, 419 bp, Glycine max
  unsure (1)..(419): unsure at all n locations
agctcgaaattcggttcgggctccaataccaggtgattttgccattggggttaagtggccacccataaacaatatgtgtgcatatgggctcaatcctggtatttcaggttctcgtcttttgggcaccattcctcagtccatttaacagcaaactgtttggaatcaaatggcaacagtgagaacaccattgaattttgattctagcaagcagagcttttgtcaattttcttttgaccttctcggtggggaattttagtggacaaaactggagattggatcacacttatacaaaattctncaattagtaacttgttgagagttgctgctttgaaagaaaggtgtttaatggtcaagattgtgatgtctgggaattgcgcagtcaaaaagagtgattgggcctcattggtacaagtgttttt

SEQ ID NO: 41828 - DNA, 252 bp, Glycine max
cttataactataatacgtcttcgtgcatacctacacaaagatatagataacgaggattctatctagagtgctgaattacgtgatgaaaacgccaaactcgaatccatgtctattggtgtataaactacagatgtgggacatgaaaatgctgaacatgcattccgcttggggcagaaagtgagacataaaaaatctgtctatagagctgtgatctgaagaacgtatacagactgcagtgaatagagcaaatgg

SEQ ID NO: 41829 - DNA, 380 bp, Glycine max
acgcgtacgtaagctcggaattcggctcgtgcctcaatactttgaggttcaggctcagatggaaacaagggtgggtgaattgtctcttgatgatgttgaaactcctaaaggttctatgttggatcttaaaatttctcaatctaaaattgcacttcccaagaacacagttggaggaaccattctgcgtagtgatctattggcaaattttttgacagagggcaattttagagcaagtgttgatttgcagcgcactcatcgtattaaaagaatgattaataaggtggccacagttggtattcctgagaatacaggtatagccattggcctgtgctattaatagatcttctaggtcgcgcgccagttctgatatttactccatt

SEQ ID NO: 41830 - DNA, 413 bp, Glycine max
  unsure (1)..(413): unsure at all n locations
taacgttaatcagccccaagagaaagatttgttagagggaaatttttcctttgatattaaatctcgctctagattggaaaaagtttcctctacaaaagcacaatttgttagtggaaaaaccttcaaatatgatataattggtgctggttcacattcttcaggagattttcctgaaaaggaagatcaagaaaaacccaaaaagattgataccagattgagacaaagaatagatcctcaatacaatgaggttcaggctcagatggaaacaaatttgtttaaattgtctcttgatgatgttgaaactcctaaaggttctatgttggatcttaaaatttctcaatctaaaattgcacttgccaagaacacaagtggaggaaccattctgggtagtgatctattggcanaatttttga

SEQ ID NO: 41831 - DNA, 348 bp, Glycine max
ggctcccaagggtttaatctttttggctgggttatgcttctcagggctggcactgaatcggtgtcttgcggaggataatggacttggtattaacttctacaaggaatcatgccctcaggctgaagacatcatcaaagaacaaggtaagcttttctacaagcgccacaagaacactgctttcttctggctcaaaaacattttccatgactgtgctggtcagagttgggatgctttacttgtgctggactccacaagaaggagcttgtctgagaaggaaacagatagaagctttgggttgagaaaattcaggtacattgagaccatcaaagaagctttggaaagggaatg

SEQ ID NO: 41832 - DNA, 399 bp, Glycine max
cccacgcgtccggaagaaagctgcacgagtggtgtttatcccttctccaggagttggtcatcttgtgcccaccattgagttcgccaagcttctcatcaaccacgatgagcgtctctggatcagtgtgttggtaatggacaccacaagtgctgcttacacagagtcccttgcatcccaacgtctccagttcatcaacctccccgaatcaccctccaaatctgaaccagcaatgacctctctcctcgaacaacaaaaaccacacgtcaaacaagctgtctccaacctcatctctgacgactccgccccagcactcgccgcctttgtcgtggacatgttctgcacaaccatgattgatgtggccaaagacttgaaggttccttcgctggtcttcttcacctc

SEQ ID NO: 41833 - DNA, 333 bp, Glycine max
gtgatttcagtgagtgatcggtgttcacttgatctcatcataatcggcagcgtcaactgaagaagatgccggtcagaaacatcgccgacacaaggcctgaagaggcgactcacccccacacgctgaaagcggatgtggctgagttcatcttaaccttcatgttcctgttcgccggctcatgctccagcatcgtctacaacaagctcaccgacaacggcgctgacacccctgccggcctgatgtccgtcttcatcgcccatgcattcgcgctcttcgtcgccggcttcgtctgcgccaacatttgcggggggcaacttaaccccagggtcacct

SEQ ID NO: 41834 - DNA, 340 bp, Glycine max
gccacgcgtacggataactagactcagtgtgacgaaaacgaaggtacatgtgaccatcgctgctacaataacatgcatgcaaggctaggccatgctatcaagatgttgcctgtgataatgaacactgcctgttgtagcccgttctacataggtgaaacgcgcatgatagaaggttgatgtggaagcacacaacatgtgtggctttatgaccactgctgtagagagcgatttagcatcacaagaatacatgcgtggcgaactatatagatcagacttcaaatctgctaccaacacgcttacgtttatgccacatacctcatagaccatgctactgacacat

SEQ ID NO: 41835 - DNA, 401 bp, Glycine max
gtgattgttgtgactcgttcttcttcgtcgttatcttcttcttttgttgtttgtgtgtttgttttttctctcacctgaaaatgtcttgctgcggtggtaactgtggttgcggaagcgcctgcaagtgcggcaacggctgcggaggctgcaagatgtacccagacttgagctacaccgagtcaaccaccaccgagaccttggtcatgggagaagctacattcaagattaattgctttgcagaagaatctatgtctatgctgatgatggacaatttcgtgatggatatgttgaagatttcaatataattaaagctttttgtaaaaaaaaatatttgtaaaagcctttttgtccgacgagagaagaggggaaataaaaagtgtaagagtaaattatatcaaaaa

SEQ ID NO: 41836 - DNA, 345 bp, Glycine max
tgcatgcgcaataatattaatgcacgcagaggtggctaagctcaatgcgaatgagtggtacttcttcagtttccgggaccgcaaatatgctactgggtttcggaccaaccgggcaactacatcagggtattggaaagctacggggaaggatcgtaaggtggaggatccagccacgcaagaggttgtagggatgaggaaaacactggtgttctacaggaacagagctccaaatggcatcaaaacgggatggatcatgcatgaattccgcttggagaccccacatatgcctccaaaagaagactgggtgttgtgtagagtcttccacaaaagccaagaaaatgacca

SEQ ID NO: 41837 - DNA, 261 bp, Glycine max
gtctttgttacaaccatgaaatgagttctattcttgtcacactgtgatgactactatagagttacatacccctgttcacctggtgctgttttctatggtcttgcagctaatgcgattttcaagaactacaactatggtagctgtggaaaagctttgaagatcgacctactcagccatccataatacatagagctgaatgccacccttgtcttccaggctgctatgtgtagatggatgaaccctatgaaaaagtaagagtcc

SEQ ID NO: 41838 - DNA, 357 bp, Glycine max
cccacgcgtccgcccacgcgttcgtccacgcgtgcgtccacgcgttcgcgtgaatttatgtctaaattgggtgacctgaagcagacacatatttatgcaaagattgaaaatatagagggaatgaaacattttgatgaaatattgagagaagcagatggtatcatcctcgctcgcggaaatttagggatagaactcccacctgagaaggttttcttattccaaaaagctgctatttacaagtgtaacatggctggaaagccagctgttgttacacgtgttgcggactctatgactgataatctaagacctactcatgctgaagcaacagatgttgccaatgcagagttggattgaagt

SEQ ID NO: 41839 - DNA, 389 bp, Glycine max
accatgctcttggtactttctccttataatttactcatccactgcgaggcaatcattaatatggagaactcaagcgaaaaatgcaattttgaagggaacaaagagttgaatgcttcaaccattactgttggaggaatctatgacatgttgttggacagcatcaaccatgaagacaccagatccgttgttcgtcttggtcgtgtagatcccactgataacccattgtttcggactaccactgtggctgttgatgctattacaagagccgttcattcctttaacttcaactgttaccctcccactgttggcttacctgaagctaagagggctgttgcagaccatcttaactctaatctttcacacaagatcatatcaccagagaaacgttt

SEQ ID NO: 41840 - DNA, 392 bp, Glycine max
gctcctgctccatggtagccttccattttctttcctttttttttggtatttctgtatgagatatccttttaccgcaggtcctatcaatttcttgtgcttatccttattcaacaaaaaaacaagagtaatctctaagcattattgcatatcagccaactaatcatttcagaacaaaaagcatgtagcttgcaagtccattctggccaagaagatcatcacaaaatgttctctgcatctattttttcaagtaattaaatttttaacaagtttgtcatgcttctgcaggttttctttgcccagctcatgcttgctgacatgaataaagaacttaaaggattaaggtttctattctaatatacaaccatttcttaaacagtggttctaatgactca

SEQ ID NO: 41841 - DNA, 336 bp, Glycine max
tgcactcgatcaaacacacaatgttaaataatgtcgggattctcgccattgacgtctacttccctgccggttgcggtcaacaagaagcattggatactcatgatggtaccattcaagggaattattccattggacttggtcaacactgcatgtacattctgtaccgaattaaaagatgtcatctcaatgagtctgacagtggttacttatgttcttgagaagaatgggattgatcctaaacaaatcggccgtcttgaagacgtaagcgagaccgttattgacaaaagcaaatccatcaagacattctatattattcgaagatctgcatcaggaatg

SEQ ID NO: 41842 - DNA, 285 bp, Glycine max
aaaaaaaaatatgttattaaaaaattatatttcacaaaattgggtagcttggaaggggggggttgggcataattttcattcacaataaaacctcttgcattggctcatcattgaagccaagaaatttttcaccttttataccgtttctacgctccgaatgtgcagaggcactcgctgatcaatctctggtggttgtatgttaagtattctttggtggccatctgaccctttttaacaagcgctgtttactatgaagcttatatttagcacattcatgcaggagcc

SEQ ID NO: 41843 - DNA, 395 bp, Glycine max
catttaggctctcttaaaacaaatgttttttaaaccactttccccacactcttgggggggtcatttttttttttgctctttccccacaaagaggtcttggacccttcttctgtgtagtgcaatggccatggctaaggttttctgtgttctgcttctggcactccttggcattttcatgatcacaacttaggttattgcaacagattctgcttattacttgtatggaaggaattatggacctggtagtcttaagagctcacagtgcccttctttatgctcaagaagatgtagtcattcacattactctcagccctgcatggtcttttgtcaacaattttttaaattgtgcccttttttttctcctgtctctattggaacaagttttttttttcctt

SEQ ID NO: 41844 - DNA, 245 bp, Glycine max
atccggtgacgtcaaacatacggaagaattgtctttcagggaacacggtggagaaaacggttcgcgctcgtagctcgattgagcaagcctatgtatgtcaaagaaacaaagcagactcatctaaagatggcagccaatttgccgttatggacttggatacatatgacgagattcgtctgggtgaaaaggaaattggagacagtaccaaatggcttaaaagaggcatggactgcgatttgctgaac

SEQ ID NO: 41845 - DNA, 390 bp, Glycine max
gaaaaaccattgtatgcttttgagtttactatcaccatcaccactggtttccaccatgtcagagaagaagaagaagaagaatagcacgagaaggagcgttgttgttgttggggagagcaaaaagccacaacctttggtggaagtggaagacatagaggactcactttccttctccaaagacgagactcacaaactgagagtggctcttttggactggtacgacctcaaccgaagggaccttccttggagaaccacattcaaacaagaagatgaagaagtggaaagaagagcttatggggtgtgggtctcggaggttatgctgcagcaaacaagggttcagactgttattgcctattacaacccgtggatgcaaaaatggcccaccattta

SEQ ID NO: 41846 - DNA, 383 bp, Glycine max
ccgacgcgtgcgtgctgacgcatgctaaaaccctaacgtgccctgtttcatcagtgcgcattgtgcatatcacaaaagctctgattctgaggggaagcatgcggtagtaggaggcgaatactaccagactgtatccagatgacaagctactcaagggagagtgaaaacatgggctgatcagaaccactacatcatgaagagtgtcaaaagcccagtgagagaacgagacattcttactctacataccaccgcaagggaatcaagatcgggactctcaacgggactgaccacaaaaaactgatatggtgaaactggtgcaattagtaacactggcacagcataccctgttgtatacactgagcaaatgagggttgtggacatgg

SEQ ID NO: 41847 - DNA, 263 bp, Glycine max
ctcataacacaaagcacaaagcaaagctcatcttgagttaaaaaaggcagcagctcttcatggctcttcatccccatctggctggcaaggccggaagctggcccatcagcccagaaggggaaggggagcatgagaagaccgcaccaacagctctcagagcccaggtcggccaaccgagtaagtactggcccatcttgcgagccccgcctaccaaccggagtccaggcactacgctggcactgtgggcttcccaaccaaaacct

SEQ ID NO: 41848 - DNA, 382 bp, Glycine max
cccacgcgtccgcctacttctacttcccccctttgctctcaaaccttatcacctaatccttatcctcccaaaccagaaaaccatgtctacctccgcagcttccctcgcactcccaaccctcactctccgaacccgaccttaagctctttgtcgggaatcttccgttcaacgtcgacagcgcgcagctcgcggagctctttgagagtgccgggaatgtggaggtggttgaggtgatttatgataagactactgggaggagcagggggtttgggtttgtcaccatgtcttcggttgaggaagctgaagcggctgctcagcagttcaatggctatgaacttgatggaagagcattgagagtgaattctgggccacctcctgctcg

SEQ ID NO: 41849 - DNA, 205 bp, Glycine max
ctattaacgaaaagaacatctattgtttgactagattggatcacaacatggcattacgccaaatctctgaaagactgacgcgccatgaatctgatgtaaagaatgtcattatctagggcaatcactcaataaccaagaatactgatgttaatgatgcaactgttgcaacctcagctggggagaagcccgtccgagagctcatagc

SEQ ID NO: 41850 - DNA, 377 bp, Glycine max
accacgcgtccgctcaccaatcgcatttgcatgaaaaagtacctgtgtaacatggagcatcagcacattcactgacacacatccacccattaaggctgacgcactctgaacggaaatagagaaagatgctgacaatatcaagagactactccaggaatgggacttggtcattcgcgctgaaggcccagcttgttgagagcctttcctatcgaggggcatcgcacttgtcgccgaactcactgatcggattgtgccatccgctatttacacaatgctatgcgcgttttacggatcaacggttcacggacacacatagttggacccctactgcgggttcatgaatcctgtgccaacatacgcgatcacttccttgaacc

SEQ ID NO: 41851 - DNA, 338 bp, Glycine max
aggtgtagcaatgatgataagtaatgactaaaattaagtttgaacagctgataaggggggggctacaataaaagggagcaaggcaatgccatgcatacagatatgttgggtctccggttgaacactggctatggtgcccgcactccggtggcgaaatgcgccggttgttggcttgccctggatgcactccacagtgtttggctttgagaccattcctgccgggtgcgccttagcggcaccggagttcatccctgtggaacaatttggctcagactccactggggttaacccactagcttacttttatgccagagacctctaagtccatcccaaggaca

SEQ ID NO: 41852 - DNA, 403 bp, Glycine max
tccggttggacccacccttccgcccacccgtccgttaagacctcccttttgagaccctaggacacacaccacaccacaaacacacagagttggaggagaaatcatcatggcatcagcagcatctgggtttgtgttgtcacttaatgttgcagctgccaccacaaactcaagggtggtcatgttcaacacatagaacaacgcttctaggcttgttgtaagggcttcagatgagcctgcagcggcggcacccgccaccgccacacccccagcttaagctgaagctaaaccaaagccaccacctattggccccaagagaggtgctaaggtgaagattcttaggaaggaatcttactggtacaaaggcactggttcagtggttgctgttgatcaggaccccaacact

SEQ ID NO: 41853 - DNA, 383 bp, Glycine max
tcgttctatttatccttattcatgtgcgtctgtcggtctccattcttgaataaacaaaaaccagatagaggaagaggagaagagaaccttgatgggagaaatcaaggaggagtgcgcgagccctgacaagaggaaggtggcactgtactcgagcggggagagcaaggcaaccgctagtgcgtgcgaaacggcgtcatcgcttggaagcatcagccccgaagtgtcgcatctcaggtgggggatgtggtacaagctccgagaactcgaagtcgccactaatgggttgtgcgaagagaacgtcaacggcgaaagtggctacggaagtgtgtaccgtggcttgtttcccgatggcaccaaggttgctggagacctggatctgattt

SEQ ID NO: 41854 - DNA, 386 bp, Glycine max
ggaacgcattcgatcgctacaaatatgtattatttaaaaaaataagacatgtttatggatatttgccttggacgtaacaaaaatagaatatttttccatacacgcacaaatagttgaaggcaactatcctaagaaaaaatgtattatgggaggaacaaaaaaaccagacttgaacgatccagcatcaatagctaaattggctaaggtaatgggtcatactatttattgtaaaactgcattgccacaactatctgatatatattaaacaagctaccattgtaggatctattgccttgaactgaagcttaactggactagaaccatacatgattggagaacccattgatacatctgctactccactggaaagattaccctgatggtct

SEQ ID NO: 41855 - DNA, 269 bp, Glycine max
cccacgcgtccgattaaatctaacgaatttatttcgattgattgtatccatatggggtaaggacctttgtgtcagttatgtctgcaatgggtgaggagcagatttgtgcactgaaggatattgggccaaagaactagcctcaattgctggtagtttgctgttttcatttatgcaaaagttatatatttttgtatgatcttgttaaaccccggagttatggagactctaagtcagactagttttatcaactgtgtttatggatgtgacag

SEQ ID NO: 41856 - DNA, 389 bp, Glycine max
cccacgcgtccgcaagtagttgagaactaagaagaaggaaatggcttcctcaatgatctcctccccagctgttaccaccgtcaaccgtgccggtgccggcatggttgctccattcaccggcctcaaatccatggctggcttccccacgaggaagaccaacaatgacattacctccattgctagcaacggtggaagagtacaatgcatgcaggtgtggccaccaattggcaagaagaagttcgagactctttcctacttgccagacctcgatgatgcccaattggcaaaggaagtcgaataccttctaaggaaaggatggattccttgcttggaattcgagttggagcacggtttcgtgtaccgtgagcacaacaggtcacctggatact

SEQ ID NO: 41857 - DNA, 277 bp, Glycine max
cccactcgtccgcaaagagtttttatttaataacaaggaaatggctcccgggatggtctccttcccaggtgggaccaccttcaaccacacccgctccgtcatggaagctccattcaccccccttaaatccacagctggcttccccactagtaataccaacaattacattacctccatcgttagtaactgtacgacgagaacaacccatgcatttgtgacctccaattgtcattaacaaatccgagactagttcctacttgccagacctctattatgc

SEQ ID NO: 41858 - DNA, 274 bp, Glycine max
gtgtgacttgctcagacgctcaagcgttctgttggatggatatccccaagtgcattgttgctcgtccattcagaaaacatgacaggcattctctatgagactggcgaacattccggccatgcggttgtcattaagtatgcaccttacggtggagacagcaggatgggcatggatgagtactctgctgagatattcatgcgcggtaagcacacacttgtgctgctcaacagtctccaggatacactgggggctgctcctattatctaagactagg

SEQ ID NO: 41859 - DNA, 396 bp, Glycine max
ggaaaacgtgaaacgctacgcccgcaactacgcctatttgttcattgttttcttcgcctgcactctgtataagatgccggttgctcttgtcgggttggtattgtgtttggcattgtgggatttcttcaagttttgtagccacagatggggattggagcagtatcccttgacgcgccagattttgattcgtgttgtgcaatgtgcaactgcggttattctaatcttttccaatgttcaaatggctctcttttgtgccatatgcgtcagctatgtaggaatgatacttcatgctggatttcgaaagttgacccctgtaaagcaaccttcagtgagcagaggtaggtagttgactaatcaatgaaactgtggtgaacgctttgttcagcacatcttact

SEQ ID NO: 41860 - DNA, 393 bp, Glycine max
cgattttgttgattccatcaaacagaatatgaatgtaaaatacgtttacatgtggcatactttaactggttactggggaggtgtactcccatcatcagatgcattgaaaaaatataatccaaagattttatatccaattcagtcacctggaaccacagggaaccttagagatgtagccatggacatctactttgactccatctacaccacagcttgcaaggtaactgtgggaatcattgtaaaagtcatatagtttttctgggtcaatgattcccactccatatttttccaagggacagcaggctaaaagcccttgctggagtatcaggattttgtcaggtaagcataccgctagggatgtataataacctttccctattaatttctctggtg

SEQ ID NO: 41861 - DNA, 230 bp, Glycine max
gttagtgagagaaagttgtctgtctttgttttttatccctatggcgcgctttgcaatcgaccgcgcttatggccaacagtcacctccctcgaagaatcattaaggaaacgcagcgtttgctcagtgagccagcgcctggaattagtgcgtcccctttcgaggacagtatgcggcattacaatgcgatgatccttggaccgactcagttgtcatatgaagggggagttttt

SEQ ID NO: 41862 - DNA, 155 bp, Glycine max
gtacgcccagcgtgtctgtaccggcgcttttgtttacttggccgcagttctcgagtagctagctttttatgtgcttgaggtggctgggaatgctgtacgtgacaacaagaagaacaggattattctcagacatgtgctatcggctgtgaggaacc

SEQ ID NO: 41863 - DNA, 364 bp, Glycine max
gagaagagaagagaagaggccggggaggtgacttgaaggtcaaccatcgaccactctgtttctgtaattcttcccacaaacatgtcacgcgccgccgcgtcgttcggaatcctcctttgtctgctgctcctcgtcgccgccgtcaactgctccgatcagggaaactgcagcaccacatgcattgtggagcaatgcgacacgatcggaatcaaatactgcaagtattgcggggtagggtattggggttgctcctttgttcacgccattgatactcgcaagggccctatttagaacctttacaaccatgctgctgatcctgttgcaacaatgcttgggcttttgccacttactttgtccctggaca

SEQ ID NO: 41864 - DNA, 290 bp, Glycine max
  unsure (1)..(290): unsure at all n locations
gaaaancggcccgacccacgcgtncgaccacgcgtncggctataagctagattatcgtgtaggagaatatgaagtagtttgttttctttgctgctgcagtagtttgggtagcatggccatgccatggcgcatgctaccaaaggttccctctccgaatgaaaactggctatggtgagcgttcttccgaggtaaaatgcgcaagttttacgcttgctgtggaagcacacaacatccgagcctttaaaaccattcctgaagagtgcgttgaaccaacaaaggactacatttat

SEQ ID NO: 41865 - DNA, 402 bp, Glycine max
  unsure (1)..(402): unsure at all n locations
accacgcgtccgcccacgcgtncgccacgcgtccgctaatgagctctacaaatacccatcacctccacccccaggttacaagtacaagtcccctcgggcatactactaccactctccaccacctcctaagcactctcctccacctccctactactaccactctcttccacctcctaagcattcacctcctcctccatactactaccactctccaccaccaccatataagtacccatctccaccacccccagtttacaaatacaagtctcctcctcctcctgttcattcaccacctcccccagtttacatctatgcatcccctcctcctccatatcactactaggtagcggttttgcgtagcttcgcacggtttaagcttcttcataaaacctacattttcat

SEQ ID NO: 41866 - DNA, 245 bp, Glycine max
acgcgctaacactcattaattgcaagaatggcacttttttgcttggagatgtccctttctgttctcttcactcttggtcttgcgagagaaagccatgccatatacgaagatttttggcatgctgtttggccaaacactcccattccaagctcattgtgagatcttctaaagtctgcccctgcacgtgatgaaatagatgatcaccctatgcaaattgaagaaacacagtccccgagaaccttttt

SEQ ID NO: 41867 - DNA, 411 bp, Glycine max
cccacgcgtccgataaaagaattgccattttcatttcaaaatcttattggactccgtgagataaccctgaggaggtgtagaattgttcggttacgatgtagcttagccatgatgcccaatctgtttcgattccaaattagaaattgcaacagctggcaatgggtagaatcggaagcaggtgaagaaaaagtggaggttagatatccaaatgtgttagagtatgaaaaagaaaagaaagaagaaggtgtgttagagttagagagctcactcatcaaaggaagtggaatccatatattcagagaagaaggcagtatggaggaagatattcgatttgatgatccatatctcagcagctctgcatcagaaagcccctccttgctacaaaccatagctttggggacacgcaagttt

SEQ ID NO: 41868 - DNA, 408 bp, Glycine max
cccacgcgtccggcttcggctctccatgcagctgttaattttgggcaatacccttatggaggttatatcgtgaaccgtccaactctagccagaaggtttatcccagaagaaggaaccaaagaatatgatgagatggtgaaggatcctcaaaaggcatatctgagaacaatcacacccaagttcgagacccttattgacatttcagtgatagagatattgtcaaggcatgcttctgatgaggtctaccttggccaaagggataatccaaattggactacggattcaaaggcattggaagctttcaaaaagtttggaaacaaactggcagaaattgagggaaaaatcacacagaggaacaatgatccaagtctgaaaagccgacatgggccagttcagcttccatacaca

SEQ ID NO: 41869 - DNA, 414 bp, Glycine max
tcgcccacgcgtccgaggcaaaagtcagtaacttctatgtctcagtatataaacaaaaaggaactaagagtttgtgttggaacatggaatgttggaggaaagcttccacctgatgacctagatattgatgattggttaggcattaacgagctagctgatatctatgttcttaggtgatgccttggctgtattgaagaatagtatgagtgaccctaacaatgttcttcaaagttggaattgtacccttgtcactccttgcacatggtttcatgttaattgcaacagtgaaaatagcgtgacccgtgttgatcttggaaatgcaaacctttcgggtcatcttgttccacagcttggtcagctcctaattttggaatgcttatgaataggtggatgactatgaagaacctcatgcta

SEQ ID NO: 41870 - DNA, 415 bp, Glycine max
aaaaaaaaaaaaaaaaaaaaaaatttaatttaaaaaaaaaaaaaaaaaaaaaaaaaaaagggaaaaaaaaaaaaaaaaaaaaaaaaaaaaaaaaaaaaaaaaaaaaaaaaaaaaaaaaaaaaaaaaaaagggggggccgttttaaaggaccaaaatttacgaacccgggcttgcaacataaaagtttttttattgggcaaccaaaattaaattaacgggccgtggtttaaaaacttctgaacgggaaaaacccgggggttaccaaattaaatggcctggaaaaaaatccccttttccccaagtgggttaaaagcaaaaaggcccagacaaatcgcccttccaaaaatttgccaaccttaaatggaaaatgggacccccccttaaacggcccattaaaagcgggggggttgggggt

SEQ ID NO: 41871 - DNA, 426 bp, Glycine max
cccacgcgtccgggcaacagaaacaaaagtggcagtattaggtggcatcaccgaagtgcagggagctgccaacagcgtcgagatcaacaatctcgctcgctttgctgtagaggaacaaaacaaaagagagaattcagttctggagtttgtgagggtgattagtgcacagcagcaagtggtttatggagtgtatgactacataacattggaagcaaatgatggtgagaaataaagtgtggattaagcagtggtatgaagaatttaatgccaagtgttgtgtgactagtgccgatattctgtttatgtttgtgagaatttgattgtagggaatgtttttaaaagctgaatttttttcattgatttttctttgacacatttagggtgtagagtttgtttttttacgttttttttttatactgatttttt

SEQ ID NO: 41872 - DNA, 267 bp, Glycine max
cccacgcgtccggccatgtgtcgcacatgggaagttctagcccgtaagaaaaatgaccttggagaactgccacttccaatggctatttatgttgtttctggagatgaagatggggagcgtggtggagcaccagttgcctgcattgaagatgccttcaaacgctggtctgcgttgtcaagtgggttaggtggttgtacacctttacttatattggttccgctggttttttgtagtggttgaatgtcaatcgcgcggttttatttctat

SEQ ID NO: 41873 - DNA, 248 bp, Glycine max
cccacgcgtccgcccacgcgtccgcccacgcgttcgtccacgcgttcgtccacgcgttcgcccacgcgttcgtccacgcgttcgtccacgcgtgcggaaacacgaaactcagaatccatggcgacaccagcgacgacgaagcgaaaaccggtgttcgtgaaggtggatcagttaaaacctggcaccaacggccacacactgacggtgaaggtggtcagtttcaagccggtgaagacggtgagcacccg

SEQ ID NO: 41874 - DNA, 261 bp, Glycine max
cccacgcgtccgcccacgcgtccgcccacgcgtccttccacgcgtccgacccagccgcagcagcaagtgatcgaagcgaaaagagagtaatcagcagagaaattcatcgtcgtagttatgggtaaagttcacggatcacttgcacgtgccggtatggttagaggtctaaccccaaaagtgtcctagctggatttgatgaataagccacgtggccgcgctcacatgatgatgcatttttatcgccgattttttttcgtcgtt

SEQ ID NO: 41875 - DNA, 465 bp, Glycine max
gtcgacctcttccattaacgggtggtgcctctcttccatctccccagccaaaacctctctcaagatggccacattaggcccttctgtcttcgcaaccgttagcactccttcttctccttcttcttcttcttcttcttccttcccttctctcattcaagacaggcctgtctttgctgcccctgcccccatcatcaccccaactgtgagagaggatatggcaaaggaattctagcaagctattgaagaactccagaaattgctgagggagaagagtgaactcattgccacagctgcttgtatagtggagcttatttcaccttattttttaacatcatcattttatggcatctcttttttgaagccttattctggttccaagctgttttatctactctatttttgtcacatatgttttgtttcctgcttattttgtttctcttgcttttttccatgacaatttttttt

SEQ ID NO: 41876 - DNA, 354 bp, Glycine max
cggacgcgtgggcgacactactgattcaaaagggtcatagggtactggggggggtagggattcgaattttgattatcgaatcgcaaaattctgaatcaatcaatcagtaattagagccattaacgactgcaatggtctgcgagaactgtgagaagaaattatcgaaggtgatagtaccagacaaatggaaagaaggggccagcattactaccgagggtggtggccgcaagatcaactagaacaagcttttctttcagaaaaacagattgacctcttactgaaacactgagtgcaccattttcatactacattttcaccactattcttagatctttcacacctatgctttctcta

SEQ ID NO: 41877 - DNA, 380 bp, Glycine max
ctcttctctctccacccaaaccctaactcctgaccctgttcccctctcgtatccgtcgggaaaggaggaaagtccaagaccgaatctaagagagccgatcccaaacttgctgtgaataagaagggagccgccaccaaggctaggaaacccgccggcaaggggaaggcagcgaaagaccctaacaagccaaagaggcctccaagtgctttcttcgttttcatggaggagttcaggaaggtattcaacaaagaacatcctgaaaacaaagcagtgtctgctgtgggcaaagctgctggagcaaaatggaagaccatgtctgatgctgaaaaagcaccttatgtggcaaagtctgagaaaaggaaagtggagtacgagaagaa

SEQ ID NO: 41878 - DNA, 336 bp, Glycine max
cctacgcatacgtttattctttgttttattaaactggacataaaaatcggtggggattctatcaaaggacttcaaaaacactctgaccaaaattaaataagtcttgcaggattaactaaaaagagccagcattaattcaacatatattataagttacaaaccataccgaaacaatgatggaatcaatctctcacaccctcaaaccttacgataaaaggaaattttcaacagcaatgtttttaactatatgttcaacaccaactccatcctctataaacctggtgaacatccaaaccatgaagttcacattaattttgcaccttactctttttacag

SEQ ID NO: 41879 - DNA, 269 bp, Glycine max
cccacgcgtccgcatcctgtatttttggtttctgttttcggacttcaagggaaattaatggatgagaactaatgaataaaaaaaaaaaaaaaaaaaaaaaaaaaaaaaaaaaaaaaaaaaaaaaaaaaaaaaaaaaaaaaatataaaaaatataaaataaaaaaaaaaaagaatacaaagaaaaaaactctaatatagagtaaaataaattcaatttatagggcgggtgtttaaaacatcataactgggaaaactttaaaattcccaaa

SEQ ID NO: 41880 - DNA, 378 bp, Glycine max
  unsure (1)..(378): unsure at all n locations
ncaacccgtccggcccaattggacaagcatttctctttactatatgttcttcggaaggaccacattgcagatgatgttgattacaaggtccttgttttctgcacaactgctatggtcactagacttgttgctgaacttcttggtgagttgaacttgaatgtgagagaaatccattcaagaaagcctcagagttacagaaccagagtctctgaggaatttcggaagtcaaagggtctcatcctggttacttcagatgtatctgcacgtggagttgattatccagatgtcactcttgttatacaggttggtttgccagcagatagagaacagtatatacatagactcggtagaacagggcgaagagggaaagaagggcag

SEQ ID NO: 41881 - DNA, 220 bp, Glycine max
  unsure (1)..(220): unsure at all n locations
cctaaacacctttttggggcggcttaccaagggacacgcnaccaataccgtttttttcaccttcaacaaggttaacccagtgcaaccaaacattatgctccaaaaagatgcttgtatttcatcctgtggggagttacaacttaccaaaggtggcagcaactgtgtgcccacctcgggaactatcggtcgagccctttacgcttgcccaagacaaatttgg

SEQ ID NO: 41882 - DNA, 280 bp, Glycine max
gtagataactagaaacagtgtgatgtaaatggaaggtccttgttttcttcgttgcgtcaattttggtagcatggcaatgccatgcgtacgatatgttccctctccgaatgaacactggctatggtgccccgactcccggagggaaaatgcccaagttgaaggttggctgtggaagaccacacaatttttggctttgaaaccattcctgaaaagggcgttgaaccaccaaaggattacatccatggcgaccattttaaatcagattccaaaacagttaacc

SEQ ID NO: 41883 - DNA, 380 bp, Glycine max
caaaaggccatataatttttttttatttgaaataatgtccgggatcatccacaggattgaggagaccctccatgtgggagggcacaagaaagaggagcacaaaggagaacaccatggtgagcacaaaggtgaacacaaaggagaacaccatggtgagcacaaaggtgaacacaaaggagaacaacaccatggggagcacaaggagggacttgtggataagatcaaggacaagatccatggtgatggccatgacaagggtgagaaaaagaagaagaaggacaagaagaagaaggagcatggacatgaccatcatggtcatagcagcagcagtgacagtgattagatcttatatgttaagcaggtgtacggtacgatggtag

SEQ ID NO: 41884 - DNA, 376 bp, Glycine max
ctctttctggctattctgtgtttagcaatgttgacatttttccacaagtaagtctgaacttcgctggtggtgcatctctggttttaagaccacaggattaccttatgcagcagaattatattggcgagggatcagtgtggtgtattggctttcagagaattccggggcaaagtataactattctaggagacctcgtattaaaagacaaaatttttgtctacgatcttgctggtcaacgcattggatgggctaactatgattgttcattgccggttaatgtatctgcatcagctggtaggggcagaagtgagtttgtggacgcgggagagctaagtggcagctcttctttacgtgctgggcttcacatgttgataaa

SEQ ID NO: 41885 - DNA, 217 bp, Glycine max
cccacgcgtccgaggtggaattggaaaaggtggtggcattggaggaggaataggtaaaggtgcaggttttcaacggtggtgccggaggcttttcccaaccaaaaaaaaagtcgtgccttccacagaatccaaccttacgccccccaccctacgaccctataacttttctatagcgtcacctaacaataattcactgtccgtcaggacacaactgcag

SEQ ID NO: 41886 - DNA, 347 bp, Glycine max
cccacgcgtccgcaaggatatctgactctctgttgattgcttggactatgcgtgattcttagcattctcccaagcttgcagtggctttgctttggaaaagcaaaaaaaaaaaaaaaatattggatggaggaagcatgtgaatttcgaagttgggctgaattgattcctgatgcgctcggggtaatcttcaccaatctttctcttcaggagagggtaacagtgatccccagggtgtgcaaatcatgggctaatgcagtaactggaccttactgctggcaagagatagacatcaaggattggagcaaccgatgccagcccgaccaactcgatcggctacttgagatgct

SEQ ID NO: 41887 - DNA, 346 bp, Glycine max
gacggatgctcgacaagttggtgtgtggttcactgacaccactcccgggcgtgggactgctccggcacctgcggctccccctggagcgagcaactatcctcctacatccgctcgagcccgctcgcgcgccgacttgacttcgccgaagcagacccgatgctcgaggggaatgtcgcaacgcgcgtcgcagcaataagaggaggaaagggcgcaaggggggaggtgacgatcgcaaacaagagcgacggggagctgaccgcagcggacctcaaagggaagaaggtcttaggaaggaacgacctaaacgtaccgatcgacgacaaccagaacatgaccgacgacacca

SEQ ID NO: 41888 - DNA, 347 bp, Glycine max
atcgatacatagaacacactcgcttttatctcatacggcaatggcgctcacgttgggcactggtctaattgcggtgctcccttcgcgctggatgtatcttttaccttacacgtctagcattgacacactctttttaactgcacgggagcgctttggactgaaactttatgggggaatggtaattaaaggcattaaggtgagggctcagctatgagttggcactgatggcactgtagctaactctggtgaacaggcccaacgccttgctattaaagaaagccagaggccagaataccccttgtatggcatagttggacaagaggagatgaagctttgcactgtcctta

SEQ ID NO: 41889 - DNA, 350 bp, Glycine max
aattaatgaacatatttggaattgtttaccgatacaagaagatgaaagaaatgagtgcggcagaaagggaagcaaattttgttcctagagtttgtatatttgggggaaaagcatttgctacatatgtgcaagccaagagaattgtgaaatttattacagatgttggggctacagtaaatcatgaccctgaaataggagatctacttaaggttgtttttgtccctgattataatgtcagtgttgccgagatgcttattccagcaagtgaattgtcacaacatatcagtactgctggaatggaggcaagtggaactagcaatatgaaatttgcaatgaatggctgcatattg

SEQ ID NO: 41890 - DNA, 355 bp, Glycine max
cccacgcgtccgcccacgcgtccgttttcacaccaccaacacaagatgtttctggacattgtgttcctccttttccttctctcatccacttcccatgccactgtccaagacttctgtgtggcagacctcaaaggtgcagacacccctgcaggctacccctgcaagccacctgctaatgtcacttcagatgactttgtgtacactggcttagctgaagctgcaaatgtcacaaacataatcaatgctgctgtgaccccagcttttgttgctcaattcccaggtctcaatggccttgaactatctgcagcaaggttggaccttggtcctagtggtgttatcccactccacactcatt

SEQ ID NO: 41891 - DNA, 293 bp, Glycine max
cccacgcgtccgcccacgcgttcgtccacgcgtccgcccacgcgtccggcacagaccatcatcgatggccacaagcatctcagtatctttcaccgaagaggtctcaatctcgagagtttcttcaactatctttttagtcaccataataacccacctctctcgccctctattggggggcaccaagatatgtcttcacctttgtctcattacttcatttatactggtcataattcctatctaactgggaaccagcttagcagtgactgcagtgacatccccatcatcaattcact

SEQ ID NO: 41892 - DNA, 338 bp, Glycine max
tcgcccacgcgttcgcccacgcgttcgttcacgcgttcgcccacgcgttcgcggacgcgtggggtatgttgtgagctataagctagtttatcgtgaggagaatatgaagatgtttgttttctttgttgctgcagtagttttggtagcatggccatgccatggcgcaagttaccaaaggttttatctacgaatgaaaactggctatggagagcgttttttggagggtaaatgcgcaagttttaggcttgttttggaagcacacaatatagctgtctttaaaacaattcctgaagagttgcattgtactaacaaatgacttcatttatggcgaacaattt

SEQ ID NO: 41893 - DNA, 354 bp, Glycine max
gtcttttggtggtatctcaacaagaactttttaaaccaaattttcgttttctaaaaaggggggcctgtaaattttatcaacacaattttatttaagtggggagggtgtctatatcttacaaatagagtcttggacctgctccatactccaagtgcaacggccagggcgacccgtgggtaggtgctgcttatggcattgcttggcatatccatgagcacaactcaagctatggcgacagattctgcctatcacttggatggaaagagttatggaccttggagtctaaagacctcacagtgcccttctgaatgcacaagaagatgtagccagacacagtaccacaagccgtgcatg

SEQ ID NO: 41894 - DNA, 359 bp, Glycine max
aaactaccactggcccatacaaatgaatgactatagaatataaacaaaacacaatacaagaaatccgaggaaagttggaagtgaagaatggctacaatgtgaagatggtgatgcaattgacctctgagagttgtatttggattttctagttgaatcattggcagggtaattaccaagccctgcagcaacagcaggaggcacatctgcgtgtgagcgtggtcttgttgggatggcatcattatgatcctcaatgtcgtaacaatcaaatttcttccatcccaatacaagcttttctcggtcaaatacgacacggtaaccagtcatgaagttttgtccaattatgtttagttcagcacttt

SEQ ID NO: 41895 - DNA, 427 bp, Glycine max
gcaatacccattgctcctggccttgacctctctgcatctgcaacacctttctggcctagacaacaacccttcaggtgccaaaaatgaaaataaagatgtgaatcatcatgcttcaagaagctctgtggggctcaagataattattattttccttggtgtggtgacagtcatagcattctgtgtttttcttttcaaattatggcaaaggaagaagagagaagagcagcatgctcgccttttgaagctgtttgaagatgatgatgaacttgaggtagaacttggtatgcgggattgacaatttatctcattccttctttatagaaaaaatgcacatcattttcatgtcaacaaggctatgttcttttaccatttaaatctagcatgggttagtttgaagagttgaactcaggcatttgcttgtcacccg

SEQ ID NO: 41896 - DNA, 424 bp, Glycine max
cccacgcgtccgctttttttccaactggctagtaaaatttcatccattcaggaggtgttaatcagccaattatgtgtggtggtgagccaagggctatgcttagaaaatatcgaggcaaagctgatgccccaatatattccattcagatatgcattcctaagcatgctttgaacttgatcttttcatttacaaatggagtagactgggatggtccatatagactacaatttcaagttcccaaggcattacagaacaagccaattgacttctttaataagggcttggcggaggaactgagtaaagaaggagcatgcgagcaagcaatatttccagacacaaataaagttataaccaaatgtgctatgattggtaatttgtcaaaagaagggggtgatcgctgcgatctgaattttgttgtaggatg

SEQ ID NO: 41897 - DNA, 349 bp, Glycine max
cccacgcgttcgaccacgcgtacgtttttgtgtttacaacgatcaattgagggagcgtgtgcgcgccaggggagtccatgcaagcgcataaagataaatcgtactgaaggatatttaaccagcttgctaactattatgccaaatacatgatcaaacatatcgtggacacagctgtgttcaggatagagggtaccccactctctaatattacatactacagaaaaacatggatatggggtggggaaattaactgcgccttggatgatgaatggttaacaagggcattgtacacgggcatgtccgcgctatataaagtacaacatgctggtgggattagggttcatgattc

SEQ ID NO: 41898 - DNA, 419 bp, Glycine max
gtagttggatgctgaacactctcatcacacatgggttcaattaccaacactggcggggtgaaaccccgcatacatgataacccaaagcatgttctctattcccaccgctcttctctacacttgctgacacaaagttaaaacaccgtgaccagcgaattttccaggggtgggttctaaagccacggcggcttcccgggccaagaagaccgaatagccgggcgagagagtccagcgagtccacagcgtggaggagttcgagtccgcgctcgaatccgccaaagacaggcttgtggtggtggaatacgctgccagcgacagcgaggagagcagccagatataccctttcatggtggagctgagccgcagctgcaacgacgtggagttcatcctggtgatgggcgacgagtcggagaagacga

SEQ ID NO: 41899 - DNA, 425 bp, Glycine max
cccacgcgtccgcccacgcgtccgcccacgcgtccgattttgtcgaattgggaggggatgcttataaagacattgatcggatgagggcttttgaaatagcacttaagacgtggggtgcatgggtagacgccaacgtcgaccctacgagagtgaaagtcttctttcaaggaatttccccatctcactacaatggcagcctatggaacgaaccaagtgcaacgagctgcatccggcagaagacaccggtgccgggatcaacctatcccggagggttgccaccggccgtggcggtgttaaagagtgtgctgagcacaatcaggaagccagtcactctgcttgacatcacaaccctctcactgctcagaaaagatggccacccttccatttatggtctcaatggagccgccggaatggactgcagccat

SEQ ID NO: 41900 - DNA, 424 bp, Glycine max
  unsure (1)..(424): unsure at all n locations
agaaatttaaaacataatccatctatagaaccaggactagcagccatctgaattgaggatggatacttttcatgggatcgtaaggaagagaaaccgacattatcagatatcaatgtggaaataccagttggcagcttagttgcaatcattggcggtactggagaaggcgagacatcacttatttcagcgatgattggagagttacctactttagccaatggaaatgctacaatcagaggcactgaggcttatgttcctaagatttcatggatgtacaatgccacaggtcgtgaaaacatattatttggatcaaaatctgaatatgaacaatatcggaaggtcattgatatgactgctctacagcatgatctcaacttactactctgacgtgattntacagagatcggagaaagaggagtcaata

SEQ ID NO: 41901 - DNA, 438 bp, Glycine max
cagaatatcagcaaaatcgttattcttgtcttctgattgctagcaccaaatccttgcagggctaccgtatcatttccacacgagcaaaaggattcagaccaaatccttgagaaacaacttgtcaagctcttcaatatctgccatagtaaaatggagaatgctgttccaaggaatgcttcagttaggcttgttgcattcaacttaggttgtcttccaggtggtgacaaagagataataacaagatcagaaacaacattactagcattggaagctgcatagagaattctaatgccaggtgggcttatcagcatagtggtttatgttgggcaccctggaggacggtgataattctaatgctttactttgtgtcattaatatattagtaggtccttgaactatttgagaatttttaataaggtctgtctttaaactaaaaag

SEQ ID NO: 41902 - DNA, 359 bp, Glycine max
acccacataactagatgcagagttctgcatcggaacatgacttgcaaaatatctattgacaggatggtacattgaacattcagctgggctggattatgaaactcaaaccctcactttgcaccactaaacaagattgtgatagctacttcaaacgctctctctttctggtgggggagataggtggatatggttataactatgctgccattgctggaaatgtgactcaacttcaatctactgttcctccagtcgttgaagcaataacaatggccatcaatggattgatagctgaaggagcaagggagctgttggtgccgtggaattttccaattggatgctctgcgctttacctaacttta

SEQ ID NO: 41903 - DNA, 457 bp, Glycine max
  unsure (1)..(457): unsure at all n locations
gtgttatgctccagggaattacactgttggttgttgatgcatactctgtctttataaaatgtgtacccctccaacgaagactcataatgatcgtctttctgggagacatgattttgtcatatctctcattagctgcagcgtgttcaacagccagtgtcacagatctcctgctcgatgccgatcgatcctattgcctgccaaagttgtgtggtagatatcaattatctgctgctatggccttcttgtcttggtttctttcatcagcatcctgtctgtttaacttttggcttttcccttctttgtaaaatctatctttctgctagctgttgatatgtacaccaatgataagggtgcaaatgacgaagtcatttgttcttgtgcagatattttttttttccacgtgaataaaattatcatgacaacantgtaataagtacttttccaatgcaagagaaat

SEQ ID NO: 41904 - DNA, 234 bp, Glycine max
  unsure (1)..(234): unsure at all n locations
agcgacgacaaagcnncacaaaaggggcaccaaaaagcaagncacgggccggcggnnaacaacggcgggacggggaaaacccgggcggnacccaacnaaaacgccgggcagcacaaaccccnngcgccagcgggcgnaaaagcgaaaaggcccgcaccgancgcccnncccaacagnggcgcaaccngaagggcgaacgggacgcgcccngnagcggcgcaaaaagcgcggcgg

SEQ ID NO: 41905 - DNA, 307 bp, Glycine max
  unsure (1)..(307): unsure at all n locations
nccacgcgnccgngagcaaacannnnngccnggaagggacgccanngaaanggcagcagcgggggacaagaaangggnnnncacggaccaagcannaccagcngancnngncaagagaggannggcagnngaggancccncngccccacaagggcnncgccnngnganagaggacnacccnnangcngnnganggacnngaaanangggangcnannaagacangggnccangagnangncncngngganaacccaacaaangcagcaanncaacaagacacngaacnncaagcanggnggaaggaa

SEQ ID NO: 41906 - DNA, 362 bp, Glycine max
  unsure (1)..(362): unsure at all n locations
accgcgagcgagaagcaaanggcnnncncaangancncnnccccagcngnnaccacgggcaaccgngccggngccggcacgggggcnccanncacnggccncaagnccanggcnggcnnccccaccagaaagaccaacaangacannaccnccanngcnagcaacggnggaagagngcaangcangcaggngnggccaccagnnggcaagaagaagnnggagacncnnnccnaccngccagaccnngangangcacaannggcaaaggaaggagaanaccnncnnaggaagggacggannccncgcngggaanncgagncggagcacggnnncggggaccgngagcacaacaggncaccagg

SEQ ID NO: 41907 - DNA, 326 bp, Glycine max
  unsure (1)..(326): unsure at all n locations
cccacgcgnccgcccacgcgnccggcnnaancgggcgaggcaganncnaaaaaanngagggggggngggcnggagcaancggggcngccaagaagaaanncgaggaagaggaaccgccgcgaagcnnccagagcgggggcccggngancggcgngacgggcancgngggcaacagccncgccgagaaccncccncncgccgacacccccgccggnccaaggaaggncaacggcgncgcacgccgcccccngccgccgnggaacgccgaccaaccngncgagaacaaccagggcgacgncnacgaacccgccgacgccgaagccaaa

SEQ ID NO: 41908 - DNA, 445 bp, Glycine max
  unsure (1)..(445): unsure at all n locations
nccacgcgtccggacgtggatatagaacgagatgatggaaacgatcgctatgaaactgcaactacggaaaatgctaagggagcggcagatgaagggaatggtgcgccacttaggcttcccccacgtctggtacctcgactgaatcattagcaggatgtgggtaacgaccaggatgttgatgcacgtggttgttgaagaggtactacttggacgcgtgggcttagagcactaacgttgcgaccgcaataccttcatgggcatgaacgtcaacagcatgggcaagatgctcaagtgcgcccgggatgacgacatcagaaccatgaaggccgacgacgggagcgacacggtcactttgatgtgcgaaagccctacacaagataagatttctgatgttgagatgatgctgatggacattgacagtgagcaccttgggattcagaggcag

SEQ ID NO: 41909 - DNA, 333 bp, Glycine max
  unsure (1)..(333): unsure at all n locations
gncatctacaactagnaacaaaganccaacaagcagagcaancncncncncngncncccaagcaaaacagacangggnnngaaggaggannnngagcagnangcngagaaagcaaagaccccgccaccgacncaancaaacgaagacccgcnnanccnnnangganngnacaagcaggccaccgnnggaccngncaacanccagccgccgggaaggggcaacangagggacagagcnaaangggangcanggaaggcngnngaagggaaanccaaggacgaagcaangagggannacancacnaaggggaaacagcngcnggaagcagccggc

SEQ ID NO: 41910 - DNA, 447 bp, Glycine max
cccacgcgtccgaagtagttgagaactaaaaaggttaagcaattggcttcctcaatgatctctgccccgggtgttaccactgtcaaccgtgccggtgccggcatggttgctccattcactggcctcaagtccatggctggcttccccaccagaaagaccaacaatgacattacctccattgctagcaacggtggaagagtgcaatgcatgcaggtgtggccaccagttggcaagaagaagtttgagactctttcctacctgccagaccttgatgatgcacaattggcaaaggaagtagaataccttcttaggaagggatggattccttgcttggaattcgagttggagcacggtttcgtgtaccgtgagcacaacaggtcaccaggatactacgatggacgctactggaccatgtggaagctgcctatgtttggttgcactgatgct

SEQ ID NO: 41911 - DNA, 452 bp, Glycine max
gccaaaagggagctcgcaaaaattcgtggtacaactgaagttgatgcaaaattcagggacagggttgctgatagtgaagcctcacagaatgtgaaacacccttggagaaccttgatggatagaaagtataggccacagcttgtttttgccatttgcattcccttcttccaacagctcactggcttgaatgtgatcacattctatgctcctattttgttcagaacaattggttctggaagcggcgcatctgtcatgtctgcagtgatcattggcagctttaaacctgtttcaaccctgagttcaattcttcttgtcgataaatttggaagacgcacccttttcctggagggtggtgctcaaatgttgatttgccagatcatcatgacaattgctattgcggttacatttggcacaaatgggaacccaggtacactgcctaagtggaatgcaat

SEQ ID NO: 41912 - DNA, 402 bp, Glycine max
  unsure (1)..(402): unsure at all n locations
cggtcgaccacgcgtccgccacgcgtncggactgacacagaccctctatgagatagtgacctgaaggaaattatccaacgagaggggccagatgctctacctgaaagcaataagaccaccttaaagacggctacacgtttgagagaggatgatgttgctcatacagcctttacaccatacgtggaattgtgcccccattacaagtctgcttggatgatgcgcatcattctccagttatacaagctggcgaatgatgcgagagcgaggagagctaggctagatgggctggagatgtcttacaccgtgatcaagcatcggatgggagagcagtcctaccgactagcgtctcagtaacttgaggatccagcaaacaggcaagctgctttggttgctatattccag

SEQ ID NO: 41913 - DNA, 488 bp, Glycine max
gtcattggttacaagattcagttcgacacaaaatcttgtggagttgactgcggcggggtcggaatccttggcatcgcgtgggcttttggtggcatgatcttcatccttgtctactgcaccgccggtatctcaggtggtcacataaaccctgcggtgacgtttggcttgttcttagcccggaaggtatcgctgattagggcggtgctttacatggtggctcagtgtttgggtgctatttgtggagatgggttctgtgaaggcattttaaagctctcactatgttaattacagtggaggagccaactttttagctgacgggtacaatacaagcaccggactcgcggtagagatcatctgaacattcgtgcttgtctacacagtctatgtcgcttctgaacccaaacacaacggttgagacttccacgttcccgatttggcgccactttcccatggtgttgcggtgtttatggttcaatttggcccttttt

SEQ ID NO: 41914 - DNA, 269 bp, Glycine max
aaggaaactaaaataagacgatcaaggcaatgatctgtcattatctcatgcttctccgacttgtctccagagggacaagtcttgagcttgcacactcgtcttagtatgccacaagccaatcaagaatgtatccgaacccgatgaactcacggtcgccaagtataccatttatgaacataacacgtacccgaacaagaaaccattcttcgctaaggttgctgagagaacgacacatgtgatattccttacagaggacgatctcaaaatta

SEQ ID NO: 41915 - DNA, 302 bp, Glycine max
tttactatcactctctaaagggggccagacgtctcttaatctaagtaatgacacccattaatgctttaacaataattccactgtccttttctactattcatctaaaccacatccaattaatcagactttcctaaattaacgatgaaagaaaaccctgttgatcttgactcttactcgactttttgaaatgacttgataggtgtaatataagtctgagctttaaacatctaaagtgaaataccactacttttaactttattatacttattccatgaatcttaagctaggcacttccccttttt

SEQ ID NO: 41916 - DNA, 464 bp, Glycine max
cgtcttatgcggattctgagggagaagatctacaccatgctgatcaaccgatacagaggcctgacgaatcttctaccggttcaaacgaatcatatgggaaaggtaatgcaaaagctactggagacttttctggaatggcttaagcctttcacatttcttccacaacagcaagggcaatctctatagtcatcgccttctctgctctcacccttccaatcttcatgaaatccctgggacaaggactggctctcaagaccaagcttttctcttacgcaacactactctttggtttctacatggcctggaacatcggagctaatgatgtcgcaaatgccatggggacttctgttggatctggagccttgacaatccggcaagctgtgatgacagctgcaattctcgaattctcaggtgcttcttttgatgggatactcacgtgactagcacgatgcaaaaaggaattc

SEQ ID NO: 41917 - DNA, 389 bp, Glycine max
aaacatccttgtggggtaggcactctttgcaaatgtctgccggtatttacacggattggggtgggaccgctcaagcatcgcctaatgatcttgtcaagagaggacctgctagataaggatccatctcgctccccatggagttcgactttcgatcgaggactatccttatgcttctgatgggctagagatatctggatgctatcaagtctcgggtggaagaatatgtctcattctactacatgtcagatttggcactttaaaacgacccctagctccaatcttggtggaaagaacttgctgaggtgggacatggagatctgaaggatatgccatcatgccaaacgatgcaaactccggtagagctggttgaagcgtgcactacccttata

SEQ ID NO: 41918 - DNA, 427 bp, Glycine max
aaataggtagattatataagatggatctatcgtatacttatgcaaagaacacaggggcagaggaagtggaagaacatgcgcttccatattattaactgacctactctattaaaacagcttggctgatcatttggctaaagccagttaggggtgcctcacagaaaaagagtatctttgacgttaaagcgcctggatctgcacgtggtgagcagggagccaacagaccatatgtgttttgcttcatcgcagactatctattacttggatggcagccaacctggtgactatggcttcgaccctacttggtctttaagacccacaaggtgctggaggattcattgagccaagatggctagcatactgtgagaacaagaactggcggtttgccatgttgtctgcatctggagctattgatcctgtggtttta

SEQ ID NO: 41919 - DNA, 329 bp, Glycine max
ataattcccatttccatctctttctgagtatcaacatatggcaaccactgcgatgaccactcggccacaattcaggggtcttagaccacaaccatcagctgcccatgtgacgaacttgattgctgggcaacccatgagtcccaaggctaaaggagcatcgggagctcgatgtgactacatagggtcatgcactaatccgatcatgagcggcttgtacaaccactacgctggctgctgcatggaccggatgagctccatctgcatacaggaaagccactgcttgcctaaagctacaggagcgggactcaggcttgctaactggtgaccct

SEQ ID NO: 41920 - DNA, 397 bp, Glycine max
gatcgagataactagaaacagcttgataaaactgaaggtccttgatgatcttcgttgctgcaagaatgattgcatggcaatcccatgcctaccatatgttccctgtacagaatgaacactgtcatatggtgcccgaactccttcggcaagatccgcaagttgtacgttagatccaaaagcacacaacatgttttgctttgataccatcactgccgagctcgtgcaaacatcaaaggcatgcatacatgacgaactgcttatatcagtcttcccatcagcttaccaacatgcttacttttataccacagacctatgagtgcatcccaaggacacattggagctcaaagtagaatgcaccgttctctctaatgtcccatactacaaaatacatggttat

SEQ ID NO: 41921 - DNA, 427 bp, Glycine max
gaccacgcgtccgagagtttgtgtgagctataacctagttaatcgttaggagaatatgaagttgtttgttttgggtaagtctgcattagttttggtagcatgcccatcccatggcgcatgctaccaaaggttccctctccgaatgaaaactggctatggtgagcgttcttcgtaggtaaaatgcgcaagttttaggcttgctgtggaagcacacatcatccgagcctttaaaaccattcctgaagagtgcgttgaaccaacataggactacattaatggcgaacaatttagatcagactctaaaacaattaaccaacaagctttcttttatgctagtgaactcgatatccatcacaacgacatatttatattcggcatacattacaccgtactctctaatatcccatactatgaaaaacattgatat

SEQ ID NO: 41922 - DNA, 393 bp, Glycine max
cccacgcgtccgcccacgcgtacgcccacgcgtccgatttttcttcctcagtagtgtcatttgggcggatattctctgcagcaactatgcctaaccctaaggtcttcttcgacatgaccatcggcggtcaatctgctggccgaatcgtgatggagctttacgccgacgttactccccgcaccgtcgagaacttccgagcgctttgcaccggcgagaagggcgtacggcggagcggcaagcccctacactacaagggctcgtccttccaccgcgtgatcccgagtttcatgtgtcagggtggcgacttcaccgtcggaaacggaaccggcggcgagtcgatttatggcgccaagttcgccgacgagaacttcgtgaagaagcacaccggtcccg

SEQ ID NO: 41923 - DNA, 502 bp, Glycine max
  unsure (1)..(502): unsure at all n locations
cccacgcgtccgcccacgcgtccgggaatatattacaagcctccccaattggacgggctttatgaatgtctttcaacagtgtttgcaactgatttgcattctcgtgcatttttacggcttcctaaatctgtgggtgtggattttcgtgcctcgtgtttctgccataagcaaacaattgacatgggctatgtgtgttctgtatgcttatccatattctgtgagcaccatgataagtgttcaacctgtgggtctgtatttggccaggctcaactagatgcctcagcagccgaccggcaaagaaaggcttgatgcattatgttgcatctgagtgcataacatattttgtcacatttatcaagagagctgatcgattaaagttcttttcatacctgtagcataatgaaattttgaaatcaaatttcttttgcatctgtcttagtgggaaactaagnttgtcatggaaattattggaggcctataaaaagtcagcatcgatctgaag

SEQ ID NO: 41924 - DNA, 362 bp, Glycine max
tttcgacccaggcgtaccgcccacgcttgcacccacgcgtccgtttagctactactggagcaaactttgcaagagcatacagcggggaattcggtagttgcaagttccctgagaacttcactggttgccaagatcttgccaaacaaaagaaagtgccattccttagtgacgatttggagcttgaatgcgaaggaaaggacaaatacaagtgcggttctaatgttttctggaaatggtgaaaggaggcaaccttttatgcccaactgcgaattattcgctttgcgatgtacctaactgcttgaatatataccatatttttctgcattgctttcagttattatattgttggtgttggattttta

SEQ ID NO: 41925 - DNA, 433 bp, Glycine max
  unsure (1)..(433): unsure at all n locations
cccgnccggaatnccgggcggaccacagccgtccgccaacgcgtccgccaaaccaaaccaaaaagtgtgggggggaaaggggaaccaaaaaccggagcaccattggcaccatttagggttcctaagccttttccccccgtggcagatgatggggggcagttccgaaaggccttttaaggtgggggaactaacggggggctgatggtttcgacctgggttaataggaatgctgttcaggggaggctaataagagaaactaatgcccagccctatggggaaaatctcttaagggcctgggccaaagaactaacaagggattttggggggttggttcattttgggccactggattctgctgaacgtgatgcatttttggcaaacgaggcgactaaaaaatggccttcaagcaatcaggtcctgggggaaatagcct

SEQ ID NO: 41926 - DNA, 444 bp, Glycine max
  unsure (1)..(444): unsure at all n locations
gggncgggaattccggggcggaccacaggcgtccggccaaattggggcacgggaatgggagcggttattcagaaaccatgggccgtggcattgggaggaggtttttcaattaagccgggtttttaattaaacaccaggggttgggttgggggttaaccagttggaaaataatcggggttgggggatggggctgttgccactcaacgttttaggcaaactggggtgggggcgcaccagcgacctacatggttccaaggactggatccccaacttaatttggagggacctttggttggagatttggggttcgaccaatttggacttgcaagggatccggcaggttaaagggggtttgtgcaggcagggctggttaatggccgttttgcaaggctgggggttttgggaattttagggccagatctacttcgggtaacaggaattagt

SEQ ID NO: 41927 - DNA, 357 bp, Glycine max
ccacacccgtccgccaacgcttccgcccacccttcctaaattccggccagataaagggtttccgcctttggcttttctttttgtggaaggcggaccccaaatttttccttaacgaaccttaattaatttttccaattcgaaatttggatcaccttttggattaaacctttttttcctggttaattttttggttcgcctggaccataaaggggggggatggaaatggaatcctaaagatgccagttccagcaggaggggttcgcatgcctgcgaccaatagggttaacagaagggcagggcttaaaacccatggtttatggcaaagggccatcggttttgaccctaatgcccccaata

SEQ ID NO: 41928 - DNA, 380 bp, Glycine max
gccaattttgtggttactatggttccaacataaccaaaagccattttttttttccatgtggggggcccgaagttttgtttgggggtttaacggcctgggtgactttggtcccgccaccgaacccataaaaccctaattaactttttcccaattaaaagccaccaaatggtccttccttttggccctttccgcccttgtaatttgcaactatggttctgaaatgccttaatggttggccatcttggagattcccggggcagctgtttttccaatggacaggggtggttaacttaaagctgttcgaaaggtgcttgctcttatagccagggaattggttgctggctataaaccctaccaccatttttttttggggtttaagt

SEQ ID NO: 41929 - DNA, 393 bp, Glycine max
ccacacccgtccgggggaatggtggtttcgttctttaacatttttccctaatttttttttttttttttggcctttaatccaaaaccttattctttttaacaatcgggggggcttcctcaaccagggcccatccttggccggggattcttttgggggggttggttttttttcggtttccaggggctaccaatccgtttttaaatttggatcagccatgttaatgggttttgatgaaaatgatggggccgatgttttaaggggggggtttttttgcccatttggttctgggatttttgatatcgtgggatattgctgccccattgccgaaaggcttccattgggggcaagaaatggggtttgccctgtttgtgctttgagggggggggttgtttt

SEQ ID NO: 41930 - DNA, 422 bp, Glycine max
tttggggggccgggaaatccacccaggggatgttcttggttccggtcctttacgacgggttggccaaccacaacctggttgggccttttttttttggcggggggggcccccagttggaccaggccatttccaggaatggccggagcctttacctttttgggcagactgatggtggggggccgaatcctttggggatggcgaatggcggggtggggaagcctagggtggttgttgttgagcccatttggcagtttatggaaagggcgcggtccccattggggaggaggaccaggaccttcttccttcctgggggggtaaacagaattggggaatggccacaaatttccaggatgggggttccccatccagccagccttgaggtccttgttggggaggttgaaggacaacttaatcgccatgct

SEQ ID NO: 41931 - DNA, 340 bp, Glycine max
ggtaagtttatgaacagtcaccctgccttgtttaaaatttccatttccggaacctgaaatcaaactctcttattcctttttttaataaataaattaagttttttcccattcaaatgggatggggattttttttaagcagtccaaaacctgaaaggttttttgaagatggggaaaatgactgtcttagatttggttaatcgtccatgcaggggtggcgtgcaccaatggaagaggctaatgctgcatatactgatctggatgagcccacttcattttttggggtttatgatggtaatggaggtaagggggttgcaaagttttgtgccaggttttttattta

SEQ ID NO: 41932 - DNA, 289 bp, Glycine max
ccaacccttccgggaactttgccaccattgtccattgagttaagtaggccacatcctcatgtggaagaatttggtcctgtgggcaaattctactttcttgccaccaaaggagtggaagctattttttgtttattgtcaaaggtttttgttgttttttatgtttaattttacattttaatctgtatctttttttaatttttattttgttttgtttttctacattttttattatttactcttatattttatctttttttataattttattatttttttttatattattttt

SEQ ID NO: 41933 - DNA, 442 bp, Glycine max
gggggaccaggcgtccgccaattaatgcttttgtttccttttgatctttttaaaaaaaacccaagaagtttttgttttgaggttttaacagaatttgtggttcaaccacttgttgaaattcttgttggaagtgtcctgaaatctgaattgccagggggccttttttgtgccctgtaatgtgcattactgaatccagttgatccaattaaaactcgggtccaagcttaaacaatgtccttccttgaaataatttttaagctgccaaaaattgaaaggcggggttaatccaggggctttatccttgcaatttttgacacagttttaaagccatggtttgcaaactgggatatttgaagcaggaaaatgggggtggttaaaaatggttcctacactgccagaactccaggtccaatttgtggcttaattcttaagcacatttttg

SEQ ID NO: 41934 - DNA, 276 bp, Glycine max
ggaaggaggccggcaaaggcctaataatattctccataaatctggggctccgggagccggaccatttggattctgctatgcggctggaggttcctaatttggcagccaaggttcatgatgcaaaccgcaacctcaaatttaagactttccgccgttggctgggggggggggccagccaaccattaactgttccaccagaaatggtaggagaccttgttttggttgccacagggttttttaccaggggtgactcccaaaaggttttggacatttttg

SEQ ID NO: 41935 - DNA, 431 bp, Glycine max
ccacacccgtccggataactggaaccagggtgtttataaaggaaggccctggtttttttcgtggttccaattttggaggcatggcattgccatccttccaatttgttccttttccgaatgaacactggttatggggcccgtcctccggaggtgaaatgcccaggttggaggctggctgtggaagcacacaccatttttggttttgagcccatccttgaggagtgcgttgaagcaccaaaggatttcatctttggcgaccattatagatcagcctccaaaccagttaaccaacaggcttatttttttgccggagacctcgaattccatccaaaggccccatttggtttaagatattttggccaccttccttttaatttttccaacctccaaaaacattgtttatgggggggtgaatttttccccgccctggt

SEQ ID NO: 41936 - DNA, 442 bp, Glycine max
cccacccgtccggaaaatcctaaattttttgggttgccaaccactttttttttgtttttggaaaattttaagttggcaaagaaaatttgaatcatgtcggggcaggcgtttgtcgccaaccaccttttgggggccatcgaaggtacccacctaactaacgctgttttaatgggccaagacggcggcgttggggctcaaagtcccgccttccttcagttaaaacctgaggggatacctgccatcatgaatgactttaatgggccgggatcactggttccacctggatggtttctcgggggccccaaatttttggtcttccagggggaacccggggctgccattcgggggaggaagggtcctggtggggttcctgtgaagaagaccggggcggccttgatcatgggcattaatgatgaaccaatgactccaggtcattgcacca

SEQ ID NO: 41937 - DNA, 399 bp, Glycine max
aaggaaggaaggggaggggaggattcgtttcctaagatgggggccccttaaccttaaaggttaattccacaccaaatggggggggtccaaaccgccccccttggattcggtttccatggagtcaagagcgccatcgtgggttttaacccttttaaattttaattccattttacagggggattggatgaagcgttgaaaaggcattgcaaagttaacctgtccggacctgtttttcccatgagggaggagcttgccaggcaaatcttgtccaggttccagcggcctcctggaccaattcctttttaaatgctgggtttggggactgttccaggaagtgttgatcacttgggttttggggattgtttaaatgcccccctgggtgaagagactttccggcct

SEQ ID NO: 41938 - DNA, 337 bp, Glycine max
aggcgggatgcctttttggcaaatgaagcttttaaaatgtggccttaaaccaatggggtcattttggaaatggtttccactggatcttaactggccctcttaagggcaaaccaggcttttaaggcccgtttaaaaaggtccttggaggaaaacgttgcctataatactaaaggggccatccgcaggctatgggttcctttggggggcccattccgttttgggggggttggggtgaccatgccattggcaaaatttggggctaaacggtttaaccagaggattgcaaagaaggcctccaccgccagggccctgatcaggattttgtcaccagggggta

SEQ ID NO: 41939 - DNA, 417 bp, Glycine max
acccttccgaaaaaaaaaaacgggattggttctttttttttattaacccacaaacccaccaaccgggaaggggggtgggggaagatggggtggcctttaacaaacctgttcagatggttgttggcgatgaaggaaatgtggattttgttgttaggtttggttcctgttggtaggacacccatctggtccaggcttatgcttgttgaatttgttgcaaccttcccaaccttcggttttaatgttgtgccggtgaaatccaagaccattaactttaactttggggaattgggttgttaaggccaggctcggtcccttgtttaggcatttttttccagacctatttggtttttattttaagtgtgttttaatcttttttttgggtttatacttttttagctctttatttttatgtttttt

SEQ ID NO: 41940 - DNA, 440 bp, Glycine max
ggaggatgggagtttggatgctgaagtcttgaattttatggcggtttaaaaggagcatttccatactgttttgggaccaggcaatcaatttgttttacaggaaatggtggttggggtgcctaaggtaagttggggggttttggggggccttgagattgtaaggcgtgggctgcaggagactgttaaatatcctggggggcacctagaaaaatttgggaggttgggtttgtaaccattaaagggggtttttttttttggtcctccaggagggggaaaaactttgttggccaaagcaatggttaatgaatgtcaagctaacttaataagggtagggggcccagaatggttaactatggggttgggggaaggtgaagccattgttcgggaatattttgccagggccaaacattcagttcaacggtgccttttttttgatgggc

SEQ ID NO: 41941 - DNA, 425 bp, Glycine max
actaacctttttttttaatcacaaatacgatggtttccatggcacccacaacctttttttaaaaccccaaactttaatttttaaacggaaggcccgtcacatatttttcccgggtggggcccaccaccaaattatcctaatccaaccagggcacaatttccatgtccttaacccaacccccttacgacctccagtccttaaaattccagcccatcaaagaatccatcgggtaacgggaaatgacgcgccgttccatgaccgccatgttaacctacgccgccaccgactttgtattcttcggagccggttcggccgggttttcttgcgcgtccgagctatagcaggaaccccgccgggggcggggccatagttgagcagtcagtgagccccggcggcggcccgtggtttgtcggccagtttttttc

SEQ ID NO: 41942 - DNA, 203 bp, Glycine max
gacgtattagtttttttttggggtaccctaaattaaattaacgggccgcggtttaccaccgtcgggccggggaaacccctggcgttccccaacttaatggcctggcggaacatccccttttggccggttggggtaatagcgaaagggccggaacggatggcctttccaaccagttgcccagcctgatgggcgatggggccccc

SEQ ID NO: 41943 - DNA, 448 bp, Glycine max
aaaacagttaaccaacaggttaacttttttgtcagagacctggaagtccatcccagggccacatttttgttcagtttagagggcaccgacctttttaatattccatactacaaaaaacatggttttgggggggggaaatttaactcgccctttgttgatgaatgggttaccaggggctatttacttgcttttctttgttcttttaatattaacattttgttgtttttttttggtttcaaagtttttatctttgtttgattttaaattgtgttatctatctcttatctttttttttccttttttgtgggtctgttttctataatttttagtttaattaatttttaatgttttatctttttttattttctttctctatattttttaattttttctattatatattttttatatttattcatttaatatctctgctttaatttttattttt

SEQ ID NO: 41944 - DNA, 295 bp, Glycine max
accagaaacaaaggggcaggaattagggggcttaaccgatggccatggggctgccaccagcgtgaggaccaacaatttcgttggttttgttgtgggggaccaaaccaaaggggggatttcagttctggggttggggggggtgattagggcaaagcagcagggggttgctggggggaattactccataccatgggaggcaaaagatggtttgattaaaaatgagtttgaaccgaaggtttgggtgagggaatggttgacctccaaggggtggctggaattcaagccagccaatgtt

SEQ ID NO: 41945 - DNA, 428 bp, Glycine max
ggggttaccaggggcatggcaccggccctgcccgggacttttaagaattccaccaggctggggtttttgggtttaaagattttattttggtcaggaggaccactggccaaccaggccgtaccagaggcaaccttaaggagggttggttcccacccatgggaaaaattaattttaagggatccacaggatccttccactccaaaggcagtttcttccaaaccagcaccgggggagaacctgttagggcggggttccaccatggtggggatcatgggggcccaagggggcgacctcctcgggggccccagaggcgaaggcaggacctttaagcttcctaatcccctgtcctccattcagtggttccttaacctttaaccaatttagctggctcctatctatctttatgtaataggatgcgttcaaatagg

SEQ ID NO: 41946 - DNA, 406 bp, Glycine max
gtttttggggttctgcacctgaaggggagggaaaggaagcggaacccaaataaggggttctttacttgggggttccatggcatggggggtagctttcctactcctggggctgggggtggggcacccttaaccttaacaccataggatcactcgctggccgggtaaaccccatgttaagtttaataagttttaaggttttgtaaccgtggatgccaaaaaccagcgggcactttttttttacttggttgaagccgaaaaggatgcactttccaggccctttgttttggggttaaatggagggcctggtggttcttttttgggagtgggggcattttaagggaagggcccatttaggcccaaggtgaagggctgggttggaaaccaattcagttggaccagaaaggcg

SEQ ID NO: 41947 - DNA, 404 bp, Glycine max
aggacattacctccattgttggcaacgggggaggagtgcaaggcatgcagggggggccaccagtgggcaggaaaaagttggggactttttcttacctgccagaccttgaggaggcacaatgggcaaaggaggtggaatacctttttaggaggggagggattcctggttgggaattcaagtgggggaacggtttctggtcccgggggcccaccaggtaaccaggttactacgagggccgctcctggaccatgtggaagctgcctatgttgggtggcactgaggcttttaaggggtggaaggagcttaaggaggctaaaactgattaccccaacggtttaatccgaataatcggattcgacaacgttggccaggggcagggcataagtttaatggcttccaagccc

SEQ ID NO: 41948 - DNA, 442 bp, Glycine max
ccacacgcgtccggttttttcttaactgaaattttgccaaaatgggcaccggattggggtcctttcaacatggggggatccacacgcttggcaaaaaatccggccccttattgcccgtttggttcgggtggggctccgtgggggggggctcgtccgtggaaatcgccagggccgtcctaaaaacccacgggtccaccttggtcggtgggccgaagttcggggggggcaatatcacacctttcaatgactgggacataacttggtcccggacgggcccatactgcttccgggcctgttgatggggcttaagggatttattcatcgttaaacccctccatgattccgaatccattggaaaccaggagcttggtggctctttaaacgaactttttatttccgcaaacaaaccagtttttttatatgaccacttttccagcttttg

SEQ ID NO: 41949 - DNA, 376 bp, Glycine max
ggaggggattccaccaatgcgaagcggggtttttaacccacccgggaaaatccaatgcaggctaatttccaaaacctccatttttaacgacgttgggcttttccgtttggccttcccctccgacgccctattaaggggttggccggtggggaggcacatattcttatgggccaccgttgccgggaaactatgcttgcgggcttccactccaccaggcagggtttacgaagtgggttccttggccctggtcgttaaggtttacttaaagggggggccccctaagttccccaccggggggatcatgtttaaccacttggactttttccccattggtttctgccttggacgtgaaaggcccacttggccccattgaatc

SEQ ID NO: 41950 - DNA, 440 bp, Glycine max
gcctgttcaaggaaggctgggggcccaggtggcctcaacaggaaaccaggctttttgagaaggctttggttgggttggccagggccactccggcccgggggttgaggggggcggccttgattcccggcaggacggtcggcgatgtgatcaaccagtttagggaactggaaaaagatgtgggggtaattgaataagggttaattcaatttccagggaccactgttgttgattccttaacatgggagggggtaaccaataaaggattggatggcctaaggcagtttaatggggtaactggcaaagggggtgcttcaactaaaccatttgaccaggaaaggaagaaaggtgtgccatggcctaaaggggagcccaggcaatttttgatgggtctgaagaagtttggtaaaggagactggagaaccatttttggcaattttggg

SEQ ID NO: 41951 - DNA, 387 bp, Glycine max
gaggtggggggcttcgttttaggaagggcaggtttggtcggattaagattcaaaccgctgttttttggcagtttttcggatcctcttttccttttccttaagaaaaattaacccctttcaaggaaggaaggaaggggcgtccttttccaataccatgggcggatcacctaaccgttgaccagatttgggagttcagggaggccttcagtttgttcgttagggttggcgatggttgcataacaccaaaggggctgggacctgttttgcgttcgtggggtcagaatccaccagaggctgggctccaggccttgatcaatgaagtaattgctgttgggaatggccccatggccttccctgggtttttgaacctcatggttggaaggatga

SEQ ID NO: 41952 - DNA, 437 bp, Glycine max
ccggtttccaccgacatttttggaatctttttaacaatccggggatccaatttggttccgttaatttaaatttaaagggccgataataggcaccccaataacgagggggcaggtctttttttcaaccagtccaaaccaaaatccgaacaaccaacgccacctgagattcccgggttttttttcggatggaccgttgatgggttcccgttgggccacggaagcgtcgtgggccagccaatgggccgggcccctgggaactcctcaatttgcgcttgtttgggccaaaccgatcatttttgcagaagcgatttcgaagttggtttttttgggaggggggctccttgggtgctgtttggaagcaatgttgaaggactggatattgttctggggacatttgccaatcactgtttgccatattttggaaggatttaattgga

SEQ ID NO: 41953 - DNA, 420 bp, Glycine max
gaccaccatgaattttttaaccttcgttccttttttacttttaatactaccagcaacctaattttcccagatttgggggaacaaccttttaactaatggaaggatattcctaaaaaaggccaccatttttacctggaccgctgtcatttttgacgggggtggcacaggaccccgtgtgcatgttttccatttggcccagaattgggatctccttcccatgggggttggtctggggcttaataaaaggatcacacccggttttaagggcttacggggttgatcccgggcaagctgcaaaatctttgtttccactttggggggaagcagaaggggtagttcctgaggacttgcttccaaacacacccgtttggttgggggcaactgctggtttaaggtttttgaaggggaatgcttttgaac

SEQ ID NO: 41954 - DNA, 369 bp, Glycine max
acacccttccggtaaccataagttttaatgggctgggggggcaccaagtaatgtagccatggttccatttatgggtgaccaaaaccacgttgccccgttggggttattgccttgtgggttttgggggggacccaaagggaagggcttggtttttctttattgggccccccaaattaaaatccttagccccagttaagttggggggttttggcttaactggggttggaattcgatccttgggggtgtgttaaggggggtgccattaataacatggccattgtttgcggggcaaaaattgaatgcgattttgttttgtgggggtttaaatgggggggtggggccaagggttggtgaaaatggtttggggga

SEQ ID NO: 41955 - DNA, 409 bp, Glycine max
ccacacccgtccgccaacgcgtccggatcgggttacctggaaccagggggatgaaaatgaaggtcctggtttttttcgtggttccaattttggaggcatggcaatgccatgcgtccgatttgttccttttccgaatgaacactggttttggggcccgtcctccggaggggaaatgcccaagttggaggcttgttgtggaagcccacacaattttgggttttgagaccattcctgaagagggcgttgaagcaccaaaggattccatccatggcgaccattttagatcagactccaaaccagttaaccaacaggtttactttattgccagagacctggaagtccatccaagggccacatttgtgttcagattagatggcaccgtactttttattttcccttactccaaaaa

SEQ ID NO: 41956 - DNA, 384 bp, Glycine max
ccacacgcgtccggggacaaggaagtttaactcagagggtttcctaaagccgccgaaggagccgaagggttaatttaaccgttccgtcaagcgtgcgtggggtcctgataggcgcgcttttttggaccgatttccggtcgaagaccaacgggcggtccattccggttcgaagggccaacaaggggcaggtggtggggggaacctacaagggccgcgggggcaaaggggtccaggtttatcgccgaagggggttaatcaaaatgaggcgcataacccgcaggagggttaacggttcaaccgtcaacgttggatttaacctttccagggtggtggtaaccaagctttgattggccaaggaccgaaaatcttggttggatcggaagg

SEQ ID NO: 41957 - DNA, 390 bp, Glycine max
ccacacgcgtccgcttaacgcgtgcaatgttttatgggacccacccatgggccaaaaacccgcaaggtttaataggcaatttaggaccaacccatcccccaggtaacggttttgccttggtgttcctgatcccaagatcaggattaacgatgttggcatgaaaaaaaagggggttgataaatttccttttggggtcaatttgtttagttggttgaaggaatacgtttttatggagacttttaaattttttcgtttttttttgattaggttactttccaaattttttataaatgatatttttttattttggatgtttaattttcttcgattaaatttcctatgttttaaaagagtttatttcgattttttgttttttgtttgttattattt

SEQ ID NO: 41958 - DNA, 435 bp, Glycine max
gtcctatcctggcactataaatccacaccccgttgaaggtcctatgcatattattggggttaaaccaaataaaagccagggccacctccaacttttttatggttttttccgcttccttagcctttttttgggggctacttaccagggaacactcgaccgatcccgtttttttaaccttaaacaggttaaacccagtccacccaaccattttgttccaaaaggaggctggtttttaatcctctggggggttccacctaaccaaagtgggcagcaccggcgggcccacctggggatctttgggtggggccctttacgctgccccaatccaaatttgggccagcaaaaccggcagggtggccagttgggctccatcctttaaattaaacattttcgaacccaccaaataaaactaagttgacgggcttgccttttttt

SEQ ID NO: 41959 - DNA, 422 bp, Glycine max
cccacgcgtccgcccacgcgtccggttggggaggatgacaccaattcgcaggtttggtggcaacgatctttttggtttggcctccgtcaatttggaccatttaaccgaaccattaaaaaggtccttttacaggaccaatttggcaggagggccggactatttccacgttgccgaaggccctggaaatggaataaggggttccatattgggtaaggtggaggggcagggggaattttggcttggccaggtaactgcggggaccgtggttccaaagtttcgaaggcggcagttagccaaaaaactattgaatttgttggaggcacatcagggccaatattgttaaggcttttttggtggacctcttgggggggagcgtaaatgcaccagccttcaagttgtttgaaaggcttggttttgggatt

SEQ ID NO: 41960 - DNA, 415 bp, Glycine max
ggaaagggtttcctaaaggatctcctcccatgttgttacaaccgtaaaccgggccggggccggcttggttgttccattaaccggcctaaaatccatggctggcttcccaacggggaagaccaacattgccattccttccattgttggcaccgggggaggagtccattgcatgcagggggggccaccaattggcaggaagaagttcgggactttttcttactggccagacctggttgatgcccaattggcaaaggaggtcgaatcctttttaaggaagggatggattccttgcttggaattcgggtgggagcacggtttcggtttccgggggcccaccagtttacctggttcctttgatggacctctctggaccatgtggaagctgcctatgttgggctgcactgatgcttttaag

SEQ ID NO: 41961 - DNA, 426 bp, Glycine max
cccacgcttccgaaatttttaattccaattgttccaactagctggttggacggaaggattgttttttttggtaaagttttttttgaaatggttgtggtttacaagatggaagttgaaggaccacaaaggggccttccaaaaaccagggtggtgatggtggacaggggggaactccttttataagggaccttctggattttaaataaggactggtggaaggggttcccagttttaatttaaattccttttccgagactactaatttttattaggcatgttttaatagatcaagacttagttggttgttggggatactaattaaataaagtttttccccctattgatattatggaaatgggcattggggaaaacttacagttaataaactatttttcccgaaaaaaaaaaaataaacgattttggggg

SEQ ID NO: 41962 - DNA, 354 bp, Glycine max
cccacgcgtccggcggcatcgttgtttcgttcattcacatctttccctcactctctctctggctgtctgtctctcatgcaagaccgtattcgatatcacaatcggaggagcatactcaaacagagaccatccatggacggtgattcctcttggagtgctcgtctctcttccgcttccaggcgctaccaatccgctcttcaatctcgatcagacatgttcatgggttttgatgaaaatgatggggacgatgatataagggaggagtttctctgcccattttgttctgagtattttgatatcgggtggagggtgctgccacattgactaatagcatccaatggaggcaagaaaatg

SEQ ID NO: 41963 - DNA, 244 bp, Glycine max
  unsure (1)..(244): unsure at all n locations
cccacgcgtccgggaactttgacacctttggtcattgagttaagtaagccacatcctgagggtgaattatatggtgctgttagccaaaactacatacctnccatcnaattagtttaagcttttattttttttactgacttattcttttttatgtttatnattttttttttttttctttattatttataattatttctcctcatcattttatttttttaatattatcttttttatctcttaatta

SEQ ID NO: 41964 - DNA, 300 bp, Glycine max
cagcagaacaaatacagatccatccatcaatttcatatttcccttcagctcaccctcaaacggaggtatcaatacacggagggggtgatcctctacatcaacaacagggattgatcttttaccaccaagatacttggtaccgtcatgctgctacttagccttaacccctctaaggcaaacctgtacctcttaatataattcaacacaactactgggaatagttccattaacccaccataaatgctgaatacaatccctctcaagatgaaacacactgattcagaaaaggagctccatgag

SEQ ID NO: 41965 - DNA, 294 bp, Glycine max
  unsure (1)..(294): unsure at all n locations
cgcaatttcatgcttctgcttccctctgatcttcttcaagaagatcccaggagtatctggtgggaggcttctacagtggttgctggtccaccatctattgaaattcctgctggaagtgtgctgagatctgcattgtcaggtggcctatcttgtgccctgncatgtgcattactgcatccagttgatacaattaagactcgagtacaagcattaacaatgtccttccctgaaataatttctaagcttccagatattggaaggcggtgtttatacaagttctctattccttcaatt

SEQ ID NO: 41966 - DNA, 444 bp, Glycine max
  unsure (1)..(444): unsure at all n locations
aataactactctctttatttgagacactggtatgcatggaaacctcaaagatctatgctgggctgcaatctttggatgcgtggggctgtcctgcgccactaccattctcgtttgcggctgcacactcaaacccgccaaaaagctcaagccgggtaaaacaccaaagacacccacagtacccgatgataaaccaccattcacaatccctcccattgttaagccaccagtcacaatccctcccattgtcaatccaccagtcacaattccttccatcgntaatccaccagacacaatcccttccattgttgatacaccagtgacagttccacccgttgtgctttcaccaatagtgaagcccccgggttttctccctccaattcttaacccaccaagtacaccaacaccggcgtcgtggaagggagggaacacttcatgttcaccacc

SEQ ID NO: 41967 - DNA, 474 bp, Glycine max
cggcaggaccgggcccggaattccggggcggaccacacccgtccgaaataaacgaggattctaataatctccctaatttttcctctcctctctttctccgaggcttttgtcctaaattttggggtggcaaataatgcaggtccaattggacctgcaggatattcttgcaggaggccttaaagggtaacagcaaatgattttgttaacaggggcctgggcattgttggtaccacctaaaacattataaaagttgcagggccccttgcattggaggctaagttggttggtttaaacggtttgggcatttccgaagaacgtttggactaaccaccagggggggtattacaatttaacactaatccggaagcttaagaataactggtggtaattgaagggggcatcttagctggattaattcttttggccaccattgtttacttaaaaactcttaagaagggggatgttatggcattc

SEQ ID NO: 41968 - DNA, 361 bp, Glycine max
aaccggcccgaaattcccgttcggaccacacccgtccggagttttaaactatgtaaataaactttttttgtagcctgccaagtccatctgaaggggcggggttaacttgtaatagggttgccaaaatcccaaacattactttaacaatgggaaataaactttttgtcttaacaccagaccagttttttttaagaactggagaaggttttccagaagcttgcctaagtggtttaattgcttttgatgttcctcctccaaggggcccatgggggttttttgtcaaggttttaataagggcttttaaaaccgcttttgcctatggaaatttctaagtggggttggtgtaattatttataatttt

SEQ ID NO: 41969 - DNA, 411 bp, Glycine max
ccacacccttccgttggcaccaaattaatttataattttcctgagcgacctaataaataaaggctgattccacttttgcaggaggataataaagctgccaaaccacctcgcaaggggtttaattggtttgatgataaacccagggttggtcctgatcctgaatggaagaactatattgggagggttgggagcatttttggggtctccgtggatccaaagctggccaaattccaggaaagggatttcttagggttgattttctttcctgtggggaatgaggctggccggttccttgatgaaggtatcgcagtcaaagcaccaaaccttgttattttggttataatgggcatgggttttcccccttacggggggggcataatatcctggccgtgtttttttggatccaggtcc

SEQ ID NO: 41970 - DNA, 294 bp, Glycine max
aaaacatttttgtggggtgggacctcaatgtaaatgtccgttgccattaacaaggcctgggttttaactgatcaagcataacctaaggatcttgtaagggggggggttgctgttaaggacccatctgttcccaatggagtccgtttttggattgaggcctatcctaatgcttttgttgggctagagtaatgggttgccatcaagctctggtggcaggaatatttttaattttcctccaagtaagattgggacctccaaaaggcccctgaactccaagctttggtggaaggacct

SEQ ID NO: 41971 - DNA, 409 bp, Glycine max
gatccgcgtttttaaagaattccaaccaatttgcatattggttccaacattttatgggggtcaacccggtcccttaccaaaggaccatttggggattaacatggggggggtaacagtaaaagaggcacttagtcctaaaggatttttcattttagattcccaagatgctttcatccaatatttgccggggttaaacagcctacttactgcaaaagctattgccacagggccaatcttgtttttgaaggaggttggtcctttgaggccacttgtttttgaattaagcaacccacatccagatggggttaatttgggtcctgggagattgggggtgttgcctgcaactgaaggggttgttggtccaattgggttattgtccaaggttaatgttattgggaatgattttgtt

SEQ ID NO: 41972 - DNA, 373 bp, Glycine max
ttatggtttggcccttgtggttaagtctttgttcgggaccgaagatggtgtttccatggtggttttaaacctaatgacccgggccaaattcttaatggaaggttggtcctttttgaaggatgcatcccttgaagggggttttccttttaccaaagcttatggattgccagcctttgattcccatggaccggatccagggtttaccagggttttaaccatggggttggttgtctattttaccatttcattgaataaaattcttgggccctacataggctttgggggacttaaatccctggtggatgttgggggagtacctgtttctttatttaatatgtattttttaaaattttctcttttatggtaattaatt

SEQ ID NO: 41973 - DNA, 385 bp, Glycine max
cccacccgtccgggcaattggggttaacagattattcatattagattcccatgaggcattcttcccgaattggccgaagataaacagcctacctatggcaaaggctaatgccacagggccaatcttgttttggaaggacgagggatctttaaggccactggttttcgaattaagcaggcctgcaccagtgggtaagggggtgtggcctgcaccagagggggtggggatttaattgggtggtgggccaaggctaatgtcatggggaatgactttggttataattaagctattaggccatgggttaaatcctcatgcagggatggagccattggccttagcaccaaacaggcatttaagggggcttaaccccattataaaacttttt

SEQ ID NO: 41974 - DNA, 381 bp, Glycine max
acacactaccaatggttaaagatatttaatttactgttaacactactaatccagttttctggggagggtttaaactgctttttacatgcttttacttccccttttagggatggtggcctttgttggggactaaaacaaagactttgccataacatggggggatggccgttccaagatcctaaaccatggagggttactaactttttaattggccaaagcatttggttaaggtttccaatcaaagaaggagtttctttttgggaggatggacatgcatttaaggcttgtccctggaaactttgctggcaccgtaattgcctattattattcttcaaagggttcaacttgtggtgaattaaacttttgaattttttggaaatt

SEQ ID NO: 41975 - DNA, 417 bp, Glycine max
aatggccacttttgttattaagcaataagatttcgcgggtaaaactgttttaaaccagttaaatgggtgggtccgaaggacgggggcccccgtaaaaggtggaaccaacatgcgccgaaccgttaagagggctcctcaaagaattaggtatggcccggacggtccaaagaacctgggtccataataagaggagattccgtaatacttgaccggggaattccttggggtttacggatggggcattgttggccaatgagctgacccggaatccttttccagaaactgggggctggtggtggttaaaaggaattggcccttgtctgggtgcatttggcgtgacttttccggtgttcctttaaaagaatggtgttaaatttgtcggggcctatggttctaaggttttttattttatttttt

SEQ ID NO: 41976 - DNA, 412 bp, Glycine max
cccacgcgtccgccaacgcgtccggggggattttaattcgccgattttaaaagatgagtaggtttaaaagggatgcttggggggaagccatttaaggaataatggccgtttccagggggaagaatcgcaaattgggggggaccatcgaactccaaatggggtggaaaaactccgatccacaaagggccaggcgtttaaggggttttgtaaggttgcccaacatccttggcccaaggaggaaaattggcatgctgggggatgctcaccatgttgaaaaggcggggaaaataggactggactggttggatgtggaagccctgaaaaggttaaccaaaattaagaggttggggaggaaactggctaaaagagcccatgcctttttagcttttgaagcagtcattaagcaaattcc

SEQ ID NO: 41977 - DNA, 351 bp, Glycine max
tgggaggggcttggaaaagagggtttttgtttaatggtccccaagggaccgttaggtcaacaataattgcggccatggcgaatttttaaggctataattggattgatctggagtggactgttgtaaaggacaaaattaagttgaggaagttcttaattgaaacatttagcaggtttataattgtgattgaggatattgatggttaattggattaaaccggccaacgaaggaaaaaaaaggaaaaggtggaggaaaaggatcaaaggcaaaaacaccaaggaatgcaggaaagaaaggttaaaagtacccaggtaactttttttgggtttttgaatttaattgatgggtaat

SEQ ID NO: 41978 - DNA, 403 bp, Glycine max
gaccattggaggcctaactaaggtgggtttattgttgagcaggctatccaaaccaggaggttgttcattttagatcaccaggactatttaattccttatttggggaaaataaatccaaatcccacaaagccttttgctccaggacccatatttttttggaaggatgatggacctttgccaccattggccatggagtaaagaaggccccatcctaagggtgaagaatatggtcctgttagcgaattttacgtccctgccagcgaaggaggggaagctattatttggttattggcaaaggctatggttgttgtaaatgatgcttgctcccatcaaataattagccattggctaaacacttatgcaattgtggggccatttgtcattccaccaattaggcaactgg

SEQ ID NO: 41979 - DNA, 230 bp, Glycine max
catgatgactgcaggtgggggttttggaggctgaaggcaaaaaggccccaccgtttaatagtttttaggatggaggagcagcaaaggcgggtcattggggagaagcttgtggggcctgcccagggctatgaagatttaattgccagccttcctgctgacaggggccgtaatgctgtttatgatttggggtttctgcctgaggggaatgtcctaaaaggcagaattttttt

SEQ ID NO: 41980 - DNA, 307 bp, Glycine max
cccactcatccgtccactcgtccgattaattaaacttcttactcacatggatcatgcaaatattatgaccattaaagatatctagtacgtactacacataaggaaagacttcaatgatgctgtaccatgactctgagtgaatggacacagatctgcatcaaataatcagcttcaatcagcaatagactgatgaacattgtccggattatacgcatcaatagggacgagggctcaagtatgcacattcagctaatgtggtgtaccgagatctacaacctactgatctactattgaatggcaagtgtga

SEQ ID NO: 41981 - DNA, 354 bp, Glycine max
cccacgcgtccgcactcgtagtgaatgctgtttaagctgttgaagcagaaaaggtcagttatgacaatgtcatggatggtagcaatggaaggaggaacttgatgttcgccgcggcggcatctgctgttcgcaatcctgctgctttgactgttgagaattcctcattgcgaggccttccatatgtctcaaggaactcttcttcattcagagttgtggccagagccatgaagatcaatactgacataccttatggaattaatggtggcatggctttgagggatggaactgattcatctggcaggaaaggaaaggtaaaggatatttttccattttttatacaaatactgttgctaa

SEQ ID NO: 41982 - DNA, 375 bp, Glycine max
cagaaacgaacaactataaactggatgacgtgtctgagattatatggaccatatatccaggggacttcatgttagaatctgggatttaactaggagataatatgcaaagaagctctgctattattttaaatactttcgctgaacttgagagtgatgtattgaatggtctcacctctatgttcccttctttttaccccattggcccttttccttatttttaaaccaaagtccacagaaccacttggcttctttaggttccaatctttggaaggaagatactgattatcttgaatggcttagagccaaggtaccataatctgttgtttatgttaaactttggttgtatttaagtttttttttcatatctactttttg

SEQ ID NO: 41983 - DNA, 235 bp, Glycine max
ctcacctcagtgctggtgatcttcttcgagtagtatataaatctggttctgaaaatggcagaatgattcagaatatgattagggaaggaaaaattgttccctctgaggtaacaattaagctcttacaaaaagcaattcaggaaagtggcttctgacaattttcttattgattgttttacttcactttcatttatatcctttctgtctctttttttataatatccgtttttttttt

SEQ ID NO: 41984 - DNA, 308 bp, Glycine max
cccacgcgtccgagaagagccatggtgcacgtttccttctaccgaaactatgggaggaccttcaagaagcctcgtcgggcgtacgagaaggagcgtttggacgccgagttgaagctggtcggtgagtacggacttcgctgcaagagggagttgtggagggttcatttcgctttcagccggatccggaacaacgccagatatcttttgtccctagactgtgaagaacctgcgccgtatcttttagggtaggagctttcttttgtataatgtacctttttctggtcctttaattttgggggggggggggg

SEQ ID NO: 41985 - DNA, 421 bp, Glycine max
cccacgcgtccgggctcctctgcgtgctcgttgaattcatcctaagtgacttgcttgctgaaggcgacacgaggtagaaacgaagaatgggggaagagaatgaagaaacaaaaacatttaaggatttgggcttatccgagtcattggtggaagcttgcgaaaaattgggttggaaaaatccattaaagatacagacagatgcaattcctcttgcattggaaggaaatgatgtgataggacttgcccatactggttccgtgtagactggaacttttgctctttcattttgtattgggggggggggggggggggggggatatttattttttttgtttttttatattatatccttttaattttattgtttatttttattttgtattattatttatcttagtttttagtgttcttttttattgtt

SEQ ID NO: 41986 - DNA, 517 bp, Glycine max
  unsure (1)..(517): unsure at all n locations
cgtaagctnggatcctctagagcggccgcgtgtttttttttttttttttttttttttttgcttaaatattggaacttgagctttctacattggggaaccattcattcattcattccgggaccagttcaagagaaaataagccatcttcattttcagaagaactaatctagcttcgtcagaactcccttccaccattgattttaaacatatactaacaacttttaacactaacaagtactaatacaagtgcacaacattaatatgcataagacaaagtcctagtacacaattacttaatattagagacatgcatgggtaacaacactcatcaaagccctacaatattaaaaacacctctagtagggagagacgcctacattagccggtgcgaaaaacccatctttcataagcacgtcctctgcttcctgacgaacattagctttcttcacgggttgattatcaggcataagtccgaaatgaatgtgtggaaaatgggcccaattcttgcagctgcact

SEQ ID NO: 41987 - DNA, 282 bp, Glycine max
aacggcataaaaaaggcagaacaacgcggacctctgaaaggaacaaccataaccacgcgggcctgcagcagcgacaccatcgaaaatggcaacgcaaagataaaagacagggaaggcattcacacggatcagactgggaagaccctggccggacagcacctaagagatggaaagaccatggccgattacaacattcacaaagaatcaaacaggcatgtactgatcacgcttcgcagacagatcacagacccaatcctgaagggtacggctcgcagatacaac

SEQ ID NO: 41988 - DNA, 455 bp, Glycine max
gagactcttctatttccgatgcgtgtacgctcactcgctgttcgtgctcacttgtgaatcatattggatcacacaatcatggatgtcgctgagccccatttcaagtccaaggccgacgccggagcctgcacaacctaccctaaccaagccggcaccatcctgcataacagctacatcgtcatcaatggccgcccctgcaaggatgtgagatggcccgacttacaaaactggaaagcacggacacgctaagcgtcactttgctggaattgatattatcactgccaagaaacttgaggatattgtgcactctactgacaactgcgatgctccttatgtgaatcgtactcattaccaattgatagatatacccgccgatggatttttcattctgctcactgaaaatggtgacactaaggatgacctcaagcttactactgatgagagtatgctcactt

SEQ ID NO: 41989 - DNA, 498 bp, Glycine max
gggttgtctaaacatggcaacgattttgatgcaattgtgggggtctttgtgagagggccattgatggatgcatacgctgggttgttggaaacaaatattggaatgttgtcaaaaaaatctactatgtctctatacacagcacccgttgtaagacttacacaattccacttttatgttcataacaacataaatggggaacacccgactgctatgaaaattgctgagcgtcctaaagcatccatttgtcggttagggactatttacatgatggatgaatctcttagcgaaagatcaagttctacttcaatggttgtttgaagatgagagggaatatatgctgaagtcttaacacatgaacatgctatactgatagtgacaaatttgctgttcactgacggcatttacaatggctgtacccttaacattcttgggaagaactatattttgcagagtgttaaagaaatgtcaattggtgggggtagggggatctttaaatat

SEQ ID NO: 41990 - DNA, 525 bp, Glycine max
gccagatgacaacagacgggaaaaaggtgatcggtgctcgaagagcgtcctggaggatcctgtctttcattgagcagaaggacagaaacaaacgggcacgagttgaatgcgaagcagatgaaggagtgcatacagaaaggtaaattgcagctagcgcacatcggttatgatgtactgcgagtgattgatgagcacactttcccttcggatgcagctggtaaatacactgtgttttactataagatgaaaggagattattatagcatattgctgaaaagatatatgcaatgacaagaaggaagatgctgatccgtatatgaaagaatatgagactgctaccgctgcagcaaaggctgatttacctgccacacatacaatccgaatgaccctagctgtaaatagctgcgtaacatatgatgagatcttgaactcacctgaaagagcctgtcatctcgcgaaacaagcatgtgaagaatctatcactgagctcgacacctggaatgaggagtcatacaaagatagcac

SEQ ID NO: 41991 - DNA, 278 bp, Glycine max
cggcggatggggactgtcactatgactataactctctaagatgaggagtggataactagagagaagacataaattgaaggtatgcattgcacctataagaagagggtccgtatagactattgttgttaatttcgatggaaccttgtgattcaagggggcctgtctatatgattcacgattgagtacgctacatacctacgggatgtaagatctgagtggaagctctataaaacgcatcggacggaacatgacaagaatgtgaataggaaaatcatacg

SEQ ID NO: 41992 - DNA, 210 bp, Glycine max
gctcacgcttagaagacgacagacggggactctacatatcgggacttctctctttacactcttttcagcacagcacagcacagcacacaaccctttccagacaaccacagaccatgacattaaaacagcgcggacggtctagaggatccaagattacgtacgcgagcatgcaacgatataactcttctattgcggcacctaaattcaatt

SEQ ID NO: 41993 - DNA, 388 bp, Glycine max
tgaaaaaaaacgacagagaggggttttcacaaaataaacaactctaatgcgtgcggggcaattagagacgcaaccatggggcgaaaactcgtgaggtgttatatgcaaattaataacacaccatactccaagtcacggctttgccgctgtgtttcttatcccaagatcacgatttactataatattatgaagaagaatggtgctgatgagtttactttctgggtgcatctgaatagttggcagaatgaaaacgatggtattgaggccctggatgctgatttgataccttgcctcatgttcaaggacaaatttgctggaaagtatgctcttcacttgagactcaaggtgcacccattggatgatattaggatcaacaagatgcttttgt

SEQ ID NO: 41994 - DNA, 396 bp, Glycine max
ctgcgtgcgggtgcacgacgacaacagattggatagcatacaacgcctttgtctctattcatgctactctactcagggtcccaatttacgctctctcgcacgagatcccttaagggatccactagctgacggataaatggtgctggcattcaccaacctgtttacccggcttttaaaccagaatgaaatgccaattctgatggtgggtctcgatgcagctggtcagaccaccatgctatacaagctcaaactcgaagagatcgttactcacaatacctaccattgcgtgcaatgtggagactgtcgaatacaagaacattcatttcactgtctgagatgttggcggccacgacaagagaacggtactcgtggatgcactactatcaaaacacacat

SEQ ID NO: 41995 - DNA, 356 bp, Glycine max
gggtattgatattaagagacacattggtaggggatacatacaaacagagaggacatgttaatagttgatcacgtaaaaaattacaaaagaacatacaaattacataataggaggaagaggagagaaacacacatagtacgagacgtggaaagttatggatattaaacatattataagggcaacgttcaaaaaacttccaacatagagcagaggaatgaattacttaagccttctcccacttgaagggtttgaccacttgccatgtgaaggcagggtctatttttaaaaagtgttcataagcagtattctttaaaaaccagatatttccacccatcttgagatcaaggttgatggaa

SEQ ID NO: 41996 - DNA, 146 bp, Glycine max
aaaaaaccattggaagttttttttttaacttaggcaaaatttcaaaatgccgcatttttgtttggcatggaatttaaaatcccactagaaccttaaagccttctacccgttctaccactctttctacgtgtgctatcggaaggaat

SEQ ID NO: 41997 - DNA, 205 bp, Glycine max
gggttaaataaaaattttcattagcatatagaagaccaaatgaagccactaactacgactaagctttacaaaaaaaatacctaaacgaaaaaacccctaaccctaagagctagtgaactttgtaacagccttggttccttccgaaacagcgtgcttggcaagttccccgggcaggaccaacctgacaggggtctggatcttcctg

SEQ ID NO: 41998 - DNA, 451 bp, Glycine max
  unsure (1)..(451): unsure at all n locations
nncgccacgcgtncgacggtggcaaaagaccaacggagggggacacacaaactcacacaaagagttacaagagaaatcatcatggcgtcagcagcatctgggtttgcgttgtcacttaatgttgcaactgccaccacaaactcaagggtggtcatgttcaacaccaataacaacacttctacgtttgttgtaaaggcttaacatgagcctgcagcagctgaacccgccaccgncacacccccagctgaagctgaagctaaaccaaagccaccacctattggccccaagagaggtgctaaggtgaagattcttaggaaggaatcttactggtacaaacgcaccgattcagtgcgtgctgttgatcaggaccccaacactcgctaccctgttgtggttcgattcaacaaagtcaactatgccaatgtatcaacaaacaactatgctctggatg

SEQ ID NO: 41999 - DNA, 362 bp, Glycine max
tatttttgcggcaagacgaccgacggggagatgggctgcttctcattgttgaagcggaacctttacaagttgcacactggcatacgttgaaatgcgatgtggtagctgctgctatagcgtcggctgactaaaaagaaaacgttcaagaagttcaactttcgagagtgtggatcatcatgcacttctccacatgtacaccgttgaactacataagatgttcagcacctggcctcatagaaagttggacagaggccttaccacaaagcaaatggtcttgatcaagaatctccaataagacaaaaggtaagctccaccatgtgagaagccagaaccggtacgcacccaccttcgtaacatgatta

SEQ ID NO: 42000 - DNA, 377 bp, Glycine max
ggcgagcgaaacaaaaacatatccatgtatttagaggatcaaataaaacaacaaaaattttttaatattcacaaaagtttatcttgcgctccaaaaaagactaataattcccaaacaaaaaactacgcgcaccttcgccccgaatgaaactaataaccttccttgaagtcaatgaccacataaaaggggataggggtaactgtcttcaacattgccccctcgaccatgaaaacaagtttgggaccctgaagctgactcttggtgctgatcttctaaaccttggtcttggccacagccttgaactgattattttttatcttcctaaggcggaacttctcattgcacctgaatggcataacatgctccacacgcacgtg

SEQ ID NO: 42001 - DNA, 408 bp, Glycine max
  unsure (1)..(408): unsure at all n locations
tttntctttttttcgttttttccattaaaccatagcaaggctgtcaacattcggaaggctttctttctcataacacgaccctaatacttcaccaccaatccaagcctctagaaacatctttacctaacaagattttcatttttgctagcccccataaaagaaatcacatataattattaataatgtaacatttatctacaataaaaactggataccaaacctcacatataaaaaaatacctcttttgcacctattgaaaaaccaacttgaaacactttgaacacatctaacctcacagtcttaaaaagtgacccccattgaccaataataacttaatctccttccttcacacggaaagcagctgatatatgatcaggaattttggagggccttttttcctacctctgg

SEQ ID NO: 42002 - DNA, 369 bp, Glycine max
ggcaacaaaatcaagtattaagtttaagtgtggaggatcccaaccaaaacagttataacagaaataggatagaaaccaaagtcataatataaagacacactacaaaaatcagcattttgactagggactaaaattttgcttctcacttgaagcacttagcatacaaaagaggttctacctaaaagggatcataatcctcgatcatgtgattgacgcgctctttttgagttttatcggagatattaaccttggtccagacatagagctccatattatagcattcatcaatcacaaattgtggaattttttggccgaggaagagccagacccccttaaccttaaatggagcctgtgaaccaatcaccagca

SEQ ID NO: 42003 - DNA, 169 bp, Glycine max
gagacctcaggtcaggcggggctacccgctgagtttaagcatatcaataagcggaggaaaaaaaaaaaaagcggacgatctaaaggagcggccgttactataggatccaatcttacgtactcgtgcttgcaacgtgttacctattttatagtgactgctaaatgcaata

SEQ ID NO: 42004 - DNA, 237 bp, Glycine max
aggacaacagatagtgtgtcccaataactcataaacgggaaatgagaatatgcggccgttctaaaggatccaagcttacatccacgttcatgcaacgtcaaagctttcgtatagtgtaacctaaattaaattcactggccatttttttacaacgttttaactggaaaaaccttggcgtaacccacctaattccccttgtaaaacatccccttttcgctacctgttgtattaccaaaa

SEQ ID NO: 42005 - DNA, 338 bp, Glycine max
acggaagacgacagaagggcaagctgtacccaaaaaaaaaaaaaaaaaaaaaaaaaaaaagaggaaagaaaaaaaaaaaaaaaaaaaaacaaaaaaaaaaaaaaaaaaaaaaaaaaaaaagggggccgttttaaaggatcaaagtttatgtacgcttgaatgcgacgtaatagtttttttatagggccacttaaattaatttaattggcggtggttttaaaacgtggtatttggaaaaaccttggggttaccaaatttaatcgctttgaaggaaattcgcttttggccagttggcgtattagcaaaaaggcccgaacgaattgcctttccaaacagtt

SEQ ID NO: 42006 - DNA, 312 bp, Glycine max
gacggtaatttgcgtccatcgaaatgtcgcgctcgtcaacccaaaccctaaatccccgaaatatcatccgaaccgcgtagcaatcttcgtaggttcttcgaattccacgcaagctagtgaaatacaacacgatccgatcctcggttccaggtaatcgaatcgccggcgaggaatcgattgatttcgccggcgaatcgagcgattttaccgagggatccgagttttcgatcgatttcgaaggtttgagtttttgatgttcaaaagaagaagattttgcggattcgaagaaactgcaaaagcgcttgacgacgc

SEQ ID NO: 42007 - DNA, 420 bp, Glycine max
ggttcaaggtctaactaagcgctacctctctgctaaagctcatgttgtatatgtcactgccagtgctgaaccctaactccgcactgctgaacatatcgtgggtactgcacatgaacattaatgccgcgcagggtcttaacgacgtactgataaacaacctgggtgccctaggcaccatcataatgctcgtcggaggtgctccgtgatgtcaagcttaccaaagatggccacactctatcgatagagatgcatattcaaaaccccacggatattatgatcgctagaactggtgtcgctcatgatgacgctagtcgtgatcgcaccacttccactgtcatcatcattggcgcgcttatgaaacaatctgaccgtagcattgatgaaagcatgcacactggcgtgttgattgacgggcttgat

SEQ ID NO: 42008 - DNA, 347 bp, Glycine max
tagggccgattgcttatagaaatgtgtgaaaatagaatcgctcttaaaagccgagtctctaccattgagttagcaaccccaatacaatttagaaaataacgtgggtgttatatccaatcgcaataaaaacaataaaatgaaaagattgaattgtctaataaaatatcagacattcaaaaaaatagaaaaactcaaaatggttgagtcgaattggttcttaacctacaaatggacagggcgaaaagtgaaaaggaagggaaattgaggcggccgctttagaagatccaagcttacctacgcctgcatgcgaactcataacttttctatagtggcacctaaattcaatt

SEQ ID NO: 42009 - DNA, 371 bp, Glycine max
aaaaaaacaagaataagtttctatttaagggggaaaaatagatcatgcttattcattatcttcagatataaatggaattctcatctcattctataaacattacaatgtggtgactagaactcatattcgaagcttctttccaagagttggttcatcatcataatggtggcctccctcaccattcgtgtccttttccatcttctttctggcaaatatcttattgatcttgtgcaaatcattattgagcttctggtccttgttttgctttccggtcttccggccatcttacatcttcacaccgaactggaatgcagcttttggcattgcttccttctgctcattgtaagttgcccattcctcttcagtttcaa

SEQ ID NO: 42010 - DNA, 277 bp, Glycine max
gcaccagaaaaggttctacatcattgtttttgcgtgctgaatgttcatgcataaacaatttcattgttcacaccgtcactcaaagagatccttatctaacattttttattatcgaacataatttgcccgctgacctgatctactctgataccacaacacctttttaaagtacacactatgtgccttaaaacactttcttgataaaaataacgcactattactcatgacgcctttcaagatataataactatcaggattaataacttattctgcactc

SEQ ID NO: 42011 - DNA, 236 bp, Glycine max
atatccaatatatactaatatatgcgaatatatgctaatcgaatatctatctatatctatctacccatatctattttaattttgggtggttgaatttaatggtttcctaagtgaattttttggggccgcatttatgtgccgcaagcttaacgaaaaggactattttgtaaaaaactggtcaatgatggccttccatggattcacctacataagccgcagcttaagtagcaaaaatg

SEQ ID NO: 42012 - DNA, 257 bp, Glycine max
  unsure (1)..(257): unsure at all n locations
ctacacacacnnntnnctttaaagaaactttttaattcaacacgcacccccccctttttctaaggtcattacacacccatttcacatttcattctttttcaaaactattgcgaaaatccaacttccaacataacacaaaaatcatctccatcttaaaaccccccacaaatacacaacaccaaatacacagtttactccttctagattttttaatcatcgagggtccttccatcctctagctgttttccagcacaaat

SEQ ID NO: 42013 - DNA, 443 bp, Glycine max
gaggccttcaaaaggggcctcactcacttcagtgtgaggttttcttattcgcttcctctctctctactctgagacacaaaggaaaattataagaaattatggctggttattcaaaagcttcagctctttggatcctttatcttctctttggcttgtttcgcgcttatgaaatttcggctggaggtaagaccgatgcatggaatgttacagcctctgaatcagattcactcaaccaatgggcagaaaagcctcgtttacaagttggagactatcttgtttggaaatatgatggacgaaaagactcagtgttgcaagtgagcaaagagaactatgtgaatcgcagcatcttcaaccccatcaaggagtacaatgatgataccacacatgttcagcttgagcatgcagcgccattctacttcatcagtggggcacagggtcactga

SEQ ID NO: 42014 - DNA, 132 bp, Glycine max
  unsure (1)..(132): unsure at all n locations
cgacaaacatgtgtcncanaattttcnagaaagagggggaaataaaagcgggcgctctagaggattcaaacttacgtacgcgtgcctgcgaagtcataactcttttattggggcacctaaattcaattaaat

SEQ ID NO: 42015 - DNA, 436 bp, Glycine max
gcatcgagagtgaaaaagtgtactacgggtaataaaattcaagttatgcctgggaaagaaacaaagaaattgaaaacatgagagaaatatgaagtccaacagaatagatggagagggtgggcatggaaaaatgttggtaactttacaaagtgtagaagtaaagaatgaatgggctgggagagtgtcacctttcctcaaagtcgacatcaataatgtcggggtctgacttattagatttggagttggttctacctttgggttgccacacaatgttgccacagcctgtacatcggattatttgattcttgtaaccaccaaattgcatcttgcaagccggacaagtccccttaataactaaggtgttggccaaagttccaattagaagaagtcctgcaaatggaagtacccatgttgcgattatcaggatccggaaaag

SEQ ID NO: 42016 - DNA, 448 bp, Glycine max
caataggaatattggtcttattacacgaaacttgaaaaaacacagtaaacattgtaattgaacatattcaagctgcttttacataagccaaactaataaaacagtaaccacacaattcttaaaaacatgaatccaaagcagatatgagctgagtagtgttcaattaggatatgagagagatgccagcagccaacaagtcatttgacaaaaccttgtttgcagcatcagagggatgaaaaccatcccaaaatacgtattcagatgcattggcacatgttcctatggacttctgattgcacaatacaaatgtttttagcaagcctgttccacagcaagccttccttgcttaaaaaaatccattttcagaaggtttagtgacaaggtcatagagaggtgtggtagatatcaaggatgaccaatttgagacccgaaagagatttttgcaagc

SEQ ID NO: 42017 - DNA, 357 bp, Glycine max
gctcttcttgtttatgtgatataacagaaacaaagtaattctatttttcaatgggggagagatggctgagtggcctaaaccgtcggttggctattccgtggtccaaattttggacccgggggtccaattcccttttttcccgttgataatttgatatttttggttgaacttctttgttttccttgtttgtttgatttttttttatttactagttaaagatgttaaaataaagaaaatcctaaaaatattttaaaatccagcacaagcaagaaaaacacagaatccacctttttcttattcttcacgccctgaattacgtcctggatcgttagataggaatccgaagatgaaaagaga

SEQ ID NO: 42018 - DNA, 513 bp, Glycine max
  unsure (1)..(513): unsure at all n locations
ggcagaactgatgattttatatacactaaactacaacatgtaaagggcatatgcccaaattaaatggaagacagataatttaagagaaaaagaggaaaggggaaaaaagaagagtgagaagagaataaggatggacataagaaccaccaacaaacaaggatgcctggtttcttcatatgcattcttgctgccctacaatgttgctcagtgacaaaatgtgttaatggaggacttccctctccctacttctcctaagtttgggaaacaggcgaaacagcaccttctgaactacgtgctgcttggttggccgacttatccgtgctgcgaacattgtatctttcatataccttgtctcggttctctgaccaccaggtttctgcttggtgctccccaaatctccttcggctgaagcgcactcgcttcagatctctcgttccatcactcaatgccacaagtgttatgtagacaccaggttcatactgntcaatccattctgcctcaacttgattacta

SEQ ID NO: 42019 - DNA, 416 bp, Glycine max
gagcgaaacagagagtgatttcagtgagtgatcggtgttcacttgatctcatcataatcgtcagcgtcaattgaagaagatgccgatcagaaacatcgccgtcggaaggcctgaagaggcgactcaccccgacacgttgaaggcggctttggctgagttcatctcaaccttcatcttcgtgttcgccggctcaggctccggcatcgcctacaacaagctcaccgacaacggcgctgccacccctgccggcctcatctccgcctccatcgcccatgcattcgccctcttcgtcgccgtctccgtcggcgccaacatctccggcggccacgtcaaccccgccgtcaccttcggcgccttcgtcggcggcaacatcaccttcctccgcggcatcgtctacgtcatcgcccagctcctcg

SEQ ID NO: 42020 - DNA, 469 bp, Glycine max
ggggggcaacaaaacaaggtttaccaaagaaaacattgaatttacttcaataacaagtgtacatcacccaacaatacattataaaacggatatttttagataggaaaactctgcagaactatcctattagttcacttggttgtggagtcatcaacaggatgccagtatctgttgaaaaaccacatagagtcagctgtaacagcatattcatcttcatttcggtgccagctatagtgagcatgtgttctgttctttatttccaaaatggcatgcccaaaacttgcttccctgtatgcagaatactcgggctgtggatttgtcatgttgcttgccaagccttcaatgttccctccatcaccaatgtttatgtatacaggagctgactggtccttcaaaggcctgcatcgaccattggtaatgttgtatccagtgttggagattcgttcacttcgttcataggcatggacgt

SEQ ID NO: 42021 - DNA, 532 bp, Glycine max
  unsure (1)..(532): unsure at all n locations
ggctaaaattttaattctctgcacatatatattatattaataattgtacaagaaaccgagaaacctagtcatactgccgatgttataaaataaaatatattataaataataacacgcgtactatgttgtaagcaacaagaaggtttatactaaaacaaaaaaataaaatgaaccctttttctatttgcgatgcggggtgctaatgattaatttgcatatgatttcactgctgtgtctgagagttcaagacaagttcctctcacgcattagagattctatctttccaacatcttcaggagtgtcaacaccatgagcctcatgaccaacttttatcaccttcatcttgtagccattctcaaggactttaagctgctccaaatcctcctcgagttgcaacggagtaagttgaagatcagggtatatattcagaaactttgcatcgtagctctgaatcccaagatgaagcaaatacgggaactgttgattgaccattcctgacttgttgaatgggattaatcctcgngaaaaataa

SEQ ID NO: 42022 - DNA, 370 bp, Glycine max
gacctcacggagttgcagaaagaaaagaccatcaaagtgtcacttaagccttatacggtttagggtttcacgattttgacccaaccttggacgcatcgaaaccttaagtttcggatcaagactgagcaatctggtggctagaacctttgatcttagagagtcaagcatcatgtctgaattacacgatcatgttactactgccttcgatccttttgctgatgcaaatgctgatgactcgactgctgaatcaaaggagtatgttcatattcgcgtacagaatccaaatggaaggaaaagcctgacaaccgggcaaggattgcaaaaagaattcagctatgacacgatacttctagatgttaagaaagagttc

SEQ ID NO: 42023 - DNA, 351 bp, Glycine max
ccttaacttgaattgaaccgtgcccttgctatggcattgcatataggagtgcagagctgaagcatcgaaatggggtgatattcactaccctggatgggtgctccggtactgtcctgtctgatttcatctggcgaggcataatatgtgtagtgtcaagaccgtaacgctccactgaatgacaaaatcattgacttgtcgaagcgaatgtctatcaaagataagataggtcacacgacacagattgaaaggagcttcgctacatctgatgagcagaacaagtacttcattggtagtctgctcagtgggggagggagcgttcacgcaacaaaggcatgtgatgcgacctggcat

SEQ ID NO: 42024 - DNA, 225 bp, Glycine max
aaagaaaataaatataaaattcaattgctcccaaaagatgccgttccgttacaccgcgaatatttaaaatatacatctaataaaccctaaattctcagaaacccactcatgagctagtgaactttgtgacagccttggtgccttcagagacagcgtgcttggcgagctcgccggggagaacaagacgaacggcggtctggatctcgcgagaggtgatggtaggct

SEQ ID NO: 42025 - DNA, 377 bp, Glycine max
gggggcacaaagttctcctacattcactcatgtccctagtgaacagagtatgccccgttctcaagcatttaagaagctgatgcattcgattccacttgctacactatcagcattcttattattcacataaaacatttagctcggctaccccagctatattatttttaggacccatgcttcacttgctctagagaatcatgtgattcttgggggccaatgcagcacatgccctaattatgtttatcaggattgcacgctgttttgacaatgcatacaccactggtgcacccggtggaaccagaggaaccttggggaggtagctgaggatggtaacgactgggtggaatgagtggaatgtgccctaattttcagcttta

SEQ ID NO: 42026 - DNA, 278 bp, Glycine max
  unsure (1)..(278): unsure at all n locations
nncacgagataaaatataatgcatttattctcaacataagggatttcgggctgagaatgccttaccagtaacaacaaactctaccactaaacttccatgaaacttgggccacccaactatacacttatcttggtcacccttggttaaaatggtatccgatactacaccaagaatttccgaacgtctgccaattctttccatgtcaataccgttgtcacatctgacgccagagactcctttattagtgcattgctatacaagattgtttgcaaacccaa

SEQ ID NO: 42027 - DNA, 300 bp, Glycine max
gtttctaccattgggttcaacgtggctactgtggtggacaagaacatttttttcactgtctgggttgttggctgccacgacaagattcgtcccttgtggaagcactgctttcaaaatacacatggtctgatttttgttgtttacaccaattacatggacagagttttttcttgtcagatattagctgcacattatgttgaatgacgatgaacttagagatgtaatatttcttttatttagctacaaacaagatacttccaatacaatgaattctgattaaaatacttacaagatgggact

SEQ ID NO: 42028 - DNA, 379 bp, Glycine max
ggttctgtgctactttccattcgatcaccgacgggaatgggtggaccgccttcaggctccaaaacatcactcacataccaacgaaggctggcattgttggtaaagtcagtcaccgtaatggagccagcctgcgaaagcagattaagaaaatggaaaaaccccagcacagcccatcttaatgtgaattttgcacaaagtatgctgtgcagatgaaagctttacgaatatggcgatgcaaggactgctgtcaaacaaaagcacacgctgcatatactatgaataccgcacgtgctgtgaccgttcagagcaccatctggaggttttacgcgcaaactgacagttgaactttctagtgatgttatcaattactattagactt

SEQ ID NO: 42029 - DNA, 352 bp, Glycine max
cgatcctgtggattctattcttcaagatacacacggctcgtacgaagcgcaccgctcgtaagtgcacaagaggaaaggcttctctgaagcagcttgcaaccaaaggtgaacgtaagtctgtaccaactactgttggcgtgaaaaacccccaccgttatcaaactggtaccgctgctcttagtgagattaagaaataccagaagagtaccgagcttttgatccacaagctgcccttacagaggatgaaccgtgaaattgctcatgactttaagactgatatgcttttccagagccaccccacgcttgcatttcaagaagctgatgaggcataccttattaggctctttgatga

SEQ ID NO: 42030 - DNA, 363 bp, Glycine max
ggacaaagaaaagctcatccttgagttaaaaaatggcaagcaaataattacatggctctctaaatccccatacttggctggcaaggccagaaaagctgggcccttctgccggatccaggtttacgggcgcgcatgaggaacaccgtaacctttcaagtgtgctaccgaaagccaatggtacggcccagatcgaacaacgtactagggggcaaactctggcgagcccccatcctacctaactggtgagttaccccacttctaccggtgggacactgatggaataggcgcaaacccataaaccttccccaaaaaccccgaacttgaagggatacagtgcaggcccctcatgctcggaatcaaggg

SEQ ID NO: 42031 - DNA, 214 bp, Glycine max
gttcccaccattgggttcaacgtggaggctgtggagtacaagaacatttttttcactgtctgggatgttggtggccacgacaagatttgttcccttgtgaaggaactacttcgaaattccacagggcctaatttttgtggttgccaccatttccaggaccagatttgttctggccagagataagttgccctgcttgttcattgcggaggaactg

SEQ ID NO: 42032 - DNA, 274 bp, Glycine max
atatgatatttgtgatggtatctttattgaatacgggtgccctgtaaaagcagatttagagatacatgctactcattatcacccaacccccgatggttatgtagaataccctgtttcctgtgtcacaggcgattgtaacatacaatagagggcaaaatgtctgcaattatctaaatgttgcatcaatatgtgtatttgttgcgacacgctcgactatcgtactcagggtaccaagattgcttctgaaggactcaggcgtagagtgattgaggtc

SEQ ID NO: 42033 - DNA, 279 bp, Glycine max
cgattctttgaagtgtattcttcgagaatcacacggctcgttcctagcacaccgctgttaagttcgcaggaagaaaggttcctctcatgcagcttaccaccaaagctgaacataagtttgccccaactactgttggtgtgcagaacccacaccgttattgacctggtaccgctgctcttactgcgactaagcaatacctgaagagtacccgccttttgctgcggcagctgcccttacagaggctggaccgtgaaattgctcttgactttaagactgatc

SEQ ID NO: 42034 - DNA, 375 bp, Glycine max
atggggcgaaaacacggaaaggacgaattatcctttccgtaacaactcccggggataaaacaccttcataggctggaattacggaccggcgcctgctaggcaaccaacacctcttgtattgagcaggattaaagcgtggaataccttggatcctattgccagcagagggaaattaggtccacttgctatttcattaaaggtacggagcaccaacttaccaccgaggggtctgaacagcccaatgctggatggaactgacatcaaatgtatggcgcttgctataagttatccagtgcacaaaccttgctggcgatgggagctaaaccttcgaccaaagcgcgtggacacgcgattttttataaatggacgctggtg

SEQ ID NO: 42035 - DNA, 348 bp, Glycine max
gacgagagaaggcgacatttattccacatcgagtgctcactctgtcttatactagggttcgctctcatggacacaagctatcgtgcacaggcttactaatcgcaagcgccattattatgctaccaaatccaaccaactgcgcgttgttaagacccctggtgggaagtagaagcaccagaccactaagatgagagcagtggacctaattgccctgtcactggctagaggatccaacgaatatgccacttaagacctgctttatacacaagggctaaatcggctaggaaaccgagaaccgcactgcaaccctacataggtgtcttatgcggtggagctgacacacaaagg

SEQ ID NO: 42036 - DNA, 346 bp, Glycine max
aaatgggacccccaaaccctgctgggtgggcggaatagagtatccaatcatacttactgctgcacgcagcatattttcttttataccgtgacacctaaaatcataacccttgccgtggtgttacaacgcactgtcagggaaaacccagtcggtaccaggacaaggaaggcatccctccggaccatcagcgcctcatcttcgccggaaagcagctggaggatcattggaagctcttacattcaaggcgctttgcatgcagttggcacagtcttatctacaatttataaatcacacataggatgttagacaactatgtaactttaggttacttaattagtttacatac

SEQ ID NO: 42037 - DNA, 343 bp, Glycine max
  unsure (1)..(343): unsure at all n locations
gcttggatcctctagagcgggcggttttntttttttttttttttttttttttttcaaaacttaaccaagggtttaaagtttaaaaattccgttttttagggaatattcctttgggtcgggatgctcctataccgaaccaaatgtcatctgcggttcctctcaaaaaaatggtgtttgcttatgtacacaaaacagggggctggaatttattaacattttcaaaaaggggtcctgtttataatcctgaaagtgccctaacctttgggataactccctatgtcttgttggtccctgtcctaaccattgggcatccgcggaaccaataccattggggttatatttt

SEQ ID NO: 42038 - DNA, 335 bp, Glycine max
gagctttcaattgacgcagttgagggagagcccttccactgcggggactcttcaatgggtgcctacaagattgtttaagatctatggcacaagaatcagcctgatgtcgtgcgcttattgcactgactgaggcgctgtgaatgtaggtatcaatctttcattgttcgctgatatgtctacccccctgcaaggttcgtctttgtcttcaagctaaccacggactatgcgatttaccgtgttcgtgctatgaggggtgtcctaaagaaaccatttcccatatgtattgcctattgcaagcgcaccaaccactgcggtacccaactgaaatttcaccg

SEQ ID NO: 42039 - DNA, 418 bp, Glycine max
  unsure (1)..(418): unsure at all n locations
gcggggaccctctagcgcggccgctttttttttttttttttttttttttntcccactaaggaaacaaccaagcgatttcacaaatgggggatgcgcactggcaggataacgtttcttcctttttagccgacctccacaactgtactttttcgttaacccaaaccggaataaaaaactcctccacaatgttcattatcatgttgaaaaacacagtctcttgttctgaaccctactcataacaatacaaattgatatggagcgagctttcactccatgagcctagctcatgccgcttgactccggcctgtaaagaaaacctagcacccaagtaagactcgaggtctggaacattctcaatggcctttaacagagtagtgtccacggatttttggtcatctatcttttctgggggaagcac

SEQ ID NO: 42040 - DNA, 307 bp, Glycine max
  unsure (1)..(307): unsure at all n locations
cgtgtgagaaaacaccacagaggggcgcccccgccttcatccctaacgcgtgcataggcanagtcaaaaacaaagacgcatcccttgggcggagacccgggaggggttttatgcgaattaagaacaagccataccccaagtcacgtttctgccgtggtgttcctgatcccaagatcaggatttatgatgttggtatgaacaagaagggtgttgatgagcttcctttctgtgtccatcttgttagctgggagaaggaaaatgtttcaagtgaggccctggaagctgctcgcattgcttgcaacaagtt

SEQ ID NO: 42041 - DNA, 224 bp, Glycine max
cttccaccggttggaaaaaaacaaaaaaaggggccggtcaattccaatatattccattctctctgggtatttccctacctctcccttcaaaatgcaaatctttgtcaagaaccttaccggcaagaccattacccttgagggggaaagctcttacaccatcgacaacgtcaagggcaagatccaagacaaggaagggattcccccggaacaacaacgtctcattt

SEQ ID NO: 42042 - DNA, 193 bp, Glycine max
ggctccaaacctgtctgtatcacttcccatttcaaaacccaccaatccatcaccgcgatccacaccaaagatccaagcttacatacacatgcatgcgcggccgttctagaggaaccaagctaacttacgcgtgcatgctaccccatagctctcatatagtgtcaccgaaataaaattgactggccgcaactta

SEQ ID NO: 42043 - DNA, 370 bp, Glycine max
gcaacaattcaaggacagggcgaggaacgggtcattaactctttaatcagtgcataaacaaagcctaaactgcaacttcttacctcctcatacccaaaatattcctgcaatatttaaaagccgatgatggccctcaaactgagaaaagtccagaaagtgtgcgaaatggcaaattctaatcttacatttataagagagatgttacttttcccttcttgtcaccacctatctaaaagtgctttcacctttttatagcctgctgatagacatgcttgcatccttggcacttgatcctcaacacaattttaatggaggttttcggctttttgtggaaaacgggcttgaaacggccaccgtaaccggactgttt

SEQ ID NO: 42044 - DNA, 392 bp, Glycine max
ggtaagaaatcaaaataaaaattaattatatattaaacatctccaacatatttaattcttaacattatttaatatatcttctccactaaatataattggtagacatagacatcatgaagcctcattaacttcaacaggatctacgagccacaacttcattctcctctttgttataccgtcttgtcttccaatgccatctccacattggtatgtatatcgagccgttcgaccaaggtcaatcgcaacttgtatgacagatttggagagtgtagagcccataacttggcctttatttaagtactgccattctttatcaatcaaagtcttgaagtattgatggactttttcttctgaaagaccgttttcgtgcatgtagcttgcaattgaagttg

SEQ ID NO: 42045 - DNA, 344 bp, Glycine max
gggcacgaaggaatggctattgacgttgaggttgctgagcgtggctccttgtctgggaaggactaccaagaccctgcaacagcacctctcattgatgctgaggagctcacaaagtggagcgtccacagggctcatattaggtgagtcattgccaccttgctcttcctttacattactgtgctcacagcaatatggtacaagcaccagacggatcatgctgatgcgtgtggtggagctggcattctaagcattgcatgggcctttggtggcatgatcttcatccttgtctactgcactgcttggatttcaggaggtgacattatcccaggagagacatttgggct

SEQ ID NO: 42046 - DNA, 331 bp, Glycine max
gggccattggcaacatgcttgtgaaggtagctactctgctcacttacaggctgcacaagaacattcgaccactggcgatattcttgatgaccaatgctggagccagtgtgaaagataccggccgggttgttactcttggaccacgggcagagccatgccatatcccacataagccggctcgcaatgtattatattttttgcctctggggatacatcttcgaggatcggacgggacgatcgctgatacaacaatgctgctcaaatgcagaacagaactccttctgccccaatatatttatcggcgaaaaacaatggtgcgccctcagcaaga

SEQ ID NO: 42047 - DNA, 275 bp, Glycine max
gagacagctttcacctagactcccctctgtggtttattcaacacaatctacctcgcaatcaatgacgaacggaagccaaacaactcctactgcatgaaccaggagtgcttgcagcacacactccatacagtctgccaattcatgtacggcggggacagccttaatgatcaaggatggcacccatctgaccgaaaacagaccggtatctgagggcagaccaagcaacgatttctcatacaggtgggaaccacccacaaaattgagttggtgctccc

SEQ ID NO: 42048 - DNA, 196 bp, Glycine max
gagacctcaggtcaggcggggctacccgctgagtttaagcatatcaataagcggagcaaaaaaaaaaaaaaaaaaaaaaaaaaaaagggggcggttttaaagaaccaaacttaactacccctgcattccaaggtataacttttttattggggcaactaaaatcaaattaatgggcggcggtttaaaaacttgggaa

SEQ ID NO: 42049 - DNA, 477 bp, Glycine max
taatgtgtgtatctgcatcatttttactggataatgagaaattgtttcttacaaccgttttgcttctctacctctatgtcctcaactgctagctctgattttatgcacagcgggggctcacaagtcttcttattcttctcggaatgccaccaaaattggccaaggctaccgtcttgtctccattgatgagacccctgacggtggtcctatatggatcctgcaagttaagcaaaaaaccaaaacctatggccctgacattacccttcttaggctctatgaaaagcatgaaacatataaccctttgagggtacacataaccgattcacaaaagcgcaggcggtaaggagcctataaccttttgccaatggagcaaccaccacatttgtttcaaagcattgccaaatacaagaagaaccccacttcagtctaccactattctggttaaaaaactctgttaactacacactaaaccctttt

SEQ ID NO: 42050 - DNA, 426 bp, Glycine max
cgaaaaacaacttttaaaccagggacttcattgcatgtgtcatccctgcataaagttcaacttgggtccattataagttttggttttaaccttttccaaaatcaaccctttccaataccaaagaccaacctgcccggcttttacttaaaaacacaaccaaaaagattttattttacccccaaatacaatccctaccacctttttttattctacaactgaatgccactaaactgttatcactcattcattataggtttgttctcgccggcttagggttcctgctcttttggcttgtgttccccccatttccttttatcaaaggagcctcccttttggctgaggaaggttcggaaaaaaggcaagttaccgtcggaaatcattggcgtttactgatgccaaaaataaaaccctagttctagttttttt

SEQ ID NO: 42051 - DNA, 484 bp, Glycine max
gaggtttctgtttttctttcacagattgaacccaccgcgttttggagagagagacatcgtattggggaggaggcctgcaaggtgttaccggcagataaaaaacaagccatacccctaatcacgtttctgccgtggtgttcctgatcctaagatcagaatttatgatgttggtatgaataagaaaggtgttgatgagtatcccttctgcgttcatatgcttagctgggacaaagaaaatgttttaagtgaaacattggaatctgctactattgcattcaacaaatatatggctaaatttgctgttaaggatactttttttcccacttttttgccaaagaaaaaaaattttttttttcgcaaagggcccaaaaaaagtacatccattccctgttcttaggattaacaaaatgcttttatgtgcttgagctgatacgcttcagacttgaatgagaagtgcatttggaaagccacagggaacatgttc

SEQ ID NO: 42052 - DNA, 415 bp, Glycine max
  unsure (1)..(415): unsure at all n locations
ggagggttattggacacattcttcagcgactgcgtttttggatcggaacctcttctgcggcgtagcaatgggacactccaacgtttggaactctcacccaaaaaactacggtcctggttctcgcacttgccgtgtgtgtgggaatccacatggactgatcaggaagtatggccttatgtgctgcaagcagtgcttccgtagcaatgccaaggaaattggcttcatcaagtatcgctaaaagagcagttgtcaactacggaccaatattgtgttctggcactaagatgttttgaggatgtntnattgnttttnttggaaaaaagggnaaaaaaaaaaacccctttttttttgagacttctttttatctataatatanacgtatttgggactaaaatctttatataaatgtttgacc

SEQ ID NO: 42053 - DNA, 394 bp, Glycine max
  unsure (1)..(394): unsure at all n locations
aatgagggttgtccctcacttggaaaaaaaaaaaaaaaaaaaaaaaaaaaaaagcggcccacgcgttcgcccacgcgttcggagacacaaaacaagcccgctgcattgctccacaaatctgtgatgaagaaggagttcaggaggatggcaaaagctgttgaaaaccaggtggccaaaaattactacaggcctgatctcaagaaagctgcccttgcaaggttgagtgctgttcacagaagcctcaaagttgccaaagtcttggggtttggtttcaaanaaaggggaaaaaaaggggaaaaaggaggggggaaaaaaaaatagacagggcgtgagagtcgctggtaggaagtgaaagggaattgagaaaaaatctgctgttcaatctttcgttttg

SEQ ID NO: 42054 - DNA, 495 bp, Glycine max
  unsure (1)..(495): unsure at all n locations
gattcaccacaaccctctctctatattccattgccacccagttttgaatatatttttattccttctttgtttcttcactttcttccatacacataaccatgtcttctcagactgttgtcctcaaagttggtatgtcatgtcaagggtgtgctggagcagtgaacagggttttgggaaaaatggaaggtgttgagtcatttgacattgatctgaaggagcagaaggtgacagtgaaaggaaatgtggagccagatgaagttctgcaagccgtttccaaatctgggaagaagactgcattctgggtggatgaaagccanccccaacccaaaattttccctttttaaaaaaaaaaaaaaaaaaaacccccagcctttaaaagtgcacctgtgctcaaaaacaagccttcaaagctgcaactgtgcctcagctgagcctgaaaacaagccttcagaagctgcaattgttgattcagctgagcctgaaaacaagccttca

SEQ ID NO: 42055 - DNA, 463 bp, Glycine max
  unsure (1)..(463): unsure at all n locations
gacatcacatttcgttgcgcctttgatctctgtccccgctgcgtctctcgtaatcatgcctaagcaaatccacgagattaaggatttccttctcactgccagaaggaaggatgcgaggtcagtgaagatcaagaggagcagagatgtggttaagttcaaggtcagatgctccaagtacctctacacactttgtgtgtttgacccagagaaagctgataaattgaagcaatctcttcctccaggtttgagtgttcaagacctgtaaaggtactgggcgagagatcaagaagaagcaattcattgattctactgaaggtnttaaggaatatttcccttttccctttggggtttttaaaaaaggattttttttggaagcttgagattttgcagtggtctttatatagattatgctanacaggttgatttatctgtttgaaaatgaaactgattatgcctaatgagt

SEQ ID NO: 42056 - DNA, 529 bp, Glycine max
  unsure (1)..(529): unsure at all n locations
gttcactttcttccaacctctaacctacctctttttcttctctctcaacaacttcaccttcttcctcctcgatcatgtctcacttcaagggcaagtaccatgatgagcttatcgccaatgctgcgtacattggcactcctggaaagggtattcttgctgctgatgagtcaacagggacaattggcaagcgtttggccagcatcagtgtagagaacattgaatccaacaggcgagctcttagggagctgcttttcactgctcctggtgttcttcaatatctcagtggtgtcatcctctttgaggaaacccttcttaaccccaggnaaggccccaaaccccaaagggcccccttttttgggccccccaagcaagccctttgtgaatgtctcgaacgaagctggtgtgcttcctggcatcaaggttgacaagggcacagtcgagcttgctggaactaatggagaaaccaccactcagggtctagatggccttggtcagcgttgtgccaagtactacgaagctggtgcacgtt

SEQ ID NO: 42057 - DNA, 449 bp, Glycine max
  unsure (1)..(449): unsure at all n locations
gactcactcatacaatagagaccagcttttgcttctttgtgaacatggagatgaggaaatcatgtggcttcttcttcttgctcctcctccttgtctttgcttcccaggtggtggtgcagacggagggaagagtgtgtgagtcacaaagccacgggttccatggtttgtgtaatagagaccacaactgtgctttggtctgcaggaacgaaggtttctccggtggcaggtgcaaaggcttccgccgccgctgcttttgcaccaggatttgttgagatctcatcaaacactactcttgccatgcaaaaaattttaaaatttaanaanaaattttcccaaattttaaaaaggggnccccttggcaaataatgcattactttatcattgggactactacaaacactatatggcatggatgttcttgcttgcttgtattttacttacttgtaggt

SEQ ID NO: 42058 - DNA, 464 bp, Glycine max
ctgttgttacaagacgacaacagaaggtggtatacgtcggagcaacagaaatcaagcttgtccacccttgattatcaaaactgaactatgccgattcgcgggtgctataatctatccaaggtaacgtatcatatcatgctcatggtgattcttatgatagcctgatcgataactagtaatgtgagaggtattttaacaccaggttgatgccatcaaacctgacctgcactacgttatacagtaagaaacatatcaaggacattgctcaagaagctgtgcagaaaggaagacgtgctgacaaatatctttactgttaagcggtttttccaatttttttgggtaaaaaaaatgggtgtttggggccccccccaatgtggaagttatccaaaaaagaaatatgataagccggaagttcgagatgcaaatagggaagctgtcctttttgaaattaaagagaggaacat

SEQ ID NO: 42059 - DNA, 460 bp, Glycine max
  unsure (1)..(460): unsure at all n locations
gaccaatcaatcgttcattcattccaaggagggatctctctctctctctctttctctcctctcacacccccaaaagcttcttctgttccgtgcaggcaatttttctttggtttggttgcatcttttgatctgatcaacaagtttgagaattcagtttgggaaaggccattcctctttagtacaaaacagattgagggtgcctttgtgctgatggccactaatgaaaatcttccaccaaatgtaattaagcaacttgccaaggagttgaaaagtcttgatgaatcccctcctgagggcattaaggttgtggttaaaaaattggaattgggnaattttggggaaaaaattnntttnnttaantttttttttaccccgacaattattttctgacannttgaaggcccagcttggaacctccttatgaagaattggagttttcccgaaatgaaagncctgttgc

SEQ ID NO: 42060 - DNA, 429 bp, Glycine max
gaaattaaatcgttcaacactggaactctttgaggtaatatataaagagacagagagagagagacagacaataagaacaaagatgcaatcttcaaaggagaagctgaaaaacatgaccagtgctgccaaggagcaagtcgacatctataaagcaaaaatagacgagaaggtcagcttttccatctctatacatccatatatttttgttccattatacaatgattcatttggggcgtagctaggcatcaatatcatgaaggtagaatcgtgatatatatttatatatgtatgtaacctatgcaacaacgccctgtagtacgggggtgtttcttaaaattttggagttagcccaaaacaaaaaaaaaccggcgttgttaaaattaatattatataattgacgtgtgcaattggaagcaaaaggagaatata

SEQ ID NO: 42061 - DNA, 259 bp, Glycine max
  unsure (1)..(259): unsure at all n locations
acgcgtacgcaagctgggatcctctagagcgtgccgctttttnntttttttttttttttttttttccaatcggaccaatccccttactcgacttcttatatttaaagtgattagtgtatctacttcaacgatactattgttccgtaccattatggaagaagattctggtaaaatatgcacttcctcgggaatgaaaaaaaattgatctactttaatttggtattttgtcttaaattctttaactccttgatactcaatt

SEQ ID NO: 42062 - DNA, 379 bp, Glycine max
cgtgtacctctctacattaacagcaaggtagtctctattgctttgccagtacatcttgcattcactgacacgtagaagaggttttctgactgagttccactttgctggggatttgaatcacactaaccctggcaggctggttaccacctcccatctcaggaacaaaaagagcaataattggatcagttggagaccagcagaaatccattatattttcaaccttcaaagatttcttgtcaacgagagaaaaggtctctgtctcataaacagagagatatttttcccatccttcaaagtattatatctcttcacactccatttaaacggcctaaactcaggcaccccacacctccatgaaatatagacttcttaagcccta

SEQ ID NO: 42063 - DNA, 146 bp, Glycine max
atttaagcttatacttgccgaaacacaatgtgagacaacaaaaagggaccaaacaaataaacgcggccgttctataggatccaagcttacacacgcgtgcttgctacgttatatctcttttatagtgtgacctaaattcaagttaa

SEQ ID NO: 42064 - DNA, 337 bp, Glycine max
ggagccaaacagagagtgatttcagtgagcgatcggcgctcactcgatctcatcataatcgccagcatcaattgaaaaacatgccgatcacatacatctccgtcggacggcctaaacaggcgactcacccccacacgttgcaggcggctctgactgaattcatatcaaccttcatcttcgcgttcgccgactcacgctcctgcattacctacaactagctcaccgacgacctcgctgccacccctgcctgacttatgtccgcctccatcatgcatgcattctccctgttcgtcgccgtctccgtccgcacctacatctccggcaggcacatcaaccc

SEQ ID NO: 42065 - DNA, 343 bp, Glycine max
ggtgtgagttgagtctgtgatgataatgatgatgaggatgtgttccatgtggatgtggggtgtccttgtggccattgctggtgcccttttagtcctaagatctatcctcaatctactatagagctcattggaaagaggtcatttatttcaatgtcttatgaagaacataagcgccttatgcgtttgacatcctcttcaatcaatggcatggaagcactgtccctctacttgacatatattgaaaaaaatgtgaaatcttccttggagaaatgggccaacatgggacaaattgagttcttaactgagatcaggaagcttactttcaaaatcattatgcatattt

SEQ ID NO: 42066 - DNA, 213 bp, Glycine max
agggaggatcgttcccaggcacattcaacttgcggtttggagcgaccaagagtttagccagctgattggatcttttaccatttcccacgggggtgttctggctaacattcaccaaaatttgttgcccaaaaaagtcgcttgccagggggaaacccaaatttgatctgctagtcaggagttttaaatataaaagccttggtttcccatgtagtt

SEQ ID NO: 42067 - DNA, 343 bp, Glycine max
  unsure (1)..(343): unsure at all n locations
agaagacgacgcagaacgtattgattcgataagaccatctctgccgctggcgacacgaaggtgagggagtcatgtgcgttcgtcaacgggctactacgcnttgtctttgcttgccaggtggtggtgcagacagacggagagtcgtgagtcacaccccacggctccaagtttgagtaaagataccacacctgtgctgtgatctggaagaacgaacgtttcgccatgggcacgtacaaaggcttgctgcatcgctacttttgcaccaggatctgttgagatctcatcaaacactactctagccatgctaattaataaatcgcagcgaggccaaatgaattgcatc

SEQ ID NO: 42068 - DNA, 190 bp, Glycine max
gttctagatgatacattatttactcctccttgctacgacataattcttctattatatcacctaaaataaataaactagccgccgttttacaacaacgtgactactaaaaaaatgccgtcaccaaacttaataatcttgttgcacatcatccttttttcagctggtgtaataataaaaaagaggccaccaa

SEQ ID NO: 42069 - DNA, 432 bp, Glycine max
gcacgctgcataagctagagcggccgagagcggccgtttttttttttttttttttttggggaacaaacagtagtaacattaatgggacaatagagttcaacacaaaccaaacttattttcaaaggtcattacagacccattacacatcacatttcttcttaaaatgtttgggaaaatccaacatcgaacatcacacagaaatcagctccagcttaaaaccccccacgaagacgcaacaccaagtgcagagttgactccttctggatgttgtagtcagcgagggtccttccatcctctagctgtttgccagcaaaaataaccctctgctggtccggtgggattccttccttgtcctggatcttcgccttcacattgtcaatggtgtcggagctctccacctcgagggtaatagtcttacccgtaagggtcttg

SEQ ID NO: 42070 - DNA, 425 bp, Glycine max
gcaccaaatgtgtttctggatattaagacgaaactgaaaatttatttttgtaagaaaaacaggaattctaaaagaacaaaaatgccttatgagccagattaagccccaactacttcagtgggtaactcagccaatgtttcatgggcaggtgtgttcaccttgtgcccaacatctttagagtaatccccatgaacctccatcagttttccaagatcaaactttggagctttaaggatgttaactttaccaatgaacacattctggtcaggatagatgctagatgttgccttctcaatctcctttacaaacatgttggggatgaacttgctgcaccaattctttcaaataacatgctggtgcttggttgaccattatctgtatgatcttcctgagaatatgtctgatttggctcgatagtgcataac

SEQ ID NO: 42071 - DNA, 273 bp, Glycine max
gcttggatcttttaaaggggccgcgagctcgacgatttcgggcgtgaggccgtagccgtattcgaagcggttcggtaccagatagtcgatctgcgcgccgaacatccgcaggccgcgcaccgcgaccgcgcaggcggtcgcgccgtcgcagtcgtagtcggcgacgacgagcaggtgccgcttgtcggcgatcgcatcggcgagcagcgatgccgcgtcggcgcagcctttcagttcggtgggcgggacgaggcgcgcgagcgtggtctcgat

SEQ ID NO: 42072 - DNA, 391 bp, Glycine max
gggatacctctgtgagattggacaggctaactaagaggcggtacttaaatggccacccttgttgttcataaccaaactacttccgctcaagatgctgaagctctgcaacaagctttcaaaggatggggggctgatgacactgccattatagccattctgggtcacagaaatgttcatcagaagcaagaaatccgtcgcgcttatgatgagatttaccaagaggatctcatcaaacgccttgagtccgatatctgtggtgactattaaagagctatgtaccggtggatgatgcagcctgctgatcgagatactgttttggcgaatgtggtaatcaagaatggcaccaaagactaccaagtgattgcagagattgcatgtgtcctatcatctg

SEQ ID NO: 42073 - DNA, 424 bp, Glycine max
gacggccctcgcttttgctctcgctctggtttatagatctttgcgaaggaagtttacagctctcaaccgaagatgcagaaggaggatggactgatcactgtgctttacattgctaggatgtgctgcgtcacaaacagatcgattaccgcttatgaccatgcttctgatcagatcaacatcgggcatgtggatgagaatggcggctacaatggccatctcttcacttttgccctttgcggatacatgcgcgctcagagtgatgcttacagtgctctagaccggttgtggcagaagacaaaagttgaattctagcaacagtggacacgcatgatagcatgctacttcggtatgtattaattgctactcttgctagacatattcgtgtactatgattgtcgctttgagcacaaatactcattctgta

SEQ ID NO: 42074 - DNA, 302 bp, Glycine max
actggtagacgacagcaggaggaagcctcttcatagacaatggcggcgcctctgctctcggagaacatcgtgctgaaaagggtcaagaagttaactaggcctctcagtgacaggatactttccgttaagactaactggggcagaccaaaaggtatcgattgtagcttttggagaaaactaaggggatgcacgttgatgccaaacattgcttattgtccagacaaaaagacccggcactatctccctagtggtctgaagagatctgctgatcacagtcggaaagattctgtactactcatgat

SEQ ID NO: 42075 - DNA, 454 bp, Glycine max
  unsure (1)..(454): unsure at all n locations
cgaaaaaaacaacaaaaggggtcttctctgcttaattgactctatttctgtagcgggtagagtcttagcgcagcgatttctagatgaacggaagataggcaaggaaattgttcacatcaagattgaggctattggccatgttgactctacaaagtccactcccactgggcgcctgatctacaagctcggcagcattgacaagcgtgctattgtgagatatcagaatgaagctgctcagatgaacaagaggtatttcacgtatgcctggatgcttgataagattaaggccgagcgtgaaagaggaatcacaatctatattgccttgtggaagtttgaaaacaccaagtactattgcacacgcatcgatgcccctggacacagggatttgatcaagaacatgatcagtgggacataccaagctgactgngctggatttattatttgttccactact

SEQ ID NO: 42076 - DNA, 446 bp, Glycine max
aggggctacagaaacattgcaagagatagaaaaagcaaaactgggttatcgcatttactccgaaacaaaccgtttcgctcgtgtgtcggatctgcgatggaagccccacccaaaggcgctgctataagaagaggcgacaggaataagtccggatccaaatacatcaatgctggcgtgcaattccacctctgccgcgtcgtcagttactagaagaaaggacgactctgttgccgacttgggaccggcgctaccatttatctacccgccgttctcgaatatgtcgtcgcagaaaagcagaagctggccgggaacgctgcacgtgacaaccagaagaataagattaaccctttgcacatgttgctggccgagaggaatgatcatgagctgtggaaactgcttctaggtgtgactattgatagcggcggaatgaagccgaacattaaccc

SEQ ID NO: 42077 - DNA, 566 bp, Glycine max
ccccactaaggtaacattgacattgattctacgggaactaatagatgaattgggtatatatattctgcaatatgatcgagctgggtatggagagagtgatccaaaccccaaacgctcactgaaaagtgaagcacttgacattgaagagcttgctgatctgttacagatagggtcaaattttatttgatcggtgtctcaatgggatcatatgctacctggagttgtttcaactacacacccaacaggcaaattacaagcctcaaaatatacatttctaaacatatgtttggtttcagaaaatgtcaattttcattttttattttcacaaataattatgaaaacgatattacatttctaaacaatgtttggtttcagaaagaaagtaaaaataaaaagcacaaagtcattttctgtaactatttgtgaaaataacatattctcaagccaaactggtcaaaattctccctttttatgttgaaaatggattgttaatttcaccacaaggtcaacatttgtgcaggctagcaggtgtgactatgatagctccagtgataaagtatcaaatt

SEQ ID NO: 42078 - DNA, 391 bp, Glycine max
agacaaaaatcccatttgcataatcatgataacaggtcaaaagctcttttatacaccagatcccatgtgataaacttccacttgatagcagccgcaaaatgatctaaatataattaccaagcgtttttgtgatacaaaccacaagaatgtttgcttgcacttaatacgatatgtcaaaatatatcacatcacttaggcgtgtttattcacatttgttaataaacgacaggtcatttaacattttctcgattgcttaatgatactgaacccgtcctgttgacttggtagatggaaccataccaatatcttcctacacagtttctgggcataggttgtcaatgacacacaccttatactcagccaattcatatatgccgagaatttctagaac

SEQ ID NO: 42079 - DNA, 325 bp, Glycine max
ggcgagcacagggataagcatacactacgcgcgaataaacaactgcgtatcgacccatcagagaagatcgggatcttttgaatcatgtctgcggaagaggtagaaaactccgcacagctcttaatttgagacgagtctttgaaggcaaagagcttaatgaactgtgaaggtgcattgattcttgagcacaagtgtgagcagcttcaacagacatgcgatgatcccatgaatcatgtgtctcaggtatttgacaagtcactgcactatgtgaagcgcttgagacgctatagaaatcccgatgctgatagacaagttctagaaattc

SEQ ID NO: 42080 - DNA, 152 bp, Glycine max
gggggaagaactaaattttctttatcatcaaaattgccagagaaaaaaaaaacgtttactttttcttccacagacttttcttccacagaaaagggaaacaaaaaatggcttttttaattcttcagctgccccttactggttaacttgcgaac

SEQ ID NO: 42081 - DNA, 552 bp, Glycine max
  unsure (1)..(552): unsure at all n locations
gtaagacccaaaaggaaagattaaggaaattgtgcaagagcacatgtaacagttttttacacgggctccaccaggattcttcattaaaatgtttccaaatccttgtggttcctatcgtaaaaattaaacatcacatgtccactaagacaacaacatgtcctatacgcaccttgatcttgctcattttggatttcaaaataactatcgggcttagctgtcgctatcttcttctgatatgtcaaacaagaacttcgaaagtgatgcaattcgaggaagttgatgaagcaactctgcaaaagagtctttcctggacatgcctagtgtttgcttgctcccagaagcatctctgaagtcctcttcagcaggcttgacatccattttaaatttgttgttctgcattgattcaagatcatggctaagttgaatacgtttttcatcatcaggtccttcagcaacagcactttccttgtcatgtgaactctgcaatcctgcagggtccttctgtagaagacagcagagagaattgaccctngtcatgagtgatatttcatc

SEQ ID NO: 42082 - DNA, 362 bp, Glycine max
tttagagcaaacacacactgtccttactaaaaatattcgcgcgcggaaaggtttgtctgcccacacttgtttgttccattctctctcagtcaactaacaagcaacccaccctaaccaatcaaggtgcgtgctggttgcaacatacactttctcagtctggtttgcttctttctaacatacatgccttcgagaaagtaactgacttacttcctttttacatagaatgcctggctgatgagagcgcacgccctacctacaagctcgttgtctgtcccatccaaaataaattaatttttatctttctcagatcgaacgaccgacacaccctccagtaggtccgcttttttttccttccttttttc

SEQ ID NO: 42083 - DNA, 483 bp, Glycine max
aaacaattaataatgggaaggcatgttcccatgttaaatttttacatgttattatcaagcgaaaattctatgttcacgtctctattataattaaaaagtggggtcaaggaacttcaatgtacataaagtgagcgtttataaagaaaacggtatagtcccacttcaaatttgtacccccaccatcagacatttgagatgcaccatctgcagcagctgtaggaacaacaccggttgaaatgcctggtttggacaggtggagaagcggcgcatggttttcacaaaagggtgacacctcacaagccacttctgcgtatgtttcaacagttgcaggtgctgttacttcaaccatttgtataccatgtgttactggcacggcctcatgagttgcatgcagcttaagcattttattgattgacgaaaccgttacagtgatttgtgcacccctgtggaaattgaaggaaaatcccaccctcagcagctgat

SEQ ID NO: 42084 - DNA, 460 bp, Glycine max
ggaaacaaacacagacttttcttattaaaaataggggtaaaggaaaagtttgtctgcccacaattgttatttcaatctttatcagttaactaaaaagcaacccaaactaaccaatcaaggtgcgtgctggttgtaacatctactgaaacaaaattgtttcattattactaacataaatgccatccagaaatttcctgatttccttctttttaacatagaatttatggttgatgaaagcacaggaactaccaacaagtttaatggcggtcccctccaaaataaattaatttataactttctcagatcgaacaacggaaacaccgtcaagaaggtgcgctttttttaccttcctttcgccaaggaaatttcttgactcacatcactgggtgggggtgcccatgcttgctttgatgggaaaatgggcctacactaacctaattttgtttcgggcgcccttggt

SEQ ID NO: 42085 - DNA, 431 bp, Glycine max
acttaatcaaattgacatactaaaaattggcataactgcgactcaaagagcaatcgttaaagctcaggctcctgctaaagaaccgttgcttaatttcaactgtgaaattgcctgacactataagaaaccctaatccacgacgcaatgtaaaaatcggaaattttctagccgccgaaaccgctgagggggctgccctgcctgttgagggcgtaaacaacgttcatggcagtgacggtattgcggggagcgtgctcagtgttggcgacagcgtcgcaaatgacgttctcaaggaagattttgtgaacaccgagggtttttttgcagatgagaccactgatactcttgaggccgccacttgtggggagacggataattgggggcttagttatgccctgaatgttatgcctcagaaccttacggtgtcggtgagc

SEQ ID NO: 42086 - DNA, 147 bp, Glycine max
ggctttttcaaattttcttttggttcactttccggagaaaaaaataacacttttcactttcttcactacgttctaacttggatatggctcgtacgaagcaaaccgctcgcaagtccaccggtggcaatgcgccacgtaagcagctcg

SEQ ID NO: 42087 - DNA, 333 bp, Glycine max
acaaaaaaataaagtttatatatagattatgttggaccatatatatgggattatatatgctatcccaaccattttacatcctaacattccttgcctaacaactcattgacaatctataacatcataagttgcagggcattattttgctaggatttccttatgagaaagccctatcagccatgtcaagtcaacttaagaaaaaattacattagagaagacctatcacaattggcagaggcccatccaatctgctgtttctcgttgtcataaatcactaacttatcttgtaaagagatgtccccaattatgttagtatttcctagtccaatttca

SEQ ID NO: 42088 - DNA, 460 bp, Glycine max
ggcaaacgtcaaaactaatgatggggcattgttaagccaagaagattttcaactaaaaatatacgtggtcatatgatatgtttggtagaccaagccctaacagtacaaatttctaaccttagaacaacaggagatttaaggaacattgtactacaaatacttcaagtaaaagcctggtcaagaaataaaacaacacgcccattccgactgacacgggaagagcaggcaaagctttctgataaaaagccaaaagcatcaaggttatgccaagacccgcaatgatagcaagatagcacgcatacaccgtcatataatcatacattgccgccctgccaaccaaaacactatagaagataaaatctcccagccctaacttgattgaaccagaagaagccaatccaattccctctagcatcaagttatcaatcgacacagtatcttcccccctaccgagctggac

SEQ ID NO: 42089 - DNA, 313 bp, Glycine max
gagtgcgctatcgttgataaatatggtgaaagggtggtgtcgctgaaactgcagaagctgctggccgcacgcttgctcatgtgtggcagaggaaaggtgtggcttgactccaatgaattcaaccatatatctatggccaattgtgggcaaaacatttggaagtttgttaatgcagggcctatcatctggaatccagctaagattcactcacgctcgcgtgctcgtatgatgaatgatgcttacaaaaagggccggctctctggttattgtaagagaaagggtacgcggtaggcgtgtcttctaccaagatact

SEQ ID NO: 42090 - DNA, 303 bp, Glycine max
gacccataaccaacctactctatgggagaccatgaatcataaccagagatggacaccaaacccatcgagatcagctgcggcatgaagatcggaggttacaacaagagactcaagcattatagcctgaccctgggatgctacatgatcttccacatctacttgcattcatctgcttctacctaccacaaatgccctgtgcttgacttactctctggcctcacttgctccgactagaactatatattcaagtcatgtgctcagcgtaccgatttcgtcgagggagttgccttggttgcccccgac

SEQ ID NO: 42091 - DNA, 467 bp, Glycine max
gtgcgaaggtcgattgaattaataatttaatggggggtaacattttttgcaggggtaatttcaacaacattcactctagttaacaaatgtgactacaccgtgtggccgggaattctttccaatgcgggtgttcctcctctttcaaccaccggcttggttctccaaaccggcgcctccaccacaatcgccgcacccgcgtcttggggtggccgtttctggggcagaacactctgctccgaagactccaccggcaaattctcctgcgtcaccggcgactgcggctccggcaagctcgagtgctccggaaacggcgccgcgcctcctgccaccctcgccgagttcaccctcgacggagccggaggcctcgacttcttcgacgtgagtttagtcgacggctacaacgtgccgatgctggtggtgccgcagggtggctccggcgagaagtgcaccgcgacggggtgcgtggg

SEQ ID NO: 42092 - DNA, 521 bp, Glycine max
ggcttatactcagctatcattgtagaatcaagagcatttgatctgttaataaacaatgaaatattctcacctacttttaaaaaaaaaaagaagaagaagaaaaaaaatccactttatcagtaacaccaccagacaactaaacattgaacaattaaacatatcgagatcgaattacgcatcagaaacaacgctaaggtcgtcgtcttccgccggagccggcaagttgagatctatgaagctatgtttcaacttaacagaatcgttaacggttgaagacgaggaaggaattaggtgagatctcttgtgtccaccgagcgcttggccagagccaaacaccttgtaacagaacggacattcgaaaaccttagtgctacgggtgttgttgtaattattttggccttcctcgcggggacaacacacatttctgtggcttccgaacgcgcgagaagatcgaaaggatttgtgacatttgtggcagaggtggttcccgcggacatttttctagatctctgatccgctac

SEQ ID NO: 42093 - DNA, 388 bp, Glycine max
aggggagcgaaagactaatgtgcttaagcaagggatgtaacggtacccatgcaatatataattcgtttacacccatgctcaggtcaattgtgttgatgctgtttttaggcttgatattaacaacttacacatcggaacaataaatatgaatgtgttattaaataatgtactgtttatatattgaagaatcaagccgtttagcccatctgccatcactttacatagtcatagacatattcatagcagtaaaaatcgtctgttggaaatcaaccgccatagcggtgcttgagggattcaggaggctgctcttccatgatgccagagcccgttgttgccaagtaatcgcgaatggttgttttacggtcagcaagataagtgtgatccacaa

SEQ ID NO: 42094 - DNA, 569 bp, Glycine max
gggaatcacaaccaaaagaattgtataataaaggggggatttcccagctaaatacagataaattaagttatataaagtgtggcagttacatagcaaattaataaaaagataaaaagaacaaatcacaatcttgcacacaaagtgtctctattgaccaaaacaaagaaagacacagaaagggagaaaaaggcacaaatttaagacaaatgtttttcaatgatgctttcctgggaagagagagccttgaatatttacaagtgctacacacacctcatgaccattcacaaccctatttttatctcttctgttcagaatataattcatgcttcacataaatcattttttgccccagcaaaagcagcaactctgagctttgtcgtcggcaggttggttccgagcggcatattgtctcccattaggcgtaactggcacgtgtccagcccccacctgtttctcctcccgcactttgttgaaaatgtgagtgtagccatcagccgatgcagggttgctctcatcccactcaccaaactttggaacagcagcacctttatcaggagtttcatcccctc

SEQ ID NO: 42095 - DNA, 227 bp, Glycine max
aggcagcaaataacaatacttgagggccattggagattattggaacacttaaaacgtaatttaagaaaatgaaacaccatttcctcgcttggtaatcatgagtcccactaacaaacattacctaacaccagggaaggtgtccccacttggattgcccccaaaaccttggaaaaccaattggcccttttaaccaccattgttttccgaaaggacccattgaatggttt

SEQ ID NO: 42096 - DNA, 586 bp, Glycine max
gcgtatttaagctaggatcctctagagcggccgctttttggttttttttttttttttttttttggggttaaaaatcatccaatattcaatcgagaggggtgcattgggttccaattaaactgcagagagacatattggaatagttccccgattagcaacagccgcgaagaatgctaccaacaaaataaaaatcatacagggaaaagtggctcttaaagattacttcttctcctcctcgtttgatggcttgtcgtcattcttctgttgaggctcagactgattttgcatggacgccagcaaatccttgacagaagggtcatttgggtcaaccccaggaagcgatgcaaggatagaagatacaaaggattgatcagctaacaatttgctcatgtctgactggcttgattgatcctttgcactatctgttattgacaattgaagtgccagagccaagtcaggatcacttgcagatgcttcagacatatctgtatcttttacatcatggctaattgcagaatcatccattgacattgcaagtgcctgctgtagtagggcattctcatcatccatcaaatcacttgtctta

SEQ ID NO: 42097 - DNA, 460 bp, Glycine max
gggagaaaaaagaaactaaattttactggaggggcaaaggtattagtctgaacatttaccaagttgtcagaaggatcactttggactagattctatctaacatctttttatgccatttttaactcacccttgattttgggagttaataacactgactaaagcagcaaagaaaaccattaggcttgatttcgtcctttgctcttggtgtatcacctgtgtcatcacgtttcgccattaaggagctagtaccgggggactctggcggcaagacagtgttctcagaactgaatattcttgaaggaatcatgggttcaggtggtgcgacagtgtaaagataatttaggagcatttggattatctgggtgaagttgggtcgggcatttggatcctcttgccagcatgaagtaagaattacagccaactcctcaagaagattttctgcacttggccttacattctt

SEQ ID NO: 42098 - DNA, 527 bp, Glycine max
aagaaacactactaaatctgattaagcataaggggtaattaagctgactcaaacctacaaaattacaaattaacaagactaacatgaagttcaaaagtaaaaacagaaaatcctgtgacagaataatgaacaataacctactgcactatcctggaatcaaagcatgcaatcagttcttgcaggcagcctcctgaagaaattcagcggcaccgaaggaagcatgtaacgaaacctcggatgtctcaaaacataaattccagtaaagagggccacaacttggaacggagtgacatacagtacagtagcagcaaccagacagaaaatcacaaatagtgatgtagctctaggatcacgccaactcagcaaagattgcagcctttcaccctgagtggccaagtccccaaccacagtttgaatcctaccagcaatgcttctaagtctatcatatctcatcctcacgaggtcatttggccgggaggtcgggaatgtgtcaaattcttcatcgagttcatcaggatgcgctgaat

SEQ ID NO: 42099 - DNA, 361 bp, Glycine max
gaccgctctcacacatgggattatcacttttttaacaatccacacccacattctacggttccgaaatggacgctggcggagagatcaagaagggcgcccaaggtagaaagggcgggtgcccagagaagaagccggtttcaaagtccgtcaaagccggtctccaattccgcgttggaagaattggccggtatatgaagaaaggatggtacgctcagcgtgtacgctccggtgctcccgtatacttgtctgcagttctcgaatacctatctgccaaagcgctcgagctggctgctaatgccgcacgtgactgccagacgaacaggcttattccacgacacgtgctcttgacacggacgaacga

SEQ ID NO: 42100 - DNA, 552 bp, Glycine max
cgaaatcaaagacgccacaaaattttattatgggtgtctctttagtctctacacaaacctccatgtccttctaaaacaatttacaatgacaaaaatccagccttagatactggtattataagctcttcagccttcttcacgaacaataccccctacataattagagaacttcaccttttttctccacacaaacatttggcagcttgcagagcaaaatatgtgaggatgatatcagcaccggcccttcggaggcacatcagtgactccatcataaccttttcttcgtctatcattttgagagcaccggcggcctttatcattgcgtattcaccagaaacctgttccacgaattaagaattattatgaaaaaggacggggaaaatgataaagcaaaacaaacttgtttttaaactactcggaactatatcttttcattcacataaaagtatgctgaagtttccttttatccccagctttaaaggcataataacttaggatatcttataattaataaactactaaactagcacaacaaataaatttcttcttcac

SEQ ID NO: 42101 - DNA, 450 bp, Glycine max
aaaacaaataccacgctcctgttattttatatatgggtatttggggatgcaagacagataacaatttccacaaagacaaacaactcattacgcacaatttttcaggggattccacttatttaaggatagaacagggacaaatgtgtatatggtaataaatctaattgggaagccaaagaaaattcccctcagtgaaaacatggaatactgtaccattcccaggcttaagattgagcactttgaatgccccatgattatggtcccactttgacgtgtctttgtggaacccaacaactgctttgactcaaaccacatgttatccctctaagcgcaccaaatacccgttactgctcggcactggatgacacccaaacacaacataagggtaactcattggatgacatgcaataaccttatcatttgccaacttcctcacccgatttttcacca

SEQ ID NO: 42102 - DNA, 480 bp, Glycine max
gggaagacgttaaacttatcattcatatatgttggggattattaaatgagtgtaaaaattctttacaccgttaaacaataaaaaaaataaaattatgaaggttgggagtgttgcaaattatggtggatgcaccaaagtttcagagcacagccttcgtaatacaatgtttgtcaacttgtttaattttcccctatcatttgctctggaattttggcttgtctttgagtgcatcaaggtcagcatagtactgtgtgatccaccttttgatgatcttgacctctttctttcgttgttcgaccaaccatcctggatcgctttgatttgcccgcagaagatccaggcaatgagaaccattaactgtatgaacggcaacgatgctgtctgatatgttatccagaaccccgccaatactatatgggtcccttagcccattggagaaaataatgttgctacccaatcttcgaaagaccaatttaatat

SEQ ID NO: 42103 - DNA, 435 bp, Glycine max
gggggattaacaaaaatgggtgctattccccttgattaattattcgcaagatgctactacataacaagtggagagtttgctagagcattaaaattttcaaaattcagttattcaaagcccctttgctctttaagtactccagagtctgatcataaatttcttcaattccatacttgaaactgaatccttctttgacaagcttttcggaagagattattaactttgcctttgagggacaatcatcgaattcagttggaattttatattgagggtatcgtttgctgagaaactttgcaagctcaggaacactagtattgtgagcacagcaaatgtatcgaccagaagccgattctttctccgccacaaatatttgtgctcggcaaatatcctccacatgagtgatggatattgaacctgatagcaactgcatacctt

SEQ ID NO: 42104 - DNA, 465 bp, Glycine max
ggggcggggaaaaaggggccatgcacttactacataacaaagtgtaactatgacaaaatattactaccggtatctaaccctaaaataggcccgtatatttatcctttaatagaaaaatctgcatctgtgccactcccaccacccatggtttacaataactaattaactcatttgctctccggaacgggaaggtagacaccttcggctgccaaccaaacattgtcagcacgcttttaacgaacaccacaaaccttctgctgtcccccagcaatacgactgtatttcttatcatgactatgtagatagcctccagtgtcaatatgctgaaagcgaattttctgatcctgcttccaagtctttccacttccttctattataagcttccaatagtccccggtgtcagattcggattctcctccaaaacaacttacctcaagattgcctgatatcggggatgcatgcaag

SEQ ID NO: 42105 - DNA, 505 bp, Glycine max
acaaaaggcattctcatcacttgtttcatgctaaagtaacttaggaatacaacgttcatattattataaaggcatgacgtgatgaattatagacactaacgatttattttacttcaaccactaccataagagggaaaagcaaaggctaaactaactagactaccacctcatacattcattgcaagcacacaacggagacatcctccttcatgcatgaggtcaaatgccttattgatctccgcaagactcaaactgtgggtaatgtactcatcaaccttgatttccttcttcaagtacttgtctacaagccaaggcacctgagagcggctcttgaagccaccaaaggctgttcctttccatacacgcccggtcaccaattggaaaggtcgagtacatatttcctgccctgatgctgcaacacccacaataactgatgtcccccagcccttatggcagcactccaaggcagacctcatcaccaagacatttgcaatgcactcaaaac

SEQ ID NO: 42106 - DNA, 359 bp, Glycine max
cgcctccaggaaaggattgaatcctatcacggggggtatttcatttagtaaactttgtttttcactgttactgttaacaatgttctttgaaacttacatccagatgagtccattcctttgcattggccaatctgcatgactgatcaataaatacatggggagttgacgaactttcccatgggaccatcccatattcatcaaaaaactcctgttttcccccaactatgaattgccaaaccagattacctgcttcagacctgttttttttagcatatttattttttatgtctagaacagctctatgcattttttgctggtcggacaaggaaaaattctgggtcgtttttgatagttcaaat

SEQ ID NO: 42107 - DNA, 378 bp, Glycine max
ccaacaacccttccgtgcggctgcaaaaaaacaccaaaagggggtcctagtgtgtaattgcctgctgttgcaactcgtacttattcttttgttgatatccgcacgtgtttgaccattctctcacctgaaaatgtcttgctgccgatggaactgtggatgccgaaactcctgccagtgcagcaacgcctgcggacgctgcaagatgtacccagacttgaactacactgagtcaaccaccaccgagaccttctacatcgtagtgacacctattactgctcaatttgaggttgctgaaatgggtgtgcccactaacaacgatggctgctaacgtggaccaaactgctcctgcaacccctgcacttgcacgcgatgtgttgc

SEQ ID NO: 42108 - DNA, 355 bp, Glycine max
ggtaagagtgaggaatataagcgcgtaaaccatacccaatgtatttttaattattaactctgaaaccaatcataatggcttacctgtaataaggtcgtagaagtcttgaggcagggagctgatcacagcacacatgccgctgtcgcgtccatgcttaaatacatcctctgcattacttcaagcatgcttttcagtgaaggcctttcatatagcgtcgatgaccagactcttacggatgcaatgtctgcctttgcaaatgcgtctgaatcaagtgctatgacagatacatacctgacactgatcagggctactaagacgtcatgcttcttcgaataatcattttgcatgtcatgga

SEQ ID NO: 42109 - DNA, 444 bp, Glycine max
  unsure (1)..(444): unsure at all n locations
ggggaggaaattttttcccaattttttaaaatggaagaaagctctatagtaaccatagttgagattaaatccccgtgataatttagacccataaccgaccgtaacaaaatacaaacatcctttcacagaacagaaacagaccgtaacaaagaaagaagaccgggataattgatgaagatgcttcacatatacagtccttcgggcactccttctttcttcttaaacataactttatcctttgccttcttaaagncggcatgcgtcaccttcattcggcgttctcgtaaagcaagtaagccagcttcagtacatattgcttttatatcagctccagagaactcatccttggtcataacaaattcttctaaattgacatcatcagctaatgtcatccttgatgtgtgtatctggaaaatgcgtcttcttgttttaatatcagggaga

SEQ ID NO: 42110 - DNA, 367 bp, Glycine max
cgtaaaatatccattgccatttaaaaaaaaatgacaaatgtatgaatgggaggttcatacagtaaacatgaagaagcacaattttgacttggagaaaagaatcaaaattcttcaaaagatgaatggcaaagaacctccataaggccaacaaaataggggaatctacaaaactacacaacatgtaagaaattttgcttcaaggtttgcaaatcaccacaaagcaaggaagaagagctctaggattgagcaaataaagctcctcaatgtttgaatagagaccaactttcccagccaatgagtcaaatcctgtttgtgctgccatttcttgaatgttctcaagtggcctatgaaccctgccagcaattac

SEQ ID NO: 42111 - DNA, 347 bp, Glycine max
ggggggggaacacttaaggatagctatatgcctttgtgcattgcatttgcatgaaataaaaagactaacagctttcaagaaccatctacctttcttctcgttaggtgaaagggtagaagtttgaaaacagcagactgccaagaaaaatgtatgccatagagtatgcccatatcacgtatccccatctaaagtattttgcaggattcgccattatatatgaagcaaaccaataaagattcgccattatatatgaagcaaaccaataaagaggagggctggcagacaagaaacgagttgacaccatgaatcccaagtgtagcacgaatgggagaacagaagcagacaag

SEQ ID NO: 42112 - DNA, 473 bp, Glycine max
  unsure (1)..(473): unsure at all n locations
ttnnnnccaaacggtaaggagcgattgcgcagataactatctattatttatatagtttgggagataatcaaacacatgaagaagtttttagcaactgatattcaaatggcacaagcacaactagtagctacagcttgcctatgtaaattgcatccacgcttgtgccagataaggaggaaaatgcattctcatagataccataccattacctagccctttgtacttcttgcccgtggattagcatctgctaactgcttggtaacatctctcattgtgggtctcttgtgtggatccttctcagtacatctcagagccaccataagcactttggtaatattttccattatatggatatctagaaattcctctgcaaggcttgaatcaacaatttgattaatgtctcctgtttccctccacacagacctaacccaatccactactatagtaccctccatgaagggaggatctgattc

SEQ ID NO: 42113 - DNA, 337 bp, Glycine max
gagaaaggggattaattaattaaggagaggggctaacaattccgatttttaaccgctaaaacggcgacaaattctattgcttatatttccctctgctcttcttgaaaagaggctctggtggttaatataacaatggcatccccacttcctttgaaaaattgccaccattatagcaaaacccagctttaattaccccttttgggctgctagggatttcctcatactagcccttgctaatagccctaccaagccccgaccatatttattggcctataaaagttatagaacttcattacaacactcacctactttcttcttgctaattttgagaacactt

SEQ ID NO: 42114 - DNA, 286 bp, Glycine max
aaaaaaaaaaaaaaaaaaaataaaaaaaaaaaaaaaaaaaaaaaaaaaaaaaataaaaaaaaaaaaaaaaaaaaaaaaaaaaaaaaaaaaaaaaaaaggggcggcccttttaaaggatccaattttacttccccttgcttgcaacgaaataccttttttttagggccccctaaattaaattcacgggccggggtttaacaacgtggggactggaaaaaccctggcttacccaaacttaatcgctttgaagcaaatccccttttccccagtttgcttaataccaaaa

SEQ ID NO: 42115 - DNA, 221 bp, Glycine max
tgttttgacttttgagtcgtggaaccagaggaaaatcgtagtcgttgtttggactttacctcgttttatgttggaaactagtttgaaaggctcctactgtctttaatatttggtaattcagccgtaggtctacattgcctccagagatgttatgaattggtcaggtttcctggctgctcactgttatgttgtcacatgtcgaaatataaaaaattatattt

SEQ ID NO: 42116 - DNA, 303 bp, Glycine max
gctgactacctgaagtacaagagcgagggcagaattgttcctgatggtgtcaacgcaaagctgctcggcaaccacggcagacttgagaagcgtgctcctgggaaggctttcctcgatgccgatgcttaagtgcggatgcgaatcctgacgttttgctttagcgtatcttactttgcttcgtggaacatgaatttcaagtgttttgagggtattacagtgccttatgtgaacttgcctatcttgtgctgaacatcggaatgtatccttcgagtatgtttaatcgcattattttattgggaaaaa

SEQ ID NO: 42117 - DNA, 267 bp, Glycine max
tgcctagaaactagtagctagtgtttgctgctgtcgaatgacactatgcaatgtgatctggaacctggtttcttgggtgcgacgcttgtagccgtgttatgactgtcgtccgtaaaatttgggggctccccgtaagggatgctgcctggcaaggcctcggtgtcccacctcgtctgtggcgtggggcgctggagcccggtctggttgggttgggaagccctttaaacttgtgtcacttgcattttaccttttccatcgctgttaaaa

SEQ ID NO: 42118 - DNA, 224 bp, Glycine max
ataagattgtagacttccactggaattcgtcagatccttgtacaattgtcagtgtctctgatgatggcgagagcactggtggaggtggaacactgcagatttggcgcatgagtgatttgatctaccgcccagaggatgaagttcttgcagagctggagaatttcaaggctcatttggccagctgtgcaccgaagaattgagtcatgtgggtcacctgctgaatg

SEQ ID NO: 42119 - DNA, 338 bp, Glycine max
  unsure (1)..(338): unsure at all n locations
tgcctctcctacgcccgcggcacggggtccgccccctccgcgtcctgctgtagcggcgtcaggaacctcaagagcgccgccagcaccgccgccgacaggcgcgccgcctgcaactgcctcaagaacgccgccaggggcgtcagcggcctcaacgccggcaacgccgccagcatcccctccaagtgcggcgtcagcatcccctacaccatcagcacctncaccgactgctccagggtgaactaaaacctagaccacgcgcgacgacggccgcctgatcgatcgaccaaccattccgccgtcgccgncggccggatcatcgatcgtcgtcatgatgatat

SEQ ID NO: 42120 - DNA, 552 bp, Glycine max
gcccatcaacggtaagcctctaaatacatgatttattcagcggtcagcaaagtaatagagataatgaatatgcataaactaccagaagctaaaatacaatttactcgtactattcacacttcaattgattcatgtttcaaaatgatgatttatgattgagtcaatgaacctgacttagatcactatgcagcagatatgagtaacacatagtaacatcttcgctggttacccacattgtgcatttaatggcaaaagacatcaggcatgacttcatgttaattttagaccctaccaactggagagaggggaggataagcaacataactcgcaggaatgtcctctaatttgccaaaagcctttagttcatctgtttgcaccaacagagtttctctcgaattttttccttcgatgtagtttcttgatccaaaaagttcatatgagatcaagccatcaactaacgctatgcagatggagaatgcttgcaaaagtgagaatgaggaatcaaaagctaccgaatataccccaggcttaaagggggaaaaactgaaagca

SEQ ID NO: 42121 - DNA, 567 bp, Glycine max
gggacaagattaaatttatttaaaataaccttgaaaatgcctcaatagttacacgataaatattaacccttcttgaaaagtatcaacatttatttcacacgcacagagaggaagtgtctagtgagtttctccactagcgcactttatctttttgataattcttaatggcttctataacttggacagaaaatgtctcgtcgtctaggtaaaaagcaataggatccgctagtagaggcattggtaggttgagaaccccctcaagtgttgcatgtaaacaatatgcagaatatgtgacatgatatccaccttcctggacaattagaaggcgtcctgcactgtgccttttcgcaagaagatggacaattcgccctatttctctataaccctccattgttaagcattgccttccattgggatcaaatgcattagagtcttgtccaagaaccaaaactatcatatcaggcccaaacttttggatggatggaacaaccaactcattgaaggcatgtacatatcccttgtccccagttccatttggtagaggtatgttcaagttaaagccataac

SEQ ID NO: 42122 - DNA, 480 bp, Glycine max
gggggaaaagcaaatttgctgaacaagaattacaaatggaaaagaggtgaaaagaaccatgctcttgttcaaaatttggaacaaaacattttcagatacactcaaatcaaacaaaggggcagcaagcagctttttttttgtgaaggggtagaaattaagggagtgagttgtcaatatcagtatcacactgaggggattcatcattgatcattcatgttaagtggttaaaggggtctgtgttgaactttccacttggttctcagatgatattgatggctgattcactactatctcaatctgcctgacattttctatcatctttactagttctaacatcttaggcctctgatcaggaaccctcaccacacatgacatggctatctgcaacatttccaccatctcttcctctatattgggatatcttatcagctctaagtcaaacacttcagctgtccactcctctctcacaaccgaatgaac

SEQ ID NO: 42123 - DNA, 559 bp, Glycine max
ggaaagcaaagtgaataacaacttaggggggtaaatgagctcctggggaagtttgagaaccaatcaagtaaatgcaagtacctatgcaatttagttgaatcaatataatccagtgttcaatcatctaaaagaactttattttccttacagaatatctagctaaggcttcacatattctctgataaactgttctaactgagagatctcccctgtaagaccagaagcatcttgaagtctaactttgttagggcactgggtgaaagaaaatggttctccaggtaccccaaggttgaactcatttgcaatgtcagctggtgatattgcacttcttgattcccgtaatttgtcaatttccttccccatctgtttgccgatgaactccttggaatgagcagtgactttgtccgttttgttgcagagaataagtaacggaatcttcttcctcacgacacttcccttggtcaatatatcatacagatactctgaagcagcacgacaattcggtaagaagtccacagcatcaacaacaaacacaatggcagcagccttgggcaagtac

SEQ ID NO: 42124 - DNA, 430 bp, Glycine max
gtaaactgaacatttattgaaaatggatgtaattataaatttagttatacaccacattggccgccaggaccaccaaagagaaaagcttgcctaaattgagccccttgatctccatgatacaacaaatcatagcaatctgaactggtgtcacaatatgacttcatgtctataggattcacatcaagttccctaaattttgaatccacaatttgaagtcttgcaaagaaacctgagttaggaaatgaagtctttggcaattttccagtacccattggaggacttccaatattagggggtccataagcttcacctccaaatttaatcaaagatgatcctttgcgtaagtgagtgaatatttcctttggccaatacccaacatcttcacttccatcacttccttctacatgcaaccaccaaatgcctgatactg

SEQ ID NO: 42125 - DNA, 368 bp, Glycine max
  unsure (1)..(368): unsure at all n locations
ttttcttttttnnngacaacccattccacattatttctcgtataaattgatcttttgattacatccaacacaaattatataccaaaaaatttaacgaaataaacaagaaaatcacttcacatgtcaaactaacactaaattcaaatcacttaaaaagcaacttttccaaccaaaaaccagacaactttaccattcttttcaaaatgcttttataatccacatatattaccccaaatcgaactttaaaaccatccttccattcaaaaatgaccaaaaataaccatgcctaataaccctttaaattctcaccatacttgatcactttaaaaacgaatttaaaattaccatcataatatttaacccttata

SEQ ID NO: 42126 - DNA, 374 bp, Glycine max
aggggcacaagtttgttgagatagctcgaaacaatatgatgaaaatgaatgtgcttgctttgcttgttgctacagttttggtagcatatgaatgccatggatgacactaccagaagtttcctctgcaaatgaaaactgggtttggtgggcaatacattattgatgtggcatgtactatttggaggcttggcgtgaaagcaaacaacgtactctagttgcaaactgttgatgcaccttgcggagagtacatagttgactactttctacgagacctatatagatcacattgcaaaacagatcaccaacatgcttatttatatgctaaattcgtcaaactcaccaacaaagatgtctttgtcttggacgtagacaac

SEQ ID NO: 42127 - DNA, 317 bp, Glycine max
tcgggagcgaagcagagagtgatttcagtgagtgagcggtgttcacttgatctcatcataaccgtcagcgtcaattgaagaagatgccgatcagaaacatcgccgtcggaaggcctgaaaaggcgactcaccccgacacgttgaaggcggctttggctgagttcatctcaaccttcatcttcgtgttcgccggctcaggctccggcatcgcctacaacaagcttaccgacaacggcgctgccacccctgccggcctcatgtccgcctccatcgcccatggcattcgcccttttcgtcgccggttccgtcggcgccaa

SEQ ID NO: 42128 - DNA, 362 bp, Glycine max
ttcagaggtgtactggtcaagaaaatatggactgtgcgagatagctctttattcattatcccttacacacatgctatatacattgggacgcatactcaaccgatcccttttaggtttatttgcttctttttcaatcataagacaaacctttttttttttgattacatgcccaatcgaaatttatgcgaggttttttttttaaagaaaagcggtcattttctttttgattcaaagtattaaatttcccccgaggctcccaaggggcttttcttttttcaccataattgtttgccactcattttccatcctgatttgaagacaaacaacatccttctttattttaataataaaacccatctttt

SEQ ID NO: 42129 - DNA, 365 bp, Glycine max
ggcaccttgatgaatggagcctgcaaccgagaagagagaggattttgggaagttgcagtacgggtaatttaatctaatcttgcaaaaacaccttctctcgcttcctttccatttacgactatctccttcaatgttgttattctgcgtgtattcctttgttccacgcttagatgcgagcactataagagacgatgcaaaattcgagcaccatgctgcaatcagatttttccatgtcgtcactgccacaacgacgccgcggtctttttctctcttacatttattcctattatgcaattgacgtctagcttctttttttcgtctctatcttcttcttctttttcctcgattaattttcgattgttttt

SEQ ID NO: 42130 - DNA, 387 bp, Glycine max
  unsure (1)..(387): unsure at all n locations
acgcaagcttggatcctctagagcggccgcgnggttttttttttttttttttttttttttgcataatatcttacagatttcttccacatanagggggggaggaaaattcaaggcccaaattaagcgggaagcaattaaggctcctcatggtgcttgttggcagcattgcactgctttctgatctcaccctttgagccagtgagagggttgttctcagagagcaaagtaatggctctagaaaactccttgaagaaatagtcctggctcttggccattttcttcacataaggcttggtcctcttgtcattggctagttggtgatccactatcaacaagcccttgttgtccaatatatttctgtagtaattgttgtctagaatcatgggg

SEQ ID NO: 42131 - DNA, 507 bp, Glycine max
ggaaactaaagcgtcaaattttattttgcgaatggctctttcaacaaatagttaaataataagtcccatgtcaaattagtcatcacttaacaacagtgcaaccttgactaactagatgaggcatgaatgatcaaagcaaagtacataatatttgctagtgatttagatgttcttagattttgttaaggacttagtcttcatcttttccaccatcttctctttgacaagccttctcattattttcccagagggtgactttggtatggcatccacaaagtgcaccactctcactttcttgtaatgtgcagcattggaggcaacatagttcatgatgtcctcctcactctcttttgcacctgggctcaaaataacacttgcagctgggatttcccctgtctcttcatctggtaatggcactacagctgcatcttcaactgatgaatggcttagcaatatggcctctaactctgcaagagcaacttggaagcctttgtacttaatcaactc

SEQ ID NO: 42132 - DNA, 358 bp, Glycine max
ggtcctggagggagagaaagaaacaagggcaatttcactggcgtcatgggtttctctgtacgcgaaggcgaagagttcaaagggatcgacagctgcggaagatcgatccacgagcgagtgcctgtacgagtggacaacatgggcgatgccaaaagcgaacgtcatcactcactacggtatcctcccttgtgtcatcgtcatcgacatcaactctgaccccaagcccccactttcccagcttcttatccccggctgatccaactgttcaattcttgcaccatgcacgcgacggcattcttttcttcctcttactttgccccctttctacatttagcagcttccttatggatcaattttc

SEQ ID NO: 42133 - DNA, 393 bp, Glycine max
ggtaggcagagccctaagaagcaattccaacaccgccgtgtacggtgttggtgccacccttcatcgagatcgaatggctccccatggctgcttaaccccatcaaatccgaatccttctgtttctgttactgggtttagatacctttctgcttctgctgctgccacgtctcttgcccaagacgctcagaccaaggccttcaaacccaaggaacttgtcctctttcagtaccaggcctgtccattctgcaacaaggttgcagtggttgaggtgaatcccataaacaagaaggagatcaaatggtccgactacaagaaggtgcctatcctcaccgttgatggtgaacaaattgttgactcttcagacataattgataagttgatcaaaaggataca

SEQ ID NO: 42134 - DNA, 256 bp, Glycine max
aggggggggatgggatatctttaacttgaacctgtccgatgccatggccagagccaaagcgcctgatatccacctgcagaaacagctgaggacctacatggaatatatggttgcactcccctcaatctatgacccctatttcattgctgccaaccaaggagaccgcgccaacaactttatcaaagtcgcatagtatgaacaagttcaacaaatcatccaagacatttatgagtctaacgaaagcactaaggctgac

SEQ ID NO: 42135 - DNA, 369 bp, Glycine max
acggaactgccacgatgctgctaatctggacactatcactgctgctgggagcagtagtaggaaaagaagtctgcttcccaagacttggctgttttagtgatgactccccatgggcaggaattgtggagagacccctcaaaatattgccctgggcttcaaaagatgtcaatacccgcttactcctatacactaacgagaacccatataactttcaagaacttactgcagatccatcaattattacaagcttcagtttcaaaacagatagaaaaacccgctttattattcatggattcatagacaagggagaagaaagctggttggccaacatgtgcaagaaaatgtttgtagtggaaagtgtgaactgca

SEQ ID NO: 42136 - DNA, 384 bp, Glycine max
ggagacaaagaaaagaaccacccaattcaattatactattttctttctttcactttatcccttcttcgttcctctctaactccatttttcttctcaaacaacatgatgtgggaatgggaagattatgaagacaccatcaccgaacccgaacccgaacccgattccgattccgattcccacctcaatttcgatttcttctccgccctctccagacccaaggattattataagatactggaagtggattacgacgctacggatgacgctattcgttccaattacattcgcctcgcgctgaagtggcacccggacaagcacaaagaccataactctgctacctcgcgattccaagacataaacgaagcctatcagggtttgagtgat

SEQ ID NO: 42137 - DNA, 374 bp, Glycine max
acgcgtgcgacgacgcgtgcgtgcgggtcccagatgacgaccgatggggacttctctgtacagaaacagcgatatatatatacccttagccaacacaaccatcatggcctcctttgctattaaacaatcagcattcactggtcaaactgctctgaagcagatattgatgttgtccgcaagaccgatggcgccgcgcaaaggtcgcactaacatgcgccgcaccatccagagtgctgctcagagcatttggtatggccctgaccgtcccaagtacttgggtccattctctgagcagattccatcatacatgaccggagaattccctggtgactacgcatgggacactgctggattatcagctgacccggaaacct

SEQ ID NO: 42138 - DNA, 235 bp, Glycine max
gcaagagttgttcccctcaacaacatggctgagatgcacctcggcgactgaccgcacgaatatttccctcgctgctattgcagagcttgctcatctaactggcggtgggctcattaaccggtctggtctagaaggacgctccctcgaatgtggctcgttggctgatactgttgaggcctatgaaattcttttggctgatggcactcgtgtgagacccaccaaagaccatgagttc

SEQ ID NO: 42139 - DNA, 431 bp, Glycine max
ggggcgctaaattttttttttttttttttttttttttgcccttcaaactgcatacatttattaataaacatgttttcttacaaaaaattttctcaacaaccaatatcacattacacattttccacacttacacaaaaaacttgactaatagatcttgcttaataaatagttccatttacaattttataacttaaacatcatccttcatacctattaaaccaaaacacctatcttatatacattatgtgcacctcccacttaaaaaccatttggagtcacagcccaattagacaacccaataataccttcctcgtcaacattacctgttataaaccattccttatagtccataataagacttttaccatccacattaacactcaatttatttacaaaactataaacaccctttctcttatcttatctcccaa

SEQ ID NO: 42140 - DNA, 431 bp, Glycine max
agggtcatacaagtatgcctgcgtggctttataagcttatatgtcttaacgcgaaagaacaatcacaatccgagattgccttgtaacattttgaaaccaccaactactattgcacactcattgatgcccctggacacactgatttcatcaacaacattatcacctgaacacttccaacataactgtgctgctcttatcattaattccactactggtggcttacaatctggaatttcaaagaaaggacagactcgctaacatactcttctttaaatcaccctttgtgtgaaacatataattctttgctaaaacacaaactattcttcttcaccaaattacttcaaagtcaattatgatgaaatcataaataaagtttatttctcttttaataaagacatatcaaccctgacaagataacttttgttcctata

SEQ ID NO: 42141 - DNA, 364 bp, Glycine max
tttttccttgggattgcttaaaaaccttaaaaccccttttaaataaattccaagggccaccacttctttaaccgattaagatacacccttcaaagaaacataaaataaattggttgtcataaaattctacttccaaatcttggaccaatttattcgttctaaaggtgcctcttgtccaaatcatcaaaataagcatgttccattgctttttttgcaaaaatcctcttggaaagctcatatttcaacatttgagatagcaaatccagtccaaactcatccaaactttgaacaacccctgacagactttgagggttccattgagggtattcatgccagttcattagtttactcacgcctggccaca

SEQ ID NO: 42142 - DNA, 431 bp, Glycine max
  unsure (1)..(431): unsure at all n locations
ggggcgctnattttttttttttttttttttttttttggaacaaataacaccaccttaaaaaaataaaagtgagaaaactaagtctgatacaacaaatttccatttttcttagcggttggtcacaaaccatgtacttgaagacaaaatgacctatttaatgtactagaaccagttaccatcagtaacagtaccatcaaagcaaaatatcagactgatttcacaaaatggttagacagcaatttagcaatctttgtgaacccaaccttatctttcccctcaaaaatggtcttcagcttctcatcacaaaagatctccttcttatttgctggattctgaagattctgcagcttgatgtaggcccaaactttcttgacggcttcggttcgggacacttgaggagcgccgaggaagtctccgagctcggaagacac

SEQ ID NO: 42143 - DNA, 379 bp, Glycine max
ctgctaaaattcttacagaagggttgatacccatagacaaaaaaaagaggcgggttttgctgcttccgggcgctgaaaacatgactcccttaaaggtgggtccattcaaggcgcgaaactggcactgtacgctctacagagggtcgaccaagctctacataatgaatgggcatggcatcaaagcacggacgaaccccctgccgtcggtctgcactcgctagatcttgaagagcaccaagaacaaaggaaaacccgacctgaggaataaggccttgccagctgtcatacctaggcaatgcatgccaaggctccgaaaagaccgcatctacatgtacttcgaagacaaagcaagaggcctactgaatcccaagggagaaat

SEQ ID NO: 42144 - DNA, 398 bp, Glycine max
cgtccgtccggttgtaaaaaaattcctaagggtttttaccggaaaaccccgggtgggcagagggtctcctactaaagagctgtatgtcaagaactgaagaagatctgatcgcgaccatcggtgacgattgtaagatcaaaacgctcacagagggtggcaagagattgaaattgacgaatggggatactgctgggcaagaaaggcccaggactctaaacagatcttactatagaaaagcacagggaatcatactcaatgatgatgtcacaaggagagaaacctataccaacttattacaagagtggtctaaggaagtggaactctactcaactaatcatgatagagagaagatactagaacgaaataaagacgattgatatactgaaaggactctgagc

SEQ ID NO: 42145 - DNA, 367 bp, Glycine max
attcccggtcgaaccacgccttccttccggttgcaaaagaccaccagaggggttcgctccttgaaaccaagcccaagtcaaccacaaaaccattctctctgctcttcttctacctttcaagtttttcaagtcttacgatggctgagacatttctatttacctcagagtcagtgaacgagggacaccctgacaagctctgcgaccaaatctgcgatgctgatctcgactcttgcctcgaacaggacccagacagcaatgttggctgcgaaacatgcaccaagaccaacttgttcatggtcttgtgagagatcaccaccaaagccaacgtttacttctagaagaatcgtgcgtgacacctgcacgaaca

SEQ ID NO: 42146 - DNA, 350 bp, Glycine max
cacgcgtccgaccacacatacgtcggcttttagaagacgacagaaggggggcaacaatgaggtgtgtttaccatgggttaggacaccatcgctgacataataacctatataagaaatgctgacatgaataaaaaaggaatggttcaaataccatttactaacataacagaaaacattgttaaaatacttttacgcgagggttttgttgaaaacgtcagaaaacatatagaaaactacaaatattttttagcattaactctactgcttacaagaaatacaaaaggatcatataaaagttttttaaatttaaaacggatcaatacacccggtctacgaatatattctaatta

SEQ ID NO: 42147 - DNA, 276 bp, Glycine max
gatctctccactaacacagattttgattcgattcgagtcgattcagtcgaggttttaagcatcagcaagatatctggacgtggaaagggaggaaagggattgataaaaggaggagcagaacgacatcgctaggtgctccgatacaacattcaaggaattactaatccagccattgctcgctaggctcacatgtgttgcatgaatcgtatcatcggtttgatctaccaggagactcgcggtgttctgaagatcatgctggagaatgtcattcgtgac

SEQ ID NO: 42148 - DNA, 443 bp, Glycine max
atcctctagagcgggcgcgtcgttttttttttttttttttttttttttacacaacacgacacatcttatttatgagaaaaggctgcaaactccaaagcgaaccaagtcacggcccacactgtttattcaccacacccatttgaacagggtccactatagcaaattaaagatgagatgatgctatcattcatatcagcagagaatataaatgtgatgagtttgcacaatcattcttatagttgccatcactgcaaccaaattcatgccttcaaagcttcccatgcatataaggatgaacttaatctgctgtccaactctgctccacaatttccctcactcttcgattgtactcacgcttgttctcactaaacattcgagctgcttcagagtttgcaggagaaattgggttggggatcacaaagcaatgactggatagatgtgag

SEQ ID NO: 42149 - DNA, 376 bp, Glycine max
agcggtcgcttttttttttttttttttttttttgtgattacataagcaactatacaaaatggaccggtggttttcaactaaaaacatcaccttatacgctcccgtcgaaatatcagaacggccattaccatatgttattttggtaaatacttaaattaaacacgaccctgtcccttaatcttctggagttttttcatgtaaaacttcaacaacttaccttacaaaatgtctcctataactcttccacattgaccatgattaaaattaatgcattctttcaaacgcgcaccaccaatctgatacttaatgtgtacatcacgctttttatctttttggcactcctccaaaaaattctacacattgttactcttttttg

SEQ ID NO: 42150 - DNA, 455 bp, Glycine max
  unsure (1)..(455): unsure at all n locations
ggaatgcaggtagacccgcgagagaacacattttcacttcattgaatatgctcgtttagtacctcatcacattaaatggcataactttatatatttgttcataacaggcttgtacaaataaatctcacacacaagataagtgcctcaccattttgactaaagggacctaacacgtagcacattaaataaaactagcaatgatattacaggttaaaatttttggatttgaaaacaagtgactgaagatgtaacctagcattggcagcagcagcaatagattcctcatctcgtttttccttggaaatcgaaacagcagccatataggcttttcttgcttcatccattttctgcaattccacctcgtccaaatcatcaatactaggcagngtgactgaaatcataagggtttgacatcataatcattggtatacttagcagtgtcagtttttgacaat

SEQ ID NO: 42151 - DNA, 377 bp, Glycine max
tgggtccgaagattccgtcctccgcccctggctgtccctcctcaagtgccgcagcttctccgcgtgccacgtgtccgctaacaaaatctcaagatccgacccgaacgtctccctccacgtggaccaaatcctcgcggtggcggacgtcctcgcggcggcggagcgccgccgcgtcccctcccacccgcacgactggtactccatcctccgcctcctccccggcgacggcgacaaccgcgacctgacacgtcagcacttcaaaaccctcgtgcggctcctcgaccctaacaagaacaagctccccttcgccgatgaggctctcatgcgcgtgcgagaagcgtggttcgttctctcagacccaacgcgcaaggcgcgct

SEQ ID NO: 42152 - DNA, 304 bp, Glycine max
gaaagcggtcgaaaccgcttaggcagaccacgtgatctcgttggtttcaagcatgtccgcgtgtggagcggtgatagctgcgtcgcaagccatgggtattgtgacgataatcgattgttgtttgacgatagtgtgagcgtctaggcctcacatgaaaactacggctcatcacacgcagacttgggctcggaacacgcaggcctccgattgaaacccaatgcccaccgtttacgatgcactgactcctgttactcccgattacaccctttttattcccgctgacgcttcttctgctaccgtttct

SEQ ID NO: 42153 - DNA, 439 bp, Glycine max
aattccccggcccacccaacccttccttccggttgcaaaaagacaacagaaggggaaaaaaaaaaattcctaatagaatagaaatagggcggtcttttcatataaatatcccttcaacacaacataggtcatcgaaaggatctcgaaaacccaccaacgcacgaaagccgggatctttcaaaaaatggattcctattcgaagggtgcataaccgcatggataagctcacactaacccgtcaatttgggatccaattcggttccttaggaggtatcgggaaggaattttggaatgtaataatatcgattcatacagatacagaagaaagggttctctattgattcaaacgctctacctacgagatagggatagagaaagaggaaaaaaccgaggatttcacatagtacttttggtcgaaaaatcgatctgatttttttcg

SEQ ID NO: 42154 - DNA, 508 bp, Glycine max
gggatacattgaatagactactcaaattcatcatttcattcttgagtttgcaaaactatgcctaaaacctatctcctgaaaggtaaagtacagtaaaaaagaaaaatagatggcaatgtatacaaaatccacaacagcatggagagggggggaggaaaatagtccttacacaagaattaaggtgcgtctagggggtcaatacaaaattttaaagaatactgcaacaattgaatctctttttggcattctggcattcaggttcttgtgatgggaccttaatttttgttccttcaagttcaaggtttactttatcccaatttgattcatgtccgtccacaaggatgagcttcctactgacggttctatatacttgagagaggaggccaatgaaagctgattccacattgctggagtcaagcgcagatgtctcaagaaagaagagaccctcctgctgcgcaaagtctctggctacctcattaggcactgctcgaagagaactcaggtcaga

SEQ ID NO: 42155 - DNA, 451 bp, Glycine max
actttgaattcgttaaattctatacttcaggaacagaaagcaaaacgttagaagtctgcatggttaatcacatagaattaaaacgcatggttaagcaactcacccagaaacaattacgtaaaaacacacaccaaaccagttgcaagcatttccaaacgtggaaacacaaatagagacctcccctttacaccttgtcctttccattcccttcccaaaaggagcttatgtgagtgctcccagtacatggacgatggatgctctccattatgacatcagcaattatgcaactcataaggggtccatatttactgaaaatcacaattgcagaaacattatgggagtaccatttttcttttttcaacctgtccctcaggcagcaagctaaaaggatcagatgcctttcaacgccaagcttcagccaactccgttctcgaatttatacgctcaataa

SEQ ID NO: 42156 - DNA, 310 bp, Glycine max
ggctctcttggaccaaaatttggggttggaggggagcaagaacaagccacaatggcccccaaaggtacaccccagggttgcaaaaaccccgaattgattaggggaattggaaaggacttgagggcgcaaatttaccacaagaagggcctttgggcttttaaggccaaaaatgggggccttttaacttgccaccacccttaacccaaaccttaaacacccgcttaaaaaccacccaaattttaacctgcccattatattaagaaaccccttgttaaccaacacaaacccaaacccgcttaacttaaggctt

SEQ ID NO: 42157 - DNA, 386 bp, Glycine max
ccactacccatattcatacccggaaacttctacgagtttttgtgccgtgaattccctccagcgttttctaaatgcgcttgggaaatgaagtttcgttagcctattccccttcaaacaagccctccattcatcaaaggttgtttggtggtttggataacatatactgtgtcttcctgggtggcctgcacaaccttagcatgctcaacaagcagtatgggctatcaaagggaacaaatgaggccatgtttatcactgaagcatatcgaactcttcgtgacaggggtccataccccgctgatcaagtcctcaaagaacttgaaggcagttttggatttgtgatctatgacaaacagggatggacagtttttgttgcatctggttctaat

SEQ ID NO: 42158 - DNA, 299 bp, Glycine max
gaatctattggattgcgaacttgatggtttcgtgcttgttcgccacctcggccattgttcgattgataaccatcgatgtagcgaaagttgagctttgtttgagggtggacgacgtgttctcgttggttaaccttccactttctgcgttccttttcctagtagcaatgaaagggtcaaccgggatccaagtgatcaaaatttctgatgtagtgacaacatatcagtccctttacagtgacagaactttgagcccttatgcatattcttcgttcttctccaaaacagtgtggctttggatg

SEQ ID NO: 42159 - DNA, 339 bp, Glycine max
gatagtattatcattcattctcatctttctctcttctctctccacccaaaccctaactcccgaccctgttcccctctcgtatccgtcatgaaaggaggaaagtccaagaccgaatctaagagagccgatcccaaacttgctgtgaataagaagggagccgccaccaaagctaggaaacccgccggcaaggggaaggcagcgaaagaccctaacaagccaaaaaagccctccagtgctttctttcttttcattgaagaattcaagaaagtattcaacaaaaaacattcttaaaaccaaacaatgtctgctttgggcaaaacttcttgaaccaaatggaaa

SEQ ID NO: 42160 - DNA, 311 bp, Glycine max
tgttttttttccgtgtcgcagcgatcgaagggggacgtcagccttatccagtttagggtttcagttccttaccctacctttgacgtatcgaaaccttaaatttcggattacgtctgagcaatctggttggtagaacctttggtcttagagagtgaagttttatgtctggattagacgatcaaattcctactgccttcaatccttttgctgatgcaaatgctgatgactcgggtgctgggtcaaaagagtatgtgcatattcccgttcagcagcgaaatggtaggaaaagcctgacaaccgttcaaggattg

SEQ ID NO: 42161 - DNA, 392 bp, Glycine max
  unsure (1)..(392): unsure at all n locations
aagactacatttttttttttctttgcattctattcattcaggggtcaggtggttttttttggaagcanagaccaaaatacttcaaaattgcccgtacaaagcaaactgctcctaagtcaactgcaggaaaagctcccattaagcatcttacaaccaatgctgcacgtaagtctgcaccaacaactgctgatgtgaataaccctcatcgttatcgtcctgaaactgttgctcttcatgagattatgaaataccagaacagcactgaactcctaatcaagaagctttctttccataagttgaatcctgaaattgcccaggatttcaagactgatctgcgtttacagagccatgctgtgcttgcattgcaagaagcttatgaggcataccttttt

SEQ ID NO: 42162 - DNA, 447 bp, Glycine max
gaaatgaaagctttttattaatttgaggatggcttttcatgtatagtaactccttacattttcaatcagcaattactctagcttgggttttgatcgctatttattacaataaagcaatcacacaagatatatagaactaggcatggtagattagtttgaggccccaggacttgcaaatggtcccctcattgaagcaaagccatgcatatatttggtttacaatttgtgtggggtgttcatcccagaaaagatgagtatctctgtttggacaaggaacagtgttgggatggcatttaagatcaccataaatggtgttagggcagcaaggcttccatgtttccactatcccataactctttccagtttccctcacccccttaaggaacccaaagagatctgcatgtacaaagctgaagccaggaagctttgactgcaactcatggagca

SEQ ID NO: 42163 - DNA, 312 bp, Glycine max
cactctaaaactggttaaattgaataggttaatgggtttggcaccgcttttaaaaaagagcagctattaatgttttacagtaaaaaaaacagatagcaaatactatgtttatgtcaactaacatcctactgagtagttgtatgaacagaagccacagttgaaaccatggagtccaccccacaaatatttcgtccccggcaaatcttgtagtatccattttctccccagttctctccccaggagttcttaatgatccaaaatggcctctccttcatacgaatgggtgcataggcaccataaccatatcccacc

SEQ ID NO: 42164 - DNA, 494 bp, Glycine max
gctgcgagaacaccaccgaaggcgtctgtctttctttgcactatcctttgcgggctctacaattattagatttgcattgcgagatcatgcagcagccatcacccggaatggcacctaccaccatgggccagcatacgcagcaacagtaccagcagcagcctgcgccgcatcagcaacaaccctacgtcatgatgccgccgcagcatcaggcgccgcagcctatgtgggccccatccgcccagactacgctgccgcagcagcctgctagcgccgacgaggtccgaaccctctggatcggcgatctgcagtactggatggacgagaactatctctacacctgctttgctcataccggcgaagattcgtcagttaaagtgattccgaacaagcaaactagtcaatctgaaggttatgggtttatcgagtttaatagtcgtgctggagctgatagaattctacaacatataatggggctattatgcccaatggggggc

SEQ ID NO: 42165 - DNA, 281 bp, Glycine max
ttaagattgtaagataccgatccacgtgcgaaagggttaggtttacgaagaaacaccaatcctctccgagaaatcaacgatgcctcgctatgatgataaatatggtaatacccgcctctatgttggacgcttgtcttcgaggacacgttcctgtgacctggatcgtgtcttcagcagatatggaagaattctaggtttttatcttaattattaatctttttcttatttattcttaacatattttcttgaaattcttttctcatctttatttattattatat

SEQ ID NO: 42166 - DNA, 258 bp, Glycine max
ggaccctttgactcctatgcattgaagactgaactggtgcgtactggaagctcataccgacatacttcgagatggcccgttcaaagcatactgcttgtaagtcaactggaggaaatgctccgagatagcagcttgcaacctgggctgaacgttagtctgcacgaacaactgctggtgtgaagaaacctcatcgttatcgacctataactgttgctcttcgtgagattacgaaataccagaatagcactgagctcctaa

SEQ ID NO: 42167 - DNA, 422 bp, Glycine max
  unsure (1)..(422): unsure at all n locations
acgtaagcttggatcctctagagccggcggttttnttttttttttttttttttttttttttcacccttaaatcccaggggcaatcaatcactccatgattccacaaatatgaaaagttaaacagcaaaagtctattgtcttaaaacgatacacgctcaagagaagcatagatcaataatttgtctttctaaagatgccccttgtccaggtcattgaaagaagcatgttccattgctttctttgcagaaatcctcttggaaggctcatattccaacatttgggatagcaaatcaagtccaagctcatccaaacctggaacagccgttgacagacttttagggttccattgggggtattcatgccagtcctttagtttactcacccctggccacacctcttcatttggagtacctaatagcctg

SEQ ID NO: 42168 - DNA, 477 bp, Glycine max
  unsure (1)..(477): unsure at all n locations
aataccgagcacccccagtattttattagttcaggaatcaaataagaggccctcaatgttctacagcatgcgccattccaaaatgtttaaatctaaataccaaattttatcaccaaaacaaaatgtgtagaatgatcacatctcagtttacaacaatcaaatcttgaagaatgaaagcatcgagagtgtcactccacagaaattgcctcaagcaacttctgggtgccttcactcacctccacattctccatcttcaatcgccgttgcatagccgaactgatcctaccagcagctgcataagttctgatcaaggattcaaacacctccacccctggagattccacagatttcttcaagatctctagaaattcttctgcaccatcaacatccttctcttgctcaaaatgcctcatcatgatactgatgatccttgacgatggaacccacttntcaccattccctctacccattgatatt

SEQ ID NO: 42169 - DNA, 371 bp, Glycine max
aaagccccgaaaagggaaaacaacggcgcgcatttcccctacatgactaactaattatactcaggatcttattttatagaaattaaggagcaacttagaggcttgatttgagagctcaatcatagtacaagggattaggcaacttaaaagtcctagcccctttgttgcttcccaggaggtcacttcattggtctccaacgtttccaatgattctgtatcccttcttatccagcttctctctcttagctgatttgtattcaaatgataacttaccagagtccttagatggatccctgcaacaacaaccaaattaaagcacccctttttttagccttttaaattaatgcccatctccaaccttgatttttttt

SEQ ID NO: 42170 - DNA, 434 bp, Glycine max
  unsure (1)..(434): unsure at all n locations
gggcggaatcaacattctttttcttttgatttttaggtgtactttaagtcacctaaaaagacaccatctactgccaactatagtttagcattaacacatcagttggacatgaaacaagcaaaacaaaagctaaagccattagcaaatattcgntctctctctctctctctcactattaaggtaggtagagggatgatttggtcatttcactaaaatctcgtgcccccagatgaacctcatcaagagcaaagggaagcctcttcttcgattctagcaagcaaatgatgaattgccgttgcaataccatctactgaacaaagttggaatccttcttcaaccttagcactgatggaatagaataccaaagggtctatagtggtgacattaagatgtaggacggtgaggcacagtgtttgaaaaccagctactaactt

SEQ ID NO: 42171 - DNA, 496 bp, Glycine max
  unsure (1)..(496): unsure at all n locations
ggaaaaaaattgtgagttccgggtatgccaaaaacatagagaggcttgcagaagctgaggtttcttctgatgccaagaggcttgtgaggaagctatccacaaaccggttccgcagtatgttgaatggaatctggcactcttgaatgtaattgtatttttttttcaccttttaactgtatatttttacataattgttttccaagttttgctaatttgatttcctcatctcaatttgttttcagttttactatttcatttgccttcatgacaagagtagctcagcctttttattgagattgtaacaagaaaaatagtgataacatgaaagatttgttgtagattttcttggggacactatggcattgtttttaggcttttagctttgactgttcagttgtgaggaagaaaaggatgatattattattattattattattagnactggattatatatcataaaataatgtaattaatcactggtgatagttaccatact

SEQ ID NO: 42172 - DNA, 514 bp, Glycine max
  unsure (1)..(514): unsure at all n locations
gggggccaaacgtagccctagagataagtccttttgcaataaaaacattggttatcctcgtagtgccgcaatcgccgttgctgtgctgttctgttcataactcctttctgcagatcatcgtcactccccccaaaaccaaccgttcaattcacctctctttttctctcttttgagactgttcctaattggtcataaatggggaagcccacggggaagaagaagggtaccgttactccaggcgctgcaaattcacacgccaagcacggaaaatcttccaaagccttcgatgaagacacggcggtgttcatcaccatgtcacaagagttcagggaagaaggcaacaagttgtttcagaagaaggaccacgaaggcgccatgctcaagtatgagaaggctctgaagcttctcccgaacaaccacatcgatgtcgcgcaccttcgcaccaacatggccacgtgttacatgcaantgggtctcggggagtaccctcgagcaattcacaatgcaatttggc

SEQ ID NO: 42173 - DNA, 326 bp, Glycine max
ggcaacaacaggtcggagattgcacctaaaagcaagcattgtctaccaagcaatccaacatggttaaagctctaacaacagacccattaaaatagttaaagaaagcattgtctagcaagccatgtacacactacaacctgagttataaaactgttaaaataaatcattgatacaaacctactactgtgatcaattcacaataaacacaaacttagttctcagttaacagctacatgaaatcagaatgccaaagagcgagctcaatccttggctgttttgttgatcaaagacttgtggatgtgaggaatgacaccaccaccagcaat

SEQ ID NO: 42174 - DNA, 378 bp, Glycine max
cgcaaaaaaaaaagtggaacgttgttctcgtcaataaaaaaaaggcaactacatagcaacaataaaaaatttataaatcactaaaccaccaagccacattgttctcgtcaataaaacacatacacgactgaaacattgtaaatctcaagcgcaacccgcaattgaaatcacgaaactcattaatacacagttccactatggcaagccacattggatgtatattatcggtaatacatatcccatcaactactgccatcgcctattcacctaggtgttgcttagatgtttccttgatctcatctccagcatcgatcgtgatgtctgatgtccacaaagtcagattgtcacggacaagttgcatgaccaacgtactatcct

SEQ ID NO: 42175 - DNA, 318 bp, Glycine max
ggctagataatttttatctctcttatgggagcttggggaatttgtgacaacacaaacctggtaagatctaataattaagtatcagcaccaagcatcaagggagacaatagcaataataaaggcttcaatgcgcttggatgaaactttcttgcaaaaaggaagcacatgttggtgatgttcccttcataaacacatgttgatccaaacctcatgtggttcaaaaacgcttctgtaatatcattggacccaaatgttcgaggatgagggccacgccttgaccaatccacccaagtgatgctactattggagcttaattga

SEQ ID NO: 42176 - DNA, 189 bp, Glycine max
  unsure (1)..(189): unsure at all n locations
cacctccgagatttctacataagggcctttacaaaggggtggttttctctgtgtggggagcanatattactatcatttgccagcgctgctccatcaattgaaagcctgcaattgcaggattgccacataaatacccccacctggctcttcggggttttttttaactatggcgcacaatacaaggttctc

SEQ ID NO: 42177 - DNA, 345 bp, Glycine max
tgctcactctgtacagttttaatgggtatcttgtctctgggtagggtcacacatcttttgaaaacgacactcgcgtgtatgttggtaacttgtattaaccagtcaccgatacagagctcgaagacgaacaccgtgttttctgagctatacgcagagtccgggtcgcacgtaaaccaccatgctatgcttttattgactttgatgaccgcagatatgcacaggaagctatccgtaaattgtatggcgggaatgtgttgagggttgagctttctcacaactctataggtggacgcggcggtcgtggtggacgctctgacggttctgattcgaaatgttaccagtgtg

SEQ ID NO: 42178 - DNA, 254 bp, Glycine max
gccaactcttactaccactcatccgcgcatttaaaactcacccaaccaattcctgcaactttataactctgaaggcaccttctacataaactacaaaccccacactgatctaccttctgttctggaaaactacattaatggcgaatttaaactggagaaattcatcactcacacagttccattctcaaatattaacaccgctttttatttcatgctcaaaagtgaatccatcatatacatcattcttatggaat

SEQ ID NO: 42179 - DNA, 461 bp, Glycine max
  unsure (1)..(461): unsure at all n locations
ggatattcaccctgggggaccccaccggggcccccttattaacctttttccaccttttttttttttttcaatggacaatggtggtggtggtggcttttgttcgntctcgccatgccaatgttgtcttcgagaggcttcatcgcttatctcgtatctgctttctcttgtgctgttctgtctgcgctttttctcaccaaccacatccatcatgatgataacaagccaattactttgttagcctctcgtgtgtctgaaactcttaaagtttggccagacttggagccaagttggagacttgtgttggcaacggttattgggtttcttggatcagcatgtggaaccgttggtgggttgnaagtnngaagcacttttcgttcccatgctcaatctgcttcttggctttgatactaagtctgctgctgctctttctaaatgtatgatnatgggggcatcaacatcat

SEQ ID NO: 42180 - DNA, 234 bp, Glycine max
gggcgaaagacggggtttgggtttcacaaacagacacacagtcagctcttacttctcaaatattatcgagatccccattttctcctaagcaaagccatggctaacggtcctggtctctactatgacattggctagatagctagggatctgctgttcaaggactaccacagcgaccagaagttcaccatgaccacctactgaccgactggagtggctattacagcatcatgaacc

SEQ ID NO: 42181 - DNA, 471 bp, Glycine max
  unsure (1)..(471): unsure at all n locations
aaaccttccgtccggttgcaagaggacaacagaggggggcacaggttggttgagatagctaggggcaatatgatgaaaatgaaagtgcttgttttgtttgttgctacagttttggtagcatatgaatgccatggctcagactaccagaagttccctctccaaatgaaaactgggtttggtgggcaatacagcaatgaggtggcatgtgccagttggaggcttggcgtggaagcaaacaacgtagtcaagtggcaaactgttcctgcagcttgcggagagtacatagctgactacgttctaggagaccaatatagatcagattccaaaacagttaaccaacaagcttatttctatgctaaatccctcaaactcaccaacaaagatgtctttgtctgggacgttgacgacactactctctcttatctncagtattntgctaaccatggatgtggtgtggaaccacacaataca

SEQ ID NO: 42182 - DNA, 379 bp, Glycine max
gcacaacgatgagcgtaccgaaggcagtggcagcgacaatccggctcacggtgccggccggaggagatctggcggggccaccgggttggacgggctctggttaaacccggtgtaaccgttagggttttgtaaagacattaaaacccgcacacagaaatacaaagcggagacacccatggccgttacgataacggcgtacaaggacaacaccttcgagttcaccgttaagtcgccgccggtgtcgtggtacctgaagaaaagccgcggcgtggaatccggtagcagccggcccggtcacgtgaccgcgtcctcgttgtccgtgcggcacgtgcacgagatcgcgaaagcgaaacagtccgatccgtaccttcagaacatg

SEQ ID NO: 42183 - DNA, 290 bp, Glycine max
ggggggagttccttcttggatcttaccctcttggcggcgtaatattctcattctccggtctatgctacattctccttctcaactaagagatggggctgacttttacctaactttataccccgctctttcctaagaaagaaacgctttttctacattgaagatcttcatgctactattgagactaccatcttttacaatctcaaactaggctaaattgtcacaaccattcgcactattggattcaatgtggagactgaatgatataagaatattatctttactttatcgta

SEQ ID NO: 42184 - DNA, 379 bp, Glycine max
  unsure (1)..(379): unsure at all n locations
tgtgcgagagagcgagcgagcgagcagtttcaaagagaggatttgggattgggaaggcgagggattgcgctgcgtctcttcctcttctctttcgattcatccctcattcataatcttccaatccaacaacctcagcctcacactcacacatacacacatctgaacgcgtatcgtccctcccatggcttcaaagcgcatcctcaaagagctcaaggacttgcagaaagacccaccaacttcttgcagcgctggtccagtagctgaggacatgttccattggcaagcaacgattatgggtcctgctgatagtccttatgctggaggtgtattcctagtcactattcactttnctccggattatcctttcaaaccttccagg

SEQ ID NO: 42185 - DNA, 288 bp, Glycine max
tggttttcaagtctgctgagataactctgggcagggggattaaaatgaaagggctggttttgtttgtttctacaattttggtagcatatgaatgccatggctcatactaccagaagtttcctttccaaatgaaaactttgtttggtgggcaatacaccaattaggtggcatttgccatttggaggcttggcgtggaaacaaacaacgttgtcaaattgcttactgttctttcattttttcggtagaataacataacttgacttacctttcttagtacaaccaattttt

SEQ ID NO: 42186 - DNA, 230 bp, Glycine max
cgattgttttcttgcgctctgctcgagcctctggggtggttatatctacattgccatttgctctctctcagattccaaaaatcttaagctatgggaaagtcttacccaaccgcgagcgcttattaccacaatgccgctgagaaggcgaataagaaactcataagcttcatcgctcataagagatgcgctcctctaatgctccgtttggcatggcactcttctgtaactta

SEQ ID NO: 42187 - DNA, 372 bp, Glycine max
tgtgcgagagagcgagcgagcgagcagtttcaaagagaggatttgggattgggaaggcgagggattgcgctgcgtctcttcctcttctctttcgattcatccctcattcataatcttccaatccaacaacctcagcctcacactcacacatacacacatctgaacgcgtatcgtccctcccatggcttcaaagcgcatcctcaaggagctcaaggacttgcagaaagacccaccaacttcttgcagcgctggtccagtagctgaggacatgttccattggcaagcaacgattatgggtcctgctgatagtccttatgctggaggtgtattcctagtcactattcactttcctccggattatcctttcaaacc

SEQ ID NO: 42188 - DNA, 453 bp, Glycine max
agcgcagaatttggttctattctttctagcagtaacatgagaatcaatatactcgtttatgttgttactagagaacatagtagcttatgaatgacttttgttcaactaccaaaatttgcccatcaagaacccaacttctgttttcattcattgcatggatttgcttgctattcaaccctgctctcgattttgctgaggaggattgaaagttgaggcgttcctggatcgtgcagcttgcggagagtacatagctgactacgttctaagagaccaatatagatcagattccaaaacagttaaccaacaagcttatttctatgctaaatcccttaaactcaccaacaaagatgttttttgtcttggacgttgacaacactactctttctaatcttcaagattttgcttaccatggatttggtgtggaaccacacaatacgactgcgtttaaaaact

SEQ ID NO: 42189 - DNA, 360 bp, Glycine max
acggcttgttgaaaacaaacaaaagggagtgtttgcttgttctctgctcgtgcctctaggggggtgatatatgcatttgcgtgtgctctctctcactttccaagaatctgatgctattggaaagtcttaccccaccgtgagcgctgattaccacaaggccgccgagaaggcgaagaagaacctccgaggcttcatcactgaaaaaagatgctctcctctaatgctccctttggcatggcactcttctgtaacttactacgcgagctccaagaccggttgtccctttcgaaccataaagcacccctcctaactcgctcacggggctaacaaccgtcttgacatcactgttaagctttttga

SEQ ID NO: 42190 - DNA, 288 bp, Glycine max
  unsure (1)..(288): unsure at all n locations
aggggacggnaacagaagaaaaaacgaaacacagaggggggggancanaaaagaagggnnnanannaaaccgacgncnnngcagaaccaccaaccgnnatggctgccttcagcggtgatgaaacggcaccgtttttcggcttccttggcgccgcagctgccctcgtcttctcctgtatgggagctgcctatggcacagcgaagagtggcgtgggcgtggcttccatgggtgtaatgagacctgagctggtgatgaagtcgattgttcctgttgtcatggctggagttt

SEQ ID NO: 42191 - DNA, 301 bp, Glycine max
  unsure (1)..(301): unsure at all n locations
ggnacaaataaagggtggtttttttattttgggcccaaaaaaaatgggtctttaattaaaaaaatccccaaaatttggtcaagcaactacaaacaacgttaaaatttactaaattaatatttccccaattttgtctccaaataattattacttaaagtccccctcaataactctattggccccattttctactaatccaaaagcatcttttaaaattagagtttttttcataatccccctcccaaacccaccattgccttttttcatcatggaagaaaattccccataaattattccccca

SEQ ID NO: 42192 - DNA, 393 bp, Glycine max
actgcaaatgctcccggagcatttcaaaacaagaggtaaaaacagactacttgaggttaatatcatacacattaacttgctgtgtcatcccaatttagaacaaaatcttcctacacttcctctactattcaaatactctgtgctctatggttgaatcacaaataggggagtgtcaacgcttacagacttggcatcttccgcaacgatttcaactatagttcctgactgatcagcttcaatttcattcatcaatttcattgcctcaatgatgcatacaacttgccccttctttactttgtctccaaccctcacaaaggaaggttcaccaggtgcaggacttcggtagaatgtccctgccatggggcttttaagaggcggaagtgatgatttagc

SEQ ID NO: 42193 - DNA, 406 bp, Glycine max
ttttgcgtaatggatgtatacttcctcgggtattggatttttcactgtactgaatttgtatgtatatcaaataccataattacatgttaccttgcttccttcctaccaaggcctacacatttcttaattttcctattgaatcgtctaatttgtagtaaatacaaaagaataataagcaaaagcggtttagatttgatttcctatatcaaaagtactccttgtgaaactcgaagcgtgtagttgtcttgtggctcagctcaagtgatagcttctttagctctttcgctaatactggcatcccgcaatagaacacccctactgtagaaaacggatgtttagaggcaatcttggtgaaaacttctttccaattaggcctggcaaagtgtgtccttactcgagtgcctga

SEQ ID NO: 42194 - DNA, 435 bp, Glycine max
atctctctcttcttcttcttcgatttctcttcgcgaccgttttgatccaacccgcgatctgatcttactccttcatctctcaaagcttgtatctttgtgtgccatacgcgtgagagatggcgcaaattctgcttcatgggactctgcatgccaccatcttcgaggttgataggctcaatgcttgtggtggtggcggcaattttttcagcaagctcaagcaaaactttgaggaaactgttggtattggaaagggagttactaaactctatgcaaccattgatctgtacaaagcaagagtaggaaggactagaatcatataaaatgaacatactaatcccagatggtatgagtcttttcacatttactgtgcccatatggcttcaaatattgtattcactgtgaaagatgataatcctattggggcaactttaattg

SEQ ID NO: 42195 - DNA, 489 bp, Glycine max
cccacgcgtgcggaccagcttgcgaagctggtttgcaattgaatggggggttcagcttatgaatgggaagatgatcttttggctatatggagggagcgcattaatgatctaagagattgcttaggatctgttggtgtaccaattggcagactatctactggactttgcaggcatcgtgctgtattattcaaagtactagctgacaccattgatatgccttgtcgcattgctaacggctgaaaatattgttcaagagatgatgcctgctcatgtcttgttcgaattggactcgacagggaatacatgggtgatcttattgggaagcccagttgcttatgcaagcctgattcctcgatcaatggtccattctgcatatcattgtgctcacccttgcgctttccaagacataaaccacttgagcctaccattgatttcaggtcactggccaaacaatatttatcagattggatgtctgctgaacttggcttt

SEQ ID NO: 42196 - DNA, 585 bp, Glycine max
aacattcgcacagtaggagactggacccaagaacttaagcatcttctcacaaaagaagatgagaaattaccttcagttaattgtcatgcaaagtttggtgaactaatgcaactggatcaaagaggacagccgagactgcttgttgatggcccttatggagctccagcacaagactaccagaattttgatgtactacttctcataggattaggaattggagcaactcctttcatcagcattctcagagatcttctcaataacaccagagcaatggatgaactagtggtgcaggagtcaaacacagaaacaagtcaaacaaccagatcagatgagagctccaatagctttacatcttcaaatgtaactccaggaggaagcaagagatcacgaaggactacgaatgcttatttctactgggtcactagggaacctggatcttttgaatggtttaaaggagtaatggacgaagttgcagaaatggaccacaaaggtcaaatcgagcttcataactatcttacaagtgtctatgaagagggggatgcgagatcaaccttaataaccatgatccaagcacttgaccatgcg

SEQ ID NO: 42197 - DNA, 338 bp, Glycine max
gactacgacaagacccaaactttttctccaaagaattctttaatacttgaaagaacaccataccacatacctttttaaaaaaataatgtttaaaataaaaaacaatctcacatcttgaaatggtcttattctccgtataaggacacaaattatggagtgacccctcaccagaataaatccaacctattctttcatgtataccaagccatatttacattcaaccttacactttaaacactctattataactgccaacacatcatacacaacttgcaataccaaaaaaccaccaaaacattcttttttcacacttcctatcaaaattcaacaaaaacaat

SEQ ID NO: 42198 - DNA, 314 bp, Glycine max
gaaagaggggagttagggcccgaaaattcatttgatctcacatccagcacttaccacctagtgcacattgcctgaatttttgttaagattacagcaggttttcggaaaatgagacacattgcccaaaaaaagtcagagcttccaacttgaaaaaaaggtttacacatataaatcccagtcagtgtctgatggtgagctcacctctaaggtggagtgccccattgattaagttaagactttcttcagccatgaacgttgtccatggaattgcaaacaagtttttatacccaacggcctttcccccaatgaataca

SEQ ID NO: 42199 - DNA, 401 bp, Glycine max
aggacgcgtgggcggacgcgtgggcggacgcgtggatccgcctggtgttggaatatacgtagggccaccacccaccaggctgattaaaccaggtcctctctatctctagagagcaagagggcctggacatgtggatctagctgcattaggctgttagtagaaagacatggatcatcccagttacaacggtgatctgaattataaccaccaggaaggtcaagttcagcaccaacagcagcatggtcagtgggcggcggcggcgcatccgcatcagtatgagcagcgatggatgggtatgcagtacccggccaccgacatggacatgatgcagcaacagacgctgatgtacccgcagaactgtatgacctatgctaacccttattacacgacgacgtcgacga

SEQ ID NO: 42200 - DNA, 276 bp, Glycine max
atccaaatgcgttctgatacacagatattatttagttgaaaggggacgcgcggcccatacttgactatggctgtcgagatccagcatgcaacctacttatgactaacgtgtctcttatcttcacaacgaactcatagaccttgtgctgatcaggaagagactctgcaacactatgtttctgtgggcaccttttggcccaagcgcctagcgtggcgcgctcattctcaatgttgatgcctccaagagtctgaatactttgaacgaactgtatgatgg

SEQ ID NO: 42201 - DNA, 237 bp, Glycine max
ggaccaaaggctacggattcaatatgatggcttatgctgccgtttgaagcaactcatggagcataacgctcaagcttgtaatcaaatcactgccaatttgtctacttacatggtgcaagataacatcaagctcttttgacacacaaggcacaatactgataccattcttaataatatgagtgagacgactggcattatgagccatacgcaggcactgcatgttaacatttacgaata

SEQ ID NO: 42202 - DNA, 462 bp, Glycine max
gggccgggggggaaccaagagatatagggacccttggacttcagattaagtcaattcatattaacaaaatgttcccaagggaaatctcaaacacatttttttttttgggcattatcactaatagactagtaatccttcaattctgctcaagaaaaattctgatacaacgaaaagtgattcataatgtaaacttaaacttccttacatttggcttgttaatcatatggtatctggatatatgctgcgtcacagatgaaaggaatgtcagcatacataccggcaagagcacaccttatggactccaagacggtaaatagataaccaagtgatacggcagtccaaaaatgcattcccagtttaccccagtagagtgatagcggcattcagcggctcacagtccctataacctgcagggcaatctccaataacattcccatcacaacatgaaatcttgagaaatga

SEQ ID NO: 42203 - DNA, 271 bp, Glycine max
ccctatcggtctctcccccgtttttagccttggaccgaatttacccccccattggggctgcttttccaaacaacccgacttgccgacagctccttttggtgcgaccgggtccgggcaccacggggctcttacccttttttgcccccccttccaggggactttggcccggtcccccacttaggacccttttccagacttcaattcggaccccctgggccaccgattttcatggtgggcttttcccggttcgctcgccggtacttagggaatc

SEQ ID NO: 42204 - DNA, 539 bp, Glycine max
gggaaaaaaaaacaattctttattaccggttggaatttaatccaccttgatcccctaagaaaaacaacacaaaaaagaaataatcatcacttgatagatgagatcttcaacatacatacttatccctgatatgaaagcatatttatttctgcatagtgtcattaactgtagtttctgcaggtttaggaagaagctcattattaactgtagtttcttcaagtttaggaagaagccctttttctctgcaggtttcaacggctccagtaaacatatcctctaagctgtacttaaatttgaagcccaagtctgtgatcttcttcgaagaaaatttaataatgtccaattcatctggaatattcttgaacttagtaaggacattatactcaaggtattttggttaagcagttttgcaatgtcatgaatggttgcctcgtgtgaacagcatatgtacctcccttcggcttttggattctcgaacacgaatatatggccaagacaaaggtcatctaagtgtacgaactggccctgctttatgatat

SEQ ID NO: 42205 - DNA, 414 bp, Glycine max
aaaaaaaacccaccctttacattcttttacaatacttaaaaaaggggtggaaattttaaaataggcaaagctttttcaaacgaggggcatccctaatttcctttttttggttgaaaacaaaacccatttaaaagaaaaccctcccccccaatcattcaaaaaatttttctttttaaaaaaatctggctttgccctttggaacaaaaaaagcttgctttaaagtgtttccaacaatttcaaagttttgtgaaatccctaaaaaaacataaaaaggcggggattgtttgggattttcaacaaggaaacttaaatccccccaatttttattagcccatttaaaaactcccatttttaaaaccattattgggcccacccactttttttggaaaaatcaattcccaccaatgtggtttt

SEQ ID NO: 42206 - DNA, 540 bp, Glycine max
cctcaacctttggagccatggggttgggcccaggaatggaaattgggggttaaaattttagccgttttttccaaattaaagtttttggtgggaggcgggaaatccacttggacccctcccactttttttatttttttcctccccctcaaccaaacacagcattagaggataatgcagtttttttttttgccagctttcaactcctcgtgcctttcttcaatgaagtcttggtttcaccaacattaaccttggtaagttatgcataccaactggtgcagtgatcaggtttgtttattctcagatccagatacaatagatgtggcttttagttgctccagcctctttcgaagataggcttgtttaagtttctcgcgatgagcagccacttgctcctgccttcgaagtttaatttcagaagccttctctcttgctcgattaacttcttcatgaacttccctaatattgcgtttataatcagaattgtcaacagctccagctgttcgcccaggcccaacaggcttcatgttaaacatcaatgaa

SEQ ID NO: 42207 - DNA, 513 bp, Glycine max
  unsure (1)..(513): unsure at all n locations
aaaaaaataatttttaatttaanaatagagagataggaaaggtttgtagaaatagtatctaaccagggctttgaagcatcctggtaaggagatactttgcaaacaagcacattttgaaacacaatgtcatcaaattctgaactccatgctatcggggaaaacattcctttttgtccaggtcttccaaaattacatttgcattaagaaccacgctcaataacttacttaccatggcacgggtttcagatttcaaagaggctgataatgcctttctggccttttctttttggggcttaataacttccaaaggccaattggataacaacttttgaagttcaacccttgatgcctgatttctttgtataaaacaaggtctgatttagaacttgaatgacagcaactgcatcactgggtttacgttccaacagtagacccttgacaaagaaaaacccattataaagtgtgctgcttcattgattcagatctcaacttttctattttccataatgactc

SEQ ID NO: 42208 - DNA, 304 bp, Glycine max
cgctatcgggctctcgcccggttttagccttgggcgggatttaccgcccgattggggctgcattcccaaacaacccgacttgccgaccgggccttggggggcgaccgggtccgggcccgacggggcttttaccctttttggcgcccccttccaggggacttgggcccggtccgccactgggggcgcttttccagacttcaattcggacgccgggggcgaccgattttcatggggggcttttcccgggtcgctcgccgtttcttaggggatccctggtaggttcttttcccccgcttattggttt

SEQ ID NO: 42209 - DNA, 427 bp, Glycine max
aaacacaaaaaaaccggtttttttttcaatttggggggcccaatttgggggggaaaaagatccaattttcccaaagggggtgattcccttaataaacaaaataggggggcaaccccggaaggggttttttttggatttttgggaaaaattcccgggggggggggggggggcctcttagggaccccttttttcgggtaaattaccaggggggattggccccgggggaaacccccgggggggaacaatgcgggggggggtaattaacccgggcctgaacagttttggggttggccccatcacattaaagggggcctttgatggctttaaggggggccccaaaccccgggtggaggacggggcccctttgttccttccaataccaaaggggtggttggaaggacacaacggggtcttgggcccccgtttt

SEQ ID NO: 42210 - DNA, 350 bp, Glycine max
gggaaaaaaaaaacaatactttattacagctagaaaatcatcacaaatgaaccctaaagaaaaaccaccccaaaaagagataatcatcacttgatagatgagaacttaaaaataaatattaatcctgatatgaaagcatatttatttctgcataatgtcattaaatgtagtttctgcaggtttaggaagaagctcattattaaatggagtttcttcaggtttaaggaagaaaccctttttctctgcaggtttcaacggctccagtaaacatatcctctaagctgtacttaaatttgaagcccaagtctgtgatcttcttcgaagaaaaattaataatgtccaattcatct

SEQ ID NO: 42211 - DNA, 412 bp, Glycine max
aaaaaaaaaccccccctttacttttttttacaattcttaaaagggggggggaaatttttaaatggggggggtttttttaaacggggggaaggcctaatttctttttttggttggaaaccaaaaccatttgaaaggaaacccttcccccccatttttccaaaaatttttgttttttaaaaaaatttggtttggcctgtggaaaaaaaaaaggtggcgtttgagggtttcccgcaatttcaaagttttgggaaatccctaaaagaacattaaaaggcgggggttggttgggttttttaacaagggaactttaattccccgaagtttgttttgcccatttaaaactccacattttgaaaccatttttgggaccccacactttttttggaaaaaacaattcccaccaatgggggtt

SEQ ID NO: 42212 - DNA, 529 bp, Glycine max
ttttatcaaagcttaatcaatttttaaatagaaattgacagttgaacagtagaaaaagttttacaggacagtttttaattttaagaaaaaaaaacacttagagaaacgaacagtccctaagctttacattttttttcaggaggtgaaaaggagggggggagggttgagcaaaattgaagaggcttatatacaaagaatcagcagaaattcatgaacagtgcccaatggcattttttctgccttataattgcccagaactggatcatcaattaaactcacgcatctgccagttttaagcggggaacaatattcattgattggagttcctgaatcatgagcttgcatgcatatggtagcttcatggtagaaatattgtctccattcttacaagatgaacaaataccagttttcagcttatggttgtaatatcctaacaacccacatgcggtacatacctgaacttcaaaaggatcactagacaacatgagtcgctcataaattaacatactagcaccatatgcaatcaagc

SEQ ID NO: 42213 - DNA, 212 bp, Glycine max
atacaacaatattagtatatatagacgcatgcagtttatatagtaaaaaaaaaaaaaaagggggaaaaaaaaaaaaaaaaaaaaaaaaaaaaaaaaaaaaaaaaaaaaaaaaagggcggacaatctggaaggaccaagcttgcatccgcgcccgccccccctaatatcccatgttttgtttccccttcattccaactcattgtccttctttt

SEQ ID NO: 42214 - DNA, 353 bp, Glycine max
gcctagggagggagcgaagtgaattgaaattttggctctcgccgtgagagactcagcttggcggaagaggtgttggggctaatcctatttctttgaagaaggggatggaaaagactgcccaggagctggtccagctcctgaagggctttcgactgcctgttgaaggaagggagcatattaaagctgtagcctcgatttctgctggaaacgacgagtatgttggtcacttgattgctgaagctatggacaagattggttcagatggggtgatgtctattgagtctacctcatcatctgagacctatgtgaggagtgcatatgcgtggaaaacttcatcaataggtgtcatgaaa

SEQ ID NO: 42215 - DNA, 149 bp, Glycine max
aaaaaatgtggtatataaaccattaaaccggcgtacttaagttagagattacaatacccattagcaggccaaatatatatgacatttttggaacaaccccattttcaagcattgatacaatacagagtaaagaaaaggggaaaagaaaa

SEQ ID NO: 42216 - DNA, 552 bp, Glycine max
gggcaaaaaagagaatacatggttcttaatttatattcactcgatgtaaagatcaacccaaaactgagatgataatccagtcttccacggtgaaacaaaaaaataaatacaataaaataaagaagcttaagtacaataggaggggtaaaaagtcattgtaatttttggtgtaatcgatgagtaggtgcttcctaatttcgtctttcctgttctgcagtccgcagcacttggtttgccaatgttgaaaatgattttgctttatcttgcatttctgtggttcgaaggttgataccctgcaattttttcatgttctcctgcagcttgctttctgccaatttagcaaagcttgtttcgttggaagaagaaaatccatatttcttcttgatttgatcgactgcaccagcttgctcatcttgctgctcttccttacttgatgttttctggatgttgcccttcatctccttcaatctaccttttagagcctgaaactttccagtcaatttcttcttattaagagctcccaatatactttgatctttgtgtttttcttca

SEQ ID NO: 42217 - DNA, 445 bp, Glycine max
ataatgacaagaaactcatcggggttttttaaaaaccaaatggaacttcttgcacttccattttaaatatctataaataactgtcccctttcaaaagataaaaaggcccctaaaagccaataagaacagggcttccttttaaaaaattccagtgcgaagatttgccccagagaaaatagctgctccattgatggcacattgcacaacctgctcatgaatggagccttccaatgtaagttcaagggtcgccccattgattgctcacgcaactgcccttttttttcattcatgagctccacgagctttttttagcccatttgtgacacctgaatacaatcctccaccctctccccacttttaggacttttttcccgctctcttaaccatggccttaatagattttttcctggcctttcctttaaaaccttttaaacgaatttttttt

SEQ ID NO: 42218 - DNA, 518 bp, Glycine max
  unsure (1)..(518): unsure at all n locations
aaactaaaattattgattaaagattataaacaaacatttctacaatttgtattgaccagatggaaaattactacaatgagaacaaaggttacaccaacattacataaaatccttgtttcatgttcactttctcaacaaagagaaacaacaaaatgaatcacacaagggtaaaattaagagactttttcttttctcttctctcaggcaacaaactcacaattaaccttgtgataataatccaaaagtatacaacaactaatggctaaattaaaaaaaaggtaaaaagaaagatacgaacagtgtttttttgaagtcatcgttgatggagtttggttaggttttcggcgaatttggcgagagattggaagttgcagcggaggatggtgtcgacgaagacgcgcgtgtcctcggtggtgttgccgggggggacgtcaacgacgtaggactcgacgacnacngtgccggcggcggagcgggggtgaagagtggtgacagagcggtagttgaagaggcggtgg

SEQ ID NO: 42219 - DNA, 453 bp, Glycine max
aaagaaataagtcgttgtcgtgcgttggtgagatattatgtgtgaattttaatgtagcgcatgaaactttgcaatggtttggctgcctctgagcgaagtgggagtgaaattagtcggaagaaggatagagtggaacgaataagcggtagtggggaggacattgctgcggagaaaggtttggagcagtgggaaaggaagcgtaataagttggatgtgtacgatttcaatgaatacgatggcatggatgtggagaacataaggaggaggcatttggatggtcatgggggaagaaggtttatgggatcaatgcatgctgctagaagtggcattgatagggatttcagaacagggtcaagtggacgtgttctcgataagagaaagaactcctacggtgacaagcctaattgcttgtatccaagggataatgtgggtcacagtaggttcaaaatgaac

SEQ ID NO: 42220 - DNA, 448 bp, Glycine max
ggagtatagataggttctttgcttggagtgagtgcgagtcaatttttggtctcttgcgttagtcttggaagaaacaaacacaccagtcaaaaatcaaaatctcgagttcttggagggtttgagcgagctagttagtgtgagaaaataattgaaatgtctcagacgaagaaattgacgccgaatctggatcagcagagcacgaaggtgctgaatctcacggtgctccagcgaatcgatccgttcatcgaagagattctcttcaccgccgcgcatgtctccttctacgacttcaacatcgaaagcaaccagtggagtcgcaaggatgttgaaggatctctcttcgttgtcaagaggaattcacaaccacggtttcagttcatcgtcatgaatcgacggaatacagataacctagtggagaatctattggattttgagtatgaacttaaaa

SEQ ID NO: 42221 - DNA, 403 bp, Glycine max
gcgtctactcgttcatacactcgtactatcttctggagcgcatgcaaccaagaatagggaggggggatatatattatcaggttcttcatcatacattctttaaataccaaacaaagcctaaactgacctatcttggagacctgtatcatgaaggaaaagagtttgaggtgaacttgagggagatgaaacctggcatgttatcacatgaattgaaagaagctcttggtatgcctgaacgttctactcctccttgacttattaatatgcagagatatggtgctccaccatcatatgctcatctgaaaataactgtactgaatgctcctatcccccctggagctagctctggttatcatcctggtagatggggcaacactcctgttcgataatatgggcgtccact

SEQ ID NO: 42222 - DNA, 324 bp, Glycine max
gtcgttcacattcatgaatcgcttccttcagaagttggccatcgtcgagagatgcgtgtgagccctattcgttcaagatgagagctaagtggtagaagaagcgcatgaggaggttgtagaggaagcgccgtatgatgagacacagatctaagtaagtgctagagcaggagtagagatgatgctttgcatgtgctaccatcgctatgacattctaagctgttatggctcttatgatcgttgggtctagtcgctaggggagctgcatgtctgacttaaattgctatactgatcctggtcctgttgcatgactactgagtgtgggta

SEQ ID NO: 42223 - DNA, 534 bp, Glycine max
  unsure (1)..(534): unsure at all n locations
gacacacatagtagctattatactctctagagtgggggcggaatctgctagaattttctaataatggcgaaagacgttgagcaggtcacagagcaaggtgaatactccgcgtaggactaccatgaccctcctccggcaccgttgatcgacccagatgagctcacaaagtggtccttgtacagagccgccatagctgagttcatagcaacactcctttttctttacatcaccgtgttgaccattattggctacaagagacagagtgacaccaaaatccccggtaacaccgaatgtgacggcgttggcattttgggcatcgcttgngccttcggtggcatgatcttcatccttgtttactgcactgccggaatctctggtgcgttcaccataattatagtttttctcacatatcgcacaccgaacataatatatatatatacacacacacataaattgaaggacaaaagttaatggtttatgaaaatttgggtattatttaaaataatttaacagggggggaacaacattaaaccc

SEQ ID NO: 42224 - DNA, 465 bp, Glycine max
gttgcaagtatatatatggagatgaagggttttatgttctaccaacaacagcaacagcaacaaatagtggaggagaacatgtcaaatttgacttctgcatctggtgaagctagtgcttcctcaggtaacagaactgaaattggaaccagctacatggctccaccaccaactcagattcaaccaccaaagaaaaaaagaaacctccctggcaatccagaccctgatgctgaggttatagccttgtcccccaagagtcttcttgccacaaacaggttcatttgtgagatctgcaacaaaggatttcaaagagaccagaaccttcagcttcacagaagagggcacaatttgccatggaagctgaagcagagaacaagcaaagaggtgaggaagaaggtgtatgtgtgtccagagccaagttgtgtgcatcatgacccatcaagggccctgggggacctaactgggatc

SEQ ID NO: 42225 - DNA, 277 bp, Glycine max
catagggagtgagttgcgagaatgaggtgtcacgggttaccggaaggttgcatagctaggatactcgatcgcactacgccgacagacgtgtgtaagttctccgtcgtataatacaatgtccgttcggccgctgaatcggacgctgcatataaacgtactctgccttcctagtaccattccatcatttctgagtctacatcaacactcaactatccttacaagaaggagctgtatatcgctgtctcaaatcgacatatcatcatcgatcagggtaaaa

SEQ ID NO: 42226 - DNA, 392 bp, Glycine max
  unsure (1)..(392): unsure at all n locations
aaaaaaaaaaaaaaaaaaaaaaaaaaaaaaattaaaaaaaaaaaaaggggtaaaaatttaagggggtggatttttaggaaagaatgaattctaatncnttaattttgtatgaatgtaactaaattcaatttactggccgtcaatttacataaatgtgactggaaaaaccttaaatttaccaaacttaatagccttgtatcaaattctccttttgcaaatttgggtaataccgaataggctcaaaacgatctgacttcaaaaaatttgcaaaatatgaatggctaatagtacacactttgtagggttgaattaatttcgtcggttttattggctactagaatagtgaccattataattgcaaacaccctagattccagtcctttttttttctt

SEQ ID NO: 42227 - DNA, 469 bp, Glycine max
ggaaaaaaatgcgggggcccaatgggatctacttctagtcacctaaaaaggcacatgtccatacatgatacttcacagctttcccatttataaggataaaagtagggtccagccgtatcagtgttcgcaaaattcaaccataccatgcttatcaaggttagaggccagtcattgcaagaggtccaaaactgaacatgacttgatacatatgtgaatgtcagcaggttacttgatagtgatgtagcgatttgttccatgtcttgcccagtattccttaagatccaatggtgtagataaataatgggcttctgacaccaacctactgagaagtcttgtgaagacacttccgctcatctttcgtcctccaatgcgggcatggcgcttgtttggaagttgtggtagtggatacataaacaatgttgtggtacaacaagatgactggcatcccccattcccccatttgtagcac

SEQ ID NO: 42228 - DNA, 459 bp, Glycine max
gccgcgtacgtaagctcggaattcggctcgagtgctgagcgaggcatgcatatgatggttcaaagagctgttagcagaagaacatttgggaagttgattgctcaacatggttcatttatttcagatatggccaagtgccggatagagctagagagcaccagattgttagtgttggaagcagctgaccaacttgacaggcatggcaacaaaaaagctcgagggatattagcaatggcgaaggtagccacaccgaacatggcactgaaggtgcttgacatggcgatacaagtgcatggagcagctggtgtatcatctgacacagtcctggcacatctctgggcagcttcaaggactctgagaattgcggacggtccagatgaagttcacttggggaccatagccaagttagaactacagaaagccaagctttgagaacctgaacatacttctccacggggc

SEQ ID NO: 42229 - DNA, 250 bp, Glycine max
ggtggaacagaaaataaatggcatacattcattcccaacggattttcataatttatttttttacaggaatctccaaggaaaaaatcaacaagttttggggtttgagctaaacactggatggcccttttcataaaacatgtttttccaagattttgtaatcctgttaagcccaaagattgaattgctttacagctactgcctcaaaaatgggtggtcgctgatatgcaggggatcacattgggggggcttc

SEQ ID NO: 42230 - DNA, 436 bp, Glycine max
gttagctaagaattcggcgcgaggccagatccaaaagctgaatgccctcaaaccggataaccgaaaagccggaaggggggttcattgagagctgcatccctaacaacaagccattccataataccagtgttgccctctatccctgcaccaaaaaccgcaatgccctacggagacctttctacaccaacggtccccaataaatctacatacaacaaggtaatgaaatttttggcatgatattcccgctttgtcctaacacttatgaagagccgtaagaatcttaacagctaggacgaagccagaggcctcaagacctttaccaaaaagtacatcgcttcatatagagtgattagatcgcaatgcctactggcaacagcatggaggatgcacaacatatgaacacactcctgaagaaaaacgattctatcaaatgaca

SEQ ID NO: 42231 - DNA, 326 bp, Glycine max
gaccaagccgtccgccaacgcgtacgcccacgctttcgcccacgcgttcgatagccttggccgacaggtccgggtaatctttgaaatttcatcgtgatgaggatggtcctgctgctggcagtggaagcggtgctggacccaaaattgaggaagtcgattaagcagaccaattgtcatgggttgttcttgattttgcgaagacccttttgaagtttagataataacctgtcttgtcattatgttttggatttggattttacttttctcgtttttttaatgtacttttccccgtttcaacttaacaatgatataagttgcatatggtc

SEQ ID NO: 42232 - DNA, 518 bp, Glycine max
  unsure (1)..(518): unsure at all n locations
gacaattacatcatgtaatgaatattacgtatagaatatctggcaattacatcttataatggttattgaatatgaaagcggaattttgattgttttcagcacaccagctgctattggaatggtgtttaattttctgctatagtgtttcctgcatttgaatattcccattgttaaacagtaatcttagtgaaatctcatatgcagaaaatatggcaccatttactaggaaagctctggcaactgtagttcctaaaccccgccatagcacaccgtatccttcttcgttaacactctttttgaaacaatctataatgcctttgtactttatagaagagggtgtttgagcctgtagtcttgtctttacaacatcaaaagggtagcaactaatccaactcgtcacccctgctaatcctcctgctattaacatagtattcaaactctcttcaccactttntctgcaacctggtgaagntgntccctcatgtattcatatgtccagaagtataaaccatgagaag

SEQ ID NO: 42233 - DNA, 504 bp, Glycine max
cttcttctataaaccccgccaactttcagcgcgtttttcaaaggtgggggacccacacaaaagatcattgctgagtacatatgggttggtggatctggtatggacctcagaagcaaagccaggactctttctgggccagtgagtgaccctgcaaaacttccgaagaggaactatgatgggtctagcacagatcaatctccatgggatgacagtgaagtcattctatacccacatgctattttcaaggacccctttacgagaggaaacaatattcttgttatttgtgatgtgtaacaccccagctggtgagccactttcaaccaacaagaagaatggtgctgccaaaatttttagtcacccttattttgttgctgaggaaaccatggttttggtatttgagcaagaagtttactctcatttctagaaagaaggtaaaattgtgccacattgggttggcaccccttggtggggtttccttggtaccaacaacggccccaatactac

SEQ ID NO: 42234 - DNA, 311 bp, Glycine max
  unsure (1)..(311): unsure at all n locations
cttccgncaaaaaaaacgaaaaaaaaagacctagtttttcgtgccgattctacaggacaatggccttcacccaacctaattggcggtggcggataagatgagtgcgtgggctgcatcaagggctgaacttggtctgcttgtcttatatgtgggcaacgctgattcaagggaccaaatatgcaaggcactgccctttggttaccaatgttttaacaacaaaaaacctggttctgctcaaattgtttacctaacaaccaatttgtttcgaaaaggcttgcgtctttttaaatttgccaattacctacatgctt

SEQ ID NO: 42235 - DNA, 350 bp, Glycine max
tccgccaccccgtccgttacttcataaaaacgaccataataattcaaaagatgtagatgggttcgttttgccagctctggtgtatttggcccgcgagaagagaccccaatatttccacaacttcaaagctggagctatgaattcattgttaagggtctcttcgaatatcagcaatgggaaaataattctaaatgtagactgtgacatgtactcaaacaactcacaatcagtgagagatgctctctgctttttcatggatgaagagaaaggacaagaaattgcctatgtgcagtttcctcagacttttgagaatgccactaagaatgatttatatggggggtagtctaaca

SEQ ID NO: 42236 - DNA, 323 bp, Glycine max
acactccatgcccaccattaaagctctatgggcacgctacgtgcccgagggacacgctcaaacttggtgccatgtttaatattataatatggttggttcacacgggaaagagaaaacttgtttcaaaccaccgctgacaaaagcttgattgactagaaaaaaaccaagctggggagaaaaaattcacctctctaaaaatgaaggttgttaacctcaacattgacgtcccacttgttttttataaaaatgtgacttgtggcaaaaaatacaactactggttacacgtgctccctctaaaccagtggaaaggattgacgaatata

SEQ ID NO: 42237 - DNA, 397 bp, Glycine max
ctcttcagcgggcgcttttttttttttttttttttttttttttgcagttccatcacttgctttccaacattataagagaacatcacaaagttcattccgctttcaactacaaggggttattgaggcttatcataactaaaaatgccacgcagaatgccataatccacacaatgtattaatgaccaaaacagttgtctttatgaaagtttaaccctgataaaatctacactttccaaatggttattttcaaacatagtaaccggtgaaaaaaaatcctcttccaacaatctcaccagcgctaaaccatgcaaagaattcgaggccaaacaaagcagcaattcccgcatcttcaacctttagctctttcctgttcttccacaaattcttggcataatca

SEQ ID NO: 42238 - DNA, 318 bp, Glycine max
gggggagagcatagagtattctatgaaagttttggacacgctgcatgagtacaaggcgggagggctctatatgaccacccctaaatctcatactccacccatgtatcggatgcgaatctttgcacataatcatgttgtcaccaagtacacgttctggtactttgtatcttaactgaaaaagatgaagaagtcttcttgagaaatcgtctactgttcacaggtattcgaaatatctcccttgcaggcgaaaaacataagcatcaggctgcgctatgaatcacgcaaaagcacccacaacatgtactttgtataccggga

SEQ ID NO: 42239 - DNA, 548 bp, Glycine max
  unsure (1)..(548): unsure at all n locations
cgttcgttagctcggaattcggctcgaggggatctgaaagattcattcattaactcagctgttcaaatagatgtctctgggaaccgcatggcagtggttattcatgttccttacagattaaggaaaggatgccgaaagatgcatgtccagcttgtgcgagaacttgagaaaaagtttagtgaaaaggatgtaatcctgattgccacccggtggatattgatgccaccaaagaaaggatctgctgttcatcgtccctgcacccgaacacttactgctgtacacgacgcaatgctagaagatatagaattgactgctgagatcgaaggatagcgtgctaggtataaaatcgatggtcacaagattatgaaggtcttgttggacccttatgagcgaaacaacaccgattacatattggaaacttttgctgcaccatacatgaaactttctggcaaagatatggngtttgagtattctaccaccgatgcttacgttctatatgctagctctgcatatagctctgaattatatatggaggatgctggatttgc

SEQ ID NO: 42240 - DNA, 439 bp, Glycine max
tcctcgacagacgcctccctttttttttttttatatgaaacataaagtcgtttatgccactcattaattaatcactggcggagattaccaaaaaatagtcactgtctggcacctacattaagttttcaacttacagacgcacatacaaattctcaatagttatctaactaaagcatacaccatcgtcaaaagacatatccccctaaccggaatcctgcggcagcaattaagaacgccatatgttgctgatgataaaatcacacaaagctcggagaaagaactagtgcgtgctcttcgccttgagcgcatgatagcaaagaagaagctcgtgcagctcgcgccattttgccgccacgtccatgaactcggtacgcgccggcaccatctgctccatcgactgccggaagtccgcgtaagggtccggcgagtactttcttat

SEQ ID NO: 42241 - DNA, 453 bp, Glycine max
ccagaacatcccacaggatggtgagcatctttacaatcgcgctgtttctgctgggagcgggcaaagcaaaggaagtttgctatgaacaaatcggatgcttatctgacgcggagccctgagccgggacagcaatcatgcctctgaaagttctcccctggagccccgagagaatcggcacctgcttactgctctacaccaacaagaacccaaacaactttcaaactctgcttccctctgatccatcaacgattgaggcatcaaattttcaaacagacatgaagacccggttcatgatccatggcttcatagacaatggagaagagaactggctgctggatatgtgcaagaacatgttcaacgttgaggaggtgaactgtatgtgcttggactggaagaaaggttcccaaacctgatatacacaagcttacaacaactttttgattgtgggcgccc

SEQ ID NO: 42242 - DNA, 306 bp, Glycine max
  unsure (1)..(306): unsure at all n locations
actgacaagtaaacattatgtttncncttttttacaagagacgcttcttcaaactacgagtgggtcttcaaaggctaccgattttcatagtggctttttccggttccctcgccgttactaagggaatccttgttagattcttttcctccgcttattgatatgcttaaactcaacgggtggccccccctgtcctgaagtctttatgggagcgtgtgtgcacgcaaaaggtcgttgatgggtccacaactgacccgttcgcacgtgatttgtctttagcgtggctcatccaccattttatcacggcga

SEQ ID NO: 42243 - DNA, 568 bp, Glycine max
gagcccatactccatggaatggagtatgggttgatcccatcttcacaactactcttgtcccttttctgcgtgatgaacccatactccatggaatgaactagttttggccaataaattactgagtaagggcaacgatattctgtgttgccattatgctagttttgatggttcgattaccaaacaagttatgagcaaaatggctgaaatgataaacactctttctggtggtgatgcaaaattgattcgtgaaaagacacacctgctgttggcttgttgatcaaggatggcaattcgcaagaaagatgttaggagagttgaatgtggaatcccttctggatttccgctcacagttatttgcactagcatttttaatgagatgctcattagatatagctatgaaaaattactgcgccaggctagagcttcaagcatgtttttacaatccttcaaaaattttgtttctttgtgcgtgtatggtgatgataacttaattagtcgtcatgaatatgtcaagccttactttagtggttctaaattgaaaagctttttacttgtcataatatcacca

SEQ ID NO: 42244 - DNA, 326 bp, Glycine max
acgcgtccgcccacgcgtccgcccacgcgtccgcccacgcgttcgaaagcactgaggtgtatgttagcagtgcttgatataacaaccttcatcgttatttatgatctttggaattgggaagaggaacaagtgctcaagttgcaaatgtttctgttatctttgatgcttctattgaatatgtctgttgggctattcttgtacatatatttcttcaggttaaaaaactgaacctgattatcaatttgtactggttttcactcattgttattccatttgaatgttttatctgaaatccttaatgatatggatgcgctagttatatttct

SEQ ID NO: 42245 - DNA, 387 bp, Glycine max
gcgtccgattgtccctcctacttgctggaaaccaccatgctctcttgagaaaaagaacatatgggaaaagtctgaatttgttgctcagattcagcgaattgatggacaccaacttcagcatgcacaagaaattatggctagtgctagtggaaatacaaaaaccaagagaaaaagagatgtaaaagtagctttagactctcagcttggtaatagaaacaccagcactccaaataaccagaatgttcaaaaatgtgactgtgagtctgaacctggtcctaaattcagtctcaaaacattaaagaaatatgcagacatatttaagagtcagtactttgattacaaggataagaagaagattataggttccaatataaaattagctataca

SEQ ID NO: 42246 - DNA, 352 bp, Glycine max
acctagaaaatcatcacataatattgatactccatacaaatgaatcaagtgttgtgtattttggataaacaaaaagggttatgagccatctaaatccaacacatctcaacccatgccgtggtgaaaaataaaactaactaaacaaaaaatgctcctccggcattgagccatctaagttatcgactcagtgtgctctttgttagtaggggtgatgacggtttttcttgtgagttctttctgccttcatagtcaatgtgcttgaaatccaagattgatttgattcagaggaatcatcagagagccaacaacatagccgaccatttttcccacccgtccaaccgaaaatgccttg

SEQ ID NO: 42247 - DNA, 263 bp, Glycine max
ggaagccaaaagtttccaccaaagcattaagccccgttggcatataaccgggtccatttcttggccggttaaactgcctcggccttattaaatttccaatgctgggcaatgttctaaaaaagcggaacatttgggtttggggctcttaaaagagcttgtatctctaaaagtccgtggcgaatttgaggggggggcctccctttttttttaaaaatggaaaaaaattttcggccaacctattaaatgttgggatgatttttttt

SEQ ID NO: 42248 - DNA, 457 bp, Glycine max
cgcgtccgcaaaatcattaaaggtgtcaacccaaaaatggatgatagtgtaaaaaagttgtaagcagacaatgcatcaaaactaaactcatacttatgtcatctttttcaaatgttttatgaagcatttgtaacattatttttattttttccccctatatgcaggttagatctgttcgtgtcaggctgaaaaatctaggtcttgaggtgtcaccttgcgtccttgactttttgagtaagactataaatagttggggggatgttgctgaaaccatacttagggacattgattgtgacgatgattgtggtgacagttgctcggctttgccatgtgggattttcttatttggtgaacatggcactgctcccagtggattgcatgtgattgatgagcaggcttatcatgctagtcgtcacttttctgatatttatatactggttgaaatgttatctattcc

SEQ ID NO: 42249 - DNA, 207 bp, Glycine max
agctcggaattcggctcgagacaccatatagccaacgtaacagaacccgttaatttgtgtattgaactaaaaattgacaggaaccctgctgatgttataaaaacactaggacactttcaacaatcacactatcctatagatgccacatttatccctgctcgaaacgtaaatcataggacccattcttatgtgaatcgcaatgaaaaa

SEQ ID NO: 42250 - DNA, 106 bp, Glycine max
ctttgaaaatatgacggaactataaggccacttgccatatagttgagtgtgccacatccggagggagatcaatcaggtgcttttagtcaaatttttctgcctgcat

SEQ ID NO: 42251 - DNA, 333 bp, Glycine max
tctgaatcaaacattgacccgcgaaattatagctaattagctaaagatccattgaacactgtcagtcaatccaaaataaaaaaaggtgaaaaaaacatagccaaaaaaggctttatagacgctcctaacaagaaacgcatcatatttaattttgattaacctcctacattttgctgccctcagcatcagcctcggacttctacagtgggggcatttcagcatcagcttcacctgcatcctggtcaatgctcagtccaagcttcaacattctgtggatcctgataccaaaagtgttgggctcgtcaaggctgaaaccagaagtgagaagagcag

SEQ ID NO: 42252 - DNA, 344 bp, Glycine max
ttttgttcctcactgaccaagccatggcgatgagaaccaaacaccccatagctggggttttatttttcaccttagacggagaaaaaacctagcctttggcgaatgccaagaaacccacgaagaaaaagacaaccgggggaaaacaacaggcaaacaccaaggcccacatgcacagtaaaacacaaaaggtgacatggggataagctggcaaacatgagacacggatcatcgtatgaagcaagatcgagagaaacaaaatcgggaggaaactcgtgagaagaaagaagaagaaagccgtgaaaaggaagaataacaacaagagcagcttgaggaacaagatgaaa

SEQ ID NO: 42253 - DNA, 356 bp, Glycine max
  unsure (1)..(356): unsure at all n locations
acgtaagctnggaatccggctagaggaaggcgtttgatactaatgacaagacaatggataacgctgtagagtacacaaattatgcttctcagtgggggaatgaagccaacgacaaaaaaacctgttccaaggtcggagagtacgccaattatggatctcagaatgcgaaagaaacaaaagatgcaacgaatgaaaaagcttgagagtacacagattatgcttctcacaaagcgaaggaaacgaaggacaatacaatggaaaaggctggagagtacactgattatgcttcgcataacgcgaatgaaacgaaagacaagacaatggagaacgctggagagtacacacattatgctttt

SEQ ID NO: 42254 - DNA, 462 bp, Glycine max
tacgtaagctcggaattcggctcgaggaggtcgacattttatgatttttatatctcagatgcagagagcagccttagctgaacgggtgacagaggggaattcttaatgacatgcaaccgactatccggataaagacagaaggatggctcatcgatacatggaaccctaacaacaagccattccagtgtgccggtgttaccctctatctatgtaccctcaaccataacgacattagtttaccttgctacaccaacggtccccatgaaatctacatccaacatggtaagggtattattggcatgatatacccggattgtgctagcacattcgaagagccttaacaacctctacatagaggacaaatgcgggcaccacactaccgtcaccagaagatctatatctccagagagggtgatatgatcgcagggcctactggagttgcatggcagatgtacaacaatg

SEQ ID NO: 42255 - DNA, 358 bp, Glycine max
  unsure (1)..(358): unsure at all n locations
gtaagctnggaattcgggtcgaggatgctcattaaatcttgctatgaaaaaatattgcgccccgctcaagctacaaggacgatgttacggtgcttcagaaattgtgattgtttgggtgactacggtcatgataactaaattactgtccatcagtctgtcaagccttactttatgggttgtaaattgcaaagctttctagctggggataatatcaccattactgagggtatggacaaaactagtgcaactctgcaatttagaaaggtagcacattgtgatgttctcaggagaaactgtaaccagatgtctaatgttttgcgggtggctcctgaggacaaggtgagtccatggtcacaac

SEQ ID NO: 42256 - DNA, 432 bp, Glycine max
aagaaaagggtttattagggaaaaagctgttgtaatgtattcagctttggcatatgcttttgctcaggttgtagtcgaactacctcatgttcttctacaaactgtggtctatagtgctatagtgtacgcaatgattggttttgagtggtctgtcactaaatttttctggtatctcttgttcatgtacttcaccttcctctactttacctattatggcatgatgtctgctgccatgaccccaaacccatccttagcggttataatttcttctggattctatgaagtatggaatctcttctcacggttcataatcccacgaccaatgatgcctgtctggtggagatggtattattgggcaaatccagcagcttggactatgtatgggctggtgacatcacagtttggagatatacatgaccatattgagtttat

SEQ ID NO: 42257 - DNA, 520 bp, Glycine max
tcgctaaaacagtaggaacttaatatggcattgatttaaactattcaggcgattacaaaaggacgcttagtgcgatatacatttgctaaaatttgtgcaaaccttggatgatttacccattatagagaactgatcactagcagaaggtgaataacttaccagcttctgttgggtattatatcaaacaactacttgtacgctaatggaccagatctagacactgcaaacctaggaagtggactggggccagtgcttccagaagttgagccttcaacagactttaccctactacagctggcactgtaatccaaaggcccggaacgacgaacgtttctttgcttgttgtccatgctccttaagctgccaatatcatcatagaggtgctcctggttatgtgatgacgatcctttgaagtatcctgattcgtgcccataatactgtggtgagtctccaccacgatgatgccttaagacaggagaagcgtgtgcgagtaacacggcaggtgaatgacggggtgatg

SEQ ID NO: 42258 - DNA, 305 bp, Glycine max
aaaaaaaacacacactttacacattttttccacaattaaaagaggggtggaaatttttaaattgaccgagctttctcaacaagaggggcatgtctaatttccttttttgaattaaacaaacgaaccaacgaaagaaaaccccatttcccgatcatgccgaggattccccattttcaaaaaatcttgcagtagcctgtggaacaaaaaaagctggcttaaaagttttaccagcaatttcaaaattttgagaaattcccaagaaaattttaaaaactgttgactgtttgggattgtcaataaggaaa

SEQ ID NO: 42259 - DNA, 430 bp, Glycine max
  unsure (1)..(430): unsure at all n locations
gcgtacgtaagctcggaattcggctcgagtgattaaatctcacaccattttgctatatcttgtcttggtgttggaacagttcttggtagctccttctggagtgaaaggtggaagcatctcattctctggttgcattcagcttcttggcttctgtgcttttgagagttgtgttggcatattctggccatccattatgaagatgagatctcaatacattcctgaggaggccaggagcaccatcatgaaccttttccgcattcctctcaaacattttggggtgtgtgggctggacaatgtatggtacacaatctactacttcaatgccatgcttgagcttaccaatgcaatagtattttcttatctctgggtttgactaattgggtattttctcgatgcanggtgatgattccctatcactggtattgttgca

SEQ ID NO: 42260 - DNA, 133 bp, Glycine max
  unsure (1)..(133): unsure at all n locations
agcgaggaattcggctcgagcaaaagtgtttccacttgagtgaaaagtaatgngtttagaactaaacaatttttcaatggcctccgagggacatttttagctagcttaggcatcttctaaagtttctcccaaa

SEQ ID NO: 42261 - DNA, 434 bp, Glycine max
ggaataaaacgtaaggaaatttattcaagaaattatggatgcatacaatattgatataatgcacacccaattctacaattggccttgccgacatacaataaatattttttaattttaacacgtataagacaatcacttacacactgtaactataagtaattagattctcgatcacccaagtttaccaaataaaaatactatatattacaaacttcaaattttagtggcaagtgggcgagctttgcacatggcctccaacggaatcaaccttgataaggtgatccaattattctctgtcatatcaagtttttcctcactaactcttttccagtcaaaacattgaatcaacaatcctaaagtaaagctgacgctttgcatagccatgggttctcctggacaagcccttttttccatcccaaatgctaccaactttt

SEQ ID NO: 42262 - DNA, 461 bp, Glycine max
cgcgtacgtaagctcggaattcggcgtcgagagtttgttgagatagctagaagcaataagatgaaaatgaaagtgcttgttttgtttgttgctacaggggtggtagcatatgaatgccatggctcagactaccagaagttccctctccaaatgaaaactgggtttggtgggcaatacagcaatgaggtggcatgtgccagttggaggcttggcgtggaagcaaacaacgtagtcaagtggcaaactgttcctgcagcttgcggagagtacatagctgactacgttctaggagaccaatatagatcagattccaaaacagttaaccaacaagcttatttctatgctaaatccctcaaactcaccaacaaagatgtctttgtcttggacgttgacgacactactctctctaatctccagtattttgctaactcatggatttggtgtggaaccacacaatacga

SEQ ID NO: 42263 - DNA, 412 bp, Glycine max
aattccccgaggaattccgatctcatttccttgggcttcaggataggcctaataagaaaacatagcagtgcgcagcatatattgcacatttttgcctccttatttcttgaaaatgtggaattggaattccccgaggaattccgatctgattgggctctggcttcaggataggcatagtgagcctactcgccaagtcaattcatatatgaacatttttgcctccttatttcttgaaaatgtggaattggaattccccgaggggatccttgtagagtagacctgcaagcatgcctgctgcacattaaaattcatgagtgatccctccagaagtgaaggttttcttaatgcttaagaagttcaagtagccttgtcgtacccaactttaaacgccttgcaaaacaatttcttttta

SEQ ID NO: 42264 - DNA, 378 bp, Glycine max
ccacgcgtccggttagagatagatagcgagcggtcgatatagacgatgcaagcttacgcacgcatgcatgctactacatatcttatatatagagctacctacattcaattgactggccgtcgacaaacaacggactgactgaacaaaccctgtacttacctaacttaattggcttgaaatacatctttctttagctagcttgcttactaacaaacaggcacggaccgatcgtcctaacaaacactcacgcagaatgaatagcgaatggcacgctctatgtacccattcatcacgcgcggcgtgtgtggtactcacacgcagactgacacattcactagcgagctagctagcgctcgtttctttcgctttctttccttt

SEQ ID NO: 42265 - DNA, 212 bp, Glycine max
tataaaaccattagtctattgctaaatttttcaattacatctttcttgcacacataaattccttggaagtgaacaaaacacacaaactttaaaccaagtaacagatctttaacatttaaccaaaaatttaggcccaaacattagcctttaaccacttaaaacttaattttttaaaacaattaaaaaattatcttaaattagaaacttacctt

SEQ ID NO: 42266 - DNA, 235 bp, Glycine max
  unsure (1)..(235): unsure at all n locations
tggcaccaaacaagcatggatatggtcaagtccttcaagaggctacggcaaattagacnagnnggagcagcaagcctatcagatgaagacacgtaagcgcctcataatcatcgcagtctcttccatcgttctatttgcggagatcatcgccgcggncgcaagggttgagatacacaagcgcaacacctcatcatcgccctcctctgactcgcccccgcaaactgagttaaccccg

SEQ ID NO: 42267 - DNA, 377 bp, Glycine max
tgcatgcaaaatcatgttctgatctttataatgttattggtgaggatttttggttggctacctggagctacagtactgcatttgaatggaagctgctagatagtacttggatataccttgtaaatatgggtgagcttggttttgtctttgcaatcataacaccttgttcccctgctagatgggatgattgtgacgaagatatgactgtggcatgggtaactctctgcaatgcttactgtggtgaatactattaggctactgactccgacacgcttgaaaacgtgcgagatgcaatttcatggatgacattttactggtataactgtatgccactgtctaggggatcggcaggggttggattcatagttatgctgggt

SEQ ID NO: 42268 - DNA, 440 bp, Glycine max
gctactaatcatagccttctataagaagagaataagaagtatttcaagaaatagcccctctaggccaacccaccacatacaaaaacaaaaacaaaatactataatctttgtttaaaaaaatgaagctattggagcagaatacatatattccagttctatctaacctgcagagttgcgagtaggtgccttaccaataagcactgcttcaccacttgcagctttctttgcagcaagctcctccaagcgtttccacgtggcttcacgccctgctatgacttcacttttctttgactcatcttcctcaaacttttagaaacattctttagatagggcgggatcgacatcattaaaaaccttccgcacattcaaagtcaaaccatggacagctaggttccaatgacttctagcatttctctccaatgcagggaatatgatgggca

SEQ ID NO: 42269 - DNA, 434 bp, Glycine max
aacagaactctggtcaagcatcacagaattatccaccccaacagaactatggtccaggatgacagaattatccgccccaacagaactttgttcgagcatcacagaattatccaccccaacagaattatggccaggcatcacagaattatccaccccaacagaactatggccaggcatcacaaaattatccaccccaacagaactttggccaagcatcacaaaattatccaccccaacagaactatggtcaggcaccgcaaaattatcctccccaacagaactttgatcaagcatcacagaattatccccaacagcaaagatatgggccatcttcaccacaatatgcacaacagcagagctttggaccaccaggacaaggagaaagaagaaattatatgccacagcagaacattggacgaccgggacaaggagaa

SEQ ID NO: 42270 - DNA, 428 bp, Glycine max
gtttttatggctccttgtctggtgaaaaaatgggatttttttcatctgggtcgcggggtctgccacataaggctgaatgtctcatatgtttgtggataagtggggtggtttgttagtattctggtgttccttggtttggtttcttttttcttcccttttttttataaattttttagaggctaacatggaggaggttgagcaagctaatagagtagctgttgaaagctgccatagggttctgagtttgttgtctcaaccaagggatcaggttcagcataggaatttaatggtggaaaccggtgaaactgtggtgaggttcaagaaggttgtttccatgcttcacaatggtttgggtcatgcaagagtgaggaaacttaaaaaccctcaaatcccctcttcccaccaaagcatcttcttagacaacccca

SEQ ID NO: 42271 - DNA, 360 bp, Glycine max
  unsure (1)..(360): unsure at all n locations
ttgtcatctgcacatggcattagagtgtatgaaaagctcaagattacaagtagtatgcatccttaaattatcatgttacaaagaagcatataacagttgaaattgaaaaaaaaaataaaaaataggtngaataagataagaacaagcataattctgtacattaagcaaatacatatgaatcatgtatagcatcaagaagttgtacaagaacataagaagaaagattacagcatataaggcttctagctttgagttgttcctcaatatttccagcactgtcctataagtttcccaaagaaacttaaaccatggggtcacagtctcccgatcagatctgtctttttcctttttcgccactga

SEQ ID NO: 42272 - DNA, 340 bp, Glycine max
  unsure (1)..(340): unsure at all n locations
gggtgggtgggcgcactaaaaaacatttatttgtgatatataccgttaacaatattggtgtaccacatgtacacacaactttgtgcacaagttatatattgcacactatactcacgggtcatatattaccagacagggagttcatatatcaaaagaanaagttcaaagcagcaatgtgccgaccctgttgttgcaaatgttgaagcaatatcagggtagtctttccatgaggttgtgaccttcagagatggatacagccacgttttaaccgaatccacaaacgagtttggatccaagttcaaaatggctttccaatcaacctgcaaaccctgtgggatgc

SEQ ID NO: 42273 - DNA, 401 bp, Glycine max
gggcaaggaatttttcaacttaaccaaacaaaacttggccgaaaaaatgttgaagtcatacaaaatccgtttaactgacagatttcaggggaagttttttgatggaccaggcaaaaggggaaagggtgcaacagaggcttacgatccggggggacccccttcattccgatggggacccctggccttgattttttgatcgccgttatcatcatccaactttgaaaactccgtaggggatgcagatttcacaaacccttttgttttgttttttaaaaattgttcgttttcaaaacgacggtgaataaaaagcccaaacataaacacaggggggtaaaaaaaactggcatggaacattctccttgccttttttttggaacggtttctataaaatgaaaatgctg

SEQ ID NO: 42274 - DNA, 456 bp, Glycine max
ggggcccgcaaaaagtcaatttttttccaaagggaaaaactgacccctgaacattaaaccagtatggcgggggaaacacctttttttttgaatactaaaaaaccctcggggggctggaaatgataaatccaggggcaataattggggggaaactaaaacatcctttatccacttgggattggacattttcaagctttccctctttaaacataggggggaacaaacccccctcgggggaaaaagatgccaagaaatattttggcaaattcaaaagtagattttttgttcctcgaactcatgcttgggatcaaaaagggagttggcagccaattccttttttttgttgcaggggaagtacacctccaatacgatggcccgatcaaaaccctttgtttaaagacgttcaattgtttggccctcctaaggggggacagttactgtttggggctttccaaa

SEQ ID NO: 42275 - DNA, 426 bp, Glycine max
  unsure (1)..(426): unsure at all n locations
aatttaccagctatacttgttccttttgaaggttagaagtgctacaatacaaacaatggcggctactcaggaagatgtgaagcttttgggtattgtgggaagcccatttgtgtgcagggtccagattgcccttaagttgaagggagttgaatacaaatttttggaagaaaatttgggcaacaagagtgatttgcttctcaaatacaaccctgttcacaagaaggttccagtgtttgttcacaatgagaagcccatagcagagtctcttgtgattgttgaatacattgatgagacatggaagaacaaccccatcttaccttctgatccttaccaaagagccttggctcgtttctggtccaaattcattgatgataaggtaactcaacatttcaaaaatcttcttaggtntcatgatttgtgctgatt

SEQ ID NO: 42276 - DNA, 375 bp, Glycine max
  unsure (1)..(375): unsure at all n locations
caaatgaatataccnacaaacccgcaacattttaaaaaaacaaaaacccccacacaaaccataaaaacccaatctctttctgattacaaacagcaaaataaagcaactgttacacttcaatatctattgaaaactaaattttcaaggaaagaacacaaaaagcttcttatttcttcaagggaaactttttcacttaatgaatcaaatgacaagtttcacaaacttgtttatgatcttacatctataataaatatctaaaagcacatgaggacgtatctttaacaaactaaatgtcaatatattgcaaaatttcaaaatgctttacaacatattaaagctcatttagaataaacccatgctgcaattatacattaa

SEQ ID NO: 42277 - DNA, 135 bp, Glycine max
gcccacgcgtcgccacgcgtcgatttaccatctatactgttccttttgaaggttagaagtgctacaatacaaacaatggcgctactcagaagatgtgaactttgggtattggggaagccattggtgcaggccaga

SEQ ID NO: 42278 - DNA, 163 bp, Glycine max
ccacgcgtccgcccacgcgtccgcggacgcgtgggttcactttcattttaaaatgggttatctatacttcttgagggtcctgtttgctttatgcctctcatctcctaacaatgtttggttggctcaaaattaacaatccaaggtggcgatcttaggaaccggc

SEQ ID NO: 42279 - DNA, 392 bp, Glycine max
aaacaaatattttttggagaatacaatattttttttttacacttcggacaggacatttgattggttttttaggggataacttttaaaacttagggaaaccaaagggggggggccaactttttaaaaaacttacggcccaaaaaatttggggccctacatggtacatcacctaaaaggaaaaatatttttttaaatttccttaagggcatagctaataaaaaacataattttttttaggggttgtttgggggtgagggaccattggagaaaaaaccataggggttatttcaaacatgccatgccctttggaaagcttggaaaaaccattttttccccatttttccccccacaaatttttgatgaaccaaaatgggttggtggcaaacctaaaa

SEQ ID NO: 42280 - DNA, 464 bp, Glycine max
aactcaaatttgccaatattcgtagaacaaatatctcttagttcctgttacatgttgttcgggcaaaatttaacagaaatattggaggggcagggaaagcttttgtgctttccaagcctaatatttgaagctactactttaatataacaacattacagataaacatatcctaaacatatggaactgttctattgttgttttgagaatgtgattgctctgactcttcctgggttccaacatcctcatcattctcacctgacatctcctccaatgattttccgtttgcctcaggcaccaagaatgtaaagaagaagcctaaaatattaaccacacccaagacaataagggcattcttcacaccaatacctgcagggtaccctgcatctgctttgctcttgtccttgttttgtgccaagtacaagaacccaaatgcaccaactatagccccgagctttccggatgct

SEQ ID NO: 42281 - DNA, 498 bp, Glycine max
cacgcctacgtaagctcggaattcggctcgaggagctgccaaggctgttgggaaagtcctccctgctttgaatggaaaattgactggtatggcattccgtgttcccaccgtggatgtctctgttgttgacctcacagtgaggctggagaaagaagcttcctacgatgaaattaaaaatgctatcaaggaggaatcagagggcaagttgaagggaattcttggttacactgaagatgatgtggtctccactgactttatcggcgatagcagatcaagtatttttgatgcaaaggctggaattgcattgaataagaactttgtgaagcttgtttcttggtacgacaacgagtggggatacagctcacgtgtcattgatcttcttgtattcgttgccaagaagtctctttaaggtgttacttcaaagtagcttgtcttcacattattaccgtatgtttatgtttagctgcgaattagtgtcttgctcgagcaaaaaatgag

SEQ ID NO: 42282 - DNA, 330 bp, Glycine max
gggcttggcccttaaatatatgcaaattaaacgggtccataacgtcacatacgcctacagaggacaaacgacttatttttaagctggacaataatgtatgtgctactacaaattctacaatgctacatttgttgctcaatcagccttaagggtgaacaaattttttgtaaccagaaacttgagccagctccgataattttacctcaccacttaaaacctggccattaataatccacgttgggaaaccttctagtttggcatctatgcatgccttgatcattttagttcctctccgaaatccgtcgggaaagcattccacatagtccaact

SEQ ID NO: 42283 - DNA, 441 bp, Glycine max
tttaaaaggaaaaatggatttattcgactaaaaaatagtaaagctggtatttaagactaccttaaatcttaaataagacattgagtaaactagtacttcaaagcaggttacaagttcaaatctttatactccttttcttttcttttccaaaagaatctaaatattgtaaataagctactaaaatctgctatagtattcactgagttagagaactcacgtaaatgatcagatggtgagattttctttgagtagtgtgaaagtgccacttatgttcccaccaacgtctgggaatgcctcacagccaaaaagaggcttcactttgccctttgaatcaacttcaagcggatattttaatagatgacttttcatttcagttacctcttctgctgcatattgtctccagttaaactcactcaatgaccttatccgtcttacacattc

SEQ ID NO: 42284 - DNA, 510 bp, Glycine max
ggaatgaggcacggaccgggacctgcctgcggaccaaaaaatggtattgggcgtcgccatggatctcgtcgtcacattcgtgattggcgaggcctgtgagaaagtgccatccgcccacagaagcacgcagggatagaatgaggaagaccgaaaccaaacacgcctgctccggaaggccatggttcagtccaaaccgtggcaaggacttgacgcgcattctctggcgagcccacatcctacctgactggcgagttaacaagtgactacagctgcgacactggtgggctttcggacgacccacaaaccttggccagaaaccgagagctcgaactgatccactccaggtgggccatgctcggtgccttgggctgagtcttacccaaactgttgacccgcaacggggtcaagttgggaaaatctgtgtggatcaaggccgggtgccagatattaaacgagggtgggctggactacttgggcaacccaagccttgtacacgcacagagcatcctc

SEQ ID NO: 42285 - DNA, 319 bp, Glycine max
  unsure (1)..(319): unsure at all n locations
ctcactttctcgctcgccaaacgcccctctctctcctccaatggccgaccagctcaccgacgaccagatcgccgagttcaaggaggccttcagcctcttcgacaaggacggcgatggttgtattactactaaggaacttgggactgtgatgcggtcactagggcaaaacccaactgaggcagaactgcaggatatgattaatgaggtgatgctatngaatggaaccatcacttccaagttctcaactgatgtccagataaaacaccactcagagactaagagttcggtgtcacagaaaaggtatttgactactcgctta

SEQ ID NO: 42286 - DNA, 386 bp, Glycine max
ggcccacactgccaaccctgaagaaaacagatcgctccaaagcacccttcatagcagaatacaaagggttccacgttgatgggtgtgaagcttcagtgaatgcaaagttctgtgctacacaaggcaagatgtggtgggatcaagcacagtatcatgattactgcggtctttaccgcatatctctcatcggcgcctgcatcctacatgaggtctacgattccctcattgaaatccttccctggatcaatcacttcaaacacacacctagccgacaatggtttgaaacggatgcagttctgcgggttagcttggcgaatatactgtttttactattctagctgttctgatggatggtgtgaaaacccacagggatcccttattatcat

SEQ ID NO: 42287 - DNA, 519 bp, Glycine max
attctaagagaaacatttgattaaccgaacaaagaaaataaacaaagacaaaggaagttaaactctcaataaaagcacattaatacagtatcactgacgtgaaaagcagtaatatacatcagtcttttttttgacactaaaatacaccagataacaaagtttcatcattatttcaagaccatcaaatagtatttgattcacacagctacttcttctgcacagaatagaggcaaatgttttaggcagttgctgtgctagtttcagatgttgctgcttcaccttcccagaaggtagtcttcttcccagttttggaaacggtctgcagaactgtgtctggctggacatttcctttcactaccaccttttgttccttcaaatcaatgtcatatgattccacacctgcgaataaagatcaccacttattattcttcaacattggaagaggaactttggttggtatacagtcattgcaatgactttaatccatattaagattccatctcaacatgtttacttcta

SEQ ID NO: 42288 - DNA, 527 bp, Glycine max
gctgggaaaagaggatctatatttctgtaccttcacacgtgatcacgggatacgatgatcctatgttttggagacaaacgatccctaattattttttctttagtactaaataaaaatccactaacaaacatcgccaccatgataaaattgattcaaatctctaacatcttattctgataaacttgcctgcatcccagaatccgaaattttcaacaaaaaattcttctaatttaaacagccatacgtttattgttctagctatcatcaaataacaaaaagatcaacaatatcctatggggctactgctccgaaaattcttctcaaaataggttcagtttcgttcttattgggtcggaatacagctacccttcttcattacatggatgcaggaaggtcctctgagttttatgtcaacttgtgaatggtcttcatgtcagtgacctccccaagagctcctcgctcaagatggtcccaccatttgaacaagaaattgtccacaacaagtctgaaccaaggcgatagcttca

SEQ ID NO: 42289 - DNA, 531 bp, Glycine max
tcggattttaagtgtcgtgtcttatgcatgagcatgactattcaatacttgtctgacaaagatagttcaaaaaatataaaccctttttttttaagtgttagtgatttcatcctagattaaacattgacctttagccatgaaattatttacatcccacttctatttcttatttcagtggaggatatatccatgcggaactgttcagctggaatggagacgaacatgtcttttagttcttttggaacatcaatatcgtcaagaaccttgaaagcaccatcaacattccgaccacccacaaggaaagtgcatcctgtttctttacaaccaacaagtatcttcagcatcttgttgtagtcaccatcgtagtattcagggttaataagcctcactgccgtgtcggccccaattacaaaagcactgcctgggaaaagttcagccttcttataaaaataaggctgattggatataaataccgtctttccaactttttcaaattgcttgatgcgatctttgatctgagacactgataat

SEQ ID NO: 42290 - DNA, 304 bp, Glycine max
ccacttttatgttatttaatctattatttttaaatcaaacctactttgattggggtgcattgactctctttccatcatcattggctgaccaaactattaagcttgcccactgcacccctcagctaacacttggaacgttaatcatgaggaaaacatcctacttaactgcacaccctacacgccgatgggacaaacctccacccaacaagaacaaactctccattatattatgaacccaagtcctaccttactgaaaaattaccaaaagactcagtttgaaacactgttggcctatatgttaacc

SEQ ID NO: 42291 - DNA, 475 bp, Glycine max
  unsure (1)..(475): unsure at all n locations
gcgtacgtaagcgaagcctccagagcagcgcgcccttctttttttttttttttgtgctctttactgtggnattaaaaattaacacggaaagggcgcttgtctaaatataaggtaactaaaaccaaacattacaccaacaaatttggcgacttgcaggatattgcattttagtttaggaatttttaagtcattgaccaataagcaaatgactatcaccactatgaccaaaatctagcgaggatatggctccgtaattgaagcctcatctaccgaatattcagttgatttatttgatcttgtttcccttgaattatactctgatgatagggtggctggaaggcttctagttctactatccacaacaaatgcaggttctgaaggcactgagagagtgagaaaattactattaatgctgagtccaacataagccatgggtggtctggcaaccacatttttttgaacacataataaccca

SEQ ID NO: 42292 - DNA, 491 bp, Glycine max
gtaaaacgatgaaacatagccagaaaaaaggatgtagcaatgcaacattcgaatagtgaatctaggctgtccctcctttctctcaaattaaaattgccaaacacaaaataagacatctctaatcttaaagcgtcaagtcgctgatccctcaataatataccagaacgtctacatcgaaaataaatgaaaatgaaattaacctaaatcaccttagagccacgatacatgtgatgtggacctaaaggattcccaatactatagtaacatgcaaagcttgaagtatgtccagcaagtattcttttatttgtccataaatttatcatatacgtcctatgattgcgcctcacatcagaaagcataacggcctgaagcagggattgagaatctcacaagatccctaaacagccatcttcatttctatcttctggggaggatcatatcctatgagcttgaaatcagctggcacaaaagaatctatatctttcttcttt

SEQ ID NO: 42293 - DNA, 427 bp, Glycine max
aactaaaaaacaaagttgctcatagttgaaatgaaccaaaaatagtttccacttcagtgaaagatattcatgatttgcacaagcttccactttttcttttcattctgcctcttatatatctctttttctacaggcaaattcaatacacggttttttttttcttccactttactaaagcaggatcccttttcttaaaagagagaaaaagacagaacaaacacaggtgtcttattaaaactcaatcctgattacagatatttctatctctggtcttcatatttacagttcaatcaagtcttgctcctgctctcttgacagtagtaatcattgttggtttttcctgaactcagtaagcactggatatatgttctcaaaagctgtgtaagtctcatctctaaccttggctcctgtcagaacaatttttccg

SEQ ID NO: 42294 - DNA, 420 bp, Glycine max
ggaacgacagcataggccttcgatttcacaattagtaatttgcaggaaaatcaatttagacgtaattcatccaaaatttgtactacacatgataattgttataacaagccaaaccatagacacatttattggctactgccctattttctcgcttcaaaattccacgctcgaaaaacctatgttctcttgatagtagtcaagtttaattttcgcaaaaaatacatgcgccatgcagtcatcaatagaatcttattcaaatgttgcttaatgatcttgggctaaacaatcaatagggttccactggggctctgaatttggcaccagcatagacagccgcagaacccagttcctcctcaatcctcaaaagctggttgtacttggcaagcctttcaaatcggcagggagctccagtcttgatct

SEQ ID NO: 42295 - DNA, 513 bp, Glycine max
tttaaggtcttctaacggtccaatagttaataaatcagcattagaaagaaagagaacacgtgtgaagcaaaaaagaagatcgagaaatatcctacaacgaaaacatggcaacactcccatgcaacatcgtatcaaggtcttcaaggtctaaactttggaagaagtactgctggagctttgagtttgagagaatatctgcaaaacctttcgcaaaatgtgatacctgctcagatatggatgttacgaagtgatcctgtataagaagatcaacatacttgtccctgttcttactattaactgcaagattttttccaccagggcagagctcaaccactttcctctgtcctaattcctccacctccctaacaaatgtcagtcctaatgcatctgaatcaatcaaatcagcatccatatccaatatttgcttgcagctagtatacagataaggatctgcatcccttatatcttttatagcaatatagtttcccgccaattgcaagaaaaacgcacgat

SEQ ID NO: 42296 - DNA, 351 bp, Glycine max
ggaagaaaccctagccactcttccgtcgtgacgatgcagatcttcgtgaaaaccctagcgggtaaaacgatcacgttggaggtggagtctttgtacaccatcgacaacgtgaaggccaagatccaggacaaggaaggcatgcttccggaccagcagcgcctcatcttcgccgggaagcagctggaggacggccgtaccctctgcgactacaacatacagaaggagtgcacgcttcacatggtgcttcgtctccgtggcggcgccaagaagcgcatgacgaagacctacaccaagcccaagaagatcaagcacaagcacaagaaggtcaagctcggcattcttcagttctac

SEQ ID NO: 42297 - DNA, 342 bp, Glycine max
atgctacggctgatgacttgcctactatttgtggccctctcctcctgctgtaatcgtgcctaataccacaccttcttacatgttgttaatggtgaggacgcacacccctacagctgtccctggcaagcttccctacactacgataagaatggagcactataccctacctttggcggtagtcttatggaccacgactgggtaataaacgatggccaccgcatgtcgagatattttacctacctgctattgttactctagtataaccctgctctggaagagagcttctaactggtgatccgcataaatgcagacgacctttttgtgcaccctctattgtatttc

SEQ ID NO: 42298 - DNA, 390 bp, Glycine max
gaggaccccatccagacgtcaaggagaaaaaagaatgctgccattggagagatttctgaatctgtagctgcatgccaaggatcagattttgacttgtgtatatagtgcttttaagttggagctgtggtgacacctcataaaagcagccacccttacaggggtatagataatttgtgtttccctcttatttgcccagactggaatgcaaatgatgaaatcttgcttctagagggaattgaaatgtatggcttgtgaaactggacagaagttgctgatcatgttggaaccaaaaacaaaaagtcatgcatagaacactataagaatgtatacatgaactccacgtacgttattgttcctgacatgtcttatgatgatgggaaaaacagaaaa

SEQ ID NO: 42299 - DNA, 318 bp, Glycine max
gcagaccactatcacctttgttttcctcggtctactgagaggcactggggctttccccactggcctggtttacaggatcgtcgggggctacacttgttgcaggaattccgttccctaccttgcgctctggtactttggatgccaattctggggcggttcccttcactaactacaacggggaggtgtctcaagatccttgtgcatagccctgaattatgacgcgcttgggtgagtacaacattggagtctccgacggtagtgaacatggcttcattgccgccgagatcatacgccagcccgaatacatgtgcaacacta

SEQ ID NO: 42300 - DNA, 412 bp, Glycine max
gagcaatttgcaaaggaaaatggacttctgttcttggaggcttctgctaggacagctcaaaatgtagaagaggcttttataagaactgctggcaagattcttcagaatatccaggaaggtgcgtttgatgtgtccaatgagtcatttggtataaaagttggctatggacgtccccaaggtcaaccaggtgccagaaattggacttgttccacccaaagggggtggtggcacttatttaaaagggaaccactcttaattttatcccttttgtgcaacgaattcttaatttccctgcttaaccgcaagtgtactctttataactaaaacaggaacctttggaagcgccacaatttcatgtatagatctaatctcaaaggccttcttgggacagatttcactacatagtttaatg

SEQ ID NO: 42301 - DNA, 421 bp, Glycine max
gaatacactactgatccttgcttcttttggagctgctgttgctacccccaccaacgacggtgacaagatcgctgggagctacacccgtgaggagaaattcgccccctaccaggggtgcccgaatgcaagctataacttttgcggaggctccctcatcagtgaccagtgagtggtgtccgcggttcactgctacaagatccgcatccaactgagactcggagagtacaacatacgatctcctggaagggaatgagcaattcatcaactctgccaaagacattcgtcatcccaactattacaatctggatcctggacaatgacatcatgctcatcaagctctgctcacctgaggtcctgaatgcccgggtggccaccatatttctgaccaaggcctgcgcaacccctggcacccaatgcctta

SEQ ID NO: 42302 - DNA, 399 bp, Glycine max
cccaaccgtaccgaccggcaactgattactataccggttgtcctcattctacatggaaaaaatgcttcttccgtgcggtgactacccttacaagagcctacgcggctactgaccctccagggatcattatccacacccggtcatctcaaaatctagttgctgcacctggccacccggcttaatcttgtccgataggcacccaatggcagctaaatacatcaatgctctgtccaaacaccctttgggggttactacaaatgtacctgtgagcgggggctgacctgtgatggtgacaagcacatctatggctccatcaacaaaaccaactttggtgtttgacaccaagctgggggctcccataaggaaagcccctgcaaggatgctcttataaatcaccgc

SEQ ID NO: 42303 - DNA, 200 bp, Glycine max
tggcagccccttgacaaatatatttaattgctccactgctcgctgttggagtagcgatgcttacaacccacttcctgggctgatggaaggggcgccctcgtccggggattataacggtgggtttgcatacaaccttatggcaaacgacttgaatctaggagtttaatgatctaagctgtctggatgcaaataccgcctga

SEQ ID NO: 42304 - DNA, 350 bp, Glycine max
aaaaaaaaaagaaacttgcttttcttggaagctggtgctggtccccccacagacaacgatgacatgatcgtcgggggctacacctgtgaggagaattccgtcccctaccatgtgtccctgaatgcaggctatcacttctgcgggggctccctcatcagtgaccagtgggtggtgtccgcgggtcactgctacaagtcccgcatccaagtgagactcggagagtacaacatcgatgtcctggaggggaatgagcagttcatcaactccgccaaggtcatccgccatcccaactattacagctggatcctggacaatgacatcatgctcattaagctctcctcacctgcggt

SEQ ID NO: 42305 - DNA, 314 bp, Glycine max
aaaaacaaacttgggggggatttttgggtcctttttttaatgggccccattttgtttacaaccattccgggtttttttttagggggctttttttccgcccccttaaacattaaagttttttaaatgttttgggaacccattcaacttttcccaacgggtttaaaaccccccacgggaaccggggacaaggggaagggttgtttccttttggattttgaaaccagggggggtccttcctttcttgagctttttgccaaaaaaaattaaccttttttggtccggggggatgcctttcttgtcctgaattttggcct

SEQ ID NO: 42306 - DNA, 497 bp, Glycine max
ggagggtgtaatattattcaactgtgatgatcggttggtgtagatgaaatcaatgttttgttgggcagacatgttttcaaatacatcatcaaagatgttgtagtagtgaacatcaatcacagatcgcataaggccattggcaagaggaaagagttccttgggctttgagggtcctatcctatttgacaacaccacaaaagctgtgggggagtgtcttctcacagcatcgtagccagccttgtaatacttgttcaacatctctagtgtcacaccaggcgagagaggctcgttcaagagctcaactgcataaaagcttggcctcttcgcataccttgcagttaggaattctataacacgaactgtttggagaatgtttttgtttgtttttccccattcttgagaaccatctcttgaaccaccatgctgaaagccattttgtgaaccgggtgtgtgcccacaagaaggcattgtctagtgcatgcaaggaacctcccaca

SEQ ID NO: 42307 - DNA, 306 bp, Glycine max
aacaaaaatttcccacccccgggggggcaatttttttttgttttttggccaaaaaaaaccggagcaggggggggaaccgcagacaaacttcaaaaaaaagaatttttttgatgaaaaccgcccatttaaacagggaaacttttttttttttaaagacccattttccgtaaccgcttaaaggggttgctccaaacaaagggttttttggagttccaaaaaataattgggggtttttcgggtaggggggggctcaatttgggtgggggctggatcaaactggaaaaaattttggtccatgttttttcc

SEQ ID NO: 42308 - DNA, 445 bp, Glycine max
gagaaagaaacatagcaacattgaatgttgaaaatgctctaaaaacctatcacatcacatatgcactacggttacaatttactcatacacacgctgagtaacaacactcgcctactcccatgatactggtaatgaaaatcggaaaagaaaagaaaatcaatgggaaatataccatcaacatcattgtttcattagctcacttataacccttctgatgcatgaaaaatctcaaccacaagccaattaggagacaaagctggtcacgcatatcgcaaaagctaggaatgcatatcaggggcaccgattatccatggtgaacatgtccttcccaactacgccaaactgaaaaatgatcttatcgtgctccgcacgagctggtatgagatggggtaggtgcaccagcagctggttggggggcatcacataactgaaagtttgtaacaga

SEQ ID NO: 42309 - DNA, 391 bp, Glycine max
cccacgcgtccgcccacgcgtccgcccacgcgtccgccgtttacaatttaacattaacatcacctaaacgccaaaccccccatgcccttttgatcccatccaacaattcaatgcctcacctcaacctcccagcctacaagcgcgttcggcagtggcgcgtgctggacctcatctcggcggcgttcttcggcctggtgttcctcttcttcatgctcgtcttcactcccgacggggactccctcgccggcttcggccgccagacgctgctactctgcgtctgcgcggatccaagacagcgcctccacgtggcggcggccatagaggccggtcagcagtcgcgcgtgatcgatgcctgccccgccgacaccgtcgccgaccacatgccatgcga

SEQ ID NO: 42310 - DNA, 308 bp, Glycine max
gtgagatgagaggatgctcatgtgctcaaatacatcctagcactcgctattaccttgctagggtggcgacaatgtcaactactgctatgaagaggctgataagagactatacgaggctggaacaagacccggctgcttggatcagcggtgccacccaggataacaacataatgctgcggtacgctgttatatacagtcacgatgatactctatgggatggaggcacgactcatgagacacttcaatttactgatgactaatacaatctaccaccgactgtacgatgcgtgtctaacaagtacatccaa

SEQ ID NO: 42311 - DNA, 351 bp, Glycine max
cccacgcgtccggccgttaacgattttttgagatcggggaactctgcatcgctgatgatgagggcaggatgcgacctttggctctgaacaacaaccctccacgatggtgtgaacagattacaatgttggagccttgatttgcgggcacgactaacacttgcacttgttcaaaactttcaattgattgctggcacccaaccagctgctgctgcacctacaccatttgaaccagctacacctgtgcacgacatgatcatccttctgtttgacatacttggtaaggacatgttcaccctcgattattgactctctctatctgcgtatcaagctttcactatatgcttgagcagc

SEQ ID NO: 42312 - DNA, 321 bp, Glycine max
ctgtctgattcctaaattatataaaatttgaaatactcattccgttaggggaaagagattgcctgtgtgtgagtgagtattgctggtaaaggcgacggtcctgctatccgaatcgatttgggaacgacgtcctcttgcctaggtgtgtggccacacgatcgagtctaaattataccctacgatcaggctaacacaactaccccatgctacgtggctatcacccacacagaacagctgatccatgatgcttcgaaaaaccacgaccatatgcacccaaccctcaccgattatgatgcttaacacctgattggacagcgtttt

SEQ ID NO: 42313 - DNA, 520 bp, Glycine max
tttactctgtcaatatgtagtatattaattgatcacaatgtgctcccaacttcccactcccctaactcactttactaagaagtagaaatttaatctataatctacaattctacatacagcaacctacttgaaccctatggtttacatattctctatttgctgtcatatggtgtgatggacccgagatactaagaatcatgtgactcatgatatggtatggtcttcagtttttcacccctaaagccagtagtgttgtgcctcatgattttgccgaagtttgctcatgagtgaatccaaaaatttgacaatgttactccactgaccacttgatgattgttggggaatcccaccaggaaatctagatgattttcccccatgcactcctcgtcctgttttgggagcctgaatacatgatcccagaagtggagaaaggtcctttttcaaattgtcacgtaaaagaccaaaaatcttctctacacaagcagttagttgttgcttaaaaagtatagcaggatatttc

SEQ ID NO: 42314 - DNA, 289 bp, Glycine max
ctcgtcacgcccttttattcacgattttctttattatattaaaatctacaatgaaagacattaaatttactatatctatctaatctactcccactgtgagatggcccctatgtggtcaagaaagccattgctgcaccctagccggcttaatagatccaggaagtcccttttactctaggaaaccctcgactcttaacttgagggaacgcacccatttagcccttaaataaacaaaagctcttctcaactactaaccggagggggctacccgtacattaatattaaatta

SEQ ID NO: 42315 - DNA, 368 bp, Glycine max
caacaccaaatttggatggtggaccagatattccttcatctggtggctcaagcatggacaaaaattccttggagaaactgagggaagcatcagctgctgaagctgaggcagcgagtgctgtctggcaagctgtgcaggctatatcaagtaatcctgctgaagaaacatctgtgtcagatgacaactcacaagctgtggaaacagtttcagatggaagtgatacagagggagatgtccgccttcatcctagagctgttgtagttgcgaaggaggctttaggtaacctaggtggaatggtgagacaattatcgctagatcaattttgaaaatgaaaggagactcatgattttctgtaaataattgatttg

SEQ ID NO: 42316 - DNA, 401 bp, Glycine max
gaggaattcaacggactcaacgttggattcgcgctcgacgaggggcaggcctcgccgggcgatgaatttagggttttctactccgatagggttccgtggaacgtgaagattagggctaaggggaggcccgggcatgggtcgaggatgtatgatgggagtgcggtggagaatttgatggaaagcgttgaggttgtgagttgtttcatggtgagccatgttgttatttttttatgctcgtcattctttgaatttttttgtatttttcctattttttattattttttctttatttttttttttctaattatagttgtttattttgtattttttcaatttttttacatattttattattttttttatttttttatattttttttaatatttttttttttttttat

SEQ ID NO: 42317 - DNA, 358 bp, Glycine max
ctgtgcttgcctcgggctaacaaaagacgacgccgttttgacccggcgaccgggaaacgggggggccggtggagcttcgctgcgaggagcaggtctcgcttctgtcagattcgagcaatggtgatcggtcgtggcggttgaacttcgacgggtttcagctatcttcggagcacgcggagaagcaagcgaaaccccctcgcggactacacgactgttacgggggtctaggttaagaagataatattgcagagcactatcatcagcatgttgaagtgcttgagggctatactgagacggatgctttagcagagcgtggttttattactggaatgccacacgaagagcgagacaagttagc

SEQ ID NO: 42318 - DNA, 342 bp, Glycine max
acgacccgggggcggacccgggggtttccccgggaaatccggcccggggccgggagggggaccaattttcccaaaagggaggcggataaaagctgggggaaaaaatggcaaaaaaaggggcccgggaaaaaatgggacccggtcacaataccacacaacatgcgagccgaaaacataaagggtaaaacccggggttcctaatgggggagccaacaaaaattaattgggttgggctaaatgcccggtttccaaacaaaaaaacatgggggccacctgaataaaagaattccccaacccacggggagagggggtttgtttattgggccccagggaggctttttt

SEQ ID NO: 42319 - DNA, 545 bp, Glycine max
  unsure (1)..(545): unsure at all n locations
ttttacagaattgtaagtaaagcgttttctttataataacaatcatatatattatacaccagctgacctatatggctgtaccttgccaaaatgaaagaaaaaagattcctgagcatgcaatagcagccacaagaaaagcagatcccaagatagaatctgcatcattttagtaaaggaatctggttttggtacatctagggatctaacttctctaccattaaaaacgtgttgacattgaaccggatgcagccatgtatcaaccctcttctacactaccccatcaactgcatctcttacaagttgcaatgaatatgtctcctttccactagtgatatatagaagcaccaacaagaaattttaagggttaagttagtcctccatgtctcaaaatatacaagttgactgctccaaaatgacatctttatcgattaaatgaggctgccgagttatcctcatactgtcccctccatgcattgccgttatctgttccactacaagcttgattggngactggaacatgacctaaatccccatccaagctcatt

SEQ ID NO: 42320 - DNA, 445 bp, Glycine max
ttttataagatattgaggcatatatatccactagttggcgttgtacgtgacaaatatattatcaatttcaacacgtatataaggacacgactaattaaatactgataattaaacattacacctcattatagatccacacacaaggcaaccagatatagtattaattaattaattacttcagattaatcttgttcacgagtggacgggctttgcacatggcattcaatggagttaaccttgacaaagtgaaccaatttgcctccctcatatcaatctcttcctcattcactcttttccagtcaaagcactgaattaacaatcccaaagtcaagccaacgttctgcaaggctaaaccttctcctggacaagcccttcttcccattccaaatgcaattacctttttctccagaccttcttcatcaaacctctccggtttaaaacatgt

SEQ ID NO: 42321 - DNA, 541 bp, Glycine max
atataaaaatattttttatttctttttatcgcatcatttgcatttcatactttttttcctagttgtaaaatttgttgtgcataaaatatttttcaaatatttatgagttcaatcatatatatagtagcatgttaaatttaaaaggtgtagatgatgtacaaaacagtttaagaccaatatacagagttatgaaccttgcagttaggaattctataacacgaactgtttggagaatgtttttgtttgtttttccccattcttgagaaccatctcttgaaccaccatgctgaaagccattttgtgaaccgggtgctgcgtgaagatcaatgatgattttcaatccatatttctgtgcccacaagaaggcattgtctagtgcatgcaaggaacctcccacatatggccagggtggatttggatcacttgctatccaccagcctactggaattctggcagcgtttaatccattactggctatgaaattaaaatcattttccacaataaaagtactccaatgttccttcataacttggggagcttt

SEQ ID NO: 42322 - DNA, 384 bp, Glycine max
caattaaaactttttgggattgaatttccttacaaggcacgacactatcattgtaattttatgtttaacagagcataaacaccctatgcctcattgattactcattcttcattaacacctacgatgatttgttgtactccaagagacttacactgatgtttaatcttacgacgaataattatattctttaatggattcaaaaagcttataaatggaggctattgcaaaacctcaacatgcaccctgttggtacacgttcaatggataattctgcaccatgcacactgtcctatggattatgtctatgaatatcctgggcctgttcctaacaagctgggggaataattgtaggaaagggcactgatcatttctgtctacaagaat

SEQ ID NO: 42323 - DNA, 301 bp, Glycine max
ccccgcaccattttttaaattgactgtccaacccccgggaaaaaggccccaaaggacccgttccaaatccgtcccccaaccggaacggaaaaacccgtttttgcgggggaagcagtttgagcattccacccacaccccagggtttgggaattggaacccccggccccacccttaaaagcaaatctttttcccggggtaacggaccaattttgccgacttcccttgccaaaattgtgccatcgaccaaagggtgttcaccttggaaacctgaggcggttataaaaacaaccgggcgggggag

SEQ ID NO: 42324 - DNA, 469 bp, Glycine max
ggaaaaaaagataaatgatattccaccaattattccttctttaaacttataaaagttagactttgccattttgaatatcaatattcctaactggccctgtgaaccattttctagcatctaaaagccaccaaagcattattagacccaaacctacccccaaagcaactggtgcataattgaaagtatcccaagtaattgggtacagagttggcaaaaggaatacagaacatgtgtaacaaatccataggaatgccaccagacagactggtcttcttgctttgcctaaataaaatggcccgggcttgaagttcttctcagacatcacaagccttgcaaagataggaactgcataaccaccaacccatccaatagtacatattgaagttattgcagtgaagactacattgaccttcaaaattgggagaccaagaagaatgcagattgcagcacagagccacactgcatttga

SEQ ID NO: 42325 - DNA, 249 bp, Glycine max
  unsure (1)..(249): unsure at all n locations
ttcaacccananttttttttttttacacaacacattttgtttcttacattatttaacggggcacataattcacgattttattcagcttctacatacaaacttttgctactaacacattttaatgactgtgcataataataataataataaaggggagccaaagggttcccattggccaaaatcaattttttattaactccaagcgcctgaaaaggttttccagggtggatttattttccttttgggttt

SEQ ID NO: 42326 - DNA, 440 bp, Glycine max
ccccaaaaaagttttttttttacataaaacagggttttggtctagtacctcactaagttgcaaacaaaagacaacttcaaaattcgatccttttcttttatggaaacaatacccgtttttttttttcctttgttgaaaacaagctgaatgaattttcattttttggattaagagatggcaaatttaattaatcggttttaaaaggaaaattgtttgtttttaaagctgtgctcatccagccaagatttgttgtccccaaaaacttgggtttttttttcatcaggctccccctcaaaaaaaccatggtgggcttccttgtaaagctgaagctttttgtttgaacagtttgctttttaatacaaggttttgctcactgatggatctgccacagtgtcagcctccccgggaaggatgaataatggtaaaaaaacttttttcag

SEQ ID NO: 42327 - DNA, 312 bp, Glycine max
cgaaaccctaactcgcgatggcgatcttgctgggcgaaattcttgaatcgctggagctgtggctgaagctgatcaagaacccgcagcctcagccctacgtgaaccctaatctggaccccgttttgctggtgcccggtgtcggaggctccatgctgcacgccgttgacgaatccgaaggaagccgagaacgcgtctgggttcgcttcctcaacgccgagtacacgctcaagaccaagctttggtcgcgttacgatccttccaccgatgttgggaagtgattctgtgtattatttccatgacatgatcgttgaa

SEQ ID NO: 42328 - DNA, 305 bp, Glycine max
accggattcattgaggtgcgcctatactgagacttggtgctacgatacgtcagctacaaagacgccgtatcggatgcgccacacgcaaattcgatttggtggtttctgccagtatttaacgccgagaaggagacgacttgttttccggagctagactacaggatccggaggctggaccacacgatcaggaacgttacctaactagctccgacggtgaggtacctgaaaggcttaaagaaatttcactagttcgcagagtttaccatagatgacttctgaaccagcgagagcggcttgaactcagt

SEQ ID NO: 42329 - DNA, 311 bp, Glycine max
aacagatcttagcattcgattttgtgatagggttggcgacagagctcttattgctatagctgagggttgttcccttcattatctgaatgttagtggttgccatctaattggagatgctggagtgatagccattgcaagggggtgccctcaactatgttatttggatgtgagtgtattgcagaagttatgtgatatagctatggctgaattgggagaacactgtccattgttgaaagaaatagtactctcacactgtcgacaaataacatatgttgggttagcacatcttgtaaaaggttgctgcacagtgc

SEQ ID NO: 42330 - DNA, 305 bp, Glycine max
tccaaaagtccggttggacaaccgccaatttccttagaaaggaaggggggcctgcccagggttttgccctggaaaaggggaaaagagccgcttggtattctttcaaagggggtgttgattttagggacacaggcaccccggtggggtggggcccggcccctttttttgcgggaaagacagcgggaaggacccaaggcccgcccatattgtcgagggagcggcctggtatgccgcacataatgccgcggagcttgcttctatgtcggccgctgctgttaaaaggctggctgcttctgctggtgaga

SEQ ID NO: 42331 - DNA, 291 bp, Glycine max
tagagcgggcgctcctccggtttcaccaccgggtccttcaccaccgtatcctccagatccgagtggtcggaatcgcggggggcgccttacttcaaattcgtggcccgaataatcacgccggaggtgaaagaaagcattccatcgtcgttgctgccacacgaattcagtgaccttttttttccgttgttgctcatgttattcttcttgttttcatacacagcagcaacaaacggtgactggccggagaaaaaatgggaattggaattggaattggtatttgtatatccattg

SEQ ID NO: 42332 - DNA, 522 bp, Glycine max
attataaatccctctttgcaataattaactaaactggggatgcacccctagttcgaatttgcccagagctaatggctttacatgattagtgttcatatcatcatctgtagtaaaactaagtgtatgtttggattacccttcgaaagttatttttaactcaaaagtaacaaagagaatgcttctccctacgtactttcaatgtacattcaccacctgcaaacggtaatccaaacatagccttaacatgcctcgggtggggtttcattgcaaactgctggggattgcccgttagcaatgtggtttgagagcttcccatcagatccccaaaatgctgcacatttcaaatcatcctgaaccattaatctggagaactcgtcatggttataactcattatgctttttccacctagttctttgggaagattttcctcatcaaaataggacttcataagctccacactatctttatttttcgggtagacaaacttcaccttctgaaatgtcttgttgtccaagaagtac

SEQ ID NO: 42333 - DNA, 511 bp, Glycine max
catcaaaactcaattgaattttgcttctgttttttggggggacttacaaacatgatacccaaaagagaaaaccagagatgtagatcaaagaaatgttgtctattaattgtatggtattcagacactaccagcttctgtctccatgattcacccaattatgaatttaaccaaggaaaaacattgggtgatgtctgcaacctccctgttaaaacttcaacaccagtctctgtcaccaaaagagtctgctcaaattgagcacttcgtttaccatctgctgtaacagcagtccatccatcaggccacactttatgctgccggataacacttttgagcatatgtgaagtttttaggtactcgtagggctgtattcttgaagagatagattttttgcataatggggataagaccgcgcacagctgttgaggttatcttgcttggaccacataatgattttaccactgactcgctgaagcttgataagattttaccagcttgagtaccttttttaata

SEQ ID NO: 42334 - DNA, 354 bp, Glycine max
ctgcacctaaaatgaaaattttttggggggatttttttaagtgcttagctaacaccaacctttactataaaaacccgaaaattgtggtttaggcccccccgcaacaaaaaccatatggttttttcaacacggggccccccctttgtatagctcgttaaaaaaatcaaaaaccaatgggttccctttttaattataaaacaccccgaatggttttaagcccaacctaaaaatggacaagcctttagcccaatttccaacaaataatacaccatggcttagccatttcttgtttcttataaaaggccatgaaactccacaaaaaaatgtttacatcaaaagtgcagtcacctcgat

SEQ ID NO: 42335 - DNA, 512 bp, Glycine max
  unsure (1)..(512): unsure at all n locations
taaaaaaaataatataaattttcaaattttatcctatagcaagcggggatgttcacatctttcccttttataaattcacattaatggaagaaaaaaaaatcatctgtgacaaatgggatccgtgcacaattttaccaaaacaagtcagaaagtgaaagcacgaacagaacccataccgcaagttgcatcgccccacaactagccctcgtcacattcgccttaacttctgggaaggtcaattcaaatgctagtgtttttttgaagtcatcgttgatggagtttggttaggttttcggcgaatttggcgagagattggaggttgcagcggaggatggtgtcgacgaagacgcgcgtgtcctcggtggtgttgccgggggggacgtcaacgacgtaggactcgacgacnacngtgccggcggcggagcggtggtgaagagtggtgacagagcggtagttgaagaggcggtggtcgccgccgaccatgctgaagccgataacgtggcgctcgtcgt

SEQ ID NO: 42336 - DNA, 497 bp, Glycine max
gtaacgttaacttggagacccgttctccgcttgatgaggttatttgctttaacaaagggggactcttcgaccttggccaccctcttctcaaccgcatagctgagagtttcgtcaaagcttctgggattggagcggttcaagctgtgtcccgtgaggcctatttctcagctgttgatggcaacaggatggataacactggcggtatgccttcagaagtttctaatgccaagaaacatcgtttgcatggtctcagaggagagaccagcagcaaatcccttgaggcaatggtgaagaataccgggaaagagtctttacaatggggattggcagcaggaatatattccggactcacatatgggttgaaagaagctcgtggagcaaatgactggaaaaatagcgcaatggcgggaggaatcactggggcaacacttgcacttacgtcaggagacacatctgaagaacatatggtgcattgtgctatcactggagctgcaatc

SEQ ID NO: 42337 - DNA, 506 bp, Glycine max
cccacgctccgcccacgcgtccgaaatccctccattttccctttcagtcttgttctgattcattttccttctttcccaaacccataaaccctagcaagccaccatcacctcaccatggagtggaaccctcagaccctccaattcctctcggaatgcttcctccacactctctccccctcgccggagccccgccgccgcgccgagtcctccctcgccgaggccgccgaccgccccaactacgccctcgccgtcctccgcctcgtcgccgagccctccatcgacgatcagatccgccaggccgccgcagtcaacttcaagaaccacctccgcctccgctgggcctacgacgactcccccgtccccgaccccgagaaagaccagatcaaaaccctaatcgtccccctcatgctctccgccacccccaaaatccaatctcaactcagcgaagccctcgccctaatcggtcaccacgatttacccaaatctgccctctcttctcctgacta

SEQ ID NO: 42338 - DNA, 366 bp, Glycine max
tcaaacattattttgtaaaaaaaaaaaaaaaaaaaaaaaaaaaaaaaaaaaaaaaaaaaaaaaaaaaaaaaaaaaaaaaaaaaaaaaaaaaaaaaaaaaaaaaaaaaaaaaaaaaaaggggggggccgttttaaaggaccaaagttaacgtccccgggcatgcaacgtaaaaacttttttatggggccaccaaaatcaaattaacgggccggggtttaaaaacgtgggaacgggaaaaacccgggggtaaccaaactaaatcgcctggaaaaaaatccccttttcgcaagggggcgaaaaagcaaaaaggcccgaaccgatcgcctttccaaaaagttgcccaacctaaatggcaaatggaacccc

SEQ ID NO: 42339 - DNA, 281 bp, Glycine max
atcgaataatgtattttcaataatcaatcacatctgcttgccacatattttgttggttaaggagggaagctaacttttggtccaggccgggcatcgtattcccaccaagactgaactgctgactaggaacctagagactggggaaaacactactactgctgagaaggctgtcaaaaaaaaagacgtatacacttgtgcatatgctagcttttctaaaacgggatagcatgatgatatggagcacaaggcgattgtaaaaggatacaaatgcaaaattgaaa

SEQ ID NO: 42340 - DNA, 466 bp, Glycine max
ctcataaccattggagataacaaccctttttccctcaaccttagaatccaaatgggtgggaaccaaagaaggagattcaaactgcattgaattaacagaattgagaccacaccaaggactcacatccctactaagcatcagcaaactcattgcaaccttttcctgctgcacctgctcatgatgagcctcagaaacaagggacacagaagaagttgaaggggccatgtaccttgtccttctactcttggatcttctccttcgattcggagccgtggcctcattctcagagtggctatcatccatcgacaccatcatcttctggctctggctagcattggtggtgttattaccattccacgaatcttgatcctccaataacaagctgctgctgctgttgttgttttggtacactttctcagagtggcacttaatgtgaccaaacagagctttccaagattgaaaccct

SEQ ID NO: 42341 - DNA, 399 bp, Glycine max
cgcaacaacagcactttattttattcttaacataaggacataactcagccggtatgcacagtacatgcatttatagggctgacatcggtaataatatatactataatacatagggcattgatgcagcgccagacttattatatataggatatagggggtttattttttataaaatagcgctgcatgcatctttttcacgttggagggaatggatccatttaacagtttttggggcaccaacagcgaaaatcggccctgcatctgcctatgagcaagtgctctttgtgcttgcagagatcatcgcagctgccagtggtgaagcatggacccctgtatgtatcacccaggttctcgcaagtgtttgcctaaggttgcaccacaacttcttgagcaacaaag

SEQ ID NO: 42342 - DNA, 339 bp, Glycine max
aggaaaaggggtaaggggggctaatttcctttattataattgggggatttattgaggaagggggataccaatttttgaagtttcaaaaaaagccagaaagatgggggtgataatcatgaagttgatcgaattggattaattggaatggggattggccaaaagggaaaccttaatggccttgaaaagagcatcacccttggtttttacaattttgaaatggtcttggtggggctgaccattttctttggtttgtgtttcgacggtgagcttgccaccagaaccttctttgggaccaacaaccaatttggaggggaaaggaatcttttccgttgggggggg

SEQ ID NO: 42343 - DNA, 469 bp, Glycine max
ttttgaacatatccaaaaccatttgtgttaccaaaatcgcattaatctcaagttctcaacatcaatttcctgaaacagaacatacctagactcagtaacagcccaatcacacataaaagaaacaaagaaggaagcaatgttgagactcaaatcaaatctcctcgtccccatttttcaaatcggatatctgaacagtcccaaccctctcattctcaggcaaaaccgaccaattcggagactgcaccgcgcgcagccaccggaaatcatccacattgctccaatttccggtctcggcgtgaagaccggtaccacgaagatcctcctcaatcccttcatatctgaaacaatacggagcaaacctgacgccgctacagtactcaattatgggcctgctcctaaccctaaggtagaaatcgcttcttttggcaccgtgaatacgaatctgatgcgacgccaacgcgaacacgca

SEQ ID NO: 42344 - DNA, 325 bp, Glycine max
  unsure (1)..(325): unsure at all n locations
aaaannnnnnnttttttttnnnnnnnnnnntaaaactttaagggaaacaactctttaggcaaaattgaaacaccagggctgcttagtgtcaactgggacaaaagataccaaatgaccaaacccaaaattttgaatctatgctttttaaaaaagttttctttaaaaataaccctagagctgcctaagaactaatactcccccaagtgcccccgcattaaccccccgccgaggaacaagcttgatcattatcagatcctgaaatacccccctaccattgagattggcatgaaaaaaattgaggacaacaaccctttgtggttcattg

SEQ ID NO: 42345 - DNA, 288 bp, Glycine max
gtaggatactgctaaacagtaccatcgagaaaatgatgccatccataacactaggctaactctcacctgcgcatatgttctacagatttaagggctccgtcatcataagctcctttctcaatctgcacccaggcacaaaaaatatgtgttccaccctccaagcttagcgaatgctcctcgaatgcaacatcgtctttttctacacgccccccaactagtggaatcacagtttcaagctgggcctgatcaaatttgagcacatgcttggttacaagcgtttctattttc

SEQ ID NO: 42346 - DNA, 327 bp, Glycine max
gtggatctcacctatgaagtatggacaaaatgccatggtaaataatgagttccttgggaagagatggacacattttctacctatctcaaccgaggcactaagtgttgaaattttgaaatcccgtggattcttcactcaaccatactggtactggataggtgttgaggctttgattggatatacattacttttcaactttggatacatactcgctcgcacatactgaaatacactggggaaacatcaagctgttttatcagaggaacctctaatcactgaccagagaggtgatcgtaaaaagggaactaatgtgttgaaaaacataca

SEQ ID NO: 42347 - DNA, 527 bp, Glycine max
atgctgcacatcatagacataaccatcctcatggcaatgatgcatgtcatggcattggcaacatcaaggaacaggtccacgcccactcccactcccactcccactcccacggacactcccactcccacatcgaagatggagaagatactgacgttcgacacgtcgtcgtttctcacgtgttggagcttgggattgtatcacattctgttataattgggttgtccttaagagtttcgcaaagtccttgtaccataaggccattaattgcggcgttatcttttcatcagttttttgaagggtttgcgcttggaagttgcatttcccaagcgcagtttaaagcctcgtcagcaactataatggcttgtttttttgcactgactacacccttgggtgttgggattggaatggctatctcttcggggtataacccttacagccccggtgcactcatcgccgaagcactgatgccatgtgtgcaatgaaaaatgtatctgttggaactgatgcccaaggaaacatcaatattt

SEQ ID NO: 42348 - DNA, 393 bp, Glycine max
ccgtcgcgtggtggaggacgaggatcaggagaggcacttagcactgctggaacgacgttccaaacgctctaagatccgtgcacaaaaccacgaatcgtggtgcatactctcaagctggtgccatctaaaaagctccatagagtgccaactcggccgatgaccaatccatttcctgagaccgcttcaagctcaaagtggacattaagcaatgcgacggatctatctgcgatcgagaaaaactagtcgcagaaaaatgctagtccctagactgggacgacgtcagaagctgaatcaaaaccgtgtgcgacttaaaacactctctagacgaactcagtttccaacttcttccagaaaagaaattctcattcaaagataaagcccgcaccaccacca

SEQ ID NO: 42349 - DNA, 281 bp, Glycine max
atttgactgagaaaaaaaaaaaagaaaaaaaagataaaaaaatgggcgggccggccggtgtatccgaaccaagcttaccttcccagccaagccatgtcttttctcttgtgtatagtcaactaaatccaatggcctggccgttgatttacaacgactggaatgggaataccctgacgtaactcaaatgaatcgcctagcatcacgttcccgtttgggcacctgacgttatagagaagaggcccgaactgttctgccttcctatcagctgctgatcatgaatg

SEQ ID NO: 42350 - DNA, 405 bp, Glycine max
ccccgctttcgtgacagaacgcacacgaagaggctgatatactcccacccaaatgcgacaggggggtcctaaggacaggtcctctacacgtcctttgccatctcattattcgaggccatgttccttatatggcattacacatatcgccccataacaaaaggtgaaaatggaaactggacatggattggtgtgcttgcttcaaagctgacgtttgccttttactgggtccttactcaagcccttacatagaaccctgagttcagacaacccttcaaaaacagactctcttaaagatatgagaaaaaattcccaagagttgacatatttgtgttcacagcaaatccagatattgagccacccatgatggtgattaacacagagctatctggtatagcttatgattat

SEQ ID NO: 42351 - DNA, 561 bp, Glycine max
  unsure (1)..(561): unsure at all n locations
gacattactaacggaggtctttatagatttaataaattaataaccagttaactatatatagtgtaacaaaattcttttacttatatatctttagtttgaaggttataattctactccgtttctatttcttttctccaggaattctatggtgggaagaaagacttggccaagtttaagagtgacgttgaatcatttatatgttcagtgatgccagcaagtagctctctacagattaaaacaactcctggtatatatgtatacattattaactaaaaatttaattattttttattatatattaatattaactagagattcatgcatggtattattggtggaaaatataaatatttttttattgataaataaatattaattgttagttttatttattttttaataaaaaagatcatgattttttttcttaatcatccaaccaattaaactataaggcaactaattaattttgtttcatattcaattaatattgtggctgacggatcactcangtgggcttctatttactagagacagcagtaatttgcaatatgccacgagctc

SEQ ID NO: 42352 - DNA, 383 bp, Glycine max
tatagaaatgcaagcagaagctgtgtgaaaaaagagagctcaaaatcttgtgggtgaatgaaaaagacagactcacataaaccttgctcatggatataagagaccattgttcttaaaatcagaagctgccaggatggatcaagttaacatagctcaatgtgaagctgaaactatccttgctaaatcaaaagcaacggcttagggactggctgttctctcaaaatcaatgaaagaaaatggatgacctgatgctatttgtttaacgatagcagagcaatatattcaatctttcagtaacatatcctaagagggcacatctatgtaacttactaggtttgcatgcaatcctgctcacatgatagaccaagctcttactatgtgta

SEQ ID NO: 42353 - DNA, 277 bp, Glycine max
aataactacattttccctatgtctttcgcccctactctacacaaaaatatattattagcgtggagaaggtgaatactgcgaagaatggagagcttatattgcctccggagttacgtttccacccgactgatgaagagctggttatgcaatacttggagcgcaaggatttctcctgacctgtgccagcctgtattattcctgagcttcatgtacgccagtgtgatccttgggatttgccacgtgatttggagcaagagagatacttatttagcaccaa

SEQ ID NO: 42354 - DNA, 368 bp, Glycine max
  unsure (1)..(368): unsure at all n locations
nnaaaaaaaaaaaaaaaaaaaaaaaaaaaaaaaaaaaaaaaaaaaaaaaaaaaaaaaaaaaaaaaaaaaaaaaaaaaaaaaaaaaaaaaaaaaaaaaaaaaaaaaaaaaaaaaaaaagggggggccgttttaaagaatcaaagtttacttccccgtgcttccaaagaaaaaatttttttttatggccaccaaaataaaatacactggccgtgttttaaaaaagtctgaactggaaaaaccttgggtttaccaaattaaattacttttgaaaaaatccccttttagccagttgggtaaataacaaaaaggcccccaccgttcgcttttccaaaaagttgtccaccctaaatggtaaatggaacccccct

SEQ ID NO: 42355 - DNA, 567 bp, Glycine max
cccacgcgtccgctttctataaaggtagagagaagagaggacccttctcttgcatagttcaagtgagtgagagtgccaaaaaatgggaagggctccttgttgttccaaagtggggttgcacaaaggtccatggactcctaaagaagatgcattgcttaccaagtatatccaagctcatggagaaggccaatggaaatcactacccaaaaaagcaggtaattaaggttttagatgctcaactttcccaattcatttctcaatttgatgtctcatgttctggtttcgatcacaaattattatgtgtaacttttataataattatattaatattgatatatgattgaatgacagtatataattatatgtgtataatcattaaattcataatataaaattacatgtatcttttatccgaaaaattatgctggagtcggatagaataaattctgattcataactctgaatatacagggcttcttagatgtggaaaaagttgtagattgagatggatgaactatctgagaccagacataaagagagggaacatagcaccagaagaagatgatc

SEQ ID NO: 42356 - DNA, 384 bp, Glycine max
taaatcagatggagtgtgtcttttaactgcagcttttgtgggcatcgccttcgcgagtcaatttgtgagagagttgaccaggttgggattgaatacatcggcatgtggggttttagctctggctttctcaaaggaactaagtcctgtggatacaacaattgccgttgcacggcgcattggaagtgcttttgcaccttagttaggaactatgcaggattctgaccaaactgatacattaagaattattgtggtaaaccctgctgattatctagcgacacccatactggtagccacttgtattgcctttccccttttgaccctgggttgttttacaatatggatgggatttaatgcccttcttgctgaaagcgcttatggggggag

SEQ ID NO: 42357 - DNA, 391 bp, Glycine max
gccacgcgttcggaattttctgcattcttctatgttgtcctagaactcgattacttgaacattccctatgacagatgaggaggttcttctggatttctggccaagtacatttgggatgagggtcacgattgcacttgctgaaaagggtatcgaatatgagtacaaagaagacgacttgaggaacaagagtcctatgatcttacaaatgaacccggttcacaagaagattcccgttgtcatacacaatggcaaacccattatcgaatccctcattgctgatgaggacattgaggacggttggaatgacagaaattccttgctgtcttcaaacccttaccatagagcttaggctagattttgggctgattatgttgacattcatatacatgat

SEQ ID NO: 42358 - DNA, 483 bp, Glycine max
gttatggctggacagaacttgtgctcatactattgcaaattgctgaaagaaacagttagggtgtggttgttgacttggcgtggtgtttttcctctcattatggcaatatatgaactatggattgcttggtggaagacggaaatgcatatacacgttatggggcctttgatgatagatgctgaaaggcgttgcatgcaaaaagttgagtggtctgtgcacaagggttgtcgatacatggaactatgccttgcccttacagctgtcacttatagctacgcaggtcacattgctgatgatcttctgacgcacgtactctatgatgtgcttgcagcacttattgttgaaaatattaaaggcggtcgtgagcgcagaaattgatctcttgatggtgtggcatatcttctacaatgtggcttcttacgggatcctgcagctacttatgctgttgcagatattattgctaaatcagaggatgatgctgtt

SEQ ID NO: 42359 - DNA, 535 bp, Glycine max
cccacgcgtccgcccacgcgtccgggcgaaattgacagggttttagattccacaagaaactcaaatgcatcaaaggaggagacaaatggtatgccttctctgacaaaggaggaaacaaatggtagtccttcaaaagctgatgcaattctagataaaccagtagaagcagatctcttgctcacttcagaaacaaaggactatagaagtgtaagatggaaatatgtactgtggaagtcctttgtttacataatcacattaggaatgctgattgcaatgcttctaggtttgaatatgtcatggactgctatttcagctgcactagctttggtagttcttgatttccaagatgctaggccaagcttagagaaggtttcttattcactcttgatattcttttgtggaatgttcatcacagtagatggcttcaacaaaactgggattccaggtgctctttgggatgtcatggagccttattctcaagtagatcgtgccagtggagtagcaatacttgctctagttatactcatcctatcaa

SEQ ID NO: 42360 - DNA, 453 bp, Glycine max
  unsure (1)..(453): unsure at all n locations
ggctattcagtcaatgcaccgatgttgcgatggaagagatatacactgctcgtaggactgatcatttttttcaggcggggaattatgtttacaattacattttttcttcacatgcagacgtttgtgttcaagaggccagttatttttacaagatcgttgattgctactattgttttctcgagtttatacgctataggtgttgcattgttcaaggatatacctgatatcgaaggagataaaaaatatggcatccattttttttcaccacgtttaggtcaaaaacaggtattttggatttgcgtttctatttttgaaatggcttttggagttgccttactagcaggagtcacatcttctgcttgcctatggattaaaatagatacgggtataggaaatggtattactgcttcaattctatcgtaccgnaccaaatatgtatatataacaagccca

SEQ ID NO: 42361 - DNA, 326 bp, Glycine max
cacacaactactacaagtactttcttacaatcaaaaccaacaacaactatggcgagttatcaaaagcactacatgatcagggtccagggttacagtttggcaacgtaaaaaccaaaccgccaaatccggaacccttgttaatcctgttggggcacctaatttaccacccaaacttgttcttgtgggtaccgggatgacatttataagccacatgattcccaccaatgcctacggggtaaaccttggtaaacagcattttatggggggttccaatggggcccttattaaccttcttggaccaccggggggttttatggtgaccccca

SEQ ID NO: 42362 - DNA, 458 bp, Glycine max
  unsure (1)..(458): unsure at all n locations
atgcacaatctctgtcttttatttattcacataagggggggacttagtattgtgttactaaccattacgttcaaacttaacaggctgaccaatttaagacatcctgccttctctaacacataatcaaaaaggctggcaaaactcttattaaacgaggacactccttcaagttaaaattgtgaaccaacagtatttcaatccacacttaattcctttccactattgtatattacacactttgaaaaaccatcaaatttttttgcgctttatacgggtccctaatcaataaatgcttgaaagacacggtccggaatggttgatacacagtctagtccaataagaggcgcctcatgtaaggtgccacaacagggcggggggtgtactctgtgtgagctccaaaagcaccttagggtgcaggcctccttaataactagaggttnacacattggaccataaaa

SEQ ID NO: 42363 - DNA, 472 bp, Glycine max
aaaaaaaaaaaaaaaaaaaaaataaaaaaaaataaataaaaaaaaaaaaaaaaaaaaaaaaaaaaaaaattttaaaaaaaaaaaaaaaaaaaaaaaaaaaaaataaaaaaaaaaagggggcggccgttttaaaaaatccaaacttacatccccttgcttgaaacgtaataacttttttttagggtcccctaaattaaattcactggccgcctttttacaacttcgtaactggaaaaaccctggctttacccaatttatttgctttgaaaaaaatccccttttcgccagttgggttattaacaaaaaagcccccaccaatcgcccttccaaaaaattgcccacccttaatggcaaatgaaaccccccctttaccggcccattaaacgcggcgggtgttgtggttacccccagtttaaccgttacttttgccagcgccttaacccccgttcctttagtttttttcccttccttt

SEQ ID NO: 42364 - DNA, 440 bp, Glycine max
gcacgcgttgttgcgtatgaatctgtattttgtagtttctgtagatgagagttcctcctgcaatcatggcggatgaaacaccaaatgagatgaaagaggaggttccagaaattgatccttttgatcctaccaagaagaagaagaagaagaaaactactattgtagatcctgctgatgaacccgtggagaaattggctgctaagacagaatacctctcagtttccgagggggttgatactgcatttactggcttgaaaaagaagaagaagaagcctgctgaaatgggtaacttgtatgatgagagtggagatgcaattgcagatttggatgatcaccctgcacatgatgaaagagaaatggttgttcctcatgctcgttatacttggtaaaggagtgatcgtaattatgaatatgaagagctacgcttccatctgtccaca

SEQ ID NO: 42365 - DNA, 427 bp, Glycine max
  unsure (1)..(427): unsure at all n locations
aaaaaaaaaaaaaaaaaaaaaaaaaaaaacaattaaaaaaaaaaaaaaaaaaaaaaaaaaaaaaggggnggggcccgccgatttaaaaaaaccaaaattaccaacccttgcaatgggggggcccttttttagggtcccgggccttcaatcccatgcacgggcccgtaaatctcttctgtcgggacacgaaaaaccatttccctgcccaactttttacacctgcaggactgggaaaactcgggggttgccaaattaaaggggttggccgcacatcccccttttcccaattggtgtataacctaaaaggccaaaacgacccgccctttcaaaaaatattaaacccggatggggaattgggaccccccctgtggtcccctttaaagggcggggggggaggggcctccccctatggttactttcctttttt

SEQ ID NO: 42366 - DNA, 163 bp, Glycine max
agacacacataggatcgtatcctttttctctttgaatacaggacttccttactggatggtgaaggggtgacttcctgaccatgcatgtacagattgttcatggaccgatgtgaacttccacagctcattcacacatatgaaatctggattctcatggatggat

SEQ ID NO: 42367 - DNA, 591 bp, Glycine max
  unsure (1)..(591): unsure at all n locations
tcgcccacgcgttcgcccacgcgtncgtttgatcagggtgatttcttagtacattttatggatattgcacgagatgaactggctaaaaagcctgatgaagcctcagttgagaagctgcagtctcttctagaccttgcattgcgtactacagcagctgctgcagatccttttcatgaaggcttaacctgtgttgtggaaagatcttctctgcttagaaagttgggcacatttaatgatcttgaggttactctgagaaattctggtgacaatgatctggatgagcctgttagcatcactggtcttgaaacattttcactaagttacaaggttcactggccactgtctatagtgctatcaagcacagcccttataaagtaccaattactttttcgatttcttttccactgcaaacatgttgaccgtcagttatgtggagcatggcaagtacatcaaagagttcgtgctctcaatacacatggaactgctatctgcagatcatctcttctttgcaggagcatgcttaaatttattaatagccttttgcactatctgacatttgaggttatttgaacccaattggcatctgatgtt

SEQ ID NO: 42368 - DNA, 414 bp, Glycine max
aacattacaattacttctatttttaatttgttaatgtatatctatgtacatatagatgggaaagtccagagggagagaaatcaagagggtggtaccaaaataaaattgagaaaatattaaatttataagttaagagaaattaagaagctacaaggtcatatatatctaatatatagctatctagccatagcttgagagttatggaatgtcactattaccgccggccgccaccactcactactgatcttggcgaggacgagttgaccacagagaactcagggctctgagacgatggaagtactcaaaaattgccaccaaacaccttgaggcttggcgtgttgttagaagttggtggagacggtgaattgtctggtgcctcagattatcagcctgtcttacaaagctttcaaggga

SEQ ID NO: 42369 - DNA, 516 bp, Glycine max
tattggaattcattcaaattgaagtgcacatgattaataagattgaaccaaactagagaaggccaccacggagcctaaggacaacatagacatagaaattttgttatatcatacacattcaaggaagagaaaatctcaatagcaagattcaactgaaactagaaatcgccaccacggagcctaagaacaaggtgaagcgtggattccttctgaatattgtaatcggcgagagtgcgtccgtcttcgagctgcttcccagcgaagataagacgctgctgatccggtggaatcccttccttatcctgaatcttcgccttcacgttatcgatcgtatcagaactctccacctccagagtaatagttttcccggtgagcgtcttcacgaagatctgcatccctccgcggagtcgaagcaccagatgaagcgtcgattctttctgaatattgtaatcggcgagggttctgccgtcttcgagcttgtttccggcgaagatcaagcgctgctggtctggtgga

SEQ ID NO: 42370 - DNA, 243 bp, Glycine max
aagaatacttgaccttttagggacataaatcccacccaaaatcaacgggtgcacctcgttaagattcaacaaatttactcactttactcctcaaaagttcaaaaaaccctacttcctagctcccaaagatgtgttgcagcctatccaaatggccaacaacaaaatgaaaaaggaacaatatttttgtgaccatacacctgcatcaccggattagaggaaaaaaagtgtctttatcctaattaa

SEQ ID NO: 42371 - DNA, 280 bp, Glycine max
  unsure (1)..(280): unsure at all n locations
gggggttaattttttgttttaatttaaactgattttttttaataaatttgtgttttattaaaanttganagatttttaaaataaccgtttctacttaagaaaatctaacatcttttaaaatattttttagaaccaaaaaagttgcattttgtttcttcagaaatataacaaacgctccccacaacttgataacattttagactaccggattgttcagtttcagtcaaaaaccaacacaattcttttttcctcaccatgctgacgccgattttcttctttt

SEQ ID NO: 42372 - DNA, 280 bp, Glycine max
aaaaaaaaaatctccttgatttagagggagttgagttcaaaaaaatagagcttgaaacaaacactagtaaaccaaactaactgatcttataatatgtaaaagatattactattacacttatatacatgaccaatgctcataacacgtatgctattgggctactctagcttagagaaaatttgacacatgcagcagaaaccagttgggagaatgcaatagagaagttttacatcatcaaccgggtttttaagctgtgtacaaaacccaaaatcaagcacta

SEQ ID NO: 42373 - DNA, 399 bp, Glycine max
gcatacgttgcgtacaatgaaagctactctgtggggaatgtactatgtttacaaaaacggtgctgactttgacaacatcgtcggcctgaaacccggttccttcatcgaagactacaacgttcacaaaaaggactttcgggttcagcttatgaacacggatcgggttggggagaggcacctagatctgacctacacccacatcaagggcgacaactcgaccgtgttgcatggaacctttgggtatgattgtgcgaacaaagttgttgacaataacactctcgactgatggaactgcaaacttaagtacactctatgatcacaaggagctggccacgtttgagctcatctatgacgaggtcaagatcacacgggacttccacgtatcgcggaagatctacg

SEQ ID NO: 42374 - DNA, 363 bp, Glycine max
aaaaaaaaaaaaatagagcatattaaaaaaagagaaaaaagagcaatggtagtttatgaacatgaggaaaagggcatcatttgataacatggcgacatggtttgaggaactgctaagccatgctgacaaaaacattgttgtgatgcttattggcaacaagtgtgatcttggaactcttagagcggtgccaactgaagacgcggatgagtttgcgcaaagagagaacctattctttatggagacatcagcacttgaatccactaatgtagaaactggctttctggccattctaactgagatatacatactttatagcaagaaaacacttactgccaatgatgatgcagatccaagtggtatttc

SEQ ID NO: 42375 - DNA, 591 bp, Glycine max
cccacgcgtccgcagaaaacgattatttttgtgcatatatatatatatatatatatatatatatgtgttctactaggtcctggcaaacgcggatacccctgaggatgcattggctgcacggaacaacggggcagaaggaatcgggttatgccggacagagcacatggtatctgtatttgttttcaatattagtactctcggttacagttactacatcggacatgttttattttccttttgatttatttgttctgggcgagggaaatagtttcaagtttcttttcttttcttttcctcacctgtacttggggcagttcttcgcttccgatgagaggattaaggctgtgaggcagatgattatggctcccacagttgagctgaggcagcaggcgctggatcgacttctgtcttaccagaggtctgacttcgaaggcattttccgtgctatggatggactttcagtgactattcgacttctggaccctcccctccacgagttccttgcagaagggaacgtctaggaaatcgtgcgtgaactgtgttctgagacgggagccaaccaggaggatgccctcgcacggatcgaaaagc

SEQ ID NO: 42376 - DNA, 531 bp, Glycine max
  unsure (1)..(531): unsure at all n locations
gttccctacctctactttcaagatgcagatcttcgtcaagaccctcaccggaaagaccatcacccttgaggtggaaagctctgacaccatcgacaacgtcaaggccaagatccaggacaaggaaggaattcccccggatcagcaacgtctcatcttcgccggaaagcagctcgaggacggccgtaccctcgccgactacaacatccagaaggagtcaacccttcaccttgtccttcgtctccgtggtggcatgcagatcttcgtcaagactctcactggcaaaaccataaccctagaggtcgaaagctctgacaccattgacaacgtcaaggccaagatccatgacaaggagggaattcccccagaccagcaacgtctcatcttcgtcggaaagcaacttgaggacgggcgcaccctcgccgactacaacattcagaaggaatcaacccttcacctcgtnctncgtctccgtggtggcatgcaaatcttcgttaagaccctcaccggcaagactataaccctaaaaagtcg

SEQ ID NO: 42377 - DNA, 336 bp, Glycine max
ttaaaatcctctgaattttagttttcattagagaaattttcaggaccgaaatatccatcaccgagtaaaatcatgcagtttaataatgtatagtaactaaataacacatgaacaatatcatttaatattatttcagtaaaaaatgaaagtaattaattaattgggttagttaccgttgtcgtgggggtagagtgggatggcccgccactgcgttgaagttgaacaaatcgagcactttgttcatgagatcagggttctggaaaatcacctcggtggaagccggttcaacgaccccctttgcggaaggtatgcaaaccagagtccgaagcccataca

SEQ ID NO: 42378 - DNA, 202 bp, Glycine max
  unsure (1)..(202): unsure at all n locations
ttttnattttttatttnnnnnnnnnnaaaacaaaaacggggattacttttaaacaaagtaaacaatcatataatatttagggtaaacaaaatatggaggagcactgctttattgaaacaagcaaccaaattaagtgttgtatatccaaactttacaaagttttcttaagaatttttaattcaacatagcctatatatttttt

SEQ ID NO: 42379 - DNA, 355 bp, Glycine max
aaaccaacggtggatatcattgttggatgcaatggtggttaaagaaacatcataacatatgtttaagacaaaaataattttatctactaatcacaatcattatttttgtattcatttttatccactgcaacattttcaactgacctatgaatcttttgcagtcattttaaccaagacttcccacagccgttggatctctccgaagacatcatcggacggcaaccgaaacctgcagcaaggacacgtgttcctttttcccagccacggcaaaatacacatccaatgaaacaagtgttgacatggcaactcgcacacgtcccttcctattcccatctcctccttgcatatcacgcac

SEQ ID NO: 42380 - DNA, 281 bp, Glycine max
tttggttaattgaaaattcactttggcaaaaactactactacatttggtaacaaatttcaagtcctgataatttgaagagctacccctaaaggtggagagggtattgatacaaaagaaaaatgcctgcaggctccgacaaaaataggataaattgatagaaaactctaccctaagtacggttgcattccctcaaatcaaaagatcttgaaaagcagaccaccatgagtggcaaaaaatggtgcgaagacaagcgactcaactgccatgagcttgatgagga

SEQ ID NO: 42381 - DNA, 394 bp, Glycine max
cggacgcgtgggcggacgcgtgggcggacgcgtgggcggacgcgtgggttattttctcattcattcgttcatcatggttcggttcagcaacaacgtgatcggactcctgaacttcctgaccttcctcctctccatcccgatcctggtggccggagtgtggctgagcaagcagggcgccaccgagtgcgagcggtggctggagaagccggtgatcgcactcggcgtcttcctcatgctcgtctcactcgccggcctcgtcggcgcgtgctgtcgcgtgtcgtggctcctctggctctacctcctcgtcatgttcgtcctcatcgttcttctcttcgccttcaccatcttcgccttcgttgtcaccaacaagggcgctggcgaagttgtgtctaat

SEQ ID NO: 42382 - DNA, 377 bp, Glycine max
aatttttccgtatatgaatctctgaaagactggttgattcgatctaaaccatttgggatagctcaagactctgagctaagtgtgacgacaaggcttgcatgtggagctgctgctggaactgttggccagactgtggcttacccacttgatgtcattcgccgaagaatgcaaatggtgggatggaaagatgctgctgcttcagtagttgctggtgaagggaagagcaaaattgagtatactggcatggttgatgcattcaggaaaactgtgcagcatgaaggatttggagcattatacaagggcctagttcccaattcagtgaaggtcagttgatccatttgcttaacttccttgtcatcatgttataataataatac

SEQ ID NO: 42383 - DNA, 393 bp, Glycine max
atttgctcagcttcaaaatgctagtgaggcatttcgcacctacattagagatggtcttgctcagatggagaagaatgctgcagctggaagaactccttcaagtttaccgatgcctacccctccaccggcatctttaaatatatcttctccggattttgcacctctctcacctgtaaacacaaatccactgggtgatgctaaattaaatgtgaaacctgatccgacaaattttaatttacccccatcatcatacaatgaggagaatagggccgtgaatgccattacttctagagcattaaattctgactatacattaggtgaccaaagaaatgatagatttatgacaggagtaaccagtggaacattggatgcaatcagagagaggatgaagag

SEQ ID NO: 42384 - DNA, 388 bp, Glycine max
cccacgcgtccggttaaatagaaaagaggagtttgagaatggcaacgatcagcgcggttcaggtggagttcctggagtttccagcggtggttacttcaccagcctccggcatgacctatttcctcggcggcgcaggggagagaggattgacgattgaggggaagttcataaagttcacaggcataggagtatacttggaggataaggcggtgccatcactcgccgctaagtggaagggtaaaacttcagaggagttagttcacaccctccacttcttcagggttttcatttttaggccgtttgaaaagctattttgtgggtcgttattttttccttttgctttcgctttattcttatataatgtttttgttattctgtttgcactcat

SEQ ID NO: 42385 - DNA, 548 bp, Glycine max
cgatgaagtgttgtgtctcattcaactctatatcatacacacgaagaatgcacactagcttcggtaaacaatatatatatagagagagagggaatttagccaaccacaaattaatcaagggttaggtatttggcaaagtggtcattaatatcaacttcctcattagcctcatcaccacgcacaacatccgaagttcctgtgccagcttgctcaccagtgtggatttttgtccttgcttcttgaatgatctgcatgatttcttccacactttggcttggttggtccttttgtgtttcctcgtaaccccttctttcagcctcaattatctctcttggcaagttcttcctaaaccaaaggtgctgttttatctccgagatgttgatcctctttaacaatgatgagaaatagtaagttgaaaaacacaaggggattctcagtgtacaagaaacaaacctacttaaatacaagaaattattacatgatcaaggactattatggttacaactaattttcacacaacatatgatcaagtgtcattaattcttttt

SEQ ID NO: 42386 - DNA, 333 bp, Glycine max
gtgcggacaggaccgggagacacatgcgccctacccgaatgcctaatgacgaagtgctgcacatccctaaggagaggtttctttggcttccctgtgccgccatcacctatgagcttatccataatgactctctcagcagcggcaggctccacaaagagcataaagcccaagccgccagcgcgaccggttactcgagccctcatgaccacaggctgtatcacctgcccatacaacccaaaacattcctacagacgctcctgatgagagacccaagatattcccccaatgaagagctcgccacgatccgattccatctcatctcaaaattcacac

SEQ ID NO: 42387 - DNA, 382 bp, Glycine max
cacatcgtctcatcataacatgatcatgatcatcatctgacatcatcacaatcacaaccacgtcatcatcaccgctgcaggtccatcatacgagaaaagtcctcgaagcagacgaacccgtccccgtttctgtccactccctctatcatgcgccggcactcctctaacgtgcaccgttcgtcgccgatggctttgaaaaccctaagcagctcctccgccgagatcctcccgtctcgatccgtgtcgaacacctcgaaggcttctttgagctcgtcgggatccgacccagtttcgagacccgacccgacgtagctcatgagagactcaaccgtgatgccgtcacgcgccaggacctcgagtcgcttctcacgcgccttggcgc

SEQ ID NO: 42388 - DNA, 369 bp, Glycine max
aaaaaaaaaaaaaaaaaaaaaaaaaaaaaaaaaaaaaaaaaaaaaaaaaaaaaaaaaaaaaaaaaaaaaaaaaaaaaaaaaaaaaaaaaaaaaaaaaaaaaaaaaaaaaaaaaaaaaaggggggggccgttttaaagaatcaaattttacttacccgtgcttgcaaagaaaaattttttttatagggccaccaaaattaaattcacgggccggggtttaaaaacgtcggaattggaaaaaccctggggttaccaaattaaatcgctttgaaaaaaatccccttttcgccagttgggttaaaaaaaaaaaggcccgaaccaatggcctttccaaaaaattgccacacctaaatggaaaatggaacccccc

SEQ ID NO: 42389 - DNA, 417 bp, Glycine max
ggaggtttaaccaagaagtccaaattttgatattttattgtggtggaagttgaatggtgtcaagtatccaacacttcaagcaattgcaagagatgtgttggcgattcctgtttctactgtagcttctgaatctgcgttcagtaccagcggttatattgtaagccctcatcgaagccgacttcattggaccactttagaggctttgatgtgtgctagaagttggttatggagtgctgagaactcgggtaattttaattctaatgtgggaaatgaaaatgctattttactcactgaaatggagtctgatgatgaaggtgaaccgacagaaccattgataactgacgttacttctgttgcaatctcccgccttgaagatgatgatttttattaaacttggttcatttggaaactttttct

SEQ ID NO: 42390 - DNA, 393 bp, Glycine max
ggggcaaattaaaatagattaaacattaataatatatttacatagtagacaaattattcagaaaagcaagaaagataaacactattatcaacaagtaccaatttaatgttctaaatttatttagggtcattggcgtcccagtctttcttgcggcggatgataatttcccatattttatccctacgtttgtaataaaaggagaccttatcgccgtgggagaaatcactatcggcaagaaattgataccatggttgtacaacatattgtggccaattccaatgtcaaggaccacaacattccattgcagtggagatccaaattttctaaggattgtcatgtgttgaccacaggcattaagatgtgtaatgacacaatttggaagtctttggaagc

SEQ ID NO: 42391 - DNA, 351 bp, Glycine max
cacaaaaaggtggccccaacattaccaaggtttaatccttgctaaacatcagggaaagaaaacaccaacagaactttacctgcacaattgattcaacaaggtgcttaaggggtgccaactctgctcttgagatcactcggaatttccaagcagtcaaacaagttgcttgaaaaccggttaaggtgactcttttacacaaactcactattttctgaaaatgtgagtgtgtaatgtgagcatatacatccaataaccttttgaaaattgtcttgacaacatctaggtaattggttggaaagggagccctcattcttggagggaaaaccgtttcatcatctagctgagatccaa

SEQ ID NO: 42392 - DNA, 510 bp, Glycine max
gaattaaaattttcttagcagacaatgcttcgcttaatcagccacatgaacagttctttactgcaacaaaatttattttgcttacactacatatattgcaacaacacaactttatagctagaatgcatgagattagaaatggcctaattttgattcaccatgattataccatttgaacttaggtatcaaaaagtgaattttacaagttggcggtctctacttcagcttctgattcagcaaccacaggaaccttttcatataccttagaccctttgaatctttgaggaagaatacaatgagcgccaaaacgttgctgcaagtagataatgatagcaagcaggacacctcccaatggaatcacaatatcccaagcagtggagtaaaaatctgcacttggatctgcatagaagtatgatccactatctacgcgagcataattatgagtcctgtaaagatcataagcatgtggcaacagtctcacaaaagtggttccaaagtaaaaagaacatg

SEQ ID NO: 42393 - DNA, 557 bp, Glycine max
  unsure (1)..(557): unsure at all n locations
taacgtaaataagttaatttggacatagtcgcatcttgtaacaacccaatgatacctgtagctgttgtttattctgcaaaataatcnttatcgaatccttatattgtgttacacgattatgcgacatgtctcgtgatatttctccttatgtcagcacttaatcgtacacatcaaatgtatctcttggcattatgcgccatcatgttcgagggtgggatacacacatgatagaatnctgaaccctcagcatgtctgcgcatatattgctgttcgaagaagtttgaacgccattaggttcagccaacatctggaaatatgcatgaggtccccatccatctgtgtcatatggaggtggaaagaattgtaagtaacaaaaggaagagattgtcaaacctataagccctccagtaaaaacatcttgccaatgatgccaataatcatcaacacgagagacagcaatcatagctgccacaagaagcggaaagaaaacaatacaaagctttgcaacatggcccctacggtcaaatgccttaattttcccggatagataccatgca

SEQ ID NO: 42394 - DNA, 418 bp, Glycine max
ttttaaactgaccattcaaatcgcatattcccatagaaaaattttccatgaaagtattaaaggggtacaacatgattaaactcagttaaatttagctaaaggtcactcccttgccgcttataatttcaccaatgcggtagaatttctctgtttcacctctgttctcgagtattctattagctgcctctggaccaactaccaggatcatccctatgcccatattaaaagtccgtctcatctcagagtcttcaatcttcccagcctaacgtgagaggttatcaatatagcgttatatactttcgtttccaaaataaaattttgaagaccagattaaaatatataattgttgataagaaatgaaaaataatttatttcctgctaaagtatatttattcaaggaacgttaaagaaagatgta

SEQ ID NO: 42395 - DNA, 542 bp, Glycine max
tttgagagttctcctaggaattcatgtatatcacttgtttttgggggggatgtatctcctactaagaacacatgcacttgtcttttaatttcaatccagctcttacctggcttcttcactatccccatattgtccatatcctttctaacattggctacctcgctccatagaccagcattagcataaatattagccagagtgatataggtagctggattctcgggctctatctcatataatgcttttgctgctcttttagccaattcaaggttcccatgtattctacatcctccaagtaaggatgcccaaaggaatttatcaggctttacgggcatgttatcaatgatattctctgcctctttgaatcggccagatcttgccaataaatcaataacacatgcataatgatcagcagtatgcatcaatccatgtttctcctttattgaatggaaatattctaaccctttatccactaatccagcatgagtacaaactgaaaagacaccaacgtaagttacttgatcaagctttggacctgattg

SEQ ID NO: 42396 - DNA, 411 bp, Glycine max
ccctgctaaaccagttttttttaaaaaaataatggggatttcgaaacatgtcagaggacaagctccaaacaaaatttaaaatccaaaatgctttccacttttcagcaaaacataactcaacggcaagagaaaaggataaccaagtttcgtgctaaaccagttaataaacatgtccggggtcatgctatacaagaccagattattttcttcttaatcatcaaaataacaatctgcaaaaaggtgcttaaatcttcggtaaaacagttggcagatccgctgggacatctgaacttgcctgaagatatcttgtcaacattgttgtagtactgaaattaaagccctgaactggttctcctttagtacgagatgcattaagttgctttctgacttgagtagccagcgacttcccca

SEQ ID NO: 42397 - DNA, 515 bp, Glycine max
  unsure (1)..(515): unsure at all n locations
gaaaattataaagtgtcttgttgagaatattgtagtagacatttcatttaaccagcttggagggttgtgcaccctttgttttcttgaggaggttgataatctgattaaccaaaatcatttattcaagcgtagcattatcctgataaaagcttggtgttactatgagagccgtatacttggtgcccaccatggacttatctcaacttatgccttagaaaccttggttctttacatttttcatgttttcaacaattcttttgctggaccactagaggtattgtaccgatttttggagttttttagtaagtttgactgggaaaatttctgtgtaagtctatggggtccagtacctattagttcactcccagatgtgacagctgaacctnctagaaaagatggtggagatttactgctcagcaagttatttctcgatgcctgcagctcagtttatgcctgtttccctggtggccaagaaaatcaagggcaaccctttgtttccaagcatttcaatggta

SEQ ID NO: 42398 - DNA, 488 bp, Glycine max
cttcttctcttgcggctagggttttagcgcagcttcttctagatttaaggaagatgggtaaggaaaaggttcacatcagtattgtggtcattggccatgtcgactctgggaaatccactaccactggtcacctgatttacaagcttggaggcattgacaagcgtgttattgagaggtttgagaaggaagctgctgagatgaacaagaggtctttcaagtatgcctgggtgctggacaaacttaaggctgagcgtgaaagaggaatcaccattgatattgctttgtggaagtttgaaacaacaaagtattattgcacagttattgatgcgcctggacatagggatttcattaagaatatgattactgggacatcccaagctgactgtgctgttcttatcattgattcgaccactggtggttttgaagctggtatttccaaggatggacagactcgtgaacatgctctgctttcattcacccttggtgtg

SEQ ID NO: 42399 - DNA, 530 bp, Glycine max
cccacgcgtccgggacaattgaagggatattcgatagaggatatattgcgacagcaaatagaaaagggcggaagtgggggaaagcctccaggaggacgaggtagtggtggtggtggcagcgacaacagctctggtggatcagatgggatgtcaaatgaaactcttcaagttgttttagcatcagtttgctttatattaatgtatatttttgtcatcaatggcttagaacttctaaagctagctaaggactgcatcaagtttgtgtctggtagaggccagagtgttcgattgaagcaagccgtgtacaaatgggtacgaatttacaagaatatcatcgagaagatggaagctgccaggaatgggttggagaaagcctccacttgcttgttggaccatgatttcttccgaggtgtctttaggcataacatgaaatcaaatccagaagaataatttttccgtgtacctattcatataaattttggtttccttctttaggacaaaaagtacattcaatatatatattttttggg

SEQ ID NO: 42400 - DNA, 416 bp, Glycine max
gaagtttggaaagttcttgacaagatccaggagttctctgagcagattcgcaatggttcttgggaaaggctttgaaggacgttgttgcaattggtattgggggaagcttcttaggtccactgtttgtacacactgcacttcaaacagaccccgaagctgttgaatctgcaaggggtcgtcagctgcgctttcttgcaaatgttgatcctattgacgtggctagaaatatcacaggattaaatcctgaaacaacacttgttgtggttgtttcaaagacttttacaactgctgagactatgctgaatgctcgaactcttagagaatggatttcatcagcacttgggatagagaatggacaatattcaaaatggactttgatgatgaattgaagactgtctcatgatatcattacttac

SEQ ID NO: 42401 - DNA, 367 bp, Glycine max
gctattcgtacggtctttacgtagcagtgattgtaatagccgcgtagatgattgagctatggaggaggggcctgattctgattttgcagaaccgactctgggatgcactgtctgggttgccgctatgacaaacaaccaactggttgttgcaaatgctggagaatcgagatgggtgatatcttggctgggacttgtattcaattcacctgtagaccaccaacctcatcttgtgattgatatgcacagagttttaaaagcatgtaggtacattcatgcacgactagttgatagaagtttaaatggtgcaagacctattggtgacatgaaatttgcacagaactagtttatttctgatgcaaaaccaatt

SEQ ID NO: 42402 - DNA, 435 bp, Glycine max
tcttcttcgtcgttatcttcttcttttgttgtttgtgtgtttgttttttctctcacctgaaaatgtcttgctgcggtggtaactgtggttgcggaagcgcctgcaagtgcggcaacggctgcggaggctgcaagatgtacccagacttgagctacaccgagtcaaccaccaccgagaccttggtcatgggagtggcaccagttaaggctcaattcgagagtgctgaaatgggtgttcccgctgagaacgatggctgcaaatgtggagctaactgcacctgcaacccctgcacttgcaagtgaggtgttggagagctaaagcttcaagcagagatggcccttagaaataatgataaaaactatatgtagtttcaaaacttcaaaattatgtagtatgtattatgttgcactctggtgttttgtgtctaaacaaaca

SEQ ID NO: 42403 - DNA, 383 bp, Glycine max
aaagtttaaatgatgctttcttttattaaaatttattgaagtcacatacaaagatatcaactgactctcacaattctgtggcaaaaggaaatgagaaaggaaacactcgttacattaattggaaggcaagtttttaacttaagcacacaccacacacagtgattggataaagctcccacaaggcaagaaaactttgatataatataaacaggcgtgctgactgataggatgaaagacagtgtataggaggccaaagtacctaacgctgaaaacataactgcttgcatttagcgctgcgacctggcgacgaatcgaccgccgagctcacttcttgagcataactgcatatgcatatgtcggaatgtcgtcatcccactcacgac

SEQ ID NO: 42404 - DNA, 292 bp, Glycine max
agacttagaacatgtaacttcatgtttatgattagctcaatacaaattacaattgcatgataaaaattattcaaggacacaatcatagtttgaattgaatcatcattcagaacccaacaaggtgcttgatatccattgggtaagtgagggctggattagaaccattatatgaatttattgcaatgattcggttgacagcttcggtgggatggaattgatcccaaaacacataagtggttcgattctggcatggcgtttgattaggaatacataacccatttgtccccaatga

SEQ ID NO: 42405 - DNA, 507 bp, Glycine max
cttgttggtcttttttcctttttttgtttctttttttttgattctttttttcaggaaacaaaaacctaggattctttggtccctgggggtatcccaaatccccacgcgcccaaactccatttagggtttaattggccttaaatcccaaccacacttttttttagaaccacatgtcttttccacaatcatttctaaacacttttttttggagcacgacggctttcttttggggatttgtataaagcaaaaagggtgtctcttggaggaaggacatcttttacacccgggggagttgtccactcttggctccattttaagatcttgagacttttttcacctggtaataattgcaccccctcttcttcttggaaaattgggtttgaaaatgcccttgagaccccagcgatttcttcaaattcaaatttatctttttcaaaacaccctttttgcttgtatttattcttaataaacagggaggccctccaacatatttttaaaagttttttt

SEQ ID NO: 42406 - DNA, 432 bp, Glycine max
ttttttttttttttttttttttttttttttttttttttttttttttttttgggaaacaaaatcctaggattttttgttccttggggatttcctaatttcccaggttactaaattacattttgtttcaaattggcctgaaattcaaaccacaattttttattgggcgacaagttgttcacacaatctttttttaacaattttttttgaagcaaaaaggctttctttgagggatttgaaaaaggcaaaaagtggtttttttggaggaaggacattttttacaacagggggggtgatcaactcttggctccatttgaagagcttaggaaatttctcactggtgaataattgcaaccctgcttcttcttggaaaattgggattgaaaatgccatgaaaaccccagcctttttttcaaatccaattttttcttctcc

SEQ ID NO: 42407 - DNA, 302 bp, Glycine max
acgacaagggatgctggtcaattcagcacacccgccgtggtaacacactttaattagtgctggtgtaacagttactagaccgtccttgctctgttggccattgcaggcattaccactctgattatattgaagctgtcgaaacgacatgttactggcgtcgaagtggtgatccctcatagcgtaccagaaggaaaggggttattggtatcttgcgtacaagatccaaatactctaatttcttatgaaccgaattgggtctatcgtttggctatcgaagatataccaaaggatcactacatgcc

SEQ ID NO: 42408 - DNA, 561 bp, Glycine max
cccacgcgtccgcccacgcgtccgaccaccttcctcttcttctccttcatccgtcgtcggccaaatgcccaatctcgccgaccctgaaatgttggcctccatgacccgcgccatctccgacgtctcccagacccgatccgtcctcaagctcatcggggcccgccccacccacgagcaggtggacgacgccaaggccagactcgccgacctcgaggcccatctctcccgccagctccaagagatcgtgggcctccccaggccccccgagatcgacgagccccgctggcgggcccatgtcgccgagaaagaaaatgccattaaggaatccacggagaaagagaagcgcgtcctcaagtcgctgattcagctcgaccagatgcacgattcctacgagaagctcctcaaggacgccgagaagcgactcgtcaagatttacgagggcgatggcgaaagcgacaacgacaacaacaacgacaacgagggtgaggtaaaagaagaggttgaggagatactgcatgaggcccacggaaaaggcatcgagcgggtggatctttccgggaa

SEQ ID NO: 42409 - DNA, 394 bp, Glycine max
ggacattcaaacgaaccatggtaggtgacttcgacggtagaggtagctgcaccagagctatcggagcctgcactcgagaatcaattttgctagggatggcatgaaccgcagggactgccttgctctggttgctgtgcacaatgattcatggatgctctattgaaccttctatctgggagctacgattaaccggaacgaacggaaacgtgcatttaacttgatcaatgatcttcctactgaccttgaaggtgtgacagacaggaagccagcataggacacgcccactgcagatagtgaaagcaagtctaagagcatcaccaagagatcaagtgatgggcaaggtaaaagcaacacaaaattctcatatgaaggttatgaataggaggatgagcac

SEQ ID NO: 42410 - DNA, 383 bp, Glycine max
gggttcgacgccacgcgtggcgtggaacatccaaacgaaaaatggtaggagacatcatactgctaaggaatatccaccagatcacaggggtgcgtgtactcggaatcaatttttctagggatggaatgaacctcagggacaggatttttttggttggtgatcacaatggttcatggatggtatttgagaccttatatattggatctaggattaaccgcatcgaacggaaacgtgcatttaacttgatcaataagcttactactgactttgaaggtgtgacatacaagaagtcagtcataggacaagacctctgcagatagtggaagtaagtctacgagcatcaccataagatcaaagtatgggaaatttaaatagcatcacaa

SEQ ID NO: 42411 - DNA, 348 bp, Glycine max
aaaaagcccaaccgtttaaaaattacattaatttcaagctccattttttttgaaattcacatgaaactaaaaagaccttttttacgattcatgaaaccttacatcactaaaacttacatttttaaagctttcttttttgggagggcccctaataagaaagaagccccccaaagttgaagtttgggattttccacaagcttagtcaacttttttaattttagggccaccaccagcagcgggcttgttagcccccattggaacattttcaccaggtccagcagcaccctggtacattttaacaatgatgggggtgcagatcccttccaacttcttttggttggcctaaaa

SEQ ID NO: 42412 - DNA, 401 bp, Glycine max
tagtcgttaacattaaattctatgttaatgatctgactatatatcactgtatctatacagcccatgatgcagtgggagagaggagtgatgaagagagatataacatttaatttataattaaagagaaattaagaagctatatatataagttaagggcatgcatatatagctagctagagctagggagtactgagcctattcttggcgagggcgtgccagccacaaagaactgagggctcgaagacgatggaagtactcagctatggccagaaaacaccttgctgcttgacgcgttgttaggatctggtgcagaccgagaatggtttggtgcctatgattatcagcctgtctcacgaaaccttcaagagtggagagcttgttcatggatacagacatctgtc

SEQ ID NO: 42413 - DNA, 398 bp, Glycine max
atcattgaacaggctgtgagcacataataaaaagaagaagagagcatagtgtcaaacactaattaccgattacaaaattctccatgccgtaccttatgtaaattcttggtattcataaatataacaataacatcataaaccataaaattctttcactgaatttagaatgatctgaatgatacatggtgattattaattaattaccttcttcatcacaagcaaatcacaaaaacgctagcgtgctaaacaagccaaccaaaagtggcatcaacacggcggcgaagctccggtgatggctggtggctccgctgaaattctcgtcgaccggatacaagttccccggcggccccgtgatgtatatgaacgatgacggtggtggtggcggacaatactgagag

SEQ ID NO: 42414 - DNA, 513 bp, Glycine max
cccacgcgtccgaaaaaaaaaaaaaaaaaaaaaaaaaaaaaaaaaaaaaaaaaaaaaaaaaaaaaaaggggccggccgtttaaaagaaccaaacttaacttccccttcattgcaacgtaaaagttttttaatagggcaaccaaaattaaattaattggccgcggtttaaaaacgtgggaactggaaaaaccttgcggtacccaaattaaatcgctttgaagaaaatccccttttcgcaagttggctaaaaaccaaaaaggcccgaaccaatcgcctttccaaaaatttgccaaccttaaatggcaaatggaaccccccttgaaccggccaataaaccccgggggttgtggggttaaccccaaggggaaccgttaaatttgcaagggccttaggcccggttcttttggtttttttcctttcttttttggcaacgttggccggttttcccggtaaagcttaaaatggggggctcctttaagggttccaattaagggcttaacggaacttgaaccc

SEQ ID NO: 42415 - DNA, 247 bp, Glycine max
cagacccttcattcttcgaatcgttgacgcctgtgaaaagctcgaaggggcttattctattggtttcgtcaccgaggacaagcttgtcgccgttcgagaccctttcgggtttaggcctttggttatggggagaagagcaacggtgctgttgtttcgctttgaaacctggcgcttgactaattgagcgactatgaagggagttacccgggagtcttggggataaacgattaagcttgctatgttatct

SEQ ID NO: 42416 - DNA, 338 bp, Glycine max
  unsure (1)..(338): unsure at all n locations
aaaaaaaaaaaaaaaaaaaaaaaaaaaaaaaaaaaaaaaaaaaaaaaaaaaaaaaaaaaaaagggggggaaaaaaaaagaaaagataaagngggggggcgcccgttttaaaggatccaagttaacttacgcgtgcatgcaacgtattagcttttttataggggcaccaaaattgaattaactggccgttatttaaaaacgtggggactggaaaaaccttggcgtaaccaaaataaatggctttgaagaaaatccccttttggccagttggcgaaatatcaaaaaggcccgaaccgatcgcctttcccaacatttgcccaccttgaatggcaaatggaa

SEQ ID NO: 42417 - DNA, 543 bp, Glycine max
gataaaatagtaaggctggatatattttctttttatattaaggctgaaaaatagttagtacatatattaatgtttgtaaaggaaaatgtaatacagttaagattccttcaacaggcatcacagaacgggcaactcagacaacagtcaaaaccccttccaattaaaggccatgttagcagagaaggttttcgtctgatctgggattactggaaatatcttcgtagacatagttatgcaaaatgccgctacaaatttagattccgatcctaatttataccaaatctacggagactgatgaataattcaaagcaccttgatgaggatctggcactttgacatgttccaacacaggagacattttcaaaccaattatctggatctgaaggtttgagtggccattgagaaaagcatctgttacctgactgcatccaaaaagtttaagtgacctcagtgccaaacagctatccacaatcaaacccagtgcattgtctgtcaaatttctgcaccaagatagatctaaagaatgcaaattttttgcatggt

SEQ ID NO: 42418 - DNA, 430 bp, Glycine max
ctggagtaggcagcttgagctacttctgggaggtccctgggcaagttctttaaaaaccatggatgggacttgatttccttaatggtgattctcctagctggatttgccacaaaaatgcgagataaaagatgtctacagtcttgagatatgtgaacatagtctgggatcttgtattgaacagccataattcgattgatggttttcctgaaatttttgggatcgtcttggtcttcaaatgggtatgctcccaccagcattacataaagagtcactccacaggaccatacatctgctaactttccatcatattctttacgtaaaaaaacctctggtgcaatgtaggctggggttccaccctttgactttagcttaaaaggaaccaaaattaccttaaattacccaaaatcccaatttttaacccgggggccag

SEQ ID NO: 42419 - DNA, 499 bp, Glycine max
  unsure (1)..(499): unsure at all n locations
tttntttttnntnttttttttttttttttttttttcattccccacacaatgcattcatgggtgattttataaaaacaatgagacccccactaataggatgacatttgattatacatcttcagctacatatataatattataattagggtatagctacaagctggtgatccaaaatgatggacacatccttaggttgcaaaattcacaatcgatctgtaagtctgaccaggagtccaccctgcagggatcacattgttggccacaatggtctggccagactcaagtgtggttagcttgataaagaatggtgctctcagtggtgagcccttgtcaaatttccaaactgcaccccatgattgttgcatggaatcccatgaccctgaatcaagtgcttccttgagttcaaccttggcaaggtcaccatccccatccttatattcaaccaaggtagcaaaattatttttggtttgagccagaatccacgtggaaagctattgac

SEQ ID NO: 42420 - DNA, 320 bp, Glycine max
attaaagagaaagggcaacgagatccatggcgggggtttttggggcgcgcgacataatattgcatgaaaaggattagttctttcaggttatccaaaatcacatccttaacggactctttgcacttatgaagctctaaaaatcattctggagttggcgacaacattaaatatttggcctcgtgctcatatgacaagctctcttttggcctagagaaccgtccgcctgtgaccagaatgatttccagacactgcggctctcatgtgttacccgtgggtcaaataaagctttaacaccttcccgagcaaatttattctcgcct

SEQ ID NO: 42421 - DNA, 554 bp, Glycine max
aaagtacattcaagcattcattcatttattcggaaacaattgggagattgaaatttttgctcaggaaaaaaggatacaataaaaaaataactatatacaaatccatgctacctgttcattttcaccatccttcttcgaaagaaataaatgccaaaagcagacagaacatgatacctcatacatggcttcgagccttttgagcaccagatcgaggaatagccaacacagctatgagtccactgataagggctgaaacagctgccacagcaaaggctggggagtttcctccaccaaatagctgatcccatggtccacttcccagtgacactattatctgtgggaccactattgcaagatttaggacacccattgataacccttggccgagtcccaatgactcaatatgtgtggaaattaaggcatatggaacactataagtgattgccagtggaaacccaagaatggtaaagataatcaacgcagctatcacaatgccagttggtggtaaatctttgcctatatagcccatgttatttgccacataggttactact

SEQ ID NO: 42422 - DNA, 427 bp, Glycine max
ggctaacaacgccaccttttaatgattgcggggactctttcttaatattcatcaaaaactcactttcatatcaaggacttttaaatactttccttaaaccacataatccatttacagcctcataaatacacataaaactccaccacaattctaatatcacgtattaaattaaacacctaacatttgattatcattcccccaataaaatccatgcccgagactcagcatcaaaatctgaaccaaatggagcaatatcaacaacttcaccaaaaagtgccacttttcttttaaacctaccggcaactcatttcctaaaaatcaactaagcggcataccccacgcgacagccattataaccgaccttaatagcaagtctaatttcctgataaaagagctactgttccaaacatattcgcccatcaataat

SEQ ID NO: 42423 - DNA, 234 bp, Glycine max
  unsure (1)..(234): unsure at all n locations
gataggggnccaatgaatattaaaataagagaaaacatttgtaattcttaggattctttttacaatcccggcattatattaaaaaaagaaaaagggggtcatgaatggggattactcaaatccaccatttttgtctctattaaacccaattaaaaaggctgcctacgtaaatatataacctacagaaaagtgggctagtccaaccaatcttgcgtgcacaatggaaagagccac

SEQ ID NO: 42424 - DNA, 318 bp, Glycine max
ctaaagagatagggacactcaattatctgggaggccaattaatcatttttttgctttaacaaaactcccttctctattcaagaggacgatttcccatatataatattacaaagaaaatggagtttacctaataaacccgagaacaatgataatgacactgctggctctcgaataaactaacctacgcgaaaagtgtgtcttctcaacccatgttgcttgctctattgaaagagccgctctctgatatatccatcgaatctaatcaaccacactactgcgttccttaacccctgcttcctttttaatcaactactacca

SEQ ID NO: 42425 - DNA, 569 bp, Glycine max
cggacgcgtgggttcagtttcaaggcagaatgttcaagggaaaaatatgtttggttctactgctcacagtataaataatggactgaatatggagaacttgcagcaaatgaattctgagcaaagaattgcaccaatgcaagattttcacgggaggcaagaactagctggatctttagagatgtcccaggacaagatgcttgtgcaggctccttcttcacagaacatggctaccttagatcctactgaagagaagattttgtttggttcagatgacagcttgtgggatgggtttggcagtaatttgggtggtttcagtatgctggatggtacagatagttttagtgggattccatctattcagagtgggagttggagtgcacttatgcagtctgctgtagcagaaacttctagtagtgacatatgcaaacaagaggagttgagtggtctaagtttccggaatttgggacagtcgtctggaaatgaacagccttcaactattgatagcagcaaacaacaatctatttggactgacagtaacttgcaatcagcatccaatataaattcaagac

SEQ ID NO: 42426 - DNA, 321 bp, Glycine max
  unsure (1)..(321): unsure at all n locations
tcacacttncgtttgaaagtgaataaactggttttattgctttgatacaaacaatacatggggggatagaaagactgaggagaaagcaccctttattaacgtggagcttcggtttccctgactcacgcagagagactagtgcaaagtggggtgcttccttccgatattggaattattactccgtatgctgcacaggttgctttactcaatatgttgaaaaacaaagaggaccacctcaaagatgttgaaatctcaacagctgatggattccagggaagggagaaggaagccattattatatcaatggtttcgtctcaattc

SEQ ID NO: 42427 - DNA, 347 bp, Glycine max
  unsure (1)..(347): unsure at all n locations
cccacgcgtccgcccacgcgtccggtttttgtttttgtttgtcaccattatcaatacctatcactgtatgtggtcattattcaacaaaaaaaaaaaaaaaaaaaaaaaaaaaaaaaaaaaaaaaaaaaaagggcgaacgataaaaaaagaaaaaaagcttacttacacatgcatgcgacgacatagctttaatgtggggccacctaaataaaatacactggccacccttttacaacgtggaaaatgagaaaaccctngcgctacaaaacataataacggtgcaggacatacacctttcgccaggtgaaaaaatagcgaagacgcacctaaagaacgcccttcccaac

SEQ ID NO: 42428 - DNA, 204 bp, Glycine max
gccagagtatggagggcaagacgcacaccttgtacatggatacccaatacaatgaatggtaatgatagcattgctgaccactgaaaacgccgataccatcgcacacaatgtggatatggcggacaaactaagtccgtcttacacaagaaggctaaaaccaccaagaagattgctctgaggttgcaatactcatgttgcaagcat

SEQ ID NO: 42429 - DNA, 416 bp, Glycine max
ataaatgaccatgtctgtgaaagagtgctatctccacacggggaagaagaggaagatcggggggcatgtgttcaggtgcttagtggtgccccttttcatcgtgctgttcacaattctttttatatgggcaatccttagacccaccaaacccaccttcacgctccaagacgttaccggttacgcctttatacgccaccgtgccgaactttctcacttggaattttcaggtcacgctcatctcacttaaccctaacgaccgcatcattgtttactatgatcgccattaaaccttcttgacctaccggagccagcatgtcacgttcctaaccggcatccctgcaacatattaaggccatttagagaacaatattttgtctccgttggtttatggaaccaacattctcttctcgccattc

SEQ ID NO: 42430 - DNA, 391 bp, Glycine max
gataaaattgatgaaaactatgccctcgtaggactccagtaggagctattgcattgctgagtgagtcttgttaaggaatttagagagcatagaggaagagatttgcattgaggaattcaacccaactaaaaacagtttacaactctgtttatatgacagttacataactgtaactgtcaactaacctgaatgagttagtgacatctgtaacatagctgtcctaactaactactgaccatagttagacttactgacttagctaaacttccgtattctgcttcagtactggacctagccactactgattgctttttggaccaccaagagaccaaattgggtcctaggaaaattgctgcacctaaggtcgaccttttatcatcaggatctgatg

SEQ ID NO: 42431 - DNA, 399 bp, Glycine max
accacgcgttcgtataaattatggttcatatctcatttactctgatttcatctcatattgggccttccttcgtatagcagaaaactaacatggggaaacagattgtgccggtgaaatcaccgatctacgcgctctccccttttcagcaaaagataatgccgggtctctggaaggacttgcccacaaagattcaccacaccgtctccgagaattggatcagcgccactcttttgcgtggtcccctcggcggaacctacacgtatgttcagaactacctggcaaacgagaagctgtctcacaggtgctgaacttatgcgggagctgagtggataaccctctactttgcagccttgatcttgctaagcacccaataatgagacactgttgaaacttgctcta

SEQ ID NO: 42432 - DNA, 366 bp, Glycine max
cccacgcgtccgcccacgcgtccgcccacgcgtccgagagaaataaaacagagatggggagagggggtatataaaagagggaaatacaactccgaggcttggggggttgttacgggggctccctggggtccggcccggtcatggacggtgatagggctctcttggttggcgatgctttcactcgtggtgcttcgggctaccaggtcgtgactgggctaatgcttgctttatcggattgattgtccttggattcgttcccgctttagctggctggattaggtgcgatgaggcctcccgctgttgccgttggcaccggtggtgctgcttttatgccctcggggagcctcctcatagcgctcctttaag

SEQ ID NO: 42433 - DNA, 404 bp, Glycine max
gctaaacatctggcgtacaattggtacgtctggtaccaaggaattcatggaagccgggggtgctggtgctgatgttagtatgattctacagcctcgtgttaaaaatgatactctgtatatcactactgcctactaagtcattgttacctccgcgcacaatgatgatgagcagtacctttgggagtcccaagctggaggttcattcactgccaccagggatacctctggtgaggatgttggcagggttactaagatcactttcttactcaatgaggatcagttaaagtaccttgtggaacgccttttcaaagattttattaagaagcattctgagttgattatctacccaatttctctttgggttgtgaagactacccacattgacacctctgacgattatgatc

SEQ ID NO: 42434 - DNA, 294 bp, Glycine max
  unsure (1)..(294): unsure at all n locations
tcctacaaaaagcatgaaagtggggcatncaaaagccattaaaatactacacaaattctattttgttgaaagggcgggggtgctccatacgttactatggctattaaaaaccaacatgaacctactcaatgtcgaacttctttattaaggacataatgaactcatcgaccttgagtaaaacaagaagagacttggcaacactgtctttttgttggcacctcttggcccaagcgacaaacttggaaactttcttttatgttgaggctgcaaaagattgtacaatgtggtggaaag

SEQ ID NO: 42435 - DNA, 340 bp, Glycine max
gcgcaccacgttttcgcacacgttcttccacacgtttctaccacacatctgtttttttgccccggtgtgccctaattacttctgattggactactgttaaaggtttaccacaaagactcgctcttaaacttactgggtatgaaaataaaaagcctgcgtggtttaaaattgagagagtttcccttgaattcaatgactataagcttgtgttctgtgcaactgaaaaaagcacatgtgtggatattggggtttatattgatggtgaacgaaacaagcgtttggtgttgactgacaataatgatccccctattggtttccctttaaataaagtttgaagatt

SEQ ID NO: 42436 - DNA, 269 bp, Glycine max
tttctataaacttacaacagattttcaaattggtcacgtgtatgctgagtgcagggtgaaattctcgccacacatactgaatctgatggaatcttactcctatgatatgacagagttattttgtcacattatgttgggggaaccaatggtgagtaggtattatcaccacactgagttagcggtaggagtggatatgaacgtgcctgtcgagggacttatggctagcactggatgggatgaacttgtttatttttgagaatatggaactg

SEQ ID NO: 42437 - DNA, 580 bp, Glycine max
cgcgtacgtatgctaggatcctctagtgcggccgcttttttttttttttttttttttttttttttatccttgctaaaagcgcgtttatttaatatttcttagcgctagctgtataatacaagccaagtacatggaatggaaccttttcgcacgctcggagactattgaactacatacattacaatatataggcacatttttattcttttcaaaacaccatatttacgatttacgagtgctccaacttcatttaacattgacaacttcatcaataacctcattctgttttcttccattgcttccccaatactggttatgcaatacgagagagtcagctgggactttctttccgtcatcattgcgataccagtggtagatagcatgggtcctgttttttatctccagtgtggcgtgtccatagctcgcttctctgaatgcagaatattctggctgtggatccaaataacttgaggcaagaccttctagatttcctccatctccgattgttatgtaaataggtgctgatttgtcaggtatgggataccttctaccgccagttatgttgtagtctatattggag

SEQ ID NO: 42438 - DNA, 530 bp, Glycine max
cgcgtatgtatgcttggatcctctagtgcggccgcttttttttttttttttttttttttttttttgatatacgttgtgctttaacgacttgaattcaatatgattttgtttatcaattatttttggatttatacattacttataagaaattttataagtttttttttttagttagtatttcactaggttttaaaataattaattgatcaaagacgtctttaagcaagcttttaaataggctcgtggaccaagccagacttttatgtaagccgagccgagtcttaaaaaaagcctatgacagttaatgagccaagctcaagccttacgtattcaactcaagccgagctcaagcctagtaaagcttggcttggctcatttccacccctaccaatgacatagtggcggaagctcccttcttcatgagaatatcaatgcaaaacattcacttcttgtagagtgtagatgatacgaacctcccattggagggccaaaagtgacttaatagatgtaactatcatcacaaatagatg

SEQ ID NO: 42439 - DNA, 564 bp, Glycine max
  unsure (1)..(564): unsure at all n locations
gcgtacgtaagctnggatcctctaaaaccggccgctnnnttttttttttttttttttttttttttggggcgggggaagtgacctcaacaagattgcttgggtcaattgggagattgtttgccttccaaaagagaggggtggtctgggaatcaaggacatcaccagcttcaacttggcacttctaggcaaatggaagtgggagttatttcatcgtcaggatgagctatgggcaaaggttctggtttcaaggtacggggactggaggggacttgctgaagcaccatatgataaaaatgcgtccttatggtggagagatttgaagttagctttacatcagccatcaatacaaaatgtgtttcgggatggcatagcatggaaagtggggagaggtgataaaatattgttctgggaggataactggcttcagggggatgcagctttggtagcacgatatcctagactatatctcaactcctgtcagcagaaccacagaattatggatatgggagcgcaaaaggatatgggctgggaatggaatttcaaatggaggaggcatttgtttga

SEQ ID NO: 42440 - DNA, 370 bp, Glycine max
  unsure (1)..(370): unsure at all n locations
gagcggccgctgggnnnttaataatttttttttttttttgttaaaaaacaggaattgaatacatgcgtatattaacaaaatgtaacataattaaacacggataaccccaatttacgtttaatagtacattctaataggggacgaccatacttggtcaatttatctttctcaacttggatgccatgaagcggaccttggaaagttttactataagcagtaaggatttacacattcttcttacttagagcactcaacgtctgttactggattaaatctcaaacaaaggatacattgttccggctagatgacacgtggtcaaacatgctctccaacattgctaattctctatgccttgtttacacggattgtt

SEQ ID NO: 42441 - DNA, 449 bp, Glycine max
ggaagacgagtgaaatgggaaaagaaaggtggaggttgacctgctttgtgacagatgtggaatggagcctgaatctaccattcatgttttaaagggctgcccctgggcatctggcatttggctactctgcccattagcccttcatactcaacagatgcaggctctcaacttctcagattgggtgaaggagatggggaagtgtcttgatgaaaagcagctggaacttatgctagtagttgcatgggctttatggagtgatagaaatttgctgctgttccaggacatacagaactatcctgtggatgtggtgaacaaagcaatcagcttcttcgaagagtataagaaggagaagctaaaaatagtgcaaacacctataggttggcaggccccaccccatggtgtttataagattaatactgatgctgcaatttttaaccaacaagggattg

SEQ ID NO: 42442 - DNA, 202 bp, Glycine max
gcaattagctcatcgactccagataggagaactcgacaccatgaaggtgctgatcgttgcccttgctctcctggcgctcgctgcgagcgccgcctgcagtacaagcggcggctgtggctgccagacaccaccgtttcatctaccgcctccgttctatatgccggctccgttctatctgcgcgcccagcagcagccgcagcat

SEQ ID NO: 42443 - DNA, 415 bp, Glycine max
  unsure (1)..(415): unsure at all n locations
gaccaacangcaacatagaaagtggaatacagtagcaacaatagagcaacaatggcggccaagatattntccatccttatgctccttgctctttctgcatgtgttgctaacgcgaccatttttcctcaatactcacaagctcctatagctgcccttcttcccccataccttccatcaatgaccgcttcagtatgtgaaaacccagccttaaccctcaggctcacaagaatcgaacagcacttacttataccctgttttcacatcgcagcctatttgtgagcatgtcaacatangccacactgacactctctccatacagcagtacttgcaactctctattagacacattctcatcacactgtaatacctggtattgaacaacatacatacgtgttgtattaagacatctcataca

SEQ ID NO: 42444 - DNA, 391 bp, Glycine max
  unsure (1)..(391): unsure at all n locations
attgagaccaactagcaacatagaaagcacaatagtgtaccaacaatggcagnccaaaatatttgcttccttatgctccttggtctttctgcaagtgctgctaccgcaaccattttcccacaatgctcacaagctcctatagcttcctttcttcccccatacctctcaccagcggtgtcttcagtatgtgaaaacccaattcttcaaccctacggatcacaggcatccagcagcatttacttataccttgtctcacaccgtagcctatacgattacttggcttgtgccaaaataggccaactccactggctgactgtgtattaaacaatttcatacatgtgtgatttgtatgaacacacatatagtattctccaatttatacatgaatatt

SEQ ID NO: 42445 - DNA, 226 bp, Glycine max
  unsure (1)..(226): unsure at all n locations
caagcagcatagaaagtggtgtccagtagcaacaatagagcagcaacggcgaccaagatattatccttccttatgctgcttgctgtttctgcatggtggtgctgacgcgacgataanttcctcaatgctgacaagctgctatagctgcccttcttcctccataccttccatcaatgatggctgcagtatgtgaaaacacagctcttcaaccctattagctgcaaca

SEQ ID NO: 42446 - DNA, 332 bp, Glycine max
gccacgcgtcggtctcagacatagcttatctactccagagcgcagaagaacccgatcgacaccatgagggtgtgctcgttccctcgctctctgctctcgctcgagcgccacctcacgcatacaagcggcggtgcggctgcagccaccgccgcggttcatctaccgccgcggtgatctgcacctccggttacctgccacctcgggcatctccaccgcggtcacctgccgcgcggtcacctgcaccgcggtcatgtgccgcgcggttatctgccgcgcaccatccactaccctactataccgcccggcctagcctcatccgcagcacacccatg

SEQ ID NO: 42447 - DNA, 357 bp, Glycine max
  unsure (1)..(357): unsure at all n locations
gagaccaactagcaacataganagcacaatagtgtaccaacaatggcagccaanatattttgcttcctttatgctccttggtctttctgcaagtgctgctaccgcaaccattttcccacaatggctcacaagctcctatagcttcctttcttcccccatacctctcaccagcggtgtcttcagtatgtgaaaacccaattcttcaaccctacggatcaacaggcatccagcagctttacttatacctgttctcacaccgagccataagagtcttgtcttgtgcaaatagacaaccaactgctgaacttctttaacaattctacatgttatttttacaccataattttcaattataca

SEQ ID NO: 42448 - DNA, 292 bp, Glycine max
  unsure (1)..(292): unsure at all n locations
gctcgctgngggcnnngcncctacgtacctacaacaacagttgctgcaacagattgtaccagctctgactcagctagctgtggcaaaccctactggctacttgcaacagttgctttcattcaccaactggctgtgtcgaacttgtgtgtacctacacacacacagtactaatcactacatggtaacatggcgtacttcgtgagacaatgtgctcaacgttttgtaactgctgaaacatgggggatttaaaattaagataatggctatcgtggtctaaaaatttgtgatattg

SEQ ID NO: 42449 - DNA, 330 bp, Glycine max
  unsure (1)..(330): unsure at all n locations
gcaaaatgccaattcgntgctcacaagggtaaagatgtctttcaaggttgtttaacaaaaccaggttcaaagggctttaaaatcctattttcctaccccaccttttattaggtggataaacttgggggttcggatattcttcatcctcttctatgttgggggccaaatagaaccgcacatatcccatctcagcaatcttttactcgactacaactgggagctcatttgacagactaatggtgactgtgttggacaatggcgttgcctttgtaaaagagttcatatatcgcaaagcaaatgtttaggacacaggctcattcatcttaatga

SEQ ID NO: 42450 - DNA, 201 bp, Glycine max
cgtaagcgaggatcctacgagagcgcgctgttttttttttttttttttttttttttcgtgtggttattctagctaagttccataaaaacacgggcgcctttttgaaatgtcctgaacagctcctgtaggttgagcgcctcgttcaaggaaatatagaataacaggaatatttaaataggtttgattctttatttggatcat

SEQ ID NO: 42451 - DNA, 329 bp, Glycine max
  unsure (1)..(329): unsure at all n locations
ccccaagcggccgctttntttgttttttatttttattttttccccaatactagttgaccatcacacattattggaacacttaattcttacattaaaaaaatcaaacaactattcctcttttgttaatcattattaccaccaacaaacaatacctaacaacactcgatgtattcacaactaaaatccacacaaaaacatataaaaacaaattgaccatctaaacaacaattcttttctgaatgcaccattttatttttttcacgtttcttatttttaccaaataatattttctcttaacatcatataaattaccacataatgttccattt

SEQ ID NO: 42452 - DNA, 310 bp, Glycine max
ggaaaataaatttcattacttaagaaactaccggggggatatttgaaaaagcttgttacaaattaacagtccatctactaccctaacattaaacaaaaaagggctttcaaaggtggggggggggaaaggaaacttcccgtaaatatttgcttcccgttgcaatcatccactatatgggcctgaaatcaatcaaacctcaccgaccagtagatcttgcgaacaaaccacaagcaagcatggaacccaagttttcccgtcaacacaaagaaggcctatgaaacaattatcatgtacccgaagtaaaggatgc

SEQ ID NO: 42453 - DNA, 421 bp, Glycine max
ggaaatcatgatttcaacaaaaaggaggttcagccgagagttcccattttccatgcaatcatcgaaaaaagcaagtgtaattggagatatacatactgttttgcataattccggcatatttgaagatggacataatactgtgtaacatcttttctggccatcgaaaacatccataaagacttcggttctactaaaaccccagtgatcattggaactgtagaaaaaagttgcagtgccaccctgaacattatctaccacataaaggtgttctcctgtatcattttttacatttacatccttccctccacagtttacatgtaaacaactttaataccgtggacagaataaattcttggaccaaggaacaaactccttctaacctaatatttcttaaataaaagctttttaaacaacattcaaa

SEQ ID NO: 42454 - DNA, 454 bp, Glycine max
  unsure (1)..(454): unsure at all n locations
aacgggcgctctcagcgtttatgagagtataaacatttttggaagataaantttacacaanttaaagaccaatttacgcatatatggggcatattttcccaganaaacaaaagttggaaactgaacatgtgcttctttttgaggtgtcancgaaaaccgataccactcacctttataagcaatctttacaacctcgcagaagccagggtatgcgattgttatattgcaacacccaatttgcaattgctagaggaacattctctgtttcttaccaatgcaattgtttcccagctgcagttccgagacacaagggactacatttgcggttttcccatcaacaccatggtcatagagaaaccctttgaacacatgcccactaatctggaccgttgccaagtatgcaaactcatcttcaccattcccaatggcagaaactctatggcacttgaacact

SEQ ID NO: 42455 - DNA, 223 bp, Glycine max
cattccactgcgctatgtacattatttattatttatatgattatttaaccttgtaattatatctacatcaaagcgatgcttgtagagctgacagttggaagaggttgattgtcaaaaagaagaatctacttcaaccgatatgcccttaggcacggcaatacataacatagaaatcacacttcggaaagggtggacaattatgctagagcagcaaggtgctgta

SEQ ID NO: 42456 - DNA, 247 bp, Glycine max
ctccaccgttttctccctcctcgccatggatgggagcggcgtagccctaattgcgctcctccttcggtccgagggtcttgaacactaccgttgcgaccgcaatacctacatgggcatgtacctcatcaacatggccaagatgctcaagtgcgccggctattacgactttatatccataatggcctacgactggagcgacaccgtctgtttttagttagaaagccctacacaagtaaagatttctgaa

SEQ ID NO: 42457 - DNA, 117 bp, Glycine max
tttaataaaacccatcctcacaataacattgatatacccatgcaagttcttcccttctgaatcaagtatattcatatctgaaaaaggttgacaataaattttttcaaaatggactat

SEQ ID NO: 42458 - DNA, 264 bp, Glycine max
cggatggtaaatatttctcagaacatggagtgtgaatcaaacccatgtttgaattgaaattgagatactgatgcaagttcttcccttctgaatcaggtatattcatatctgaaagaggttgacaataagttttttcaaaatggactatttgtccctctgttagaggtgttccagaaatgtctgcgatcgagtaaatagctccacgaacgaatagatcgtatcgaattggaaaatggaaagatttgtacaagttatacccttcgt

SEQ ID NO: 42459 - DNA, 363 bp, Glycine max
gggggaacaagggcgcataatttattaaagcccccaaagaaaaaacaacatagtgaaattttttaaatgacttggtgacccccaagttgaacaacattaaggggaacttgggccccttatttaaacccttttttttccatttaattagctgggaccagcctaatttgttggaagggaaagaacctcctgatgtttttccaggggttaggaaacttaaagggccctctttcgcccttggggccccccaagaaaaccctccattgggctccaaagagaccaaccatgtggtttccctgccatattaacttacttctcgctgctgtttgtatgaaactgcatttggaggggaaagatcttgtggat

SEQ ID NO: 42460 - DNA, 405 bp, Glycine max
gggagcggctagtggatttgtggtgcccgtcataacaaaaaaaaactgctcaaatatttttatgggtactggtaaggagctcctttaagccagatgttatccgctataatttactcatagaagcttttgggcaaaagcttctatacaaggaggctgaatccacatatctgcagcttcttgagggtagatgcattcctaccgaagatacttatgcccttcttataaaggcctactgcatatcttggctgctcgaaaaagctgaaaccatctttgccgaaatgcaaaattatggccttccctaaagtttgtatctgtattaacttgttcgtccacacatgctgcataagaaatataatctaggattgtggatttagacatgactacgtggatatttgaatggggctt

SEQ ID NO: 42461 - DNA, 230 bp, Glycine max
gtgcccgtgatactaatctattggaaacataccaaatggcggtcggtctagaggatgcaagcttacatacgcgtgcatgctacgtaataactgttatatagtgacacctatattcaattcactgcccgacggtatacaactattggactgataaaaccttgacattacgcaactgaatcgtcttgcatcacattcaattttggccatctggcgtaatatcaaaaaggccc

SEQ ID NO: 42462 - DNA, 235 bp, Glycine max
cccagccttcgcaccgagaaaacaacacaatggggcaccccttgagcccactctacaacacggcacagcggggtactgtctgttgaagctaccaccatttttttttttttttagaacctccttgccagaagttaaaatggaccaagaaactttcctattcacatctgaatcagtgaacgaagggcaccctgacaagctctgtgaccagatctaccatgctttgctcgatgcatgc

SEQ ID NO: 42463 - DNA, 563 bp, Glycine max
gccagtatcggaaaggtctaacgaacgaagatgcttaagattgcctacagagtcaggcatctcttgaaggtcacaaaaagacaaagataggatgcgtaagaacttaaacttggagaacaacttatctactagtttcctaccaccccaacgacgcatatgttgtcctggaaatgtgggcataaatgtccgtagccttttagcatgatataaactctcgtacccatccaaatattgatcgtattgagatacaaatgaaaaatgacggacttttgatatactttttggtttatcaacttctaacctgaaacagatgtccccacaaacatattttgccaaatcattgagaaggtcatgcatgacaaaatacttttctctacttgatcgttgaaagaaggaccttgataatagatcattgaagtattgttcaccaatttcttcttgaggattactctgttgagagcactgtacaaaattttgagtcacccagaactgaattaagctctccttgtgaaacttgtgatctttggggaataaggcacactgtgcgaaacatctcttgagat

SEQ ID NO: 42464 - DNA, 504 bp, Glycine max
aaaaaaaaacatttctttttaaccaatagtagctattttactttctaaaacgtaccatccatggatagtagatacgcatacattatttatttgtttgtttgtataccattactcaactagtgctagagcttgaggaagacgaactcttcaatggcaggcacggctccaatattgtcaagagcctccttgtttggttcttcatcgacaccaatagccataatagccttgttcctacgcgatgttcttcccacactcataaagctcacattcacgttttgttcacccagtatgtttccaacacggccaatcatgccgggctgatccacctgccggcacaggattagattcccttctaagctcacatccacatcgaaagaccccacacatgtcaggtggggttctccaaacttcactcttccgtcaatgctgatctgaccactctctgatacagcactcgcaaatttggagtccacactggatatctgtacctggattgaatcaaca

SEQ ID NO: 42465 - DNA, 622 bp, Glycine max
  unsure (1)..(622): unsure at all n locations
agctggatctctagacggccgctaaatttttttttttttttttttttttttaaacatataaaataaccatttanttcattaatgactggagattcatccttccaaaatggcttttangacataacacattttttttgaaggaataataataatcctactcaaataaaatctactttagctccccattattttgcaactccatcacaatatcattaccaccaatcaactcacttttttattaaattttaggataggttggccaatttaaatataccttcaatccctttctcacttcctcatcaatcaatatatcaaatgacccaaaattcaagccctttttttcaatgacataatcaactcttgaactaaaaccacattttgttgcattttgtgtacccttcataaacatcattacaatgtgactatgcaatcaaattttttatgtttattcttaatggtctctgaaagaagaatcccttttttttttaaaatcttcctaagttttccgttttttttcatcttcaacacaatattttatccaccaattacctccccctttttattcaantttagttaaactgtaccagtttaaattaaccctaatccccttaactaaattttt

SEQ ID NO: 42466 - DNA, 392 bp, Glycine max
ccgcttcctcagccaggtttgggcagaatagcggggggtgttatgtattattagcatagcaaaaatgctttcctcgtcattaatatgtttgctagtggaaattgtggcttctcgggagaattgatgaatgcatcaaagatgcacttgctattgctagtaccagaacatctaatatttctttattgtttggtttaaatagccccatactgcgaaacaaagtagtatcctgaacctacaccgagtcattgactgtaattctcaaaattttcaaaacttaacaaacttggattcactttgatatattgcttaccaatcaaattctggggtataccaagctatctactttttttaacgcccacagtgaacctatatattccgtatcacattttttt

SEQ ID NO: 42467 - DNA, 353 bp, Glycine max
ggctaaacagaaagtgatttcagtgagtgatcggtgttcacttgatctcatcataatcgtcagcgtcaattgaagaacatgccgatcagaaacatcgccgtcggaaggcctgaagaggcgactcaccccgactcgttgaaggcggctttggctgagttcatctcaaccttcatcttcgtgttcgccggctcatgctccggcatctcctacaacaagctcaccgacaacggcactgccacccctgtcggcctcatctccgcctccatcgcccatgcattcaccctctttgtcgccgactccatcggcgccaacatctccagcggccacgtaaaccccgccttcaccttcagctc

SEQ ID NO: 42468 - DNA, 381 bp, Glycine max
ggagcaagaggttaataaagggggaggcggcgtggtaccaaaggagcctctctctcctgcctgcgctcgagggagcaattgaagagaagaagaagtaataagtgaggctgtccctgttgctcctgctgttggaatggaatttgacagctacgatgatgtctattacttctataattggtacgccaaggaacagggttttggggttagggtcactaatacctggtaccgcaagaccaaggaacgttacagagccaaacttagctgcagcagtgctggcttcaagaaaagaactgaagccaatcgccccagacccgaaaccaaaacaggttgtcctgctatgatcaaagtcaagttgatggactccactagatggagaattat

SEQ ID NO: 42469 - DNA, 301 bp, Glycine max
acaggaattattgtataaagataatggaaatacccagggttgggggtatagtgatgctgattgggcaagttgtcccatagacaggcgatccaccactggatgctgtgtatcctttggaggaaatattgtttcttggaaaagcatgaaacacactgtgttgttggctgatcaagggtttaagcagaatatagagctatggctcttgttacttgtgaattgttgtggattaaacaacttgaagaattaaaaatatgggatattcatctgattacgatgcatggagataatcaggcaggttttt

SEQ ID NO: 42470 - DNA, 483 bp, Glycine max
ctaatccatcaaaacttaattgcaacacattcatgatatctttgcttgaattttctttcaatctagccaatgcactcctccactcaaaaacgtctctgtcaaataaaaatgaggctaatactttaattgctagaggaaagccatggacatactctaatacatcatataccaattgttcataatctttgacaatatcttcagttttgaaagtttttctacaaaataattgtagagctttatccttgtcaaggagttgaacattgtaaactttatttacttcataattttttaagatatgtctatctctagagattatgatgaccctactccctgcacctagatatatctaggatgcaaagccaatttctccaattgttccatttgatcaacattatcaagaataataagtgtctttaagtggcatagcctagttcttaccaacatagttcctcgggaaggggttgttatctcaatatttccttg

SEQ ID NO: 42471 - DNA, 190 bp, Glycine max
ggggaaatccagtacattatgatagtgttcaggtgccgtaaatggaaaataaagacagggtgtggatggcacaacacttaaaacagttagatagagagccttatttatttatataccattccctggataaactacaaagcaggcaaaattttcattttatgaggactaggataataatattatatggggg

SEQ ID NO: 42472 - DNA, 425 bp, Glycine max
ctggaaggtatgtctaccattagtttttgaaaaataataggtaaaatacacaattaagcacaggtaatgtgaaccattggatttactccacccatagctcataaaaaattctcagagaatggataaaacctatttaaagcaacattaaatttatacaagcactagaatgaaaaacggctcccagttccatccaaaaaccgatcagtgtgccaccctttgttctgtaattcccttaagaatacaggaaagacaccattcattttctcataagcctcatgcaggacactagtagcactgagctcatgagaggaactctcagttcgtgcagcatatgcagcaactagccaccctctcagtgcatcttcaccactagcatcttgttccaataccatgtcaatgcatttattcccaaaatttaagagaaa

SEQ ID NO: 42473 - DNA, 458 bp, Glycine max
gggcatgacagtagaactctggaatgcactcatcaggggtccattgatagagcctctgcattgtggaaggatattcattaggctcatacactgaacgaacagccattcggagaacactcaaagggagtcttcttgctttataactacagacagccaattcagacaaacattcatctgaaacatgatgagggatttcagacgttgaataggtgaaatccaattgttcatcaccttttgccaagcgccatttgctcttgctcaagtctcgccaccctgcgtcacaactgtcatcaggttttgagctaaaatcaattacccaaggcattactggatgaaatgtatggtccccccaccttcttcctgctaatctgtttaagatgagtaaatattcaaaattacttaattctcctctccaccatttatgaaaacaagattgccaatctattgttggagaaagc

SEQ ID NO: 42474 - DNA, 417 bp, Glycine max
ggacataaggaaagttagatggcctaatcgtaagggccaaatttcactcacagaatttaagctatttgtatatacagaatcaattttagtattgaggcaacaagaaataacaggaatctctcgtgctcttaagtaatacaatcctttattcaatttagcatgcccaatcatcttcaataaaggcatgtcatgtatatcacaataagattgataaaaagtgagcttgcaattcaaagtacaaacaagttggagtttaaagactatgttgaaagtaaagtcaggaatatataaaacattatacagccacaggttttcagaaagttatacacaactagaatattttgtagtgaagtaattccatttggaagattgacacgtatagcaaactttgaaagaaatttacctgaaaggcgattt

SEQ ID NO: 42475 - DNA, 230 bp, Glycine max
aggacttcatgattgaggagatccacgagggttcctttggggcacatgccggtgggcatgctatggccagaaaaatccttagggccgactattattggcttaccatggaaagcgattgttgtgctcatgtcaggaaatgtcataaatgtcaggcatacccggacaatgtcaatgtttcgccacattctctgaatgtaatgtttgccccttggcctttttccatttgggga

SEQ ID NO: 42476 - DNA, 324 bp, Glycine max
gacaagaggacgaaaaggggaaaaaaactctttaaggaaggattgtatgaaacttgaacttgggagatgcctggggcgatgcttttatcatcaacaacgctctacgttgcttattgacatgaacaatccatttctcaatataactgttgaatggtttcttaataacggagctgttgtatccacgctatcaggtgctgaagatacttatcatattattcgatgcgggaatgttttaacacatgatttatagaaaacgtttaataagatgtgtaaagaacgtgtatattggggaactttagctggtgcttaatcttgaatggaata

SEQ ID NO: 42477 - DNA, 373 bp, Glycine max
aaaactatattatatatcatattattaggggcattagatataaaacaaagtggactgagtatcatcccaattcgacatgtttctatgtatgctctaccaaaactccgatgcctcatgcttcctatggtccaatctaggtgtgaggttacacaaattcttctatttgatggaaatatcttctgttttgccaaggacttctgttgctgaacgtttatatgactcaacagaacaggcttctttgtcggcagtttgatttcttcaagttctccagcaattcaacaatctcaagctgcttcatcactgcagcatgtagcaccctcttggtcttctcaaagtcaaactcaacagatttaattctatccatggaattcat

SEQ ID NO: 42478 - DNA, 416 bp, Glycine max
tgcggccccgacggctgcgcactgccggcgcgctcgtaacacgacgcatcacgcccgccccgagcgttcggtccgggcgcgccgctacgcgtctctgctgccacaaaccggcaggaagcccgtgccgacgacgtctacaatgcatcctttcagataactatcagaaggctgcaagcccatgacccacgggattcacggcgagaagcgctggtacgcgctgatcgtcctctgcctcggcgtgctgatgatcgtgctcgacagcacgatcgtgaacgtggcgctgccgtcgatcagtaccgatctccacttcaccgaaacggccctcgtgtgggtcgtcaacgcgtacctgctcacgttcggcggctgcctgctgctcggcggccggctcggcgacctgtacggtcagcggcgcatgt

SEQ ID NO: 42479 - DNA, 312 bp, Glycine max
gactatataaaccacaaacacaatttaaacaaattaatgttggatccttgggttactgaagcatgtgtgagcaaaatgatcttagtaggaataacctttgacgaacattccccgagtggcttcctcaaattcaccctcagcagtatactttccaagctgaacaagttaaatggactaggcactttaaaacaatgcatatttaacaacctttacattctcatggaccccaccccatgtattcaagcatgtgttttggataactcttgcatacaaaaacgacacctgccatgggtttggatactggttcataac

SEQ ID NO: 42480 - DNA, 349 bp, Glycine max
ggactaaccctagttcattgggctgcatcttattcgcttaaaccctattcgatagcctttccacatatttactgcttctttcatacaaatccaaaaccagacggaattcacaaaaaacgttaccatgtcggacgatgagagagaggagatggaatttgatctcacttctccggaagttgtcactatgtacaagagcgccgctgagattgttaacaaggccttgcacttagttatttctgaatgcaaaccaaagacattgattgttgacctttgcgagaaatgagattcgtatattatagagcaaactggtaacatgtacaagaatgtgaataggaagattgagagaggt

SEQ ID NO: 42481 - DNA, 409 bp, Glycine max
gttctttctattgctttcagtcattgggttctgctgggctcagtatgccccaaataccaaacctggacggacatctattgtccatctgtttgagtggcgctgggctgacattgctcttgaatgcgaacgatacttagctccaagaggatttggaggggttcagatttctccacccaatgaaaatgttgtgattaataacccttcaagaccttggtgggaaagataccaaccaattagctacaagttgtgcacaagatcaggaaatgaagatgaattcaaagacatggtgactcggtgtaacaatgttggtgtctatatttatgtggatgctgtaattaatcatatgtgtgggaatgctgtgagtgcaggaacaagcagtacttgtggaagttactttaaccctggaaac

SEQ ID NO: 42482 - DNA, 340 bp, Glycine max
ccatctcgtatcatggaaccataaagcattactacaactccaacttttttggattccaaactcacagcaatgcctattgtaccctcttcgaaatacactaattcacccgccattacttcatctggaccatgcatacgatctataccgtggcctagttgaagtacgggaccctgatttacaatgttgacttccagatcatattgctcaatgcgttcacggatgattgtactaaactcatcggggcgaatggttaccatgaaaagttgttaatcttattattttagaagaaaaaaatattgccgcttctctatttgacggcagaaagactaatcagctcttt

SEQ ID NO: 42483 - DNA, 409 bp, Glycine max
acgcacaggtgctagctgtggacagatcaagggtgcccacagatgggtcactatgctgataaatgtgcggacaatacatgtgatgagacacagaaatacttcctgcactccgcagattgcaacaattttgctcgctggagatactgggtttatatgacattggctggaaaaagagccactggacaggctaaagctgctttgataggaagtccgggagatactcatgaattaagaatcttcaaggggattgttagaccaggatctactcattgcgatgaggttgatgcacagcttgaggttgcggctattgaaaaagacaagtttctttcttattacaccgtagtaaacccaacttttgccaaagaggcagcagccaatatcatcgtgcataagggacaggttacaacag

SEQ ID NO: 42484 - DNA, 308 bp, Glycine max
gatactagatatcaaaaaacatactacgtaatagtaaataaattaggacatatataaaaaatgggtgggttccatagtttctatgattttttttagaaacgggcacgtcctttctatacaccggagcctatctttcttttcatttttattaatttaattaatgtgattgataacttgtacagttcacactctttggctctacccatccaatatttagcttagtaagacgattatttcacaaagaaatctatttatacagtaacgggctttaattattaaaatttgctgggtaggtgacccttttattt

SEQ ID NO: 42485 - DNA, 466 bp, Glycine max
gagagaaatccttcccttttattcctccgtaaccggggaccaaactcaaaagatagttttcaatataccatatactacatattcaaatacacctgcattacaacttgcaagatccttaattaaagatagttttcattccacacacaagtacatgattgatactatataaaggaaatataatgtataacacactaaaccaagtgagatatgcgtagccttatcccgcaagccgatgactaattccaatatatgaatcatatcatagtttatgcaaaacgatgtgtgccccacgttttggctgcaaactaagcacaaccgttggagcatgttcatagaccggagaaagctcaaatgagaaatgttgcagaagcaatgataacactatctttgcttccattaaggcaaagttttggccaatgcatattctaagaccccatccaaatggataaaacgaaatttggccttt

SEQ ID NO: 42486 - DNA, 576 bp, Glycine max
gcaagaaatttccggcggtttatgatataagggatagcagttctgagtctccacgagagagattaattaacttacggaggttcccaacatgatacaaagaagaaaatataacacaaccaaaattgatgaggaaatgcatgtagcggagaatatgtcgatgacatcattcgtgacatcttactttctgtcggtcttataattcatgattcatcgtaacaacgagataatgacattcatatttttccttgccactgccaaagaaaaggtggaatgaagaacctaccaatactggttatgcaatacgagagagtcagctgggactttctttccgtcatcattgcgataccagtggtagatagcatgggtcctgttttttatctccagtgtggcgtgtccatagctcgcttctttgaatgcaaaatattctggctggggatccaaataacttgaggcaagaccttctagatttcctccatctccgattgttatgtaaataggtgctgatttgtcaggtatgggataccttctaccgccagttatgttgtagtctatattggagtatcgatatgatctttc

SEQ ID NO: 42487 - DNA, 441 bp, Glycine max
ccttctcaaacaaactgtcaagattgaaactttgtgacctacaaatgagctcaaaagcattcatggagacgggtttctcttttctctctgtcactagattttcctataaatcaaagtgaatgaataaacaacagaatttcctgcaactgatgaaagaagttgaatacaaatattgcctaaaaatcagtacattagactcattgaaagcaacgactacatcatctacatttagatcctcttcctcagagaaggatgttggcttgtatccttttttgaaccattcatcttctaagagctcaggaatttttatcctcgttagaaggtttgggtcaagaatgtgttttagcaatttctttgcctgtggcgaaaaccatgatggacaagagaattctgccctgccaatttttttgtacagagtcatatgagttggttcatcaaaag

SEQ ID NO: 42488 - DNA, 154 bp, Glycine max
caaccatcgctatttgccatgtaagaaccaaaagcgccccatatgagtctatgaaccatggaatatgaagtccaccaaaccgcatgggaaggcgcataaatcaatatcgaaatgccaaagcctttataaaagcctatcgttgcatcaacacacc

SEQ ID NO: 42489 - DNA, 479 bp, Glycine max
  unsure (1)..(479): unsure at all n locations
ccgacgacaaaaatactgagattcaaaaacgaagggggatggaactagactcattggctccctaccgagaaaccaaatttttgtttttttcattcaaaataaacacggaaaagaaaaagccttattgatggataaacttattaaatagacatgcagcattaatgctattgcataattacttgattcttgacttgagttttactaacacgatatggagccttgggatggtaaggcccattgaatccaaattcttttttttccttagcaccagctcccactcaaattgctgaaccaatctgccaattgcagcgcaagctataaacatgtcctgaagagagcccgcacacaccctattgcttgctacaaaggccatggtcttgtttaaatccatgtggtcatatttctaatctataaatctctctggcctgcactcattaggattttaccacagattgtnngccatgttgcatccgtatata

SEQ ID NO: 42490 - DNA, 501 bp, Glycine max
ctctcagttcatgtttctctctcctttcatcaattttatttttctcttattttctctctttgttctcttttcactctcatttttatttgatcctcacaaacctcacttggagacaaaggtttaagggtaaccttttgccctttatgtacaaatgaaaatttgtttgtgacatcattgtggacaacatccctatcgtactaccaagacattccaagtaagagatgactagctccatagggactacatgaaatagtatttcatcaacatattttccaatggaaaagcatatcaaaacttgtctatctacagctagctcctcattctcactcaaccattgtagtttgtaaggcttaaggtgagggaaagtttccaaagcaagtttttcgatcaatctttggctagctacattagtacaactaacctcatcaataatcaaagaacatattttcctcatgaccatgcacctaccatgaaaaatgttctccctttgagtttcatccc

SEQ ID NO: 42491 - DNA, 203 bp, Glycine max
ttttcttataattttgacttacattcacaaaaaaataaattttatgctcattataacttggccacattattaattctaccaaagatttaagtcccttccataatcaaaaatatcccttgctaccaagttgtgaattaccatgctttaaaacacaaagccgttcctcttatttattaagtagataataaaccccatttctttct

SEQ ID NO: 42492 - DNA, 302 bp, Glycine max
gaaaggcggaagaggaaaagaggattaccgggtctccacgtttagcaataaccaaaccctctttactctcttttcttatacttctcttcgctagggttctagcttctttctatacacttcattctttctcgactgtacaatgatcaacgaccaggacacatttaaacgagccgatctcacttctgatctcaacgatgacaatacagcagaccttgttaatgctcttaagagcaagatacacagttgggctggacaacactcatatattctagagactatgacgaccaatgtacgatagcgtg

SEQ ID NO: 42493 - DNA, 368 bp, Glycine max
ggttgccactagtgactacaatgaatttcataaaactgtcaaaagacatattcttactaacttcttgggtgccaatgcacagaagcgacaccatatccaccgagaagccatgatggaaaatattttgagccagtttagtgaacatgtcaagaccttctctgatttggcagttaattttaggaaaatattcgtaactcaactttttggattagcactgaagcaagctctgggaagtaatgtagagaccatttatgtggaggagcttgggagtacattatcaaaagaggacatatataagattctagtggttgatataatggagggtgcaattgaggtggattggcgagatttctttccatacttgaagt

SEQ ID NO: 42494 - DNA, 405 bp, Glycine max
aaaaggtacgaaaaaacggggcgggccacaaccttcgtccggtttaaaaaaacaacaaaaatttgacaccaacaccaaaacaaacccactgggatggtttaatttgtattctttctaatactgctttttgcataccttattctcatgccttaatggcttgctacttactacaaaccaattaagaagccaccattgtataagtttttagtgttacaagccaacagtgtacaaatcacctttttattagtcaaattcaccgttttacaatccgtaactcatttgtttacaatctattatataagatgccattatataataaaccatcttatggaaagtacccttacatttgaggacattttctatgttttaagcaaagcaatgaggtttattatctactttataaat

SEQ ID NO: 42495 - DNA, 235 bp, Glycine max
cccaacaatttaaaacaacaccatctgacaataaagaagttcatttttaacacattcataacaaaccttggtggaattttagagtcctattattaatgcgacacaatttatttcaacacaaacccaacttattttcaaggtacattattacacacccacttaaacataaaaattcttcaaatgttttgggaccccatccaacattacacaacacgcttaaaaccccccacgatta

SEQ ID NO: 42496 - DNA, 485 bp, Glycine max
  unsure (1)..(485): unsure at all n locations
gttagcttggatcctctagagcggccagctgtttttttttttttttttttttttttttcgcgcaactaagaagcatcatagtcttaacatngggagaggacccaacatgattattcaattatttgacctactcaacagactcagcctccaggcttacaaaaaaacataaatcccatgacaacaatatttatttccaagccacaaatatttcttttgaaaacccacttccttattggaagtgcagttcctgcttagaatccaatcaacttccctaatataactattgtttttcagccaagtcccgtttatattttcatttcaccacattccatacttacacaaactatttttctccgtttataggctcctgtttccacaaaataattcttcctgacaaccaaaataccatcttccaactctctcccaaatacaacatgcttgttgtcaaaccagtctcatctttcacatcttataaacaaccgaca

SEQ ID NO: 42497 - DNA, 330 bp, Glycine max
ggcaccgctggagcagacttaacaacagcacaaagcgggttactgtctgttcaagctaccatctatctctttctctttcttagtgcctccttgccagaagttaaaatggcccaagaaactttcctattcacatctgaatcagtgaacgaggggcaccctgacaagctctgtgaccagatctccgatgctgtgctcgatgcatgcttggagcaggaccctgacagcaaggttgcctgtgaaacctgcaccaagaccaacatggtgatggttttcggagagatcacaaccaagggcaacgtggactatgagaagatagtgcgtgacacatgc

SEQ ID NO: 42498 - DNA, 355 bp, Glycine max
tactggttggttagttaccttgttagaaaataatatcctttctaagagtcattaaaatgatagaagaaaattaaaggacctttttgttataaaatggtcaatttttgacacctagctagaaaaagaaaatgattcgaatggtgagttgtgaaaggctggcttacttggatcaatctcggtgctcataagttccagcacaatgtttcttgttcctatcctatcattgatggcatccaaatgcttcaagatagtctctttgaaatcctatttgattttattcctcactatcaccaccgctctgactttgaattgtactggtttctctgcatgcactgtcagtgtggtctttatcaaa

SEQ ID NO: 42499 - DNA, 350 bp, Glycine max
acgcccacgcgtgcgaagtcgacccaactatttacaattctcctcctcattgggtcgggttattggaatgagtacaatctaaattccttaacaaggaaccattggagggcaaattttgtgccaacagccgcgtttattacaactccaataacgtatatttaaattgttgcaaataaaaaactttcatttggacctttggttgggttgatcagtccaccttctgtgtgcaccggacggcttgtacctttttaccgcgattcgctcctgttcttaactggccgggtcgtgccttctgtgctgttacttttaaaaaaataaaatgtcttaaacaaaacctacccttctttata

SEQ ID NO: 42500 - DNA, 305 bp, Glycine max
atgtgagaaaacaaaaaaaagtttatatgaaatactaaactagagataggtggattttgtaattcccgatctcttataaaacagtttaattgcttaaggacatcgcctttttttgtccaatcatcattacttacaaaaatcatgtgctacaacatattattaacctgtgcatcaaacattcatttcacggtatataaacatcttactatgagactagttttctaattcaacattgcatattaacctgggacaatttattgattgaaaattacacttgctcataactattaatatcaattattaca

SEQ ID NO: 42501 - DNA, 344 bp, Glycine max
atctcttagccatgtccgaagatgacttaccctaccatctccgcataacacccaacggcgacttaaccaccgtcggccgttacaactttaacggccagttaaaatccacaatgatcgctcaccccaaactcgaccccgtgaccaacaacctccacgccctctcctacgacgtcgtccagaagccatatctcaagtacttccgcttctccccagacggcgtcaaatcccccgacgtcgaaattcccttgaaagaacccaccatgatgcacgatttcgccatcaccgagaacttcgtcgtcgtccccgaccagcaggtggtcttcaagttatcagaaatgatcacc

SEQ ID NO: 42502 - DNA, 178 bp, Glycine max
ggcaaaaacagaaaaaccccaccgagttgaccttgggtttctaccaattggggccctcccttcaccaccccacaccggatggtctacggggatcataaatcctcctcttactacaggacgcttacctatacaacatttagatccggatctacctaaatttatggtggtaactgcaaca

SEQ ID NO: 42503 - DNA, 416 bp, Glycine max
ggacagggtaaacttgtgcctctttccccgcgaacaaaatatacatcattcaggttacacaaagctgcagtcaactttcagattaactaaaagttacccttagaaaaaaaatagaaaacaaattttaaagaagaaacattcaggagtatgcacaataggctcacaagtcatagtcacagtcacagacaattctaactccacactgtccataaaatagcaatcccaggattcaaaaacatttgtatctcaagaattatttacacacctagagttcttgtagtaacagactgtctgagacttctactaatgggtagttgaatgtaaacctcatggacgtcttgtttacaaacctctcctctatcccggtctatcgcatagcagacgtaaattgtgtcaattacgttgtctagcacatg

SEQ ID NO: 42504 - DNA, 185 bp, Glycine max
ggggagatttcaaatatattttacctatatgcaaatggtgatatcatacataaattataatacaaagtggaattttgtttcacagacagccgaaactacttgttgatggcccttatggagctccagcacaagactaccagaattttgatgtactactcctcataggattaggaattggagcaact

SEQ ID NO: 42505 - DNA, 316 bp, Glycine max
cgagtcacgcctgcgtgcagaagacaacagacaacagatagttgaaaacattgggtgccaaacgtttaaccttggtgaagatgtttatatgcgttttaacactcactctgattccttcttgtgactcggaaaggcaaaataatagcctagttatgaatcttaacaaaggattatgccctcaagctgcacacatcatcacagaacatatcaaggttcttttcaaacgccacaagaacactgctttctcctgagtcacgaacatttttcatgactgtgatgatcataagaatgatgcttcactggtgatagacttcac

SEQ ID NO: 42506 - DNA, 202 bp, Glycine max
gacagatggggaaaaaaacatatatggagaaatcgtgaccatagaatatgacccttatcgtatgcgtacatttgtctcatacactatggggatggggagaaaatctatatgttacaccctaaaggggctataattgcagataccattgtttctgatacagacagctctatacaaatgacgaaatgccctaccttagagtgcg

SEQ ID NO: 42507 - DNA, 400 bp, Glycine max
gacagaattcaaatccttgtcatgcgatcatcctttcctcctctcaactttatttcgattgaaatgattcaatcatagtgcctaatcttcatccacccataataaaaagaaagatagagcaaagaaacaagagaatctacagaaaaaagccaggcacaaaaagttgtacataatattgtatgcatgagaattgaaggagggggttgaagactctttatcatcatcgatcgtgtacagcatggattcatcatcttcaggatctcagttatctcagcacccacaactcccaccgggttttcgattctaccccacagatgaggaactagtggttcactacctcaagagaaaagcagactctgttcctcttccttgttccatcatcgccgaggttgatctctac

SEQ ID NO: 42508 - DNA, 320 bp, Glycine max
tacggatgctacaagacgacattatggtacggatgcgggaaacacgacataacgtgtctgttgcaacaagaccactgtacggcttgatgaacttgttgcaccctttcttttctttggatgattgggtatacaacaagctttagcttgtgggttgaacgcttatactctttctattatctctgcagatgattgtcccgttaaatgtcacatacagagcgccttttatcactgtcccacatgtggaggacttgtgaatgctacatgtgggaatgttactctgctcataatagcaatatttggccttagcaataacaaaattg

SEQ ID NO: 42509 - DNA, 323 bp, Glycine max
  unsure (1)..(323): unsure at all n locations
gacaacttaaaaattatttataaaaatgggttgaaaattgataaaataaaattaaattggtttttttaatggctttaaacaaaatggtaaaattgaagatgtatacaaactctaactgaaaaatatcacacattataacagttatttgctaatcattttggcaaacttatgagggcctagaagtgaaaaactataggcagtaggtagtgataatagcttttttatttttactacatatgccttttttgngaagttattataataattggctacaatgtaatttaatatttgcatatataaaaagaatgatgcccacacaggcc

SEQ ID NO: 42510 - DNA, 520 bp, Glycine max
ccgaactaaaagtgggcacgatacttaggaatgactttttccagtgcggttgacgaagtatttacattatgtataattatgtaaaaaaaaacaggtattgaataatcaaaccccttaaaatgaagtgatatttgaaatttccaccaagagtatttctaattttccgaatcaagcttgattatcttccttagtattgagagttgagatggaaaaaattaaaaaattaaaaccctttttttaataagttgtgtgaacaccttttctgaaatcctagatgtgatcattctggctgtctcaacaaccgaacttggtaatcctgccacttctgctaagagaaggccataatgggggatgcgtttcgatccttccttaagttgaaacttgaagtccaagtggttgttttttaactcgacatcaaagtgaagaattttcacgttgggatacattgttactaattccgatatgttctccatatgagtggcaaatacggtatacgttttaagtgacaaaagatgctcgc

SEQ ID NO: 42511 - DNA, 372 bp, Glycine max
aaccctacaaaaataaaaccccgcgttaattaaccaaagggacccaaccccacaaaattcttaaaattccttcccttaacaaaaattttatttatgcgttaccaccaaactcttccctttttaaacccacatacataaagctatttttaccacccttatcacaaacccaattactgaaacaccacctgccaaatgatcgctgacactttaaactttgacctaaaaaccagcttcctagaaaatatcacacaagagctcagaaaagaaaccacacatttattgtaaccaacatcccctgatgaaccagcccccacgattcacttcttattctggacaatcttaatgaccttgtctcccgtaggatccttattc

SEQ ID NO: 42512 - DNA, 494 bp, Glycine max
gggcacaaaaaacataacgttggggggggttaagccaaagcaacacaccgcaacaaaggcctgaaactggctgcgctgaccaaaaatggaatgcggggctgcgtccaacacaacgcgttaaaacacaaattagtagaaccaatggtcacaccggttatcaggaaccaagttttgggaacaaccgttgccacacgatggtcgagacttcagactttgtccgaaaaacaggctagctaaaaaagaagacacaacgtgccataaacgaaaccaactttttttgcgaccaacatcccctgatgaacgagcccccactagttacttgagtttcggcacagccttggagaccgtggctccggtaagatccttcttcgtgacgtttttgttgactaccacaccagcagtttgacgcatgtccttaacagcatacctctgaaaaagaggatgctcgcggaaagcgcaaacaaccatgggttggggtggaatcagcttaacaa

SEQ ID NO: 42513 - DNA, 355 bp, Glycine max
tttttaccaatcacaccataaaatggtgatttagagggttaagcccttttcttttaaagaaaacccaatggaattattgggcctaacttaaaaaatactttactgggtggcccttttccaaaaagaaaaaaggttggaataagaccccttttttttggatattaacccttcacaaatactggagtccatctaatttattggaaaaagtcatagattcagaaattacttgcggtagaggaagttgcacaagaataccatgaatggatggatctttgttaaatctcatgatggcattttgaacatctgttactgcacaatcagtgggtaattcagtcaccaaagacttgattccaac

SEQ ID NO: 42514 - DNA, 317 bp, Glycine max
gaacaccgaagggggatttgctactttatcttatgtttgctagccttcagttacttatgattgctagacccttgagtgtgtctacaggatttggagctgaggaacgatggatgtcgtaatgtacgttttaagtagtgtgactatgatcaataaatctctcattttataaagcccgtcaatactgaaaaaaccctaacgttacagcggccgatctagaggacccaagcttacgtactcgtgcatgcgacgacatagctattgtatagtgccacctaaactcaattaactggccgccgtctgacatcgtaatgactggc

SEQ ID NO: 42515 - DNA, 308 bp, Glycine max
gaaagtgcgagactttttggggagccatacgccaggggatcgtgaggggaatatgatagctggctgttttctcttgtgctgcgacagatttgggagcatgggcattccacggcgcaagctaccaaaggtgccctctccgaatgaaaactggctatggtgagcgaatcttggaggtaaaatgcccaagttctaggcttgctgtggaagcacacatcatcccggccttttaaaccattcctgaagagtgggtcgaaccaactgagggctaccttaacggggcacaatttagagcagactgttaaacaggt

SEQ ID NO: 42516 - DNA, 353 bp, Glycine max
gtgctcaagaataacattcctggttatagtattcctagcaatacaatgttataccttgaaacaaatgcccacaaagtaattataggaatatttaagagcagttagttgatggtgaactgtatcatttaggattgtgaagcagttgaaatactcacatgtctgactgtcaaataaaaataacttatatacaacttttggttgtcttcttgaatagttgttttctgtgtgcagttttgggaagatggttgcctgctttcgttatgcttcaattcaccttcattctgtttatcttcccccacccaaactggaattcaactatgatagtcaggactggctacaaaaagatgcaaatg

SEQ ID NO: 42517 - DNA, 363 bp, Glycine max
gcacgcatacgccgacgcgtgggcggctgtgatgggacaacagacgggcaccctggtcagattggaaatggctatgcccctgtcttcaagagccacacttactactcggtgtgagattgcatgaactcatgatcaagattgacaggcgaaccggactagagcttgagaaggagcccaagtactggaaaaacggtgatgctgcctatgttaatatgattgcaaccaaacccatggttgtcgaaactttctacaactatcatgcacttgccagagcttgctgttaagcacatgcgtaaaactgatggtgagggagacatccccaacgtcgagacaaaagatcctaccggagccaaggttaccaac

SEQ ID NO: 42518 - DNA, 387 bp, Glycine max
  unsure (1)..(387): unsure at all n locations
gggngnntctagccagccaaaattgtgaatgagggggattctgctatgatacaaaacccttacaaacgcatagcacatctcctggaagctgctcatgaattaaaactcaacactcgcgtaaccacttttgagctgaatagatacaaggattaaaccttaattaacactcctactaaattagattctctgcctgtctatttggctatgcctataattacatcgaatccaatctacaaaggatcggttgcctgcaattaatagctaattccatccagcgctcttctcagaccatccttcgtagttgcgtataacatcttagctctaatccttgatgctgttggagaccatgcaatgtataagatcttgctcttgcggcaattatcaacg

SEQ ID NO: 42519 - DNA, 382 bp, Glycine max
ccgagcgaaacaaaaacatatccatgtttttagagcggcaaataatacaacaaaaatattttaatagtctgaattgtttctcttccaacacaaaaaaggactaataatccccaatcaaaatactacgcataccaccaactagattgaaacttataacctccctagaggtcatagacgacttcatatgtaatcggggtaactggctacaacgttgccccctcgacacatgaaaccaggtttggaaccctgacgctgtctccttatgctaatctattcacccttgtccttagcctctgccttgagcttatcattcttaatcttcctaagacggatcttcttagtgcacactgatcgcttaacatgctccaaacgcacgtgaatc

SEQ ID NO: 42520 - DNA, 324 bp, Glycine max
gcttgcagagcgtatcttccgaagcaaatgtgagaccctggataggatattactttgattcttgctctatgttggatacgaaatctggctctttgggggttataattgacggttgatactcaattgcatctgtattacagaaccgcacatgagattttgaactaatactggtcctcgcgaatgaagcaatgccaatagaaatacctctatatgtctcgataaagcatttcatctaatacgataaatgatatggactaatattcacttgtttaaaggataatggaatgaggggattttttgagactttattaaatatacatccaa

SEQ ID NO: 42521 - DNA, 335 bp, Glycine max
cgcgcttgctagcgaagggaccgacgttagggcgctttttgagttgacgcttttggatcagagtgggaaggagagacacaaggtgcatagccattttgagaggaccctcgagagtggaccctacacgttaaaataccgtggtagcatgtgattacttgtgggtgggggttgctttagaatccttcccttaaacgacatgaagtgaatcatgcctatcaaatcagagcatgaggtgataagagctaatcttgaccacacaaccatacatggatggggttacaagcggttttttaagagaacagcactagagacatcagattaccttaaagatgatt

SEQ ID NO: 42522 - DNA, 354 bp, Glycine max
  unsure (1)..(354): unsure at all n locations
gttggatatggataaagcgcctccttgggtggacgaaaagtggagttgtgttgtggaatatacacaaaggccgctgatgtnggagcagaccttgtcggaaaagnagaacagggaatacctgaagacgaccctatgaatactgctgttattgctgatctggttggtgacaatgtgggagattgtgctgctcgaggtgctgatctttttgaaagtattgcaggtgaaataattattgccatgatacttggtggaacaatggcacaaccctgtaaaattgcagatccatctggcttcatcttggttcctcttggtggtcactcattcgatctgatagtttcatcagctggaatattt

SEQ ID NO: 42523 - DNA, 368 bp, Glycine max
caacagattgggaaagatatacaaaaggggatccacgtgtgttgggctatttgaccagttgaaaccgcggaatatacacaaaagcccctgttgttggagcaaaccttttcggaaaagtagaacagggaatacctgaagactaccctacgaatcctgctgttattgctgatctgggtggtgacaatgtggaaaattgtgctgttcgaaggtgcttatctttttgaaagtattggagtgatgaaaagaggctttactccacttgggcaactgaacttgagcgatcctatgtggttgaaaaatgtggattccaacctcgtgcaaataatacccacatttattctatcgctgacagagaccaatgcctcatt

SEQ ID NO: 42524 - DNA, 443 bp, Glycine max
gtaatacatgagaacttattttaatccaacacggttcaatttctcacaataggaacgtcgcatcaatttagatttcagagaaaccaataaagtactatcattttacaattacacatcaaatgcatcacctaaatagctattctgtggaccatgagaaaaactttgttattgacgatttttaattaattaaagtgatgcactcacttaggtgatggtaaacataatcaagtatctctacttttggtccttttagagcttggcaatcatcccattctgaataggctttgcagacatcccattctccttatcatccaaatcacttgcacttgggggaacatctacagctggggagcaattgaaaaacccatgtggcataagcataaagccaatgcgttccactggcataactggccagtcttccaatcggggaatgtgtgttatac

SEQ ID NO: 42525 - DNA, 452 bp, Glycine max
cggccgctttttttttttttttttttttttttttttgggtgcaatctcaatagttccatctcgtgttcttgcggctttccaaataaagtggcaagagacatgttagacaaatcttttgattcagaaatggccgctactttgggttgtcattctctacttaaacatcttaacaccttgtttataagatcctcattttgaaattctttgcctaaggctgctagatgatttactatatgtgtaaatctcttttgcatactctgaatattttcatttgcattcattctaaataattcatactcatgagttagtgcatttatcctagatcttttaacatctgtagttccttcatgtgttaatcgaaaagtgtcccacatttccttagcactcttacaatttgaaaccctgaaatattcatccattcctagagcagatgttattatgtttttggcttt

SEQ ID NO: 42526 - DNA, 492 bp, Glycine max
  unsure (1)..(492): unsure at all n locations
tggcgtatgctatccaccctcacaatatgtcacgttatgattcacggtanagatatactatagcacaaagtgtctatngaacatgccacaaatattttgagtcactcggccactgaatatagtttgcatatagatgtggagtgggaaaataccaataagaganagagaaggccatttgagtatattatcctggtcaaattgcaagaaggatgtttaccactggttgaaaggtagatacaanggatagccacgagcactgaacatgtgttcatgctcacatataaactgatcttgcagcatacgggctctctcatcacacacatttgctagagtttcttctcttctccgcataattcccgtattcaggtgccaaaataaccaaaaggacccgattattccaagtgacacaaatataactaataactttttcctccaccttccagcaccccttgaaggaccccttggaaaatgtttcaaacacttttgttgtgc

SEQ ID NO: 42527 - DNA, 475 bp, Glycine max
ggggcttgcttggatggtttttcggttctaacagcatcaggaccacaaaaataaatctgatgatacatcaacttattcggcaaaaataattttccacaatatgggcatctctcttttggaggcaacatatgcttcctgtactcactctcaacaacagagtacgtagttatcacaaaatcataatctgcaaaccgattcccactcctccctctatttgccccatgataaatcagcaccttggtgcttccttttaaagtaaagcgatcaacctcactaacccactgagtgacagcaaccacaggacatatgacaagcgttcctttgatcgcaggcttcaggctggatgaacatggtatggattgatctggttcacaacctagttcaaattcacgtttggcgaggacaagagcaattgcttgaacagtcttccccattcccatttcatctgcaagtattccacctttacttgcagaac

SEQ ID NO: 42528 - DNA, 419 bp, Glycine max
aaattagaacggtatcttaatcttttgggggcctcttaattttatttttgattaataaaaacatcctttgcaaaattcttttaaatttttctttttttataaattcaaaaattttaccttttactattaaatactaattccccccactttcccttttaatcattacttccatccccaaggccaacacaatatgatcagaatcctttggtgttattccattctaatttttacaaaacattggctttcttttagcactttaatttttttaaagtaacatcactctatgtacaaccctaccagttaattaccttatctcatttccgttaaaatgtactagccaaccttttcacactgtatgctaacctattctatcccaacccaaattccaactaccagctttttaacttcaacaacttaaa

SEQ ID NO: 42529 - DNA, 337 bp, Glycine max
  unsure (1)..(337): unsure at all n locations
gctaaattcatntaaaaactctaaatttcacccagcgcgttttaaataaattttttcaccacacctcacataaaactccaaaaatacccgaacaaggcaagtttccccgaaaggacaacttttcacatttcccgcgaagaaaaaccacccacaaagttaccttattttgcaaacttctaaatataaacctcttctttatcaccatttttaatttcctcttcaccaactttcttataatccttcttcagggcaacaaaaactttaccggccttaaaaaacatcccctctttcataccctcaccaacataccaatgaacgaaccccccctttgcataca

SEQ ID NO: 42530 - DNA, 360 bp, Glycine max
ctttgacagtcatcgcgttctgaatccgaggtggatttgacatgctccgatggtacttttgctagagctgctgctccaagaaaaacatccaatgcgatttccgtagtaccggcaatgagagatggaggatctgactaccttggaaagggtgtatcaaaggctgttgacaatgtgaacaccattattgcccctgctttggatggcaaggacttaactgagaagactcctattcacaactcattgcttgcttacgcttttaccccagtgtattgagcacgttgaatcccgtgaagcttggagcaaatgccatattggcagtgtctcttgcagtctgcaaagctggtgctactgtcctgaaag

SEQ ID NO: 42531 - DNA, 303 bp, Glycine max
ggtattggtaaatacatatatactgagagtctattagcatctattatcatttcttgaactctaacgtgggatatgaggaggaatctgttagatttctggccaaagccatatgtgaagaggggcatgatagcaattgctgcagagggtgttaaatatgagctctatgaagatgactggaagaacaagagtactttcattctacaaatgaaccgacctcacaagaagattccggatctcattcacatcggccaactcataagagaattattaaacgctgatcaaatcatacaagaggattggaat

SEQ ID NO: 42532 - DNA, 226 bp, Glycine max
aaggatgtgcccacataagttcagcgagggggatcttgttttgaagaaagtatcgcatgttcaaaaagatcatcgagggaaatgagccccgaactatataggaccttttgtggtaaagaaggctttctcgggtggagcactgttactcatgaacacggatgatgaagagctgccttcgcctatgaattttgatgttgtcaagccatactatgcatgttactggggg

SEQ ID NO: 42533 - DNA, 112 bp, Glycine max
ccccccccttattgatatgcttaaactcagcgggtggccccgcatgacctaaggactcccattctgtcgatttccagcacccgtacccttatgtcgactagtcccagccgta

SEQ ID NO: 42534 - DNA, 375 bp, Glycine max
gcgaattctgtatttcgattctactcttgatgtgatattgacacatgccctttcgtggcaattttactgttatcgccatttttatgtttccattacttctgcctattctatgcttattttaacttcgagcaatgttggtttatattttttcaaatatttaccatttatcctcaaagtacgtttctgaggggttaattcctctaattcataagcaccattcgaatagatctgaattattttaaacggtccttcccaatttggggaccatttgcccaaggctcgatccttactatccatgggcaggataaccttccaaactaaatctccaacattaaaagtttttgacttcactttcttattataaactttagcaac

SEQ ID NO: 42535 - DNA, 367 bp, Glycine max
  unsure (1)..(367): unsure at all n locations
ggcactgcaaatcacttttctactttgagtcttcttgatccttctttttctccttgaactcaaacatggcagatgaggtggttctgctagatctctggccaagtccatttgggatgagggtcatgattgcacttgctgaaaagggtatcaaatatgagtacaaagaagaggacttgaggaacaagagtcctcttctcctccaaatgaacccggttcacaagaagattccagttctcatccacaatggcaaacccacttgcgaatccctcattgctgttcagtacattgaggaggtttggaatgacaaganatcccttgttgccttctgacccttaccatagagctcaggctagattctgggctgatt

SEQ ID NO: 42536 - DNA, 370 bp, Glycine max
  unsure (1)..(370): unsure at all n locations
aatatctcctaataaagtcacattcattgccttattgaatgcttgtagtcatggctatatggttgaggaggggaaattatatttcagattgatggttagtgattatgcaattaccccagaaatagagcattatggatgcatggtagatctacttagtcgttctggtctcttgaaagaggctgaagacatgatttcaagtatgcctatggctccagatgttgcaatctggggagcactgttgaatgcgtgtagaatctataaagatatggagcggngatatagaataagcagggatcattaaagagcatggatcctaaccatataggctgtcatgttctattgggtaatatatattctacatctgggagat

SEQ ID NO: 42537 - DNA, 566 bp, Glycine max
ccgagattggcttggtgtgcagtggaaagagggtggaaaagagtggtaagggggagggcggccccccttgctgtaaaagatcgaggaacgtagtgtcggactattataccacttaaccggcttttctttgggagaggtaaggtatagagcttgaatcccccagctgacatcttattctccattgggcatcctcatggcatctacttctttaaataaaagataaaaagcttttgccgctctttccttggctttctttcgcgtacgtgtgctcgtctatcctttaatagatagaaagaagcaatttctctgttcgaaatcaagctacaggccatctttgatggcggtagaacagctagcaagaggtgcccaggtaccgttaacaagctcatgaattttactttgaagcgaaccgcggccactaaaggaaaggcattggttcgctttcgtttgtggaaggcccatgcatgaatgaagtgaggcttcatcccattatcttgttgcctgaatttgataccaaatgagcgagcggaactacgttgcttgcgaaatacgcgagttcggaaagt

SEQ ID NO: 42538 - DNA, 446 bp, Glycine max
tccttttttttttgcaaaaattatctttaattgagtacattctttccttgtatttatccagtagatacaacatcatttagatccaccagcaataaaaagtattggaaaaccgaaagagggtagagtttggaatacatacgttcagaaagggcgattcttgcaatcaaataaagtaaaaaaaaaacagaaggaaaacttaggggaagggtacgaatgttacatgatgcaaatcaaatgaataccaattaaaggaaaacgcatgttctgttcttctttcgttttttctttggctttgatggctgcagaacaaccttgattgcagcgtcaaacacagccttcacattctgctgagtctttgagctgcattctatatacacagcagcaccaatttccttcttcagctcttctccctgagcagtagttataggtgtggccgcaggatgatc

SEQ ID NO: 42539 - DNA, 443 bp, Glycine max
gaacaagggccctttttttttttaagcccccaaagaaaaaacaactttggggagttttttacattatttttttacccacattttaaacaacataaagggaagtttgtgcccctttttgaaccctttttttttcattttaattgatggggcccagtttttttttttagaggtgaaggaacttcttttttttttccaggggttttggaagcttaaaggtcctttttttccctttttggcctccgaggaaatcgctccttttgtttccaatgatcccaaaaattttgtttccctgccttataaatttttttttccctttttttttttttaaaactgctttttggggggaaggattttttggatccttgaaaattaatttttcccatttttgggagcccgccttttttaaattttttttttttaccgcctttttttccaattttttt

SEQ ID NO: 42540 - DNA, 487 bp, Glycine max
acaacggacttaagttaaggaagccgactctcgttctttggacaccaacctatgaccgaacaaaaaagggttcgtcactctttttcacatacaccgggagaaaaggttacgatagcaagcccctcctcggccggagagcctccaggacaagggggcggcggtcaaccatccactctcgagattcatattgatcaatcgatctccgcgtcctgccagttcgctaagtagactcactctcccgaggggcaacaatggaactcttcctgccaaaaacaagggacctacttcttatcctaggagttagcaggtatgattgcctctctgtctctccgagtttctactactaattaataagtagcacttctgctattcaatcatagaatcgattccgatcaagctgaaagatgaaagaaaaaagccctatatatattagctagcgccctgcaatcaaaaaacagcgctaacgagcaagaaaaggccccttact

SEQ ID NO: 42541 - DNA, 409 bp, Glycine max
ccaggtggattttagtttctcatttctaattgagcgatgacattgaccagttaagcacaagtacccaactggccaacaactacaataaaataaaactaataatcaaaacacaaacttacaataaaccactgaattaatgacacaaaattaaaacgtaacaaagcgtataaatgatgaatagtaataattatcttctattaattcttaattaagcggcaattttgggaaagtactctcgttgaacggctttcatgaggaggctatcatgttcaagggccatttgaacagggagagatccaagtccattcgccatggcaagcattatctgcttcgtttcctctttaaattcttggagatcaacccttccattcaagtcgtggtcgaattgcacaaacagggactcgtacac

SEQ ID NO: 42542 - DNA, 603 bp, Glycine max
cggccgctttttttttttttttttttttttttttttgggctgcttgttatctatactaggttgtatataaaagaagcttaatgtatcagtgtatctttctgctgaagcatggcaaaaattatgtttttcaattcgtactcattttttttaaaaaaaaaaatcaattccacaagtgtatatatatcaacgtatctttctgctgaagcatggcaaagattatgtttttcttttcatacttaattttcaattccacaagtgtataaacttctcaaacacaaacttaaaaaatgagaaaactcaagctcacacacattcaacacaatctaacttcaggcactcctctctgtagtataacttcttctcatgtatctattcatcatcaccaattccaatccaattaatgaaaccaaagaggaactctctgaacgtgacctgtccattcttgtcccagtccatttcttgaaatcggtgtttagagatacgcgccggtgacctttcccttggattagtctcattcagtgtcctgaccatgtccttttggttaagctttccatcaccattttgatcaaaaaatacaaagacctcaactatggtattaaaaat

SEQ ID NO: 42543 - DNA, 481 bp, Glycine max
gggccttatccactataagtatttgtttttgttttcaataaaggggactttttggcattttcataaaatttggtgagagtgtctctctgggttccttgttgaaccaatctcagacttatcaaagtaatcattgtggcgtctaccctgacttatcttccttcaccggaagtggcgtcatccaaatcttcgttgcctgtatcaagtgatccgctcctggtcaggatcacatcaagcaccctctacttctcattcgggcttcaattactatgtaacttatgttgatgctcattccggatttacctggttatatctgctaaaaagcaagtcagacacaccaacagttttcagacagtttcacactatggttcaaactcagttcagtctgactggggaggtgaatacagacctttcaccaaatttcttgctgaacttgggtgtcattcacagacttatttgcccacattcccatcaccaaaatggg

SEQ ID NO: 42544 - DNA, 565 bp, Glycine max
acaaaagctgaatcatacaaattttattcaagggctgaatcaacgatgccagaactgatgaataagtgacataacatcacataacccacaccgcaccgcaaggtagcgataacatactcaagtacagtagtactttccacaagatcaaaaccaatgcatttgtagagtgcacgaagaatcataaattcttggaaatcaataccaaatcccaaagcatcattaagtgggaagtttatcattacgtgcatctatattttataaacatactgttaaatatacctcatcgagcatggtcacaagcttggacttcttcatctgaagctcttgtctctgtgctgtgctgagttcaactccttgtttggctcgatcattattctcccttccgcagctcgaaccatcgccaaccccagaagtggattcaatattccctttcatcttctccttcttagccccttccatagattcctcccctttggagattcccttgcccacattcacaacttcatcaagaagctcctgtgttgctttcaaatacttggaacccaaagcaacactatgcatacta

SEQ ID NO: 42545 - DNA, 563 bp, Glycine max
ggcccagatgtctagaaaattcagtaaaaatttcagctcataatttgcagtaaccaattcccagtaatttatacaagttcgtatgttcaagctgctaacaccagcgatttcaacctagaatgattcctgctgctgaagtaaaggtcttagtggtttaaattcttttcctccatcaatttgaatagattaaagcggtgtttgaaactgtttttctgccatagctttaaaaagctgaaaattgttagaaacatcaaatttatgattaagcagataaatctaggtgaatctggaataggcatcaacacaagttaggaaatataagaatccataagatgactctactgaagagggcccccaaacatcaaagaatactaattcaagaggtgcagtataaacagtggaagagggagaagagggtagtttgtgagatttggctatagagcaagaattacaaaaatccctgttagttttattgataaagggtatattacatttatttagtacaatttctagtgcatccttgttaggatggcctagtctttgatgccaaagtttaaaagaac

SEQ ID NO: 42546 - DNA, 240 bp, Glycine max
acacagagactttataatctaaaggcgcttttcacattattggagcagggaaaacctacattaaaaaaatgaaacaacaattcctcgcttgacaataataagtaccaccaacaaacaatacctaacaacatgcaatgttttcacatctagaatgcacacaaaaacattgaaaaacaaattgtccatctttacaacaatactattccgatggcaccacataaatgactaaactgtacttat

SEQ ID NO: 42547 - DNA, 470 bp, Glycine max
ctaatataaataaaacaccaaaaactgggtgattgcttacaccaccatacctgatttgccaaattgtagaaatggataatgttgcgcatcatccaaacagacttgtagaaggggcagaatttgtcatatctatcacagccacacaaaaaggtgccaacataagaacaaataaaaacaataatataatacatattaaagaagttaaccaattacaaggtcccttacggtgtaaaggcattttgagcaagataatcctctctcaaaagctttgcagtttctaaggtgatcttatctccttcagctaaagcatccttgcccacaagctggattaaacaaggtcaataaatgatccagttaagtttactaatagaacaaatgcatatacatcctaacaaattttgtccaaactacaaaacaacaccataatttagtagcatttagagctccacttatcattatcaaacacattg

SEQ ID NO: 42548 - DNA, 523 bp, Glycine max
  unsure (1)..(523): unsure at all n locations
atcctctagagcggccgnttttttttttttttttttttttttcgcgttttgatggtaaagatttcccaaaacatggggggtgaatcaaacccatggggggatggaaattgagatactgatgcaagttcttcccttctgtataaggtatattcatattttaaagatgttgacaataagttctttcaaaatggactatttgtccctatgatagaggtgttccagaaatgactgaaaaccagtaaatatcttcactaacgaatagatcgtgtggcatccgaaaatggaaagattagaacaaggtcttccctcccacgcctctttgtggaaaatcggccggcatcaatttgttagatacctgtgactcgaccggtgaaataatttctctcttcaaaaaagcatgtttcctttgaccatcgtaaaaagaaaagattttgctgccaattaacaagatattgaggaattgaccatacgttaaatcataattattgataccaggccttttccacataaaaaggaaattttt

SEQ ID NO: 42549 - DNA, 451 bp, Glycine max
  unsure (1)..(451): unsure at all n locations
tttnggcaggtgtgggatttaatactgtgagcagacagtgatcattgatattagccgaacttgatacagtatctaccaattaccaaacattaaaaaaaaaaaaaaagatgcgaccatgagctgtacacacccatcacaggtgcaaaactctagaacttggtgaaaggcaagacatgacgcgtttattttaaggatgtttgtttgacacaaaacaccggagtgcactaaaaccctcacagagctaatacatatgttttcacctacacattaatagtttgttattaacactaattaagggctatgtgtgcttgaagattgctattccaacacctaactttcaagttcaggggttgcaggaccactttggtccacatttgcggccatcgtttttagcgggcatacccattgaggcaccctcaaattgagacttaacaggtgccactcccatgac

SEQ ID NO: 42550 - DNA, 374 bp, Glycine max
ggccccgtttgagcagacttaaaaccaccccaaagagggttactgtctgtccaacctaccatatctctatttgttttttagagactgcttggcagaacttaaaatggaccaagaaactcttctattcacatatgtatcactgaacgatgggcaccctgtcaagctctgagaccagatctacgatgctgcgctcgatgcatgcttggatcaagaccctgacagccaggttggctgtgaaacctgcaccaagaccaacatggtgatagatctcggagagatcacaaccaatgccaacgtggactatgagaagattgtgcgtgacacatacaggaacattggttttgactctgatgatgctcgtcttgatgcttaca

SEQ ID NO: 42551 - DNA, 174 bp, Glycine max
ggcacaagtgagtttgttgatcgagattacttgaaacagggtgatgaaaatgaaggtccctggtttcttcgttgcttcaattttgggagcatggcaatgccatgcgttccatatgttccctcttcgaatgaacacttgctattgtgcccgtacttcggaagtgaaatgcgccag

SEQ ID NO: 42552 - DNA, 295 bp, Glycine max
gaccacgtccacgaccacgtccacgtgctttttgactactttctcctccattttctttcaaagaagctttggctttgaggacttgctccaatgactcatcatgtcttctattgaacctttcttcataggcttaaagagaacccatcaattggtctacggtcattgagtctaaatccttagactcttcaatagcacaaatcacataatcaaatttagcgattaaggagcgaaggatcttttccaccacacgaacatcttccatattttctccataatgcttcatttggttcacaat

SEQ ID NO: 42553 - DNA, 378 bp, Glycine max
  unsure (1)..(378): unsure at all n locations
cggttgcaaaaaaacaacagaaggggaagggccagaagttggtgggaacctttaacctagttattgggaagagaaaatgaaagtggttggtttccttggtggctgaagaagttttggaagcatggccttgccttgggccaggctaccaaaggttccctttccgaatgaaaactggctttgggaaccgtccttcgggggtaaaatgcccaagttttaggctggctgtggaagcacacaacattccgagcctttaaaaccattcctgaagaggtgcgtgaaccaacataggactacatntatggcgaacaatttagatcagactctaaaacagttaaccaacaagctttcttttatgctagtgaacgcgaagtccatcac

SEQ ID NO: 42554 - DNA, 572 bp, Glycine max
tcaccacaaataagattaaatcaagtcagccttttattaacaaggccatggaacaatttcagtgttatacatatgcacattattttctcgaattaagatcattatcacaaattaatgtcccccacaacttattcatgccagattttagaacagcaatttatatcacagctttgaaggcgactgataccagccccactgttcatcagatatgtacttggtcacttgctttacacttaaatagttctcgagtccccattctcctagttcacgaccaaaaccactacttttaacgcctccccatggagcttgaatgaagcttgttttgacacaatttatccatacaaatcccatcctgaatagcctttgatatgcgcctcgctatctttctaaatcttttgacattacatcataatcctaagccgtaatgtgtgtcatttgctagttcaataacttttttttacggtactgaatgttttaacacatttcacaagttcaaaaaacttttttcttcaaatttgatttaatgtaacaacatttaattatattggtgttttaaacaaaatccccccttt

SEQ ID NO: 42555 - DNA, 524 bp, Glycine max
aaagtgttaaataggttgtagggtgtccaacaatatttttgttctttaaaagtcaatttttttttcacttttaattgattagttgataatgtaaaattcttaattaaactcgttggtttgtgtcgtcgtgtccatatataatacacaccttgtttggttgacggggtaaatgagtatgggtccattgcttgtgtctttaagaatattgccaaatacttcttcagcaaagtcatgaatctcactccttgggatcagaaggttcagccaaggatggggaacttcccacaagccttgtgctcttagcttattctcagaaacatgcactctgtctaagaattccacgtaagaaacttctgataggaagagtgtggacggaatgtaactcagctttgacagtagctgatcaacactctgtatttgaacataagtgatggagatgagaacatttttttgcaatcaatgctttaattttggtcatgcaagtgcaattaatgagttgctttgtatggcatacctgattcatg

SEQ ID NO: 42556 - DNA, 211 bp, Glycine max
ggggaagtcaattatattgatacaaacttaaccagagttcaacaagaaaactttaaatcaaactaaaagctttccaggagataaccttccttaactaaacaggtgggttttgaaataccaattaagagaactcccttctttaaactatttacgttttggaaagacgagcaatttacggaaggaggagcagggaaatattttttgggaagag

SEQ ID NO: 42557 - DNA, 358 bp, Glycine max
gaggaaaaacagaaaggagggtttttgtcttcaaattttgaactagtgtggtgtaggatataatagctagggaaaacggacaagagtgtggatgggtgaggaggcaatggagggtgtaatttcttctaaagggatgggttttggagagaatacaagtagtagtggggtttgtccaatgatgatgatgcctttagtgacttctcatcatgttggtcatcatccattaaatcatcctattcttaataatcccaatcctaatgaacacacaaacactctcttccttcccatgccttgtactaataataatcaccacccgaaccgcaataaccacaactccaacgccactgagttagggtat

SEQ ID NO: 42558 - DNA, 351 bp, Glycine max
gatagtagatattcattccccttatctttctctcttctctctccccgcccaaaccctaactccctaccctattccgctttctctcatccatcatgaaaggaggaaagtccaagaccgaatctaagagagccgatgccaaacttgctgtgaataagaagggcgccgccaccaagactaggaaacccgccggaaaggggaaggcagcgaaagatcctaacaagccaaagaggcctccaagtgctttcttcgttttcatggaggaattcagaaggtgttcaacaaggaacatcccgacaacaaagcagtgtctgctgtgggcaaagctgctggagcaaaatggaagacgatgtc

SEQ ID NO: 42559 - DNA, 393 bp, Glycine max
acccgggcggtcctaacgagaataccacagaagggtttgtcattaaatttgagggattgttgagagcgtaagtgagggggtgacttatatgaaagggggggaccatgcccttcctgtgtttaccggggagtgtggggactgccctcattgcaagttatatgaaaacaacatgtgtgaacttctcatgatcaacacttataggggtgtcaatgatccatgatagccaaacaaggctttttattaagggacaacctatttaccattttgttggtacctctacattcaaataatacaactgtgttcattctagatgtgttttcaaaattaaaccttctgtcccacttgacaaaaatttttgttctcagatgtggaacttgcacaagttcttggggc

SEQ ID NO: 42560 - DNA, 468 bp, Glycine max
tttttacaaaaaacaaacaaaaaaaaactgcattttttttaataacatgcagattatatatgacaatatgaacagattaaacaagtaaataacacaagaaaattgttaacctatttcggtgcaacgtcacctacatctgggggctaccaagccagggaggaaatccactaaaatagtattagttcgaaaatctaacaaccactgtatacaaccttctcacctatccactacccatgcaacttttacctaaaaaccactcttaaatatgagaacccctttcactccctcttaatcactcacccgtgtttacaaacaaattaaagacacaccagagatttctctctgaacaatagagatcaactttacacactcaggtccaacacttgattttagggtaacatcaaagtggctcacaaaacactcaagttacaaaactcacaaaataactctttaatctttgacttgatc

SEQ ID NO: 42561 - DNA, 507 bp, Glycine max
attaaaaacaatattgaattataaaattgaacttgtcgaccttgaaaagaaatattcagatgtggtagtgccctattctattttgctcatgtaacaatggtcacaaggcatgagcatattactatgatagagtcagcatctcactgacccatactccattgtttcttgcatggttgtaaaggtttgccacataagcacaagttgtggatgtaagcaactggtcgaaaaatgttgaatggtctactttgtggtatttcaccacacagcctgtttgccctgaagtttgcatgcttaagaccagttatctgtgacaagctacttggtatttgccctgttaatccgtttatggatacatcaagccatagtagtttcaacaactgacctagacttgaagggatggttcccaatatgtgatttcttgaaatgtccagtctctcaagatttatcaagttcgagatagaaattgggattgaacctgatatgttgttgctccccaagtttaacacc

SEQ ID NO: 42562 - DNA, 404 bp, Glycine max
cccacgcgttcgcccacgcgttcgcccacgcgttcgacgacagaaggggttactctagacggtgaggatgttattgattgtgaacctatattgggttatttacacagaggaatggaaaaaatagcggaaaaccgaacagttatacaatatttgccttatgtaacacgttgggactatttagctactatgttcacagaagcaataactgtaaatggaccagaacagttgggaaatattcaagtacctaaaagagccagttatatccgagtaataatgttggagttaagtcgtatagcttctcacctactatggctaggaccttttatggcagatattggtgcacaaaccccctttttctatattttcagagaaagagaattaatatatgatctatttgaagctgc

SEQ ID NO: 42563 - DNA, 381 bp, Glycine max
gtctaacattatgtcaaggaatcagattgggctgcacaatgcacaaggcaagataaaatgtcaaatgaagaattgaagctgcaggatccacgatgtcggatacaatgtccaggacatcctgcccgaaaatactggacacataaatctgttatatctttaacagattaatgtgcagtcagcaacagattaggagctctatctttaggaacgaattaaaagataattaaagattgaattacaaacttgaatagtttcgttcagggattagagattgaagataaaaactaaaagataaaactttatcttttagatctttaagtgcagatttttcaggagaatgatagagcttatccagcgcaagttgttgcagcccagatacgt

SEQ ID NO: 42564 - DNA, 371 bp, Glycine max
  unsure (1)..(371): unsure at all n locations
caaggaaatgtttattgactgtgatttaaccgtgtcctatctaaatgtgcactatccagcttttctttcacaatttccgtatctaatcaaattttggccccgattattaaccatgctataaccatatattttagcccaaaaatcttaatggctattaaagtgacataaatactgctactggtgtaagaatttgaaactcaattgcaggtagcattcttctaatcngcctgcacttgattccttatccactttgttgccacccacttctctccttttatgacggggcagcttccgtgggctgatgtctgatcaatagtaccattaggtaataatgaataaaatagaagcgcatcccccttgcgtggtcttac

SEQ ID NO: 42565 - DNA, 288 bp, Glycine max
  unsure (1)..(288): unsure at all n locations
agcggncgcttttttttttattatttttcccttttataataacgccgccccggaaggatgcgagaacgttttttgcagaacctcttacaatgtattgatgggaaaaggcagccaccccaacttcaacaaacggtccaacccagttaatccaaaggttcggccaggctttggcggtgttgaagatcacagatggtccgaaactccgtgcaaggataatgccggtcccagtgacagggattgtagccaagtgaacctttaaaaccgcaaaccccatgggaaggggttctt

SEQ ID NO: 42566 - DNA, 299 bp, Glycine max
cctattttcattaaccgccgccttctgatatttgatgacgctcacatggagagatggccggcgacatgctatcgcctgatcaagaacaagccataccccaaggccatgtactgtcgagctgtaccccacccctatagcaggatctactatcttggcatgaatagcctgggtgttgatgtgtaccggtacagcctgcaccttgccactagagagaagggataaagtacccattgacgctaatgaggctgcccttgttgtctgcatcacgtaccttaccaaatttaaaggtgaggattgcc

SEQ ID NO: 42567 - DNA, 352 bp, Glycine max
cctacttacattctccaccaccttctgatatttgctgacgccgacatggagggggggccggggagatgctatcgccagatcaagaacaagccataccccaaggccatgtactgccgtgaagtacctgaccccaagatcaggatctacgatgatggcatgaatagaaagggtgttgatgagaacccctactgtgtcaccttgtaaacttgagagaaggagaatgtctccattgatgctcataaggctgcctgtattgcctgcatcaagtacatgaccaattctgaaggaaaggatgcctaccaccttccggtcagggttcacccacttcatgttcatggtatcaacaagatgc

SEQ ID NO: 42568 - DNA, 396 bp, Glycine max
ccttctttcattctccactgccgtctgatctttgctgccgctgccatggggggagggcctgcgagatgctatcgccagatcaagaacaagccttcccccaagtccatgtactgtcggggtgtccctgaccccaagaacaggatctactatgttggcatgaagagaaagggtgttgatgagatcccctactgtgtgcacctggtatcttgggagaaggacactgtctccagtgatgctcttgaggctgcctttattgcctgcaacaagtacatgaccaactctacaggaaaggatgccttccaccttccggtccgggttcagccattccatgttcttcgtatcaacaagatgctttcgtgtgctggggctgatacgctccagactggaatgaggggt

SEQ ID NO: 42569 - DNA, 373 bp, Glycine max
ggcaaacaagagcaagattagctggaagtgttcaacttcactgatgcaggaggagttgccgtatcaatttacatcactgacgagtccatacatgcctatgatgactcttctgtggccactgcttatgaaaagaaatctccattggatcttaggaccaaaaacactattttgaacaaatatgatggcaggttcaaagactattttccacgaggtgtatgaacctggctgtaaaacacagatttgactcttgctgcatatggtctgagcaccgccttatagataacatggcagaatactctcttaatagggggagagggtcttcttgcgcttgcgagatttatgatggtaatcctcagagcgatttcttaactca

SEQ ID NO: 42570 - DNA, 302 bp, Glycine max
gcggccgatatttttttttttttttttttttttacaatgtacttttcattactagcataccaatccatgccgtcatttatgaacccctccaactaaatccaataatttttttattttattattaatcaaaaatttcgtatatagctagaacggccctcacaaattgcaaatactaatttgttaaaaattaatcgaattgaggctatagcatcatcattagctggaattgaaatattggcgaagtccgggtcacaatttttatcgattaaacaaattgttggaatttccaaagttatacattc

SEQ ID NO: 42571 - DNA, 354 bp, Glycine max
tgttggagccagagaaagcggatgagttcaaaaagggtgtcgagggtgcaaccaagtttctccttagcaagctgaaggaccttcaattttttgttggtgagagcatgaaggatgatgcgtccgtggtattcgcctattacaaggatggtgccactaatccgacattcctctatttctctcatggtcttaaggagatcaagtgctaggcttgcggcgagattagttacccatgttgggtactatctatgtactattgttatatccacaactatagttgtcctggttgaattgaactcaaaaaggtttgtttgagaaaaaactgtccaagaatggattgcttgttaaagctctatt

SEQ ID NO: 42572 - DNA, 317 bp, Glycine max
catcgtggaccaattaatatatggttacagcagacgcaatcggatcaaccaacatgcatgtagacacacgtacatgagcacaaagactgacgccaaacatgcagagagagatagcaaactgaagaactctgtttctctctctctcacacacacaccacacaatacctatgtatggcagccagctcggcctcgcttattattgttcaaccaccaccacaagctagatagataataatcatatccatggtcgtcgatcgatgtgatcagcagttgcaggggtcgcacttgcagccgctaccgcagctgcagccgtgggc

SEQ ID NO: 42573 - DNA, 410 bp, Glycine max
atggaatgctgcacaagctcaattaaacggcacagttcattgtaactatcctcaatggatagagatcctttgccatgacataaatgtgcatgtcccacaccatatttctccaagaattccaagctataaccttcgtgctgcttatgattccatcaaacagaactggggcaagtatgtcaatgaagccaactggaattggcgattgatgaagacgatactgacgagatgccatgtgtacgacaaggagagatactatgttccgttcgatgagctcgcgcctcaggaatcccaaccaatcaaattccttaggaagttcatgccagattacgcatgatgccatcatcacagctgttgactagttgagattattcagtgttgtcggcacaggtggacagtcacattttcagtga

SEQ ID NO: 42574 - DNA, 412 bp, Glycine max
  unsure (1)..(412): unsure at all n locations
ggcgagttctgggtggcaatccactgccgccgaggtctgtacgcccggcttatgagccgccatgtcaagctgaggaagtttttgctcagcctcccgatccccgccaagtaccactacctgatgcagatcggtggcaggctccacgcgctcatcatcaagtacagcccagagggccaggtgcttgacatcttggaggacaccaagggcgaggtggtgagagccgtcagcgaagtggaggagaaggacgggaagctctggatagggtccgtcctgatgccgttcatcgctgtctttgacctcgcgaaggcgtcttagccgcctcaagtttgattggaaacattgttgctttaagacatgaagtccatggntaccgctgcacgcttctctgagaggatcagtgatcccaataatg

SEQ ID NO: 42575 - DNA, 373 bp, Glycine max
ggaacaaaacttaattaagaaatccttctccggagccatggcagatctcaagtccacattcttgaacgtctattctgttctcaaatctgaactcctccacgaccctgcttttgagttctccgatgatgctcgtaattgggtcgaccggatgctggactacaatgtgccgggaggtgtggcttgagaatttatttttagtttgtgctgagtaatttattagtttattgttagttttttacataacttgttaggaaagaaaggaggaggtgttctgttctgaagcaattttcataaataaagacataaagggtattgatcgaaagatggattataactgcaggaaagttgaaccggggactgtcagtaattgata

SEQ ID NO: 42576 - DNA, 377 bp, Glycine max
gaagctacgaagcatggcgtccgtcaccgcccgcgccccggtcgcggcccttcgcccgtcgtcggcatcgctcaagtcgtcgtcggccttccttggccactctagccgcctcggccgcaccgcgtcgcccacgaggcgcagcctcaaggcggaggccaagggcgagtggctccccggccttccctccccctcctacctcgacggcagcctggcgggtgacaatggcttcgacccgttgggcctggcggaggaccccgagaacctgcggtggttcgtgcaggcggagctggtgaacggccggtgggccatgcttggcgtggccgggatgctcatcccggaggtgctgaccaaagccgggctgatcaacgcgccgcagt

SEQ ID NO: 42577 - DNA, 398 bp, Glycine max
cggacgcgtgggcggacgcgtgggcaaagcttttgagttggagttgagctggatctgtgatgaatggaaccgccagcatcagaaggttccaaatgaactgttggagcaggccaaagctgctgctcaggcagctcttgaggagatggatgctgactaagaaacaggacgatttgcccagacttggtgtttttggtgctgttgaaatctccgatccctttggggtgtgacccactggacatggccaatttgtcacaatttattattttgacccatgtcatgtgaaactcctttcgttgaaatctggtatctagattgacttgtaccagaactgtggtttacgcaaactggattctggagtactggactgggtgtgtttttttcggaactgggcatcttac

SEQ ID NO: 42578 - DNA, 379 bp, Glycine max
gacgccaattctaatcagcaggatcattccaatatgggcaacagaattgttatgggaaattcccttctctttatctctttcttcatcttcagctttagtttcttggaggctcaaaaggctccagcagtttatgtgtttggagactcacttgttgatgttggcaacaacaattacttgagtctctccattgaaaaggcaattcttcctcactatggcattgattttccaactaagaaacccactgggagatttagcaatggcaagaatgctgcagatttaattggtaagttgattcaaaattgactatattattgtttttcaaaactttcatacaataaattgttcactttactgtaggtaagtacctttaaatatgata

SEQ ID NO: 42579 - DNA, 351 bp, Glycine max
agggagcttcttaatattcggacattttatttcgggtcatcaaagaaggatagtgaagagaacaatcatatataatattaaatataaaaaatggcccgatcatttatcaaaagacaatcttcggtagaagagaaggctgctttggaacacttatttgtatgtaagaatacacgctctatttatttcattgcaaaaaaaatatagaatttcgatcttgaaaagaaagaaacgtgcggggataattttaaatgtcgcaaagatattggtacataatcttggaagagatgatggaagcaagagtgcattttgggctcggtactcgaaactggaatcctaaaatgtgaccttata

SEQ ID NO: 42580 - DNA, 406 bp, Glycine max
accaacatcaactccgccttcgcggcgtcgctcagggccaactgccccagggcaggcagcaccgcccttgctccgctggacaccacgacgcccaacgcgttcgacaacgcctactacaccaacctgctgtcccagaaggggctcctgcactcggaccaggagctcttcaacagcggcagcaccgacagcacggtcaggagcttctggtccagcacgtcggccttcaacagcgccttcgccacggccatggtcaagatgggcaacctcagccctcagaccggaacccaggggcaaatcaggcgcagctgctggaagctcaactcgtaaactactacgcccaatgcaatgcgttatggcaggcataacatagccaatcaataattaggcctcagctcgctctctagct

SEQ ID NO: 42581 - DNA, 389 bp, Glycine max
cggtgaaatcattccatttttatcctctggccaacgccgcaagctatgaagagaatccccttcccatgagtggtattccatcaccaagtgccctagacaggggtaatcgtttttgcatttttggttgcatttactcctcgtcctcctcgtcgtcaccaccctcaccgccagcagcagcagcggccttctttctgcggacacggccgggacggccaccgccgaagggcgaggtcagagcgaagtcgatgtgcttctgggagtcgagacggacgatgaaagagggaacgttgacgatctgctttccgactcggatgtgacgctggcggatcagaacacgggcgtggtggatagacttggcaagaccgagcttccagacacaggtctggaga

SEQ ID NO: 42582 - DNA, 248 bp, Glycine max
  unsure (1)..(248): unsure at all n locations
cggctcctcctttctcgaccccaagggccgcggcggctccaccggctacgacaacgccgtctcgctctcttgttggggcagaggtgacgaggaggagctccagaaagagaacatcaagaacgccgactgctccaccggcaacattacgttgagcgttaccaagagcgacctgtataccggcgaggttatctgcntgttttatagcttgtaacttttctacaccnaccttggtgccaatgctctccagg

SEQ ID NO: 42583 - DNA, 313 bp, Glycine max
agtaactaggttcaacgaatatttttaaatacaaaaagaaatacgaatataaatttcatatataatctaatatagtataatattcattttggatatttacattatatctatatatctatctatatatagatagatatatagatagatatatagatatatttctaatagattctaagggacttttttaaaattcttttatttaatgtttagtaaacaaatattgtattttaattaattctttgaatctcgacaatcgactaaaaatttgttattatgatttcgagtaagccgctatggtgaaattggtagacac

SEQ ID NO: 42584 - DNA, 414 bp, Glycine max
cccattcaagcagtggtacctcactcactatggagttgacattggtaggaagaagaaaacccctgctgcaaagaaggataatgctgagggacaagaggttgaggcagcagctgaggaaacgaaaaagagcaaccatgtcacgaggaagcttgagaagcgcaaggagggacgtacccttgacgcacacattgaggagcaatttggcagtggacggttgctggcatgcatttcttcccgccctggacagtgtggccgagctgatgggtacatccttgagggtaaagagcttgagttctacatgaagaagctacagaggaagaagggcaagagcgctgtagcttagagcattctcatggattgtcttgcaccgaaatgtgtgtcctgatgagtacactttttttggttagtcgtctc

SEQ ID NO: 42585 - DNA, 378 bp, Glycine max
cggacgcgtgggcgcccccgccgccatgcttcggcgtctcgccggcgtcgcccagcggaccttgtcgtgctcctcttccccgcacgccccgccgctggctgcgtcgggctacaccccgcgccgcgagtacggcctggtgcccatggtgatcgagcatacctcccgcggggagcgcgcctacgacatcttctcgcgcttgctcaaggagcgcatcgtatgcatccatggccccatcactgacgatacggcgtccctcgtcgtcgcccagctgctcttcctcgaatccgagaaccccgccaagcccgtccacctctacatcaactccccggggggcgtcgtcactgcgggcctcgccatctacgataccatgcagtacat

SEQ ID NO: 42586 - DNA, 408 bp, Glycine max
atcgagaagctattgcccgcttgactctgctgaaactcataaaggttgtctatgagcaccatcctcgaccaaaacagctcatagtagagaatgacctccctcagaagctacagaacctcattgaagagcgcagggatggacaacggggcggccaacaagtgttggtcaaacaaatggccacctcattgctgaaagcgctgcacatcaatacagtattgtgatattggtggatcatatgttttcctctcaagttgtatatgcttgccctagaggagaaggtgccttttccttttgctctgctgtggtggtttctcatgagcaccagactcatctgttgtacctgatccctcttttttcgggagaaaggttttttaggtgcaggatgaaatggacgttctgtccttcagt

SEQ ID NO: 42587 - DNA, 415 bp, Glycine max
ctccgcttccgccgatcggcttgccccgtctatttctccaacccctcaacccgatcggctccattgatcgtacctcgtcgtccggtgatcctctcgaccgattttcccccaaaaatagctgccggagctcgcgagaattcggcgggttttactacagtttagtttgtctctgatgctatccttggatcgatctcatctttgtcgttgacttgcgcaggttgtcgatggccaggacgtctttcaaaatggagcacgacctcgagaaaaggcagtccgaatctgccaggatcagggataagtatcccgacagaattcctgtgattgttgagaaagctggcaaaactgatgtccccgagattgataagaagaagtaccttgtccctgctgatctcactgtcggccagtttgtctatgt

SEQ ID NO: 42588 - DNA, 358 bp, Glycine max
gtcatccacactaacgaacgaactcttgctccgatcacgagctagctgaggtcgacgatggcggctgtgctgaacagcaggaagacgccgcaggcggtggtggccgtgctggtggcggcggcgctgctggcttcgtccgcttcggcggcgatcacctgcgggcaggtggggtcgtcgctggcgccgtgcatcccgtacgcgacggggagggccagcgcgctccccgcgtcgtgctgcagcggcgtcaagagcctcaacagcgcggcgcggaccagcgcggaccgccaggcggcgtgccgctgcctcaagagcctcgccaacagcgtcaagagcgtcaacatgggcaccgtcgccacca

SEQ ID NO: 42589 - DNA, 376 bp, Glycine max
tttttccacaaccttgaatgtttaccgccccgccggataaggagaaggagaaggaggatctgcgtcgcaggcactgttcatcgccatgtctcgggttgataacagaaattcctcagccaccaagcgtgctaggactgatggtagtcgtagggaagatgattggacatgccccagctgtggcaatgtcaatttctctttcaggacaacttgtaacatgcgtaattgcactcaaccaaggccggctgatcataattcggtatgatattatatgtaatgtcattttttttttaaaatgtgattttcatttcgttaatgatttatggttaacatttagttgaagaattcttttatcaatttctctctttttgcatgtgtt

SEQ ID NO: 42590 - DNA, 386 bp, Glycine max
gttccccactcagacttagatgttgagtcgtgcactttcaaccccaacaactcaaagcctcaaggcaacaagaacaaatgcaatgctttatccaactcatagattattgtctcttaaggagttgtttccccaaggtgtggcctgccactgacagaagagaatgtggagaaggttttggatgaggtaaggcctggcttgatggctgatggagggaatgtggcattacatgagatagatggtcttgttgttgtcctcaagctgcaaggggcatgtggatcatgtcctagctcagctatgacattgaaaatgggaattgaaactcgcctccgggataagattccagaaatcttgggagtggagcagataatggacaccgagactggtct

SEQ ID NO: 42591 - DNA, 261 bp, Glycine max
  unsure (1)..(261): unsure at all n locations
tacaaggaagctgtgagaatacctggatttcttattttaagcattgaggctcccatcaattttgccaacatcacatatctcaacgagagaacgttaagatggattgaagaagagtgaactcaaagcgacagctgctgaaaaagtggagcagataacagcttctctagggacatcatcatctgatggcatcccatcatcagaagcctcagacaggatcaaagctggtttcattcacttcangaaggagaaatacgacaagaa

SEQ ID NO: 42592 - DNA, 297 bp, Glycine max
  unsure (1)..(297): unsure at all n locations
gtgagatatggagctgtgtatttagcaaatataaaaaaaggaatgtataaatgttaaaatttcggccacccctaaaaatagagtcttcggatagttaaatcttatttaactatacttttcatttacaaattcacttttggtgaccgttaatgttttcatttggcagaattcatggtcttgactcatggctcgtggctattgacacgacagtgaagttctaacattttttgatggaatgggatcactgagagagcagcacgacagtctcttagtgcanctaaaacatcccccttgtgt

SEQ ID NO: 42593 - DNA, 344 bp, Glycine max
attcggtccaagtgcccaccttggaccggttctttccctaaccttcacctcataaggggatctgtggtcgggttcaaaaggaggaggtataaaaatatggccttgggaggctgttgaaaaatctattcatcttactaaggaggaaaggcacagtgctgtcatattcgtggagaggtcctatgttgacttaaggagccagctatctacaaatggcttcagtaacatgctaacttcagatgtaaagtacttagtatctgataatttgagagcataggtgtggagtgctggctatttttcatttgctttgtgggatgcccgtaaaagagaactactgaaaattttca

SEQ ID NO: 42594 - DNA, 304 bp, Glycine max
gcacgtctactctagatgatcccctcggggaattgcaattccacattttcatgatataacgaggcaaaaatgttcatatatgaattggaattatttgttttcttattaggcctatcctgaagccaaaggaaatgagatcggaattcctcggggaattccagttccacattttcaagaaataacgacgcaataatgttcatacatgaattggaattatttgttttcttattaggccgatcctgaagccacaggaaatgagatcggaattcatcggggaattccaattccacattttcaagaaata

SEQ ID NO: 42595 - DNA, 262 bp, Glycine max
gttaactgcaccaagttgaactggatctccctctccaacaacaggctcagcggcgagattccgccgtggattgggaagctttctaatctcgccatactcaagctcagcaataactctttctccggccggattccgccggagctcggcgactgtacgagtttaatatggttggatctgaatacaaatatgctcaccgggcccattccgccggagctgttcaagcagtcggggaagatcgccgtgaatttcatcagtgggaaga

SEQ ID NO: 42596 - DNA, 405 bp, Glycine max
gcgggaggcacttatcaaatttcctccaacatataaatttgagaggcacaaaccaggtttaggagggtatgattctggagagaaaaagcgaattccggcctggtgtgacagaataatataccgcgatactcggtcagctccagtttctgagtgcaatttagactgccctgttgtgtcatcaattttacagtatgatgcttgcatggatgtgactgatagtgatcacaaacctgtccggtgtaaattcaatgtaaaaatttctcatgttgatagatcaataaggagaaaagagttttggggtattatgacatcaaatgaaaaaatcagatccagtcttgaagaattaagttaagttccagaagccacagtcagcccaaacagtttaatccttcaaaatctggacac

SEQ ID NO: 42597 - DNA, 152 bp, Glycine max
ccgattgctagaatggaatttcgatgctcagtcatctcttttaccagtctcatctcacttgcgcttgtcagagagacccatgtcgatgcatcgctatctgaggaagatttctgggaagctgtttggccaaacactcccattcccactgcagt

SEQ ID NO: 42598 - DNA, 339 bp, Glycine max
acatgaccttaataaacacgtatttacaacttctcaatgctggaaaaatgcgagcagccggaagaggatgaggagtttaagggtgttttgctagaattaatgtttgatgactgactaagcatgtcctggaaattgaggacgattaatccaaagtttgctcaaagcccgcaggcgttgaaaatattcccccaaagcgggcagaaatcgaccagtctgacgtatggtaagtattcgatacatttgccgcaacgtttcttgtcgtagatgatcagcctggttcagaaagctcacaagagcttctagcctctccattgcagtagcaatttggggaaagtgggt

SEQ ID NO: 42599 - DNA, 338 bp, Glycine max
atatataattgcagaccttggcattaattggagagaaaatgtaatgtattagtaaaagagaaattaaagaggaatgaaatgtaataatatataataagaataatgatgaatgttaattgtggatgggtttgtgggaagttccaatgagtccctctctcctcatcttgtcttccttggatttcctacagaagacaacccaagagttgacctccaaagcaatgcaaagcccaatgagagtggagagccctaagcagtaagtcaacttggcgtaagatctgcttgcccccataacctcaaatccctgaaagacattcacaaagccaaggaccacacacgag

SEQ ID NO: 42600 - DNA, 405 bp, Glycine max
  unsure (1)..(405): unsure at all n locations
cattctcatatcctcaatcaccccccctcgcactcgctcttcccttcctctggtggcgacaatgtcgactcctgctaggaagaggctgatgagagacttcaagaggctgcaacaagacccgcctgcagggatcagtggtgccccccaggataacaacataatgctgtggaatgctgtcatatttgggtgagttgaattgaaattgaatatagatcccatgttgttttaacttatagtcaattagtctattcatttttttttatttcttatgttgtttaattattgatggataagtgatttttggattgcagtcctgatgatactccatgggatggangcacgttcaagttgacactccaatttactgaggactatccanataaaccaccgactgtacgatttgtg

SEQ ID NO: 42601 - DNA, 177 bp, Glycine max
agttctccgctcgagggactctcgtgctgctatggttttagcgcatcttcctccacatttaaggaagatgggtcatgaaaacgttcacatcactattgtggtcatttggcatgtctaccctgggaaatccactaccactggtcacctgatttacaagcttggaggcattgacaagcg

SEQ ID NO: 42602 - DNA, 231 bp, Glycine max
gaaaatttaaacactcatgggttctgaaacttttctcgaagtgatattggcaatcctgctacctcctgttggtgttttcctccgttatggctgtggcgtggagctctggatagatctggtgctgaccatactgggatacatacctgggattatatatgcaatttatgtattgattggatgactctcatgtaccataatgtgtatatttctgtgttatttataatatgtgca

SEQ ID NO: 42603 - DNA, 214 bp, Glycine max
ctttcaatgtggagatattttgtcggagatctcgtctttgaagtatctaagatgacttctccctacattaaatgtacagtctcgatcatcatagcattttgaaatttggctgatgacaccatcaattgtgaggcttttccccacaagctggtgcagtttggtgagattcaggtaaaagttgtattgaaattttcacaagaggaatttcttacag

SEQ ID NO: 42604 - DNA, 222 bp, Glycine max
gtgtaatcgtgtatgggttcgctgatctatgtttaatcaatcttgttaagtttgggttctgatttggacttaatttgttttatataacttttcaaaaactatgagctacttctttatatattaagaacagaaaaaatgtgggtacaatgcttccttactgagaaaactgctatgactatgaagacgtgtgggaagtgctgctctgaagatggttgaagaagt

SEQ ID NO: 42605 - DNA, 285 bp, Glycine max
cttgaacgatgtcgtttcaaagagctttgttgggaggtacttcaagttggaagcaaggaagagttgcttcaccagggagcttcgtgccgccatggccacttttctgaccatggtatacatcatcaccgtaaacgccaccatcatcgcggtctccggtggaacctgctccgtcgaagattgctcgtctccgacgaggccggactgtaaggtgaagcccgacgttgggtacgagagttgtcttgcaaagacgaagagtgacctggttgtggccaccgctgtttctgg

SEQ ID NO: 42606 - DNA, 162 bp, Glycine max
ccacaaaaggattaaagagaaaacggtcaagttagaatcttttgaacctttcgatcgcgtgggaaggaagagaggaagatgggtgcgtacagagcggacgatgattacgactacttgttcaaggtggtgttgatcggagactcgggcgttgggaaatcgaac

SEQ ID NO: 42607 - DNA, 272 bp, Glycine max
  unsure (1)..(272): unsure at all n locations
gctgaacaggaactggtattgccagagattggttatcagctacttcatagttatagtgaacagattaaagattggggctggatctgcaacattcatgctcaaaattctgaatcctttagaaggagtttggatatcctcaacagaccacaaatggccgtcacacttattgcggtacgtgtattttaggggtcaaattaaatgatgtngatcttttagaatttcttcagcagcttgctgacactgatggatcatcaacaatgccaccctctgtc

SEQ ID NO: 42608 - DNA, 254 bp, Glycine max
agaccgagctagctagctagcaagcaagcacagagatggaggcaaagcgaggccatgccctcatgtgcttggcacgtgtttcactcttcctctgcgctctaaccctatccgctgctcacggaagcaccacggttcaagacatcgcgagaaagttgaaactcggggacaacgagcttctgcgcacggagaagaagttcaaggttttcatggagaattacgggaggagctactccacagaggaggagtatttgcgc

SEQ ID NO: 42609 - DNA, 287 bp, Glycine max
acccgaaagggaacaagcattagaggctgaggtggagatactcaaagagaagctgaaggaagctaatttggaaaaagcctgaataacatcagagtacgaaaagctttctgctatctgccgatcacaaaggcaagaattgcaggatctcaagcaagcactcgcagctaggactccttcaccaagtagagagggtttgaaaatctctcccgcagttacatcgtctgcatctgcatctgcatcttcggataagtcatggcaagcttttccagaggaaccgcaacaacaaa

SEQ ID NO: 42610 - DNA, 281 bp, Glycine max
aaggcataggagccggctacggtgttgttgcatacgtaactccagaagatgtgctgcttggaacacttactgtgaaggagaccatatcctactcagcccatctacgtcttccaacatcaatgagcaaagaagaagttaacagcatcattgatggaacaatcatagaaatgggtcttcaagactgtgctgataggttaattggtaactggcacttgagagggataagtggaggggagaagaagagacttagcattgcacttgagattcttacaaggcctcgc

SEQ ID NO: 42611 - DNA, 284 bp, Glycine max
gttttgatggcaccaaaatgcacacaacattttcagtgaaactgaaaggggaaagaaagagagtgaaatgggggagctttacgcgatggagtcatctgcgatagctgcggagaaagctctctctcaggtctcaaggctgccaaagtgagatggcctggtttgtttgatggggtggattcagccacagaagattggattattgatcagatgcacacagtgcgaccagtagtagaaactggatatgaaaacgtttttacttgtgagattgttgcttgagagcagaa

SEQ ID NO: 42612 - DNA, 283 bp, Glycine max
aagaatttccattgcatgcaaagcaaatacgcattatattactagttttaatttgttttgtcgtttgcttccttctttgattaatgatgactagctttaaggttgcatgtgtggttgcgatgatgtgcatggttgttgccatgagtgttacacccatggcacaggccgcaatcacgtgcgggcaggtcgccggcgacgtgtctccgtgcctcagttatcttcgaagcggcggaaaaccgtcggacgcctgctgcaacggagtgaagtcgctcagctgcgcggc

SEQ ID NO: 42613 - DNA, 354 bp, Glycine max
tcgaggcacaatacaataaattggcagatccaactgatgaggaaaatgacatgttggatctagcttttgggcttactgacacatcacgtctgggttgccaagtgattgcaaaacctgaacttgatggaattcgtttagctattcctgctgccactcggaacttcgctgttgatggttatgtgccgaaaccacattgagtcatttttttgggttcaatcaaagagtgccgctttcagttttgtatccttaccgacttagataaattagcatttattgatatcataggcattatttttgtattgtccgtgttcacggagcacctctatatatatatatatctatgtgtatagagat

SEQ ID NO: 42614 - DNA, 345 bp, Glycine max
cttcacgcttcgcgtgagcaacttcacaggagaactatggaatgacgtagatgcattcggtttggagtttatagaaggaaacaaaccagttgtttattcatcaaggcatggccatgcaagtttccctcatcctgggagctaccttcagggatcatccacacttggaataggagcaaagaatgaagcagctaaaagtatactgacagtggatccagcaccagatacaaggttgttgcggccgagtatcttggtgagggagcaattgctgaaccatgttggttgcagtacatgagagagtggggcctacagttgtgtatgatcacgttgaatagtaagtgatagact

SEQ ID NO: 42615 - DNA, 348 bp, Glycine max
ggattgtctaacaatgatgataaaggtatctttcttgggtatcctattgttggatttagcaaccggatgcaggcatcagggacatgtttggatagtctaaatgatggattgatcacagcatgtccatgggactccagaatcaaaggggaattctttcaccaaacagcatttagcattccattgtctgctgtaaagaacttcatcgagatgtgcgaaagcttgttgagctggagccagagtcactgtgtggcttagagacagcacatgggattctcatgcgctatgttacggcttctagtgcttaccgtggaaaatcagaggatgctgtggatcttgacatcacatact

SEQ ID NO: 42616 - DNA, 309 bp, Glycine max
aatgcagggtaccttgactctaacatgataattatacttaatgacaacaagcaagtttctttgcctactgctactattgatggtcctgcaactccaattggagcccgcaatagtgccttaagcaaaattcaagcaagcaccaaataccgcaaactgagagaagctgcgaaaggcatcacaaagcagataggaggaacaacacacaacttgcagcaaaggtagatgagtatgcaagaggtatgatcagtggttctagtactacacttgttgaggagctcggcttatactacatatgccctgtggatggtc

SEQ ID NO: 42617 - DNA, 208 bp, Glycine max
agtgaatcgaatgcatgtttggactcgatggcctgctgaatgacactaaaggctcaggatggaaattggtgtatgtagattatgagagtgatgttctacttgttggtgatgatccttgggaggaatttgtaggctgtgtccgctgcataagaattttatcaccttcagaagttcagcagatgagtgaagaggggatgaagcttctaaa

SEQ ID NO: 42618 - DNA, 210 bp, Glycine max
gtctcagctggaaccagcatgggaagatatgaatttatggtatcaagttcagaggcagaccagagtattgacaataatgaagcaaaaaggtctatcaagcaaatatctgcctcaattgagtgcctctggtaggatcatacacccaggccattgtcgccggcccagctctggtggaaattgtgaccacccttggtgtgggacccctattct

SEQ ID NO: 42619 - DNA, 206 bp, Glycine max
cggctcgagcggctcgagcttcgtgtcaatttctctctctcagcgctttctgcaatcgaaccttacatctccaacaggatccacaggccgaatgagaaatggggctgacatgcacaaagcttgtcagtcggcttttcgcgaagaaggaaatgcgaattctgatggttggtcttgatactgctggtaagagcactatcctgtacaag

SEQ ID NO: 42620 - DNA, 269 bp, Glycine max
tagaagacgacagaaggggaaatcgagaagaagaagaagaagaagatggagaagtatcagatctggagcaggagaatagcgttggcagcgtttgcgtttgctctgctgttccaatcggcctcagcagacgacgtcgttgtgctctctgaagataacttcgagaaggaagttggtcaggacagaggacgctctcgttgagttctatgctccttggtgtggacactgcaaaaagcttgctccagaatatgaaaagcttggtagcagcttca

SEQ ID NO: 42621 - DNA, 235 bp, Glycine max
caacaggggcaacccccttctctttggtgtatggtatggaagcagtactccctgtggaggttgagattccatcaatgagagttctaatggaggcccagttatcagaagctgaatggtgccaaagcagatatgatcagttgaatctaattgaagaaaaacgcatgaaggccttgtgccacggacaactttatcaacagaggatgaagcaggctttcgacaagaaggttcgtcctcg

SEQ ID NO: 42622 - DNA, 233 bp, Glycine max
gttctcactaactattacttgcacatgacgtacgagtgtgctagagggggaagtgtagccaaagatgaggtttcatgggatgcagggaggggatttgcggttgaaggagtagaggtggcagcaccacaagctggtgaatagcgtttgaagatcgtctaaacctctctttgccagactgattaggagtggtgggaagggattggtgatgctggatgggttgctggtatatttgg

SEQ ID NO: 42623 - DNA, 159 bp, Glycine max
  unsure (1)..(159): unsure at all n locations
taaacctcctggaacacatgaagttgttatgatcagagccataggaatcgaagacaacacaantctctcnagcatagatccttctgtgattctcacatacaatgcacaggataaaaagagcactgtgcaagaagatgctggatgtaagccacaatggaa

SEQ ID NO: 42624 - DNA, 267 bp, Glycine max
ctggttcatgtgtatagacatttgcttatgcatcatggaaattactttacatttgcacaaatatgtgtcaaggaccctttcttgttacttgaatgctttagttttgaattgcaggccatagattactgccattctcaaggcataatgcatagagatgtcaagcctcataatgacatgatagatcatgaattacggaaactccgcttgatagattggggtcttgctgaattttatcatcctggaaaggaatacaatgttcgtgtggct

SEQ ID NO: 42625 - DNA, 152 bp, Glycine max
tgaagttgcttgttttctttgtagctgcagtagttttggtttcatggctatgccatggcgtaggctaccaaagggtctctctccgaatccaaactggctatggtgagcgttcttcggacagtaatatgcgcaagttttaagcttgctgtgga

SEQ ID NO: 42626 - DNA, 270 bp, Glycine max
  unsure (1)..(270): unsure at all n locations
cgttgctgacgttctcatagcaggcatggatattaaccgtgggacgtgtataggtcgaaatgcagaatctcccaangttgatccgggagatgacccgattatccacctttcaaatgcatgcctcggggatgtcactaaggataaagaaggtctaccagtagccctgtacgtcaagtttggtaaccaatagcttgtacttggaacgctttcctctgaagcttttccctcgactatctgctgattggtatttgagaaggcaattgagctatc

SEQ ID NO: 42627 - DNA, 253 bp, Glycine max
aagaaagtagatatggaggtcataatgattctgctttgcaccacactagcatgtgtttttgtgggtttgcaactctaccatgtgaaaagaaatcctgacatgcttcccttaatctcctttgtcatgtcattgattttgactttgggaaatatggtacctcttgttctgaattttgaatccctttttgcacaaaatcatgacaagaaaagaattttgcttggaagtgaatggcttgaagtgattgaattgctgt

SEQ ID NO: 42628 - DNA, 264 bp, Glycine max
ggtgttgttactgctgctcttttctcttttcttttctctttagttctctcttcccctttctttttctttttcttgttcttctgagcttgtttaagcttttcttccattaaaattataatataatgtgtggtattcttgctgttcttggttgttctgatgactctcgagccaaaagggtctgcgtgcttgagctctctcgcagattgaagtaccgtaggccctgactggagtgggctttatcaacatggtagattctttttggca

SEQ ID NO: 42629 - DNA, 243 bp, Glycine max
caaacttgcagaaagagctgaatcgatacattcccactgccgcagcatttggaggcatctgtattggtgccctgacagtgatggcgtcatttggtgatccagagattatggctgctcttcaagatgttatgaagaaccctgctaattttgccaagcaccaatcaaatccaaaggtagctcctgtaattgcgaaaatgtagactaaacttggaggtggtccacagtgatacttttagaggcttg

SEQ ID NO: 42630 - DNA, 258 bp, Glycine max
tctgctcgagctcgagcgcaagaaggaagtgttgtgggaggaaagaggcagagctgcaatcaccagagtggaagcgcgaaacggtcctccccggctttccattttttctcttctgatgaactttagcctcatgctcaactccgttggattctaccaaatatcaaaactgagcatgattcctgtggtttgtgtgatggaatggatacttcacaacaaacactactcaagggaagtgaaaatgtcagtggtggttgtggt

SEQ ID NO: 42631 - DNA, 266 bp, Glycine max
gatggaggatgcattgggaaagcgaagaattgaaaatcatgtgaagaatgcagcgttcttcatcagtgccggtacgaatgacttcgttcttaattattttgctctaccagtacgaagaaagagcctcagtatcctggcgtaccaacagttcttaatccaacacgtgaaacaatttatacaggatttgttggtagaaggtgctcgaaaaattgcaataactggagtacctccaatgggatgcctaccgttgatgatcaccttgaatt

SEQ ID NO: 42632 - DNA, 271 bp, Glycine max
cagaaattcaagcactagagaaggatggagacaagatggctattgccaaggcatcaatgcaaagtgtccaccttcagatatctgaaggtgctgcacaactcactgcgtatagagggagctctcatcaggcatttgctctgattattgatggaaaatcacttgtttatgcattagaagataatatgaagaacttgtttctggaccttgcgattcgttgtgcatctgttatttgctgtcgctcatcaccaaagcagaaggcactggtcgctag

SEQ ID NO: 42633 - DNA, 291 bp, Glycine max
gaatcggctcgagcaccttgaagaatgaacggcacaggacaccgcactcgaaaacaaaatatcccgccctccattattaccatcctaacctccgaatatccctccctctctattttcttccataaatcactccactctcctcaacgcatcatcgtatttcatttcatttccctccccccactcccaccgccaacgccaaacaaaccctaaatctctctcgtcttcttcttcttcttcctccttcaaccatgagagagatcctgcacgttcagggaggccaatgcggtaacc

SEQ ID NO: 42634 - DNA, 245 bp, Glycine max
caaatgttcaggtgcctatctcgaagttgcggtgatggcgctgtggcggctgtggacgtcacaatcgagcctccttcttcagaagcaggtcaaagatctttgcaaaaaccccgtcgatggcttttctgccggtttggtcgacgaaaccaacatttttgaatggagtgtaactataattggacctcccgatactctttatgaggggggatttttcaatgccattatgagctttccacacaacatac

SEQ ID NO: 42635 - DNA, 253 bp, Glycine max
gtgaatttcatcaccttggtactatttcatttatcaccgttttgcagctttgaatgggggatctaacagtgaatttggtggttttgatttttcctgtttcagctatggttggtacttcacatttgttcaaggggttgtgtacctgttctgattaactccaaggcttcacaagcaagccaatggtgaatccatggaaacttatgtgaaactctctgctgtgcttatgggttctcatggcctaacaaaggggtca

SEQ ID NO: 42636 - DNA, 254 bp, Glycine max
  unsure (1)..(254): unsure at all n locations
gctccctgagagagctcgtcgcggcggtagcagaagaagattgcaagatgaagttcaacatcgcgactcccaccactggatgccagaagaacctcgagatccacgacgtcctgaaactgcgagcatnttgggacaagaggatctcacaggaggtcatctgagatgaaccccgtgacgaatttaagggctatgtcttcaaaattaacggaggctgtgacaaacaaggatctccaatgaagcagggagtgctgact

SEQ ID NO: 42637 - DNA, 251 bp, Glycine max
ataaagggaaaagagaacacccttatttccatttctaaaagagttcattgaagaaatgaagatggatagtgcttccatgacaggctcaaagaggaggatatcatccaacagaggaattggaggagtcctcagagagcaaagggcaaggctatacattataagaagatgtgttgtcatgctcctctgttggcatgactagttttttcaagacttgaagaagttccacaagcagcatggcaatggaagaaaag

SEQ ID NO: 42638 - DNA, 201 bp, Glycine max
aatcatgtcattcagaagtgtattgaatgtgtccctgaagatgcaatccactttattgtgtcaacatttttttgatcaagttgtgacactctcaacccatccatatggttgccgggtgatacaggtaagttctcttcactgcttatgttactcttataatgtaccttagatcatttgtcatataaaatacgttccacacaa

SEQ ID NO: 42639 - DNA, 258 bp, Glycine max
caatggtgtacgtcaaggctcagaaatcaaaagcctacttcaagagatatcaagtcaagttcaagagaagaagagagggaaaaaccgattaccgtgccaggattcggttgattaatcaggacaagaacaaatataacactccgaaataccgatttgttgttcgctttagcaacaaggacattgttgcacaaataatatctgctagcattgctggcgatattgttcttgctgcagcatatgcacatgagctgccacgat

SEQ ID NO: 42640 - DNA, 216 bp, Glycine max
actcgagccgattcggctcgagtacaggcacctattgttaataatctagctttttgggagagaataggtatcgaacaatatggacctgataccctgttctttgcattttactatcaacagaacacttaccaacagtatatggctgcaaaagagctaaagaagcagtcctggagatatcaccggaagtataacacatggtttcaacggcatgaagag

SEQ ID NO: 42641 - DNA, 261 bp, Glycine max
cttgtatatatctcattttgaggcagtggaaaatgttgtacgctgcataaggcgggctctgatgctaacttggaggaactatcatcagttatatcctctaatggtcattctattgaggaatttcttgcatctgaggccactgaagctggttcaatatttgacgatcttcagagaaccctttcaactcagcaggatgaactggaactatttgcagggaaactacgcagtagattcaatctcagtcttgaacaaataaaagat

SEQ ID NO: 42642 - DNA, 281 bp, Glycine max
agtagctcggaattggctcaatcgattgaatcggctgacttgacttggtgactaatgacactgtaattctcaaccacatcaacaagctggacgagccatttttactcacttggaacggtattaaacaaaggaagaattcatggcaagatggagttttgggaaccaactgtcccattcctccaaactcaaattatccatacaagtttcaggccaaggatcagattggtacatatacatactttccatcaactcaactgcatgaagcagctggagggtttgga

SEQ ID NO: 42643 - DNA, 265 bp, Glycine max
cctcgagcgaatcggctcgaggcaaaagtttgaagaacactcaacatggtatgagcataggcctaattgatgacatggtagcatatgcactcaaaagtgaaggtggatatgtttgggcttgcaagaattatgatggtgatgtccaaagtgatttacttgctcaaggttttggctcattgggtctcatgacttctgtgctgttatcttctgatggcaagacattagaagctgaggcagctcatggaactgtaactcgacattttcg

SEQ ID NO: 42644 - DNA, 259 bp, Glycine max
gttggcgtctatgacgaccgacgacgtcgtcagagactcagagcctctcgtatgctcgaaaacggcattcgcattctcaaggaagaggtgcagagatcgaatcgggaatgggaatcatacaaggagaagataaaaaataacgaggagaaggttaaacttcataagcagttgccctacctcgttgctaacattgttgagatattggatatgaatccagaagatgaagctgaagaagatggggccaacattgatcttgact

SEQ ID NO: 42645 - DNA, 262 bp, Glycine max
cttctctcctatctatatcttttctcacttagtcttgtgttgtcttcccccacaacacacttgtaagggagagataacaatggcttctgagaaggttgagactgttgttgcagggaattacttagaaatggagagggaaaaggaaggttctaagtccaccagtggcaaattgtctaggctcttttggcatggtggctctgtctatgatgcatggtttagctgtgcttctaatcaggttgcacaagtgttactgacactccat

SEQ ID NO: 42646 - DNA, 263 bp, Glycine max
gttctcttcactcttggtcttgcgagagaaagccatgccagagccgaagatttttggcatgctgtttggccaaacactcccattccaagttcattgcgagctcttctaaagcctggccctgcaagtgttgaaatcgatgatcaccctatgcaacctgaagaaacacagtacccgaaaaccttcttctataaagaataccttcatccaggcaaaacaatgaaagtacaattcagcaagcctccctttcaacaaccatggggtgt

SEQ ID NO: 42647 - DNA, 236 bp, Glycine max
tgacatggttggttttaaacttcttgagcatgttgggcttgttatggatcttcctgtcattatgatgtctgtggatggggaaacaagcaaggtgatgaaaggtgttcaacatggagcctgtgattatctccttcagcctataaggttgacagaactgagaaacatatggcagcatgtctttagaaaaaagatacatgaggcaaaagaatttgacagttttgagagcattcacttga

SEQ ID NO: 42648 - DNA, 145 bp, Glycine max
cacgcgtacctcagcactcggctcgacgcgtgaggcaatcaaggtgataaacactaaaactgagaagtattgggactgggtattggccaatgaaacgaagccaatatggatgcgcaatccaaaggaagttgaaaaggaggagtac

SEQ ID NO: 42649 - DNA, 263 bp, Glycine max
gcaaagttgggttatgctagtgaccttgcaggaagtcaggaacttgctgaaggtagtcgtgcaacacaggctcttctgactaattatgcacagacacctggccaaggaatgactcctttgcgaacccctcagagaacaccggctggtaaaggtgatgctatcatgatggaagctgaaaatctggccaggctgagggagtctcaaacaccattgttaggaggagagaacccagagttgcatccttcagatttttccggtgtcac

SEQ ID NO: 42650 - DNA, 162 bp, Glycine max
tctcgcgccgagttccaagccttcgacctattttcccatttaaataggtaagacggagcagctgctctgttgcaccgtgccatggaatcgagatctcccagtgggccatttttggcctgcagtttcggcgattacggggtccaaatgcagtcactgatgaat

SEQ ID NO: 42651 - DNA, 189 bp, Glycine max
ggaagctgcagtaactgttgatgtatttgtaaaccaggactgggagaaggacttcccacaagaccactccgggagttttgatcagttcaagaattttatcaggtcaaattatgagatgtgcaaatgggtaggcctgtcacttgtttctgtacagggactctctttattattggcaatgatactcaaagc

SEQ ID NO: 42652 - DNA, 262 bp, Glycine max
cttgaactcaaacatggcagatgaggtggttctgctagatttctgtgcaagtccatttgggatgagggtcaggattgcacttgctgcaaagggtatcaagtatgagtaccacgcagaggacttacagaaacagagtacctcttctcctccaaatggacccggttcacaggaagattccggttctcatccacaatggcaaacccatttgtgaatccctcattgctgctcagaccattgaggcggtttggcatgacagaaatcc

SEQ ID NO: 42653 - DNA, 269 bp, Glycine max
tttctatcagctttatataaaaagattttcaaggccaagttcacatgtgctccgtggttctctacaagtgcaaagaagctaatcaacaaaatcctagatccgaatcctgccactcggattacatttgctgaggtcattgagactggctggttcaagatgggatctaagcctaccgtatttgaccaggctaatgttagatctcatgatttcgaatctacattcagtgagtctacggattcacaaaatcttgtagtagagaggcgtgaaga

SEQ ID NO: 42654 - DNA, 269 bp, Glycine max
ggccatccaaacagttgcaaagatatctgggtgcagtgaattagctgccaaaagccaattctatttgattgataaagatggtctagtcacaactgagaggaacagtctagacccagctgcagctccgtttgctaaaaatccaagagacatagaagggcactactgagggtgctagtataattgaagtggttaagaagattaggccacatgtgctccttggtttgtctggcgttggtggtattttcaatgaggaggtgcttaaggcaatg

SEQ ID NO: 42655 - DNA, 258 bp, Glycine max
ctgatttgggcactccgagtaaacagccaacaaactacttctgcaaaattttgacagccagtgacactagcactcatgggggattctctgttcctcgcagggcagctgaaaaagtttttcctccattggactttcacaacagcctccttgtcaagagttaattgctagggatttgcatggtaatgagtggaaatttagacatatcttccgtggccagcccaaaaggcatctacttacaacaggatggagtgtgtttgt

SEQ ID NO: 42656 - DNA, 274 bp, Glycine max
ctcacaagattcccaatatgaaacttggtctggttctcgttacgttgaagaagatattgctcaaagtttcagggagttatggagaaatcctccagaaattgatgcctcactgcatcttccttcccaaaatgagtctattcctagtgacttttctatacgtgctagtgacacctgtgttgatgattttgcaaattcaacttctcctagatgtttaattgatgaggcattgataaaattctggtacaaaccggatagcactttcaaagttcctcgt

SEQ ID NO: 42657 - DNA, 281 bp, Glycine max
catacacaagctcttccattcattgtatttctttctttgcctttcaactcaaaacaatgggcttccgcttacctggtattagaaggtcatcttttgctgtaaccaaagcagcttccaaggctgtggaggtccccaaaggctaccttgcagtctatgttggggagaaaatgaagcggtttgtgattcctatttcatacttgaatcaacctttatttcaacaattactgagccaagctgaggaagaattcggatatgatcatccaatgggtggtctcacaatt

SEQ ID NO: 42658 - DNA, 268 bp, Glycine max
ctcatgggctgtccactttctcttcagaatactgtcactgctggaattgtaagttgtgttgaccgcaaaagtagtgatctgggttttagtggcatgccaagagagtatttacaaaccgattgtgaaattaatatgggaaattctggagggcctcttgtcaacatggatggagaaattattggggttaacatcatgaaagtggccgctgcggatgggttgagtttttctgtgccaattgattccgtgtgtaaaattttagagcatttca

SEQ ID NO: 42659 - DNA, 254 bp, Glycine max
taagcttgctactgagtttccacactgcataccttaggtcttccgaattcgaagttaatttgcaagatggctaaggaaaaggctcagatcaacattgtggtggttggtcatgtggaccctgaggaggcaaccaccattaacgagctgaagaagcctgttgtggagaaagaagctccagggcatgccatatgagggcatgcacgtacggcctcggaggggaaccagaaaattatgttaacaaaataatctggaac

SEQ ID NO: 42660 - DNA, 239 bp, Glycine max
gcaatggcttcaagtcagtgtgaggtgacccatttgggagctattggaagcccatttgtgtgcagggttcatatcgccctcaagttgaagggagttcaatacaaatatgtcgaagacaatttgaggagcaagagtgaactgcttctcaaatccaactcagtgcataagacggttccagtgttgattcacaatgagaagcccatagcagagtctacttgtgattgttgactacattgatg

SEQ ID NO: 42661 - DNA, 241 bp, Glycine max
  unsure (1)..(241): unsure at all n locations
cctccgtgggcgtggcggtgctggtttcccttcgggcctcaactggtcattcatgccaaaagcatccggcctgncgnncttcatatcttgttgttaatgctgatgaccgtgaacctggaacttgcaaagacagggaaattatgcggcatgacccacataaattgttacaaggttgcttgattgctcgagtaggaatgagggctagtgctgcttacatctacatcaggggtgaatatgtgaa

SEQ ID NO: 42662 - DNA, 235 bp, Glycine max
gctcacgacattcgcgctcaaactcgagacgcttctctgcgagactctggatctgtccatattggtcaccggcctgtcactgagattttctgctgcgggggaacggcagaataatggccttgttatgaacttctacaaggaatcatgcactcaggctgaagctctcatcacagaatcagtcaagcttccctacaagcgcaacaagcacagtgtttccccgtggttccggaacatg

SEQ ID NO: 42663 - DNA, 252 bp, Glycine max
tgcagctgttaaggttgttgacattgttgacacattcagacttcaggagcaacccgcattcgataagaagcagtttgttaccttcatgaagaggtttatcaagaatttgactcccaagctcgatgcagagcaacaggagttgtttaagaagcacatcgagggagcaactaaatacctgctctctaagattaaagatttccaattttttgttggtgagagcatgggtgatgatgcttgcttggtctttgccta

SEQ ID NO: 42664 - DNA, 266 bp, Glycine max
cctcgagccgaatcggctcgctgtccgatgattatcgtaaacttactagttatcgacatgacgacagttaacatcgaagtgatagcagctgccatggagattataggagacgcctatgagatctagggtttcttagcctttgtgaaccatgggatatccattgagttgatggacactgtggagaagctcactatagagcactagttgaagactatggtgcccaggttcagagatatggtagcccgctcagggttcgagtccgttca

SEQ ID NO: 42665 - DNA, 269 bp, Glycine max
cgccgattgggacggcggcgcagagccaagacgacggcaaggactaccaggagccggcgccggcgccactggttgacccgccggagtttacgtcatggtccttttacagagcagggatagcagagtttgtggccacttttctgtttctatacatcactgtcttaaccgtcatgggagtcgccggggctaagtctaagtgcagtaccgttgggattcaaggaatcgcttgggccttcggtggcatgatcttcgccctcgtttactgcacc

SEQ ID NO: 42666 - DNA, 213 bp, Glycine max
agccggcaatgcggctgtcaggacggtgggttccacggctgttgtcgacgtcgtcgcggcggcggatgttgtcgttgctaattgcggtgattgtaaggccgacctgggaagaggatctcaggccgtggacttctctagtgatcataagtccgacaggcccgatgagttgagacgagttgaacacgctggtggaaggggtcattaactggaatg

SEQ ID NO: 42667 - DNA, 243 bp, Glycine max
  unsure (1)..(243): unsure at all n locations
ctcgagncncttcggctcgagctttcgtcgcaaaagggtcacaacattaaggggactatggtcggttatgagaagaactgtgtattctatgaacagcatcagtagtgttggagggatcgttgtacaaggcttaggattcatagggagtgcagtcgatgcgattagttttgcagggagcaaaatgtgcatccagttgattagtggtaccaaggctgatggtgggacaggagaaattggaaagag

SEQ ID NO: 42668 - DNA, 227 bp, Glycine max
tgatgctagagatagtggtgatcaatatgtgcaagaatcgaaaagtttgctgtgatattctaattggaaacatgatagctagacgagtagtgatggagtagtttggcgatgctaccccaaaaggagctgaaaacttcagggctatctgtactggggacgtatagatgggtagatctgggaaacctgggcactacaggggctctgtagttcatcgtagtagtccagaa

SEQ ID NO: 42669 - DNA, 264 bp, Glycine max
caaccatgcgggagtgtggtgtacgtggcctttggaagcgaagacaaaccaagtcaagatgaagtgacacagatagctctaggtttggaggaatcaaagattcggtttttctgggtgcttagggttcaacgtgggccatgggacccagatgtgttacggttaccagaagggttcgaagagcgaaccaaagggcgtggaatagtgtgcaccagttgggcaccacagttgaagatactgagccacgtagcagttggtgggtttttg

SEQ ID NO: 42670 - DNA, 259 bp, Glycine max
gccaagaattcagccccattgagtggtgttcgtgagccaagcaagtgcgggatcacttgaattcatggaacttagatattgcaagaatatgatgcaattcttagtgtcttcagctgaaaatggttggcgcgttcttgggggctctgtctcctccaaagctattgctttggatgaggttgtgcctggtccaacgaccattcttgtcttaggtagcgagggcactggtttaagaccaatcgtggagagatcatgtactcag

SEQ ID NO: 42671 - DNA, 278 bp, Glycine max
tcggagttaggttctgcacgctctgcttccagcgagtgttctttcttcgtttcaacaccttaatttgcacacgctgcttcttcagcttgagaaatggcacaagaaacctttctattcacatctgaatctgtaaacgagggtcaccccgacaagctgtgcgaccagatctctgatgcagtgctcgatgcgtgccttgaacaggaccctgacagcaaggttgcctgtgagacatgcaccaagaccaacatggtcatggtctttggagagatcacaaccaa

SEQ ID NO: 42672 - DNA, 257 bp, Glycine max
ctcccaagggtgtaaccttcctggctgtgttaatatgcgtgtcagcactgtcactcagcccttctgttgcgtgggaagggcaaaataatggccttgttaggaacttctacaaggaatcatgccctcaggctgaagacatcatcacggcacaagtcacacttctctacaagcgccacaagaacactgctttctcctggctcaggaacatcttccatgactgcgctgttccgagttgtgatgctgagcagttgctggac

SEQ ID NO: 42673 - DNA, 271 bp, Glycine max
ttatgggcccagctctctatctgtctggtttgtaagattcaattttagcatgaatggtttttgaaggttaattatagacggaacctctacaacttgcaactcaatctccttctttgttgctggtgtccccaatatttgctgggtctgcaaacgaccgggttcacccaaatttgttcgccatgttatctggagtttaccaagaacattacttccttcaacttttgtttgcggcgaaccatctgataacgttttcaattgatagagatagttg

SEQ ID NO: 42674 - DNA, 271 bp, Glycine max
  unsure (1)..(271): unsure at all n locations
gttcatactcagccacttccttccacacaacataaaacaccanaaagtcaatataagagcataaanaggccgaggtcaatgagccggtagtgtttagctcttgcaattgcatcagcagggaatagcagtccaacattaggatcatcaagtaggaatggagcttggcacaaagcagcaacctgacgagggcagctcagtggtttctgtcccaatgcatgtgggttgccaacacaggcctagggaatggctgctatcttagctcggaaatcac

SEQ ID NO: 42675 - DNA, 281 bp, Glycine max
ttccttctatatcttcagagtagcatagcatatcatatccatggaaacttctcagcccctttctatagaaagcttctcatacagttggttagtgaacctaaggccatcagcactagaaagcctagaaagctccctaagaactccccttgatgcatctgatgaaacttcttccttcattgagatggacccaagaatgccaccttctaaaagattctttaagaactcacaggactccaaatttgacttcccaatttcacagtccgctctcactcttgtccatg

SEQ ID NO: 42676 - DNA, 271 bp, Glycine max
atttccttccccagaaattgatatgtatggcagatttgaaaatgttgacgggtatttatttttgagtctgggtgttagttcaaaacaaaatgcatgggcagggcctgatcattggaagtatcgaaaatccaaagtctcagaggttcatcctacttctgaagatgggtcgaccctaaaaagtagacagccaaagagtaagagacaaactgaagttgatttaaatttcacaaattctcttgagaaaaaaatgctagatacattttctcctccc

SEQ ID NO: 42677 - DNA, 254 bp, Glycine max
tgagccttggttggatggaactttcaaagggaatggttttctctatgaaagacaatggcgtggacttgttactaaacaaggctctacagattcgactgctgattttgggtttggaatttacaatgatcaccatttccatttgggctacttcatttatggaattgctcgttcttgcaaagattgatcctcaatggggacaaaagtacaagccacaggtttattcacttgtgacagatttcatgaacttgggtcaa

SEQ ID NO: 42678 - DNA, 258 bp, Glycine max
gaaaaaagaatcctattcagacaagtttctccaacaagtggcgttgaattttatcctagctggtcgtgacacctcatcggtggcattaagttggtttttttggttggtgattcagaaccctaaggtggaagagaaaattctacgtgaaatttgtacagtcctgatggagacacgtggcaatgatgacatggcaaagttgtttgatgagcctttggcctttgaggaagttgaccgtttggtttatctcaaggctgcatt

SEQ ID NO: 42679 - DNA, 245 bp, Glycine max
  unsure (1)..(245): unsure at all n locations
gcgtacagaggttaaaacatatgtgccgtatgtaatcagggcaataacttcagctgtcaacgagttgattggtttaggggctcgcacactcatagttcctgggaatttaccattgggatgtagtataaattatttaacaatctatgaaaccatggataagaaccaatatgatcaatatgggtgtttgaagtggttaaatgagttcgctgaatattacaaccanaagctccanagtgaattagata

SEQ ID NO: 42680 - DNA, 259 bp, Glycine max
ctatctagaagtggaaagctgaacagaattatatacgattcgcgcgaccctgacttgagcaagatagttatggatgatctccctggagggcctgaggcttttgaacttgcatccaagttttgctatggaattgcaattgatttaacatcaggcaacatctctggccttagatgcgctgccgagtaccttgaaatgacagaggacctagaagagggcaatctcatattcaagacagaagcctttcttagctatgtggttt

SEQ ID NO: 42681 - DNA, 251 bp, Glycine max
cacaaatagagttgttggtacatatggatatatggctccagagtatgcaatgaaaggtgttgtgtccatcaaaacagatgtgttcagctttggtgtgttgctactagagatacttagtagcaaaaagaataatagtcgctatcattcggatcacccactcaacctcataggatacgcgtggcagctctggaatgcaggcagagctctggagcttatagactcaacgttaaatggattgtgttctcagaatg

SEQ ID NO: 42682 - DNA, 249 bp, Glycine max
cgacggggtattgtaagtggcagactggccttgctgccacgatccactgagattcagcccttgtcgctttgattcgtctgcaaaggattctacccgccgctcgatgggaattccgcctcgagccgaatcggtcgaggcgaaaacccccaactccaacctctgttcatcgtctaccgcgctttcttttcaaccagaactatgataaagctttttaaagtaaaggaaaagcagagagaacttgcagaaaat

SEQ ID NO: 42683 - DNA, 247 bp, Glycine max
gctcttttctcttttcttttctctttagttctctcttcccctttctttttctttttcttcttcttctgagcttgtttaagcttttcttccattaacatattatcataatgtgtggtattcttgctgttcttggttgttctgatgactctcgagccaaaagggtccgcgtgcttgagctctctcgcagattgaagcaccgtggccctgactggagtgggctacacaacatggtgacttttttttggca

SEQ ID NO: 42684 - DNA, 272 bp, Glycine max
ccggcccaagcagtctccgtcctttaccacagggagtatccgagttcctcatgggctccggcttcgacaatgtactcgaccagctcgacgccgccgcggggggcgccggagcactgccccccacggcagcgtcgaaagcggcgatcgagtcgatgccggtggttaagatcctcgcgagccacacctacgcggaatcgcactgcgcggtcaccatggagaatttcgagatcaactgcgacgcacgtgagatgccgtgcggtcacgtgtaccat

SEQ ID NO: 42685 - DNA, 265 bp, Glycine max
gaaaattcgaagtggcggccatgactatgaaggggtgtcttatgtggcctcacagccatttttcatccttgacatgttcaatctccgatccattgagatcgacatggacaccgaaaccgcgtgggtccaagccggtgcaacgcttggcgaagtttactatagaattgctgagaagagtaaaactcatggtttccctgcaggggtgtgtcccactgttggggtgggaggtcacattagtggtggtggatatggcaatctcatgaga

SEQ ID NO: 42686 - DNA, 266 bp, Glycine max
ggccttcctagaacgaaaaaaaaaagaagagcaattttccctcaccaaagaagaagaagcgaacaatggccgatcaacttaccgatgaacagatctccgagttcaaggaagccttcagcttgttcgacaaggacggcgatggtagcatcacaaccaaggagcttggaactgttatgcgttcattggggcaaaacccaactgaggcagagctccaggacatgatcaatgaagtggatgctgatgggaatggtaccatgacttccctg

SEQ ID NO: 42687 - DNA, 267 bp, Glycine max
ccgaccccatcttcaaccctgccctctccgcttccttcgccgccgtcccctgctcctccgccgtctgcgaccagctcgacgactccggctgccaccagggccgctgccgctaccaggtctcctacggcgacggctcctacaccagaggcacgctcgctctcgaaacaatcacgctgggaaaaacagtgattcggaacaccgccatcggctgcgggaacttgaaccacggcatgttcgtcggcgcggctgggcttttgggactcggag

SEQ ID NO: 42688 - DNA, 221 bp, Glycine max
ctcgagccgctcatccttggcataatcatgggtattgaaacggatgattttgctggatgctgctcgcaagtgctcttgccaaggaagtagtctatgaaggaacatggagttatagcgcacattttccatcccaatgtgcttactacaagtagttccattttttgaatggttctagcttcaaacacaaactttggttccccaacctgtaaatctacggattg

SEQ ID NO: 42689 - DNA, 267 bp, Glycine max
ctaaggagttatacaaacaactgcttgctacaataaaaactaatgcttaaagccaaacccatacttgaagaaactataatgagactatatcgtgatttttctccaaactgcatgaaagtggcaaacttaggttgctctgtaggaccaaatgcacttctggtgatatcaaatattattgacattgtcaataccgcttgcactagcttgaatcgtgaaccaccaaaattccaattttatctcaatgatttatttggaaacggattcaat

SEQ ID NO: 42690 - DNA, 132 bp, Glycine max
gcagtgtcatctctcctttgacgacaagatgagcatcccaattccccatcggcagttattcatagacggagactggaaagtccccgtcctcaagaatcggattcccatcatcaacccttccacacaacatac

SEQ ID NO: 42691 - DNA, 278 bp, Glycine max
ctcgtttcaatcgaaaccaaaacaaaaacatgggcagaaaattcttcgtcggtggcaactggaaatgcaatgggaccactgaggaggtaaagaagattgttactactttgaatgaggctaaagtccctggagaagatgtcgtagaagttgttgtgagccctccttttgtgttccttcctgttgtaaaaagtttgctgcgccctgatttccatgtttcggcacaaaactgttgggttcgcaaaggtggtgcttataccggtgaggttagtgctgaaatg

SEQ ID NO: 42692 - DNA, 257 bp, Glycine max
caaaattaaattgttttcattatcacttgaacatgtacaacaaaactacatactccttttttatgtatcagtatctttggggaaaccaattcaacgatgctataagctagtttatcgtgaggagaatatgaagttgtttgttttctttgttgctgcagtagttttggtagcatggccatgccatggcgcaggctaccaaaggttccctctccgaatgaaaactggctatggtgagcgttcttcggaggtaaaatgcg

SEQ ID NO: 42693 - DNA, 265 bp, Glycine max
acgtggtgttgttactgctgatctcagctcgtgtctcttctcttgagttctctcttcccctatcgtttgcttgatcgtctccatctgagcgtgtatagaggtaactcccatgatcatatgagcacaatgtgtggtattctgctgggcttggttgttctgatgactgtcgagccaagaggggccgcgtgcttgagctctctcgcagatcgcagcagcgtggacctgattggagtcggctccatctccatggtgactgcgttctggc

SEQ ID NO: 42694 - DNA, 267 bp, Glycine max
agaaagtcgtgacaggcgaccagcttttgttctctgccgagcaccggtggttactgagattattaacagccaccaactagagattgtaacattagctaatctatcctctttgacagtaatcactgaaagagatgctgttccatctggatatgctgatgctgttgtaaatgaaaacctttctgtttatttagagcttcaaggaactaattctgcagaagcagaggggaagatcaagaagatagatgagctgaaaaagcaaatagaaag

SEQ ID NO: 42695 - DNA, 257 bp, Glycine max
caagtgcgagaagaccaacaagtgtgagagatttggggtggatgctatgaagaaggtgatggttagtgatggtgcaacaaggttttacacaatggatggaaaacccatattccatttcttgaacacttcaactttcactgagtacacagtggtggattcagcatgcatcgtcaagattcacattgatggtagtaatggcgatctcaaccgcaatatcaaaagactcaccttactcagttgtggcgtatcttcgggtg

SEQ ID NO: 42696 - DNA, 247 bp, Glycine max
gtccctttctgttctcttcactcttggtcttgcgagagaaagccatgccagagacgaagatttttggcatgctgtttggccaaacactcccattccaagttcattgcgagatcctctaaagcctggccctgcaagtgttgaaatcgatgatcaccctatgcaaattgaagacacacagtacccgataaccttcttctataaagaagaccttcatccaggcaaaacaatgaaagtacaattcagcaag

SEQ ID NO: 42697 - DNA, 264 bp, Glycine max
ctcgagccggtttccagctatcaggcaagggagatggcttaaccctgtcctttgccacaccgctggaaactgaatgaactctttgctactggggttgtgcttggaggttacttggcactgatgactgttatactcttctgggcaatcaaagagacgacattcttccccgacaaatttggagttagaccaattcatgacaatccagatgaaatgactgctgctttgtatctacaagtcagtatagttagccaggctttgatattt

SEQ ID NO: 42698 - DNA, 260 bp, Glycine max
gtgccctccatgcatgactgacaaacatcagaaaatgaatggtgaggatgaggagtaactcccaaagagttactcttggtgttgcaatgttcgttgttttagcaatggtattgcgtcggaagcctgatgctcttatatctgtattgcccacattgagggagagtacaaagtatcaagggctagataagcttccagtcattgtatggatgatagctcaggctgctgtaggagatctctcagtaggtttgtatgcttgggca

SEQ ID NO: 42699 - DNA, 274 bp, Glycine max
aacacccacttgaatgagctcttagccatggcaataattcagaagagaaatgagaatgaagagtgaagaagagagagaacacccacttgagaggaggcaggctgaagcatctcgaataagagagaagtatcctgacagaattccagtaattgttgaaagggctgagaagagtgatgttcctgaaattgacaagaaaaagtatcttgtacccgctgatttgactgttggtcagtttgtgtatgtggtgcggaagagaatcaagctgagtcctgag

SEQ ID NO: 42700 - DNA, 270 bp, Glycine max
taaaaaccgaagaaggaagctggcttttaaagtggttgttcaactggctcttgaccttgcaagagggttgagctatctccacacaaagaagattgtccacagagatgttaaaacagaaaatatgcttctggacaagacacgaaccttgaaaatagctgaacttggagtagctcgtattgaggcctccaatcctcatgacatgacaggtgaaactggaacccttggttacatggctcctgaggttctaaatggtaatccatacaatagaaa

SEQ ID NO: 42701 - DNA, 182 bp, Glycine max
gcttggtgatgtccctttctgttctcttcactcttggtcttgcgagagaaagccatgccagagacgaagatttttggcatgctgtttggccaaacactcccattccaagttcattgcgagatcttctaaagcctggccctgcaagtgttgaaatcgatgatcaccctatgcaaattgaagaa

SEQ ID NO: 42702 - DNA, 252 bp, Glycine max
ttacactccaaaaccgcacatcttcactcccctgaagaccctcctactgccttgccagactccaaaaaacccgattcagggaatggtggtgatgatgttgatcaagagtgtcaggttcaagcattcaaagagtatggtctgattgagcttagaagggccacaaatgagttcagcacagattacattgtttctgagagtggtgagaaagctcccaatgtggtctacagagggaagcttgagaacaatcggtta

SEQ ID NO: 42703 - DNA, 254 bp, Glycine max
aaggaccacccttttagtttgaggcctttgttgctagtcacacttgatccaagtgtgattaagtcatggtgtcaattctctacttggctcacaagtgaagaccgtacaccgtttcaaacggagaatggggtgacatattttgattatgctaagcgtgaccccaaattcggtcacttttacaatgatgcaatggctaaggacactcgattcgcttctagtgtggtgattgaaaactacaaggaagtgttcgaggg

SEQ ID NO: 42704 - DNA, 259 bp, Glycine max
ttcggcgtctagatcatagatatgccgctggcaatcaccggtggagattacgacggcagcaccatcaacgtgtaggggaagtacatgatcatggatcgacctaagatggaattctcaactgatggtgaagccaaaattgagagacctgtaatgatacacagagccatcctaggatctgttgaacgcatgtttgccatacttttagagcactacaagggtaaatggcctttctggctcagtcctcgtcaagcgattgtat

SEQ ID NO: 42705 - DNA, 255 bp, Glycine max
gagagagcgaaggggcaaacacaattttcttgatcttctttcttattttttgtagagagagagagagagaaaatgtaggggatcttcagcagttcagtggtgtcgccgccggaggagctggtggccgctggtagcagaacgtcgacgtcgaaaacgacggcagtggaagctgctgaaccgtctcgaggatagcatggcgtcggctgtgtcgctgcaagtgggggaacacgtgcagttggcgtacacacaccacaa

SEQ ID NO: 42706 - DNA, 262 bp, Glycine max
aggcactccatcgtataatgataggggaagaagcagagcctatgagaaacagagcacacaattgctacttccatttagctgataccaacagggaccccgatttgaagtatatcggtcacaaacttttcattgtagaattgctctgcagagacgggccaggtgagcatggggacccccgccgacactgcttcgagcgtggaattccataccacagtgtgtgacaaaggctcccacagcttgatggtccagaattagcacttgg

SEQ ID NO: 42707 - DNA, 244 bp, Glycine max
tattatgcgtttcagcactgtcactgagtccttctgttgcggtggaagggcaaaataatggccttgttatgaacttctacaaggaatcatgccctcaggctgaagacatcatcacagtacaagtcatgcttctctacaagcgccacaagaacactgctttctcctggctcaagaacatcttccatgactgtgctgttccgagttgtgatgcttcacggttgctggactccacaagaaggagctt

SEQ ID NO: 42708 - DNA, 256 bp, Glycine max
cgggttgtcctccttgagcttgtaactggaaggaaacccgttgatcaaactcagcctttgggagatgagagtttggttgagtgggctcgtccacttctccttcgtgcaattgagacacgtgattttagtgatctaatagatccaagactcaaaaaacactttgtggagaatgacatgctcagaatggttgacgtggccgccgcttgtgttcgccactcagctcctagacggcctcgtatggttcaggtggtaagat

SEQ ID NO: 42709 - DNA, 276 bp, Glycine max
ggctccacgcggatggagctctcagtgtctggaacattgccgcaccctagatgtgcgcgatatgccacaatggtcgaaaaacggtaacttgtgtatggtggaagcagaggaggtggaccaattatgggcgctttatgggcgttgaagggcctcattgcagaagggaagcgaatgaagcacctgggtggcctcaattaaagcttccaggtcaagcaccttctccccgatgtggccatacagtgacatccggaggacactatttgttgatgtttggag

SEQ ID NO: 42710 - DNA, 257 bp, Glycine max
agagcttgtgaaagcaaggcttgccgaactggatccagacaactccggtgaccacgtactgctctcaaatgtttatgccgttgcagggaaatggaaggatgcctccagcataagaagaacgatgactgaacatagcatgaaaaaaactcctggttggagcatgattgaacttgacaaggtcatttatggttttgttgctggtgaaaagcctaatgaggttacggaggaggctcatgaaaaactgagggaaataatgt

SEQ ID NO: 42711 - DNA, 236 bp, Glycine max
tttcctccttggagtaattggtgagtgaggcagacttacagcgcactgttgtggatataaaggacttaaatacacttcgcccactcttgcttctgctcttagcaaccttataccggctttcaccttcatactagcactcattttcagaatggaaaaggtagctttgagaagcccaagcactatggccaaaatcttgggttcgttagtatccatatcaggtgcactcatagttgttc

SEQ ID NO: 42712 - DNA, 226 bp, Glycine max
atggaggttagatacactgatgttgactaccttgtcttttctgatgctgctgctttaatggctgtgggcgattccccttataagagaaccacttatcgctattctcctttgcttgcctttcttctcattccaaattcgttcatccatcgctcctggggaaagtttcttttctcggcttcagatctacttgtgggatatttcatctattatattttaaagctacgga

SEQ ID NO: 42713 - DNA, 264 bp, Glycine max
caagaatggcacttcgttgcttggtgatgtccctttctgttctcttcactcttggtcttgcgagagaaagccatgccagagacgaagatttttggcatgctgtttggccaaacactcccattccaagttcattgcgagatcttctaaagcctggccctgcaagtgttgaaatcgatgatcaccctatgcaaattgaagaaacacagtacccgaaaaccttcttctataaagaagaccttcatccaggcaaaacaatgaaagtac

SEQ ID NO: 42714 - DNA, 265 bp, Glycine max
attgcggcgacgtgagcggttcgctgcccgcgacgttgtgagaagtccactgaaccttatcatttagaagaaggagaacatggggtttgaggaaactgagttaaggcttggactgcctggaaacggaggcactgaagaagtgctcatcaggaagaggggtttctctgagactgaaactggtcatgaagatgagtctgccaccactgtggatttgatgcttaatctttcttctaaggaggccgcaaccactgctgctgctgctgca

SEQ ID NO: 42715 - DNA, 260 bp, Glycine max
ccagaaccatcagcatagtggccaacaacaataaccaagaggatccatctccttctgcttctcttgcttctgcttgcttcttccttctcttgctcttctgcttcagacaaatccatcgactctgcttcttcaccagcagcggcaccagttagacgaaggactctttgtctcccaatgcctctcgttcatcatcctcccatcaaaaagggtgactcacaccaccttgtctctctcacctccaccacctatggctcccttct

SEQ ID NO: 42716 - DNA, 257 bp, Glycine max
ctctgacagagcatgaagacaaacaggtccatcaaattgctcgaaacttccgagacagatggtttcccagacatgccagaaaacatggctatatggacagggatgataacagagtggaatctcacagaagtttcaagtgtaacagattttcagcatcacagagttataggcatgaacaggatttaaagactacagaagcaagtgattgtagtcagcagtcgatgcttgtgacaactccagtagatgctgaagcccgg

SEQ ID NO: 42717 - DNA, 254 bp, Glycine max
ggtgctcagaaagcctctcttcatccagatgatatgctgctcctggccaactttgttatctcatcagaatcctttaggacttcagaagcattttctcccgtgtgcctgccaagatacaatggtttggcatttttgtatgcctatatccacttttttgatgatgacacatacttgatgttgctgaccactagttctgatgcattttaccatcttaaggcttgcaggattcgtattgaaacggtacttttgaagtc

SEQ ID NO: 42718 - DNA, 250 bp, Glycine max
attcctccctggagtaacttgtggcttgttgcttctataatcctaactatgcttcttcacatgctaatcttatatgttcacccactgtcagtcttttctctgtaacaccattatcttggactgactggacagttgttctctatctttcattacctgttatagtcattgatgaggtgttgaagttcttctccagaaatcccattggtttgagattcagattatggttcaggaggtcggatttactaccgaa

SEQ ID NO: 42719 - DNA, 258 bp, Glycine max
cgcatggcttagacttaaaggctatggcaatctgaggccagaagttgaagagggaatttgccaagtcttggctcatatgtggttagaatcagagttattcctggcactggggatgaaggtgcatcatcatcatcatcctcatcatcctcatcgccttcgtcttcttcatcatcaaagaagggtaaacgttccgactttgagaagaaactaggtaagtacttcaaacaccagattgagtcagatagctcagcagcttat

SEQ ID NO: 42720 - DNA, 253 bp, Glycine max
cggctcgaggccctggtcaaaccatctcttccattaaatttgccagctttggaactcctttgggtacttgtgggaactatgagcaaggagttgccattccccagcatcttatgccatattagagaagagatgtataggaaaaccaagatgcacagtcactgtatcaaacagcaacttcgggcaagacccgtgtccaaaggtgttgaagcggttatcagttgaagctgtttgtgctccaactgctgcaaattgg

SEQ ID NO: 42721 - DNA, 268 bp, Glycine max
  unsure (1)..(268): unsure at all n locations
cggctcgacctcgagccgaatcggctcgacgggctagagctcaccttagcttcagatagcatccatcatgcagactnccaactcgcaagcactcgcattccgtctacagaggggtccgaatgcgggcctgggggaagtgggtatccgaaatccgcgagcccagaaagaagaaccggatctggctcggcacctttgccaccgccgagatggccgcgcgtgcacacgacgtcgcggcgctcgccatcaaacgcaactccgccattctcaa

SEQ ID NO: 42722 - DNA, 270 bp, Glycine max
ctggtttgcaaagcagtatcttcgacctggaagatctgtagaatttggggtaaatttaggatcaaatgcacccaaaaatccaaatgggccataatctattgtaagacccaaaatgctcatgttatccgtgttcagcacaccatgagtgaaaccaaccccctgtcatctggcaatcatggaagcagtacgctcagcaaatctccagcatccaccagccatgctcctttgagttgaagtcccacctcttcagttttgaacccggtttccccc

SEQ ID NO: 42723 - DNA, 272 bp, Glycine max
atttttcaggggtgaccttacagaagatgggttcttgagccgaagtggtccttggtgtgatcaggtcagtttttcttggatgatataataagatttttctttttgttggcttcattaatagacagtacatattgtttatcttgcagggtctttgccttgttgactggggaagagggattgatttgcatctctttccagatcacacactatttaagggagattgcaaaacttctggttttcgctgcattgagatgctagaggataagccgtgg

SEQ ID NO: 42724 - DNA, 236 bp, Glycine max
gggttactgtctgttcaagctaccatctctctctctctttcttagtgcctccttgccagaagttaaaatggcgcaagaaactttcctattcacatctgaatcagtgaacgaggggcacctgacaagctctgtcgacagatctccgatgctgtgctcgatgcatgcttggagcaggacgctgacagaaggttgcctgtgaaactgcaccaagacaacatggtgatggtttcggagag

SEQ ID NO: 42725 - DNA, 277 bp, Glycine max
attctcccttcatccaagtgtccgtacaacacatacaccctctccttatctccgaccaccaccgacgtcgggaaccgccgcacattaacctccacgttgtcgtacaccgttccctccgcccaactatcaatcctcttcaccaaccacaactccttcaacggcgacaccaccgccgccgccccgtccttcctcaccgcgatgtcgtcggcgccgacgaggtcctcgttcagcaacactttccttgccgtgccgtccaccgcgtccaccttgaaaacct

SEQ ID NO: 42726 - DNA, 272 bp, Glycine max
tttgctttctaggtttttttttttttttcttgctctttctctgtgtcgatggcgggaaaaggaggaaaggggtttttggccgaaaaaaccagggaagcgaaaaaggacaaagacaaggttaagaaaaggcctgtctctggttaatcccgtgctgggatccattttcctgggggtcgaatccataggcatttaaaccaaagggtgcaaccaaatggacttttgggggcgactgctgctgtgaacttggccccaattctggaatatctgactgc

SEQ ID NO: 42727 - DNA, 267 bp, Glycine max
actcgagccgaatcggctcgagggctggattcccaagaaaagaaggactggagaggaaggatacgatgactaagaacgtctccatttacaagtcccaggcttctgcccttgaaaagcatgctgctgccaactgcaaggttcttgctgttgctaacccagcaaacaccaatgcattgatcttgaaggaatttgctccatccattcccgagaagaacatttcttgtttgactagattggatcacaacagggcattgggccaaatctctg

SEQ ID NO: 42728 - DNA, 259 bp, Glycine max
cggctcgagaaaacatgctgccaatgaggcctggccaatattacgcgcacaaatcatataatgtggacaatgtggacagatttcaagtaccaatatgcacaaacctggtttcggcaattggacaagtttattcactatgttaatcaagatggccgtgttcatgccttatactcgactccatcaatatatactgatgcaaaacatgctgccaatgaggcctggccaataaagaccgatgacttctttccgtatgcagatc

SEQ ID NO: 42729 - DNA, 270 bp, Glycine max
cctcgagcgattcggctcgagcgaagtttctcatcagccttatcgagtttagggtttcggactcttaccctacctttgacgtatcgaaaccttaaatttgggattaggtctgagcaatctggttggtagaacctttggtcttagagagtcaagttttatgtctggattagacgatcaaattcctactgccttcgatccttttgctgatgcaaatgctgatgactcgggtgctgggtcaaaggagtatgtgcatattcgcgttcagcagcg

SEQ ID NO: 42730 - DNA, 257 bp, Glycine max
ttgacactgaacccattgggatagggaaggatggcacaacaagaggaggagaagcaagataattagctcttgttaatgggtgaactcggccctcaaagtcaatgtgcactgtgctcgccagggcataggcaataacaagaggaggagaagcaagataattagctcttgttgttgcctatgcccttgctggcacagtggacattgactttgacactgaacccattgggatagggaaggatggcacaaagatcttcttc

SEQ ID NO: 42731 - DNA, 260 bp, Glycine max
gagacgaaacccttgaatcagatatcgctgtgggatggtataattccttcaaaagatcatgctaagtcttggattcatacatccaataagtaccgcttcattgatcagggaagcaatttgcgcggtaaagaatttaatttgacaatgcactggcatgttatgcccaagactggcaaaatgttcgctgacaaaatagttatgccaggatataaattgccagaggaatacagatgaagcttgcatttgttaatgtattgaag

SEQ ID NO: 42732 - DNA, 257 bp, Glycine max
gtttcacagcagcaatggtgtacgtcaaggctcagaaatcaaaagcctacttcaagagatatcaagtcaagttcaagagaagaagagagggaaaaaccgattaccgtgccaggattcggttgattaatcagacaagaacaaatataacactccgaaataccgatttgttgttcgctttagcaacaaggacattgttgcacaaataatatctgctagcattgctggcgatattgttcttgctgcagcatatgcacatg

SEQ ID NO: 42733 - DNA, 257 bp, Glycine max
actcgagccgaatcggctcgagctttaactaaggcaatggcaaatgcagcataccctgcatatatgttggagactagaaaaaccgctccaggtcttcgtttagtggataagtgggcggtattaattggtggaggtcggaaccataggatgggtttgtttgatatggtgatgataaaagataatcatatatcagcagctggaggtgttgctgatgctcttaaagctgttgacctgtatctggagcaaaacaatcttca

SEQ ID NO: 42734 - DNA, 188 bp, Glycine max
aaagtgctttactcctctgtcaatatctccatcttactatgcttaaagctagtagaaatttcgtaattcatagtctctcaacgccgcatgttgttgaaggtcataatcctcggagacagcggggttggtaaaacatcactgatgaatcagtatgtgaatcgtaaatttagtaatcagtataaggcaac

SEQ ID NO: 42735 - DNA, 281 bp, Glycine max
attccgtcttatgctgtagacctgaacatgtcagcacttctgtggatgccgagtccttctttggcccgacatctcgccttgtctagaagcactttgcaactttatatttcatgttcatatttgatagttctgaacacgagcttgctatgcttgacttgatacaagtgtttgttgaaacattggacaaatgcttcagaaatgtatgtgagcttgatatcgtgttcaactatagtaagatgcataccatactagatgagatcattctcggaggccaggtgttg

SEQ ID NO: 42736 - DNA, 269 bp, Glycine max
gacccatttggtttagaaccaaatgttgcattgacagaacagggccttgtctctgtgtctgaaggttgcacctagctccaatcagttctatatttttgtcgtcaaatgtcgaatgcagccctacatacaattgcgcggaacaggactaatttgactcgttttcggctttgtattattgagcctcggactcctgactatctaacccatgaacccctggattctggttttggggctattgtagagcaatgcacggatcttcaacgcctatc

SEQ ID NO: 42737 - DNA, 279 bp, Glycine max
aaaggggtggctctgatgatgatagcaatgagaataacaacaacaacaataacggaagcagtggcaagattgtgaattctaatgaggggcagagcaagcccaagcgccagatgaaaaccccttttcagcttgaaaccctcgagaaggcttatgctgtggataattacccttcggagacgatgagggtggagctgtctgagaaattggggttgtcagatcgacagcttcagatgtggttctgccacaggaggttgaaggacaagaaggacttgccgtcta

SEQ ID NO: 42738 - DNA, 260 bp, Glycine max
caagggtttaacccttctggctgtgtgaatatgcgtttcaggactgtcactggagtccttctgtttcgggggaagtgcaaaataatggcgctgttatgaacttctacaaggaatcattccctcaggctgaagacatcatcacagaacaagtcaaggcttctctacaagcggcacaagaacactgctttctcctggctcaggaacatcttccatgactgtgctgttcagagttgtgatgcttcactgttgctggactccac

SEQ ID NO: 42739 - DNA, 267 bp, Glycine max
caccattgttgttcctttcaagatcacttgcacagaacaaaacaagggtgaagtctataaactttctcctgcttctgtctctactagcctttgttccctcctgtcactgcaaaaagaaaataggaggttacctctaccctcaattttacgacggttcatgccccagagctcaagagattgtccaatccatcgttgccaaggctgtggcaaaagaaccccgcatggctgcttcgttgctcagactacatttccatgattgttttgtca

SEQ ID NO: 42740 - DNA, 257 bp, Glycine max
ctcgagccgctcgagccgggagtggtgaagtgggaaagcaagatgataagaaccaagcactcttctaatcctacatttacgcatggcagcacattcggtatttatgaagtgttgactggaagatcatatatctgtgatgtcgtcactgattccgtggtattctgcatttttcttgaagctgataagataagatcatgtctcaaagcagatcctttgacggaaaaattcctgtgggaggaaagtgctattttcctttc

SEQ ID NO: 42741 - DNA, 215 bp, Glycine max
gaaagagaacaatggcaaagttaataaaattgctttgagttcaacacaggggccaagattccttctgttgcgttaggcacttggccagctgagcctggtgttgtacccaaagctgtcaccacagccattctggctggataccgtgctattgatcgtgctcaagcgtatcacaatcaagcagagattggttctgctcttaagaagctttttgatga

SEQ ID NO: 42742 - DNA, 255 bp, Glycine max
cggctcgaggtactaattcaatgtaccctccaattcatcagtgtcacaacggccacacactgcgttccacgtgtaaaacaagggtgcacaaccgatgtcccacttgtagacaagagcttggagatattaggtgtctggcactggagaaggtggctgaatcacttgagttaccttgcaagtactactctcttggatgtccagaaatctttccatactacagcaagctcaagcatgagacagtatgtaattttagac

SEQ ID NO: 42743 - DNA, 253 bp, Glycine max
gcggaattgattgattccgttctcgatgttgtgcgcaaggaggctgagaactgcgattgcttgcaaggttttcaagtgtgccattccctggggggaggaactggatcaggaatgggaaccttgttgatttctaagatcagggaagagtacccagatagaatgatgcttactttctctgttttcccatctccaaaggtttcagacactgttgtggaaccctacaatgctactctctctgttcaccagcttgttg

SEQ ID NO: 42744 - DNA, 277 bp, Glycine max
caaaattattagatggatcttccaagtttgtgctcacttatgaagacaaggaaggagattggatgcttgttggggatgttccctgggggtaagtaattggtccacaaacatcaatttttttttagcatcaaatatgcgatgttaaaactgatactgcagtacaaaaatgtgttgccaattaattgtcaaatagtacatgtaatgttttcatcaggcaataaagagattggtaaaaatatttggtgctatactctaaaagctacatgtcaaatattgg

SEQ ID NO: 42745 - DNA, 273 bp, Glycine max
  unsure (1)..(273): unsure at all n locations
atctcggaattcggtccgagtgcgtatatgtatgtgtgtatactctctcaagtacgcacatatatacacatccattcgtacataaatagttatttctattgttcctgcgatgttaattcacataattgctagctgcgtctggtantggatcggatgagtagataacgagtctcctaggatcaggtagcggtccttcagagcttcgcaagttgaaatatgatggttccagcacaggtcaagctccttgtgagagacagtgaagtaattttatag

SEQ ID NO: 42746 - DNA, 274 bp, Glycine max
aggaagttgaggggaagtgggttgttaaaggagcagttgatgtagacattggtgcaaacccttctgctaagggtggaggagaagatgagggagttgatgatgcagctgttaaggttgttgacattgttgacacattcagacttcaggagcaacccgcattcgataagaagcagtttgttaccttcatgaagaggtttatcaagaatttgactcccaagctcgatgcagagcaacaggagttgtttaagaagcacatcgagggagcaactaaata

SEQ ID NO: 42747 - DNA, 270 bp, Glycine max
tctagctctaccacttaataataatatctttagacgttgattcatatatatctagctttctagctccatcatgaagactggaaacagatttgtggggatagctcatgccaagcagaaacttcagagaacactttcacaaagaatcaaaatggcttcagctgttgctgatgttccaaaaggccacttggcagtgtacgttggagagaaccataagagcgttgtgatcccaatatcttacctaagccaccctttattcagagactcgttgga

SEQ ID NO: 42748 - DNA, 284 bp, Glycine max
tgcgaattcggctctagggaacgcgcaaacttcaggaggataaggtggaagaatcagaagtagagctttttgaggtttatgatgtggtcctatacatgggcataattgatatattgctgagactccaagaacatgcagtctagagaaatttgtttgaatagggattctcgtaattttttatccatatgaaattcatattttagatcaagatctttcaatgttgtattgctattaattttatctttgtctgtatatcttccttgagtagaccccttcagatcata

SEQ ID NO: 42749 - DNA, 276 bp, Glycine max
aattcggctcgaaggacacttggattgtgagtgccagtgatgatcagaccattcgcatttggaactggcagtcacgtacctgtatatctgtattaactgggcacaatcactatgttatgtgtaattcattccatccaaaagatgataatgttaagtcatcttccctggatcaaactgttcgtgtttgggatattggttctctcaaaaggaaggccgggcctgctgcagatgacatcctacgattgagtcaaatgaacacagatctttttggaggtg

SEQ ID NO: 42750 - DNA, 267 bp, Glycine max
tcgaatcatgtgtgtttcataatcatatgaagctctgccggtttcacaattaacccgacaagtacataatgtactttttgatgtgatcttgacttgcgggacagagctgccctcgagaaaatattttcaaccgtaaagtttgatgccgtcatacattttgctgggcttaaagcagtgggtgaaagcgtgaagaaaccactgctctactttgacaacaatttgatagggacaatcgttctatttgaagtcatggctgcccacggatgc

SEQ ID NO: 42751 - DNA, 260 bp, Glycine max
cctcgagccgaatcggctcgaggccaaaccaaaattgaaagctctgacattgggataaagtgcgtgcgacctcagaccgtgctactgtgtgggaccagatcaaatcaagctcctttcagttaaatgaggacatgatggaatcgttgtttggatgcaaagccacgaattttacccccaaagaacctcccagaaagaaatcagttcttccttctgttgatcaggagaacagggtgttagacccgaagaagtcacagaacata

SEQ ID NO: 42752 - DNA, 263 bp, Glycine max
ctgggttacaagagcatactgccacaaggttcttcgtctctcagctgctactcaggatttaccaaagtctgtaatttgcaatgttcatggtgtgaatcccaaattcttgaaaattggagaaaagattgctgcagagagggagctagggcagaaagcctttacaaaaggggcgtatttcttgggaaagatggtgtgggcaaagggatacaaggagtgccccatttgtatcccgggaagttttcgaaagcaagacggagtataat

SEQ ID NO: 42753 - DNA, 253 bp, Glycine max
ggctcgagcggctcgagctcgagccgattcggctcgagtgattatgttgataagaagatatatgctcttggaacgaagaactggaatctcaaaaggagaagaaaaagaagctgctaagaaggagttcatagaagcccttaaattgttggaggaacagctgggagacaagacttattttggaggagacaatctaggttttgtggatatagcgcttgttccattctacacttggttcaaagcctatgagactttt

SEQ ID NO: 42754 - DNA, 264 bp, Glycine max
gacgaagagcaccatttcgagtccaaggccgacgccggagcctccaaaacctaccctcagcaagccggtaccatccgcaagaacggctacatcgtcatcaaaggccgcccctgcacggttgtggacatttcgacttccaaaactggaaagcacggtcacgctaagtgtcactttgttggaattgatattttcactgccaagacacttgaggatattgtgccctcttctcacaactgtgcatgttcctcatgtcaatcgtactga

SEQ ID NO: 42755 - DNA, 271 bp, Glycine max
atgattgttaccatgatacagtccaccagtttgcaccaacctatcacgaatatgttctgtataatcacagcgaaggtgaggagggaactaagaagtacaggtcacgaacttttgttccaattggcccagagatggattctgtgagaagaaataaacatatgtttggaaacaagttagatgacatacagctctcaagtttgtcttattctaccagtagcactccttcaaattctggttccatgcctgatgcttcaaattctgatgcaactaa

SEQ ID NO: 42756 - DNA, 257 bp, Glycine max
ccaagattgacaggcgatccggcaaagagcttgagaaggagcccaagtttttgaagaacggtgatgctggttttggtaagatgattccaaccagacccatggttgttgaaactttctccgagtatcctccacttggtaggtttgctgttagggacatgcgtcaaactgttgctgtgggagtcatcaagaacgttgagaagaaggatcctaccggagccaaggtcaccaaggctgcccagaagaagaagtgaatcgtg

SEQ ID NO: 42757 - DNA, 257 bp, Glycine max
tgaaggggatgctctccatggtcaatgcgggacccatcaccaacggctcccagtgcttcatcactaccacccgcatccctcactttgacggaaagcacgtcgtgttcggtaaggttctgaaagggattggcatcgttcgtgccgcggatcatgttgttcccggggaaaacgaccgtcccactcaggatgttgtgatagttaattgtggggatattgctgaatgggaagattatggagttgttaacttctttaaggat

SEQ ID NO: 42758 - DNA, 263 bp, Glycine max
tgggaagctggatgggtggttcttccagatggttctactttcccatcaagatctcagggtcaaaagccagctggtggtaattctacaattgtcacttcatcatcttcccttgcggcttcacaacagactccatctgcttctctcaggggagttgcttctggctataggagccctttagagtataatgcatgtcaaacaaaaggtgtttttatgcctactccgtctccttatgatctatcctcaagttcccggtctcaaacatc

SEQ ID NO: 42759 - DNA, 260 bp, Glycine max
actcgagccgaatcggctcgaggccggaggtatcagatacgttatttacatggccggacttgacagctaaactaaatagtgagctactgaataatttgggcaactttatcaaccgagttttgagttttattgccaaacctgcagggcaaggatatgattccattatcccctctgttcctgataatgtaagtggtgactcccatggtccgaccaaaaagttggctgataaagttgctgcatatatagaccaatacatagaa

SEQ ID NO: 42760 - DNA, 275 bp, Glycine max
caaaagagaagcctcgttggagaatgatttggcaaatatgtgggttcttgtggctaagttaaagaaagaagggggtgccgtcccagaatcaaacatcaatataaaaaaagttgatgaggaagcacatacaaatgatctgaaaactaatggcattgaaagtgatattgtccccaaggagcagattttagatgtatcaataccagaaaatgaaatagccaatgaagaccctttggttgttcgacttaaggcacgcatgaaagagatgagggataaag

SEQ ID NO: 42761 - DNA, 278 bp, Glycine max
gtaaggtacctctgtattggggaataactgctgatggctacgtagcatttgctgatgatgcagaattgcttaatggtgcttgtggcaagtcacttgcttctttccctcaaggatgtttctactctacagctgttggaggattgatgtgctatgagaatcctaaaaataagattactgcagttcctggtaatgaggaggaaatctggggagccactttcaaggtgacaaaatgtaacctaggattcccatcttgtgatgtcacggttcataaattctca

SEQ ID NO: 42762 - DNA, 270 bp, Glycine max
ccgctcgaggcaagcccactcaaccaccacactcctcctcgttcacgctacccctttctgctcttcttctacctttcaagttttaaaagtataaagatggcagagacattcctatttacctcagagtcggtgaacgagggacaccctgacaagctctgcgaccaaatctccgatgctgtcctcgacgcttgcctcgagcaggaccagacagcaaagttgcctgcgaaacatgcaccaaaaccaacttggtcatggtcttcggagaaatca

SEQ ID NO: 42763 - DNA, 269 bp, Glycine max
  unsure (1)..(269): unsure at all n locations
gcgtgtccttccacattggtagcggcggaccancacgcgagcctacgacggagccatatccgccgctaaaaacgtattcgaaatggcttctgggctcggcttgcccagaatgcgcgttctggacatcggaggcggcttcacctctgggccgccgtttgaagccgcggcattgaaaataaacgctgcgattcaggccagcttcgggaacgaggaagggctcgtggttattggcgaaccgggtcgttacttcgctgaaacggctttcacgt

SEQ ID NO: 42764 - DNA, 271 bp, Glycine max
gcagggtctactgagtggctacaaatgaaccacctttggggtgcaaattggtgcattattggaggacctttaagaggaccattctcagtgaaattgagctcctccactgggagaagcctctctgcaagagatgttattccaactaattgggttccaaaggccacttacacctctcgcctaaatttctacccctaatcacatccttggtgcaattggtacaagtactagtacacccagggctttttcccaaagggggtaactaatatttaat

SEQ ID NO: 42765 - DNA, 263 bp, Glycine max
cgatcgtatatgttttactcatcatccaagctctgttatatgctcttcaaagtacaatttggagtctactggagaatcattgcagtatttatcaatttatgataatcgctgcctacgatacttcaaagggcataaacagagagttgtttctctctgcatgtctccaatcaatgatagcttcatgtctggttctctagaccacagtgttaggatatgggatcttcgggtaaatgcttgccagttgagctcaaggtttaaaaatg

SEQ ID NO: 42766 - DNA, 227 bp, Glycine max
tctcgagccggcgtctaacaccaagagcaaagcactgtttgattcagaagaagctttgatgatcgttaaggaactgagagtaacgtttgattgtggtaagactcggagctatgaatggagaatttcccagttgaaggcgattatcaagttaactgaagaaaacgagcaacagatttatcaagctcttcactccgatttatgtaagtgtgaaaccgaagcctttgtgc

SEQ ID NO: 42767 - DNA, 263 bp, Glycine max
tacggggctacccgctgagtttaagcatatcaataagcggaggaaaaaaatgaagttccaagttatagagcttctctttggtaaaagcaccccaaaacaaatgatcccaaaagtgactttgcttgcagtgtttgccgtactgttattcactgtcacaccactttcctaccctttgtttagatactcctcttcatcatcatctttgaagagcaataagcatttatccaagaaaccatcatcagcatttgatgatctgaatgagt

SEQ ID NO: 42768 - DNA, 222 bp, Glycine max
caaaaactcacactctctctctctctcttcaaatcaaaacccctcacaaaattcacaaccacatacactctggtcccaaatcgtgtcttctcatataaaagaagccttctttcgaatccttcccgctctctgtctctcttattcttgttcgctatccgattcaattcgcgcgcagttccaaacactagtccccctgtccgaggtctgatttcacaccccacg

SEQ ID NO: 42769 - DNA, 255 bp, Glycine max
cgtccaacagctactccaaggtcaacgacgtgttcttgaacttcagaggagaagacacgcgcaagactttcgtgtctcatctgtatgctgccctctctaatgcaggaatcaacactttcatcgatcacaagcttgcaagggaacggagttgggagaggaactgttagcagtcataaaagggtctcggatatccatcgtcgttttctcggctaactatgcttcatcaacttggtgtcttcatgagctggtcgaaat

SEQ ID NO: 42770 - DNA, 246 bp, Glycine max
cggctcgggtggtcccagaagggtggtgttgctgcatacgttgatgagcgtgcttacatagagactctcctttcaagccggtgtgattatagcattgtaggtcaagagtttaccagaaatggttgggatttgcctttcctcgagactcaccgttagcagttgacctttcgactgcaatattagagttggcagagaatggagacttgcaaaggatccatgacaaatggcctttgcagcagtgcttgc

SEQ ID NO: 42771 - DNA, 254 bp, Glycine max
cttaagctcctcattagtgctgcaccttgcagatctaattccatctcctcaagcactcgctgacgctgtcacgatcacaactgtgtcacctccagtatcgtgatatcgatgttagttaggaaagactggtggtaacttgtacgacgcgacagacatggctccgtcagtcaagctgagtcaccgctgcgtagatgcactggatggatggtcatattctcacatctgttggaatctcattgtacagaaagcttgat

SEQ ID NO: 42772 - DNA, 166 bp, Glycine max
tgtggatatgaaggtcaaggttaaagacaatccaaacctggatgaatgtgttttccacatcgttcttgatggttataatgcccctgtaactgctggaaattttgttgatttggtagaaaggcacttctatgatggcatggaaatccaaagagcggatgggtttgtt

SEQ ID NO: 42773 - DNA, 265 bp, Glycine max
ccccactttaccaactcctaccaatttctctctgtctccttcttcagcgcatcaatggcgccggtcggcgctctcctcggcatgtggcaccctctcctcgacatcgctgccgtcgtcgacgacgctttcttgcaaaaatacggtatcaagttgaacgatgcgagtctcgctgaggataagcagaaacctatgtatgacgaattggctaacaatcctaatgtggagtacattgctggaggtgctacgcagaattcaatcagggttg

SEQ ID NO: 42774 - DNA, 268 bp, Glycine max
gaggcagtgcatctttacctattgtggtcactgtggtttcactactgtgccttttggtctcttttggaacgtgctgatgcagcaacttacaccgttggaggacctgggggatggaccttcaacactaatgcttggcccaaaggaaaaagattcagagctggtgatatcctaagtaagtaaatttaattagtactccactccttgtatgtcacttcaaaaattaatgttagtaacacattttttttataagtctatctttttatacttt

SEQ ID NO: 42775 - DNA, 265 bp, Glycine max
ctcatgatgaattatgcctttggtggtaacttggaagacaaagcatattccactgatgccttctattttagaacacaagccaaggttgaagagttgctaaaggaatatgaaaatgtttgcaccctaagaatccaattgccagtgtcatctgatctcagcaacccacataacttgatcactatgataacaaggtctgataaagtggccaacattccaaacagcatcactgttttggatgaactcgtaccaatttcaattgagatgg

SEQ ID NO: 42776 - DNA, 269 bp, Glycine max
ctccttggagaatcctaagagtgttctacttctatattaaaatcctacccatcaatggcagattatcagaaatcaggcctttacaaatgggctggtgatgcagagaattttgacaaagagggtccttatattgagcttgttacttctcccaataaccctgatggacatagaagggaagctatggtcaaccgaagccaaggactattgattcatgaccttgcctattattggcctcaatacactccaatatcatccccttcagatcatga

SEQ ID NO: 42777 - DNA, 266 bp, Glycine max
cgccgccggcaatgctaggtttccggtgacgatgctcccctacgcttcgatcccggaggccgtgtcggcgctgggccgcaacctcagcttcgcggagagcctctggttcaactagtccgccgccaagtccgattacttcctctattgcacaaacattctgttcctcttcctcgtctgctccctcgtccccctacccctcgtcttcctcgaattcaagcgcttctccttcgtctcttcccacaagatcgaagcaaaagtccgcttgt

SEQ ID NO: 42778 - DNA, 269 bp, Glycine max
gaacagtgtaagtgtatacagagagtgcttgagaaaccatgcagccagcctcggaagctacgccacggacgggtgcggcgagttcacggtggacggcgcggggggactacaatgcgcggcgtgcggctgccaccgcaacttccaccggaaagtgaagtacccggtggcggacatgaggagtatggaggcaagaagcggttcaggtccaagttcacggcagatcagaaggagaagatgctggggtttgcggagaagcttggttggaagct

SEQ ID NO: 42779 - DNA, 255 bp, Glycine max
cggctcgagtaaacttgatgccaaaactgcaaaagcgttcaaagagaagattgagtgatgagtatcgagtgaacatgtatggcattcagtaattgtcatgtattttcctgccacttttctgctgcaatcttgatatcttataatggacctaccttttacttgcaggatccttgataaccttcctctggttgttcccataaaaccgatggatgcagactctactgtttatcaacttggtttccatgttggactcaa

SEQ ID NO: 42780 - DNA, 265 bp, Glycine max
gctaggtagtccaaccactgaatcttgggcagatggactcaaacttgccagggggatcaactatcagtttccacagcttgctggttataatctctctacactgatcccatccagaagcgatgatgcaatcagccttgtgacgtcactttgttcatgggatccctgcaagagaccaactgcagcagaggttcttcaacatcctttttttcagagttgcttttacatccctccatcccttcgcaccagagctgtaaccagaactcca

SEQ ID NO: 42781 - DNA, 256 bp, Glycine max
caaccacatgtcacactacacaactgtgatcttccgcaggcacttgaggatgaatatggaggatgggttagtcgtgatatcataagacacttcacaaactatgcagatgtgtgttttagagagtttggtgatagagtccagtactggactactgtgaatgatcccaatgcctttgccttgggtggctatgatcaaggaacctcccctcctcagcgatgttctcccccattttgcactacaaacagcactaggggca

SEQ ID NO: 42782 - DNA, 248 bp, Glycine max
ctgacccttctagtgttgcttctttggttgagtttgttaagatcaagtttgggagacttgatatcttcgtgaacaatgcaggaataagtggattcaatacagatggcatggtgccatccaaaattaattggaaggagttacctcaaacttatgagatggcagaaaaatgcctaacaacaaactactatggtgctaaggaaacaactgaggcatttattccccttcttcagttatccaatttacccatg

SEQ ID NO: 42783 - DNA, 258 bp, Glycine max
ccgctcgagcggctcgagcgagaagaaaacatcattctcacaggaggaatatagacttaagaagcagaagaaatatgcaccaaaagtacttatgaggcgtcctgttgctcgaagtatatgtgaggcctattttaagaagtatccatctaaaattggattcttgcgggtggacacattgtcccttctactttccatgggtaatgtttcttcaaattctgacattcttgtagttgatatggttggtggccttcttactgg

SEQ ID NO: 42784 - DNA, 257 bp, Glycine max
gcttcttcgtggtcttgagcattgtcacagtcgtggtgttatgcggggtgacatcaagggctcaaatcttctgcttgacagtaatggcaatctgaagattggtgattttgggcttgcagctttgtttcagccatctcatgggcagcctttaactagtcgtgtcgtaaccttgtggtaccgaccacctgaacttttgcttggagctacagattatggagttactgtggatttgtggagtgctggatgtattctggcag

SEQ ID NO: 42785 - DNA, 276 bp, Glycine max
tgcagtacgactagcaaagttagcagttgataaggtcttggatgcactgtgtgatacatcagttttatatcccaaacacggaaatctgcactgttttgcagcagtgacaccttgtgccatgctagacattctcacacctccttacagagaagaggaaggaaggagttgtacttattatcatgattatccttattcagcattcttagctggaaatgcacctatacgtgacggggaagaggaggaatatgtgtggctcgcagagttagaatcacctag

SEQ ID NO: 42786 - DNA, 273 bp, Glycine max
atgaggttcaatgattggttttgctgctgttaataatgcagttacagttgaagaagtggaggcattgcatgtgctgtttaaaaggttaagtagctccctgattgatgatgactcgattcacaaggaggagcttcaattggcactgtttcagaccccatatgggaaaaatcttttcctagatcgagtttttgatgttttcgaccaaaaaagaaacggtgtaatcgagtttgacgaatttgtccacgccctcagtgttttccatccatatgcccc

SEQ ID NO: 42787 - DNA, 264 bp, Glycine max
ctcgagccgctgttttgctgctttagtctattctgcaaatactagttttgattctctgctggagtcactacttgcctgtgctaagccttctccacaggctggtggcattgctaaacaagctctggattcgataggtcagtgtgttgctgttctatgccttgctgctggtgatgagaagtgtgcatctacagtgaaaatgctcactgacattctcaaggatgacagcagttctaactccgctaagcagcaccttgcaattttatg

SEQ ID NO: 42788 - DNA, 264 bp, Glycine max
gcgagaatggtgagttctccttctttctccgacgagagtgagacctatttgttgtttatgaatgttgaatatgcattttgcaggcagacgttgaggttgatgcggcggcagcggcaggggcagcgcagccgaagaagagaacgttcaagaaattcagcttcaggggcgtggatctggacgcgcttctggacatgtccaccgacgaactggtgaagatgttcagtgcgcgtgcacgtagaaggttccagagaggtctgacgagga

SEQ ID NO: 42789 - DNA, 260 bp, Glycine max
ctgcttcaaggaaggagagcttgttattctctatcaacaaggaaaatgtcaggtgaagaggttgttgttgcagctgagccagctgctgccatcccaggcgagcctatggatatcatgactgccttgcaacttgtgctcagaaaatctctggcttatggtggtcttgcacgaggccttcacgaaggggcaaaagtgattgagaagcatgctgcacaactctgtgttctagcagaagactgtgaccagcctgactatgttaa

SEQ ID NO: 42790 - DNA, 258 bp, Glycine max
ggtgtggactgtggagtaggatgtttctcaattatgtctttttgggcttgtttgacaggttgggcttggagatacttctggtggtgacagtccgaatgatcactattgctggatgcgtccggaggacatggactatgaccgccctgtgactgaatgccacagttgttccgatctcgcggctgagatggctgctgccttggcttctgcttccattgttttcaaggacaacaaggcctattccaagaaactggtgcatgg

SEQ ID NO: 42791 - DNA, 255 bp, Glycine max
tctcgagcctgaaaatttgagtcactctgtaacgattcctgttgctactgataatgtggagatactccaaagaatagtaaagcagttgattggatgtttttacatagatgtgaatgagattcgacgtattggcttgcatgtttccatgcttgaaagtgcagaagcttctaaacaaggtacagtccaatacactttgaaatcatggctcacttctcgatatgtcagtattgaaaatctcgcatatcctatgggtca

SEQ ID NO: 42792 - DNA, 260 bp, Glycine max
tgggcctttacattttgatctgaatactggtgcaaagattccatcggttggtcttggaacatggaaagctcctccaggtgttgtgggtgatgctgttattgctgcagtcaaggctggttacaggcatatagattgtgctaggatatatgataatgaaaaagaggtaggggaggctctgaaaacactattttctactggggtagtacagcgtagtgagatgttcatcacatcaaagctatggatcagtgactgtgcacctg

SEQ ID NO: 42793 - DNA, 226 bp, Glycine max
  unsure (1)..(226): unsure at all n locations
ctcgagccgtctggatgggattattcttgacggggcacctgttaaggtcaggagacctactcattatagtccttccttagctgctaccctaggctcaagccaacctagccctagccttaatctgggtgctgctggctcacgactgngtcggcaggtgacatgatggtctgatcggattncaatngatgactcatatacttactgaacacagtcaggagtttagagc

SEQ ID NO: 42794 - DNA, 233 bp, Glycine max
ctcgagccgatagtgctgcaatggcttcaagtcaggaggaggtgaaccttttcgggagctactgcgaagcccatttgtgctgcagggttcatattcgccctcaagttgcaagggagttcaatacaaatatgtccaagacaatttgaggaacaagagtgaactgcttctcaagtccaacccagttcacaagaaggttccagtggttattccacatgaggagcccatagcagagt

SEQ ID NO: 42795 - DNA, 292 bp, Glycine max
ggagtgtggactttaaaagggtactctataagtttgttgcttgtgatatttgtactttgttcatgtgctgtggtgtgtgttgttgttgagagagtttgagaaagaataatgggaagaacaccatgttgtgacaagaagggtttgaagaaaggaccttggacagctgaagaggatgaaattctttctagttatatcaagaaaaatggtggtcatggaagctggcgttctcttccaaggatggcaggtcttcttcgttgtggcaagagttgcaggcttaggtggacaaactatc

SEQ ID NO: 42796 - DNA, 286 bp, Glycine max
gttcctcctccaacagcacaagcatctatgatgccatttccccatgtacagttcactcaacctgctacactagtaaagccaatgggtcaagctgccccttccgaacctagcttgcatagctctcctgctagagaagaaggtgaagtacctgaatcagaattagacccagatacaaggcgtagcgttctcatattgcaacatggacaagacaccagggatcatgcatctgctgagcctccatttcctgttagacatcctgtgcaaacctctgctcctcatgttccat

SEQ ID NO: 42797 - DNA, 274 bp, Glycine max
cctttcttcaatcgaaaaaaactgcaaccctaacgagattgagagaagatgtcaggctgggacgaaggagccgtctactacagcgaccaagcgctcgccggcgacgacggttcccgtgcccgcggtgaagccggcaccgattcgaaccactctctcatccagaaattcaaggaattcatccgaaacttcgagaccaccaacaatgtcttgccttacagggagagtctcctccataaccctaagttccttctcgtcgatctgggagatctcgaca

SEQ ID NO: 42798 - DNA, 278 bp, Glycine max
gctgcaatggcttcaagtcaggaggaggtgacccttttaggagctactggaagcccatttgtatgcacggttcatattgccctcaagttgaagggagttcaatacaaatatgtcgaagaaaatttgaggaacaagagtgaactgcttctcaaatccaacccagtgtcacaagaagaattccaagtgtttattacacaatgcagaagtccatcagcagagtctcttgtggatggtcgaatacattgatgagacatggaagaacaatcccatcttgcctt

SEQ ID NO: 42799 - DNA, 269 bp, Glycine max
cctcgagccgaatcggctcgagcggctcgagaaagggagtagtgacccacgtgctcctagacaagttcaaggacgacgtcactccagagcggattgaagagctcatcaaggactatgccaatctggtcaatctcatcccacccatgaagtcattccattggggcaaggatgtaagtgctgaaaacctgcatcaaggcttcactcatgtctttgaatcaacctttgagagtccagaaggcgttgcagagtatgtagctcatcctgcccat

SEQ ID NO: 42800 - DNA, 268 bp, Glycine max
gaataacctaggggcaacccggtctattcggttttcttctgatggtcaatatatggtggttgctgagcctgcagattttgtgcatgtttatagcacaaaggcagactacagaaaacgtcaagaaattgatttctttggggaaatttctggggtttctctgagccctgatgatgagtgtatatatattggaatctgggaccggacttatgcaagcttgcttcagtatcatagggaagcaccaatataaatatcttgatgcatactgatg

SEQ ID NO: 42801 - DNA, 263 bp, Glycine max
gtttctcactctctctcatgttcactcaacaacaacgacgcactcactgacatcaacactagtttcaggtgctatctcatccaccaaatgcagcaaatacactccatgcccggagggaggtttttctccggctccggatccgccgaccggaggctccgaccccaccatcagaaccagcaggccttaaagtgcccccgctgcgactctctcaacaccaagttctgctactacaacaactacaacctctcccagccccgccactt

SEQ ID NO: 42802 - DNA, 273 bp, Glycine max
tttttctataacaaccccttgctttctttcatccaatatgttattggaccttacacagatgatcttggagatgtattaccttatgcagtggaaggtgttggagttcctgttgatccacttgcatttgctgggcttttagggatggtggtgacttctttgaacatgttgccgtttgggaggctagaaggaggtcgcattgctcaagccatgtttggaagaagcactgccatgctgttatcgtttgccacttcattgttactcggtgttggtggg

SEQ ID NO: 42803 - DNA, 217 bp, Glycine max
cctcgagccgaatcggctcgagattcgcaccgcaaacagtgagccatggccgtcggaaagaacaagcgcatctccaaggggacgaagggtggcaagaagaatgcagctgatccctttgccaagaaggattggtatgacattaaggctccttctgtttttcaagtgaaaaatgttggcaaaaccctcgtctctcgtactcagggtaccaagattgctt

SEQ ID NO: 42804 - DNA, 261 bp, Glycine max
gaatgccatctcttgttccagttgcttctacgaagcctcgtattggacgatcaggctacaacaaaagccaaggcccttttcacggcttgtctatcacattcttcatctctaagaggttcatacatgaaggtatgagtaacaatgccaatgattccaccttgctttgcctgaaagtgcttgcggtataattcaacagccttggcatgcgacagtatcatattgtgcacggcaatgagaggctcaacatcagagttaccagta

SEQ ID NO: 42805 - DNA, 258 bp, Glycine max
aaacactgtgtcccttctctcaagtgcacatccttcgaaaccgctgcggctcacacgtggcgctcttggattcgatcactaaaccaatccctaccctccaaactcatcgtgaagctccttttctcagtcaacgttagagcaatagttgaccttccacaaggttattacggaaacgggtttttgctagcgtgcgctgatagcaccgtagaggagttagtggagggtaacttgcgccacggtgtgaagcttgtgcaggaa

SEQ ID NO: 42806 - DNA, 253 bp, Glycine max
ctcgagcgaatcggctcgagcaggaagtgttcatgatgcatgctgatgctgtgcttactgtagactttagcagagattcagaaatgcttgcatctgggtctcaagatggaaagattaaagtctgccgtattaggactggtcagtgcttacggcgtcttgaacgtgctcattctcaaggtgtcacaagtgtttccttctcccgtgatggaagccagttatcaagcacttcatttgacagcacagcaagaattca

SEQ ID NO: 42807 - DNA, 260 bp, Glycine max
tcggggattcaaaaacagtgatacaactcaaaaaagagaagtgattgatgcaattgaaaagccaaacataaacaagccaaatgctgttcaggataatgcttctcagcacctccttaccttgcgtcaggaaattttggctcataaaaggaaggcagttactttgaaaagagaagggaaactaacagaagctaaggaggaactccggcaggccaagctgttggagaagggcttggaggatggaagtatgcagccagacactg

SEQ ID NO: 42808 - DNA, 255 bp, Glycine max
gagcgaatcggctcgagagaaagcactctacatacttgacgtgttgtcaacactaccagagggaagaatggctatgaaggagtgtccaaatatcattcccaatgtggtgaagttgctgatgagagtctcagagaggtgcacacaatttgcattgtcaatattgtgggctatttacaagcttgcccctgaagagtgtgcctccaaggctgtggaggctggattggcagcaaagcttctgttggtgattcagagtgg

SEQ ID NO: 42809 - DNA, 261 bp, Glycine max
gtggagattgcggactatatagttcttaaaaaaattattcttgttttgttttgtattattttgttttgtaagattgttagatacatgttcagtcttctcaaagaagagaaagaaccaatcacaatattagtcaccggtgcagcaggccaaattggatatgctcttgttccaatgattgcaagaggggcaatgttgggcccaaatcaacctatgattctacacatgcttgacattgaaccggcaacagaatccttaaaaggg

SEQ ID NO: 42810 - DNA, 265 bp, Glycine max
gtaacaccgaatcttccaccttttccttcttctattgttgtctcaaaactctcttttcttcttctttgtttcttgtttccttcaattttaagttgcctgatatggcttcatataccccaaagaatatccttattactggggctgctggatttattgcgtctcatgttgcccaccggcttgtccggagctaccctgactacaatcttgtcgtgcttgacaaacttgattcttgttctaatctaaagaatctccttccttcaaaatc

SEQ ID NO: 42811 - DNA, 269 bp, Glycine max
caagaatgcgcacttcgttgcttggtgatgtccctttctgttctcttcactcttggtcttgcgagagaaagccatgccagagacgaagatttttggcatgctgtttggccaaacactcccattccaagttcattgcgagatcttctaaagcctggccctgcaagtgttgacatcgatgatcaccctatgcaaattgaagaaacacagtacccgaaaaccttcttctataaagaagaccttcatccaggcaaaacaatgaaagtacaatt

SEQ ID NO: 42812 - DNA, 265 bp, Glycine max
atctatgcttacctcttcctctgcatgatctttctctcttccgccactcccattctcggttgtggctactgtggcaaaccccccaaaaagcacaagcctggtaaaacaccaaagacacccaaaacacccgttgttaagccaccagtcaccatccctcccattaatgttcctcccgttgttcttccaccaatagtgaagcccccaggtattctccctccaattccaattattaacccaccaaccacaccagggaagggagggaaca

SEQ ID NO: 42813 - DNA, 263 bp, Glycine max
atgacatccagtcaagtagcaggaactcatcagcttccatacccatgacccctcggagcgagggagagatcttacaattttccaatttaaaaagctacagctacaatgagctaaaaatggccacaaaaaatttctgcccagatagtgtcctaggagagggtggatttggttcagttttcaagggctggattgatgaacattcgcttgctgttaccagacccggaacaggcatggttattgccgtgaagaaacttaaccaagac

SEQ ID NO: 42814 - DNA, 257 bp, Glycine max
caagaatggcacttcgttgcttggtgatgtccctttctgttctcttcactcttggtcttgcgagagaaagccatgccagagacgaagatttttggcatgctgtttggccaaacactcccattccaagttcattgcgagatcttctaaagcctggccctgcaagtgttgaaatcgatgatcaccctatgcaaattgaagaaacacagtacccgaaaaccttcttctataaagaagaccttcatccaggcaaaacaatg

SEQ ID NO: 42815 - DNA, 259 bp, Glycine max
gtcgagtttcacagcagcaatggtgtacgtcaaggctcagaaatcaaaagcctacttcaagagatatcaagtcaagttcaagagaagaagagagggaaaaaccgattaccgtgccaggattcggttgattaatcaggacaagaacaaatataacactccgaaataccgatttgttgttcgctttagcaacaaggacattgttgcacaaataatatctgctagcattgctggcgatattgttcttgctgcagcatatgca

SEQ ID NO: 42816 - DNA, 267 bp, Glycine max
cgggcgctcgcgctctctcaatctagccttctttctttttttcaatttccaaatcacgaaactcaagaagatggagaaagcgatcaacagacagaagattttgcttcatcatctcaacccttcatcatccacccaccccaacgaatcatcctccctccatgcttcagcatgtgtggcgggggatagcgctgcttatcaaaggacatcgacattcggggacgatgttgtgatcgtggctgcttatcggactgctcattgcaaagctaa

SEQ ID NO: 42817 - DNA, 259 bp, Glycine max
cgcactagctagtgctggatttaaagtttcacgttcaaagctagttgacatgatcagcaatggtgatgtgcgtatcaactggatccctgttactaccaaaggaaccacactcaagagtggagatattgtatcaattagtggcaagggaagattaaagataggagaaataaactccacaaagaaaggaaagtttgcagtggagctcattcggtatttgtagaagtttagagagttcagaagtactttcactctcaaagta

SEQ ID NO: 42818 - DNA, 280 bp, Glycine max
gcagctgaagcctatgacattgctgctattaaattcagaggatttaatgctgttacaaactttgatataacaagatatgacgtggaaagaattatggagagcaataaccttcttagtagtgaacaagctaagcggaaaagagagatggatgatggaactagaagcgaggctacagttaaccaaaaaccttgtactactcaagaaaccgttctgatgcagaaaagatgcagaagccaatcagaatggaagatggttcagtatccatcctcccaacagcttg

SEQ ID NO: 42819 - DNA, 269 bp, Glycine max
agggtttactattgttacaagaatcctgtggtatatatgctcaactacatgaatgtagcacatgtacgtgttttgattgaaacctcatcatcaagcatgtgtgggataacgaacaccaagcaattttacatcatctatgacgggtccacaaagcgaaccagagttatcactcttcatggtgtaaaatgtgcttaggaacctaagacgagtacgtgtgctacattcatgtagttgagcatatataccacaggattcttgtaataatagga

SEQ ID NO: 42820 - DNA, 272 bp, Glycine max
ggggtattgtaagtggcagagtggccttgctgccacgatccactgagattcagcccttgtcgctttggggggtcagagtgagaaagagaaagagagaattcgtaaaccctaatttcggaaagatcggcgatgactgcctccaaggatcgcgagaacttcgtctacatcgccaaactcgccgagcaggccgagcgttacgaagagatggtggaatcaatgaagaacgttgcgaatctcgacgttgaactgacggtggaggagcggaatttgct

SEQ ID NO: 42821 - DNA, 144 bp, Glycine max
attcccccacctggcactggacagagaatatatgagatagatccatctttgctagctcaccgtgaccatcttgatttccgttatggacaatacaaaagagtgtgttatgaaattgacaagcatgaaggcggtctggatacattt

SEQ ID NO: 42822 - DNA, 285 bp, Glycine max
tcttgaccagatggaagatcgccagcggaccagtcttactggtatatagactggttatctgactcactttagttatattagatgactgtaatttccatgaatctgttcgtcttgacagttttgatatagatagtactctatccctggtatcactcagatggtgaatttccagtcatgaactatcgtttgacacaggaatttaggcctccttatcgtattaatgctttgattgaagatgcagggtcacttaaggcagaagtaattcttaaagtaagtgctgagttt

SEQ ID NO: 42823 - DNA, 266 bp, Glycine max
gtgggatgataccaagaatatttgaccacttatttactagaattcaaaaggacaaagaggctcgaagagatgaaaagataaaatttacatccaaatgctctttcttggagatatacaatgaacagatccttgatcttttggacccatcatctaacaatctgcagataagagaagacagtaagaaaggagttactgtggaaaatcttacggaaacagaagtcacttatgctcgagaagtcattcaattacttattcagggagctgcg

SEQ ID NO: 42824 - DNA, 279 bp, Glycine max
cctcgagccgctcgagccgctcgagcggtcgaggtgcttggtgaccgggaagtggaaacaccttcatcaccgacaagcaactatcacacgacaccagcattgaagaatccccttgactatatgttggtatggtgttccaatgcaggaagtaaggaattgccaattggttctgcttacttttgggtgccccagcttcctgaaggttacagtgcccttggctatttggttactaatgtgcccgacaagcccaatttggatgaaatgatttgtgttcgtgct

SEQ ID NO: 42825 - DNA, 277 bp, Glycine max
atcctcttctctctctctctctctctctcttaattcctgaaaagcaagtaactaaggaaaagaaaacacaacacacacacaaaggaaaaaacagaaaaaccatgtcttctccaagcaagcggcgagagatggacttgatgaaactgatgatgagtgactacaaggtggagatgattaatgatggaatgcaagagttttatgtgcatttccatggacccaatgagagtccttatcatggaggtgtgtggaaagtgagggttgagctgccagatgctta

SEQ ID NO: 42826 - DNA, 306 bp, Glycine max
ccagaacaatggtttctctggtgatttccccattggattgtggtcattacccaaaattaagctcatcagagctgaaaacaacagattctcagggaagatacccgagtcagtttcaggagctggtcagttggagcaagttcaacttgacaacaacacctttgctggtaaaattcctcaaggtcttggccttgtcaagagcttatacagattttctgcttctctcaaccgtttctatggtgaacttcctccgaacttttgtgactctcctgttatgagcatagtgaatctctcccacaattctctttc

SEQ ID NO: 42827 - DNA, 151 bp, Glycine max
atagaaagcatctgctcaaatgaatgcaattacgcagggaaaattagcagatggcagagatgttgcagtcaagagactttcaagcagttctggacaaggaataactgagtttatgacagaagtcaaactatttgcgaagcttcaacatcga

SEQ ID NO: 42828 - DNA, 298 bp, Glycine max
gctacccagaacaagatccgagggtttttgctttcactgattctgagttgttgcacgaccagatcccatttgggaaaaaattggagatgcctcttttgacggcactgagagaaaggattctggaacttgccaacaattttgaagattttgttttaaaccttataccctctactgatcttgagcagccactgcatttggccaaagtagctattggacttgtcactttccctgtaaatggtgagatattgcttaagaactgttctatttgctgtgatgacaagccagtgccaattatgat

SEQ ID NO: 42829 - DNA, 274 bp, Glycine max
ctagcacataaaacatggtatagcagtaatctcataactcatttgaggctctgtgagaattgtgaaatggctaaagatgttgaggttcaagagcaaggaggagagtactctgccaaagactaccatgactgctctccagcacctttgttcgacccagaggagctcatctagtggtccttctatagagccctcatcgctgagttcatagcaacccttctacttcctttatgtcactgtgctcaccattattgtgctaaaaaggcagactgatact

SEQ ID NO: 42830 - DNA, 296 bp, Glycine max
gtaaactcaaactccggctccagctcagactactctactactgctacccaattcccgacacgcctcaactttcattcccttattggtggccttcttagaagattttgtccgttcatgtgtttcccaccctagtacccttgacatatttggctcacatcatggattatattttattatatcctgattttggtatgattacatcatatgcaggcagttcattccggtgcagatcttgaatctgctatttcaaattgtatgggctacaaatctgagggtcagggcttcatggtaggggt

SEQ ID NO: 42831 - DNA, 275 bp, Glycine max
ggcccctagaaaagtccatgcctagatttccaaggccatggaagatgaaagagggagtctcctactaccaaagaacatggaggagcaccacccagcacatgatcgtggaacacacgaaactatacaatccaagaagagggtgtgaatgtgtaagggcgttgttgtacatggtggcacagtgtgccggtgctatctgtggtactggattggccaaggggttccaaaaagcatactacaacaggtatggaggtggtgccaactctgttgctgatggc

SEQ ID NO: 42832 - DNA, 276 bp, Glycine max
gaagctccaacgtatataatcaacgctaacgacactcgtgcctaaccattaaaacacacactctctctcaccaaattcttattagaacgaaaaaagaaaagacaagacaaaagagcgatttttccctcaccaaagaagaaccaaaacaatggcggatcaactcaccgatgaacagatctccgagttcaaggaagccttcagcttgttcgataaggacggcgatggttgcatcacaaccaaggagcttggaactgttatgcgttcattggggcaaaa

SEQ ID NO: 42833 - DNA, 270 bp, Glycine max
gggggcccggaaagagttatcttttctgtttaacagcctgcccaccctggaaacggctctgctaatataggttcgtttgaagaacacactactggttttggttcaaaaatgatggctaaaatgggatacacggaaggagcaggattggggaaaaatggtcaaggtatggcacagcctattgaggttattcaaaggcctaaatcacttggtttaggtgtagaattctacaacaattcagctgagccagctaggaacaaatcttcaagagtt

SEQ ID NO: 42834 - DNA, 266 bp, Glycine max
cgcagattgtgagttcacttatttgtccacacagcaaaaaaaacacaaaggaatcgaaggaccaaaaacatcagacccgagcaaatatcctcgttacaggcataatagagtacatcttgagaatgcaattgttagggccagtgctgtgagcacactggcaaaatctggtgctgctgttgatgtgttaaagccccgcatatttgttctgctaaggcgatgtctttctgacagtgatgatgaggtccgtgatagggctacactttacc

SEQ ID NO: 42835 - DNA, 265 bp, Glycine max
ggcttttaaaacagtacctgataatcctttgcattaaccagatggcatcttcgctatttcgattgatggcagcatttggaagggatgttatagttgcaaacactgctggaagttttgcattacttatagttctggttttgggaggatttgtgatttcccgagagaatgtgcacaaatggtttctgtggggttactggtcctcaccactgatgtatggacagaatgctatagctgtgaatgaatttcttggtcatagttggagaaa

SEQ ID NO: 42836 - DNA, 266 bp, Glycine max
ctcgagccgagggactatgcaagaaaagtggtggaaaataaagcaagagatgaagctggaaacattctgatacgcatgacagataggtcctctactgttttcaatcatgataatgattcactacctagagtttggactgggaaggaagatgtcagagctattacaagggatgctcgctctgcgtcgctgaagcttctatcagatatggctgctatacgcttggatgagaagccagatcgcattgaaagtgcactttattcatctct

SEQ ID NO: 42837 - DNA, 259 bp, Glycine max
tctatctctagaactagaatggctgaccatgatgctaaagaagaacaaaggcccctcaatcaatggagtctgagcaaagggggattcatggcttccatgttcatttttgtcttctcagcattggacaacatgggctttgtggcaaacatggtaagcatagtcctatacttttatggagtcgtgcactttgatctagccagttcagccaacacactcacgaacttcatgggctcaacctacttgctttcccttgttggtg

SEQ ID NO: 42838 - DNA, 266 bp, Glycine max
ggggaacaaccacaacaacaaatttttcaattagctactatgagtaagatttggaataaatgaagcacatgactaggcaagagtacgttgcgtcattgagaaggaagagtagtgggttttctcgcggtgcatccatttatcgaggagtgacgagacacctccaacatggaaggtggcaagcgaggattggaagagttgctggcaacaaggatctttacttgggaacttttagcacccaagaagaggcagcggaagcatatgatgta

SEQ ID NO: 42839 - DNA, 274 bp, Glycine max
catcgagccgaatcggctcgaggaaggcagatcaaacaagtctcatatgacatttttatcagaccgattggaaagtaccatctcttcggtcttactttactaattggcctaaaacagtggagcctaggctttatgaggaaggcaaagaaaaagtggcagccatattcaagcaccagggttatgaggtgaaagagcttcttgaagaagacaatgagccatctatagattgcagtggcacaatgaaagtttggcgggtggatggtgatgaattgtc

SEQ ID NO: 42840 - DNA, 277 bp, Glycine max
caaacatgaaggacccagagaggaaccggctatgcaaaaccattgattgtcagaaactgtctcaagaagcatgcagccatgcagcacagaacgaaaggctaccggtgcagatggtggttcaagttctttacttcgagcaaatgaggcttcgcaatgccatgaatggagggcacaaccaactcttctttggtcagttccctcaccgttcagggagtggtgcagggagtggagccatttccccaagagataactatgcatctgttagaagagagaacag

SEQ ID NO: 42841 - DNA, 256 bp, Glycine max
aaacgcctttcttctccgtttccgtttcctcgttcgaattcgctttttgatctgcgaaaatgagagagtgcatctcgatccacattggtcaggctggtatccaggtcggaaatgcttgctgggagctctactgcctcgagcacggcatcgggcccgatgggcaaatgccaagtgacaagacagttggcggtggtgatgatgctttcaatactttcttcagcgagactggtgctggaaagcacgtgccacgtgcagt

SEQ ID NO: 42842 - DNA, 262 bp, Glycine max
cactgaactaacaaagcaaccctatgtcgaaggtggtttgtgtcaccggagccagcggcgccgtcggatcatgggtggtcctactcctcctccagcgtggttacaccgtccatgccaccgtccaagctatcaaggatgaaaatgagacgaaacatttggaggaaatggaaggagcaaagagtcatctccatttttttgaaatggatcttcttgacatcgactccattgccgctgccataaagggttgttccggcgtaatcca

SEQ ID NO: 42843 - DNA, 253 bp, Glycine max
ctcgttcccctgacggtgctgatggctatggccttgctcgcatctcttccttcttccccaaactcatgtggtctgagggattcacaattgttggatcccctcttgagcattttcgtcaactctggccccaagattaccacaaatactgtgatcccgtcaagcgctatgatgaagccatgaaaaagctagtgggaaagctgatgtggctgatgttggattctctgggtattacaaaggaagacctgaaatgggc

SEQ ID NO: 42844 - DNA, 250 bp, Glycine max
tgctagaaataataatatgggaggaaaagggtatgctctatggctcttcattattgaaatcctggtgcatttttccacatcaagaagtgccacagttccttcaataatagtgtttggagactcctctgtggactcaggtaacaacaacttcattccaaccattgcaaggagcaactttgagccttatggtcgtgactttttcaatggaaaccctactgggagattctccaatggacgcattgcccctgac

SEQ ID NO: 42845 - DNA, 268 bp, Glycine max
cacttcgttgcttggtgatgtccctttctgttctcttcactcttggtcttgcgagagaaagccatgccagagacgaagatttttggcatgctgttccgccaaacactcccattccaagttcattgcgagatcttctaaagcctacccctgcaagtgttgaaatcgatgatcaccctatgcaaattgaagaaacacagtacccgaaaaccttcttctataaagaagaccttcatccaggcaaaacaatgaaagtacaattcagcaagcc

SEQ ID NO: 42846 - DNA, 263 bp, Glycine max
gtccgtgctatcattatcagatcaactagacaagttcagcgaatacaaaaacaagataaaggaaacagttggagaaaatagaatggccacaataatatcaaaaagcatatacgtcttgtgcacaggaagtaatgacattgccaatacttactctctatcaccggttaggagagcacattatgacgttccagaatacacggacttaatggcttcacaagccacaaacttcttgcaggaactttatggactaggagctagaagaa

SEQ ID NO: 42847 - DNA, 268 bp, Glycine max
agcgaatcggttgaaggagatgtcaagtcaattaaaaactggaaacgccttgatagatcaacatcttactggaactgatggtgaggtcctgtggagcaagagcactgtctttcttaacagaatgatcaaagctgagaagcctaatcttattgtcttcactggagataatatatttgggcttgattcctcggattcagctaaatcattggaagctgcatttgctcctgcaattgcatcaaacattccttgggtggctgttttagggaac

SEQ ID NO: 42848 - DNA, 262 bp, Glycine max
tttttattgagtctgtgcctttattcatgtcctacttcggacctcttaagtagacaccactatgcaataacatgccccaatgttgaaaacattgtcagagaagcagtcaaaaagaagtttcatcaaacatttgttacggttcatgctaccattcgtctcttcttccatgattgcttcgtgccggtaatcaatcaattgcatgcatttcattcattcaccatataaatgctaaaaagaaagtaaaagagataatccccccatt

SEQ ID NO: 42849 - DNA, 137 bp, Glycine max
ggcacttgcaggtatgatgatacagatcctgaagcagaaaagaaggcgtatattgatcgtattgaagacattgtctattggatcggttggtcctcagttaagatgagttacgcacgtgattactttcaggcattgta

SEQ ID NO: 42850 - DNA, 282 bp, Glycine max
tggacccacaaaggagattctcaaggatgggattacataaggaacggttccaatctagtaaaggatatggatcgtttggatgcatttttcaaagggatgaccacatgggctggatgggttgatcaaaaggttgactctatcaaaactaaagttttctttcaaggcatttctcctactcattatcaaggtcaggagtggaatcaaccaagaaagagttgtagtggagaactagaaccatcagcagggtcaacatatcctgctggtctacctcctgcagcaaac

SEQ ID NO: 42851 - DNA, 272 bp, Glycine max
gcgaagaatggcatccagcaatgaagaggatttggaatataaaataataagggagacctttcagcgtgcatcggattatctgtcgccatacttgaagggcagttcttagtcgccctagaataaacattgttgacaatattaccaaccttcaaagtgttgtccaaattgcaagtataatccagccaaagatcaggtgttataggaaagtcagtaatggctcgttcatatagaacttgaattctggctggcgttccagaagactgctcaaattt

SEQ ID NO: 42852 - DNA, 260 bp, Glycine max
ggaagcacaacaagggtgcaccaaaactttgacatttcaaacggatgtgctttgtaatgcttgtggtggcagtagtgttccacctggtactaggcctgaaacttgtaagcgatgtaaagggtcaggagtgttatttgtacaagctggcatattcagaatggagagtacttgtggtacctgcaagggaactggaaaaattgtatcgaattactgcaagtcatgcatgttttgcaaagattgtcaaaggaacgaagtcggtc

SEQ ID NO: 42853 - DNA, 274 bp, Glycine max
caaaatggtgggttatcagaggaagaaaaggagcagatcaggtattctcaggttcactgtaaaaaggactttaccttcgttgaaagggtaaataggagatacgtaaatgtactccgggggcttgaacttcacactggagttttcaatgctgtggagcagaggaaaattgttgagtggatttacagattgcaatggaggggacaacaagggaaactgaaagatcgaacatattcagaaccaagaaagtggatgcgtggtaagggccgcgtgacaa

SEQ ID NO: 42854 - DNA, 264 bp, Glycine max
cggtgctacaagagccttggttcatcagcacagatattttctggtgcgttccctgagaattatgaacctcccagtaatttctactatgaagtaaatgacgattctcccattgttcaggatgatgtcagtttatttgattacaatgtccctgaaagagtaaatgagtttgtggcagctgcaatatcacaggccaatattacgctcacaaatcatataatgtggacaatggggacagatttcaagtaccaatatgcacaaacctgg

SEQ ID NO: 42855 - DNA, 271 bp, Glycine max
taaaaatgcagatcttcgtgaaaactctgacagggaagactataaccctcgaggtcgagagcagcgacaccatcgacaatgtcaaggccaagattcaagacaaggaaggcattcctccggatcagcagcgtttgattttcgccggaaagcagcttgaagatggaaggaccctggccgattacaacatccagaaggaatcaacccttcatctcgtcctcaggcttcgtggtggcatcattgagccttccctcatggctttggctcgcaaata

SEQ ID NO: 42856 - DNA, 268 bp, Glycine max
aaggttcttcttcgtcgtatatctcttcttttgtcgtctgtgtgtctgtgctatctctcacctgacaatgtcttgctgcggtcgtcactgtggttgcggaagcgcctgcaagtgcggcaacagctgcggaggctgcaagatgtacccagacttgagctacaccgagtcaaccaccaccgagaccttggtcatgggagtggcaccagttaaggctcaattcgagagtgctgaaatgggtgttcccgctgagaacgatggctgcaaatgt

SEQ ID NO: 42857 - DNA, 259 bp, Glycine max
ctcgagccgggatcaaataaaggaacagctctcagctgcagggtggacagttgactttaggcccaggaatggcagagagtaccatgatgcagtgtatgttagtctggacggacatacacactggtcaatcaccttggcctacaaaaggctaaaagagtattatgaagctggtaatggtgaaggtaaggcatataagccaggcttcaaatttacaccaatagcagaagaggatttcaaaatgctaactaaggtaatgaac

SEQ ID NO: 42858 - DNA, 261 bp, Glycine max
cgcgtggcagcgtttgcgtttgctctgctgtggcaatcggcctcagcagccgacgtcgttgtgctctctgaagataacttcgagaaggaagttggtcaggacagaggagctctcgttgagttctatgctccttggtgtggacactgcaaaaagcttgctccagaatatgaaaagcttggtagcagcttcaagaaagccaaatctgttttaattggcaaggttgactgtgatgagcataagagtttgtgcagcaagtatgga

SEQ ID NO: 42859 - DNA, 126 bp, Glycine max
  unsure (1)..(126): unsure at all n locations
tctttgacangctgcagtacgtttctggtagcatggccatgccatggcgcaggctaccaaggttcctctccgaatgaaatggtatggtgacgtcttcggagtaaatggcagtttagctctgtggag

SEQ ID NO: 42860 - DNA, 253 bp, Glycine max
ctcttggtcttgcgagagacagccatgccagacacgaagatttttggcatgctgtttggccaaacactcccattccaagttcattgcgagagcttctaaagcctggccctgcaagtgttgaaatcgatgaccaccctatgcaaattgaagaaacacagtacccgaaaaccttcttctataaagaagaccttcatccaggcaaaacaatgaaggtacaattcagcaagcctccctttcaacaaccatggggtgt

SEQ ID NO: 42861 - DNA, 190 bp, Glycine max
ggaagccttgatggttccgaacagaaggtgaaaatggaacgtttcgatacgttggtgggtattgggaggcgagagagcatggaagatgggacgggtgcccgaatatatttggtgaatttaatgaagactctaccgatccgttaggtgcatcttcttaatttggttcaggtaacctttacatattttccac

SEQ ID NO: 42862 - DNA, 256 bp, Glycine max
ccagattctcactgcttctggtgatcaaacaataaaagtatgggatgttcaagaacagaagtgtcttggactgttgactgggcacacaggaagtgtgaaatctatgtgttctcatccaactaattctgatattattgtctctggttctagagatggatcctttcgtatttgggacttgagatgcaagtccactgctaagagtaggtgtggagaagttagcatatgttcaatgggaggcgtcaaaggagcacatatt

SEQ ID NO: 42863 - DNA, 259 bp, Glycine max
agaaagaaaggttagggtagatcacgcaggcttcagccatgagaactcacacaattatctctctcattcttctctccttatttctccgaacccaatccgaggttataacgttatcctctgatacgtttaatgataagatcaaggagaaagacactgcatggtttgtgaaattctgcgttccctggtgcaagcattgtaagaacctgggttctttgtgggatgatttggggaaggcaatggaaggagaagatgaaataga

SEQ ID NO: 42864 - DNA, 260 bp, Glycine max
tgaaacgtgactttgaggaaaatggctcggtggagagagtgacccttttccttaatctggcaaatggtcctacgattgagcgtatcatcactcctcgtattgctcttactactgctgaatatttggcatatgaatgtggcaagcatgttcttgtgatactaactgatatgagttcttatgctgatgctcttcgtgaggtaatgtacctaaaactattataataaggtggcaaaagaaaagaaaagagatgggaaatcttt

SEQ ID NO: 42865 - DNA, 256 bp, Glycine max
tggcttctaatattcaaactctgcttgtgcttgttctggcaacattgggaacatttatgatcccttccaatgcacagcttactcctaatttctataagaaagtttgtccccaggcattgccaatcataaggtctgtcgttcaccgagcaattattcgtgaacgacgcattggagcctccttgctgcgtttgcatttccatgactgctttgttaatggttgtgatggatcagttctactggatgacacgcacaactt

SEQ ID NO: 42866 - DNA, 288 bp, Glycine max
gttcagctgtatttctatatatattaatttatcaaaatgcaggaagtcagacggaaagaagaagctgctgcacgagctggaattgttcttgaggagaagaattggccgccatttttcccaattatccatcatgatatcgctaatgaaattccaattcatcttcaaagattgcagtatgttgcatttacttcattgttaggatttgcattgtgcatcacatggaatattgtagctggtcacttcagcttggattaagggagaaggagtgaaaatatggtttcttgctat

SEQ ID NO: 42867 - DNA, 280 bp, Glycine max
gcaggatggctagaagattggtggtattggtactgtgccagtgggacgtgtagagaccggggttgtgaagcctggtatggtggtgcactgtggtcccactgggctgacaactgaggttaagtctgttgagtcgcaccatgacgctctcacagaggctcttccaggtgacaatgttggctttaatgtgaagaatgttgcagtcaaggatctcaagcgtggttttgttgcatccaactccaaggacgaccctgcctaagaagctgccaacttcacatcccaa

SEQ ID NO: 42868 - DNA, 219 bp, Glycine max
agaaattggttggacaatcgaaaagctaggctagctcgcacagctagggatgttaaagcagcagcaggtgatgacaatcctgtcccagagaagcagagagggccagtacctgggtcctatgactcacctggcagtccaggtcaaaatgttgtgcttgttggtgtacgaggagacgaaattggcagaggaaaagtgtttcaggtgcacggtaagtggtat

SEQ ID NO: 42869 - DNA, 275 bp, Glycine max
  unsure (1)..(275): unsure at all n locations
cacactcgaactcgagccgattcggctcgagcagnctcgagctcgagcgtgaaaacgctgcagaggcagcaccgagctgtattgatactaccttgctgtacccaatttcatgtccaaagttgtgatgaaattgaagatgtaatcagcagatctcaatttccagaagggttccttttcggaacaggcacttcctcttaccagattgaaggagcgtattttgaagatggaaagggtttaagcaattgggatgcttttagtcatacaccaggacagat

SEQ ID NO: 42870 - DNA, 263 bp, Glycine max
  unsure (1)..(263): unsure at all n locations
tatttgccgctgacaccgatcaggaaagcaggaaaacacacacaacaaggagcagatcgggtacctcaggtttctcatggaaattggcggatcatccaaagcttccaaagggtaagactgccgctgttgtggtattggatggttggggagaggccacacccaatgagtaccgntgnatccacaaggctganncaccctgnatggattcacttaaaaagggtgntcntgtaaggtggagattggtcagggctcatggtactgct

SEQ ID NO: 42871 - DNA, 260 bp, Glycine max
agaacacctatgataataagaaaaagattgagcagatgatggatcttattaatagccttaagctctgcgttcggtggtttaagagaatcgaagaagggtatatgcaagaaaaggaaaagcttcaatctgagctagagactgctgagaagaagtgcactgatactgggactgagatgaagagtaagattgaggagttggaagagactgtatctgatttgaggaagacaatttcttctctagaagagagaattgtaaaggaa

SEQ ID NO: 42872 - DNA, 257 bp, Glycine max
cctgccttcactttgacaactgctataaatgaatggagctccacgttatactcaataatctacagttcattgccaactataattgttggtattctcgacaaggatcttggtaaaaggactctccttaagtatcctcaactttatggggcaggacagagacatgaggcctacaacaagaaattatttttgttaacaatgttagatactttgtggcaaagcatggttatcttctgggcacccctctttgcatattggag

SEQ ID NO: 42873 - DNA, 283 bp, Glycine max
atttggtcgtctttgatatctaccaacccctctacgacttggccaccaagccttctgaaaacggattttttgaagcaaggaaggcttgttgtggaacggggttgatcgaggtatctattttgtgcaataagaagtccataggaacatgtgctaatgcatctgaatatgtattctgggatggttttcatccctcagaggctgcaaacaaggttttggcggatgaattgattacttctggcatctctcttatatcctaatcaaacacttcacgagtcatactttg

SEQ ID NO: 42874 - DNA, 274 bp, Glycine max
gtgaaactcaagtgcttcaactgaaagataattctgaaatatgtagggatactgtttctactcctccctcaacttctagcccatcgtcttctggagggaaaactgagactttggagtccctgataagagctgatgtgagtaaaatgaacagctttaggatcatggaagacgagcgtattcgaatgcaaaccaatgcaaggctgaaagcctcaaatctgctgatgcaactgatctcgtgtgggtctatatcagtgaaaaaccatagtgttggcct

SEQ ID NO: 42875 - DNA, 256 bp, Glycine max
aaagatctatgcttacctcttcctttgcatgctcttcctctcctccgccactcccattctcggttgcggctactgtggcaaaccccccaaaaagcacaagcctggtaaaacaccaaagacacccacagtacccgttgttaagccaccagtcacaatccctcccattgttaagccaccagtcataatccctcacattgttaatccagcagtcaaaatccctcccattgttaatccaacagtgggaatccctcccatt

SEQ ID NO: 42876 - DNA, 272 bp, Glycine max
ctggggatcatcatggttgcccctatcgacatttcagtgaagagaaccaccgagctgctcttagcggaatgggggtaaacagttcagcaatggccgatgtgatggacaaagtgagaaatagacattattcgttggcttgcaccttgacatttgaagctcttcatggcatgccgtgtgatgcagggattaaccatccaaatcaatacttcagtgacagtcaaaagatattaaagccaaagaaggattcttcagcctaagtattttagttattg

SEQ ID NO: 42877 - DNA, 267 bp, Glycine max
gcaacataccatcaaaaggatttatgtcagtcttactgctgggctacccactccagttgctgggcgtgttgaggttccagttggccgtgatcctaataatcggattcgtatgactgctgtagctggaccagttaattctagaaaggcccgtcatgctgctagtaggtacaaagtaattgagatacttgctggggggagttgttctttggttgagtggaagttggaaactggacgcactcatcagatacttcatgacacaactttgag

SEQ ID NO: 42878 - DNA, 254 bp, Glycine max
tttcctattttataatctctagcataattcagcatggccaaagacaagtacaggtctttcttgcatgatgaacctgataacgttcagtggagacatggtggccctcccacttatgatgctgttaacaagctttttgaagaaggaagaacaaaggagtggacagacggatcattggaggagatagtgcaaaatgctattaagtcatgggagatggagctctcacacaagacccgtttgcacgacttcaagacaat

SEQ ID NO: 42879 - DNA, 259 bp, Glycine max
gcttgtcttgtttgtcgctacagttttggtatcatatgaatggcatggctcagactaccagaagttccctctccagatgtacactgggtttggtgggcaatacagcaatgaggtggcatgtgccagttggagtcttggcgtggaagtaaacatcgtagtcaagtggcaaactgttcctgcagcttgtggagagtacatagctgactacgttctagcagaccaatatagatcagattccataacagttaaccaactagct

SEQ ID NO: 42880 - DNA, 261 bp, Glycine max
ctcgagccgaaacaaggcaaaagtagtacgagaataattgatatacataaaaaaaaaaaaaacagaccaccctgagcaaaaggacccaaacttcaacaacaatttgatagctacgtgtcccaatgccgagtcccccaacaccgttaatttggacgtgagaacccccgtgaaactcgacaacatgtattacatcaacctcttgaaccgccaaggagtgttcacttctgaccaggacactccgggcagccccaaaaccaagga

SEQ ID NO: 42881 - DNA, 258 bp, Glycine max
aggagctgatgttgcagagagtgttgcccaattcgcaaggaggcgtcagcgtggggtttgtgtgctcagtgggagtggctcagtggccaatgttacacttagacagccttctgctcctggtgctgtggtggcacttcatggaaggtttgaaattttgtccctaaccgggactttcctacctggccctgctcctccaggatccacaggactcaccgtgtatctggctggaggacaaggccaggtagtgggagggagtgt

SEQ ID NO: 42882 - DNA, 257 bp, Glycine max
ccttccgaagcgacaagcagcacccactctctcttctcggaccttccaaacatggaacgcatacttggcggcaagtaccagctcgggcgcaagatcggaagtggatccttcggcgaaatctacctcgcgacgcatattgataccttcgagatcgtcgccgtcaagatcgagaatagtaaaacaaaacatccccaactgctttacgaggtggcattcctaacataaaatggtccggcatagatggggaggataatgtg

SEQ ID NO: 42883 - DNA, 259 bp, Glycine max
cacttttcaagaatcgtaagctatgggaaagtcttacccaactgtgagtgctgattaccagaaggccgttgagaaggcgaagaagaagctcagaggcttcatcgctgagaagagatgcgctcctctaatgctccgtttggcatggcactctgctggaacctttgacaagggcacgaagaccggtggacccttcggaaccatcaagcaccctgccgaactggctcacagcgctaacaacggtcttgacatcgctgttagg

SEQ ID NO: 42884 - DNA, 258 bp, Glycine max
gaatgaccctctttactggtagttcaagagtggcagataaattggctgttgatttgaaaggtcgcgttaaattagaagatgctggatttgactggaaaatactgggccctgatgtccatcaggaagattacatagcgtgggtctgtgatcaggatgcatatgcatgcagtggtcagaaatgctcagcacaatcattgttatttatgcatgagaactggtctaaaacttccttgctatctaagttgaaagatcttgctg

SEQ ID NO: 42885 - DNA, 164 bp, Glycine max
  unsure (1)..(164): unsure at all n locations
ctcgagccgagagtttgcatcttttgccaccatggcttatctttcaaatcaccatgacccagttctacaagttgtttccacaaagcttggaacattaagncgctcgagccgttttttttatccaantaaacgaagtgtnnattatttgagtagttgaggtttgt

SEQ ID NO: 42886 - DNA, 253 bp, Glycine max
ctcgagccgggtagccatagcatagcagagatcgacataacatagccagcaacatcaatatcaccgacagacaacaatttcgggaatccgctggctatgactgcagttgtggtcgtcccattgggccttctcttcttcgcttccggcctcatcgttaacctcattcaggcaatatgctacgtggttgtgcggccggtgtcaaagaatttgtaccggcggatgaacagggtggtggctgaactgctgtggctgg

SEQ ID NO: 42887 - DNA, 241 bp, Glycine max
caaaaccgtacctgtaagtcttgccgtaatcctcagagaggcaattcttgctgctcataggcatctgttcaatggtgaactggtcgtattccgaaagtgagtgaagcacggacttgatagtagtctaggaggcacataaatgtactcatcaacatcgaaaaagaacatccacttggccatgaacttgtatctatgaagacaatcattgaccaccatgaactggttatgatagtatccatcc

SEQ ID NO: 42888 - DNA, 245 bp, Glycine max
  unsure (1)..(245): unsure at all n locations
ccgctcgacgcttgccactgactttccacactgcataccttacgtcttccgaactccaagttcatttgcacgacggctaacgacaaggctcagatcaacattctggtggttggtcatgtggaccctgacgcgcaaccaccattcacgagctgaagaacgcctgttctggacacatccgctccagggcatgccatatcacggcatgcacgtacggcctcggactcgaancccccccccccctaaca

SEQ ID NO: 42889 - DNA, 249 bp, Glycine max
gtaagaagagaaagttcgtagctgatggagtgttgttcgctgaactgaacgaggttctgacaagagagttggtcgaagatggttactctggcgtggaagttagtgttgtgacgatgcgtaccgagatggataaaaagggtaaaagctcgtttggttctgatttccagtacgaatacgaaccttgaaaccgcgcctcgggctctagagccttcggattttgaagctagaggtgtcagtaaatcacaggat

SEQ ID NO: 42890 - DNA, 268 bp, Glycine max
agtctgatctaaattgttcgccattaatgtagtcctttgttggttcaacgcactcttcaggaatggcgaacaatttagatcagactctaaaacagttaaccaacaagctttcttttatgctagtgaacgcgaagtccatcacaacgacatatttatattcggcatagataacaccgtactctctaatatcccatactatgaaaaacatggatatggggtggaggaatttaatgacacttatatgatgatgggttaacagggcgacccc

SEQ ID NO: 42891 - DNA, 233 bp, Glycine max
ccggatcatacaagtaaatgcatttggtgatccaaatcgcgctgcagatattactaaagatgttggtgttgatgttaagttcacttattctgttatctggaatgccactaaagtacgttttgagaacaggatggacagatacttgagagcttcgttgatgcctgtccaccagcaagttcattagttctcgtttgttaactcaattgtcatcattttgcttttgatgggttcgc

SEQ ID NO: 42892 - DNA, 279 bp, Glycine max
gttggttcctcaatcactgtggtggggacaccccattatgctcacaaggactatgctcccatgcttgcaaggtcaaggaaaggtgatggattggcattggtttcggtttcacagtttgtggttgaattacaagggctaaagtcagtggaatgggaagatcctcctaagattcttcacttgaatcctaggttaagaggggattggagcaaacggccagttattgagcataatacctgttatcggatgcactggggaacagctcaaagatgtgatggtttg

SEQ ID NO: 42893 - DNA, 283 bp, Glycine max
aaaaaagttaagatgggtaaagtttattttaatttatattaaaaatttgtgcgatacctagcttcttcattattttacttttatctctttctgatgatttgttaaagaaaatcaaatttgtggtacatcaacttggtagtgtcaaattgttaataacttgtgttggtttatgacttgagcagagatgatggggccaacaatggtggcagaagcaagaacttgtgagtctcagagccaccgtttcaaggggccatgtttgagtgacaccaactgtggctctgtt

SEQ ID NO: 42894 - DNA, 265 bp, Glycine max
gtggagatttgtttgcgggatgccaagatggataagagtaccgtccatgatgttgttcttgttggtggttctactaggattcccatggttcaacagttgttgcaggacttcttcaacggaaaggaactttgcaagagtattaacccagaagttcgatgagaaggaaaacattgtgttcatcacagtggtgtgttgcagcccagagaagataagagacaagctttgctaaaaaggtggcggctcaatcaaaagcattgagatactg

SEQ ID NO: 42895 - DNA, 280 bp, Glycine max
ggcgaaactggtcattattttgccatgaaggcaatggagaagggtgttatgctcaatcgtaacaaggtgcatagagcttgcacagagagagagatactcgacatgttggaccacccttttcttcctgcattatatgcttcctttcagacgaagacacatgtttgcttgataactgattattgttctggtggagaactattccttcttcttgaccgacagccagctaaggttctcagggaagatgcagtgagattttatgccgctgaagtagttgttgcgt

SEQ ID NO: 42896 - DNA, 278 bp, Glycine max
gtccctttctgttctcttcactcttggtcttgcgagagaaagccatgccagagacgaagatttttggcatgctgtttggccaaacactcccattccaagttcattgcgagatcttctacagcctggccctgcaagtgttgaaatcgatgatcaccctatgcaaattgaagacacacagtactcgaaaaccttcttctataaagaagaccttcatccaggcaaaacaatgaaagtacaattcagcaagcctccctttcaacaaccatggggtgttggta

SEQ ID NO: 42897 - DNA, 269 bp, Glycine max
ggttaccattatttctttataactatactactcatcagctgcatggtatttttgctttcattgttggtgttgttgttgatccacttcatcaactttacttgacaacaagattgtaaaactcaaaatctagtttcatactttttttcttcttcttgaaatggctctccaggctgcttctcttgttcctgcttctttctcggttcttaaagcgggcaagagtggtgtgtctctcaaggactccaccttgttcggtctttcattttcagaac

SEQ ID NO: 42898 - DNA, 303 bp, Glycine max
ctcgagccgcgttaagatttagttccatttgctgtaagagtcaatcattctctaattatagttgtaataacaccatcaaggtagctatcaactacacggtttctggatatcttgtggttcttggccttcatctctgattcagcccgaagaccttttctggacaacaactttgacaagttcttatctccaaccatacaaattggacatgctggatcatacctatctgcctctgatgtcatagcctctaaacattctgcatgatatgaatgaccacagactagtacagcaacaactgagaggtca

SEQ ID NO: 42899 - DNA, 160 bp, Glycine max
ctcaaactcgggatcacagaaaccagcaacagttcttgcgctgaggtttcacgatgttgctggaacttgcagttggtgtgtatgtgttagctttgtatctgcacttgcgtcccacaccaagtgcaaaatcaaaagcacttcgccacctcacaaaccctcc

SEQ ID NO: 42900 - DNA, 299 bp, Glycine max
agaaaaatccgcgattcgctcttctcttggaaaagtgaaaaccagaagtacgaacgaaagagaagaccgattcgcagttccagaactgggggttgtcgttcagaagccgttccagaaggttgtttgcgaagaaggaaatgaggattctgatggtaggtctcgatgctgctggtaagacaaccatcttgtacaagctcaagcttggagaaatcgtcaccactatccccaccatcggatttaatgttgagactgtggagtacaggaccatcagcttcactgtgtgggatgttggtggtcag

SEQ ID NO: 42901 - DNA, 294 bp, Glycine max
tgcagaggatgctgccaggaaatttttaagcgaatacgacattaagttggttgttattaacccatcaatgtccatagggcctctcttgcaaccagagctgaatgcaagttcttcttcaattttaaacctaatcaatggttcaccaacgttttcaaataatagttttgggtggatcaatgtgaaagatgttgcaaacgcgcatattcaagcatgtgagattgattcagctagtggaagatattgtctggttgaaagagtgatacacttctccgaacttgcaaaaattttacgtga

SEQ ID NO: 42902 - DNA, 292 bp, Glycine max
ctcgagccgctcgagccgcgcaaccttatatgtgctgaccctaactttgccatcagcatctgcagtctatagggcatttggggaccagcttctcacccattccaatgccctctcattgctcccaaagactggtttcagagataccgctgtcatcctcatgctcattcatcagttcataacttttggatttgcttgcactcctttatacttcgtgtgggagaaattcattggggtgcatgagaccaagagtttgttcaaaagggctttggctagacttcctgttgtgattcca

SEQ ID NO: 42903 - DNA, 287 bp, Glycine max
acggctgtcacgaaattgtgagcaggtaaacatctacaatctgttgccatggcaaaaacaactcacatagctattgtttcaagccctggttttggccacatagttccaataaacgagttcagcaagcgacttgtgaagcttcacccaaattttcaagtgacctgcatcattccttcacttgagtcatccacagaatcctgcaaagcctaccttaaaacccttccttcattcatagacttcatctttctttctccagttagcatagaacaattatcccaaggaggata

SEQ ID NO: 42904 - DNA, 281 bp, Glycine max
cttgaagttgttgctcaaggactaacggggaggattttttttcctcggtggcgacaatgtcgactcctgctaggaagaggctgatgagagacttcaagaggctgcaacaagacccgcctgcagggatcagcggtgccccccaggataacaacataatgctgtggaatgctgtcatatttggtcctgatgatactccatgggatggaggcacgttcaagttgactctccagtttactgaggattatccaaataaaccaccaactgtgcgatttgtgtctcgc

SEQ ID NO: 42905 - DNA, 251 bp, Glycine max
gctcgcctattttctaaattcttccctccctgaataagatcgcaataggactaccaaggtattgcatcaggcatcatcaggtcggccagaggtcatcactagcaagtctgggaggtctgtcaccaagtatcctgttcctgagtgcaagtgccatgatgactcgcaccatcagtctacctaaatttcacgtatctataccaaagcggttagtgtgaagattacacgtgcatggataaacttacacgggagcg

SEQ ID NO: 42906 - DNA, 280 bp, Glycine max
gctcccctattttctaaattcttccctccctgaaaaagagttcaataggattatcaaggaattgcatcaggattcattaggtcagccagaactcaggactagcaagtctgggagggatgtcaccaagtatcctgttcctgagtgcatgtgcaatgatgactctcatcatcattcttcctaaattgcacatttgataccaaagctcttggtgtgaagattacacgaaaatggataaacaaacacggaagcgatgctacgagtatgattttgatcccttgcg

SEQ ID NO: 42907 - DNA, 272 bp, Glycine max
gctcccttcttgagtgacatatgcaaattctatagggactttcatgtaaaatctgaccgtgtccatggaattttcctccatgatcctgtcagttttgtggcagttgtgcgtccagatcttttcacatacaagaagggggtagtgagggtagagacacaaggcatctgtgttgggcacacacttctggaccaaggattgaaaaagtttgtccaaatttaaaactattattattcactctaatttttccttataatttagtgctcaacataatt

SEQ ID NO: 42908 - DNA, 268 bp, Glycine max
caacgttacatttgaggactttccttattacttgagtgaacgaactcaagttttgttgacaagtgctgcatatgttcatttaaaacatcttcacttttccaagcacaccaggaactccccaccagcaagcagggccatttgctatctggtccagcagaaccttaccagcaaatgcttgccaaagctttagcacattactttgaatcaaagttgctgttgttagatattactgacttttctgtgaagttgcagaataaatttggatgtt

SEQ ID NO: 42909 - DNA, 270 bp, Glycine max
ctcgagccggatcggctcgaggctcatgttcactctgctcagagccttggtcaactatatacccattttgttaaagaatatcccattgtgtcaattgaggatccgtttgctcaagatgattggggttcgcgggcttcttgctcgcttcagttgatattcaacttgtaggagatgatttcttagttacaaatcctaagagaatagctgaggccatcaaaaagaaggcttgtaatggtttgcttctaaaggttaaccagattggtacagtga

SEQ ID NO: 42910 - DNA, 270 bp, Glycine max
gggcaatctaaaaagtatgagggaggtcattgggtaccaattggatgggcaagaatttcagaacttgtccaagcagttcaggttgatgctgactggtcttctcatcaattggaatttgaggattctgaagatgattttacagtagcagatttggcagctccttattgggagcatccggctgggcctatatggtggtgccatgtttttgcaggtcaccccactgttgaggcttggctcagcaatgctcaatggctacaccctgctgttagt

SEQ ID NO: 42911 - DNA, 260 bp, Glycine max
cttgctctcaggccactgtgctgcttttgtcacatttgagttctggatccaaatcgaacgtggagggcttctcacaacttctccgtcttctttgttggtgtcctgcttacatttccactcatgatgcaatgcaaactggtgttttcatatggacatggttggtttctgctgcacctgaacttggagctcttgtccttgctgagcttgtcgatgcatggttatggacaattgataccaagcggggtctttttgcatctgaa

SEQ ID NO: 42912 - DNA, 263 bp, Glycine max
gtctcccctatctaccctgataattccttaaaacatggctggatgttctcaacaaaggctggttgttatgtttttatgtctcattgggatagtttcagctacagatttaacttcttcagctgtgagtttagctgattatgagttaagcaccactttttatcttttaaagtgtcccctgggcctctttaccattaataacctagtaaccactgctgtgcggaatgagtctcgcatgggtgcatccttgctccgtcttcatttcc

SEQ ID NO: 42913 - DNA, 192 bp, Glycine max
  unsure (1)..(192): unsure at all n locations
atgtgtcgttgacagngaacaagttccccgacagacagccgattcggacggcggcgaagagccaagacgacggcaaggactaccaggtgccgctgtcggcgccagctggatgacacgacgcgatttacgtcatggtcgttttacatagcagggatagcaggatttgttgccattttctgactctctacatca

SEQ ID NO: 42914 - DNA, 256 bp, Glycine max
  unsure (1)..(256): unsure at all n locations
ggttactgtcaatggcgacggcggggttgtatcggcgccttcttccttgcccccctggcgtnngagtttgttcctcacaaggcaagcaactatttcttgaatccattcagaatggaaccatggacggcttctaacagttggtttcctatttccaaacgcaatccgagcgcagncttttgcggcctcgccagcctgtccatggtcctcaatgctcttgccattgatcctggcagaaaatggaaaggaccttggagat

SEQ ID NO: 42915 - DNA, 254 bp, Glycine max
cggaaagtgagggaaagacaaaatcggttttatgaatcggattgattgtttaattttcctttgataatctcaattacttagtacctgtaatgagcaggcttgtatggaccctcaacaggcacactgatgtaatcagcctgggccgggctaagcttggtgagcttagctccaagtttgccaaggtgaagtgcagccaccttctcatcaaggtgcttgggcaaaacgtaaactttcttctcgtacttgccggtact

SEQ ID NO: 42916 - DNA, 247 bp, Glycine max
cctcgagccgattcggctcgagggtagcatatgaatgccatggcccagactaccagaagtcccctctccaaatgaaaactacggtttggtgggcaatacagcaatgaggtggcatgtgccagttggaggcttggcgtggaagcaaacaacgtagtcaagtggcaaactgttcctgcagcttgcggagagtacatagctgactacgttctaggagaccaatatagatcagattccaaaacagttaacc

SEQ ID NO: 42917 - DNA, 238 bp, Glycine max
ctccgccctctggaactgccccaaatgcagatccgaataccccaaatctcacattcccaaaacctatttctgcttctgcggcaaaatagagaaccctcctaacgatccatggattttacctcactcttgcggcgaggtttgtggaagaccgttgaagcacagttgcggccaccattgtttgctactctgccaccccgggccgtgcccctcttgccccaaactagttaaagttcgatgc

SEQ ID NO: 42918 - DNA, 249 bp, Glycine max
ggaagttaccgtgcaactgatcaattatacaaagagtgaagttctggaacctgtttcatttgcaacctatgcgtgaccagaagggagaagtgcagtattttattggtgttcaacttgatggtagtcaacatgtagagcctcttcacaactgcatcgcagaagatactgcaaaggagggagaacagttggtcaaacaaacggcagaaaatgttgatgaggcggtaagagattttccggatgctaacaaga

SEQ ID NO: 42919 - DNA, 236 bp, Glycine max
cggacttaaaaaattgcaggagagagtgaagaaacaacaagagaaagtaggaaagaaggtaacaacgttgatcatgaaatatcctattagctattatcatttgctttgaatttgcatcggcaactgttggcacacgagtctttgagaaaggttaccttagttcagagagcatatccactaaccattgatttgaactaaagcattttgtaagcataacttactttaaatcaatggta

SEQ ID NO: 42920 - DNA, 266 bp, Glycine max
attctctaagaatcaaatactttctattcaatttctttgaaattcacaccaaaatagaattaattaagcgcaatcggtttcagtttgcgtggtgttcaaagacgtgtggatgtcccaaagggctgtgtagcagtgtatgtgggagaaaatcaaaagaagcgctttgtgattcccatatcatacttgaaccaaccttcatttattgagttgttgaatcaaagcaagaatttggatttgatcatccaatgggtggcctcacgattcct

SEQ ID NO: 42921 - DNA, 261 bp, Glycine max
cttgcttgcaccatgacccatgtcatgccttgggtgaccttgtcggaattaagaagcatttcaggaggaagcacagcaatcataagcaatgggtctgtgaaagatgctccagaggctatgcagtgcagtctgattacaaagcacatctcaaaacgtgtggcacccggggccactcttgtgattgtggccgcgttttctcaagggttgagagtttcattgagcaccaagatgcttgcaacatggggaggctcaggcctgagt

SEQ ID NO: 42922 - DNA, 257 bp, Glycine max
ggggttgtgcccctttgggccggggtcgtcattactgctcttgattgttttatttttctctttcttgagaactatggtgtgaggacattggaagctttttttgctgttctcattggtgtgatggcaatctcatttgcatggatgtttggtgaagccaagcccagtggcaaggaacttcttcttggcgttttgattccgaaactcagctccaaaactatacagcaggctgttggagttgtggggtgccttattatgcc

SEQ ID NO: 42923 - DNA, 258 bp, Glycine max
cgcacttcgttgcttggtgatgtccctttctgttctcttcactcttggtcttgcgagagaaagccatgccagagacgaagatttttggcatgctgtttggccaaacactcccattccaagttcattgcgagatcttctaaagcctggccctccaagtcttgaaatcgatgatcaccctatgcaaattgaagaaacacagtacccgaaaaccttcttctataaagaagaccttcatccaggcaaaacaatgacagtacc

SEQ ID NO: 42924 - DNA, 260 bp, Glycine max
cggcgttccacttccgaaagaagaagagaacttccagaaagtttatgttaaagctccatcttttctttcaattcacatgggggttaaagctgaggttttgccgccagatacagactgtcaccattttgtgcttgagagcaactggtccaaattggaggagccatatggaagtatctttctaagtataccaactgttcttgattcatcattggctcctgaaggccgtcatatccttcatatattcacaacttcttccatgg

SEQ ID NO: 42925 - DNA, 138 bp, Glycine max
atcgagccgctcgagccgaatcggctcgagctaaaccctactcattctccatacctcaacgaagaggttaaagcgacggcaacactttgctgtccgccttgaccgagcagagcttcgtcttggccctggatttggcca

SEQ ID NO: 42926 - DNA, 290 bp, Glycine max
atcgagccgctgctccgtaccagtttcactgcataaatttgagagaacactctgcaaacatgttggtttatcaggacctccttacaggtgatgagcttctctcggactccttccgttacaatgaaattgagaatggaatgctgtgggaagttgaggggaagtgggttgttaagggagcagttgatgttgacattggtgcaaacccttctgctgagggtggagaagatgagggagtcgatgacgcagctgttaaggttgttgacattggtgatacattcagacttcaggag

SEQ ID NO: 42927 - DNA, 278 bp, Glycine max
gagacattaaatggacaggaggttgtaattaaagtacaaaggcctggtctcaaggatctttctgatattgatcttaaaaacctgagggttatcgctgaatatcattctacaatcgctccacaatcagatggcgcaaagagggattgggttgctatttatgatgaatgcgcctctgtcttatatcaggagattgattacaccaaggaggctgctagtgcagaattgtctgcaagtaactttaagaacatggattatgtgaaagttcctacaatctactg

SEQ ID NO: 42928 - DNA, 274 bp, Glycine max
ctcgaacgctcgagcgattcggctcagggactgcagccgtagaaggaaaaccgaaatcggtgcacgtctccttttacaggaactatggtactacgtttaagaagccccgccgtccgtacgagaaggagcgtctagacgcggagctgaagctggtgggggagtacgggctgcggtgcaagagggagctgtggagggtgcagtacgcgctcagccgcatccgcaacaacgcgcggaatctccttaccctcgacgagaagaacacgcgccggatctt

SEQ ID NO: 42929 - DNA, 268 bp, Glycine max
ggaagacttggcaacaacttaccaacccctcacgaagttgtggccctctacaatcaagccaacattcgcaggatgcgaatctacggtccagcacctttgttcgacccagaggagctcacacagtggtccttctatagagccctcatcgctgagttcatagcaacccctgtggatggagtgcctagcccagatgacattgctggtcctgaaccattcaagtttcagtttgatagacttggtgttagggttcctaccatcattatttctc

SEQ ID NO: 42930 - DNA, 260 bp, Glycine max
ctcgagcgattcggctcagatgttttccaatacataaaacgtgcagatggaaacatgtctggtcctcctggcgatgttgcaaattccctcatggacggctattccaagggtaataatgaagtgagacgtaggtctagattcttacgtagaagaggaagagtccgtcgattgaagtacacctggaaatctgctgcttatcattcaattaggaaaaggattacagagagaaaggatcaaccctgccgacagtataatccatg

SEQ ID NO: 42931 - DNA, 259 bp, Glycine max
tgaattgtcaatgactgtggatccatccaacaccacagcagtgcacactgctgcattacaagggcatactgagatagtaaagcttctattggaagcaggtagtaatctggcaaccattgctagaagtaatgggaaaacagctttgcattctgctgcgagaaatggacatttggaggttgtgaaagcgctattggggaaggagcctgtggttgcaacgcggacagataagaagggacagacagcacttcacatggcagtg

SEQ ID NO: 42932 - DNA, 261 bp, Glycine max
ggtccatggtgatgtcaagagtattccggatttgcaggctgaactggacagtttattgcaggagcaccagaggttacgtggcacatttgaatatgaaaagaacaaaaacatagagctagtggattacatgaaagcaaaagagaagaatctgatagcgatggcaagagaagttgaagtgttacgagcctggattttaaatgctgagaaaagagtaaatgctcctaatctgtttggggctgctacccctggacacagcagcgg

SEQ ID NO: 42933 - DNA, 266 bp, Glycine max
cttgatgcttcataagtcgtcatcatcatcatcatcatcaccgttgattgaagaagatgacgatcagaaacatcgccatctgaacgcatgaagacgataatcaccacgatacgttgaaggagacgttggatgtcttcatctccacattgatcttcgagttcgatggttcatgttacggcatcgcatacaacaagctcaacgataacggcgccgccactctcgtcggcctcatctccgcttacatctcccatgatttcggactcttc

SEQ ID NO: 42934 - DNA, 232 bp, Glycine max
ctcgagccgctttgctggagacactgaccttggactccaatatgttctacaaggatgtcctaatctgcagaagcttgaaatcagggacagtccatttggggatggagctttgcattctggcttgcatcacttttacaacatgaggttcctctggatgtcctcatgtaagttgacgcgccaagcttgccaagaagttgcgcagacattgccccatctggtgttggaagtcatt

SEQ ID NO: 42935 - DNA, 232 bp, Glycine max
tttctgaagccagtaacgtttcaaaaactcaagaatcaccatttgaccagcgcaggctgtttggttttcgtcctcgctccccaccacttccatacttgttgtcttggttattgcagacacgtacctacccaaaactccctgctgatcagggtggggctgacaatggtgattctgatattgaaatggctgatttatctgattctgatctagatgtagatgaggatgagtatga

SEQ ID NO: 42936 - DNA, 249 bp, Glycine max
ggaaaatcgagttgacatttcatccgtgcagcagcaggatcaagcagttgaagacgaaatgaaggtcaagtttgtttccacctctaaaaaggcctcatcccagggtactagctttctacagcgctacgcaatgccatcatgggagctgctgatgccgtgcgtcgagttgcaaccaagggtgctggggcatttgtcgaagatactaaaagaaccgaagcccttgtgcaaacaggcgatggaatgatttgg

SEQ ID NO: 42937 - DNA, 249 bp, Glycine max
tgcagaccgagctagctagctagcaagcaagcacagagatggaggcaaagcgaggccatgccctcatgtgcttggcacgtgtttcactcttcctctgcgctctaaccctatccgctgctcacggaagcaccaggttcaagacatcgcgagaaagttgaaactcggggacaacgagcttctgcgcacggagaagaagttcaaggttttcatggagaattacgggaggagctactccacagaggaggagta

SEQ ID NO: 42938 - DNA, 248 bp, Glycine max
tgcagaccgagctagctagctagcaagcaagcacagagatggaggcaaagcgaagccatgccctacatgtgcttggcacgtgtttcactcttcctctgcgctctaaccctatccgctgctcacggaagcaccacgttcaagacatcgcgagatagttgaaactcggggacaacgagcttctgcgcacggagaagaagttcaaggttttcatggagaattacgggaggagctactccacagaggaggag

SEQ ID NO: 42939 - DNA, 244 bp, Glycine max
cacacacacagctagcagatattacatacacgtgaatcactaattaagccatggagaagaaatcaatagctggaagaagttgtggtgcaaactgaggcaaagacttgcgagaacctggctgatacataaggggtccatgcttcaccactggcagctgcgatgatcactgcaagaacaaagagcacttgctcagaggcagatgcagggacgattttcgctgttggtgcaccaaaaactgttaaat

SEQ ID NO: 42940 - DNA, 243 bp, Glycine max
gtttgtttattgtgaaaaatagagaaatgcaggcagcaaagaaagccatagagacctttaaggaaaccgcagccaacattggcgcctctgccaagtctggcttggagaaaaccaaggccactatccagagaaggttgtttttttttgcctcatttttctttctgggaatgataataagtaaatgatgaatgttctatgttggcattacttaagattcatttttcatgatatccaaaccatctt

SEQ ID NO: 42941 - DNA, 239 bp, Glycine max
gtttatttgttggttgttcaataatcttgtttttgtcaaactgcagacagatgaaataaacagattaaatggactttacaagcggatgttatccaattggggggttaaattatttgaaggtgagggaaagatagttggtccaaatgaagttgaggtgacacaattggatggcactaaactgtcctactcagcaaagcacatattgattgcaactggcggtagagctcaacgtccaaata

SEQ ID NO: 42942 - DNA, 240 bp, Glycine max
cttccattttaggctctgatccatggcttgaatagacattattactccatagcaattaattacagaaagaatgaacttgaagagaagatgttgcttaaccttcacaaaaagaagtggactgatggtttgacactcaggcattttgattcacattctaaaactaatgaacagactgttcaggtaagttgagatttttcaatgtaaatgactcaaacttttaatttctgttttctctcccca

SEQ ID NO: 42943 - DNA, 236 bp, Glycine max
gtttgtgcattgtacattattatctctacatgttctgactagaaggtgctctttctgtatcagtggatagaggcatatgggtaaatggcatcaagttgtgaattatttgcaaatctgattcaactacagtgtctattttgactcccaagattgcaagtggcagttatgggtcataggcacttacataacacatcttcattgttcgatggtgagcctgaccagaactggatcatttg

SEQ ID NO: 42944 - DNA, 248 bp, Glycine max
aggagagtctctttttccccttcgagttgccgagcgaggagcgtggtcgtcgcgctgttgcgtgagaagcagtgtggagggatgctaacggaataaaatggccacttgtattgctatcccttgtgctagcataatagaaagggttgaatcgagctaatccgagtttcattcagtttaactcgagtttttttttaaaatgaatttttcgggcccagaggacgatacccaaaatcggtcatctcagcatt

SEQ ID NO: 42945 - DNA, 247 bp, Glycine max
gcagaccgagctagctagctagcaagcaagcacagagatggaggcaaagcgaggccatgccctcatgtgcttggcacgtgtttcactcttcctctgcgctctaaccctatccgctgctcacggaagcaccacggttcaagacatcgcgagaaagttgaaactcggggacaacgagcttctgcgcacggagaagaagttcaaggttttcatggagaattacgggaggagctactccacagaggaggag

SEQ ID NO: 42946 - DNA, 250 bp, Glycine max
tgcagaccgagctagctagctagcaagcaagcacagagatggaggcaaagcgaggccatgccctcatgtgcttggcacgtgtttcactcttcctctgcgctctaaccctatccgctgctcacggaagcaccacggttcaagacatcgcgagaaagttgaaactcggggacaacgagcttctgcgcacggagaagaagttcaaggttttcatggagaattacgggaggagctactccacagaggaggagta

SEQ ID NO: 42947 - DNA, 245 bp, Glycine max
cagaccgagctagctagctagcaagcaagcacagagatggaggcaaagcgaggccatgccctcatgtgcttggcacgtgtttcactcttcctctgcgctctaaccctatccgctgctcacggaagcaccacggttcaagacatcgcgagaaagttgaaactcggggacaacgagcttctgcgcacggagaagaagttcaaggttttcatggagaattacgggaggagctactccacagaggagga

SEQ ID NO: 42948 - DNA, 246 bp, Glycine max
atatatactatgatgagagtgcggtttcctttgttggtgttgctgggaactgttttcctggcatcagtttgtgtctcattaaaggtgagagaggatgagaataaccctttctacttgagaagctctaacagcttccaaactctctttgagaaccaaaacggtcgcattcgtctcctccagagattcaacaaacgctccccacaacttgagaaccttcgagactaccggattgtccagtttcagtca

SEQ ID NO: 42949 - DNA, 251 bp, Glycine max
ctcgagcgaatcggctcagtatgattctgccagcgtgatatatatgtgcagttggagctcgatataagagttattgctcaaacatagctcggacattcttgattgatgcagatcctcttcaaagtagggcttatgaggttcttctgaaagcccatgaagctgtcataggttctatgaagcctggaaacaagttaagtgttgcataccaagctgcagtttctgttgtggaaagggatgctcctgacctgatt

SEQ ID NO: 42950 - DNA, 241 bp, Glycine max
gagagtcttcggaggcaacatcttttctcagttctttttggtcaagcatgctctgaagcacatgaaagaagggagctgcatcataaactctacttcagttaatgcatacaatgggaatccagaagcgttggactacactgctaccaagggagcaattgtggccttcaccagaggtctttctcagcagctagcgagtaggggaattagggtgaatggtgtggcacctggcccagtttggacg

SEQ ID NO: 42951 - DNA, 243 bp, Glycine max
aaaaaaaaaagcagcggatttagtagcacgggctgcaataagagctcggtgtcattatgttaataaaaagtggctcggcggtatgttaacgaattggtatactacagagacacgacttcaaaagtccctgaacttttgaagtcgtgtttctgtagtataccaaaaagagatgccgctatattgaagagacatttagctcatttggaaacatatcttggcggcattaaatatatgacggggtta

SEQ ID NO: 42952 - DNA, 243 bp, Glycine max
ttgacacagtagagactcattcatctgaattagttcttgtattttctataatttaggaaattgattatgttttccttggttttaagttaagttggttgtgtttttcaggtctatggtggagaggcaaggatttcaactttgagggaattatttcctctgatggaagacaagaagagccttgcttcatctgaagagcgttctcagataaagggaaaagcttctctattagctgcacttgactac

SEQ ID NO: 42953 - DNA, 234 bp, Glycine max
ctggtttagacgctgaagatattgctctattatttgaagcaataaagccagcattgcaggatgctgaaggtgtcatgcagaagaaggcatacaaagtactttcgatcattctgaggagctcctccaatgattttgtttcatcaaagtttgaggagttgcgtcaaactatggttgaagttcttccgtgtcatttttctgccaaacgccatagacttgattgcctttacttcttaa

SEQ ID NO: 42954 - DNA, 237 bp, Glycine max
tgcagaccgagctagctagctagcaagcaagcacagagatggaggcaaagcgaggccatgccctcatgtgcttggcacgtgtttcactcttcctctgcgctctaaccctatccgctgctcacggaagcaccacggttcaagacatcgcgagaaagttgaaactcggggacaacgagcttctgcgcacggagaagaagttcaaggttttcatggagaattacgggaggagctactcca

SEQ ID NO: 42955 - DNA, 245 bp, Glycine max
agccttatgtgtattttcctttgctgctggtccagacagtgaacctatcacattttctggaaaaactccgggaaagattgttcctccaagagggcctaatgattttggatgggatcctatttttgaacctgatggctatgaccaaacgtatgctcagatgcccaaagaagaaaagaacaaaatttcccaccgctccaaatctcttgcattggtgaaatctcattttgctgaagctagatttactt

SEQ ID NO: 42956 - DNA, 244 bp, Glycine max
ccgctcgagccgcgagtagtggtggctctgtggagttgggtgctgtggcggctattcgcataccgttacttcatgtgtcaaatttcaaaggagggacgccggagttggttgagacgtgttatgctatacttgttttggttctgccaagttcaagcactagggtttggacctaccatgagatggagatagttgaagtggttgctgatcaggtggctgttgccctgtctcatgcatctgttcttga

SEQ ID NO: 42957 - DNA, 133 bp, Glycine max
gaaaaaaaaatggctgatacaggtggaggagatgcagtgagaccagtggtaatatgtgataacaagtgtggctgcacacttccatgcactggtggttccacttgcaggtctcttaagttcatgatttcaacaa

SEQ ID NO: 42958 - DNA, 246 bp, Glycine max
  unsure (1)..(246): unsure at all n locations
cacacaactacaagaaagaacttccttataaccaaaaccaacaacaactatggcaagttatcagaagcactacgatgatcagggtcgcaaggtcgacgagtatggcaatgttgagaggcaaactgacgaatatggcaacccggttcatgccactagtgtcacttatgtagccaccaaaagtgttggtggctacaatgatgacgctaataagcaacatgatattactggtgtctatcncgagaaaga

SEQ ID NO: 42959 - DNA, 259 bp, Glycine max
aatttcaccaccgaacgaaccaacacacgctcaaaccccaaaccctaacacaagccttgatcagatggcatccaaacgaatcaacaaggaattgaaggacctgcagaaagatcctcctacgtcatgcagtgctggcccagtggctgatgacatgttccattggcaagctacaattatgggtcctgcagatagtccatttgctggaggtgtatttcttgtgtcaattcactttcctcctgattatcctttcaaaccaccc

SEQ ID NO: 42960 - DNA, 250 bp, Glycine max
gagtgccagatccaaaagctgaatgccctcaaaccggataaccgtatagagtcggaaggtgggttcattgagacctggaaccctaacaacaagccattccagtgtgccggtgttgccctctctcgctgcacccttaaccgcaatgcccttcgtagaccttcctacaccaacggtccccaggaaatctacatacaacaaggtaatggtatttttggcatgatattcccgggttgtcctagcacttatcaag

SEQ ID NO: 42961 - DNA, 246 bp, Glycine max
cagagaatacctttctttaatgaaaaaggtaaatatgtaagtacagatccacttgatatcaatgacttgtcatctctaaattacattggaacaaaactattagaaagttttaaaaggaaaacagctattttagaaaaagagaattcggctctttctcagaaattacagaagctggaacaggaaagaggtataatagcccagcggagagtagaagaaggaaataataccgaagataataatacatta

SEQ ID NO: 42962 - DNA, 247 bp, Glycine max
gcagaccgagctagctagctagcaagcaagcacagagatggaggcaaagcgaggccatgccctcatgtgcttggcacgtgtttcactcttcctctgcgctctaacccatatccgctgctcacggaagcaccacggttcaagacatcgcgagaaagttgaaactcggggacaacgagcttctgcgcacggagaagaagttcaaggttttcatggagaattacgggaggagctactccacagaggagga

SEQ ID NO: 42963 - DNA, 242 bp, Glycine max
cggcggcgggagcgaatggatctcgtgacggtgcttgacgttagtaacagcatgagcggcgcagactttcacatgctaaagcgcgccatgcgtttggttatatcgtcactcggcccggctgaccggctcgccgtcgtggcttcctcggctaattccaaacggttgttacctctgaggagcatgacggctcagggacaacgcgcggcgcggcgcgtcgtggatcggctcgtgtgtgaccatgg

SEQ ID NO: 42964 - DNA, 250 bp, Glycine max
atgttcttatgtggttatgaatgtgcttcttttaggaaaagcaaaagggaaggattgggatcctcttggattttgtttggtatgagcctcttacaagatcaaaggctgacaattttgcagctcaaagagccagagactttcatattggatggtaaaaatctttagcatttgttaactgaggatcctatattgcaagtacaagtctttagttatgaatgtgaattttcccctgcaaagactttcacacgct

SEQ ID NO: 42965 - DNA, 244 bp, Glycine max
  unsure (1)..(244): unsure at all n locations
ctcttcttctcttgcggctagggttttagcgcacntcttctagatttacggaagatgggtaaggatcaggttcacatcagtattgtggttattggccatgttgactctgggaagtccactaccactggccacctgatctacaagcttggaggcattgacaagcgtgttattgagagatttgagacggaagctgctgagatgaacaagaggtctttcaagtatgcctgggtgcttgataagctta

SEQ ID NO: 42966 - DNA, 243 bp, Glycine max
tcaaaccttgctctatactacacagtacacacactagaagaataatggcttccatcctccactactttttagccctctctctttcttgctcttttcttttcttcttatccgactcagtcacccctacaaaaccaataaaccttgttgttctacccgttcaaaatgatggttccacagggctccattcggccaacctccaaaaaagaacccctctaatgcaagtaccagtcctggtggacctca

SEQ ID NO: 42967 - DNA, 243 bp, Glycine max
tatcacggcgttctatggtgcttaaatgcaagggcgaaggatcggatccggtaattctgggaaacgcttccgatgtcagccactccagctacttccagcgttccaacgttaaagcattcatcgttttcgttggatcgtacaatcgccagttgtactcctcagggccacagcaaatccgtaaaacacgaagagtacaaggtgcacacctacaaccggaatagtctttgcgcattagaattcttg

SEQ ID NO: 42968 - DNA, 252 bp, Glycine max
caaaatgccaggtcttaccatcggagacactattcctgatcttcaagttgaaactaaccaaggcaaaatcaagcttcatcagttctgtgctgatggctggaccatccttttctctcacccaggttctcattcacttaatttaaatatttttctttctatatccatatttggtggttacttgatttcttcttctcatgcatgcatgattgtaatttctaaatgtatgtatagatgatttcaccccggtttgta

SEQ ID NO: 42969 - DNA, 237 bp, Glycine max
ggagaacgcaaaaggatgattcagttgttgttcatggtgatttttgtcgagggggttctggcatttcttttgttggttaagataggacctttgagagatcttgtgataaagagcctggatcagttgaagatggggaagggtccagctacagtgaaaaccattgctggtaccatgtcggtgattctcctttcaagtctcatgagcattgtcaagatccagaacaaaggtgctaaactt

SEQ ID NO: 42970 - DNA, 245 bp, Glycine max
tctcgagcgctcgagccgctcgagccgcacgcatattctagagatgctatcggagcaatatggtggacgtgtcgaactcgctaaagcatatgacaatgcacacactgcttccgtgatgaagcatatgcataggcaatggtgtcatttcaagcatgcatcagtgcaatgatttcatgttccttggtacggataccatatcacttggacgagtcggtgatgatttttggtgcacggacgcagctgga

SEQ ID NO: 42971 - DNA, 134 bp, Glycine max
cgagagaccagatctaaatcctcttccaagatgcagggaagagagacagctggtgagtccgtcgaggaaacagctgcaagcattggcgcttctgccaaggctggcatgcagataaccaaggccactctccagga

SEQ ID NO: 42972 - DNA, 244 bp, Glycine max
cttaccaaagagccttggctcgtttctggtccaaattcattgatgacaaggtaactcagcttttcaaatatcttcttcttacttttcttgatttgtgctgatttgatttgtctccaaaacatcacctttcatgccatctagatgtgaaatctttgaataagtttagtgaaccctgaaaaaagttaaaaaaaaatttttcattaattgtatcaactttgtctaagatcataccaatgattggtca

SEQ ID NO: 42973 - DNA, 249 bp, Glycine max
cacgagtatacattggttagttacatttactcttgtccttcatgttctgtgcttccttttcctggcctaagcactgcgacattgacttttttgctttggtgtttggcagaataatacaaagtttgcattgtctatcgaacctgaaaacgaggaacttcaatcctatgctgcccaagtagcttaccttcgaagtaaaggcctgcccacgattcccaccacactgaagatggaaaaggcttgtaatccatt

SEQ ID NO: 42974 - DNA, 243 bp, Glycine max
agtgcacttgtacaatgcattgctgacccaacattcagttaaaacttttggaacctgttaatattttatacgcctctgagcatcatctacatgagataaatgccatttatccttagtgtttttgttttcatttgttgaataaaggaagtgctgctttgtgttccacgggaacaatggagaggtacaagttaattaaggaagttggtgatgggacttttgggagtgtttggagagctattaata

SEQ ID NO: 42975 - DNA, 174 bp, Glycine max
gtcgcaaggttgacgagtatggcaacgttgagaatcataccgacgtatacgggaaccctgttcatgctgctagtgtcacctatgtagccatcagatctgctgcttggtggtacagtgctgaccataataagcaacatgataccacccaatgcctaaggcgtagacacctggtag

SEQ ID NO: 42976 - DNA, 236 bp, Glycine max
gcagaccgagctagctagctagcaagcaagcacagagatggaggcaaagcgaggccatgccctcatgtgcttggcacgtgtttcactcttcctctgcgctctaaccctatccgctgctcacggaagcaccacggttcaagacatcgcgagaaagttgaaactcggggacaacgagcttctgcgcacggagaagaagttcaaggttttcatggagaattacgggaggagctactcca

SEQ ID NO: 42977 - DNA, 235 bp, Glycine max
tgaagatgctctcaaaatagacctctccaagaatattgagcagagtgttgaacctgctgccacaggtccatggggagcacaactttatgacaaagccataatctatgattcaactgatttatcagagacagttgtactggagtttccagagcttacgagttccacgagacgtgatcattggcttgcactagtcagagaaataatgtttctccaccagtttttatcaaagtaccag

SEQ ID NO: 42978 - DNA, 234 bp, Glycine max
atcgtgtaatggaattttgcaacaacaatgatcttcagctgattgttcgtgcacatgaatgtgtgatggatggctttgagcgttttgcccagggacatttgatcacacttttctctgctacaaactactgtggtatttgttactagcttctacattgcacctccacagataattctcccttctaaattttggcactttattgtgtcaatagatacgtcaccagaacgtcatatt

SEQ ID NO: 42979 - DNA, 223 bp, Glycine max
gctaaagaatcatatgaagtagtgcaaacagtatctgaagcatgggatcgacataattctgatgatataaggttctgtttgctggtactaatcaatgcttatataaggccggttccagggttgaagaacttgggagctaaaggtttttccaccctaaactgtatgttgaagaactgtggtcgtcaggtacttaattgcttgttggatcccaattgtaggaaag

SEQ ID NO: 42980 - DNA, 225 bp, Glycine max
gaccgagctagctagctagcaagcaagcacagagatggaggcaaagcgcggccatgccctcatgtgcttggcacgtgtttcactcttcctctgcgctctaaccctatccgctgctcacggaagcaccacggttcaagacatcgcgagaaagttgaaactcggggacaacgagcttctgcgcacggagaagaagttcaaggttttcatggagaattacgggaggag

SEQ ID NO: 42981 - DNA, 225 bp, Glycine max
cgaaagtgtccaccattagtgcggccaaaacggagatatcatcaatggatgcttctatcaaaagtagctcatcgagagatgctgatcgctccggtgatttttcaatcagcaatgctagtgatttggagactgaatgggttgaacaggatgaacctggggtttacattacgatcagagcattgccaggtggtgcaagagagctcaaacgagtcaggttcagccgag

SEQ ID NO: 42982 - DNA, 226 bp, Glycine max
cgaggatccagtgggctcatggctcccacaacgaccccaagagttgcgccccctcaaattggaagagatcaaccgtcgattcaattaccagcaatggagaatacctttgtcgggttcttttggaaatgaagtttctactgtgcttggtggaggtctcgtaccaggttctttaactttagttggtggtgatcctggtattgggaaaagtacactgctgttgcagttg

SEQ ID NO: 42983 - DNA, 253 bp, Glycine max
ggctttcataagggacttgaggactgaattcaaaggtttggatgatgtctatgtgtggcatgccctttgtggctcgtggggtggtgtgaggccaggagccacacacttgaattccaaaataacaccttgcaaactctcccctggccttgatgggaccatgcaagatcttgctgtggttaaaatagtggaaggttccataggacttgttcatcctgatcaagctaatgacttgtacgattccatgcactcttat

SEQ ID NO: 42984 - DNA, 245 bp, Glycine max
gcaagttttggtggctctaacatagatccaactgcctgggaggataaaaaatgcaaaggggaatcaaggtttccagctcaggtagtagaatataggactttgaaatggaggagaccatgtatgagctgtatctgtacatcaatgaatacaacagaggatttgtgcctcctcttccttgtaggtaagaatccgtgtcaggaatctctgcaaggcattggaagaggattctatcaggccagtgttgc

SEQ ID NO: 42985 - DNA, 236 bp, Glycine max
gcgcctcaacggaaacgggcttttgcggctacggtggagcatgcaggagcgacgtcgtccagccaggggatggtgagaggaagcggaggggacatagttcaagttgaaggcggtcacattgtgcgctccacagggcgtgacgaacgtcacagcaaagtgttcaccgccagaggctctcgtgacggacgggtgggctccccggagcacaccggcatcctgttctacgacgtactgga

SEQ ID NO: 42986 - DNA, 245 bp, Glycine max
cacacaactacaagaaagaacttccttataaccaaaaccaacaacaactatggcaagttatcagaagcactacgatgatcagggtcgcaaggtcgacgagtatggcaatgttgagaggcaaactgacgaatatggcaacccggttcatgccactagtgtcacttatgtagccaccaaaagtgttggtggctacaatgatgacgctaataagcaacatgatattactggtgtctatcccgagaaag

SEQ ID NO: 42987 - DNA, 241 bp, Glycine max
ggagcttgttgatgtcaagcttggccaagaatatgagcttgttgttacaactcatgccggactttataggtacagagtgggagatatactaaaggtatcaggattcaagaacaaggcccctcaattcagctttgtttgtagaaaaaatgttgccctgagcatagattccgacaagactgacgaggttgagcttcagaacgcaatgaaaaatgcagtgacacacttggagccatttgatgca

SEQ ID NO: 42988 - DNA, 241 bp, Glycine max
tgccattttcctttgagtgcaagattaattaatgtctgattttatgtattggtgtgttgctgcagacataccctaatcctttgcaagacaaccctgcttattcagttgttaagcagtattttgtgcatgttgatgacagcgttcctcaaaaggtcgttgttcacaaagatggtgcaagaggggtacattttaggcgtgctgggcctcgtcaaaagatgaagttcaggctgctattgttact

SEQ ID NO: 42989 - DNA, 238 bp, Glycine max
gaactgggcaatggaaagccaaagttctattcaactccagagataattgctttctgccgaaaatggcgccttccaacaaatcatgtgtggttgttttcaacaagaaaatcagcagcttctttcttcgctgcctatgatgccttatgtgaggagggtactgcaacttctgtatgcaaggctcttgatgaaattgcagacatctctgtaccaggttcgaaagaccatgtaaaagcccaag

SEQ ID NO: 42990 - DNA, 238 bp, Glycine max
ctctctctctaacccaagacagtctctttctcttcgaagcaagacggtagctttccgacccggaaaacgccctctcctcctgggactcctctgccgccaacccatgccggtggcgcggcgtcacctgtgaccctctcaccgacaccattactgacgttagcctcccctccgtctgcctctccggcccctttcccgtcatcctctgccggatcgtctccctaagcaccctcaacgtcag

SEQ ID NO: 42991 - DNA, 240 bp, Glycine max
attcaaaccttgctctatactacacagtacacacactagaagaataatggcttccatcctccactactttttagccctctctctttcttgctcttttcttttcttcttatccgactcagtcacccctacaaaaccaataaaccttgttgttctacccgttcaaaatgatggttccacagggctccattgggccaacctccaaaaaagaacccctctaatgcaagtaccagtcctggtgga

SEQ ID NO: 42992 - DNA, 245 bp, Glycine max
attagcttagggattacttctgccattactcaaggtaaaccttttacaattttcaggaaaaatatcaattaaggcttaaagtgctacaggagagtttgagagaaacttctaacagtattaatcgcggcacctcagagggaagatgtgttagcaatgggccttctcgacgtcaatccctaggtggagctgatagcatctcgaaactacacatctaatgggtttgtgacgagatcaccgtccactca

SEQ ID NO: 42993 - DNA, 230 bp, Glycine max
ggcagatgctttcgcaccagctgtagcttctggtttgatatgcggggatggaatatggactcttcctgcttcaattcttgctcttgctggtgttaagccaccaatttgtatgaagttcttgtcaagagcagcagatgcgagggtcgatactttcttagggaattaaggactagtttgaaaattggacttggctataaacttgtgcagccgtagttgaacaaaacaacata

SEQ ID NO: 42994 - DNA, 234 bp, Glycine max
agagctgagagagcttcgaatcgatactcagaagtagaaagatacacaaatcacaatcgttatggctaggtacgtccgagcaatcaccttgttctcccctgtcggccatctctttcaggtcgagtacgccctcgaagctgtccgcaagggttacgccgccgtcttggtccgcggttccgacaatgttgtcctcggcgtctagaagaaatccaccgccaaactctaagactccag

SEQ ID NO: 42995 - DNA, 234 bp, Glycine max
gggaaatgcttgatatcaggccaggcgaggccttggctgtgatcttccccttgcaactctatcacacagctgatgtgagtgttcatgttagcaacccaagggttggacttttgagcttggtaaggttactttctcccaaggtgaccacatttgtggagcaggaatcaaacacaaacacaaccccttttttcaacaggttcattgaaaccttggattactacttggcaatctttg

SEQ ID NO: 42996 - DNA, 230 bp, Glycine max
acacaacctaagcttagaatttgaaacaaagaaaagaagtaaggaaagaattgatctttgaaaatgcagggttgaaagaaagcggtagagtccattaagcaaacagctacatacattggtgcttctgccaaggctggcatggagaagtccaaggccactgtccaagagaaggcagaaagaatgtcagcacgtgatccggtgcaaaaggtgttggcaacccttaagagaga

SEQ ID NO: 42997 - DNA, 227 bp, Glycine max
cgcattcgtggaattgctgtgggcaatgaagttttgggtggcggtgactattctttgtggggagttcttctgggcgctgttaataatatttacaatgctaccgtgaaacttcatctagatctactggttcagatttctactgcaatctcgtttgcagtgttttcgcagtcctaccctcccttctctgattgatgttgcctatgctgttttggaggatgttggatttg

SEQ ID NO: 42998 - DNA, 190 bp, Glycine max
agcgggtaacattgcaggacttgttgattgtaaagatgctcctaaaccagataagtagcctgtagaggatttaaagctaattcatgagtggaaatgcagtgtaaggaaggtaataaaaattactctggaaaggctttctctaagatctgacaccgaacttaagctttctgtggcacgaaaaatgaaagat

SEQ ID NO: 42999 - DNA, 228 bp, Glycine max
  unsure (1)..(228): unsure at all n locations
acntaagtgagaaacaaagataggaaataattgatcttcgaaaatgcagggaggatagaaagctggagagtccatcaaggaaactgctgcaaacattgttgcttctgccaatgctggcatggtgaaaaccaaggtcactgtccaggtgaaggcagaaagtatgacggcacgtgatccgatgctaaaggagttggctacccagaagaatgaggcaaagatgagccaggc

SEQ ID NO: 43000 - DNA, 234 bp, Glycine max
  unsure (1)..(234): unsure at all n locations
atganaaacaaagaaaggaaatatttgatctttgaaaatgttgggaggaaagaaagcttgagagtccatcaaggtaacagctgcaaacattggtgcttctgccaaggctggcattgagaaaaccattgccactgtccatgagaaggcagatagaatgacggcacgtgatccgatgcaaaaggagttggcaacccagaagttagaggcaaagatgagccaggcagtgctggacaa

SEQ ID NO: 43001 - DNA, 131 bp, Glycine max
ggcgttttcatcggctgcgtcgtcaatcacgccgtcatcgacggcacctccttctggaatttcttcaacaccttcgctcagctttctagaggagccattaactgcatccgcaatataccggttttccaccg

SEQ ID NO: 43002 - DNA, 188 bp, Glycine max
aacaactactacaagtacttccttacaatcaaaaccaacaacaactatggcaagttatcaaaagcactactatgatcagggtctcaaggttgacgagtatggcaacgttgagaagcaaacctacgaatacggcaaccctgttcatgctgctagtgtcacctatgtagccaccagaactgctgctggtg

SEQ ID NO: 43003 - DNA, 230 bp, Glycine max
gcggctgaatacctagcggagaagatgagtcatgagcagccacggcgtctcaaaggccaaaaccccttcaaatacggcgacgtttttgtcgtctccggcgaccttgcacagaagcccgtcgcaccggaagttgctgccatgatgcaaagcgcggaaactcgattgctcggacaaacctaacccggcggagatccttccgtcatgcactctgccgccaccacgaatgaaca

SEQ ID NO: 43004 - DNA, 231 bp, Glycine max
gaacctaagtgagtaacaaagaaaggaaataattgatctttgaaaatgcgcggaggaaagaaagctcgagagtccatcaaggcaacagctgcaaacattggtgcttctgccaagtctggcatggagaaaaccaaggccactgtccaggagaaggcagaaagactgacggcacgtgatccgatgcaaaaggagttggcaacccagatcatagaggcaaagacgagccaggca

SEQ ID NO: 43005 - DNA, 230 bp, Glycine max
ctgctgttcaggctgcgatcttgagcggcgaatgagacgagaaggttcatgatttattgctgctggctgttacaccactcattctcggtcttgaaatgtctggtggtgtcatgtctgtgctgattccgcggaacacaactattcccccgaagaaggagcagtttttctcaacctattctgataaccagccctgggtgttgatccatgtgtttgaaggagcacgggctaga

SEQ ID NO: 43006 - DNA, 230 bp, Glycine max
gtgtttttgacttcctcggtaagaaaaaggatgaagaagacaagcctcatcctcaggaggaggtcttcgccaccgagtttctaaaagtcactgtcttagaccaaggagagaactagcacagcctcttagttaagcttcaccgatctcacagcagctctagctcttcaagtgaggaggtaggagaagatggatagaaaaggaagaattagaagaaggaaaacaaagggctg

SEQ ID NO: 43007 - DNA, 226 bp, Glycine max
tctgagtattccgatcgctccctgagagatctcgtcgcggcggttgtcgaagaagattgcaagttgaagttcaacatcgcgaatcccaccactggatgccagaagaagctctagatcgacgacgatctgaaactgcgagcatttcgggacaagaggatctcacaggaggtcatcggagatgcactcggttaggaatttaagcgctatgtcttcaaaactaccggag

SEQ ID NO: 43008 - DNA, 229 bp, Glycine max
acaagtacttctttacaatcaaaaccaacatcaactatggcaagttatcaaaagcactacgatgttcagggtcgcaaggttgacgagtatggcaacgttgagaagcaaaccgtcgaatacggcaaccctgttcatgctgctagtgtcacctatgtagccaccagaactgctgctgttggttacagtgatgacattaataagcaccatgataccaccaatgcctacggcg

SEQ ID NO: 43009 - DNA, 233 bp, Glycine max
ctctgttctctcttttgttctgtttcgcgtattgtcttcatacaggaccttgaacaatgaagattgcaaagggcaagggcgcagcaagggcctcataagaatcactgaagctcgttgatgaccgaaagtttggaaagcggaaggtttccggtaagcctggtagaagtagtgcaccaaagaaggagaagatggccaagaaagactccaacaagcctaaactaccacccagtgtt

SEQ ID NO: 43010 - DNA, 232 bp, Glycine max
ggaaataatttatctttgaaaatgcagggcggaaagaaagctggagtttccatcaaggaaacatctgcaaacattggtgcttctgccaaggctggcatggagaaaaccaaggccactgtccaggagaatgcagaaagaatgacggtacgtgatccgatgcataaggagttggcaacccagaagaaagaggctaagatgagccaggtagagctggacaagccggcggcgcgtc

SEQ ID NO: 43011 - DNA, 227 bp, Glycine max
actctgttgcctgatgggtgtccatatttgtatgctatggtgcattatagttcagtgtctattataccaggtgatttcttcattggtgttaatgtgacaaccataaacattatgtgtgcatatggtctcaatcctggtatttcaggttctcgtctttttggcaccattcctcattctatttcacagctaactgtttggaatcaaatggcaacagtttgaacaccatt

SEQ ID NO: 43012 - DNA, 231 bp, Glycine max
gaccccatcatatacggcgacgtttttgtcgtctacggtgacctttctcagatgcccattgctccggaagatgctgccttgatgcaaagcgcggtcatctcgagtactcggattaacccaacccggcgtatgttcttccgtcatgtaatccgccgccacaacgaatgaacaggctggtcttgtcggtcacctggacgtcaccgacttcaccggcgaccatcgcgtcacagt

SEQ ID NO: 43013 - DNA, 228 bp, Glycine max
gttctagatcgcgagcggccgcccgcgattaagaatttttctttataaaaatcattttgctatttctatactttttattaattttgtccctgaattcttcttgttctatttctttttcaaagtgtgccataacagaaaagacttcatgtgacaatgggtgtaatggaggtcttatgacaaatgcctactattatttgctcgattctggtgggttggtggaggagtctt

SEQ ID NO: 43014 - DNA, 228 bp, Glycine max
gaaagaactttcttataaccaaaaccaatcacaactatggcaagttttcagaagcactacgatgatcagggtcgcaaggtcgacgagtatggcaaggttgagaggcaaactgacgaatatggcaacctggttcatgccactagtgtcacttatgtagccaccaaaagtgttggtgtctacaatgatgacgctaataagcaacatgatattactggtatgtatcccgag

SEQ ID NO: 43015 - DNA, 251 bp, Glycine max
ctcgagccgctcgagccgattcggctcgaggccagttaaggttgcatacagcatattgaattgcttggactaggacattggtgctgactgggacaacgactatcaattggatcttggtctggttattgatgttcctgtcattggcatcttcaccattcctctctctcagaaaggagagatcaagctaccaaccctctctaccatgttcgcctaatcgcatccacaaagcttaggataaaataaatgcattg

SEQ ID NO: 43016 - DNA, 251 bp, Glycine max
cggcatttgattccaagagttttagaccagcatggattgagttctgagtttcttcagattcctgaggcaatggtgaagcttgttattcagagatatactagggaagctggtgtgcgaaacttggagaggaatctagctgccttggctcgagctgctgcagtaagagttttagagcaagaacaagtagttccattaaacaaagggatgcaaggacttgctacaccacttgtggaaaacagacttgctgatgg

SEQ ID NO: 43017 - DNA, 249 bp, Glycine max
ggcaagttcatgctagaggagggtgcagagatgcagtggaaggaagaaagagaagtgcatgtgatgggtggaccagtagaggagtttgcaaggttgatagtatcaggggcatgtagaggagatgcatatgtgaagtttcctagctggtatgatgtattcctactatacagggtgtttgctccaagagttcttaactgggcattcaggtttcttatttcgccacaagggacaagaagagcttcttcttat

SEQ ID NO: 43018 - DNA, 246 bp, Glycine max
cacaactacaagaaagaacttccttataaccaaaaccaacaacaactatggcaagttatcagaagcactacgatgatcagggtcgcaaggtcgacgagtatggcaatgttgagaggcaaactgacgaatatggcaacccggttcatgccactagtgtcacttatgtagccaccaaaagtgttggtggctacaatgatgacgctaataagcaacatgatattactggtgtctatcccgagaaagaca

SEQ ID NO: 43019 - DNA, 247 bp, Glycine max
tgcttctcgacaaaaacgaccagctcggacgcccctttgtgttgattctcccgatcctccaagcctcgttccgagcctccctgcaacccggtttggatgattacgtggacgtttgcatggagagcgggtcgacacgtgtctgtggctccagcttcgggagctgcttatacgtccacgttggccatgacccgtatcagttgcttagagaagcaactaaagtcgttaggatgcatttggggacgttcaa

SEQ ID NO: 43020 - DNA, 267 bp, Glycine max
caagaaaagaaaaaaagaagagttgagattccctttgaagaaaagatggcatcccataggcaaagctatgaagctggtcaaactaagggccgaactgaggaaaagacgaaccagacgatgggcaatattggagagaaggctcaagctgcaaaggagaagacccaggaaatggcccaagctgcaaaggagaagacccaacaaacagcccaagctgccaaggacaagacttgcgacacttcccaagcggcaaaggagaagacccaacag

SEQ ID NO: 43021 - DNA, 262 bp, Glycine max
ggtttgattaccaagcaagttatgagcaagatggcagaaatgataaacagtctttgtggtggtgaaaaaattgatgcgtgaaaggacacacctgctgttggcttgttgttcaaggatggcaatttgtaagaaagatgtttggagagttgaatgtggaatcccttctggatttccgctcacagttatttgtaatagcatttttaatgagatgctcattagatatagctatgaaaaattactgcgccaggctaaagctccaagt

SEQ ID NO: 43022 - DNA, 259 bp, Glycine max
gtgatgaaatttctataatgtgctgattttctgtgattattatcctaaatatcaccatctttcggctgagattgcagatcaaattgttcttttctatgaaaattttatcctagtctgtataaataaccttttctttttttattcaacagacaaactggcgtagaccaaagggtatagattcccgtgttaggagaaagttcaagggatgcactttgatgccaaacatcggttatggttctgacaagaagacccgccacta

SEQ ID NO: 43023 - DNA, 259 bp, Glycine max
cttggacttgcagggttgctatgttggagatcaaggtctagctgctattggacagtgttgcaaacaacttgaagatttgaatctgcgtttctgtgaaggcactagctgcttgtctttggagttattggctttatatagttttcagagatttactgataagggtttgtgtgctattgggaatggatgtaagaagttaaagaacttgactttaagtgattgctatttcctcagtgacaagggtttggaagtaattgctact

SEQ ID NO: 43024 - DNA, 254 bp, Glycine max
tagttctagatcgcgagcggcctacttttttttgatgaatttgattctatagcccccaagagagggcatgacaatactggagtaactgatcgtgttgttaatcaatttctgactgagttagatggtgttgagattttaactggtgtatttgtgtttgctgcaaccagtagaccagatttacttgatgcagcactgttgagacctggtaggttagatcgtcttctgttctgtgactttccgtctttgcatgagag

SEQ ID NO: 43025 - DNA, 256 bp, Glycine max
atgcagcataggctcatcaaatctggagtagtggttgctcgtttctttgtggcactgcatgcaagacaagaaattaatgcagagttgaagaaggaagcagaattttttggtgatattgttatagtgccgtatttggataactatgatcttgttgtgttgaaaacagtggccatatgtgaatatggggtacatacggtttctgctaagtatgtcatgaaaggtgatgatgacacttttgttagagtggatgccgtta

SEQ ID NO: 43026 - DNA, 179 bp, Glycine max
gtttaaacctaattctcatttcttcatcgttcgattcttctcctcctaaagatgcagatcttcgtgaaaactttgaccggtaagaccatcatccttgaggtggagtcctccgacactatcgataacgtgaagcttagattcaagacaaggaatggatcccacctgaccagcagagactt

SEQ ID NO: 43027 - DNA, 248 bp, Glycine max
attctttcaggccaaggcaatgcaggatcccgaaattcaaaacatccttcaagaccctgttatgagacaggtttgcttcctttttgattgaatgttggtatgtattgtggtagtgaaacaagagtgaaattgcttataagttggatgcgtactgtctatgcaggtattgattgatttccaagaaaatcccaaggctgcacaggaacacacgaagaatccaatggtgatgaacaagatccaaaagctgg

SEQ ID NO: 43028 - DNA, 248 bp, Glycine max
tgcagaccgagctagctagctagcaagcaagcacagagatggaggcaaagcgaggccatgccctcatgtgcttggcacgtgtttcactcttcctctgcgctctaaccctatccgctgctcacggaagcaccacggttcaagacatcgcgagaaagttgaaactcggggacaacgagcttctgcgcacggagaagaagttcaaggttttcatggagaattacgggaggagctactccacagaggaggag

SEQ ID NO: 43029 - DNA, 234 bp, Glycine max
gttctagatcgcgagctaccgcccttttttgtttttatttttttttttgtcttcgtttcattctctctggaggtatttgaccctttcgagggggggccggtggccacaggtcacgtgccttcctctggtggggaaagcagtgccatagccaacactcgcgtggactggaaggagactccggcggctcacgtgttcaacgttgatcttcccgggttgaagaaggaggaagtgaag

SEQ ID NO: 43030 - DNA, 242 bp, Glycine max
ggctgctgctatcgaatactcggataaggagggtaagggcggtgaagtgcagtacttcaatccccttttctctcttctccttttatttcatcactcacacatgcccagttctctccaccagatggattgccttatgatgaattcttttcacaaagatctgagtctctcttgaaggttcttaggtcaggtgccaggataaagaaggaagcctttcaggctgcttccattcctgttgttttggt

SEQ ID NO: 43031 - DNA, 241 bp, Glycine max
ttcagatttttccggtgtcactcctaagaaaaaggagattcagactccaaacccaatgctgactccttctgcaactcctggagctgcaggtctcactcctagaattggcatgacaccaacagagatggtttttcttttagcatgacaccaaagggaactcctcttagggatgagctacatattaatgaggacatgaatatgcatgacagcactaaacttgagctacagagacaggctgata

SEQ ID NO: 43032 - DNA, 225 bp, Glycine max
tgccaggaacaggcctaatatgacacgttttagactatgtattatcgagcctcaagctcctgaccatcttacccatcaacctctggatgctggttttggagctattgtagagcattgcaaggatcttcagcgcctttccctttccgggcttcttactgaccgtgtttttgaatatattgggacttatggcaagaagcttgagatgctttctgtggctttcgcggg

SEQ ID NO: 43033 - DNA, 220 bp, Glycine max
cagattgatcagaagaatgaagcagttctcttgcctataaatggaagcatggtaccttttcatgtggctttcattcgaactgtttccagccagcaggacaccaaccgcaattgctatgtcagaattatttttaatgttcctgggactcctttcagtcctcatgatgcaaactcaatgaagttccctggatctatatatttgaaggaggcgtcattccgct

SEQ ID NO: 43034 - DNA, 217 bp, Glycine max
cacacacaactactacaagtacttccttacaatcaaaaccaacaacaactatggcaagttatcaaaagcactacgatgatcagggtcgcaaggttgacgagtatggcaacgttgagaagcaaaccgacgaatacggcaaccctgttcatgctgctagtgtcacctatgtagccaccagaactgctgctggtggttacagtgatgacattaataagca

SEQ ID NO: 43035 - DNA, 221 bp, Glycine max
cttgcatacagcactacctagctcgcaagcaagcacagccatggatgcctcgcgtcgccatgttctcatctgctttgcacgtgtttcactcttcctctgcgctctatccctatccgctgctcacggatcctccacggttcaagacatcgcgataaagttgacactcggtgacaaccatcttctgcgcatgtactagaagttcgtggctttcatcgatactt

SEQ ID NO: 43036 - DNA, 250 bp, Glycine max
ctcgagccgctcgagccgtgcagaccgagctagctagctagcaagcaagcacagagatggaggcaaagcgacgacatgccctcatgtgcttggcacgtgtttcactcttcctctgcgctctaaccctatccgctgctcacggaagcaccacggttcaagacatcgcgagaaagttgaaactcggggacaacgagcttctgcgcacggagaagaagttcaaggttttcatggagaattacgggaggagcta

SEQ ID NO: 43037 - DNA, 252 bp, Glycine max
ctcgagccgaatcggctcgaggctagctagctagcaagcaagcacagagatggaggcaaagcgaggccatgccctcatgtgcttggcacgtgtttcactcttcctctgcgctctaaccctatccgctgctcacggaagcaccacggttcaagacatcgcgagaaagttgaaactcggggacaacgagcttctgcgcacggagaagaagttcaaggttttcatggagaattacgggaggagctactccacaga

SEQ ID NO: 43038 - DNA, 246 bp, Glycine max
cgtaaaattattttcagattccttctgttaatgctctctctctttctctctcatgatttctattatcttctaatctcccttcagttcctctgaagcgcacaaccagctggtcttttgacgaaaagcttcttatacagtctctctataaggttctggcttttgtgtcaaaaacctatcccattgtgctatatttgcgggatgttgataggctgttatataaatcacaaaggatatataacttgttcc

SEQ ID NO: 43039 - DNA, 140 bp, Glycine max
tagcaattggtgcaacagtggctccatttgttcgggttcttgtatggatatgctttcctgttgcttatccaattagcaagttgttggattatttgctggggcatcgacatgaagcccttttccgcagagctgagttgaaa

SEQ ID NO: 43040 - DNA, 239 bp, Glycine max
ttcagagacagacactgccaactatatcatcgacagatggtatagaaaccacgggaatagttggtggtaacatggcttccaaaagaaaaagaaaggcatggtcagaagaagaggacatgcagctacgagctgctgttcaaagatggggtgaagggaattgggcaaccatggcaaaaggagacgactttcctattaagagaagtgctacacagttggctcagaggtggagcattttacga

SEQ ID NO: 43041 - DNA, 243 bp, Glycine max
cgagaaagttgaaactcggggacaacgagcttctgcgcacggagaagaagttcaaggttttcatggagaattacgggaggagctactccacagaggaggagtatttgcgccgtttggggattttcgcccagaacatggtcagagcggcggagcatcaggcgctggaccccaccgccgtccacggcgtcacgcagttctccgatctcaccgaggacgagtttgagaagctctacactggcgtca

SEQ ID NO: 43042 - DNA, 241 bp, Glycine max
tacaagaaagaacttccttataaccaaaaccaacaacaactatggcaagttatcagaagcactacgatgatcagggtcgcaaggtcgacgagtatggcaatgttgagaggcaaactgacgaatatggcaacccggttcatgccactagtgtcacttatgtagccaccaaaagtgttggtggctacaatgatgacgctaataagcaacatgatattactggtgtctatcccgagaaagacac

SEQ ID NO: 43043 - DNA, 238 bp, Glycine max
caaaacagtaaagctaacttcaacacctttaattttctaaaagtaattcagcggctgaataccaagcggagaagatgagtcaggagcagccacggcgtcccaaaggccaaaaccccatcaaatacggcgacgtttttgtcgtctccggcgaccttgcacagaagcccgatgcaccggaagcatgctgccagaagcaaagcgcggaaacacgagagcacggacaaacccaacccagcgg

SEQ ID NO: 43044 - DNA, 183 bp, Glycine max
gttgctgttaaggttctgagatcggagcaattgaatgatgccttagaggatgagtttgctcaagaagtggcaattctgaggcaggtgcatcataaaaatgttgttcgtttcattggtgcatgtacaaagtgtccacatttgtgcataataacagtactttcaggggatttattagctaaaaca

SEQ ID NO: 43045 - DNA, 252 bp, Glycine max
gaatgaatgtgaaagatgatttggtggtgttgcttgatcatattcagtatgcttgcaagagaattgcagcacttgtggcttctcctttcaattacagccttggcaaacaaactgctcttggttctgttggttctgatagggatgctccaaagcctcttgatattgtctcgaatgaaattatcttgtcatcactccgaaaatccggaagagttgctgtcatggcttcagaagaaaatgacgcaccgacttgga

SEQ ID NO: 43046 - DNA, 253 bp, Glycine max
gcggcggaatcccacctgggattctgctaatacgaggaaagcaatggaacctccagacgcaccgctacatggtgctcctcaccaccttcgtcgcctacgcgtgctaccacgcgtcaagaaaacccaccggaatagtcaagagcgtcttatgccccgaacacaaaggaacctcgcaaggctggagcccattcaacggtcacgatggaacgtcgaagctgggcgaaatcgacgtggcgttcttagcgtgttcact

SEQ ID NO: 43047 - DNA, 223 bp, Glycine max
cttccaccaagttatgggtttccttgtgttgcttcttttctccctcttaggtctctcttctagttccagcatatcaactcatcgttccatattggaccttgacctaaccaagtttaccacacagaaacaggtgtcttcactgttccaactatggaagagtgagcatggacgtgtctaccataaccacgaagaagaggcaaagagacatgtagattttcaagaa

SEQ ID NO: 43048 - DNA, 256 bp, Glycine max
gcattgtatttggaacagttatgggaagtgttggggcattacatgcctttacttcacgagatgatgttgatttcttttctcatttggagatgcatatgaggcaggatcacccacctttgtgtggaagagaccacatggcatatagatctgcctattttcctgttaaggatgttattgatggggatctatgtgagcaatacccaacattgccaatggatttgcagagaaaaattgctgatgaattggacagaacccc

SEQ ID NO: 43049 - DNA, 256 bp, Glycine max
caagtccgtcgtcaagcgccagtccggattcggaccatctacgaaagtcagctccttgagtatgaccctgataggcacttggctgttttctggatttcctgtgaggctggcacctatgttaggactatgtgtgtgcacttaggcttgcttcttggtgtgggtagccacatgcaggagcttaggagggtcaggtctgggatcatgggggagaaggataacatggtctccatgcatgatgtcatggatgctcagtggg

SEQ ID NO: 43050 - DNA, 229 bp, Glycine max
gaagagattaaggggaagaaatattttggaggggagaatataggataccttgacattgcacttggatggatctcttactggcttcctatttgggaggaagttggatcgatacagataattgacccattgaaatttccagccatcactgcatggatcaccaattttcttagccatcctgtgatcaaggacaacttgcccccaagagacaagatgcttgtttacttccaca

SEQ ID NO: 43051 - DNA, 234 bp, Glycine max
tttcaatctctctacctaatttctgtctctctctctcctgtatttgtcttgattccaatgctccgcaaggtttcgagcatcgtagagaacagttttgccatattaggtgcatcttccatttaagataagctgcaacaaggtgtgcctgaatccattgagtctctaaggattgcaggcattaaagtatgggttctgactggagacaaacaagaaactgccatatccattggctac

SEQ ID NO: 43052 - DNA, 234 bp, Glycine max
ctcgagccgattcggctcgaggcagggagagtacaacgtgagagtacaactcaataagaatcaaccagcacagtgtgttcccactgaacaagatatcatccaccatcgtagggtcgacctctggaggaaccatgattagcacctcaactcctcacatggttctccagcaatccgtgtaccaggctttcactcaggtgtttgctcagcagctaccaaagcaagcacaggtgaaat

SEQ ID NO: 43053 - DNA, 233 bp, Glycine max
tctcttttgatggacaagctaagtatcctctaaaccttggccttggaaacaaggaattgaagaatgcaaagaatgttcagtatcttccatctagatggtgtgtggcaagcccctctactgatgctcaaaatgtagcaaaccatatgagaattgcatgcagtgttgcggattgcaccacacttgattatgggggttcatgtaatggaattggagagaagggtaacatctcatat

SEQ ID NO: 43054 - DNA, 232 bp, Glycine max
ggagaggacggcccaacccaccagcctattgagacgcttgctcacttccgcgctctgcccaacatgatggtctggcgtccagctgacggaaacgagacttctgctgcatactacgtcgctctcacttcggagaagaccccatcgatcctcgcactcacccgccagaacctgccacagctcgagggctcaactatcgagaacggaatcaagggtggttacgttgcagttgagg

SEQ ID NO: 43055 - DNA, 226 bp, Glycine max
aagtaattcagcggctgaataccaagcggagaagatgagtcaggagcagccacggcgtcccaaaggccaaaaccccatcaaatacggcgacgtttttgtcgtctccggcgaccttgcacagaagcccgtcgcaccggaagatgctgccatgatgcaaagcgcggaaactcgagtgctcggacaaacccaacccggcggagaagcttccgtcatgcaatctgccgcc

SEQ ID NO: 43056 - DNA, 248 bp, Glycine max
cgtttaggttaatggaagagaaaaccgtgccggggattattgacaagttcgggtggtgcacgtgggacgcgttttaccttaacgtgcacccggaggaggtgcgggaaggaattaagggcctggtggagggagggtgtcctccggggttggtactgatcgacgacggttggcaaacattttgccgtgacgacgaagccgtgagcgacggggggagtttaaattgctctgtgccgggggagcagatgctg

SEQ ID NO: 43057 - DNA, 258 bp, Glycine max
ccagtgttgaagaggcctacaacaagctaatagttgaacttgagaaaagtgttcctacattggttggcattgaatgtcccaaggatgagaaacttcctcgtcgcaaaatttttgacaaacctaagacgcgctgcttcactattctccctatggagtttaatcttgtggttcgtcagaagtttttaaattttgtgaggttcattatgaagaaaagggacaagcttagttgtcaagttggaatcaacccatactccatgg

SEQ ID NO: 43058 - DNA, 250 bp, Glycine max
ctttggaaactgttgttgagtgagaagttacatgtgaagccggatgtcttcacgtgtaataatttgattcagggactttgcaaggaaggccgtgttcatgatgctgcaaggatccattcttcgatggttgaaatggggctcagaggtaacatagtaacttacaattttttgattgagggttatctagctgctcggaaacttattgaggcgttaaaactctggaaatatgcggtggagtctggattttctc

SEQ ID NO: 43059 - DNA, 257 bp, Glycine max
cttcatttgagctttgaagaatcaatatttggaggacagagggagatcgaagtttcctgttttcagacatgtaatatgtgtgatggtacaggagctaaatcaaagaattgcattaaacaatgcaacaattgtggtggcagagggggagaaatgaaaactcagagaacaccctttggaatgatgtctcaggtttctacctgctctaagtgtggtggccttggcaaaataatcaccgatcaatgtcgaaggtgtatggc

SEQ ID NO: 43060 - DNA, 251 bp, Glycine max
gagggcgtggggagcaccgaattggacgaggcgttcagcgccgcgacggctttcgtggccgccgccgccgccgatcggctatcgcagaaggtgtcgagcgacgtgcagctacagctttacggtctttacaagattgccaccgaacgtccctgcagcacgccccagccttcgcccctcataatgaccgcacgtgccacatggcaagcgtggcagaaattgggtgctatgcctcctgaagatgcaatgcagaa

SEQ ID NO: 43061 - DNA, 251 bp, Glycine max
actttgttatggaatatgctaaaggtggagagttgtttaagaaggtggccaaaggaaagctcaaagaagaagttgcacacaagtattttaggcagctagtgagtgcagtggatttttgtcacagtcgaggtgtataccatagagatataaagccagagaacattctgttggatgaaaatgagaatttgaaggtctcggatttcgggttaagtgcgttggccgagtccaaacggcaagatggcttgtgcaca

SEQ ID NO: 43062 - DNA, 218 bp, Glycine max
ccatttctcacctgacatgtgcagatttccttcgagcccctggagttcagacgcctgtaattgttcgtttctcaactgtgattcatgcgcgtgggagccctgaaaccttgacggaccatcgaggatgtgcagtgaagttttacaccagagagggtaactttgaccttgttggaaacaaccttcccgtcttctctgtacgtgacggcatgaaatttcca

SEQ ID NO: 43063 - DNA, 220 bp, Glycine max
aagcgcgttgcaatgaggaagcttgagaaggtacggaagaaggccaatgccatatcagatcagacagagatatctgatagttcgaagaggaagcaaattgaacaactatataaaagggctgttcccaagaggcctaaaaaggagtatgtagttgcaaagaaaggtgtccaggtaagggctggcaagggaaaagtccttgttgatcgcagaatgaagaagg

SEQ ID NO: 43064 - DNA, 260 bp, Glycine max
agcggcagaagaagacgccgcctccatggtgaagtactccagagaatccgagaatctcaacaagtcatgagatgccacatgcgctgacctcagactgcggtacaagaacactaggcagactgcctttgccatcaggacgttgcccctggataaaagcgtagatagcatacctggaaagatgctttggctcattaacaggccatcccattccgaacgttctgtggtggtgttgggaggcgaactaatctaacagcagacac

SEQ ID NO: 43065 - DNA, 175 bp, Glycine max
agtcacccctacaaaatctgtaaacctcgttgtactacccgtacaatatggtagatccacagggcgccattggcggaacctccaatcaagatgcccactaatgcaagtctgagtcctgcgaggacctgcactggatgtcacttctgggtcaactgcgagtagcagtactcatcca

SEQ ID NO: 43066 - DNA, 262 bp, Glycine max
cggaaagatttcgggagctttaggattactggaatgagtctcaaggtaaccttagacttggtcctcctgctccagacgggtggatttctgagtttagtcaacaaagggagagatatgagagttccgatacatgggctaactcatctgagctggagtattgtgcaagtggttgggtgtctgggtttgtgcattcctaattgtcatcgctagatctcgtgtgatggatgaacatgtctaagtatgctgcaagggagcaatgtcg

SEQ ID NO: 43067 - DNA, 265 bp, Glycine max
tcggttgcagaccgagctaactagctagcaagcaaacacagagctggacacttatcgaggacatgcgctcatgtacatggtacgtgtcacactcaaccttaacgctctaatcctaactgctgctcaccgtatcaccactgttcatgacatcgccaaaaagttcactctccaggacaacgatcttctgatgcacggagtagaagttcaaagttttcatccagaattactcgcagaactactgcacagtgccggagtcttttcgccg

SEQ ID NO: 43068 - DNA, 259 bp, Glycine max
cgcatattacgtcatcaactattccatggcaaactgggtttgattctctggggggtacacgggctcaatctcagtatgccatggcatattacgtcatcaactattccacgctacgtatttgggagtttgtggagtacagcaagatgatatacctagacggtgatatccacgtttttgacaacattgaccacttgtttgacttgcctgataactacttctatgcggtgatggactgtctctgtgagccaacttggggcca

SEQ ID NO: 43069 - DNA, 266 bp, Glycine max
cgcacacaactactacaagtacttccttactatcaaaaccaacaacgtctatggcaagttatcaaaagcactacgatgatcagggtcgcaaggttgacgagtatggccacgttgagaaccaaagcgacgaatacggcaaccctgtacatgctgatagtgacagctatgtagacaccagaactgctgctggtagatactgtgatgacatttataagcaacatgataccaccagtgcctacggtgtacacactggtagacaacattct

SEQ ID NO: 43070 - DNA, 259 bp, Glycine max
atgccaagtacgcgcccgtctacttcgagacgtactaggtcgacggcaacatgaatgctgagccgccggacgtcgtcgattcgattcggactatcaaggtctgtctcaatggatgactcgttagccccataggcggtggcgtcagctgccacaatgttcagactctggaaagagcttgatctctatgcttctctggttagttgtctcaatctccctggcttacccacgcgacatgataatgaggatatcgttgtcatca

SEQ ID NO: 43071 - DNA, 257 bp, Glycine max
cggccatatatgccataggcatcattctcggaaagggtggcatatttgctagagcatgaggtgctgtcagcgtactaattgcggcagagggcgcatcggccacgttccaattaccttctatggtggtccgtttgatatcgaaaaactgctcggcaacagtctgacagctgggatatgtccgagtaaccagctcgatttgggtagagccggatctagatgttggctagttcaacgtcctgtagtaagaggtgtagtta

SEQ ID NO: 43072 - DNA, 128 bp, Glycine max
acgagaagatgcgtagaccaacagagatgccgtcctcataggcgaagatgaaaaccctggcaagtcgtgccaaggcacaagtcgacatctatagagccatagtagacgcgaaggcagcgaaagcaacg

SEQ ID NO: 43073 - DNA, 234 bp, Glycine max
tagaagagacttcatgtgacacttgttgtcacagtcaaggagctgttgttcactaagactgtcataacagaaaagacttcatgtgacaatgggtgtaatggatgtcttatgacgaatgcctacaattatttgctcgagtctggtgggctggacgaggagtcttcatatgcctacacttgggtgagatgtgaatgctaatttgatctggagtgtatagcagttgagatccaaatt

SEQ ID NO: 43074 - DNA, 235 bp, Glycine max
ctcgagccgaatcggctcgaggcagattaaaagggatggaattaccaagcttgttattcttccactttatccacaattttcaatatcaaccagtggctcaagcctacgtctactggagagtatattccgagaggatgagtatctagtcaacatgcagcacacagtaataccatcatggtatcaacgtgaaggatacataaaggccatggcaaatttgattgagaaagagttgaga

SEQ ID NO: 43075 - DNA, 232 bp, Glycine max
cttgagatgatacaatcagagatgaaacacttaaggaaatgtctaccgactatggtacaatctcttcttgcaaagttatgcgagaaccgactggaatcagcagtggatcacgattagttgcagtatcaactcctgaggtagcaactcgagctattggtgcgatggatggtaaaatgcttgctggagaacctctgtatgttgcccttgcacatagaacagttgagagaagaca

SEQ ID NO: 43076 - DNA, 254 bp, Glycine max
gtctgaatatgaccattcttgtctacgttcctgtcgatcacgagctttgtacaaagggatgaaggttggggcaactccggatttaatggtagcatacattgatttttttcttggtggtgatgagaagcgattagacattgtatcaattatacagaagagatttcccatgtgcataatttttggtggggatgggagctacatggcaccttataatcttcacaatgatacactgttgaccaacctccttggtcagc

SEQ ID NO: 43077 - DNA, 253 bp, Glycine max
cccagaaaacaaccccacacagcaatttcaaaatcgatatactgagccagataatcgtgactggcgtggaagatctggccaactttctggtaatgcagatgagaggtcttgggataatctcaaggagaatagggagtttggcaatactagtaatcgtcaagaccaactgaactctcagtttgcaaggacacaaatctcttctaaccaagggggaggacctactccgacactagtcaaggctgaggtgccatgg

SEQ ID NO: 43078 - DNA, 248 bp, Glycine max
cacacaactacaagaaagaacttccttataaccaaaaccaacaacaactatggcaagttatcagaagcactacgatgatcagggtcgcaaggtcgacgagtatggcaatgttgagaggcaaactgacgaatatggcaacccggttcatgccactagtgtcacttatgtagccaccaaaagtgttggtggctacaatgatgacgctaataagcaacatgatattactggcgtctattccgagaaagaca

SEQ ID NO: 43079 - DNA, 165 bp, Glycine max
cttcttttattatatgtgtgtttgtcttttctctcacctgaacatgtcttgttgcggtggtaactgtggttgcggaagcgcctgcaagtgcgggaacggctgcggtggctgcaagatgtccccagacttgcgcttcaccgagtcaaccagcatcgcgaccttggt

SEQ ID NO: 43080 - DNA, 235 bp, Glycine max
gttcttatgctagcttaaatgctagtgtcttagtgttttaggaaaggataggttataaaaatggtataggtagcagctaggtcaaagtgtcatgtcattgtgtcgtgaaattattagctagcatgtttagtgttttagggtttcttttgcatgtgtgtttctcttatggggtgtaactgatgagtgaggcatggctctactatagctatctaaaaaataatgcaagctttttttt

SEQ ID NO: 43081 - DNA, 242 bp, Glycine max
gagaagtacaaggctgaggatgaggagcatcttctcaatctcctccttagaaagccttcctttgtcgttggtaattgtaatcttgatcttctgttgttggatgttactcctctctcccttgggttggagaccgcgggaggagtcatgactgtgttgattcccagaaacacaaccattcccaccaagaaggagcaggtattttcgacctattccgacaaccagcctggtgtgttgattcaggt

SEQ ID NO: 43082 - DNA, 266 bp, Glycine max
caacaactatggcaagttatcaaaagcactacgatgatcagggtcgcaaggttgacgagtatggcaacgttgagaagcaaaccgacgaatacggcaaccctgttcatgctgctagtgtcacctatgtagccaccagaactgctgctggtggttacagtgatgacattaataagcaacatgataccaccaatgcctacggcgtagacactggtagacagcattctagtggtggctacgatggtgacactaataaacatcatggaact

SEQ ID NO: 43083 - DNA, 212 bp, Glycine max
cggctcgaggtacggaattgaaagctgggcgagagggagtcgctataggggacaatataggcaagggttgaggcacggttatggggtttataggttctacactggggattcttattcaggagagtggtgtaacggtcagagccatggcgtgggtcttcaaacttgctccgatgctagctgttatattggtcaatttaagtatggcgtcaaac

SEQ ID NO: 43084 - DNA, 233 bp, Glycine max
tgcagaccgagctagctagctagcaagcaagcacagagatggaggcaaagcgaggccatgccctcatgtgcttggcacgtgtttcactcttcctctgcgctctaaccctatccgctgctcacggaagcaccacggttcaagacatcgcgagaaagttgaaactcggggacaacgagcttctgcgcacggagaagaagttcaaggttttcatggagaattacgggaggagctac

SEQ ID NO: 43085 - DNA, 216 bp, Glycine max
taatgggtgatgtggttacagtttgtgatatctgtggggatcaaggatttgaagagtatcttgctatttgtaacaagtgtcctgatggggcagaacacatttattgtaatgatgaaaagttggaaaaagtgccagatggtgattggtggacctgcgaagactgcaggaagtcaccaggtaatgaattaccaacattgggctcacaaaccgagatag

SEQ ID NO: 43086 - DNA, 252 bp, Glycine max
aactcggctcgacgcttgcatatgatgactatggctagttatcggaagcactacgatgatcatggtcgcaaggttgacgagtatggcaacgttgagaagcataccgacgaatacggcaaccctgttcgaggcgttaaatcaacgggcagtggctgtggtggtggagcctattcagagtgttaaaggcaaagtggtaattgatgctttccggctgattaatccacaaactatgatgctgggtcaggaaccacg

SEQ ID NO: 43087 - DNA, 241 bp, Glycine max
agttgtgatcaactacgttacttctctcttggttttcttcatcttccaccttcacctgttggaatggcaaggaactacttcaaacaagaacatgatcttgagaagagaagagctgaggctgctaggattagggagaaatacccagacaggattccggtgttcctattcctacctttcccttgttggagtataatattctgtaaacatagttatttcctcatgagaatggtaattgtggaga

SEQ ID NO: 43088 - DNA, 227 bp, Glycine max
gaccgagctagctagctagcaagcaagcacagagatggaggcaaagcgaggccatgccctcatgtgcttggcacgtgtttcactcttcctctgcgctctaaccctatccgctgctcacggaagcaccacggttcaagacatcgcgagaaagttgaaactcggggacaacgagcttctgcgcacggagaagaagttcaaggttttcatggagaattacgggaggagct

SEQ ID NO: 43089 - DNA, 258 bp, Glycine max
caagtttcctctcaattgtccaccacttactaggatttattttttatttttgtttcaggaaatagtttcaatataccctgttctttcaccaccaaatcttactcctgcacaatcgaaccgagtatgcaatgctcttctcttcttcagtgtgtagcatctcaccctgatacaaggatgctattcctcaatgctcatatacctctatatctgtatcccttccttaatacaacaagcaagtcaagaccatttgagtacttg

SEQ ID NO: 43090 - DNA, 257 bp, Glycine max
aaaatgatacgtcttatttgtatagtagtggggaattatgggacaaaaaataaatccgcttggtttcagacttggtacaactcaaagtcatgattctatttggtttgctcaaccaacaaattattccgagaaatacaagaagataaaaaaatacgagattgtatcaaaaattataacttgaataagatcaattcttttttgaatctttatctgtccaattccctcaacaccagaggatattcttatatttggttgta

SEQ ID NO: 43091 - DNA, 250 bp, Glycine max
tgtagtttcttcttccagcgcaagaactcgcggtctctgatccgaaaagtggaagtttttcagttgcttttggagtatttgcgtgattcccaatcgggttcttcgtgtcttccacccacgacggtactcatctcaaggagctctacctcttgctctaccgctccaagattctcctcgattactgcgcccaatcgagtaagttgtggctcttgcttcagactcattccatctctggtcacttccatgattt

SEQ ID NO: 43092 - DNA, 250 bp, Glycine max
atcgtattgtaattgttttgtatctcatcatttcacttcaagaatatggcttccgaagcagcaccacacttcgtcttgtttccactgatggctcaaggccacatgatccccatgatggacatagcaaaatattggtgcaccgcaacgttattgtgactgtagtcacaactccacataacgcagcacgtttcacatcaatcattgatcgttatattgagtcagggtttcctataagattggttcaacttca

SEQ ID NO: 43093 - DNA, 263 bp, Glycine max
ctcgagcgcgttgccattctcatcctcctctgtctctctctctccaccattgccatggctccttacaagctccggccatccagcgccttcaattctcccttctggactacaaattctggtgctcctgtttggaacaacaactcctctttaaccgttggagctagaggtccaattctgcttgaggattatcatcttgtggagaagcttgcaaactttgacagggaacgtatcccagaacgtgttgtccatgccaggggagctag

SEQ ID NO: 43094 - DNA, 261 bp, Glycine max
ggctcgagtaaagtggtagttgggaacagtcttgaggacattgttttcaaatctgggaagaatggtatgtactttacttctttttttatttggttttattccatggatatcagatagattttggcattcactgtgctctaacaaaaaatatcacattattggttgcaaactatatgaaggaacaaacgtgtttttaatgaaaagttatgtgatatccttctgatactctgttatgtatctgtgattatatccttcagacat

SEQ ID NO: 43095 - DNA, 259 bp, Glycine max
ctcagacgattcggctcagtggaggacgagacccagaatcggtcctctcagcattcaactggaatgtgctgcaagctgcgctccaagtatatagacccttaatttcttgctatcatgcatcattaacattaaatgctactaattaatttggctttgtcaatttgatttcttgttattttgggaaattaattacagaccccaaaaggaaagttagaaaggctttttaatcaacagaacgagggaagtattttcaaaataa

SEQ ID NO: 43096 - DNA, 261 bp, Glycine max
ggcggggcgaccgctgagtttaagcatatcaataagcggagaaaaaggaaacaaggatagaccagaactgaaaacacgaaccagagaggtaataggaagaacggagaaagaaagaggaagagaaagtggaggacaagtagtggcagagaaaggaagagaaacagaaacggcaaggggacgggttggtgtgtaccatatgccaacaactgagaatgatatgcccactggtagcatccctttggccttacaaagtttattcta

SEQ ID NO: 43097 - DNA, 257 bp, Glycine max
ctctaatgaaatttgcaaaatcttctcgtcctcctcaagataggactatggtagttgcctgccttgctgaagttgctcagaacatgggttttcctattgcaagctatgttgatagggtgatgcccttggtacttaaagaactagcatcatccgaggcaactaatagaaggaatgctgcattttgtgttggagaattgtgcaaaaatggtcatgaaccagctttgaaatactatgacaatattttacgtggactttat

SEQ ID NO: 43098 - DNA, 252 bp, Glycine max
aattgcattttccattattgtcattggaaattctgctgttttcattggactttggagtgcacattttgtttggacatactactgtgtggcaagaacaaataggttcggactggttttcaagcttgtggtgctcatgtgtttgccaattcctctgttactttggccaatagtgggtattgttggaagccttttaggtggaattggatatgggttttttgctcctcttcttgcaacttttcaggctgtagggaa

SEQ ID NO: 43099 - DNA, 167 bp, Glycine max
gggtatcttgtgaatgatactcttatagtcgaagctgaggttcttgttcgtaggattgttgattactggacttatgattccaagaaggagactggctatgttgggcttaagaaccaaggagctacctgttatatgaattctctacttcaaaccttgtaccatattcc

SEQ ID NO: 43100 - DNA, 255 bp, Glycine max
ctcgagccggatttgggagcaagatcattttggatacacaacacaggacccattggctgcctcccttacattttggccaattttctatcagctgaaagggatgcctatggttgtgcaaagacatataatgatatagctcagtatttcaaccacaaattgaaggaagttgtggttcaacttcgcaaagaccttcctctggctgcaattacatatgtagatatttattctgttaagtactctctattcagccaccca

SEQ ID NO: 43101 - DNA, 257 bp, Glycine max
cacaaatctggaatatctgaatgttagcagtaactttagtgacatgacagagctacctgaaacacttggtgatctggtcaacttaagggagcttgacctcagcaacaaccaaatccgagctcttccttactcgttcggtaggcttgaaaaattgacaaagctcaacctggaccagaatccaatcatagttcccccaattgaggttgtaaatcaaggggctgaggctgtgaaggagttcatggccaagtggtggctcg

SEQ ID NO: 43102 - DNA, 237 bp, Glycine max
attttcttctttccttcacattttctctctcaccattctcttcttcttctccctttcttagattctcccttttttctctttaccctccgccatggctgaggataaggagatgtcttcctctgtcaccaatggcgatgattctctcactggccacatcatatctacaactattggaggcaaaaatggggaacccaaacagactattagttacatggctgaacgggttgtaggaactgg

SEQ ID NO: 43103 - DNA, 234 bp, Glycine max
gcttgcacaaaagcaatgactatgtcagttaatccattcccgggttctgatgcatggagtttggaattgctgaagcgtaccggagttcattgtgatatcatttgtgtcactggatggactgccactccaatgcaggatgttcatgttacaattgattggtttattgcctctcaggaatgtgttcccaggacttattgtgtggtaaatccacaaaatcctcatgtgttgaatagg

SEQ ID NO: 43104 - DNA, 246 bp, Glycine max
atactcctctgttctctctgtatctcttcaatcttcctgaaaaaaacaaaaacacgataaatcatccaccctctcacattctctctctctctcctgtcaactaatatggcaattgaagaccaagacaacactgtcagagatatcaatccaaagaatatgagaatcatgggtgctggaggccctgatgatgacgacaataggtggccaccgtggttgaagccactgctgaaagagagcttctttgtt

SEQ ID NO: 43105 - DNA, 238 bp, Glycine max
atcgcaaggaggaaaaacacggacgaaagggcagtgaagacgagaaagagagagagttggcttctgatacagccaggtctggaaatatagttaacgaggacaaagacgttgaagaaggaagacgaggacacgaaagtggtggtggtggtggtgttcagcatgagaggaagtgtgcaacgaaagttgaagacaagtagggttttggggaaaaggctgaactcgagggaataacaatagt

SEQ ID NO: 43106 - DNA, 194 bp, Glycine max
acgttgaatgctgcatagtaccatgtacttagccccgttgaccaacactgactgtaggctgctgaagtgacccatagattctcagctagtgagaacactctcgcccttggtacccagcatcagtcggatgcattggccacaatggaggcacgtgtgaccaactttagaaggacgagtgctctgatccagcacga

SEQ ID NO: 43107 - DNA, 211 bp, Glycine max
atgcagagcttgtgtcaatgttctattgaccttcttggtggaggaattttagttgacaaaactggatattgtatcacacttattcgaaattctccaattagtaacttgtgtagagttgctgcttggaagaaaggcatgttaatggttaacgattgtgatgtctggtaatgcatgcagtcagaaggactgattcggcttcattggttcaagc

SEQ ID NO: 43108 - DNA, 237 bp, Glycine max
aaactttgaacggtatgaccattaaccttgtaggtggagtcctccgacaccatcgataacgcgatagctagagattcacgacaaggaagggatcccacctgaccagcagatacttatcttgtgcagggaagcagcttgaggatgctcgaatccttgccgactacactgtcctggaggcatccactctccttctcgagcttcgactttttcgtggcattttttttcgctgtcaagact

SEQ ID NO: 43109 - DNA, 235 bp, Glycine max
ctggttttgagggagacaacatgattgagaggtccacaaaccttgactggtacaagggtcctactctgctagatgcacttgaccagatctctgagcccaagaggccttctgacaagcccctcaggctaccccttcaggatgtgtacaagattggaggaattggaactgtgcctgtgggacgggttgagactggtgtcttgaagcctggaatggtggtgacttttgcaccaactgg

SEQ ID NO: 43110 - DNA, 267 bp, Glycine max
ttacgtaagcattcagctcgacgcatggtgaaagctttaaggccacactatgagcttaacaatgctgtgcacattgtgacgacttggaactacttatagaatattagcagactagattgccactacctttactgcagactgaacccataatatgactgtacgatcgcggcataatgtcatcacgactgctctacgcgacatcagcatctccaattcacgcatcactctagcagatgttgctaataaactgaggctgaactctgataa

SEQ ID NO: 43111 - DNA, 228 bp, Glycine max
gaaaacctaagcttagaacaggtactagccagagacagacagaggagcgtgaaatgccggagatagacagcgggagagtccattaacgaaacagctacacacattcgtgcttctgccaaggctagcatggagaagaccaaggccactgtccaagagacggcagctagaatgacagcacgtgatccggtgctttaggagttggcaacccataagaaagaggcaacgatg

SEQ ID NO: 43112 - DNA, 235 bp, Glycine max
ctatgacaaggcttcggaaacgagttgctacacggctgaaagattcccaaaacacatttgctatgctgactaccttcaatgaagttgatatgactaatttgatgaagctccgttctgattataaggatgcttttgttgaaaagcatggagtcaaattggggcttatgtctggctttgtcaaagtatgttttctaattactgaaatataaactagctgggctttctcctttgattt

SEQ ID NO: 43113 - DNA, 242 bp, Glycine max
tttactcattagctgttagatggagacaaatttctgagccttgtgaccctgttgtatgggtgaacaagctaagtgatgagtttaatgctggatttggttctcacacacctatgattcttgggcaagccaaagttgttcgttactttcctaattatgaaagaacattagaaattgccaagactgtaatgaaagagagatcatttgtccacagcaaaacagacaagatcattcatctttccaaa

SEQ ID NO: 43114 - DNA, 237 bp, Glycine max
gttgaatttctggttaagctattatgggatgaggttctggattgcactagtggaaaagggcatcaagtatgagaatagactagagaatattagtaataagagccagttactcttgttaatgaaccctgttcacaagataataccagtcctcttcgacaatagcagacactgctgtgattcactcattgctgttgagtatattgatgaggtttggaatgatcaatctcccttgttgcc

SEQ ID NO: 43115 - DNA, 234 bp, Glycine max
tgcactgtaacaaaacatgtgtccctggagattttagctgctcttgcattcaaagaaatgaaggtgactttccatatactccaaatggtgttttagtgagtcggtaaccattggttcatgagtgtggcccattgtgcaagtgttctcctaactgcaataatcgagtattccagactggtttgaagcaccacttggaagtgttcataacaaaagatttagggtggggtcttagat

SEQ ID NO: 43116 - DNA, 233 bp, Glycine max
agcttatcatgtcaatctcttaaatgtgatacgataactgtatttgcacactccagaggaagatcgccaattgagaaggatagctctctctcttattgaatggctgcaaaaagctcatgtgcctaccatagcacagattgaagagttccattcgatgcagaggatgatgaatgctcctgattcaaatgataatattgatctaccgttgagcattcatttgttgggtttacaag

SEQ ID NO: 43117 - DNA, 240 bp, Glycine max
agaaaacctaagcttagatttagaaacaaagaaatgaagaaaggaaagatttgatcgttgaaaatgcagggaggaaagaatgcgggagagtcaattaaggaaacagctacaaacattggtgcttctcccaaggctggcatggagaagaccaaggccatctgtccaagagacggcagaaagattgacagcacgtgatccggtgcaaacggagttggcaacccaaaagacataggcaaagat

SEQ ID NO: 43118 - DNA, 101 bp, Glycine max
cgtcgatcagggtcgcaagtatgacgagtatggcttcgttgagaagcaatccgtcgaatacggcttccctgttcatgcttttagtgtcacctatgtagcca

SEQ ID NO: 43119 - DNA, 235 bp, Glycine max
gtctgcacaaaagcaatgactatgtcatttaatccaaacccgtgttctgatgcatggagtttggtatttctgaagcgtaccggatttcattctgatatcatttctgtcactggatggactgccactccaatgcaggatgttcaggttacaattgactggtttattttctctcaggaatgtgttcccaggacttattgtgtttcaaatccacaaaatccttttgtcttgaataggt

SEQ ID NO: 43120 - DNA, 235 bp, Glycine max
attaagagagagaagaagtaaagaagaacaaagacgcaatcctcaaaggtgaagatgaaaaacatggcaagtgctgccaatgaacaagtcgatatctataaagctaaaatagacgagaaggcagagcaagcaacggcaagaacagatgaggagagggcgatagcccatgagcacgcaaagtcaaaggaagcttgagcaaagatggagctgcatgatgctaaagcaagtcatgcag

SEQ ID NO: 43121 - DNA, 133 bp, Glycine max
agcgaattgaactgtttgatcaaatggatgatccacttgattagattgagatggatgaactatctgagaccagacatcaagagagggaacatagcaccagacgaagatgatcttataatcagtatgcattcac

SEQ ID NO: 43122 - DNA, 235 bp, Glycine max
tctaaagctaacttcaacacctttaattttctcaaagtaattcagcggctgaataccaagcggtgaagatgagtcaggcgcagccacggcgtcccaaaggccacaaccccatcacatacggcgacgtttttgtcgtctccggcgaccttgcacagacgcccgtcgcaccggaagatgctgccatgatgcaacgcgcggaaacttcagtgctcggacaaacccaacccggcggagc

SEQ ID NO: 43123 - DNA, 232 bp, Glycine max
aacggatttggaagaactggccgtttggtagccagagtggctctgcagagagacgatgttgagctcgttgccgttaacgaccctttcatcaccaccgattacatgacatacatgtttaaataccacagtgttcttggacactgcaagcatcacgctgtcaccgttcaggacgagaacacccttctcttaggtgacaagccactcactatttttggacacagaaaccctgaag

SEQ ID NO: 43124 - DNA, 237 bp, Glycine max
atactgtcacaagtgtatatagatggccaaaaattggaggccatcgattaataggcatgagctctcaagctcaacggctgcctagaaagtgtgaagttacagctattcttgttctgtatggtcttccaaggttactcacaggtgctatacttgcacatgagttgatgcatgcttggttacgcctcaaaggttaccaaaaccttagtcctgaagtagaggaaggtatttgtcaggttc

SEQ ID NO: 43125 - DNA, 236 bp, Glycine max
attttgtacagatttgccattgggtatttaatgaattgttaatattatttttccctttaattatcaaatgtataattttttcttttaaattccaatgtttcaatatttataaacagacaagcttttctggtgttgaggtcatgcctcttcttccagatgaatctatgaatgttgaaattccttaggaggacctggaaattagtttttcaagagcaggtggaaagggaggtcagaat

SEQ ID NO: 43126 - DNA, 249 bp, Glycine max
  unsure (1)..(249): unsure at all n locations
aatccaccgatgctgagtcagactcggagtttccgtctcgggaaccggacatcgatgacccttcagtaaaatcctcaaaccctagtcatgatgtggaacctngctcgaaatgcgtatgtgagtacgtccatgactggaccgagtgtccgtacgcccaccccggggagaaggctcgccgccgtgatccccggaagtaccattactccggcacggcgtgccccgatttccgcaaggggagttgcaagaagg

SEQ ID NO: 43127 - DNA, 247 bp, Glycine max
ctaactctttgctttatccttgtcttcattttctttctctctttcctttgttgttgtcaccaaaatggctactagtacactcagccatgcagaagaagtacttcccaatccagcaaaaaatactgatcagaagcaaatccaagttactgaagatcataccaacaacattgactatgtacaaaggggacagtggcttcgtgcagcggttttaggagccaatgatgggttggtttcggtttcttcattg

SEQ ID NO: 43128 - DNA, 257 bp, Glycine max
acgcaattcgacgcgagcacaagcactccgatgatcagggtcgcaaggttgacaagtatgacaacattacgaaacaagctaacgaatacggcaaccctattcatcctgctagtgtcacctcatgtaccccaccaaaccacctactggtagttacagtgatgacattaataagcaacatgataccaccaatgcctacgacgtagacactcgtaaacagcattctagtggtagctacgatggtgacactaataaacatc

SEQ ID NO: 43129 - DNA, 103 bp, Glycine max
gccagaaggtgcttcctaatggtcaaagttggcggcctctcttgttgctcttatgctactcaatgaagattctttctgaagccagtaacgtttcaaaaagtca

SEQ ID NO: 43130 - DNA, 242 bp, Glycine max
cattcataaagacataaaaacaaaagagaagcacgaacagtaactttagaagatcgatcatcatcaatggctgtccaagtttatattgtgtactactctatgtacgggcatgtggagagattagcagaagaaataaagaaaggagctgattcggtggaaggcgttgaggccaaactatggcaggtagctgagatattgccagaagaggttcttggcaaaatgggagcaccaccaaagagtga

SEQ ID NO: 43131 - DNA, 237 bp, Glycine max
aaagagctttgcactcgataaactgaacggcaaaatatgctacatgctctcagcccgaagtctctcaattgtttggggagacactcccaggtattggagatggacttctgttccagcggccaggtttcggaggtggcggaacttgttagtgtgtgttggttggaaataaaaggtggaatcaaaagtggcacgttgtctgaaaaaacattgtacggggcatacctagtgtttaagcaa

SEQ ID NO: 43132 - DNA, 230 bp, Glycine max
  unsure (1)..(230): unsure at all n locations
aagaccatctatcagatggcttttatgatgcaggacgagatcggctgtttatgcctcttgagtgttatgagcaaaatcnattgtttgcttctcgtgaagtcatccttttggacagaaaaacgatgaagagttggatgctgttatgctagctgctcaggcattggtttataatttgaagaagttaaatggtttaagcagatatgggaaccaggatggggttgataacttgc

SEQ ID NO: 43133 - DNA, 274 bp, Glycine max
agaaaacctaagcttagaattagaaacacagattagaagaaaggacaggcttgatcgttgacaatgcagggaggaaagacagcgggagagtccattaaggatacagctacaaacattggtgcttctgccaaggctggcatggagaagaccaaggccactgtccaagagaaggccgaaagaatgacagcacgtgatccggtgcaaaaggcgttggcaacccaaaagagcagatgcaaagatgaacccgggcggagctgcgacaagcaggcggcgc

SEQ ID NO: 43134 - DNA, 275 bp, Glycine max
tgaggattttgtatgtatgatgtgttctgacagtgaccaactactcaatcacaatcctgatcttcttaagaagctggaactctcggatggtctcggttcgccgtagctcagttaactaggcaagcgaactcgtgaatcactatttgaggatccagccagagatatgactagcttgctcaaaatatggtacctgaacatatgctctggagttgtctgtttatgttactgccaatgttctggttggtgcgagatatagtagaaaacccgcatccatg

SEQ ID NO: 43135 - DNA, 263 bp, Glycine max
agtaattctcccaagggaacggaagacgcatgagtatcatgaagccataaatagacgctataagcacctccctgaagttaaccgtatcgcaagacatagacacttgccaagaccaatattcacagcttctgctttaatgcgcgttatggcggatgctaagagtaggaaggttgagaagaggatagctcacagtgctccagggagtattaccacacagccattacgaagacgaagcattatcgtaatagtcgcgtgaggttttt

SEQ ID NO: 43136 - DNA, 266 bp, Glycine max
gtgagctacaaagaaaggacataattgatctttgaaaatgcagggaggatagaaagctggatagtccatcatggaaacagctgcaaacattggtgcttctgccaaggctggcatggagaaaaccaaggccactgaccaggagaatgcagaaagaatgacggcacgtgatccgatgcaaaaggagttggcaaaccagaagaaagaggcaaagatgagccactgcatagctggacaagcaggcggcacgtcagcataacacggcggcg

SEQ ID NO: 43137 - DNA, 263 bp, Glycine max
ggcaggttgactacttcattgattgccactactccagagaagctgaaaaactatgggtgattggaggcactaatgctggtactatgggctactttcctgtaaattacaaaggagtggcaacgattggagctgcagaagcaattcttgaaggtggccacacaagtgttattaggagtgttttacccatgtcaacaattcctagtggacctactaatagtcctagccaaggcattttcggttggacgggtggggaagatggtcgg

SEQ ID NO: 43138 - DNA, 266 bp, Glycine max
acaattcatactgatgataacattggttgttagtgtaaaattcttttacactaattaatggtatcggtatgaagtatgatttattactttgtggatgcttaagatgcttcataaatgatgattgcaggtacgagtgataactaggaaaacttgtgaaccactggaggaagattccttcaggccaatccttcaccactatgagggtcccaagttccgtcttgagctgaatgtgcccgaggtattttatttttatcttgctgaatatt

SEQ ID NO: 43139 - DNA, 265 bp, Glycine max
acgagccgcagtaaaacctcaagctatacaattagggaacacgcgactacgaagaagcagtcagaattgatcgttgaaaatgcagggaggaaagatagcgggagagtccattaaggagacagctacaaacattggtgcttctgccaaagctggcatggagaagaccaaggccactgtccaagagaaggcagaaagaatgacagcacgtgatccggtgcaaaaggagttggcaacccagaagatagaggcaaagatgaaccatgcg

SEQ ID NO: 43140 - DNA, 253 bp, Glycine max
tgcagaccgagctagctagctagcaagcaagcacagagatggaggcaaagcgaggccatgccctcatgtgcttggcacgtgtttcactcttcctctgcgctctaaccctatccgctgctcacggaagcaccacggttcaagacatcgcgagatagttgaaactcggggacaacgagcttctgcgcacggagaagaagttcaaggttttcatggagaattacgggaggagctactccacagaggaggagtattt

SEQ ID NO: 43141 - DNA, 251 bp, Glycine max
atcagggtcgcaaggttgacgagtatggcaacgttgagaagcaaaccgacgaatacggcaaccctgttcatgctgctagtgtcacctatgtagccaccagaactgctgctggtggttacagtgatgacattaataagcaacatgataccaccaatgcctacggcgtagacactggtagacagcattctagtggtggctacgatggtgacactaataaacatcatggaactactggtggctataatgatgac

SEQ ID NO: 43142 - DNA, 245 bp, Glycine max
ttcagaagctcctcggagcatttatctgctgccaagaggaattcagagccatcctgttgaataacaaagagcaggtcacaaaacccccccttgatcgcatgatttctgaattctttgagaggtcagtgaaggcgcttgacatttgtaatgctagccgagatgggattgagaagattcgcacatggcaaaaccatctggaaatcctgttttgtgccttgggttcgagtaagagagcgttaactgaa

SEQ ID NO: 43143 - DNA, 231 bp, Glycine max
gggaattgaattgcagctgcaggggtggtacaacagatttcaaagggacgaagtggtggcacagtggaaaaaggtgaagggaaggatgtctctgcacgttcactgccacattagtggaggtcattttctcttggatatattagcaaggttaagatacttcatcttctgcaaggagctaccagtggtaagctacttttgcttgcaagcatcaaattatggtttgtttcactg

SEQ ID NO: 43144 - DNA, 228 bp, Glycine max
aattaggaggattcgatgaaaggacatcaattcaaatcctggattttcgaattgagagagatattgagagaaatcaagaattctcgctatttcttagattcatggacccaattcaattcagcgggatttttcattcatatttttttccatcaagatagttttataaaactcttggactcccgaatttggattatcctactttcacgcaattcacagggttcaacaagc

SEQ ID NO: 43145 - DNA, 249 bp, Glycine max
gggagattaatggttcggtgtcggatgagaggggtgatggactggtgtttggaagcactgaggctgccaataagttcctggaggatttggaattacatcaatcgcgtgatgctgagaggattgttactgactcggacgaagaagaggagtctgacgatgaaggagaaggcaaggagctgtttgatactgctacattggcagctcttttgaaagcggcatcgggtgcggaccaagatggcggcagcatca

SEQ ID NO: 43146 - DNA, 253 bp, Glycine max
ctcgaggttggttctctgtctagggtctattgttaaaaaatgtcgtcgcagttaagccaagaactttgtgaaatgatatggccaagaactttgcttgatacccatctgtgagatcaactactctttcaaaagcgcatccagggagatagcagcagggacaatagcagacccaggatcattgaaggcaaaggacaagacaatgggggatgtggctgcatgttaaggtgccatagagcatattgatgagcttggc

SEQ ID NO: 43147 - DNA, 232 bp, Glycine max
gccggagaatgcaaaagtgaatgaagtgaaggcttctatggaaaatggggttcttactgttactgttcctaagaaagaggttaagaatcatgatgttaaggccatagaaatctctggttaagcagaagcaaatgttgttggtcttttttgtttgaagtcgtgtgcttttctttgttctaatatgatgtgagtgggagttgtgattgtacaaacaaataaaatagttgtataa

SEQ ID NO: 43148 - DNA, 232 bp, Glycine max
atttttatttttgtttatctttctcactttctctcttccgcttttgcttctgcttctgctttgtatctctgtaacatactttgcttaatatggcggctgagaagtcaaacattgcaaaagatgtgactgaattaattggcaaaactccattggtatatctcaaccacatcgtggatggttgtgttgccaaagttgctgccaagcttgaaatgatggaaccttgctccagtgt

SEQ ID NO: 43149 - DNA, 252 bp, Glycine max
gcttcatcggctccgagccgaagccgagcaacgttcgcttcgccaccatccccaacgttatccctttccaatcttagatagcctccgatatccccgctttcttcaaagccgtcgtcaccaacatggaacctcccttcgaccacctcctccgccgccttcaccctcccgtcaccgccctcgtcgccgacgtcgagcttcacttccctgtcgccgtcgcccgccgcagtaatattccggtcgcgctgctttgga

SEQ ID NO: 43150 - DNA, 256 bp, Glycine max
gatgaattccatgcaaacggcgtcatcccaaggggagccaatgcttctttcattactttaattcctaaagtgtccgaccctcattgcctcaatgatttcagacctatcttgctcataggttgcgtttacaagatagtggctaagttactagccaacagagtgaagagggtaatgccatctattatagacgaatgccaatccgctttcatagctggaagacacctcttgcacagcgtagtcatcaccaatgtagtgg

SEQ ID NO: 43151 - DNA, 253 bp, Glycine max
cacgatactgataagagagataccaacaagaaaagaaaaaaagaagagttgagattccctttgaagaaaagatggcatcccataggcaaagctatgaagctggtcaaactaagggccgaactgagaaaatgagtaaccttccttatgttttaggaaaagacgaaccagacgatgggcaatattggagagaaggctcaagctgcaaaggagaagacccaggaaatggcccaagctgcaaaggagaagacccaac

SEQ ID NO: 43152 - DNA, 255 bp, Glycine max
cgatgatcagggtcgcaaggttgacgagtatggcaacgttgagaagcaaaccgacgaatacggcaaccctgttcatgctgctagtgtcacctatgtagccaccagaactgctgctggtggttacagtgatgacattaataagcaacatgataccaccaatgcctacggcgtagacactggtagacagcattctagtggtggctacgatggtgacactaataaacatcatggaactactggtggctataatgatga

SEQ ID NO: 43153 - DNA, 257 bp, Glycine max
cacacaactactacaagtacttccttacaatcaaaaccaacaacaactatggcaagttatcaaaagcactacgatgatcagggtcgcaaggttgacgagtatggcaacgttgagaagcaaaccgacgaatacggcaaccctgttcatgctgctagtgtcacctatgtagccaccagaactgctgctggtggttacagtgatgacattaataagcacatgataccaccaatgcctacggcgtagacactggtagacag

SEQ ID NO: 43154 - DNA, 244 bp, Glycine max
ttgtgcgaggaggttgggtcaggagtttcatgcttatgttgtgaaaactaaatcgtactctaagctggtgcccgttcagtcttctttgattgatatgtattgcaagtgtggggatatgatttcggcgagacgggttttttatggttcaaaggagaggaatgtggtttgttggactgctctgatgtcggggtatgctgcgaatggaaactagagcaggcgctgaggtccacgatttggatgcagc

SEQ ID NO: 43155 - DNA, 244 bp, Glycine max
aaaacagtaaagctaacttcaacacctttaattttctaaaagtaattcagcggctgaataccaagcggagaagatgagtcaggagcagccacggcgtcccaaaggccaaaaccccatcaaatacggcgacgtttttgtcgtctccggcgaccttgcacagaagcccgtcgcaccggaagatgctgccatgatgcaaagcgcgaaactcgagtgctcggacaaacccaacccggcggagcagctt

SEQ ID NO: 43156 - DNA, 243 bp, Glycine max
cagattcagatttatattggaatctggatattttgtcttctcaagtgcatgcgcgattgtgcactgtgtaactcccatttgatacactcaatgaagatgcacttgagaagacaaaatatccagattcagatttatattggaagaaatttgaggataaataccacttttcatgccaatttactgctgacctaatagccatgaaaatgcgtgttttatcatcaccagtacataccaggagattgc

SEQ ID NO: 43157 - DNA, 237 bp, Glycine max
ggctcgaggttgacattgtgttggcacttctcaaagaagccctttaccttgtttttagaagaaactggctacaccgaagaaaacgttctccttcgagaagcaaaagcaggaattttgaaaccagcttttacaataatagctgatcatgagatgggatgccttttgttattgattcgtggcacgcatagtatcaaggatactttaacagctgttactggaaatgtggtaccatttcat

SEQ ID NO: 43158 - DNA, 153 bp, Glycine max
aagataaattgatgatcacctagaaggttttgctccatccattttgattgttttgttctgatgtggctaacccaccaccatgaataagcattgctcgccgctctctgcaacatatttggttgtttcttcttctgtcttctgtgttatctcttt

SEQ ID NO: 43159 - DNA, 244 bp, Glycine max
cacaactacaagaaagaacttccttataaccaaaaccaacaacaactatggcaagttatcagaagcactacgatgatcagggtcgcaaggtcgacgagtatggcaatgttgagaggcaaactgacgaatatggcaacccggttcatgccactagtgtcacttatgtagccaccaaaagtgttggtggctacaatgatgacgctaataagcaacatgatattactggtgtctatcccgagaaaga

SEQ ID NO: 43160 - DNA, 247 bp, Glycine max
ggcaagtgaggagaaaggatttgaggaatcaagaattcccactgcatttgttgctaccccagaggttgtggcccggaagcccaccttccctgagaatagcaggaccataatggatgtattggtatcattgatatacaagtacggcgatgagcgaactaaagcacgtgcaatgctctgtgatatataccaccatgctcttcttgatgaattctcaattgcccgtgatctgctgcttatgagtcatctg

SEQ ID NO: 43161 - DNA, 240 bp, Glycine max
gaccgagctagctagctagcaagcaagcacagagatggaggcaaagcgaggacatgccctcatgtgcttggcacgtgtttcactcttcctctgcgctctaaccctatccgctgctcacggaagcaccacggttcaagacatcgcgagaaggttgaaactcggggacaacgagcttctgcgcacggagaagaagttcaaggttttcatggagaattacgggaggagctactccacagagga

SEQ ID NO: 43162 - DNA, 242 bp, Glycine max
gttctcacctcaccgctgcatcttcacgtcgtctctaacgcatcttcgtgttgttgcagagggaaaatgagtcgaggaggtgcagcagcagcgaagggaaagaagaagggtgctacattcaccattgactgtgcaaagccagtagaagacaagatcatggacattgcttctctcgagaagtttcttcaagagaggatcaaggttggtggcaaagctggtgctcttggtgactctgttaccgt

SEQ ID NO: 43163 - DNA, 255 bp, Glycine max
atgggattctcatttctagtgtggtgtgatggctcattccttcaacaaagatgcattgcatgcccaatagcttccgttttcacatttaacggatcctaggcggtgttgtccttgctgaggtgttgttggctgattcacgattcactcgaccggatatgggttttcacccaacaaaactcaatttcgtgcctagcgatgcggatgaggcgccactcgatgtttccatttgcctgcatgcctttggtattgtggggt

SEQ ID NO: 43164 - DNA, 248 bp, Glycine max
tttcggtttcttcaggctatcaatgagagacctgacataacggaaggattgaagagattaaaatgtcgtacgcttatttttgtcggggacacttctcctttccattcggaggctcttcatatgacttcaaaacttgataggagatacactgcattggttgaagttcagggttgcggatcaatggttacagaggaacagccacatgcaatgctggtccctatgtagtactttttaatgggatattgctt

SEQ ID NO: 43165 - DNA, 247 bp, Glycine max
cctcgagcgcatcggctcgaggcgttgccattctcatcctccactgtctctctctctcacccattgccatggatccttaccaagctccggccatccagcgccttcaattctcccttctggactacaaattctggtgctcctgtttggaacagcaactcctctttaaccgttggagctagaggtccagctctccttgaggattatcatcttgtggagaagcttgcaagctttgacacggaacgtatcc

SEQ ID NO: 43166 - DNA, 204 bp, Glycine max
aagacggcctgtaggagaggcccgaggaggccgacgcccagcgccgcaaggaggctgccgccgacctatacgacatcttcgacatgcgagttgacaggcactggagcgataagaatctggaagagctgacagagccggcttagcgtatcttcagagaagactataagatctcctacaagggttccaatattcctcgtcctatga

SEQ ID NO: 43167 - DNA, 253 bp, Glycine max
gttttagccagttctcggaccaacttgcacggaattttaaggtgctagataaggcagatttaccagacaaggaacatttgttggcaactttgcaaacagaagaccagtgggcttggaatttagtgggcttgaattgccagatagttttggagagctcattacaagtggaattttaatcatccagttgcagcgtgtttataatatggtgtctcactttgtgcaagctagatttcaaatgggaactgaccatggc

SEQ ID NO: 43168 - DNA, 246 bp, Glycine max
ccaggagtaaaccctgatgaggcagttgccatgctaggtggcattgcacagtggtattctgcgctcggatacttgggcgtttatgcttctgggtgtaccactgctctctctgggtattgagactttgggtggtatctttacaagattgatcaaccgcaacactactattcctacaaagaagagtcaggtcttttcaacagcagctgacaatcaaactcaggtaggtatcaaggtgctacaaggtga

SEQ ID NO: 43169 - DNA, 176 bp, Glycine max
catggctcaccctcgactcactaactcgctctgttcttctccgctgcgaagccgttcgtgcatttttgaggtgccgctgtcatgtttgggcgtggtggaccaaggaggagtgataactccaaatattatgatattctcgggatttccaaaaatgccagtgacgatgaaatcaagaa

SEQ ID NO: 43170 - DNA, 243 bp, Glycine max
  unsure (1)..(243): unsure at all n locations
ctttgcacaagccactcatgcgcgacaagactgtgctggtatccgccggcactacggtattccggtcctcttagctgacgagcgcggtaatcccgtctaactcactggcgtcgctgaccatcgcgaccgttcctccgaggtttctatccaacgnatcagggagcttgccggcgaatttgggaacaacctctcctttcacaaggtggacctacgggacagggatgcactagagcaaatttttgt

SEQ ID NO: 43171 - DNA, 236 bp, Glycine max
tgaagaaggtgttgtttcccagagaggactaattgctttgtcacatggctgtccagaactcgaatacttggccgtctacgtatccgacattacaaatgcatctctagaacacattggtactcacttgaaaaacctttgtgattttcgccttgtcttgctagaccgcgaagagagaataactgatttgccacttgaccaccgaacaagggctctactgaggggttgtgactagctca

SEQ ID NO: 43172 - DNA, 242 bp, Glycine max
gaaggttgctgcagaataagcgatgttcttgctcttctttctcttggaagaagaatggtgttgaatcagtttcaagtggtgggatcatattcatatataatagtagaatcccgtctccttaaaggagcgatctctccctcaaagtagaacgagcataatcgaagacagatggtagcgtattctaagtagttgatctcacgtgctatccgaaagtattattagtcttcgtctgctctcaatgc

SEQ ID NO: 43173 - DNA, 177 bp, Glycine max
ggtactgatttggggacaaccaattcatgtgttgccgtgagggtatgcctgtacgccttagttattgatcagtctaatggtgcacgaagatcaccatcggtgggtgctttcaacctgagaggggagctgctgtaggtaccccagcttagcgtcaagctgtaactaacgcacctgaca

SEQ ID NO: 43174 - DNA, 262 bp, Glycine max
caggctgcttctttccccattgctaaagagggaaagtctggtgtttctctcaggtacaccacaatgttcggtgtttcattgtcggatactctcaaatctgacgctcagcttttcctcattgacatgcaaagaaacaccaacaccttggctggacatgtgccacccaaggctaaccttggtgacttgaggggactagctggaggcttgaatgggctaaacacttcagccatgatagatggaggatcctttgatggcaccaagg

SEQ ID NO: 43175 - DNA, 250 bp, Glycine max
agctattatactctctagagtaattgcggaatctgctagaattttctaataatggcgaaagacgttgagcaggtcacagagcaaggtgaatactccgcgaaggactaccatgaccctcctccggcaccgttgatcgacccagatgagctcacaaagtggtccttgtacagagccgccatagctgagttcatagcaacactcctttttctttacatcaccgtgttgaccattattggctacaagagacaga

SEQ ID NO: 43176 - DNA, 252 bp, Glycine max
cagaattggaggtgctcagttcactctaaatggaatccattacaaattagttgctaatgaaggaaacaacacacttcatttgacaaggtacataaaagatgatgacaaacccagaatcaccttcagttatcacagttatgatggtgaaggaggatttcctggggacctcctagtaactgtgagctacattcttgggaaaaactcattaagcataatcatgaaagcaaaagctctgaacaagcctaccccagt

SEQ ID NO: 43177 - DNA, 255 bp, Glycine max
cactgatcgggggcgttcgtagtgactgagggggtcaaagaccaagaagtgagttatttatcagccaagcattctattcttcttatggctagatccaatctcctggtccctgtggaaaggaaaaagaatttttcacgttcttcctttcgggaaggaaggattagtaaaatcctattgattgcaattttctccagacccccgggaaaagcatgaaaaaaaggctcgaatggtacgatcccaccgtcaccccagaat

SEQ ID NO: 43178 - DNA, 252 bp, Glycine max
gggaggaaagatagctggagagtccatctaggaaacagctgcaaacattggtgcttctgccaaggctggcatggagaaaaccaaggccactgtccaggagaaggcagaaagaatgacggcacgtgatacgatgcaaaaggagttggcaacccagaagatagaggcaaagatgagccaggcagagctggacaagcaggcggcgcgtcagcataacacggcggcgaacaggctgccacggcagggcacattgga

SEQ ID NO: 43179 - DNA, 246 bp, Glycine max
gaccgagctagctagctagcaagcaagcacagagatggaggcaaagcgaggccatgccctcatgtgcttggcacgtgtttcactcttcctctgcgctctaaccctatccgctgctcacggaagcaccacggttcaagacatcgcgagacagttgaacctcggggacaacgagcttctgcgcacggagaagaagttcacggttttcatggagaattacgggaggagctactccacagaggaggagta

SEQ ID NO: 43180 - DNA, 251 bp, Glycine max
cacagacatccacagcaatacgctgacccaggaacccaggttccaccagtatacccacggtgcgaagcacaccgacgaatgacccgaccctgttcatgctgctagtgtcacctatgtagccaccagaactgctgctggtggttacagtgctgacattaatccgcaccatgataccaccaatgcctacggcgcagacactggtagaccgcattctagtggtggctacgatggtgacactaataaacatcatg

SEQ ID NO: 43181 - DNA, 262 bp, Glycine max
tgatctatctacattcaatggtggtaccaactttgttactccttgttagaccaagggtgcaaagtcttagtgcttctattattgctcatatcgtccttatttacaccattgtctccgcgaccgatgccagactgaacgccagtgattcgctcgtccccattttggcacctcttgcctattgagttcgcgatgttcttggttcacttggcaacgatcgctatcagtgacactggtatcaaggctgctcgtattcttagtgctg

SEQ ID NO: 43182 - DNA, 253 bp, Glycine max
gccactgccgctcagctaggaaatcatgggttggttgtgatcccctttttgagtgcatttgtgagtttaaaagtgctcaacttggctggaaatgctattgtgaggataactgctggtgctcttcctcgtggacttcatgccttgaatttgtctagaaacaagatctccactatagaaggattacgtgaacttactcggcttcgtgtcctagacctcagttacaaccgtatattaagaattggacatggccttg

SEQ ID NO: 43183 - DNA, 244 bp, Glycine max
gaaaccaagcctataaagataagcagtggcaaaaagccattggattttatacagaagctatcaaactctgtggtgacaatgcaacatattatagtaacagggctcaagcgtatctaggacttggaagttatcttcaagctgtggaggattgtacaaaagcaattagtcttgacaaaaaggtaactttcttcatagaacgttttgcttagaagtctatgtattttgccatcatacactgacaaaa

SEQ ID NO: 43184 - DNA, 215 bp, Glycine max
gggaaagaggctgtgagcctaatgtttatacttataccgtgttgattgattacttgtgtaaggagggtaggatggacgaggcgttgaagatgttgaatgagatggtggagaaaggcgtggctcctagtgttgtcccgttcaatgccttgattgatagttattgcaaacgggggatgatggaggatgccgtgggggttttgggtttgatggagtcg

SEQ ID NO: 43185 - DNA, 250 bp, Glycine max
gttgggttagcacatcttgtaaaaggttgctgcacagtgcttgagtcatgccacatggtttattgctctggtgtaacttcagttggagtagcaactgtggtttctagttgtcccaacataaaaaaggttcttgttgaaaagtggaaggttagccaacgtactcagcgtcgagtaggctcagtcatctcctacttgtgcatggacctctagatctccttcggtgtatatgtacacctccaagttttttttt

SEQ ID NO: 43186 - DNA, 247 bp, Glycine max
gtgcggtttcctttgttggtgttgctgggaactgttttcctggcatcagtttgtgtctcattaaaggtgagagaggatgagaataaccctttctacttgagaagctctaacagcttccaaactctctttgagaaccaaaacggtcgcattcgtctcctccagagattcaacaaacgctccccacaacttgagaaccttcgagactaccggattgtccagtttcagtcaaaacccaacacaatccttc

SEQ ID NO: 43187 - DNA, 251 bp, Glycine max
gtgatagaagctcctatgagaaggggaaggcaggctacgaccactgccgttagtttccaactcaatgtgaaaccaataacaaaagctgttacagtgagagctacattttgaacaatggttgagagtctgtcagctagagcacttcttactaatgttgcatccgcagctagcatggccgttagtgagccagtgttgttctcatccttatcaaaccatgcaacttcattgttgagaatagctgacagttaaat

SEQ ID NO: 43188 - DNA, 241 bp, Glycine max
aactaattgtgcttatccttattgagagaaaaaatggccacatcaatcaaattctttgagttgaacacaggggccaagattccttctcttgggttagggacttggcaagctgaacctggtgttgtagctgaagctctcaccacagccattcaggtaagtaaaactcttgagcgttttctgcttgtaattgccatgtaaaaaatttcataggttagtcatggctttttgagtttcgattggt

SEQ ID NO: 43189 - DNA, 255 bp, Glycine max
tagcttttgagtctgagcgagaaaggaatgcagccatcatgcttgcaagaagatttgcatttgactgtaatattattcttgctggacctgatcacaaagctccattagaaacataatgggaccttggatattattttctcaactgtaattatttgagttttccttgtattataagtgtgtaacagtgaaatatgcctttggattgtgctaaggattcataccttgaggtctgaattcctttattccatttttttt

SEQ ID NO: 43190 - DNA, 251 bp, Glycine max
agggtcgcaaggttgacgagtatggcaacgttgagaagcaaaccgacgaatacggcaaccctgttcatgctgctagtgtcacctatgtagccaccagaactgctgctggtggttacagtgatgacattaataagcaacatgataccaccaatgcctacggcgtagacactggtagacagcattctagtggtggctacgatggtgacactaataaacatcatggaactactggtggctataatgatgacacc

SEQ ID NO: 43191 - DNA, 240 bp, Glycine max
taaatttgttatggctcgtgcatagcatatgaagattgagaagatgttttatctggcaatgctttttctgtgtgtgtaaaccttgacctggttactagagcaacaaggacattgttgcacaaataatatctgctagcattgccggcgatttagttcttgctacagcatattcacatgagctgccacgatatggtcttgaagtaggacttacaaattatgcagcaggtgctgtgttcatga

SEQ ID NO: 43192 - DNA, 242 bp, Glycine max
gtttaaaaatgtcgcagttgctggataaagccaagaacttcgtgtcggagaaggtaaatgatatggccaagccggaggcgagtgtcactgacgtggacttcaagcgcgtgagcaaagataatgtcgagtacttggccaagggagatagcatcagggaaaattccagacccaggatcgttgaaggcaaaggacacaacaatggtggatgtgccagttaaggttccatacagcatattgatgag

SEQ ID NO: 43193 - DNA, 238 bp, Glycine max
gtttgttgatatatataaccctgagagacacagctggtgtgagattaagaatgctatgggtgttgtgtgtaaaggatggaggtcgtttattcaaagcaaagaattcactactgtgcgaaaattggctgggatgctagaggaatggctctatttcttaacaacagactgtgaaggaaaggaaagtcattgggaggttatggattgtctcggtcataaatgcggatctcttccaccaatg

SEQ ID NO: 43194 - DNA, 231 bp, Glycine max
cagatatcggcgaagatgagggagaaaggtttcgatcgttctccaaccatgtgcaccgataagtggcgcaacctcttgaaggagttcaagaaggccaagcaccaggaccgagggagtggttccgccaagatgtcgtattacaaggagattgacgagatcctcagagagaggagcaagaatgtgcagtataaaagccctactcctccgcccaaggttgattcctttatgcag

SEQ ID NO: 43195 - DNA, 228 bp, Glycine max
gttgaggttaatcctgatggaagccgaaaatgggttggaggagaggttgtgcaagcactggcttatgatgtgccaattccaggttaccaaaccaagaacaccatcagtcttcgtctctgggaggcaaaagcgagtgctgaggatttcaatttatttttatttaatgatgggcaacatgatgctgcttcagtgcttcactcacgagctcaacagatttgtgcagtttta

SEQ ID NO: 43196 - DNA, 259 bp, Glycine max
tttgaggccttgccgagtgtggaaattggagaaggtaacgaagattcggagtgtgtggtttgtttggaggagtttggggttggtggggtggcaaaggagatgccatgtaagcataggtttcatggtaattgtattgagaagtggttggggatgcatgggtcttgccctgtgtgtaggtatgagatgcctgtggaggagattgattgggggaagaagagggaggaggaaggtggtgagaggagaaggagtgatggtggtg

SEQ ID NO: 43197 - DNA, 264 bp, Glycine max
aaaaaacattgcccttgttctttcaaagttaccaaacacaagtacacaacacaacagcaacatatggcgtctgaacaattggctcgcagagagggtcaaagatcatgcaggaaaagccatgggagatattggtggacgtgggaaagccagagagactcacgagctgggtgcacactttgaatccctggctgacaaagtaactgaccatgcagcagccaatgtagttggaaacaaagagagtcaaagagaagctcgtggtggtgt

SEQ ID NO: 43198 - DNA, 246 bp, Glycine max
cacacaactacaagaaagaacttccttataaccaaaaccaacaacaactatggcaagttatcagaagcactacgatgatcagggtcgcaaggtcgacgagtatggcaatgttgagaggcaaactgacgaatatggcaacccggttcatgccactagtgtcacttatgtagccaccaaaagtgttggtggctacaatgatgacgctaataagcaacatgatattactggtgtctatcccgagaaaga

SEQ ID NO: 43199 - DNA, 247 bp, Glycine max
gacggagtcgttttgggtcatgaggaacgatttaagaagagagaggaaattgcccggatttttcgataaggaggtatatgatattcttgattcaccagcggccttggctctcgctctttcatcctcatctcctcctcctccaaccacaaccagaacaataacactccctgctgaggagcctctgcctcacctctatgatagtaatcggagcgcgcccggtgacggtgaggatggcttgttctcagat

SEQ ID NO: 43200 - DNA, 234 bp, Glycine max
tgattattgtcttattattgatcttattattcttttattccactatttttgattttattggttacattgttgctattagggagattggaatggagctggagctcactcaaactacagcaccaagtccatgagagatgagggtggttatgaggtgattaagaaggccattgaaaagcttggattgaggcacaaggagcacattgcagcatatggagaaggcaacgagagacgtct

SEQ ID NO: 43201 - DNA, 229 bp, Glycine max
gttcgcgaactcctcaagtccgagaccggcgccgacctccgccgcgagtacgtgcgcggctcgccgaagtgctcggagcttctcgaggcgtggcagcttcgcgagggaaagcaaggcatgaactacgtgttcgacctaatctccgccattctcagccaaagtaaaggtaagtacaaccctagcgacatcgaaagcgtgaatattactaaggatttggataaattcgcgc

SEQ ID NO: 43202 - DNA, 161 bp, Glycine max
tccaaggactatgccggtgacactgctcagaaaaccaaggactatgccggtgacactgcacagacatcaaaggactatgccggtgatgctgctcagaaatcaaagggctatgtcggtgatgctgcacaaaagaccaaagaatatgttggtgatgctgctca

SEQ ID NO: 43203 - DNA, 154 bp, Glycine max
  unsure (1)..(154): unsure at all n locations
caagtttcatgctgcctgtgcggattcgtggcttacttcatggagaaccttttgtccagattgcaagcgtgatgctagaaccggcttaactgatccaccaccttcagagtccatcccctagctgaaacaaaacccagnatgtatggcatcctct

SEQ ID NO: 43204 - DNA, 247 bp, Glycine max
ctagctagcaagcaagcacagagatggaggcaaagcgaggccatgccctcatgtgcttggcacgtgtttcactcttcctctgcgctctaaccctatccgctgctcacggaagcaccacggttcaagacatcgcgagatagttgaaactcggggacaacgagcttctgcgcacggagaagaagttcaaggttttcatggagaattacgggaggagctactccacagaggaggagtatttgcgccgttt

SEQ ID NO: 43205 - DNA, 135 bp, Glycine max
tgcaattcactctgtacaattcttcgttcgttctctgcagttatatcctttttgagcttcaatggcggacgctgaaaccttcgctttccaggctgagatcaaccagcttctaatctcatcatcaacacattccac

SEQ ID NO: 43206 - DNA, 234 bp, Glycine max
tgcagaccgagctagctagctagcaagcaagcacagagatggaggcaaagcgaggccatgccctcatgtgcttggcacgtgtttcactcttcctctgcgctctaaccctatccgtgctcacggaagcaccacggttcaagacatcgcgagaaagttgaaactcggggacaacgagcttctgcgcacggagaagaagttcaaggttttcatggagaattacgggaggagctactc

SEQ ID NO: 43207 - DNA, 236 bp, Glycine max
ctcactcactctgcactcaccactgccacacttcaatcgcactaatggctgtcaccttctcagatctacacaccgaagagggcatcaaatccctcgatcaattcctttttgggaaaacctatatttctggggatcagttgacaaaggatgatattaaagtgtatgcagctgttgttgaaaagccaggggacacttttcctaatgctgccaagtggtacgatgctgtctcttctcaa

SEQ ID NO: 43208 - DNA, 225 bp, Glycine max
cctttggcagtgatagtggtcctaactctgcccgattgcttctttttggcacataattacttaatactctataggaatatcttggcatcaagttattcagctttgttaaggaatattctctaacatctgctaatcgtctgagaagataataccccaatcaatttgttctcggtatggtttagcaattggtgcaacagtggctccagttgtccgtgttctggtatg

SEQ ID NO: 43209 - DNA, 219 bp, Glycine max
actagcgatactgataagagagataccaacaagataagaaaaatagaagagttgagattccctttgaagaaaagatggcatcccataggcacagctatgaagctggtcagactaagggccgaactgaggagaagacgaaccagacgatgggcaatattggagagaaggctcaagctgcaaaggagaagacccaggacatggcccaagctgcaaaggaga

SEQ ID NO: 43210 - DNA, 216 bp, Glycine max
acaggaatctaatcctattgtggtggctttcgggatcggagtaatgaactacgaatacacccgactgtccctgttaatcattactccgatcccgaaggccaacacaataggatcagaataatgattaacagggacagtcggtggcattcgtatttcatagtcagaggtgaaattcttagatttatgaaagacgaacaactgcgaaacatttgccaa

SEQ ID NO: 43211 - DNA, 215 bp, Glycine max
aagaatattgatattggagagtttgctgcaagtcatcttctggaactggacccaaagattcagtaacctatgttctgctttcaaatatgtatgcagtaactgggaaatggggttgtagggatcagacaaggcaaatgatgaaagatagaggtgttaaaaaagagcctggtcttagctggatagaggttaataactcagttcatgcattttttggt

SEQ ID NO: 43212 - DNA, 230 bp, Glycine max
gtgagcggttcgctgcccgcgacgttgtgagaagtccactgaaccttatcatttagagaaggagaaggagaatgagaagataccagaacctgtaaaaaagaacgcctcaggtggatcccttgatagagacattgctcttgcagaaatagagaaagagaaacgattgtctaatgtgaaggcttgggaagaaagtgaaaaatccaaagcagagaataaagcccaaaagcagc

SEQ ID NO: 43213 - DNA, 222 bp, Glycine max
gatgctttgtataaaattcagactgattgattatgatgtcttttcacttgatacagaactggaggaagcgaaaatttcttccattgctacaagtgtggttgttgctactcaactcttctgaaaaacagtcacccttgtgtagaaggagcaatgcatcatgattgcccggtttgttttgagtatttgtttgaatcaagaaatgatgtcactgttatgccttgt

SEQ ID NO: 43214 - DNA, 223 bp, Glycine max
ataatggtgttctcacagttaccgttcccaaagaagaggttaagaagcctgatgttaaggccattgaaatctctggttaaacttgttgttgcttaaaatcgtgagctttgctttgtgtaataactaataagtattctctgtcatgtgttcctgtggtgaattttgagaattgaaagattttacattgtgaaatgtaactgcttaagtggtaattgtgtgcttg

SEQ ID NO: 43215 - DNA, 224 bp, Glycine max
gtgataagtgataactgcaaacttattgaatccttaaacaatatgaactctagaaataagagttagttgtttagttgcacattttctgacatggtgtttcaattggaccctttgtggcttattacagaagatacttagtgtccagtactcggtccccgattatgtacgagtttccatggaatgtagacatcttctatcacaaatatttgtggcaagtcctgaaa

SEQ ID NO: 43216 - DNA, 244 bp, Glycine max
ggaaaggggctaaactattggtgcttatatgcttttcatttgctgtaactaattacagatatgcaatttggaatttactcaaaacattttgttttaggaatgtgtacgagctttcataacagaaagcacagatggagatattcttgaactacaaattcaggatccttttcatagattgttactgcatggagtttgtgagttctacaatctggcgtcggatacagtgtcaggttataatggcgtg

SEQ ID NO: 43217 - DNA, 282 bp, Glycine max
gatggatgaagatacaagagcaatcattatgttaccatattgtagatcattgtgacaaaaaccaatctgttgatttccttgagataacaactccacaagcatatttatttcagcatctagattgtccaggccaaaatgatctacaatatggtaacataatgatggatgaagatacaagagcaatcactttaattgactatgaatatgccagttacaatcctattggatatgatctggcaaatcatttctgcgaaatggtggcaaattaccatagtgacgaac

SEQ ID NO: 43218 - DNA, 265 bp, Glycine max
gtcgagcgctcgttatatgatcatcataatatgccggataagattattgatgtattaggagacatggaggagttgcggctaaaacctgatgaagatacggtcaggagagtggcaagagcttttagagaactaggtgacgaagagaagcggaaactggttataaaacaatatgggcttaaatggaagtacattcacttcaatggtgaacgggtgagagttagaacagaagcatgggaagataatacatcaacaaattgacatgggt

SEQ ID NO: 43219 - DNA, 260 bp, Glycine max
aaacgcttcgggctgctaccgcaagcaagaatagcaaggccagttactatactcttcacatgaatgcttcaggtcatttggagctacattgggaaagtggtgttatctactggacaagtgaaaacccttctgcttcaaatctccgtgctttccttacagccagtggagcactagagcttcaagaccgaagcttgaaacctgtttggtctgcatttggagatgatcacaatgattctgtgaagtacagatatcttcggctt

SEQ ID NO: 43220 - DNA, 264 bp, Glycine max
  unsure (1)..(264): unsure at all n locations
cagggctcttcaagcacttcggtacttcgcacctctgtggcctcaacaaccatggctgaaatcgtaactaccgtttccagatcccatccanatcgacgtcaaactcttcaatcgctggagcttcgaagatgttgaggttaatgatatgtctctggctgattacattggagtgtccccatcaaagcatgctacatatgttcctcacactgctggtaggtactcagtgaagaggttcaggaaagcgcagtgccccattgttgagag

SEQ ID NO: 43221 - DNA, 258 bp, Glycine max
gaagaggaagacaattgaaattgaaattgaaagtggatgacattgccagtagcagccaccgttctttaagaaaaaatctctccatggagtgggagatgaggcccggcggcatgttcgttcagagacgcgaggcagcggcggataacggcggcggcggcaacggcaacatgacgacgacggtgttgatcactgtcgtccacgcttcctcccactacgacctccacctccctaccaactccactttctgggatgttaaga

SEQ ID NO: 43222 - DNA, 256 bp, Glycine max
cactgagaggaagagggagtgagagagagtgttcttcgtttgctaccttctcccagaaatggttacgttcaggtttcaccagtaccaggtggtcgggagggctctcccaacggaagcagatcagcatccgaagatctaccgaatgaagctctgggccaccaacgaggttcgcgccaagtctaagttctggtattttttgaggaagctgaagaaggtgaagaagagcaatggtcaagttcttgctatcaacgagatt

SEQ ID NO: 43223 - DNA, 246 bp, Glycine max
aaaaccggctccgaaccgacgcacagaaagcctgtgcctcggcttcacgttgtggtccggtccgaaccggacccgcggttcgtgtttcagttcgggggagaaccggagtgtagcccggtggttttccagattcaggagaataatatcagacagcctgtctttagttgcaagttcagcgcggatcgtaactctagatccaggtctttaccctcagattttgctaaaaaccccagtagatggagaaga

SEQ ID NO: 43224 - DNA, 250 bp, Glycine max
gaatttgattctcttatttcttagtttattgcgatggattcgagttcaacccaggaattcgaatatttgtttaagttgttgatgattggggactcaggtgttggcaagagtagtctcctcctctgtttcacatctgattcctttgaagatctttctcccacaattggtgttgattttaaagtcaagtatttgacaatggaaggtaaaaagctgaagcttgccatttgggatacagctggtcaagagagat

SEQ ID NO: 43225 - DNA, 250 bp, Glycine max
gacccatcttggaggtgaggattttgataacaggatggtcaaccactttgttcaggaatttaagagaaagaacaagaaagatatcagtggcaaccccagagcacttaggaggttgaggactgcctgtgagagggcaaagagaactctatcttcaactgcccaaaccaccattgatttctactccaccattactcgtgctagatttgaggagctcaatatggatctcttccgcaagtgcatggaaccagtt

SEQ ID NO: 43226 - DNA, 237 bp, Glycine max
cgcgtcgctccgcaccagtttcaccgcacgaatatcttattgtttggagcgatccgagaaaaactctgtaaacatgttggtttaccaggacctccttacaggtgatgagcttctctctgactccttccgttacaaggaaattgagaatggaatgctgtgggaagttgaggggaagtgggttgttaaaggagcagttgatgtagacattggtgcaaacccgtctgctgagggtggagg

SEQ ID NO: 43227 - DNA, 234 bp, Glycine max
attctcttcagtttaaagttacatagtttgtcaatgtgttacttaatctacaatggctgcttcaacagtggctctctcttcatcatcagtggctggtcaagctatcaagcttactcccctccaaccctgagctgtgtgttggacgggttagcatgcggaaaacagcctccaaaactgtttcctcaggaagcccatggtacggacgagaccgtgtcacatacttgggcccatgct

SEQ ID NO: 43228 - DNA, 223 bp, Glycine max
caaacatcgaggaggagatgggtcaactgttgcaaattgctatggcgtgcgcttccgccgtgctggatcagaggcctagcatgctagacgtggtgcgtatgattgaggacattatccgtggcgaggcttatgatggcttgggataagcggcggatgagccttcctaaggatccgagggtcaggcaccagccccagagtcaaggactccaactagggcactcag

SEQ ID NO: 43229 - DNA, 223 bp, Glycine max
gcggcttctttcgccaagattaagtttcaccagtaatgggtaagccgaaggttcacatgaacatcgtggtcattggccatgtcgactctgggaagtcaaccaccaccggtcaccttatctacaagctcagaggtattgacaagcgtgtcatcgcgagattcgagaaggcagctgctgagatgcataagaggtctttcaagtatacctgggtgcttgacaagct

SEQ ID NO: 43230 - DNA, 235 bp, Glycine max
cgtatatccattggagaagttgaccgtggaaggcgagttttaccgcaaatcatgctttaggtgtgcacatggaggatgtttcctgaccccttcaacctatgctgctctagatggatatctttactgcaagccccacttctctcagttgttcaaggagaagggtagctacagttatctgtccaagcaagcttcattgaagaaaagtgaaatgcaacaacaagaacgcgaggctgtg

SEQ ID NO: 43231 - DNA, 145 bp, Glycine max
ctagtaacctcttgttggggcaagcagtcaaaaaatgaaccagagcaaatgaaattcgaatggctattcctcacgattgctccttgcgcggcggtcaccattaacagtccgctggatcgatttgagataatcccattgattgata

SEQ ID NO: 43232 - DNA, 145 bp, Glycine max
ggaggaaatccgcttcatggtcagtccagaactgatggttggcatgcttttcttgccagctatggcagataatgaggctatagaaattgttggtgtggaaaggttctcaagttatacagggtatgcttcatcatttcgattttct

SEQ ID NO: 43233 - DNA, 234 bp, Glycine max
gtttgttgtgagctataagctagtttatcgtgaggagaatatgaagttgtttgttttctttgttgctgcagtagttttggtagcatggccatgccatggcgcaggctaccaaaggttccctctccgaatgacaactggctatggtgagcgttcttcggaggtaaaatgcgccagttttagggctgctgtgggagcacacaacatccgagcctttaaaaccaatcctgaagagtg

SEQ ID NO: 43234 - DNA, 243 bp, Glycine max
tactggagatggcgcttgatcgactcagctacctccgatgaagacaaagtcacacctgtctacaaactcgaagaaatctgccaactcctactctcttcccacgctactatcgtcaaagagctctcagaattcatccttaaacgcctcgaccataaaaaccccatcgtcaaacaccaggctttaagattgatcaaatacgcggttggaaagtgtggtgtggagtttaggaggggaatgccgaga

SEQ ID NO: 43235 - DNA, 242 bp, Glycine max
ggtttggcaatggttttctggcatagattttgcaaccctggaagaccacagctgcattgccgaaaatgaagtccacagttccatagatttcacattgggaaatacttggcttcctgacacagatataccttacactgaaggactactaagatagacagctgaaagcttaaattgaaaaaaataaatttgattccattattgttagatgtaatgtaactaccatgttttccctttaaagggat

SEQ ID NO: 43236 - DNA, 223 bp, Glycine max
gggaaatggctcccaaaccgcctagtacgggtctgtttgttggactgaacaagggtcacgtcgtcaccaagaaggaattgcccccacgcccctcagatcgtaaggggttcttacttcaggtgttgtttgccaaaaacaagcaagagggtgcactttgtgaggaacctcataagagaggttgctggttttgcaacctatgaaaagcgtataactgagttgctga

SEQ ID NO: 43237 - DNA, 252 bp, Glycine max
cttccacaagagttcttgcagttgggagcagctgcaatttgtgtcaaggatcctgttccttctgctgaagacttagcagatcaaataattgaggtcctcaactattttgggcttggtgcagtgatgtgtatgggagtgacagctggtgcttatatccttactctttttgctatgaaatatagggagcgtgttcttggtttaatacttgtatctcccttatgcaaagcaccttcttggacggaatggttttat

SEQ ID NO: 43238 - DNA, 241 bp, Glycine max
acctaatagaagaaaaatgatgggcattgaatcgacggggagtaaatggcttggcttggtggcggcggtgtggatacaagcaatctccggcaacaactacactttctcgaattactcggacgctctgaaatccctcatgagcctaacccaaatcgagctcaacaatctgtccgtggccaaggatgttggctgggctggcctcagacaaattcccgactttggccattctcctcattgggtc

SEQ ID NO: 43239 - DNA, 249 bp, Glycine max
aagcgtcgcagtcgcaaccctaatcagaagaagcgcacttcaagcgagtgacagccaccagccatgggtcgtatgcacagccgcggtaagggtatatcctcttctgctttgccctacaaaaggacacctcctagctggctcaagatctcttcgcaagatgtcgaagaaaatatctgcaagtttgcgaagaaaggtttgaccccgtctcagattggtgtcattctcagagattctcacggtattgctcag

SEQ ID NO: 43240 - DNA, 253 bp, Glycine max
ctccgattgagaggataaagtctgtgattcaaaaaccaaaccagttgttagagctgggtcggataggcaatcaacatgattggtcccgacccagtttaagtagttggatgtgagtgcgcttcttcaatctaggtaagcgaaagcaagcagtagatcgagaaaagaaagaatacggattgcaacctacagatgaagaatagaattacataagaagaggaatcaatcgttcagtgatcgctacgcttgattgggg

SEQ ID NO: 43241 - DNA, 263 bp, Glycine max
agtcgagcgaatcggctcacgaccgtgtcacacattgctcatttataagttttcttgctttcccaattcagttgaatacacatcacaaatcatggcaggagcactgacagatgatcagattgctgaattccatgaagcttttgcctcattgacaaggactctgatggattcattactgtggatgaattggcaaccattatccgatcattagaagggaatccaacgaaagaagaaatccaagacatgattagtgaggtcgatat

SEQ ID NO: 43242 - DNA, 261 bp, Glycine max
cgcgagattgcgtgtttgctccttattttcctgctgatgaaccccagaagtttggtagtgttcacaaggttttcggggctagcaatgtaaacaaaatgttacaggaattacctgagcaccaaagaagtgatgcagttagttcaatggtatatgaagccaatgcaagggtgagggaccctgtgtatggatgtgtgggagccatatcctctcttcaacaacaagttgatgtgctccaaacccaattggcactagcacaagcag

SEQ ID NO: 43243 - DNA, 257 bp, Glycine max
ggatgtcttggatcttaaaaaccttgagattttgattttggatgaggctgatagactcttagatatgggattccagaagcagataacttctattataactctcttgcctaagcttcggagaactggtctgttctctgctactcaaactgaggctattgaagagcttgctaaggcaggattgaggaacccagtgagggttgaagttcgagcagaaacaaaatcagaaaatggtcctgcatcatcaaaacaaccagaat

SEQ ID NO: 43244 - DNA, 253 bp, Glycine max
cctcgatcgtatcagaaaattagcagacaattgcactggtttgcaaggattcttggttttcaatgctgttggcggtggtactggttctggtttgggatcattgctgttggaacggttatctgtcgattacgggaagaagtctaaacttggttttaccatctatccttctcctcaggtatctactgcagttgttgagccttacaacagtgtcctttccactcattctcttcttgagcacactgatgtggttgtg

SEQ ID NO: 43245 - DNA, 252 bp, Glycine max
gagagagaatggcagcacttggtgggaatcgtgatgtgacaggaagccagaacagcgttgagatcgatgctctagctcgctttgctgttgaagaacacaacaaaaaacagaatgcccttttggagtttgaaaaggtggtaactgcgaaacagcaagtggtttctggtaccttgtacaccatcactttggaggcaaaagatggtgggcaaaagaaggtttatgaagccaaagtttgggagaagtcatggttga

SEQ ID NO: 43246 - DNA, 217 bp, Glycine max
tgcgactgctgattctcatctctgcaactatgcctacgccgaatgacgtcgtcgatatgaccatcggcggtcaatctgttggctgcatcgtgatggagttctacgccgacgtgactccgctcatcgtcgagaacttctgcgagcattgcaccggtgataagggcgccgggcttggttgcaagttcctccagtaataaggctcgtactgtccaccgcg

SEQ ID NO: 43247 - DNA, 247 bp, Glycine max
gtaccagggtgctggtacatctttgctatgatgggcttacaaatgctctccagctcctccatcttatcacagatgtagcagggtgctggtggtgatgcgggtggagccatggatgacgatggtgtgcagctggtagtggaagcggtgctggactcagaattgctgaagtccattacgcagaacattctcatgggttgttcttgattttgtcgaagagccttttgaggtttaggtatcagcgtgtcat

SEQ ID NO: 43248 - DNA, 224 bp, Glycine max
ttctaccatgcatcatctccgctggtgacagctctaaatgagggtcgagatgtgatcatggatggtaccttatcatgggaaccatttgtggagcaaactattgctatcgcaagaaatgttcacaaacacaggtaccgaatgggggtatggtataaagtacctgaacatgggacagttactgagaattactgggagcaagtacatgatgcagaggatcatcaatc

SEQ ID NO: 43249 - DNA, 260 bp, Glycine max
ctcatctcacacagcacatgagcgaagcctcatcctagagttaagaaatcgcagcagcttcttccatgggtctctcaatccccatccttggctggcaatgccgtgaagctgggctcatcagccccagaagtccgaacggtgagcatgcggatgaccgtcaccgagcaggactcctcacgtaccccatggtacggcccacaccgagtcaagtacttgggctcattctctggcgagaccccgtcctacctgaacggtgagtt

SEQ ID NO: 43250 - DNA, 249 bp, Glycine max
gaaggttttactcacactcaagtcagtacacttgcagtgaaggagaagcttctagttgttggaggatttcagggtgaacttatttttaagcacctagatcgacctggtgttagcttttgcacgagaacaacttatgatgataatgctatcaccatgccattgagatttatgattgtcctagtggtgcagttcatttcacagccgctaataatgatagtggagtgagagactttgatatggagaaatttc

SEQ ID NO: 43251 - DNA, 254 bp, Glycine max
gtgatgtatgatgctactggtgtaagattgcaagcaggacgccaagcagagcttttgaaccaaatcgtatacgaacttcctgctgaacatcctctggctgaaagcagaccactccgggaacttcttgggcatactccgcctcaggtcattgctggggcatacttggacttataactgcagctattggctatctaataaccatggctagtagttgaaattgaggattccttgttggcatccccagaggaaccttg

SEQ ID NO: 43252 - DNA, 251 bp, Glycine max
gtctaagggacttgtcttctcccggaaaaagtggcagcattttctatctttctaaagatgatagatttgtgataaagactgtgaataaatctgaactaaaggagatcatgaaaatactcttataacaaaattcttcgggctccatcggataaattaagaggtggaaaaaaggtgcgttttgtggtcatggggaatgtgttttgcacagaactacaaatccaccgccgatatgatctgtaagggtctaaaca

SEQ ID NO: 43253 - DNA, 247 bp, Glycine max
aaaaaatcggaaagataggataaagcaggagtgggatcttgcattaatgaacgtgatgacagcagcagcatgcaatgcactagttgtttggtcccttgctccttgtcgatcatatgggaacacttttcggtttgatttacaaaatacattgcagaagcttccaaacaacatatttgatcagagctatccacttagggaatttgacatgcaaaagagaattcaatgctttctgttcaaggctgctgag

SEQ ID NO: 43254 - DNA, 254 bp, Glycine max
tgcaataagcagagctcatttaagccctgatcgaaggattgaggataattatatgaggcgacaaatgcatggagctgctttagatgtaaacaatttgcagatgcttgacaagaagagagatatcttttatcttctctcctttatacttcagaatacaaaacctgttgggcatcaggatcttgttggtttagtaatctcaatgctgcttctaggagattttagtttagtattacttaccttgcttcagttgtatt

SEQ ID NO: 43255 - DNA, 242 bp, Glycine max
tgcacagtatgaagccattgccaatgatgacaccgtgtttacatttttaactaataaagatgctccaaaatataaaatagtccgagtagatttgaaagaaccaactgcttgggctgatgttctccaagagtctgaaaaagatgtactggagtcagcatgtgctgtaaatggcaaccaactgatagtaagttacttgagtgatgtgaagtatcttctacaagtaagagacttaaaaacaggat

SEQ ID NO: 43256 - DNA, 238 bp, Glycine max
tagagcttcttggggggaaagcaggggtttcatgtggtaggtttcattacggcagtgcttttggggagagaagtggtcatgctgacaaggttgaaaccataagtgaaactcttgtgagtaaaggcttcaactacagtgggaaagatttcatttattcaggtgcttgataagatgcatgctcgtggtagtggccctcgtgtcatgttaactagacagcctacagaagggagagctagaa

SEQ ID NO: 43257 - DNA, 239 bp, Glycine max
ggccaacctcgccccggtggtctcagagctactttgtgtatttcttctcaggttggatgcaaaatgggttgcaatttctgtgccactggatccatgggattcaaaaacaacctatcatccggtgaaattgtggaacagctcgttcatgcctctaccttctcacaaatccgtaatgttgtcttcatgggcatgggagagcctctcaacaactattctgctgtggtagaagccgttcgcat

SEQ ID NO: 43258 - DNA, 239 bp, Glycine max
gcaatttgcagtacgtaacatcaactagcttccttctcttgacatacgccaaatatctgaacacaaacggcggtaatgtagttcgatgtgggacttcagcagtcacgggcgaaaacctagtaacactagctaaagcacaagtggactacattctgggcaacaatccaacaaagatgtcttatatggtgggttttggagagaggtatccaaagcatatccaccacaggggttcctctctg

SEQ ID NO: 43259 - DNA, 222 bp, Glycine max
tcgagcgattcggtcagtcagcggtgagcgatgtagtgcgacgagcgcgggagagttttgggatgaaggacttcaagtacgtaaacaccatcaaagcagcggttgagaaagaatgccccttgacggtttcatgcgctgacattgttgctctttctgctagagatggcattgccttgttgggaggaccaagcattgaaatgaagacagggcgaaaggatagca

SEQ ID NO: 43260 - DNA, 233 bp, Glycine max
ctgtggccaaggtcctttggttttgctttgttagtttcttttccttcatgtactttacatattatgggatgatgactgtttccattacaccaaaccaccaaattgcatcaatccttggagcagcatttatgggatcttcaatctcttttctggtttttttatcccaagaccaaaaattcctaaatggtgggtttggtattattggatttgcccagtagcatggactgtatatg

SEQ ID NO: 43261 - DNA, 261 bp, Glycine max
ggacttttccgcagtgtaactgtgatgccatcaaagaggttaaaagggaagaagaaccgtaagattaatgttaatcatgagagcaaaattctatctcttggttccttggaagaattgtgtaaggctcgacgatcagttttggatcctccttgggaaggcccaaacttgattcctggtgatgttttgtggtctgatccatccaaaaatcctggtcttgctccaaacaaagaaagaggcatggcttgatgtggggtcccgatt

SEQ ID NO: 43262 - DNA, 259 bp, Glycine max
gagctacttaaatctaataacgaggggaatgaatctttgctcaagtccttgtggcatcactctgatgcaatattgtgctgcactctaaaggtatgcttgaaatttaattcaatttcatagcgcatgtatctatttcgtgcttataaaaaatatatatatctattttgtgctctgtccataatgcaattcaaattctctaactcataaaggttttactctgaaatagagggtatcatgtatcaacatgggctatatagcc

SEQ ID NO: 43263 - DNA, 251 bp, Glycine max
gctactcacataggagaggttgtgatcaacaaatgcttctgcacccgcaggaatccgattagcatctcagctgctgctatatatttggcttgccaacttgaagacaaacgcaaaacccaggcagaaatttgtaaggtaactggtcttactgaggtcactctccgtaaagtgtacaaggaactattggagaattgggatgatttacttccctctaattacaccccagtgttcctccagagagggcatttccc

SEQ ID NO: 43264 - DNA, 248 bp, Glycine max
aaggcttgcagctgaagttacatttggtgcacttaatgaaggtctagatatggatatgtattgggatgctttgagaaattcatggatttgggaagaattgcataaatctcggaactaccgaccagcctttgaatacgggcttattccaggactggccttaagtggtctggaacattacatattcaaggggaggcacccagttactttgaagcatggtaaacctgatcatgaggctatgaatgctgcca

SEQ ID NO: 43265 - DNA, 239 bp, Glycine max
aattgtgttattgcttttggctgtaattgcagttccgtggatgctctttccaaaaccttttatactaaaaaagcttcatactgagaggtttcaaggtcgtagttatggtatactgaatacctctgaggtggatcttgaggctgaacctgattctgccagacaacatcatgaagaattcaatttcagtgaggtctttgttcaccaaatgatccacgccattgaatttgttctaggttcag

SEQ ID NO: 43266 - DNA, 252 bp, Glycine max
ggaaaaggtgatgaaattgacagagaatgagagtaacaagtatggtttgttcaccaaggaatttgcgaaacgccatggcctgcatttgttgggaaccaccaccacttggttcttgttggacatagcattctacagccaaatcttttccaaaaggacattttcagtgcaattgggtggatccctccagcaaaggaaatgaatgcaatccacgaggtgtataagattgcaagagcacaaacacttatagcactg

SEQ ID NO: 43267 - DNA, 255 bp, Glycine max
  unsure (1)..(255): unsure at all n locations
tgttttttacaataattattacaaactcatgcgacatgcttcgttcaagatggacaaagtttaccattaaatttaaacaaaaattcctaatcatgatttttattcttccttttcagattcttaaacgctggaatatttggaaatggaactgaatcaagccataccctgccacacaatataagaagcggcgncatgttagtgagaatcaacactcttcttcaggggtactcaggcattagatttgaaatcttagaa

SEQ ID NO: 43268 - DNA, 245 bp, Glycine max
aaaaaatcgtgctggtgttgccaagtttgttgataacaccactttatttttggtaccaccttctgatttcttgaccaaggttttgaaagtcacaggacctgaacgcttatatggtgtggttcttaaatttccattagttccaagtagcacatctatgcaacaaccaatgcatttgccttctccctctactcagtatatgcaacggattcctccttcacaagctgaatatggttcaatattggtaa

SEQ ID NO: 43269 - DNA, 241 bp, Glycine max
ctttgttcaagaccccagcatctgtggtatatatatcttttggagagtattgtgtatctgcctcaagaacaggtaactgaaatagcgcatggatttacgaattcgcatgcctcgtttttgtgggtgttgaagccacctcctaagaatttcggggttccacctcatgttctgccagatgggttctttgaggagacaagagataaaggcaaagttgtgcagtggagtccacaagaggaagtgt

SEQ ID NO: 43270 - DNA, 232 bp, Glycine max
aataaggcaaaacgattggtaccttggatggaagtattggttgcattgcacctcttgatgaaatcacatttcgcagactgcagtctttgcagagaaaacttgttgatgctgtaccccatgttgctggcctgaaccccagagctttcagattatttcggtcaaatggaaaggcccatcggccaggccctgacagtatagttgattgcgagctgctatgccattatgaaatgct

SEQ ID NO: 43271 - DNA, 254 bp, Glycine max
gacagagagcattggactcacaaatttaaaagctactccacttgaagttctcctaactccacgtttagatacaaagctttatgagaactaaaattatatattatgctagtttttttcctcaaaattaggggaagcctcaaatcggggccttccatcatgtaataaatgttcaacggggttgcgctgctgttacactcatagttatcacatttaaatcagtcatcgacttgatcaaagtattgagtcattgggtt

SEQ ID NO: 43272 - DNA, 250 bp, Glycine max
gacgaatcatgcaacaacaggggtacagtgatggggatccactggctgctgaagatcaactttttgtacttgagaatgtctttgagcaccacccagataaagaaaccaaaatgggtgctggaattgattatgtcatggttaacaaacacagtagcttccaggaaagtagatgctttctcgtggtttgtaaagatggtcaaagcaaagacttttcctaccggaagtgtttggccaactatataagcaagaa

SEQ ID NO: 43273 - DNA, 250 bp, Glycine max
tctcgagcgaatcggctcgagggccttcaatttcacccttcacacgtggtggtggtgtacttcttcttctcttcccctttctgtttcttcttctgagcttgtttaagctctttctatttgattccattaaatatattactacaatgtgtggtattcttgctgttcttggttgttctgatgactctcgagccaaaagggtccgcgtgcttgagctctctcgcagattgaagcaccgtggccctgactggag

SEQ ID NO: 43274 - DNA, 256 bp, Glycine max
ggttgatgtggatcagcagggtcaaatggtgtctgagctcaatggtgcaataatgaaatgtgtacgtgatcaaaatggaaaccatgttattcagaagtgtatagagtgtgtccctcaagataaaattcagtttattgtttcatccttttatgggcaagttgttgcactttctactcatccttatgggtgcagagttatccagagggttctagaacattgtgatgatcaaaatacacaacaaattatcatggaggaa

SEQ ID NO: 43275 - DNA, 253 bp, Glycine max
tgaatctcagaattctctaaaagagatctttttctgctctttgaagaaagaagggtctttgcttgattttggagatgtctctgctctcagatctcatcaaccttaacctctccgataccaccgagaaggtgatcgcagagtacatatggatcggtggatcaggaatggacctgaggagcaaagtaaggactctcccaggaccagttagcgacccttcagagcttcccaagtggaactatgatggttccagcac

SEQ ID NO: 43276 - DNA, 266 bp, Glycine max
cgcattcaggccgttccatccatcttcaatggcaagcttcctctctacgtccctcaatgtgcaagcttcatcgctgaggagcagcaacagcaccacttccaccaccactagggcgatgatgtgcctggcgaggttgattatacgaaggaggagaagcaccacaagcatcttgagcaccttggggcacttggtgctgcggctgccggtgcttatgccttgcatgagaagcatgaggccaagactgacccagagcatgctcacaggca

SEQ ID NO: 43277 - DNA, 229 bp, Glycine max
ggctcgagcggctcgagatagtggagacagacaacaggtttatatccagggaaatgccatatagtactcgtgataatcacttgggttctttgtggttgattgaagccaaccaaaacaatcatccttatcttcttgattggtactatacatcccgatcacatgacacaaatctgggagatgttcctttagaagaaccatttggatctcatgatgtgaatctgggagatgt

SEQ ID NO: 43278 - DNA, 242 bp, Glycine max
tatggcttccttaagctcctcattagtgctgctccttgcagctctaattctatcccctcaagttcttgctgactatgagaagcccccaatttacaagccacctgtttacacaccgccagtttataagccacctgttgaaaagccaccagtaggcaaaccttgagtttacacgcctgcagttgaataacgacctgggtagaagcctgcagttgataagtcagccgtgtatacgcctaccagtg

SEQ ID NO: 43279 - DNA, 223 bp, Glycine max
gttttggattcaagtgtgagtgctcttgtgaagaggccaaagaagggaaggagtgagaaggaaaaggaagaggaggaagaggttttggtgatagaagggattgagtttgagagggatttgggtgtgaatttgatgtgtatattaacgatgaagatgatgtgccaggtgggccaagtaagactgagtttgcgggaagctttgtgagtgtgcctcataagcacaa

SEQ ID NO: 43280 - DNA, 220 bp, Glycine max
caaatccaaaccaaatggtttaagcctatcctctcagactctcctatctcacttgtattaggcccaaacaactggctatggcttggtgctataatctcgtcatcctttctcatgttcctcctcttttggggattatcactcgttactacatatatccaattgaaaataactcagatgaagtttatcattggacctttaaggttttgtggttcatgtttct

SEQ ID NO: 43281 - DNA, 216 bp, Glycine max
caaaaattctatccgtggttacacttgcaatggtgcaaaccatagctgccaaagttacctcaccttcagatctcaacccatctacaactctgtcaagacaatatcaactttgttgggttctgacccatcccagcttgctaaaataaactcagtttccatgaatgacacctttgaaacaaacaagttggttattgttccggtcaactgttcctgtgc

SEQ ID NO: 43282 - DNA, 222 bp, Glycine max
gaatattccaacagaagtgatctctctgcagtgaaagatagaaagagtcttcatcgccaccaaatccaggaacaggtaaaggtggtaataccaactggcaatcatggtttgccaaatgctgaaagccatggtccctcgtcattacttgatcgactgaggcacggtggaggttgtgactgtggtggctgggacatggcctgtccccttattcttttaggcaat

SEQ ID NO: 43283 - DNA, 231 bp, Glycine max
tgaggtctgagatcgatgacgtcggggacgaggctacccacgtcgaaggagagagaaaacaacaagaggagagagagaaggagaagagccatagcggcgaagatcttcgcgggtctgaggatgtatgggaacttcaaactccccaaacactgcgacaacaatgaagttctcaaagctctctgcaacgaagctgggtggaccgttgaacccgatggaaccacttaccgcaag

SEQ ID NO: 43284 - DNA, 243 bp, Glycine max
aactgagcgattcggctgagaaagcgctgagaatcttggagagcctctcaggggagatcagattcataactctcccaaccttttccacatgaatgttaatccgtcaatctacctctgtattacgaccgccttgaatgagaatgaggtaaagctactgaaacaaagaactcgtgatctgtatcaagtaaatatgatccttgacaatttgcctgttatgaggtttgccaatcaaaatgggattaa

SEQ ID NO: 43285 - DNA, 221 bp, Glycine max
gggaaaccagtatcaaacttcagcattcatggattgtggcctaatttcagcaatggatcatttccatccaattgcaatattgctgaaaatccatttaaccaatctaagatcactgacctgattccaagagctgaaaaaggctgggcatcactctcttgtgcaggcagcaaaaagacagagaacaacaaaacaagcagtgataatacaaggttctggaaaca

SEQ ID NO: 43286 - DNA, 247 bp, Glycine max
tgcctgtaaaccagcaaaagtggtaggaagagtcttgaacatcttgaagacagacagaaaatgggtgcttctcaatcaatctcagaaaaatcctttcatgaattcactgtcaaggatgccaggggcaaagatgtgaactcaacgcctacagggggaaagttcttcttgtaattaatgtcgcttcaaaatgtggatttgcggatgccaattacacccagttaactcagctttactccacgtacaagag

SEQ ID NO: 43287 - DNA, 249 bp, Glycine max
cctgtttctctattgccagcaagcgtggctggggagccagttccttatgagaaaagcttttggggtgctatggaggatccagtgcgatatttagttaccttcattgcattctcacaaattggtgttatggtggctccaaaactataacctcacaatatcttgctcccgtttggaggggtgcagtgattgtttcatttgtatggtttttgcatagatggaaaacaaatgtttttgcacggtcattgtcta

SEQ ID NO: 43288 - DNA, 238 bp, Glycine max
atccaatgttctctttgctgcgcatactgtaggtgtcttcatctattggggcatcacacaccaaatggaagagacactagagtggagcaagacatatgtatcaaatgtagctggggtgattgcaattttaattgcattagtgatgtgggtgaccagctttccagggttcaggcgaaaaatgtatgaggttttcttctacactcaccatctctgcactctctacatcttattttatgcc

SEQ ID NO: 43289 - DNA, 233 bp, Glycine max
gctatgtggctattgtatgggtggtaaaaaacaaggacttgccccttatcttcagattccatgtaatgatgggaatgctgttggaacttgctctgcagatagtgtatacttcaagcaatttcatgccactcatacacttcccagggggaacattggggatgtattactggactggtgtggcattggcatatatttttacaatgataatgtgcataaggtcggcccttctcggt

SEQ ID NO: 43290 - DNA, 234 bp, Glycine max
ttcttaaattggataatgcagttccttttgaggctgaattacttgtttgtgttttaacttttttcttcgttttttttttcaaatgatacaggttgtattaccaccaaggaacttgggaccgtgatcggtcacttggccagaacccaactgaggcagagctgcaggacatgataaatgaggttgatgctgatgggaatggtaccattgatttcccagaattcctgaatctcatgg

SEQ ID NO: 43291 - DNA, 248 bp, Glycine max
ctcctttgattattcttgttgagaatgaagctgattgctactggtgctttgaccgtgcaatgcgaaggatgagagagaacttcaggagcagtgcaagttcaatgggggtccaatctcagctggctacactctcacagataatgaaaacagttgatccaaagcttcatcatcaccttgaggatttagatggaggagaatatctctttgcatttcgcatgcttatggttcttttccgaagagaattttct

SEQ ID NO: 43292 - DNA, 247 bp, Glycine max
ctttcaaccatatttgacattgggggagtcctaggtggaatcacagctggtttcatttctgacctaatagaagcacgggctattacttcaattctgttcttgtttctatcaattccagctcttgctttgtatcgcatttttgggagcctctccatgttgatcaacatcattttaacacacctgtcgggatttttggtgaatggtccatactcacttatcacaactgctgtggctgctgatcttggta

SEQ ID NO: 43293 - DNA, 240 bp, Glycine max
gttgctctaactggagcacattcacttacgaacaccaggaaaccacagggcccttgtcgccccttctctttcccttatttaggagccctgaactcccccagagtctatccattcatgcctcttgtatgttgatgccacttcttggaagaagatgagggcaatgagttagggctccttttccccttccctcccaccagattgctctcccacctttcatttcttcctccaggctttactccc

SEQ ID NO: 43294 - DNA, 242 bp, Glycine max
caaggctccgtatgccatcatatatagaaacatggcaattcttggtgtggaaggcttttctgcccttccacatcattgcttgcagctttgttacggatttttcacatttgccatagcggccaacttggtcagagatcttggccccaaaaagattgggaaatggattccacttccaatggcaatggctgtccccttcctagttggtggttactttgccattgacatgtgcatgggtagtttgg

SEQ ID NO: 43295 - DNA, 267 bp, Glycine max
ctcgagccggacttttggtaccaaccacgtcacaataccatgattagcacatcatggggcgctcctagtgcttttacaaaaggttttaacttacagcatctctctgatggattatacgggaggcatctccatgtatatagctggcctaggggcgaactgagacaaacaatggaccttggtgattcagggcttatacccttagaggtaagttgttaacataatccggggtagatgtttaagatgccattattttaaccctttaacttc

SEQ ID NO: 43296 - DNA, 271 bp, Glycine max
ctcgagccgctttcgtcagtttcgggggaagagatccagcagcaatggtgtacgtcaagagctcagaaatcaaaagcctacttcaagagatatcaagtcgagttcaagagaagaagagagggaaaaaccgattaccgtgccaggattcggttgattaatcaggacaagaacaaatataacactccgaaataccgatttgtggttcgctttagcaacaaggacattgttgcacaaataatatctgctagcattgccggcgatttagttcttg

SEQ ID NO: 43297 - DNA, 271 bp, Glycine max
gtgtagttttggcagtactgattctgacatagttgagatttaccactgctcaggtgcgtcaatgcaagcacgatgggagctgttccagaagcaagctgaaattaccaaaaaaaatcatggggaagctaacattcggtatgcttggcttgcttcctctaaaggagaactatctacaatgatgacacacgccttcggtccatcttcaatacccctctctcttcctctattcactccgttttccactctgccgacaacctcaccaccaagctcc

SEQ ID NO: 43298 - DNA, 263 bp, Glycine max
ctttcctctccgaaccctcgatcactctcacgcgctcctatattcgctcctccaccgtcgctctctcgaacaaccacaacaccatcttcatcacatggcaaacgcagcatctggtatggcagtccatgatgactgcaagttgaggtttttggagctgaaggcaaaaaggacacaccgtttcatagtttttaagattgaggagcagcagaagcaggtcattgtggagaagcttggtgagcctgcccagggctatgaagatttca

SEQ ID NO: 43299 - DNA, 247 bp, Glycine max
cttagcttcttctttcaagctaagatttacccttgcactaattactgatctataactacattttgagcacctcttatttagttaatcgattacaaattatgcaagggttgctcttagcttcttcatttcaagcttttgcttacactttgcagtgctatggcaaagataagagtatcatggatggaataagggggggaaaaatactgtgtttgtactccaaattatgaataatagaactttatattgt

SEQ ID NO: 43300 - DNA, 246 bp, Glycine max
gtgggttcgtgtgttcttgtgatgttgatgaagggggaggatgtttatgtgatgaatgtaggggatagtcgagctgtgctggctcagaaggctgagcctgattactggcttggcaagatcaggcaggacttggagaggatcaatgaggagacgatgaatgatcttgagtcttgggatgttgatacgtccaacttggtaccgagtttgagcgcgattcagcttaccaatgatcatagtatagtgttg

SEQ ID NO: 43301 - DNA, 262 bp, Glycine max
ggaattgtcttcacgacagatcggccctatcaaccaggtgagcaggtattatttcatatggaaaaaaatcaaatggggagcttttgttatcttatggatttgttccaaaggaaggcgctaatcctagtgattcagttgagttgtcactgtcactgaagaaatctgatgcgtcctataaggagaagttagagctgttgaagaattatggattatcagcatctcagtgttttcctatacagattactggttggcctttggaatt

SEQ ID NO: 43302 - DNA, 264 bp, Glycine max
acaaggagtacctaccccacaagaatgttttctctataataccgtctgcattgaccaaggatttgcgggcaagtgaattaatgttcatggtgtcacgatagtgaggaaacaaaagtttgtaaatagggtgaaccacgctcagatgcctgtttgttgctatgacgaatggctcaacaaccgcatgagtgtttagccagtggctgacgagttgatggtagcacgaatcattcacaacaacataagcctttgccagtaaccaaatgt

SEQ ID NO: 43303 - DNA, 259 bp, Glycine max
gtcgagccgattcggctcgaggttgcatcatgatgcgcaagtgtcggaagaatacctgccctgttggcattgctacccaagatccagtactaagagaaaagtttgctggagaacctgagcatgtcattaacttttttttcatgatagcagaagaaatgagagaaattatgtcccagcttgggtttcgtactgtcaatgagatggttggtcgttcagatatgctcgaagttgataaggaagtaattaaaagtaatgagaa

SEQ ID NO: 43304 - DNA, 261 bp, Glycine max
gttcaggtgtttctggtgtcttgacggtgatgtctttgggaatgttctattctgcatttgcaagaacagcttttaagggtgaaagtcaacaaagcttacatcacttttgggaaatgatcgcttatattgctaataccttaattttcattttgagtggagttgttatagctgaaggaatacttggtgacgaaaatgttttctatcatggaacatcatggacccacctcttgcttctctatgcatatgttcaagtgctccggt

SEQ ID NO: 43305 - DNA, 255 bp, Glycine max
gcgaacacttgattcagctagtgtattttggagaagagatggttaagattcctgcgctggttttgctctcatacactgcaatgcacgtgccggatagcgaggaacttgctcaggctgaggtgctgggagtcattgattgggcatccaagcaatcttccattgccaacgacccagcaatcgaggcgttgttgttggagtccaagagcaggttggagctttaccagtctagaggtccaagaggattccataaattgc

SEQ ID NO: 43306 - DNA, 272 bp, Glycine max
gtaccaggcaaggcggaagctgagtttgccaacaatagcattgaacaagtaatcaagaacatactaacaagtcggagacctggaccaccaatcctgcgcaaagaaggagcaggttccaattccgatccttcaaggcctcttcccacttggctctcacaagaagatgtcacttattacgcttctaaatttactaagacaggcttaactgggggcctcaactactatagaaatctcaacctaaattgggaactcacagcaccatggactggagt

SEQ ID NO: 43307 - DNA, 258 bp, Glycine max
gtagaaacatttgttcccttacgtgggatcaagaatgatctcaaagcaagaattccatgctacagacaagattggaccagtggattccaagctggaattaggatccttgccccaactacatacatattttttgcttctgcaattcctgttatttcttttggggagcaactggagagaaacactgatggaagtctcactgctgtgcagactcttgcatcaacagcactctgcggtgttattcactcaatcattggagga

SEQ ID NO: 43308 - DNA, 246 bp, Glycine max
gtagaatcttatgtgctgtggctcatgtacatcaatagtcgggggaagcttgctgaccgattggctgcctatgatactgctctttcagtgctctgtcagcatgcagctgccagtcccaaggacataatacatgaaagtccatgcatcttagacctgtttttacagatgatgcattgcttatgcatgtcagggaatgttgagaaggccattgaaagaagttatggaatattccctactacaacaaat

SEQ ID NO: 43309 - DNA, 252 bp, Glycine max
ggaagatgttaagacaaagatacaaatgaggcaagaaggagctttcaaaagggaaagagcaatggcttactctcttgctcacaagcaatgcagatcaactccaagctctaattcacgaacaaatgcctctttttcctctctcaagagtcatgagatgaacaaagctaacggtgggtggagttggttggagcgttggatggcagccaagccttgggagagtagattgatggaacaatcacaatctcaggctga

SEQ ID NO: 43310 - DNA, 246 bp, Glycine max
tgaatctcagaattctctaaaagagatctttttctgctctttgaagaaagaagggtctttgcttgattttggagatgtctctgctctcagatctcatcaaccttaacctctccgataccaccgagaaggtgatcgcagagtacatatggatcggtggatcaggaatggacctgaggagcaaagcaaggactctcccaggaccagttagcgacccttcagagcttcccaagtggaactatgatggtt

SEQ ID NO: 43311 - DNA, 255 bp, Glycine max
aaggtatgcatccgagtatgaagcatctacctgctgaggcttctagatgttgtactctattgagaagctgccatatcaagattgcatagcaacactgcgttaattctttacatcagcgtgttgatcattattggctacaagagacagagtgacacctaaatccccgtgtaaaaccgaatgtgacggcgttggcattttgggcatcgcttgggccttcggtggcatgatcttcatccttgtttactgcactgccgg

SEQ ID NO: 43312 - DNA, 261 bp, Glycine max
ctcgaccgttcctcaccgattgctagaatggaatttcgatgctcagtcatctcttttaccattctcttctctcttgctcttgcaggagagagccatgtccatgcatcgctacctgaggaagattattgggaagctgtttggccaaacactcccattcccactgcactgcgagagcttctaaagcctctccctgcaggtgttgaaatcgatgaactccctaagcaaattgatgatacacagtacccaaaaacattcttctat

SEQ ID NO: 43313 - DNA, 260 bp, Glycine max
gccggtagcgacagaaagaagaaaaaggcaaagatagttagtgggggtggtggtagtttgaacaatttgaaggagattttggaggatttcatgaggcaacagatgcaaatagaagcacaatggatggtggcgttcgaggcgagggagaatgagaggaggttgaaggagatggagtggaggcaagccatggaggtgttggagaatgagaggataatgatggaagaaagatggagagaaagggaggaacaaaggaggattag

SEQ ID NO: 43314 - DNA, 251 bp, Glycine max
gcaattcagttagatttaatagcaaaagttcgtggactttctagtgcagaagcattctttctgagtctggaagataagttaaaagataagaagacttatggtgccctgttgaatgtatatgtgcattctagatcgaaggaaaaggcagaatctttatttgatacaatgaggagtaaagggtatgtaatacatgcactaccatttaatgtaatgatgactctgtacatgaaccttaatgaatatgctaaagt

SEQ ID NO: 43315 - DNA, 262 bp, Glycine max
ggaaattgatagatatataaaagcttcacttacagacatgattaagaagagagagaaagcaccaaagacaggtgaagctactagggatgacttgttaggtatacttctggagtcaaatcacaaggaaatacaagaacacagaaacaatgagaatgttggaatgaatctcaatgatgtaatcgaggaatgcaagttattctactttgcagggcaagagaccacttcagttttacttgtttggacaatggtgttgttaagtagg

SEQ ID NO: 43316 - DNA, 262 bp, Glycine max
ttttagtctcccacaggagatgaagcatacaatgaaaatggtttagtgcctcgaacaatacgtttactcaaggataagtacccagaccttgttatctatacagatgttgcattagatccttattcatcagatgggcatgatggcatagttagagaagatggagttattatgaatgatgagacagttcatcagctatgtaaacaagctgtagcccaggtcatatgactgtcttctataaacattttcaactgtaggcagttac

SEQ ID NO: 43317 - DNA, 256 bp, Glycine max
ttattccattctcttctatgctccagtgctgtttcaaagcatgggatttggaggagatgcatcactcatctcttcagctttaaccggtggagttcttgctagttcaacgttcatttccatagcaacagtagataggttgggcaggagagttcttcttgtcagtggtggactacaaatgatcacatgccaaatcatagtggccattattctaggggtcaagtttggagcagaccaagaattgtcaaaagggttttca

SEQ ID NO: 43318 - DNA, 201 bp, Glycine max
ggacgccttgggtgattgcattgttgcatgcaccttggtataatactaatgaggcacatcaaggtgaaggtgaagacatgagacaggccatggaagagttgctttatgaagctcgtgttgacttggtctttgctggccatgttcatgcatatgaacgctttactcgaatttatgacaataaggctgattcatgtggtccgc

SEQ ID NO: 43319 - DNA, 259 bp, Glycine max
gttgaaaaaagcaagagatgaattggatactttcgtaggtcaagatcgcttggtaaatgaatcagaccttccaaacctattttaccttaagaagatcatccttgagacacttaggttgcatcctcctgctccactagcaataccacacgtgtcttcagaagacatcaacataggagaattcaatgttccacgagacactatagtgatgattaatatttgggctatgcagagagaccctttggtgtggaatgaagccaca

SEQ ID NO: 43320 - DNA, 254 bp, Glycine max
cagaattctctaaaagagatctttttctgatctttgaagaaagaagggtctttgcatgattttggagatgtctctgctctcagatctcatcaaccttaacctctccgataccaccgagaaggtgatcgcagagtacatatggatcggtggatcaggaatggacctgaggagcaaagcaaggactctcccaggaccagttagcgacccttcagagcttcccaagtggaactatgatggttccagcacaggtcaag

SEQ ID NO: 43321 - DNA, 254 bp, Glycine max
aaacaaggatgcatccactgcaatgactcgagcactttaagcatcttctggcaaatccctcagtatgcatttataggagcttccgaggtttttatgtacgtaggccagttggagttcttcaatgctcagacaccagacggcttgaagagctttggaagtgctctttgcatgacatccatttcccttgggaactatgtgagtagcttacttgttagtgtggttatgaagatatccaccgaagatcacatgccggg

SEQ ID NO: 43322 - DNA, 251 bp, Glycine max
tagtgaccctattattaaggataggaattctgtgtctgtgcaaaagcgtgaaaagcagcttaaaagcatcaatatacacaaacgtaagaagccatcttcaccttacatggataatgcagtcaaagctgcacgcagtaaaccgtctaaaccacaattggacacaactgtgattgatattggacctcctgctgattgggtaaaagtgaatgtacaaaaaactaaagattgttttgaggtatatgctttagttc

SEQ ID NO: 43323 - DNA, 247 bp, Glycine max
ccgggttatgttttgtcttctgatattgcacactacattgtatctgaatttgagatgaataaattaaggttgtttaagatggaagatgtgagtatgggaatgtgggtagagcagtttaaccggacgaaaccggtaaactatttgcatagcttcaagttctgccaatacggttgtgtagaaggctattacacagcccattaccaatcgcctaggcagatgatgtgcctgtgggacaaattgcagatgc

SEQ ID NO: 43324 - DNA, 242 bp, Glycine max
  unsure (1)..(242): unsure at all n locations
caaaaactacgtcaaaacgcgaactccgacgcaggttgccagccatgctcagaagtactttctccgacgacgccgctcctcagaactccgggcgccaccgcgagcgcgagcgaaagcgangagttccgtggacggaggaagaacacaagttgtttttggttggattgcagaaagtagggaaaggtgattggagaggaatctccaaaaactacgtcaaaacgcgaactccgacgcaggttgcc

SEQ ID NO: 43325 - DNA, 241 bp, Glycine max
ggaagttcttcttctggatgcaggaatcaaatgctgatgatgattcacaactgtgtagctcagtgaatgattacattaatagaccattagagttgcttggtgaagaggagcctgatggatcccttccacttcaagtttctgaagatatggctgaggatgacatctcgtctagagctgcaaacttaggtatcccaaacttgggcgtggaagcaacgagtgatgtaacatcttctggtccagt

SEQ ID NO: 43326 - DNA, 249 bp, Glycine max
ctagttctagatcgcgagcgatctagaactagtctcccatttccactcagaaccctcgatcactcccacgcgctcctatatcctctccttcaccgtcgctctctccaacgatcacaacaacatcgtcatcccatggcaaacgccgcatctggtatggcagtccatgatgactgcaagttaaggtttttggagctgaagacaaagaggacacaccgtttcatagtttttaagattgggagcagcagaagc

SEQ ID NO: 43327 - DNA, 238 bp, Glycine max
accagcttcccggcgaagacctcgacgccctcatctccgtcaccaacgacgacgacctcgatcacatgatgcacgaatacgatcgcctctatcgcgcttccgctagaccctcccgcatgcgactattcctctttccctccgatactcttccttcccctccacctgctgcttctgctccacacgattcggttatcaaacctaataacgtcgattttctcttcggtctcagcctcagcca

SEQ ID NO: 43328 - DNA, 244 bp, Glycine max
ctcgagccgttcaatgcttcatcatggaagtgatagtacattcaaacatgacgacagtaaatggaaaaagcaggctgcgtactacaagaagttgatccctgagcttgggactgacaaaataagaaacataatggacatgaatacagtatatggaggtttcgctgcagccttgattgatgatcctgtatgggtcatgaatgtagtctcatcttatgctaccaatacactcctatggtttatgatc

SEQ ID NO: 43329 - DNA, 258 bp, Glycine max
tttgtactgtcccatctccctgacttcaactccattactggtgtatccttggcagcagcagtcatgtccttaagttactctacaattgcttgggtagcttctgtacataagggtgttcaagaaaatgtacaataggttacaaagctaagagtacttcagggacagtgtttaacttctttaatgcccttggcactgtggcttttgcctatgctgggcacaatgtggtgctagaaattcaagcaacaatcccatccacac

SEQ ID NO: 43330 - DNA, 267 bp, Glycine max
gttatgagatgctgagcaggactatgcatgggtcaagtacgggatgatttttccgtttatggatcatgtagacaggtttcaggggcagtctgatttgggtgctataactataatccctctgaatttcaaatatcaatagaggaggcatttttggcagatcagggttttacagagaagttgatagcagatataaatacagcagctggtagaactggttgtggtgattctgtactgaaaggctttcagaaggtcactgcttcgaaccag

SEQ ID NO: 43331 - DNA, 263 bp, Glycine max
gttcttgtttgtatatctttattctatattttatcaaactcccattttgtagctgcatcacaactacttatttatgtgggcgctataaatgttttataatatttgctgtgatgtttatgaatggttcggaatattaccaagattttcgtctttggactgttggggatggaattactttgatggtttgtacaagtatctttgtttcactaataactactattctagatacatcatggcacgggattatttggactacaagaccc

SEQ ID NO: 43332 - DNA, 260 bp, Glycine max
ccaattttgatgagaaaacaacacttgactacatctaattagtttgcgtttcatattattgtttaccctttcgtttcaaatctaataatggttatttgagacatgcaggtggtcaagaattgctcgaaagttaccagggcgcactgacaatgagatcaagaactactggaggactctgatgaggaaaaaggctcaggacaaaaagcgaggagaagctgcatcatcatcatcatctagtgttgattcctcaatatcctcaa

SEQ ID NO: 43333 - DNA, 257 bp, Glycine max
ctctcttctccaatcccatttcaggcaaaatttgcctttgaaggaatcaaaatcctgagctaacttgtattggttctgtattcaacatgttcgggaaggagcttggagaacctgtagactttgaacttccagattcatttaataaatccaagccaatgcagtacacctatataaaacgcaatatatatctcactaagaaggtcaagagatcccggtttgatgatgatggcatattctgttcctgtactccttcccct

SEQ ID NO: 43334 - DNA, 244 bp, Glycine max
acaccttctccaccacctccttactactacaagagtcctcctccaccatctcccgtttctcatcctccctactactacaaatctcctccacccccaacgtcgtctcccccacctccttatcactacgtgagcctccaccaccaaccaagtctccaccaccaccagtttacatttatgcttcccctccaccacccatctacaagtaagcttggaattaagaagcagcaacaataataagtcatgt

SEQ ID NO: 43335 - DNA, 258 bp, Glycine max
atactcaatcttcagcagtctttagtgaaagcaaatctagctggttacattaaactagttgtcccctgcaatgcagatgcgtatgagtcatcacttccttcacaaggtgcattccggcctgaactgacccaaatcatgactcagctggttcagttcctcaactcatacggtaccccgtttattgttaacatctacccattccttagcctctatgacaagaatgatttctcgcaagactacgcattctttgaggggact

SEQ ID NO: 43336 - DNA, 147 bp, Glycine max
  unsure (1)..(147): unsure at all n locations
ncagatgcttgctctagtctgcatggcttcgcttacctttaggtgttgattccaccaccagacagatgttcattgacgaagtcatggaactggtggagctgaacccattaaggacctcactggttggattgcccggtgtgagtcgtc

SEQ ID NO: 43337 - DNA, 251 bp, Glycine max
cacatagtagctattatactctctagagtaattgcggaatctgctagaattttctaataatggcgaaagacgttgagcaggtcacagagcaaggtgaatactccgcgaaggactaccatgaccctcctccggcaccgttgatcgacccagatgagctcacaaagtggtccttgtacagagccgccatagctgagttcatagcaacactcctttttctttacatcaccgtgttgaccattattggctacaag

SEQ ID NO: 43338 - DNA, 249 bp, Glycine max
gttagtggtaatcacaaaggttcttacctaacaatgctaagttccggtggcttagtttttgggattataaacattgttggaaattttggcactgtgtttgttgacaatggatattgggtgagtgccattgctgcaagaccttcatctactcataaggggtacttgttgggaggcttggtctggtttgctgtgccattttctttggctacatcattaggtctaggagccctggcccttgatttaccaata

SEQ ID NO: 43339 - DNA, 249 bp, Glycine max
agataccaaggagcagaggacatatactggggaatgtgaggattgatttcttaatgctgagagacctagtttgaaacatcaaaggaaatggaaatctgaccccaattacaccaaatcatggtacgatagaggtgctaaaatctttcaggcagacaagtatcggaaaggtgcttgtgagaactgtggagctatgacacatgattctaagtcatgcatggaaagaccacggagagtgggagcaaaatggac

SEQ ID NO: 43340 - DNA, 237 bp, Glycine max
aaccatacaggatcagtgactgtgcacctgaagatgtctcaaaggcactaactaggactcttgcggacatgcagcttgactacattgatttatatcttatgcattggccttttaggacaaagttgggttcaagaggttggaaccctgagaatatggctcccttgtgtcttccagagacatggaatgcaatggaaggtttgtttgcctcgggtcaggcacgcgcaatcggggtgagca

SEQ ID NO: 43341 - DNA, 245 bp, Glycine max
tcgaaatgaaacatttaatttgcgtgcaatgcttttttgtaccattaatgattttccagcatatgggaacttgagcagttacagtgttaaaggccatcgtgcatgccccatctgtgaagaagacacaagttacatacaactgaaacatggaagaaaaacagtgtacactaggcatcgacgttttcttaaacctcatcatccttaccgacgattgaaaaaaacatttaatggaagtcaagagcatg

SEQ ID NO: 43342 - DNA, 245 bp, Glycine max
atatggaaggctcttctatatatctatcttgttccgtttgtgtcctaacttcatcatatcagccttcagccaccgctgatattgtattcgacaccgaaggcaatcctattcgaaacggcggcacatactatgtgttgccagttataagaggaaagggcggcggaatagaatttgccaaaaccgaaacagaaacatgccctctcactgttgtgcaatctccctttgaggtctcaaagggtctacca

SEQ ID NO: 43343 - DNA, 248 bp, Glycine max
catcaacctgtttttcctccattcagtcggaagacaaatcactaacattctttcctcatgacaattttttactactcgtaaaacaactttcttttccttttacccttttcataggtgtatgagttgtgtttgtcttgcagccttatatgcatgaatcacgccatctacatgcgacgcggcgaccaagaggatgcggtggtcgcttcttgaacacaaaaagctctactgatggaaatggtaaaaatgaa

SEQ ID NO: 43344 - DNA, 248 bp, Glycine max
gtccagaagacagaaagcatagtctattgctctgtttgaagaattttaaatagtactacttgctttaccagtagtttatattaatgtttattgtatgttggatatatttggctgtttttcactgttgcttggtaagaaatgttttttctccgcctggttttgacagcaaggtacactgttcgttcctttgggattagaagaaatgagaagattgcatgctatgtcactgtcagaggtgacaaggcaat

SEQ ID NO: 43345 - DNA, 252 bp, Glycine max
attcgtattgtcgcagagaaagaaaaccctagctcaccgtttcaagatgcaaatcttcgttaagaccctcactggtaagaccatcactctcgaagtcgagagttcagataccatagacaatgtaaaggccaaaattcaagacaaggaagggatcccaccagatcagcaacggctcatttttgctggcaagcagcttgaggatggacgtacccttgctgattataacatccaaaaggagtccactctccactt

SEQ ID NO: 43346 - DNA, 248 bp, Glycine max
aggagactggccttatccccaatgctgttgctatgctcgatggtttatgtaaagatggtttggttcaagaagctttgaaactttttggtttgattcgggagaagggaaccattccagagattgtcatatacacagcggtagtggagggatacacaaaggcccacaaggctgatgacgccaaaaggattttcaggaaaatgcagagtagtggtatttcacccaatgctttcagttacacagtccttata

SEQ ID NO: 43347 - DNA, 240 bp, Glycine max
catggacttgtctggtgcattctccatcatacttggtctacttgcaccaatacttcaggagccatttaggcagattctgaagagactaccaggcacaatggacagcaccatagagagtactaatgagaagctgagtgggcctctcgatgagattgtcaagaagaggctggaagacaagaatagaccttcacagaatttccagtcactcattttgggtgcaagagagtcaaagaaagtatc

SEQ ID NO: 43348 - DNA, 188 bp, Glycine max
gatgctcaatgctgctaacagtcacatgtttctcagcatgagctttaaggccatcaatccaaccatagccaactccatcactgaattgttggattgatggccttgccgctcatgctgagaaacatgtgactgatagaatgtatgctcaatgctgctaacattttccccttcaacacacgaacaacaaa

SEQ ID NO: 43349 - DNA, 271 bp, Glycine max
ggagcggataagtcgaagcgttacttttattacttgaacaggtttttgagtcagaagttgagcaagactgagtttgataagttatgttttcgagttcttgggagggagaatcttccattgcacaaccattttataaagtcaattttgaagaatgcctgtcaagccaagaccccaccaccaatccatccgccagatcccctgaagtctggagaacatgcttcagacatgtctcctggcagggaagatgggcatgaacacagtgttgccagct

SEQ ID NO: 43350 - DNA, 268 bp, Glycine max
caacaagagagaagtctcatgactggtgtgtacactattgctggtatcttttgcagcaactgtggtgaggaattgggatggaagtacctacaagcttatgaggcaagacagaagttcaaggaaggaaagttcataattgaaacggcaaagattgccaaggactactactagcttgtatattgaaggctacaaacactaattaaggtgttgagttgataagtttctcaataaatatttgtatgagaaaaaagatagagagataaaataa

SEQ ID NO: 43351 - DNA, 260 bp, Glycine max
cacgcatcgcactttatcgtcgttcgatgctgacggagggaaacaacggcagctgcggcagcggcagcggagtgcagcaccatacgacgtcgtcctcgtcctcgccggcgcagagccggctacagcggcagaagctggaagtgtacaatgagattcttcgccgcttgaaagattccggcaacgaagaagccatgcaacctggcttccacgatcagctttgggctcactttaatcgactccctacgtggtatgcgctggat

SEQ ID NO: 43352 - DNA, 252 bp, Glycine max
acaacttctgctacttcctactccaaccgcacttctgttccgcaattatcatgggcaaggtcaagatcggaatcaacggatttggaagaattggccgtttggtagccagagtggctctgcagagagacgatgttgaactcgttgccgttaacgaccctttcatcaccaccgattacatgacatacatgtttaaatacgacagtgttcatggacactggaagcatcacgatgtcaccgttaaggacgagcaga

SEQ ID NO: 43353 - DNA, 254 bp, Glycine max
caagtagagagagagagaaacacaactgctttgccaaaccttaatttcagggcacttccaagctaacaggaccagttgttgttccctttttgtgttgtttgattcagcgatttctggttttcgttttttttctttctttgtgataaggagagttcgatgtctttaagttgaataacttgttgggacatatttgactcggtgcttttcttttggtgcttgcctcatgggaaacagtgaggatgagaaatctgtta

SEQ ID NO: 43354 - DNA, 257 bp, Glycine max
ccagaacgagtgttgttgctgatgggcattgttgctgttgtgggcagcaattggtttgtgttgatattgatgatgtggagacggagaagtttgcagggtctgttgctgccttggcctttgaaagagaggtcaaggccaattttagtgaatttcaggcctggcttgaaaagcatgcctcttatgaagctatagtggatggagcaaatattgggctctaccaacaaaattttgccgatggtggattcaacatttctcag

SEQ ID NO: 43355 - DNA, 256 bp, Glycine max
cagacgcagcggacgagctcacattcggctgcctatctgctgctggatccaacggtatgtctagctgcgaaactaactgtcagataccagaccacatgagatcgctcagcgcaactctacacgagctcaaaattggcacagtcaagtctggtgctcgtgtcaaggcggcggaggactaccttttggcaaatccgcattaatactgatcgaattcgatcatcagtattcagtgatctgcaaagactcttgtcttata

SEQ ID NO: 43356 - DNA, 257 bp, Glycine max
caatcctacctttcttcaacttagtgctcatgctaataatcaacatagtttggagatcagataccatgaattcaaactccaagttggcaccaggaccaaggcagctacctcgcatcggatacatacaccaccttggaactctacctcatagatccctaacaagattggcaaatcaatatcggtctctcatgcatatgcagctaggtgagctatcctgcataatggtatcttcacccgagatggcgaaagaagtgatg

SEQ ID NO: 43357 - DNA, 251 bp, Glycine max
cgggaaagtgtgcatgttggaaacgatgctgagccggttatgtgtgcacaccccattcctcggtttccagttgttaaataacgggtgcctaatccaagctttttgcaaaaaggagaagagcctcctggggagcatattcctgcttggttgcctgcattccctgatccacaaacttattctcagtcacctgcagtgaatggaagagggacagaacctcgtgcggtcaaatgtgaccaagaaagagagagtgg

SEQ ID NO: 43358 - DNA, 160 bp, Glycine max
tttgaagttgttggccatggaacagcttctcattcagcaccctgagtatcgggaaaaggtagtgctggtccagatagcaaatcctgcgagggggcgagggaaagatgtgaaagaagtgcaagccgagacgaaggccacagtgaaacggataaacgaaaca

SEQ ID NO: 43359 - DNA, 158 bp, Glycine max
gtggtgacccagcggcaggcccagaccttctcgtggcggccactccccgacgagaagcgtggtttcacgctccgcataaaaaaaaaggacaagtccttcatactaaactcctacttggattacattatggagaaagccagcgacattcggaggaagaa

SEQ ID NO: 43360 - DNA, 157 bp, Glycine max
atccaacaatatcttggctgtggctctggagaactctgtttatttgtggaatgcttctagcagcaaggtaactaaattatgcgatttggggattgacgattcagtttgttcagttggctgggctccacttggtacctacctgtctgttggatcaaac

SEQ ID NO: 43361 - DNA, 151 bp, Glycine max
gtcaaggactctgccaacaccgccttccaacaggcgacggtggagggtgtgctgtcttcggagacgatgcgcggcatccgcttcgacctgatggacgtcgtgctgcacgccgactccatccaccgcggcgcgggccagatcatgccgccga

SEQ ID NO: 43362 - DNA, 140 bp, Glycine max
atccgtatggtctaatgtgagagtgatacatccagcaaaacacgagcacatattagactatgatgtggctggtctgtttcagcctatgcgcatgcttggaatcagtgtcggtgttgctctcagtgttgtcttgccctact

SEQ ID NO: 43363 - DNA, 244 bp, Glycine max
gatgtcttgaaggttattgctggtttctccctagctgacttgtatcctattaaagggcttcaagttttgacagggttgagatccaaagttgagaagttacatcaagaagttgataggatccttgagaaaattgtgagagaccacagggacacaagttcagaaacaaaggaaacccttgaaaaaactggagaggatctagttgatgtgctactaaagcttcagaggcagaacaaccttgagcatc

SEQ ID NO: 43364 - DNA, 239 bp, Glycine max
agcatttggaattatctaggaagggttttcgctggatttgtttctgaacattatctgcaaaagtacaagttccctcgtcctctcatgcttacactaaccatgctcttgtcatgtgctggtcaccttctgattgcatttgacgtgccaaatggtctttatgcggcttcggtgattattgggttttgttttggcgcacagtggcctttactttttgccattatatccgagctttttggaca

SEQ ID NO: 43365 - DNA, 239 bp, Glycine max
ggcatactagattatcaaatatcccctgagactaagtcagacactagaactcccatccaaacttcaaataaggagttttctactccagtgaaaagcaaatctgaggccagcacatcttatgctttgagaggggtacaacaaaaccaacagggctcgccaggtttgagttggtggtcacctacaactgcaaagagtggtggggaacaagatgagaggggaagaagttcgccagttgaggg

SEQ ID NO: 43366 - DNA, 234 bp, Glycine max
ttggaggatcctcttggcaagctcaatatgttttacctgccgtccaaaacgtgtaccaagctataagggctcaaggccttcatgatcaaatcaaggttacaacagttattgacacgaccctaataggaaactccttccctccatcacaaggctcctttaggggtgatgtgagatcatacctagaccccataattggatacttattatatgctggggctcctttattagtcaata

SEQ ID NO: 43367 - DNA, 231 bp, Glycine max
ctcggtggtcgtatccgttttatactgtccggcagtgctcccctttctggtgataccccgaagttcatcaatatttgtcttggtgctccaatcggtcaaggatatggtctcacagagacttgtgctggtgggacattctctgatgttgatgatacatctgttggccgtgttggaccacctcttccgtgctcatttattaagctaatagactggcctgaaggtggatattta

SEQ ID NO: 43368 - DNA, 233 bp, Glycine max
gcaatcactggtaaatcctgctgggaaggacttgtatgtttctctgtatgcctcttggtgtcattctcctatggcaattataagtctttgctttttggctcagacttaccaacatgccagtgctgtgattcaatcaatggaggaggaggatattaatgtcaaatttttggtccaactggataaattgattcgcttgatggaaactccaatctttgcttatcttcgattgcagc

SEQ ID NO: 43369 - DNA, 229 bp, Glycine max
cttcttctctggttgattcggatctagagtcttcagtttctcctacgttgttcttcgctttcctgttttcaatttcgattctttcgttaatttaataagatgtttgggagggcaccgaagaagagcgataatacgaggtactacgaaatcctcggcgtctccaagaacgcttcgcaggatgatctgaagaaggcttacaagaaagccgccattaagaatcaccccgaca

SEQ ID NO: 43370 - DNA, 227 bp, Glycine max
tgttgcacctctgggcgcacaggctgttaccaaaattcatgatatatttgattggtccaagaaatcaagaaaaggcctattgctttttattgatgaggcagatgctttcctttgcgagcgtaacagctcccacatgagtgaagctcaacgaagtgctctaaatgcattgctcttcagaactggtgatcagtctagagacatagtacttgtccttgccacaaacaggc

SEQ ID NO: 43371 - DNA, 265 bp, Glycine max
ataataatagtgcttccttggttttgcaagtttgtgtttcagtgtttggcaattttatgttttctaatctaattattcaatgtttgtgtctcaacatctgattatgtattggtattttgtgatttttgctttgtgtggtgtagttagatgccttgacgcatcctttctttgacgaacttcgtgatccaaattctcgcttgccaaatggccgattccttccaccactatttaatttcaaatcccatgaactgaaaggtgtcccagc

SEQ ID NO: 43372 - DNA, 260 bp, Glycine max
caggaacagttatcagaacaactgtttcgagatggtggcattccattgccagtattttctgagtggtggctgtctaaacaaaaattctcagaaattgattcttttattctctcttcatttcgtggggcaagatgccaagggtgcaatggtttgagcatcagatatcagttaccatataatgaagatttttccctagcagatgtttttggacttcttgaaagaaacagaaatagattagggattgcagagtacagcatcag

SEQ ID NO: 43373 - DNA, 258 bp, Glycine max
atataacatagtcctcctcctttgtttttccacatcacatcgcagatagagagagagatccatcgatcaattaatttccaatggccgatcagctcaccgacgaacagatctctgagttcaaggaagcctttagcctcttcgacaaggacggcgatggttgtattaccaccaaggaacttgggaacgtgatgcggtcgcttgggcagaacccaactgatgctgagctgcaggacatgatagatgaggttgatgctgatg

SEQ ID NO: 43374 - DNA, 253 bp, Glycine max
gtccagagccataggtgagtaatccacaaacttttttttttcttttaaaatacacgcgcggcgtattatagcagagtggacggttctggattattaatgttgtggtcgtgttgtgcaggggacaattatctgaaaccgtatgtaatttcggaaccggaggtaacggtaacggagcggagtgacaaggatgagtgtttgatactagggagcgatgggctttgggacacggtgcagaacgacaccgcatgtaagg

SEQ ID NO: 43375 - DNA, 256 bp, Glycine max
gtagaagagagccaaatccgtcttttgactcataagtaaccaaccgcttctttcaatcaactgaaagtctttatgttttcttaaggttttaatttataatatgggagtggaggagaacacccctaactccatttccacctcacaatgccacgaagaacaaagcaacaacaaaatcaacacgcatgtgctcttgaatgtctacgatctcacccctgtcaataattacgtctactggtttggatttggcatctttcac

SEQ ID NO: 43376 - DNA, 245 bp, Glycine max
aaaatgctggccgcattgattggagtaaaatagtaactgatacctatgaattagctgaagcaggtgttaaaacaaactactatggagccaaggaattgaccaaagcacttattccccttctccagttttcagctccccaaaaatcgtcaatgtttcctcatccatgggaaggctagagcatataccaaatggatggcctaaagaagtactgagtgatgttgagaacttacagaagaaaagatgat

SEQ ID NO: 43377 - DNA, 243 bp, Glycine max
gtgctaacctccttatatgattatatcccacgcatgcggagttctgattcagaggaagtatcagaaaactcagaaaattctctatctaacaaaaggaagtataatatatcggtgtctctgagtggtcacttattgatcagtttctgataaatgaggccttagatattattgaagctgcaggaggctccttccacttagtcaactgccatgtgggtcagagcattgaagccgtatcattctctg

SEQ ID NO: 43378 - DNA, 246 bp, Glycine max
atcaccggtttacaagcctccagtttataaaccagctgtttacaggcctccagtgtataaacccccagttgaaaaaccacccgtttataagccaccagtttacaagccaccagtgtagaagcctccagtgtacaagcaccagtttagatgccaagtgtgtacaaaccaccagttgagaagccaccagtgtaccagccaccagtatgtaagtcacttgtacacaagccactatgcacaagtcacagt

SEQ ID NO: 43379 - DNA, 247 bp, Glycine max
gtcaataaccagtttgtcagggttttttgaggttactcctcgatgccttccagctatatatcctgtttgtatgaacttgacagctatgaaccttagctatgcagcagggattcagagcagagagctaaaaaactaatttgccgctgtgggaaacttcagcgattatggataatggattgcattggagactttggactacatgttgtggattccacatgtaaagatttgcaagaactaagggtttttc

SEQ ID NO: 43380 - DNA, 206 bp, Glycine max
atctgattctttctctctcccttagtcaaagggactcattgttcttctcccaggttatttagaaaagcaaaatggtgaagatttgctgcattggtgctggatatgtggggagtcctactatggcagtcattgcactaagtgcccatccattgaagttgctgttgttgatatctctaaatcccgcattgcagcctggaacagtgacc

SEQ ID NO: 43381 - DNA, 244 bp, Glycine max
tgccgttcttgctgttggatattgttcactatctggtaagttgtaccacaagtgtcactagtggtagcacttcccaggatgtgaaccatgccgttcttgctgttggatatggagttgaaaatgggtcccatattggctcataaaaaattcatggggagaaagctgtggtgaaaatggctacttcaagatggaattggggaagaacatgtgtggtgttgcaacttgtgcacttatccattgtggc

SEQ ID NO: 43382 - DNA, 255 bp, Glycine max
gcaatagagaagaaaaatgtgacggagaagagtgagatatatggattcggagtggtgctgattgaattattgacgggaaggagcgcaatggacatagaagctggcaatggcatgcataaaaccattgtggagtgggcccgctattgctactccgattgtcatcttgatgtgtggatagatcctgtgctgaagggtgtagatgcattgagctatcagaacgacatcgttgagatgatgaatcttgcgctgcattgt

SEQ ID NO: 43383 - DNA, 258 bp, Glycine max
aaagtattggagcatgatgatacagactcagacagaactaaaggaaagaaactggatcttggtttttctggaaccaccagacagtgggaagtcacatttggtacaagatattggaaggctggagcaatgtataggggtaatgcaccgtctcctatcacaagtaacccttttccatctagcattacttgcaagaaggttgtttcatcaaatgagtacccacaagagatttcgctaccagatcggaaagttatggaggta

SEQ ID NO: 43384 - DNA, 251 bp, Glycine max
gggaacttggtcggggcacaagctgcggcgaacatgggttggaaagagagtgcagtatgcttgttttcgctggggatggtgcattacttggtgctgtttgttacgctctatcagcgcttgtccggtggagatcgccttccggtgttgttgaggccggttttcttcttgttctttgcagcacctagtgtggcaagcttggcttgggaatccattgttggcacctttgatactgcttccaagatgctcttctt

SEQ ID NO: 43385 - DNA, 261 bp, Glycine max
ccttcacccacgcctcccccgtcttccacaacttcgccctcaactacgccgtcaagaggatcgacctcggcggcaaggccctcaccaactacctcaaggagctcgtctccttccgctccgttaatgtcatggaagagccttcatcatcgacgacgtcaaggagaaactctgctttgtctcactcgacgtcaaccgcgacctcaccatcgccaggaagagtgggaaagagaatctgttcaggtgcacctacgtgcttccgga

SEQ ID NO: 43386 - DNA, 253 bp, Glycine max
cgccaacaacccttccaacaccaagctcttcttctgcgacatcgcgttcaaggagtcccagctcaccttctcccagttcggcgtcaacgccctccctcacatccgtctcattgggcccacggcgggcctcaggactccgagcccatggaccaaggcgacttctcccgcctcgccgattccatggccgagttcgttgaatccaagaccaaactctccgtgggccccatccaccgcccccctctcttctcccgca

SEQ ID NO: 43387 - DNA, 257 bp, Glycine max
tagctgttgaacctggttatcgaacaatgtcagaggttgcgttgagcatgctaagagaggaaggatttgcatctttctactatggccttgggccttctctgattggaatagctccatatattgcagtgaacttttgtgtttttgatttattaaagaagtcattgccagagaaatatcaaaagagaactgaaacatctctactcactgctgtggtttctgcatcacttgccacacttacatgctatcctctggataca

SEQ ID NO: 43388 - DNA, 260 bp, Glycine max
cttaaggaacataacatcatctgcttccaccttcaactttggtaaatttgaaccatggagcacttagacattgtgagtgaagtgaagcatcaaagaatcaaaaccaacgggatatggctacacgtggcagagaaaggaacaggtccactagttctgctgcttcatggcttcccagaaacatggtatgcctggcgccaccagatcaatttcttggcccatcatggctaccatgtggttgcacctgatcttagaggatatgg

SEQ ID NO: 43389 - DNA, 251 bp, Glycine max
agacaagccaatctatacatgtgggatataattgctctattacatttggatgcttcgatgaacactcagacttgtaataattttatttggcagttctgctctgttgggtaacaccggattttgagctttatgctgcatttgatccccttgcagacaaggccttggcaataaagacgtgcaatcgggtgtgtcagtgggtaaaagatgtggaaaatgaaatatttttgctaggagctagccccttttcatgg

SEQ ID NO: 43390 - DNA, 254 bp, Glycine max
cacaggttcaaagatgtgcagatgacaaagcagtgttgataacaacctacgaaggcaatcacaaccaccctttgccgccggccgccaccgccatggcaaatactacgtcagcagccgcagccatgctgctatcaggttcggcagccccaagcaaggaagcgctaacaaactctgcaggatattactcttcttcttcaattccctatgcttcaatggcaaccctatcagcttcagctccattcccaaccatcact

SEQ ID NO: 43391 - DNA, 283 bp, Glycine max
ctagatgcaagggcagctgcagttgtaatgagagcagtgaagaatgttgttggaactggaagaactgttgcatgcaccattcaccagccaagtattgatatatttgaggcatttgatgagcttattctcatgaaagctggaggtcgcttaacctacgctggcccacttgggaagcactcaagtagggtcattgaatactttgagagtataccaggagtgccaaagattaaagacaactataatccatcaacatggatgctagaagttacttcaagatctgcag

SEQ ID NO: 43392 - DNA, 271 bp, Glycine max
tgacacgtgtgaaggtacccgacacgtcgaaggcgcgcgtggcagcaaccattgggatgagagagtgcaaagagagatgcttgagggattgttcgtgtgtggcttacacgagtgccaacgagagctctggaagtgggtgtgttacttggcatggaaatatggaagacactaggacttacatgcaagtgggacaaagtttgttcgtgcgagtcgacaagcttgagttagctaaatatgcaaaacatccgtatggttctctaggcaagaaggg

SEQ ID NO: 43393 - DNA, 266 bp, Glycine max
ggaatgtatagcccaatgcattccagcaacaagaagaagtcattggccatgttccagcatgattcaaattgtatggcacttctgatggatggaagtgctgcattgggtcttgatttgagttttgttacgcatgtatttctaatggagccaatttgggacagaagtatggaggagcaagtaattagtcgtgctcatcgaatgggtgcttctcgtcctattcatgtggaaacattagcaatgcgtggtacaattgaagagcaaatgct

SEQ ID NO: 43394 - DNA, 260 bp, Glycine max
atcatattagcttttaactgctttgatatcaaatttcagttgtagcacacctgagtttttttgttgatattcagctctggtggggtggtgttggcttctcgtgatggaaagattgtgtgtgaaaatacacttgatgcacgtcttgatgtagttttccgtaaaaagcttccagaggtaaaagagaactgagtatagcagttcttattctgtgatgttagatatttgttgctgaattgtttttactgttgactctcgtattg

SEQ ID NO: 43395 - DNA, 264 bp, Glycine max
ctcgagccgattcggctcgaggggccattgtcacatagttagcagaagccctcccgaggtatgacaaggcttaccttaagcagtttcaacaagattttaaattgtttctaaaatcacgttcggaggaacttgtgcctggaggagcaatggtcttattgtttttcggtagagatgaaactcctagaagaacctcttttgaagtaactagcctaatactcaacgacatgctcttggagggtttgattgaagaagaaaaactggact

SEQ ID NO: 43396 - DNA, 247 bp, Glycine max
gtagctattatactctctagagtaattgcggaatctgctagaattttctaataatggcgaaagacgttgagcaggtcacagagcaaggtgaatactccgcgaaggactaccatgaccctcctccggcaccgttgatcgacccagatgagctcacaaagtggtccttgtacagagccgccatagctgagttcatagcaacactcctttttctttacatcaccgtgttgaccattattggctacaagag

SEQ ID NO: 43397 - DNA, 259 bp, Glycine max
agagaaactccctaacagaatcattttcttccgagacggggtcagtgaaactcagttttacaaagtgctggaagaggaacttcaatccatcaggtgtgcatgctcaaggtttcctggctacaaacctaccattacctttgcagttgtgcaaaagaggcatcacacaaggttgtttccctttgaaactgaccagtcttcaactcaaaaaaacaattttctatatgaaaacattcctccagggactgtggttgattctgtg

SEQ ID NO: 43398 - DNA, 256 bp, Glycine max
aaaaaagtaaaggagttgcaagataacattgcggctgtaaactttaccccccaaagcaagatggggaagatgctgatggctaaatgtagaaccctacaggaggaaaatgaggagattgggaatcaggcttctgagggcaagatgcatgaattagcaatgaaactttcagtgcagaaataccaaaatgcagaactcagaagtcaatttgaagggttgcaaaagcatatggatggattgacaaatgatgtggatagat

SEQ ID NO: 43399 - DNA, 249 bp, Glycine max
gcaataaatgcccaaattctaacagaaatggagatccccgaaagctatattgactctctgcccaagaatggaagagcaagtctaggggactcgaactacaggagtataacagttgaattttttgatcctgaccagttcctatcaaccatggacttatcatcagaacataaaatcctagatctcaagaatagaattgaagcatcaatagtgatttggaagcgaaagatgcaccaaaaagattccaaatct

SEQ ID NO: 43400 - DNA, 260 bp, Glycine max
cccgaatccaagccattcccaaccataacccgcattctcaagatccacaacagccccaagatcctctccaaattcgaagagtaccgcgaggccgtgaagtccaaggcggcgcgtcacgaccgcccatacgcgccgccgcgacgagcgctgcatcgccgacggaaacgagctcatgcgcttccactgctcgacctttttatgcgacttgggacacaacggggattccgcgatttgtacgcctcaagattgttctttgcaca

SEQ ID NO: 43401 - DNA, 251 bp, Glycine max
tcgggattgactgcctcaattgctctagaaaaggcaggacagatggaatctggaaaagtggtccttgttactgctgcggcaggaggaacggggcaatttgctgttcaggtacttcataaatcccatgccacttttctcaaccatatgagcttgtgtatatgtttccaggaactatttgttgtaacaaattgattgtttcttgatattctgtagttgtaggctgaacctgggaaaactaaccaatattttac

SEQ ID NO: 43402 - DNA, 259 bp, Glycine max
cagactattacccttgaatgagtggagccaccttttggcctcttctgccaatgagaatgagaataggctgagtctaatagcttcatctggcacaccgataatcttattagtgttgcatatttcaatgaacattgccaagtgtgcataggggtcttcattaggtaatcctagaaataagttcccctgtattaaatgaattaaggactatgggtagttgatgttgttagcttgcacttcaggacgtgcaatgctggtgaaa

SEQ ID NO: 43403 - DNA, 253 bp, Glycine max
aatccctctttcttcctcttcctcagtagtgcgattttcgattctcttctctgcaactatgcctaaccctaaggtcttcttcgacatgaccatcggcggtcaacctgccggccgcatcgtgatggagctctacgccgacgtgactccgagcaccgccgagaacttccgcgcgctctgcaccggcgagaagggcgccgggcggagcggcaagcccctccactacaaaggctcgtccttccaccgcgtgatcccg

SEQ ID NO: 43404 - DNA, 253 bp, Glycine max
tgcagcttggatatagaaccattcctcctatccttccaagacaacacaaggggatatctctcatgatatcacccaaacacttactgcaatcttggcttgatagatctggcgtgcactgaacaagagtataaacttcctgggccccagacaaggttgcgttctttgttgcaaatttcatggtgcccgcaggaccagcattcgcagcctcacccactgcatcactcaacgttttggataacaaccagaacccata

SEQ ID NO: 43405 - DNA, 255 bp, Glycine max
caagagtttgtggttggtctggcaatgaaagcttgccatgttcttcaattctttttgcgcctgagttttgtgctatctgtgtggctcttaattatacctttcataacattctggatatggcgattagcttttgtaaggagtttaggtgaagcccagaggttattcttaagccatttatcgacagcagttattctgactgattgcctccatggtttcctactttctgcaagtattgtcttcattttccttggggcc

SEQ ID NO: 43406 - DNA, 260 bp, Glycine max
gaaaaaatgtgaagactgggcatactgaggaaaatagtgcactgtctgtttttcttgttgcaagtgttcttgagattaagaataggcggattttaaacgaggccaagggtgtggacgatgttgtcaagatcttgggcgacataacctcaaatcttgatgctaagaaagcacttagtgaagcactgaaaattcagaaaaaatacctaagcaaggccaagaaggcatgacaaagacaacaatagattttctgtaactatatg

SEQ ID NO: 43407 - DNA, 255 bp, Glycine max
aatgccatgggctccatgtatgctgctgttctccttattggcattaagaatgctaatgcagtgcagccagtggttgctgttgagcgaacagtcttttatagggaaaaagcagccggaatgtattcagctttaccgtatgcttttgctcaggttctaattgagctcccatatgttctagtacaagctgtggtatatggcattataatttatgccatgattggttttgagtggactgtaactaaagttttctggtac

SEQ ID NO: 43408 - DNA, 249 bp, Glycine max
gcctctttggttgatcttttcctacactgttggggcttttagtctttggggtggtggctttctctaccaatggggggttattgactattctggcggctatgtcatccacctttcttctggaatcgctggtttaactgctgcttactgggtacataaattttactcttatcatatttgcttcaaatatctaaaagctagctagctcccttagccaaagttttaaattgcggtggcggttgtagttttggt

SEQ ID NO: 43409 - DNA, 254 bp, Glycine max
ggagtatggtgtgatttctatacctgaattttctcaccggcagcttacagacagagatcagttcattgttcttgcctcagatggggtgtgggatgttttaagcaacgaggaggtggttgagatagtatcttcagcgccaacgcgatcatcagcggcaaggattctggtagattctgctgctagggagtggaaacacaaataccctacatcaaagatggatgactgtgctgtagtatgcttatttttggatggga

SEQ ID NO: 43410 - DNA, 248 bp, Glycine max
gatttaagaactcttattgcggattccgagagatctcgaatgaccatattcataagaggggaaacaatagaaattcctcatcattcagttgccctcttactagaaggatatgtcaaaactcaaggtcgtcaagaactggtaacagcaccagcagccctgcttccttcacatgggaatctaagcttccaaaatttggcaagttcaggttctaaggaagctagttttattcatcaacaaggatctagtta

SEQ ID NO: 43411 - DNA, 241 bp, Glycine max
ctgagattgctggtgtggtggtttccgttgaacccaagccaattatgggtgcttggactgcgtgctcgtgctcacacaaactacagcacgaagtccatgagcgaagatggtggctatgcagtgatcagagcagcacattgacaagttggggtaggagcgcaaagactcacattgctgcttatggagaacgcaaccaacgtgctgcgacaggccgccacgagaccgctgacatcaacacctt

SEQ ID NO: 43412 - DNA, 232 bp, Glycine max
atacactggtggcttgtaaacaggtggtttataaactggaggcttgtaaacccccaattgagaaaccacccgtttataagccaccagtttacaagccaccagtgtacatgcctccagtgtataagccaccagtttacaagccaccagtgtacaagcccccagttgagaagccgtcagtatacaaaccccccgtttataagccaccagtttacaagccgccagtgtacaagcc

SEQ ID NO: 43413 - DNA, 233 bp, Glycine max
ctctagcacttaactagcaatattaattagcatttgctagagagactaggagtataaacataccccagtttaagatggcttcaaaaacttgttcctccctaaccctagcccaagtggctcctgcccccgtgatgcactcaaactaggtgtatgcgccaatgtgctaaacttggtgaacgtcactttgggtcaaccaccagttaccccttgctgcacccttctcgatggtctcg

SEQ ID NO: 43414 - DNA, 231 bp, Glycine max
ggcaactcaagtatttggagaattgctttattatcctcagacagattctctgatggaattcccctcaccggaatcattgaaaggtcgaattcttatatcaacaaaaccaccaaaagaatttcttgaatccaaagaatgtgatgacaaggacaatgaaaaggaatcagccgacgaggttttgtcattgccagaccaaacaagtgaacgggaaactgatgataagagtgcacc

SEQ ID NO: 43415 - DNA, 257 bp, Glycine max
acggttcgaaggcgtgttgagaatctgagagactgtaaagttctggaagggttggtgaagaagcatgttgaggacggacggctctatgcggcggtgtgtgctgctcctgcggtggtgctcggaccttggggtttgctgaatgggaaaaaggcgacttgttatcctgcattgatggagaaattggccgcttatgcagccgctacttctgagtctagggtgcaggtggatggcagagttgtgaccagtcgtgcgccggg

SEQ ID NO: 43416 - DNA, 280 bp, Glycine max
tgttttccacaaaattccttttatggcaaaaactcgcaatttaattattataattttttactgcatctttagttaatttggatgctttgcatcatattttgttgtttgtattgttattttgtacccagaatttttagtaaattacagtgatctatttttggggtcgtatactatttttgtgcgggtaatgttattgtttttttggaggctaatgtggtgttttccttctgattaggacaagcctgagccaccaccagagggtcgcttgcccgatgccact

SEQ ID NO: 43417 - DNA, 255 bp, Glycine max
cgtggtctggctagtggacatgtgaccttaagagaggcgcttgttgctgctgcgcaggatgtgcaaaagctgaagtcacacattagaagcatccagactgagagtgacattcagatcagaattctagtagataagatttccaaaggggaggttgatattagggccagtgatagtgtgaagaaggacctacaaaaggcccatattgaggcgcagagcttggcagcttccaggcaggaagtgagtgcccaaattcat

SEQ ID NO: 43418 - DNA, 265 bp, Glycine max
cattttctctctcatggtcatcatccacttggagtcttgatcttgtacttcattgccatcacctatgtactactatatgtagcccaacaaagtcgtttatttatcagagttcacacaaggtagtttcatggttcaaaccaagaatggaactgttgcagtagcttctgcgtttgctggacataaggaagctatacagcaaagggaccacaaatttttaagaattgctagttgaagaagcctataaaggggtagactgtgaagatgg

SEQ ID NO: 43419 - DNA, 282 bp, Glycine max
tgcttctctgcttcggcataacctggataccaattgccggggtccttttcccattgttaatcatgcttcttgtcccagtacggcaatattttcttccaaagtttttcaaaggtgcccatcttcaagagctggacgcagcggcatatgaggaagcacctgctattgctttcaacatgtcctttgaaggtccaagtaaccaggcaccaacagtcaatatcagcggtggggaaattcttgatgaagttattacaaggagtcgtggagagtttcgccacactcaaa

SEQ ID NO: 43420 - DNA, 261 bp, Glycine max
acaatgagagtgagcaagtgaggaaccaccacctcctccatcatcactcatccttctccctccatgatgagtagtggtgtttggaatttcattgcaagcactatagcggatcaaatcagcgtttgtggcatcaagttccttttggagcctaaggacttgcttttggagcactgaaatggccccaacacaaccatacactggatctttgatccttgcttcggcttcataggccagagagttcacagcatcctctctttgatg

SEQ ID NO: 43421 - DNA, 267 bp, Glycine max
tgcagctctatggaggatcttgagaacttggctcttggaggcatgagtgttgccaggctcaacatgtgccatgggaccagggagtggcaccgtgatgtgattaggaagatcaagaagttgaatgaggagaaagggttctgtgtttctgtaatgattgacactgagggtagtcagattcatgttgttgatcatggagctccttcctccgttaaagttgaggaaggttcaaattgggtgtttactgctgaacattatgagggttctcgt

SEQ ID NO: 43422 - DNA, 258 bp, Glycine max
gtatttttgatgcaaaggctggaattgcattgaataagaactttgtgaagcttgtttctagagacgacaacgagtggggatacagctcacgtgtcattgatcttcttgtattcgttgccaagaagtctctttaaggtgttacttcaaagtagcttgtcttcacattattaccgtatgtttatgtttagctgcgatttagtgtcttgctcgagcaaaaaatgagaggtctgaataaatcggtttctgaaaccagtggtg

SEQ ID NO: 43423 - DNA, 253 bp, Glycine max
gtcctcttacagcagtagttctgggaacttttgcaaaaatatttcatccatcatcaatttctttggtgggagatatacctcaaggcctaccaaaattttctgttccaaaatcttttgagtatgcacagtccttaattccaactgctcttctcataactggtgtggctatattggaatcagtgggaattgcgaaggcattagcagcaaagaatgggtacgagttggattcaaatcaagagttgttcggtcttgg

SEQ ID NO: 43424 - DNA, 250 bp, Glycine max
taattatggagagaatgggggataaggacatagtcgaacgagcatttaagacattccataacagtttcaaccaaccaaaaacttctgttgaagacaaatctttgacaaagaagcaggttccttcaagggggactgtgccaaaggttccaacatctacaactttgaggaaagaaaatggacggccaactaaggttgagaatgtggataaaagtggaaatgctctacgaactactttgggcccaaaacctga

SEQ ID NO: 43425 - DNA, 249 bp, Glycine max
ggagaggccattattgacactgctgcaggagtgcttggtaaatatgatccacgtccggttcagcctgatagcctttttcctgtgttctctgttacgaagggtatcacagcaggaatgatacattggctggttgacaatggacaactaaaccttgaagagaatgttgcaactatttggccagcatttcgatcaaatgggaaggatgtcattaaggttcatcatgtgcttaaccatacatctggtttgcac

SEQ ID NO: 43426 - DNA, 238 bp, Glycine max
  unsure (1)..(238): unsure at all n locations
cacatatgtcttgtggtgtttcccccaatgagactcaagtgtctgagagctcatcaccggctcnaaaccattcagtgagtatggtggcggcttcagctcgagcttcgcattgtctggtttggagccggtgatgagccagcagacacttgagtgtcattgggggaaacaccacaagacatatgtggacaatctgaaatcacaaattgttcgggcagagcttgatgggaaatcactagaa

SEQ ID NO: 43427 - DNA, 260 bp, Glycine max
acccccaccatacaagtacccatcacctccaccaccatacaagtacccttctcctccaccaccaccatataagtacccatctccaccacccccagtctacaagtacaagtctccaccacccccagtttacaaatacaagtctcctcctcctcctgttcattcaccacctcccccagtttacatctatgcatcccctcctcctccatatcactactaggttatttctgaagaatataagccaataaaaaacgttgttgata

SEQ ID NO: 43428 - DNA, 261 bp, Glycine max
atttagtggtgctttttttgtcttctctggcaaacctagttagtcttattacgagacgaccagatttagttcgaattgttcgattgcgacggctaggaagatgcttatcgacggtgaagctgaaattgctcaaggtggtggagaagaagtgtcgaattttgatttcgacttgtttattattggggctggaagtggtggcgttcgtgccgctagattttcgtcgaattttggagctaaggtggggatttgtgagcttccatt

SEQ ID NO: 43429 - DNA, 268 bp, Glycine max
aaaaaaaaaaaaaaaaaaaaaatccgggattcgctcttctcttggaaaagtgaaaaccagaagtacgaacgaaagagaaaagcgttttaaaagtgagaaaaaatggggttttcgttcacgaagcttttcagcaggttttttgcaaaaaaggaaatgaggattctgatggtaggccccgatcctgctggtaaaacaaccatcttgtacaagctcaagcttggagaaatcgtcaccactatccccaccatcggatttaatgttgagactg

SEQ ID NO: 43430 - DNA, 262 bp, Glycine max
ggaagagtatgaggttcatactgtttctggtatagattataatcaatattttggtggcggtgtaatgtactggaacccttctgactatccagggaaaggtttctcccggcctccctcgcttagctctgatgacagtctatgggctttgcgtgatgctgacatgaataggacggtggatgatatggttgctttctcttcttcgtatagtacgaatggtttaacatcacccactgctgctacattttgttctcctttcgatcct

SEQ ID NO: 43431 - DNA, 240 bp, Glycine max
tgtctccaaaaccatccaactctcatgtgcgaagagaacatacacaatctcttcaaactctaattttcttttcctgtcatttaattgcctcaatggcggcttccgtcgaccagcgtccgtatcccggcttccacaatggcgtcgtactgcacctcaaactatgcccggatatcccgcgttgcaagtagctacacgatccgccgctgccactctcggattcctcaagcgacgtagaagaag

SEQ ID NO: 43432 - DNA, 256 bp, Glycine max
cggctcgagcggctcgagcggctcgagtatattttctagatttttataataaagggtcctgcagttgcctccgaggaacaagggggcttgtatcttccccaagggcttgaatctttgtccaatgaattgagatatcttcgttggacccattaccctttggaatctctgccttcaaagttttcagctgaaaatcttgttgaactgaacttgccctatagccgagtgaaaaaactttggcaagcagtgccagatcttg

SEQ ID NO: 43433 - DNA, 229 bp, Glycine max
agagagagaggcatactcattgtgggacgtgtgctactttgagagagggtcggtttcactaatcaaggtgcgatgatgaagctctctgagatcgcaccaccggtatggcgatgagtattcatcacagggttccagttctacttaggagttggagcgcttatcgctggctgcataaacttcgcaaccgctacacgcgcgtggggatggtatatctctctctcccttgtaa

SEQ ID NO: 43434 - DNA, 258 bp, Glycine max
ctctaattctaaatgagagcttgtatcgaaaccaacacttgtagcatggttgatctttctggtatccaattttcactattaccaccatgccaagtgcccaagagactaaggcagacttttccacaattatataccagataaatcaaccatgctacaagtgttggtttcgatacaagctctaattctaaatgagaagccttttcataatgagcctgggtatacgtcaacatatcctggtgctgaggggcaaagaagatc

SEQ ID NO: 43435 - DNA, 251 bp, Glycine max
cggccattaacatgggaggtggttttcatcactgttctgcacaaaaagggggtggattctgtgcttacgcagatatttctctatgcatccactttgcttttgttcggttgaatatatcaagggtgatgatcattgatcttgatgcacatcaaggaaacggtcatgaaatggacttcgcttatgatagccgagtctatatcctggatatgtacaatcctggaatatatcctttggattatgaggcgagaaac

SEQ ID NO: 43436 - DNA, 254 bp, Glycine max
cgatggttttaggttgggccaaggttgaagagtgacagggagaggttcccaccgaacaacgtattgctgatgcttgcgggtgcagggttactatggatggggtggtcagggttcaatggtggagcaccatatgcagccaacattgactcttccattgctgtgctcaacactaacatttgtgctgccactagcctccttgtatggacttctcttgatgtaatcttcttcggcaagccttcggtgattggtgctgt

SEQ ID NO: 43437 - DNA, 236 bp, Glycine max
agctgttcaattacttttggcctatcgtgagcatctgagttctgatagcaacccaacagactcacagaagttggatccagttcaagttgaattacttctagggaaagcctactcagattggggccatgtcgggatgctgtagctgtttatgatcagctcatatctactcagcctaatgattttcgtggatacttagctaagggaatgatcctaatagcatacaaaaatattggtga

SEQ ID NO: 43438 - DNA, 243 bp, Glycine max
ctttggcaacatttatgatccctacctttgctcagctcactcctaattattatgacaaagtttgccctaaggcgttgccaatcataaagtcaattgttaagcaggcaattattcgtgaaaaacgcattggagcatccttgctgcgtttgcattttcatgactgctttgttaatggctgtgatggatcagtgctgctagatgacacaccttccttcttgggggagaagactgcacttccaaatc

SEQ ID NO: 43439 - DNA, 248 bp, Glycine max
actttatagtaataatataactggtaaaatcccagatgagcttggaagtttgagaaacttggtgagcttggatctttactcgaacaacattactggccccatttcagacaacttggccaaccttaaaaactacgtttcctgcgtctgaacaataacagcttgtcaggaaagatccctgttcgtttgaccactgttgattcacttcaagttcttgatttatcgaacaacaacttaactggagacatccc

SEQ ID NO: 43440 - DNA, 229 bp, Glycine max
aatgggcttgtaagtattgtggtgaatgtgatgggtgatgttttcccggagctaaaacaactggtaacacacattcggaagataattgatgaggtggtggaaatgtttgggtgatctgaattaagggtattgagatatttgaggctgctgttcgacaagttctgggaaacatactgtgtggggtggttgcttttgtcttgtgggatacatatgggtttccatgagatct

SEQ ID NO: 43441 - DNA, 240 bp, Glycine max
gttctcttctgttcattgaatctgtccctttgataggatgctttttttttaggattacaccggtgataatgtgacgacggagaacctctttgctgttattcttggagacaagagtaaattgaaggaggaagtggcaaagtgatcaacagcaaacccgaggacagaatatttatatactactctgatcatggaggtcctggaatacttgggatgccaaacatgccatacctttatgccatg

SEQ ID NO: 43442 - DNA, 260 bp, Glycine max
gttggatcaaacatttccttctgaattcaaagaccttacagaacccatagaaattcctggctgtgttccaatatatgggaaggatttaccaaaaccggttcaggatcgaaccggccaaatgtacgagttctttcttaaacgatgcaaacaactccatgaaaccgatggggtcttggttaacagcttcaaaggcattgaagaagggcctataagagcattggtagaggaaggaaatggttacccaaatgtttatccgattg

SEQ ID NO: 43443 - DNA, 253 bp, Glycine max
cacttgttcaattactccttcaaatcagtctggcttgacaagcaggaaaggtatttattgctctctacttaggtaacataagccaacaattttagtagtaattaatggctggagaattgggagttttgatgcacttgatgtggcaaagacacaatggtaccacttcactgctattgtgatcgctggaatgggtttcttcaccgatgcctatgacctcttctgcatttccctagtcaccaagcttctagggagg

SEQ ID NO: 43444 - DNA, 251 bp, Glycine max
cagatctccaagaaacaaaagatgctattgttaaagcatccgacctgccattatcaattcttattgttggggtaggaggagctgatttcaaagaaatggaggttttggatgcagacaagggagagaggctagaaagttcatatggacgcgttgcttcacgtgatatagtccaatttgttccatttcgggagcttcaaagtggattttcagttgttcaagcacttctagcagaattacccgctcagttttta

SEQ ID NO: 43445 - DNA, 243 bp, Glycine max
aagaaaacagctagtgaaatagacactttggttgcagggtggctggaggaacacaaaagaaaaagagctacgagtacaaatggacaggaagaacaggatgtcatgggtgttatgctgaatgttctgcaggatcttaaggtttctggttatgattcagacaccatcatcaaggctacttgcctgaatctgattttggcaggaggagacagcatcatggtggctctaacatgggcgctatctctg

SEQ ID NO: 43446 - DNA, 246 bp, Glycine max
ctcgagcgaatcggctcgaggtccttccttcgtcaacacccctttttgctgatggcgcaaattctgctccatgggactcttcatgccactatctatgaagtcgataagctcaaaattggtggaggcaactttttaaccaagatcgtacaaaacatcgaggagactgttggtattggaaaaggtgtcactaaactatatgcaaccattgatctagagaaggcacgagtggggaggaccagaattatt

SEQ ID NO: 43447 - DNA, 243 bp, Glycine max
agtaccttggcgacgaggatataaaggtgaaggaggctgcagggggcattttggcaaatttagcattgagccgcgttaaccacgacatcatggttgaagcaggtgttatacctaaattggcaaagttcttaacatctaatttggaaggatctaaagttattaggaaggaagcaaggaatgcattgctggaacttgttaaggacaagtatcatagaattcttgttattgaggaaggtctggtcc

SEQ ID NO: 43448 - DNA, 241 bp, Glycine max
attggtcgcttgctagctggcataggaattggtgtaacatctgcaattgtaccactttacatatctgagatttctccaaccgaaattcggggtgcgcttggatctgttaatcaacttttcatatgtattgggattcttgcagcattactggctggtttgcctctggtgggaaatcctatatggtggcggacaatgtttggaattactgtagttccatctgttctgttagcacttggaatga

SEQ ID NO: 43449 - DNA, 244 bp, Glycine max
gtataacgctgctgccgaaacccttcccgatccttgaggtaagtgagtagtcggtggttcagggtggtgcatactgctaagggtaagcaataggatgtggttaccatcgcgtagaccatcatgctccataagcggctccatggctgcacatttaagagaaagctcctagagctattaaggagataaggatatttgcccgaaaggccacggggaccactgatgtgagggtggatgtgaagttgaa

SEQ ID NO: 43450 - DNA, 250 bp, Glycine max
ggaattgttcattcagatatgtggtcccttgatcctaaaacttgggaatggaacaaggttaagaaaagtggaatgcctcctggtcctcgtgctgggttttccatgtgtgttcataagagaagggctctgctatttggtggtgttgtggatatagaagttgaaggtgatgtaatgatgagcttgtttttgaatgagctttatggactcagttagacaccaatcgctggtatcctctggagttaagaaagga

SEQ ID NO: 43451 - DNA, 247 bp, Glycine max
ggtatctgaactctccacctccaaggtgatggtctttcccgtcaaagtcttgacgaaaatctgcatgccatagacaatgtgaaagccaagattcaagataaggagggtatccccccagaccagcagaggcttatctttgctggtaaacagcttgaagatggacgaacccttgcagattataacatccagaaggaatctacctgcacttggttttgaggcttcgtggtggcatgcaaatctttgttaa

SEQ ID NO: 43452 - DNA, 248 bp, Glycine max
tggagctcttgaaaaggtcaaggatacattgaaggagttggtgatgcttcctttacagaggcctgaacttttttgcaaggggcaattaaccaagccgtgcaaaggaatcctattatttggtccccctggaactggtaaaacaatgctcgcaaaggcaatagctactgaagctggtgcaaacttcatcaacatttctatgtcgatattacctctaagtggtttggggagggtgagaaatatgtgaaagc

SEQ ID NO: 43453 - DNA, 257 bp, Glycine max
gaaaatattggcatgctcattttgggtcgtgtgctacttggttttggggtcggtttcactaatcaagctgcaccgttgtatctctctgaaatcgcaccaccgaaatggcgaggagcattcaacacaggcttccaattcttcttaggagttggagcgcttatcgctggctgcataaacttcgcaaccgcgaaacacacgtggggatggcgagtctctcttggccttgcagtggtgcctgcatcagttatgacaattgg

SEQ ID NO: 43454 - DNA, 253 bp, Glycine max
gtgcgctgttcctctgtctgtcgtttttgttttcagaccaaaccctagctccgcatcgcaaccatgtcgaccaagcaaggtggaaaagctaagcctttgaagaaacccaagtctgataagaaggattacgacgaggttgacatggctaacattcagaagaaaaaggaagaggagaaggcgctaaaggagttgaaagccaaggcgcaacagaagggaagctttggaggttctgggctcaagaaaagtggaaaga

SEQ ID NO: 43455 - DNA, 244 bp, Glycine max
cgaaggcgaagattgtggatatttgtgagaaaggggattcatacattagagagtaagcttataatattcataaatgaaggagcattgcctgttcttaacatatattgatatggcatgccatatagatggattcatcactgcggtagctcacacccatgttcttcaggaaggtcctgttgctgccacaaatactgctgctgaggtggccttgaggcttgtcaggccgggaaagaaggtaatcaat

SEQ ID NO: 43456 - DNA, 238 bp, Glycine max
tgctgtgggagtcatcaagaacgttgagaagaaggatcctaccggagccaaggtcaccaaggctgcccagaagaaaaagtcaccacttggttggttacaataaatgttggtttcttttctgtactcttgtgtcttcttttctaggtagcttgtttttcggacaaagtttgaagtctccaccatcatctcgcaactgttgttcccagaactgggttcttgatcgacggtggcaaaattg

SEQ ID NO: 43457 - DNA, 241 bp, Glycine max
gtaaaatactactctcttataaaggcattgttgacgtccatttgctgtaacttccacttgttggtgacagctaaagttagtaggatccttacagttactggtttaataactggagaaaaagtctcattgtagtcttttcccagttgttgataaaagcctttggctacaagcttcaccttgtacttagtaatagagccatctggattctcttttactcgaaacacccacttgcaactgatga

SEQ ID NO: 43458 - DNA, 250 bp, Glycine max
cgcttccctgtttcatagcagaatgtggctacaagatatggtggtacgtctcgggagcatcacaaataccacattatggtaatatatacgtgagcagcatcattctgtgcacattggacctatgttcttggctgtatagaacctccattttcttcctggtgtgtgttctctttcgacttatctgctacttgcaaatacttagactagatgagtttgctcgagtttttcagcgagaaactgaggtggggtc

SEQ ID NO: 43459 - DNA, 269 bp, Glycine max
gcttgagtcatcaacaattgaagtcccttccgttttcatctgcccaatttcacttgagccaatgcaagacccggtgaccctttgcacgggacaaacctacgaccgttccaacatcctcaaatggttctccctcggtcacaacacgtgtcccacgacaatgcaagagctttgggatgattctgtcacaccaaacaccactctttaccacttcatactctcttggttctcgcagaagtatttggtcatgaagaagaagctcgaggacgtgc

SEQ ID NO: 43460 - DNA, 162 bp, Glycine max
gaagcttcaaaacattctcgttttccagaatggggatgttaaaatcgcggattttgggcttgcaaaggagaaaggggaaaaacaggggaaattggagtgccggggaacaccgctgtttatgtctccggaatcggtgaacgacaatgagtatgaatcgccggc

SEQ ID NO: 43461 - DNA, 256 bp, Glycine max
ggtgatagaacactttatgcagatgagattttgaaagatgggttttgcctgaatatgattgatacccctctgtgccctctgaaggttgtgacaaacctgcaggaggctgtgtgggatgctgatatcgtgattaatggcttgccatcaacggaaactcgtgaggtgtttgaggaaattagtaagtactggaaagagagaatcactgtccctgtcattgtatccttggcaaaaggtgtagaggctgaattgggcactg

SEQ ID NO: 43462 - DNA, 301 bp, Glycine max
cacacaactactacaagtacttccttacaatcaaaaccaacaacaactatggcaagttatcaaaagcactacgatgatcagggtcgcaaggttgacgagtatggcaacgttgagaagcaaaccgacgaatacggcaaccctgttcatgctgctagtgtcactatgtagccaccagaactgctgctggtggttacagtgatgacattaataagcaacatgataccaccaatgcctacggcgtagacactggtagacagcattctagtggtggctacgatggtgacactaataaacatcatgg

SEQ ID NO: 43463 - DNA, 107 bp, Glycine max
tgggtggggaccaggctcccgaggcagaatacgaggaggtgaagaagtaaggcgaggaggggtttgtatccacttttactgatttattttgtctagagttagagatg

SEQ ID NO: 43464 - DNA, 297 bp, Glycine max
ggagtccttcacctcagaggagcacttcccctcctataatcttgatctctgtaatcatcaaggagccgtagcccaaggaaaaggcatcgtgatgattacaaagatcgagattataggaggcgaagtcgcagcagaagttatgataggtatgaactgacaggcaccgtgggagagacaaagattatcgtcgcagaagcaggagccgtagtgccaatcttgattacaagggtcgtggtaggggacgctatgatgatgagcgtaatagtagaagccggagcagatcagttgatagcggct

SEQ ID NO: 43465 - DNA, 304 bp, Glycine max
ctagaactagtcagcaaatatacgtggtggtggagaatattgggaggaatggcataaatctggctcccttgcaaataagcaaaactgctttgatgatttcatttcagcagctgaataccttgtatctgctggttatacccaacccagaaagttatgtacgagggtggaagcaatggtggacttcttgttggcgcttgcataaatcagagacctgatctttttggttgtgccctggctcatgttggtgttatggacatgttacggttccacaaatttacaataggtcatgcttgggccacagact

SEQ ID NO: 43466 - DNA, 301 bp, Glycine max
ctcgagccgatcttttattattattttcatagtaataataattgaagaagagagaagaagcggccagaaaacaaaatcccaagagactcttcctccctccatcgttttgtttaagtgttaaattaattaaatgggcaatgtgacgggaacagtggcgggaaattcgcgtttttcccgccagagcctccgacgtacgacgtcagcagacacgaggatgggagggtggtggtgtcgggtgtcaccgccgacaaaaacgtcgacgttcacattctccacaccaaaggtggcaacgagatcgtcg

SEQ ID NO: 43467 - DNA, 296 bp, Glycine max
tgtgatgtgtagctgatggggagctcaatgaggaagatgttgctgctttggtgaagttgcgtggaattgtctgcataccgcaacagattgttgaaacagctcattcagatatatgtggcagtttgtttgaaaaggttgtgagttaggcaatcggtcaggggttgatggatatgatgctgaaatccagaaatcagtaagaagagcagcacatggcctgcgacttactagggagggtgctatttctattgcgagcaatgcggtaaggcagatttttattaattacataaaacgtgcac

SEQ ID NO: 43468 - DNA, 300 bp, Glycine max
gggatgcacctaacaacatgcgacagtttcaaaaccaagatattatagcaccctttgaagtagggtagcgagaaaggcaagtggtgaattggcgttgtaggccaaagtggcaggaaacattgctctttggtcaatccctgtcatgtttgctttattgtctcgttcacttgccagacgttcctgcaatctcaaagcaagaacatcatcattgcgttcttggcggctttttcgatagtcattcacgtgtttctctcctggcttttgacaatgaagttcaagtttgggattcctggtgctatg

SEQ ID NO: 43469 - DNA, 324 bp, Glycine max
  unsure (1)..(324): unsure at all n locations
gtatgatgacctcgctgagcagtctttctacatggttggtggcattgaggattgattgctaaggctgaganaattgccaaggagtctgcttcataaggtggcttcttgcttgttcatgcctgtacaagttccatttttggattttaagcgtttatttatgcttatcccagttaggcatgacgagctcgatgatccatctcctgctgagagatgtntgttttacccttctttgcttcctccaccttacacccataagcaactgcagtgacgttggttcggctagcaccaaactacatgactgaagatattgtggctgtgtaagcg

SEQ ID NO: 43470 - DNA, 234 bp, Glycine max
  unsure (1)..(234): unsure at all n locations
gagcgcggaaccctgcccccggccgccatggagatgaccgctgcggagcggctgttcttcttcgagatggcctgcaacaactccgaggtcgcgtatcagnggaaccccaacgacgccgacaacttgacgcgatggggcggacgctgctggagctatcgccactgcgtaacggccccgacagcctcaagctcctccaagatgcggaagccaagctggaggaggcactgcaaattg

SEQ ID NO: 43471 - DNA, 169 bp, Glycine max
caacgaagagctaggtacttgcccagtgaggcagattggtggatgctctgtcttctacatgaggatcagtaatgtctacctagtcattgtagtcagcgacaacgccaatgacgcttgcgcaatcgacgttgaagttgaggctgttgcattgctccgatcagacctgggt

SEQ ID NO: 43472 - DNA, 196 bp, Glycine max
tcctagtacaccgtattaaagaatttaagatatactatgatgagagcgcggttcccattactgttgctggaagttgttttcctggcatcagtttctgtctcatttggcattgcgtattgggaaaagcagaaccccagtcacaacaagtgcctccgaagttgcaatagcgagaaagactcctacaggaaccaagcat

SEQ ID NO: 43473 - DNA, 143 bp, Glycine max
ggatcctctttagctttcatcctcctaagcctctgcgagtctctctatcatgccattttaatgcacgtgttacttattaatatgtagaatgtattatgagatgagaaggagaatcgggtcgcgggcgtcgtgagaatactgca

SEQ ID NO: 43474 - DNA, 254 bp, Glycine max
gtaaaatggtaaccatcaaagcttctcacactgtggttccaaatcaaccaacacctaaaggtcgattatggctatcaaatagtgaccaaaccgcacgcccagcacacacaccaaacctttacatctacaaagcaaaacacaacatcatcgaatatgacattgagaaaatgatagactctctcagcatcattttagtgtactactatccggtagctggcagattgagtgttacagaaagtggtcgaatggaagtg

SEQ ID NO: 43475 - DNA, 255 bp, Glycine max
gttatttggtgtagggattgcgggaaacaagtctatttgggtatggatttttaatttatgaatttatgaatttcagtgtttattttagggtacatagtttttgtactatctgaaatcgtattctatggtttactattttaagcatcttttgacaaaattggtatttgagcttgtaggtggatttgacacggctcatgctgctgccagagcctatgatcgagccgctattaagttcaggggagttgatgctgatat

SEQ ID NO: 43476 - DNA, 259 bp, Glycine max
tttggatccgttcttcgtgttctccattccctctctcactccttcatctacgtaatttccttccttcctttctttctttctttctttctttatcttctcatttttctcaatacaatttttttctttctttctcaagttttgctacttttctcttcttaaccatagttcacatattatatcatcacatatcatagtgatatcatatcacaatgtgtggcatacttgctgtgcttggttgctctgattcatctcaagccaa

SEQ ID NO: 43477 - DNA, 99 bp, Glycine max
tgcagagcgaggtagctagctaggaagcaagcacagagatggaggcaaagagaggccatgccctcatgtgcttggcacgtgttacgatcttcctctgcg

SEQ ID NO: 43478 - DNA, 267 bp, Glycine max
tcttgctctatactacacagtacacacactagaagaataatggcttccatcctccactactttttagccctctctctttcttgctcttttcttttcttcttatccgactcagtcacccctacaaaaccaataaaccttgttgttctacccgttcaaaatgatggttccacagggctccattgtcccaacctccaaaaaagaacccctctaatgcaagtaccagtcctggtggacctcaatggaaatcacttgtgagttaactgtgag

SEQ ID NO: 43479 - DNA, 173 bp, Glycine max
  unsure (1)..(173): unsure at all n locations
ttcaaaccttgctctatactacacagtacactnactacaagcatcctggtctccatcctccactactttttagccctctctctttcttgctcttttctattcttcttatccgactctttcacccctacaaaaccaatacaccttgttgttctacccgttcaaaatgatggttc

SEQ ID NO: 43480 - DNA, 220 bp, Glycine max
gtgattcacagaagcagttgcgccatgagaaacactatcggtccgtgagttctcatgatgtggcatattgggcgcgcagtttatgctggatttggagagagcctgcaaagatcattacaccaaaagatgctggagatttggtttgggcttggggttcagagttgtttctccttctcatggttttaggaagttgtcagttgcacatattgtttcaccatac

SEQ ID NO: 43481 - DNA, 246 bp, Glycine max
gtgagtagcataatggaggcaccgaagctgaaggtagtgacactgaaagccatcgaagcaactccgtcaaccttcaaagagttcggtcaggtcgtggaggcttcgcgagacggccaggaattcggtccccacgatgctcaactcgacctttcccaaggaactccaagtgtgtattcttttacaggttctacattatcaagcttgaaaaatgcccgcttaagttttctagtattacacatcatgcaa

SEQ ID NO: 43482 - DNA, 246 bp, Glycine max
gtctaataaggtggactagctctttaacatgatttgctctgttttcaacctggaaatatcttttattacagctagtccaccttattagacaatcatattctgcagcatacaatactatatcttcacactacgtacagtacatatgattgacctcttcaggagataactttcagaactaaggaaaaccaaagaggagatgcaataaaagatatttccaggttgaaaacagagcaatcatgttaaaga

SEQ ID NO: 43483 - DNA, 104 bp, Glycine max
ggttaccataacatgatcttcagttggatagacactttaaatgaaaactatccaccccccttggatgctaatgtggttgcttgcgttatgacaatttggagtca

SEQ ID NO: 43484 - DNA, 246 bp, Glycine max
catgagagtgcggtttcctttgttggtgttgctgggaactgttttcctggcatcagtttgtgtctcattaaaggtgagagaggatgagaataaccctttctactttagaagctctaacagcttccaaactctctttgagaaccaaaacggtcgcattcgtctcctccagagattcaacaaacgctccccacaacttgagaaccttcgagactaccggattgtccagtttcagtcaaaacccaacac

SEQ ID NO: 43485 - DNA, 241 bp, Glycine max
cgctaatatctcaaaccaggcaaacttcatgcgtttgatgttcgacaccatgaacgaaatagcagatgaagcagctattggtgccaagaaatacgccacgaagcaagcaaacatatctgggtttcagaccctctattgtctggttcagtgcacgccggacttgtcaacccagggttgcagaagttgtcttagtgatgccatagggctccttccatggtgttgtgaaggaaaacaaggaggg

SEQ ID NO: 43486 - DNA, 255 bp, Glycine max
aaagatgaaaggtgctggaacgtgagcagtaaggatatgattttcagagctgataagattgatctcaagagtttggatgcacagctggaaaagcacttgagcagggtttggtcgaggagcattgagactaaacggcctagagaagagtgggagattgatttggccaaattggatctgcgatatgttgtggctcatggggcatatggtactgtatcaggggtacatatgatacccaagacgttgcagtgaaagtgt

SEQ ID NO: 43487 - DNA, 248 bp, Glycine max
cacccaacgtaccttcattgctggtcattggctgttaccagtcattggagttgtggaacatgagcgagaacaagacgatgactctgtctgctcatgatggtctcattacttccttggctgtttcaattgtaaatggtttggttgcttcagctagtcatgacaagttcctcaagctctggaagtgagtgtgtgtctcctccaagtgaccaaatggcaatacattaggtcttttgtcaatgctgttcaca

SEQ ID NO: 43488 - DNA, 273 bp, Glycine max
atcgatttaatcgccgatgggttgatgctttatctgacccacgggtcacccatgaaatccgcagtgtctggatatcttactggtctcaggctgaccgttctctaggccaaaagatagcatctcgtctgagcatgaggccaaatatttaatgttgttgccaaccccagaatgattgttagagttgcagacgtgcaaagagtacatgactcaattattaggcatagtctgacatgattggctggaatttagattagaagctcaatgggtccaatg

SEQ ID NO: 43489 - DNA, 170 bp, Glycine max
gtccttacaaaatcaaaaggttctgatgattctcgcacaatagtctgagaggatatgggattgtcattttatgaccatcgctgcatttctggttcagttttgtgtcagagcttttcccaaggagggatcgttattctacattgaagaaaatggtcatgggtcagacactt

SEQ ID NO: 43490 - DNA, 263 bp, Glycine max
gtacgggcagatcttccgccccgacaacttcgtgttcgggcagtccggcgccggcaacaactgggctaaggggcactacaccgagggcgccgagctcatcgactccgtcctcgacgtcgtgcgtaaggaggccgagaactgcgactgcctccaggggttccaggtctgccactcgctcggcggcggaacgggctccgggatggggacgcttcttatttccaagatcagagaggagtatcctgacaggatgatgcttactttct

SEQ ID NO: 43491 - DNA, 256 bp, Glycine max
ggtatggtcagccgcatagagcaccagatttgcagaaagaagctatatatggattaacagaggttttaagggaggaaataaagaatgcacgtctagttgctaatcctggttgttatccaacttctgttcaacttcctcttgtcccattgataaaggctagtcttattgagcttaaaaatattatcattgatgctaaatctggtgtgagtggagcagggcgcagtgccaaagaaaatttattgttcactgaagtaac

SEQ ID NO: 43492 - DNA, 253 bp, Glycine max
ctgtaattgtactagtatacagtagcaccatgaggtacgacccgctcaagaaacctcaacgggagcaggacgccatcaaatacggcgacgtgttcaaagtctccgacgaactcgctttcaaactcatcgcgccatgagactcagagctcatgctagtcacggagaacccatcattgggccagactcaaaaaggaggtcccgtctcggtgataccatccgccgcaatcgaaaacctcctcgcctgcgtcgtggg

SEQ ID NO: 43493 - DNA, 168 bp, Glycine max
acaaaaaataaaacgtgattcgctcttgtcttcgaataaaccacgaattcgacaaacgagaagagtagtgagagaagatggggttgtcgttcacgaagctgttcagcaggttgtttgcgaagaaggaaatgagggttctgatggtaggtctcgatgctgctggaaaga

SEQ ID NO: 43494 - DNA, 243 bp, Glycine max
ggttgcccactgcaggcatatattgtcatgggtccgatttactaccagaaagtggaacatatggtgcttgataagatgcatgctcgtggtagtggccctcgtgtcatgttgactagacagcctacggaagggagagctgcaagtggaggtcttcgtgttggagaaatggaacgtgattgcttgattgcatgtggtgctagtgtgttggtttatgagcgactcgtgttgtctagtgatcctttt

SEQ ID NO: 43495 - DNA, 263 bp, Glycine max
gtctctacaagattctattgagtctgctttgcaatggagagatagaagctgggcgaacgttcaatccagcaacatatcggtcaggtttctgctctcttgaaagcatttgctgattatgtggctagcctttgtggaactccataccctgttgactatgatatatggttgaaaaggttgaacaaggctgtggaagtttcagcggataaaggtaaaatgattgaggaagtacctataacattaggattggaggatgctgctgagtc

SEQ ID NO: 43496 - DNA, 100 bp, Glycine max
ggcgacaaaggaaggcagagccataggcatcgatctcggcacgacctacagctgcgtgggcgtgtggcaaaacgaccgcgtcgagatcatcgccaacgac

SEQ ID NO: 43497 - DNA, 133 bp, Glycine max
tcgtctgatagcgctctttgcgcgtactccgagagggattcgggttaaaattcctggaccggtgactggcggctgacggcatcgttagtgagtcctgatatgtctgcgggggccccgggaagagttatcttgg

SEQ ID NO: 43498 - DNA, 141 bp, Glycine max
gcaccgaaatcggcgcgattgcagagcgaagaagcaagcgagcaagcaaacgcagacatgcggtcaaagcgaggccatagccgcaggtgctgtgcacgtgtagcactcttcctctgcgcgctaacccgatccgctgcacac

SEQ ID NO: 43499 - DNA, 250 bp, Glycine max
aacgaaaggcagaagggcacgccttggactgaagaggaacacaggctgtttctcattgggcttagtaagtttgggaagggagattggagaagcatttcaagaaatgttgttgtgacaagaacaccaactcaagtagctagccatgcccagaaatactttctgcgccagaattcggtgaagaaagagaggaagagatcaagcattcatgacataacgactgtggacagtaactcagcgcctatgcccattg

SEQ ID NO: 43500 - DNA, 195 bp, Glycine max
  unsure (1)..(195): unsure at all n locations
gctgagnggccctcagtttttccgtttgattgatgctaaggaaactaggaacaagtacattgaggttgtggagagagaccctgggttaggaacttgtgcaattgaggaagctagggaaagggtttatagagagagaggaagtgatgctgaggatattaggttttcttctgtgattgattttccacacaacatacg

SEQ ID NO: 43501 - DNA, 237 bp, Glycine max
tatagttttacggtcaaagtttgatatccaattttcttactacgcaggaattgtttgctgaagttggtgacctgaaacggcatgcggttcattatgacaggagtggcagatcaaagggtacagcatcagtagtattttcacgacgagctgatgctgtagctgctgtaaagagatacaacaatgttcagttggatgggaaaccaatgaagattgagattgtgggaaccaacatttcca

SEQ ID NO: 43502 - DNA, 234 bp, Glycine max
gccgcttcggctcgttccagggacgtcacgttcatttgtgggcgtgctggtgtgtgctctctcggagctgtcgctgcgaaacacgctggtgatgacgagtccctaaagtattacttggctcagttcaaaaagattaagctgtcaaaagatcttcctgacgagttgttatatggaagggttggttttctatgggcgtgtttgttcttaaacaagcatcttggtctggggacagtt

SEQ ID NO: 43503 - DNA, 236 bp, Glycine max
cttttggaagaggaggtggcttttgagggaaaggagggaacttttagtgtgggagggtggaaactggaattgggtttggttgggggtaaagagaatgaagattcagtgtaacgtgtgtgaggctgcggaggccaaggttctgtgttgtgctgacgaggctgcgctgtgttgggagtgtgatgagaaggttcatgcggctaacaagcttgccagcaagcaccagagagtgcctcttt

SEQ ID NO: 43504 - DNA, 227 bp, Glycine max
cagaatatgtgaaggtcatttctgaatcagatcccagatcacttccaagtattagtgctcccaaggcacttggagatgtagtggaaagtatagtcggggctatactaattgataccaagctcagtcttgaccaagtgtggaacgttttctattctctattatctcccattgttactcctgataaacttgaattgcctccatttcgtgaattaaatgaattatgtgat

SEQ ID NO: 43505 - DNA, 234 bp, Glycine max
cccgaaccccatcgcctcctcgccgagctccattccacaacgacgccgtttcacagttccacttccaccaccaattccaaacacaacgacatcaacaccatctcggtcgacgaaacagaagacgagaaccgcgagaaagttaacccacacgaggcgtatcgtctcggccccaaaatatcgatctgggacgaacagagatctcgctggcttcgcgagaatcccaatttctcgaat

SEQ ID NO: 43506 - DNA, 241 bp, Glycine max
gctgtggttatcatcttcttcttcctctttcttagatctcttctttctctacgccgcacgccgaaaccatggccggaaaaggagagggtcctgctatcggaatcgatctcggaaccacctactcttgcgtcggtgtgtggcaacatgaccgcgttgaaatcatcgccaacgaccaagggaacagaaccacgccgtcttacgtcggattcactgacaccgagcgtctcatcggtgatgcggc

SEQ ID NO: 43507 - DNA, 246 bp, Glycine max
  unsure (1)..(246): unsure at all n locations
gcgagcaatatcaggtctcctttgacgcctaggtaagcatcccagttgcccgttggtcgtggttcgtggtcgcgcactggagagtccttgtcttgtcgtttcgggttcccaggatccatcgttctaaccacattacaaagacaaaaacacgtcggcgactatnttgacgtcaaggttaacggtgccgttcacaagggaatgccccacaaattctaacatggccgtaccggacgcgtctggaatgtc

SEQ ID NO: 43508 - DNA, 189 bp, Glycine max
ttctcaccgtgctctatgctatacagtacattcactctacgtttaatggcttgcatactatactaattgtcatcactctctctttcgagttctttgctattcttcttatccgactcagttactcctatatcaccaatataccgtgttcttctaatcgttcaaaatgatcagttccacagggctccattg

SEQ ID NO: 43509 - DNA, 243 bp, Glycine max
caagaactaaccgtgcaacacaagctggatactggaaagctacagggaaagataggccagtgcactctcaaaagaagcaagttggcatgaagaagacattggtgtactatagaggtagagcatcacatgggattagaaccaactgggttatgcatgaataccgtttaattgaatcagttcctggtactgctctctcatctttgaaggattcctattcgctgtgtcgcattttcaagaagacga

SEQ ID NO: 43510 - DNA, 254 bp, Glycine max
ttttgacttaatgacttatccatcccaatcccttacaccctataaactcaccaactctctcccacactctctcgaacacacaatctgcttcttatctccaaagctttatatttctttttctttttctgcgtttcacaatggaacaacctccttcgtcctcaatcgccgcgggaattcaattcgggtggcccctacagctctctcttttgacaccctacgtccagaccctgggcgtcccccacgcatgggcctcc

SEQ ID NO: 43511 - DNA, 222 bp, Glycine max
  unsure (1)..(222): unsure at all n locations
taaaattcttccacccagttatcgagtcccntgtgttgcttcttttctccctcttaggtctctcttctagacccagcataacaactcatcgttccatattggaccttgacctaaccaagtttaccacacagcatcaggttccatnantgttnnaantatggaagagtgagnatggangtgtatangataangaagaagaagaggtaaagagnattgagattt

SEQ ID NO: 43512 - DNA, 271 bp, Glycine max
ccaccaccacccaacaacagcgttctccagaagctccaaaattctacaactcccccacgtgcgccactctccgccaccacccgaacccaaaccacacgtgccccgacaacgctgtccacgtgcatgaccctcgacgtttcctacctccgaggttccatggccgcaatcctctccgttctgcaacacacctcatgccccgaaaatgtgatcttccacttcgtcaccgcagcttctaaatctttctccgccgcaaagctaaaccaaacgctaa

SEQ ID NO: 43513 - DNA, 275 bp, Glycine max
caaatcaacaaccctgaaaacccacataatgagaggaccatgaagagcttattcaattggtactatgcttcggttggcatttcagtaactgtttcaatgacatttatagtgtacattcaagtaagcagggtgggttgtgggttttggtatccctgtggcgcttatgacattttctgctatcatgtttttcttgggttcttgcttatataagaaagtgaagccaaacaagagcttgctcactagcttagctcaagtgattgtagcagcctggaaaa

SEQ ID NO: 43514 - DNA, 276 bp, Glycine max
gttcaatatcctagtacaccgtattaaagaatttaagatatactatgatgagagcgcggttcccattactgttgctgggagttgttttcctggcatcagtttctgtctcatttggcattgcgatgggaaaagcagaaccccagtcacaacaagtgcgtccgaagttgcaatagcgagaaagactcctacaggaaccaagcatgccacgctcgttgcaacctccttaaggtggaggaagaagaagaatgcgaagaaggtcaaattccacgaccacga

SEQ ID NO: 43515 - DNA, 257 bp, Glycine max
  unsure (1)..(257): unsure at all n locations
atttcttcggcctcaaggacatcccttcatcctccacacaacatacgactccggngntacnaatgggncttngccatcgtcgccgccggcatcaccaccggaagcatcgccgaacgcacccatggtggcctatctcaactactcctccttcctcaccggcttcgactcccnggtggtctcccactggttctggtccccagacggctgggcctctgcctttaagatcaccgaccggctattttccaccggcgtaatag

SEQ ID NO: 43516 - DNA, 270 bp, Glycine max
caaaaccaaaacagtaaagctaacttcaacacctttaattttctaaaagtaattcagcggctgaataccaagcggagaagatgagtcaggagcagccacggcgtcccaaaggccaaaaccccatcaaatacggcgacgtttttgtcgtctccggcgaccttgcacagaagcccgtcgcaccggaagatgctgccatgatgcaaagcgcggaagctcgagtgctcggacaaacccaacccggcggagcagcttccgtcatgcaatctgccg

SEQ ID NO: 43517 - DNA, 140 bp, Glycine max
  unsure (1)..(140): unsure at all n locations
gcaaaattgttgagggacaacgatatacaaaaaggttgaatgtgnagcaaatcactgctctcttgaaagttacttgtcaaagacctcgcgatcgagaaaatgacattttgcagaccattcagcaaaatgcttatgaccaa

SEQ ID NO: 43518 - DNA, 255 bp, Glycine max
catcaatgatagctcatttagcaggttgacatatgacatgatgcttgcttgggagagaccgagctactacgatgaagaaccaatggagactgtagcaaaggagaaagaagaaaggaagataactttgaataccactcaagaactggatgatatccctcttttttattcagacatcatgcccctccttgttaataatgagcccaatgttggagaagatgcatttgtatggttgggatcattagtacctttagttgc

SEQ ID NO: 43519 - DNA, 253 bp, Glycine max
gcagaccgagctagctagctagcaagcaagcacagagatggaggcaaagcgacgacatgccctcatgtgcttggcacgtgtttcactcttcctctgcgctctaaccctatccgctgctcacggaagcaccacggttcaagacatcgcgagaaagttgaaactcggggacaacgagcttctgcgcacggagaagaagttcaaggttttcatggagaattacgggaggagctactccacagaggaggagtatttg

SEQ ID NO: 43520 - DNA, 218 bp, Glycine max
  unsure (1)..(218): unsure at all n locations
tgcatttcgttactttcatttgttgtgcaatcttacaagttccaaacttctctattttgttattatttgttctcacttctacgccacatacgacacagacacnggggtcatcgtggcttcttcggtggcttcggtttctgttctggctatgatgttgtttgtcatgaactgtgcgtgcactactgttgtccacatgccttctacctgagtggctcgtc

SEQ ID NO: 43521 - DNA, 268 bp, Glycine max
ggtcaacaattattttatagccaaggccctcctgctatcattccttcccagataggagagctagactgcaggctcagtttgctcaaatgcgacctgttggaatgccaccatctgttggtcctcgtgtgccaatgtatcccccaggtggtccaggtattggtcaacaattattttatagccaaggccctcctgctatcattccttcccagcctggatttggctatcaacaacaacttatgcctggtatgaggccaggtgcagctcctgt

SEQ ID NO: 43522 - DNA, 218 bp, Glycine max
cacaactactacaagtacttccttacaatcaaaaccctcaacaactctggcaagttatcaaaagcactacgatgatcagggtcgcaaggttgacgagtatggcaacgttgagcagcgaaacgacgaatacggtaaccctgatcgtgcagttagtgtcacctatgtagctaatagaaatgatgatggtggttacagagatgaacatataggcatcatga

SEQ ID NO: 43523 - DNA, 259 bp, Glycine max
aaccaagcttctctgttaaaacctcattaggcgtctaaagggccaaagcttagaaagttgaagcttttttgttgaggtgaaagtgaaatggttgggaaggatattcctgtggagcttctgatgctaattctgtcccttgtggatgatcagacggtgatcatagcttctggagtttgtcgtggatggagagatgctatttactgtggccttgctcgtttatcactctcatggtgtagcaagaacatgaataacttggtcc

SEQ ID NO: 43524 - DNA, 256 bp, Glycine max
tcttgtgcaagttatttcttatattcattagtaagatgctctattttgtcactattgcagtttcattatgctgtgttcttcgcatatatgaggttaagggaacaggagatcaggaacttaatgtggatttcagaatgtgttgctcagaatcagaagtccagagttcatgacagtgttgtcttcatattttagttggatggctcgttatagtttgtatgttcgttgggacaatttgtatactttctgcattctccat

SEQ ID NO: 43525 - DNA, 254 bp, Glycine max
tctcgagcgaatcggctcgagaagagagagaagaagaaaagaagttcaaagatgcaatcctcaaaggagaagatgaaaaacatggcaagtgctgccaaggaacaagtcgacatctataaagccaaaatagacgagaaggtctgctagcttccgaagatttccattgtacattcatatattttgttccattatatagtagtagtatctctcaatcaatgattaatttgagtttgtggcgtaggcatcaacatcat

SEQ ID NO: 43526 - DNA, 245 bp, Glycine max
tttggttttaaacatttaggttaggcggggcgtggcggactgaatcggaggcatgaagctcaccgtgaagactctgaaaggcagccatttcgaaatcagggttcagccctcagacactattatggcagtcaagaagaatatcgaagatgtacaaggcaaagacaattacccatgttcacagcaattgctcattcacaatggtaaggttttgaaagatgaaactactttatccgacaataaggtct

SEQ ID NO: 43527 - DNA, 257 bp, Glycine max
tgctaaagctggttacactggaaaggttgtaattgggatggatgttgctgcttcagaattttacgataacaaggataaaacctatgacttgaattttaaggaagagaataatgatggatcacagaaaataaacaatccagcctggaagagatttctaagtgcagagctgaagctgaagagaaagttaaggagagaaaggagagatcaaaacaagcagcaagtaatgaagctgccaaagagagaaacaagcaggcaaa

SEQ ID NO: 43528 - DNA, 138 bp, Glycine max
gtctgagcggggcgtagcagactgaaattccggtggatgcccgcagggagagtgacgtgcaaatcgttcgtcggactttgggatacttccgcaagactaatcgtaccgttctagtacctggatccctccgaaggtgcc

SEQ ID NO: 43529 - DNA, 234 bp, Glycine max
attttataatcactagtacataccaagaaattgcaggaagcaagaataatgttggacaatatgagagctacactgccttcactcttccaggactgtatcgtgttgttcatggcattgatgtttttgatcccaagtttaatatcgtgtctcctggtgcggacatgtgcatatattttccatactcggacagagaaaggagactaacttctctacatggttcaattgaaaaactgg

SEQ ID NO: 43530 - DNA, 238 bp, Glycine max
gaggaagagcacgagcagaaggaggatcacgaatggcatcgcaaggaggaaaaacacggaggaaagggaagtgaagaggaacaagatgaacgtgaacacccacgcccacacgacacacaatagaaaaaagtggaaaagcacgaatggcaacacaagcaggaatggcaccaaggacaggtaagtgaagaggatgtagaagacctagacgaggatgaggagcaagacagtgtgagccaag

SEQ ID NO: 43531 - DNA, 239 bp, Glycine max
caaaacagtaaagctaacttcaacacctttaattttctaaaagtaattcagcggctgaataccaagcggagaagatgagtcaggagcagccacggcgtcccaaaggccaaaaccccatcaaatacggcgtcgtttttgtcgtctccggcgaccttgcacagaagcccgtcgcaccggaagatgctgccatgatgcaaagcgcggaagctcgagtgctcggacaaacccaacccggcgga

SEQ ID NO: 43532 - DNA, 237 bp, Glycine max
gtttcatcttttaaaggcgcttccgttaaggttgagccagacaccttgagttttaccagaaaataccagaaattatcttacaaagttaccttcacaacacaatctcgccaaacagaagctgaatttggaggtctggtgtggaaggatggtgtgcagaaggtgaggagtgcaattgttataacgtatctgccaccaatatgaaaacttcacttgggactacgtataacttaagcagta

SEQ ID NO: 43533 - DNA, 251 bp, Glycine max
gtcagcaaaggcgttgaatcaacattggtccagcttcttgaaacaggcttattacatgctgatccacatcctggtaactttcgttacacttcctcaggacaaatagggtttctggattttggtttgctctgtcaaatggaaaaaaggcatcagtttgctatgctggcttcaataattcatatagtaaatggtgactgggcatcccttgtccgtgctctggttgatatggatgttgtgaggccagggacaaa

SEQ ID NO: 43534 - DNA, 249 bp, Glycine max
taacttcaacacctttaattttataaaagtaattcagcggctgaataccaagcggagaagatgagtcaggagcagccacggcgtcccaaaggccaaaaccccatcaaatacggcgacgtttttgtcgtctccggcgaccttgcacagaagcccgtcgcaccggaagatgctgccatgatgcaaagcgcggaagctcgagtgctcggacaaacccaacccggcggacagcttccgtcatgcaatctgccg

SEQ ID NO: 43535 - DNA, 245 bp, Glycine max
atcatctcgtccccatatcgaatccgttttatcgccgaagcgcatcctttgagccttaagttcgattcatttgcagttataatgctgggtgttggaattcctaccgagtggtctgttgtggaggatctaccagaaggacctgctgttaaaattggtgagaacaaagatgcaatggatggttggtttagacttgagagagtttctgatgatgaattcaataactataagcttgtgttctgtccaca

SEQ ID NO: 43536 - DNA, 252 bp, Glycine max
gtcaaatcaggctactcaatcacctttaatttcaatcccaatccctattttgagaatacaaagcttacaaagacttttaccttccttgaagaaggcacaacaaagataactcgctacccccataaaatggaaagagggcaagggattacccaatggacttgatcatgacaagaatgggaacaagcgggctcgtattgatatcagtctctttagttggtttagtgactgtgagcagaaagatgatgtggatga

SEQ ID NO: 43537 - DNA, 242 bp, Glycine max
ccttgctctatactacacagtacacacactagaagaataatggcttccatcctccactactttttagccctctctctttcttgctcttttcttttcttcttatccgactcagtcacccctacaaaaccaataaaccttgttgttctacccgttcaaaatgatggttccacagggctccattgggccaacctccaaaaaagaacccctctaatgcaagtaccagtcctggtggacctcaatgg

SEQ ID NO: 43538 - DNA, 235 bp, Glycine max
cacacacaactactacaagtacttccttacaatcaaaaccaacaacaactatggcaagttatcaaaagcactacgatgatcagggtcgcaaggttgacgagtatggcaacgttgagaagcaaaccgacgaatacggcaaccctgttcatgctgctagtgtcaactatgtagcccacagaactgctgctggtggttacagtgatgacataataagcaacatgataccacaatgcct

SEQ ID NO: 43539 - DNA, 262 bp, Glycine max
gtcctgcacaattattaaaagtcaatttatgtccttgtatggattttgtgtctaatgtttgcttgatttttagtgtaactgctcaagatcttgttgacataatcaaggcacaacttcaaaggtacaatcttttctatgtacagaaatcttttactatcctgtacaattacagtttatgccttttctctaatgtggctaaaatatgttgagtttctacagtttgtgacaaatttcagttagatgtttatcatttcaactggct

SEQ ID NO: 43540 - DNA, 256 bp, Glycine max
agcctctgtggatgctgtccactttgttttaaaagaacttgtgcggaagtcaatttcagaaactgaggaactaaaaagatttccgacactgtcaaatgatagagcttcatttgcagcagtagctatatcatttgaagtgtcggaaatgaagctctggaaaaattccgagaagaaagcaggaaaacagtcttacggttggtcgatatggagtctagctatttaacagtggaatttttcaggaagattcattttgaac

SEQ ID NO: 43541 - DNA, 256 bp, Glycine max
tgctgatgtgtgttaaagtcttgcagcaagcaatcattgatttactattggatataatggttgagtgttgccaaccttccgaagtgggtcctgttgctgattctgttgatgcatgctctaaaccttctccaaatgaagtggagctgcaagtcctcttgagtgtgaaagagaaaatggagcaatggagtctgcacgagtccccgtatgtgagaggttggattctgttgttcaagtaagcagtaatgcatctgctgtg

SEQ ID NO: 43542 - DNA, 236 bp, Glycine max
  unsure (1)..(236): unsure at all n locations
ccgactcagtcacccctacaaaaccaataaaccttgttgctctacccgttcaaaatgatggctcagacagggcatcagagatacaancnccaaaaaagaaccccncnaatgcaaggaccagagccgaggaccgcaacggaaaacacccgcggggcaaccgagagcagcaggacgcaaccaaaacggaccaagcacccagcggccacgccacccaacgcacgagtcgcaacacccac

SEQ ID NO: 43543 - DNA, 247 bp, Glycine max
tgcagaccgagcttactagctatcaagcaagcacagagatggaggcaaagcgaggccattccctcatggccttggcacgtgtttcactcttcctctgcgctctcttccctatccgctgctcacggagcaccacggttcaagacatcgcgagaaagttgaaactaggggacaacgagcttctgcgcacggagaagaagttcaaggttttcatggagaattacgggaggagctactccacagaggagga

SEQ ID NO: 43544 - DNA, 244 bp, Glycine max
gatgagagtgcggtttcctttgttggtgttgctgggaactgttttcctggcatcagtttgtgtctcattaaaggtgagagaggatgagaataaccctttctactttagaagctctaacagcttcaaactctctttgagaaccaaaacggtcgcattcgtctcctccagagattcaacaaacgctccccacaacttgagaaccttcgagactaccggattgtccagtttcagtcaaaacccaaca

SEQ ID NO: 43545 - DNA, 254 bp, Glycine max
gaatcatggtcacatctgtagtatatatagtttatagaagcggaatgccaatcgacactggtagccatcgggattgagttcagctgcttttgacgatactgacgaatgagtaaacggaagaatgaatcagatgagctccagtctggactctcattggtcaaacaggcgcaacgggccgagagagaataaaaggacaccagaagagcaagaaaaagagctgtatgataagagtccttatcctacccaccccattt

SEQ ID NO: 43546 - DNA, 242 bp, Glycine max
cagagtttgtggccacttttctgtttctatacatcactgtcttaaccgtcatgggaatcgctgaagatgcagggaagaaagatagcgggagagtccattaaggaaacagctacaaacattggtgcttctgccaaggtctggcatggagacgaccaaggccactgtccaatagaaggcagagagaatgacagcacgtgatccggtgcaaaaggagttggccacccctaagagagatgtctaga

SEQ ID NO: 43547 - DNA, 255 bp, Glycine max
gcaatactagcgatactgatggagacagatgccgacattggcacgtgaactctgctgatgagagaacctcgcagagttgggttgcgtcgacaactctcagaccaagcgcgctcgcatcatcgaattgtctcgcaggttgcggcatagaggtcctgattggagtggcatacattgctatgaggattgttaccttgctcatcgacgccttgctattgttgaccctacttcgggggatcaacctttgtacaacgaaga

SEQ ID NO: 43548 - DNA, 260 bp, Glycine max
  unsure (1)..(260): unsure at all n locations
atcactcaagtatagctctgtaattaatgtgacttcacttacaatttgaaacacgacctgcanncnnnnattcgnaanttttgaacanaacatggcatctcatcaacaaaacaagcaagagcttgatgaaagggcaaggcaaggagagactgttgttccgggtggcactggtggcaagagccttgaggcccagcaacatcttgctgaaggaaggagcaggggagggaaaacaaggaaggagcagctggggacagaagggt

SEQ ID NO: 43549 - DNA, 241 bp, Glycine max
acctacctctttttcttctctctcaacgacttcttcttcttcctcctctatcatgtcttacttcaagggcaagtaccatgatgagcttattgccaatgctgcgtacattggcagtcctggaaagggtattcttgctgctgatgagtcagcagggacagttggcaatcgtttggccacaatcagtgtagacgacattgtatccaacaggcgagctcttatggagctgcttttcactgctcct

SEQ ID NO: 43550 - DNA, 165 bp, Glycine max
ccttgctctatactacacagtacatacactataagaactacggcttccatcctccactactttttagttctctctcggtcttgctattttctctccttcatatccgactcagtcacccctacatgaccaataaacctagatgctcaacccgttcataatgatggt

SEQ ID NO: 43551 - DNA, 250 bp, Glycine max
gttgtgttgtgtgtcttcgcttggtgttccagtttttatttgcagtcggcatctgttctagttccagcatatcaactcatcgttccatattggaccttgacctgaccaagtttaccacacagaaacaggtgtccttcactgttccaactatggaagagtgagcatggacgtgtctaccataaccacgaagaagaggcaaagagacttgagattttcaagaataacttgaactatatcagggacatgaatg

SEQ ID NO: 43552 - DNA, 178 bp, Glycine max
ggaagcttggggagctgaaggactctgcggctgatgcggcgaagagggcagtgggttaccccagcggaagacagatgaaaccaaagagcaagtctcggagacggcaatggacggctataagggcggagatgaagagccacaggagaagctgcggatgggagcgcaaaacagccgaagg

SEQ ID NO: 43553 - DNA, 246 bp, Glycine max
caaaccttgctctatactacacagtacacacactagaagaataatggcttccatcctccactactttttagccctctctctttcttgctcttctcttatcttcttatccgactcagtcacggctacgtgaccaatatgccttgttgttctacccgttcgaaatgatcgttccacagtgctccattgcggctgcctcccagaaagaacccctctgatgctagtaccagtcctggtggacctcaatgg

SEQ ID NO: 43554 - DNA, 266 bp, Glycine max
cttcacttttctccgagtttttattatcatcatctctctcgtgtccctgtccccatctccatctcttagtttcttcttcaaatggcagaagttgaagacatagacaaccctcatcacgaccaccatcattacctttcttcttctacaacacaaactccaatgatcaatttcccgcgagatctgttaagaaccttcgtgggagtgaacaataataacaataacaacagtcagcaccttccttccttgttcaaaagggtcttcctaga

SEQ ID NO: 43555 - DNA, 255 bp, Glycine max
gccaggcaagccccactcaaccaccacacttctcctcgttcacgctacccctttcttctcttcttctacctttcaagttttaaaagtataaagatggcagagacattcctatttacctcagagtctgtgaacgagggacaccctgacaagctctgcgaccaaatctccgatgctgtcctcgacgcttgcctcgagcaggacccagacagcaaagttgcctgcgaaacatgcaccaaaaccaacttggtcatggtc

SEQ ID NO: 43556 - DNA, 255 bp, Glycine max
caacaacttctgctacttcctactccaaccgcacttctgttccgcaattatcatgggcaaggtcaagatcggaatcaacggatttggaagaattggccgtttggtagccagagtggctctgcagagatagaatgttgaactcgttgccgttaacgaccctttcatcaccaccgattacatgacatacatgtttaaatacgacagtgttcatggacactggaagcatcacgatgtcaccgttaaggacgagaagac

SEQ ID NO: 43557 - DNA, 273 bp, Glycine max
agaagacaagcctcatcctcaggaggaggtcatcgccaccgagtttcaaaaagtcactgtctcagaccaaggagagaacaagcacagcctcttagaaaagcttcaccgatctgacagcagctctagcgcttcaagtgaggaggaaggacaagatggagagaaaaggaacaggacgaccaaggaatagacagggctgaaagagaagatcgaggagataatagagggtgagtcatcatcatcgacagggtgaggacacaaggtccctgttgagaa

SEQ ID NO: 43558 - DNA, 267 bp, Glycine max
atttgttccagcatctgcttcgccacctacacgttttgtcttttctcgtgtaccatttggtgttggcaacagaaactatcctcagtctgcagccaatgatgattcagagacacgtgctgacccaaatggagacctggctggagatggcttgacagctttagttgggctaagcctgggagggagtaatggaacaaatgtacatacagagctaacacaaaggggatatgaaatgggcttgcaaagcagcatgtctggaactactgctgg

SEQ ID NO: 43559 - DNA, 265 bp, Glycine max
caaggaccattgctgataatctgtgtccaaaatacaacgagcagtacacttgggacgtttttgatcatgccacggttcttactgttggtgtcgttgacaacagccagctcggggaaaagggtaatggttcttcaaaggacttgaaaattgggaacgtcagaattcgcatcgctacactggaaacaggaaggatttacactcactcatatccattgttggttcttcacccaaccgtggttaagaagatgggtgaacttcacttggc

SEQ ID NO: 43560 - DNA, 250 bp, Glycine max
tgtttgtgttctctcctttcattaacgttgtgttgggtttgctagtgtacttggttttcattatggcgtctgcttcagcgtctcgtgatggacactgcagaggagttagccggcgaccatgtcgacactaggcaggacggttaccaggtccgtaacgcatgctgggaactctattgccgtgatcacggaattcagcccgatgggcagatgccgagtgacaagacggttttcggacgatacgacgacttca

SEQ ID NO: 43561 - DNA, 265 bp, Glycine max
cagcagttcaatctgttgttgatggaggtatgctgatgtgtactgcaacagacatggctgtgctctgtgggggaaatggggaggtctgctattcaaaatatggatcatacccattgagagggaaatattgccatgaaatggctttgaggatcgtgctggcttgcattgagagtcatgctaatcggtataagcggtatatcgttcctgtgttatctgttcagatggatttttatcttcgtgtttttgttcgcatatatacttcggc

SEQ ID NO: 43562 - DNA, 258 bp, Glycine max
ggctttttgctcttcttctacctttcaaggtttacaagtatagagatggcagagactcgcctgttaacctcggagtcggcgaacgattggcaccctgacaaactctgcagccggatctccgatgctgtcctcggcgcttgcctcgggcatgccgcagtcagcatagttgcgtgcgagacgtgcaccagaactaacttggtcgtggtcttcgtagaattcacggccaacgccaacgttggctgcgacagagatagtgcg

SEQ ID NO: 43563 - DNA, 235 bp, Glycine max
tccaagtgatgcaactgatgctgcaaaagagactacagattatgctgctcagaagaccaaggattatgcaagtgatgcacctgatgccgcaaaaagtactaaggattgtgccgcgcactcgaccaacggctatgccagtagtggtgcgcagagcaccaaggactgtgccactggtgctgcgcatataccaaggactatgcaagtaatgctccgcacgaggcaaggaccatgcaag

SEQ ID NO: 43564 - DNA, 102 bp, Glycine max
ttgcagacgaatcaaagcgacaagggctgaatctcagtggatcgtggcactcgagccggcaaaagcacatgaagactaataacaacgtttctggggagagga

SEQ ID NO: 43565 - DNA, 242 bp, Glycine max
ctcgaacctggatgcgctattttgatgcataacaaggttctctctgttgttgggcttcttcaagatgaagttgatccaatggtctctgttatgaaggtcgaaaaggcccctttggaatcatatgctgatattggtggtttagatgctcagatacaggaaattaaagaagcagttgagcttcccctgacacatcctgaactgtatgaagacattggtatcaagcctcctaagggagttatttt

SEQ ID NO: 43566 - DNA, 242 bp, Glycine max
ttttgaaggggggctgaaatttgctacaaaagcccaaaggctgtttcctgagattcagaacattcttcagatccttgctgtttgtgaggttcactgtgctgcacagaagacatactctgggtcatacatggactggtatggaattcttaagactgaaaagtccgccgatgaagcaaccataaagaaacagtataggaagcttgcactgctacttcatcctgacaaaaataaatctgctggtg

SEQ ID NO: 43567 - DNA, 200 bp, Glycine max
ggcggagacagagacgtttgctttccaggctgagatcaaccagctcctcagtctcatcatcaacaccttctactccaacaaggagattttccttcgtgaactcatcagcaacgcctccgatgctttggacaagattcgatttgagagtttgacagacaagagcaagctcgatgctcagccagagttgttcattcatatta

SEQ ID NO: 43568 - DNA, 234 bp, Glycine max
aatccatacacagcctaagcaccacgccatgaactttttcaagtccgtcttcgccgacgagcccgacgagcccgactctcctccggccgaatcggacaacccctatccgcctcagagccaccacgactccgcgtggagcttcggcggcctcatccaaaccctcgcctcgaaatccgagtccgtcctcgagaactaccgtcgcgatctcgaggaattcgggtccggtttgaggaa

SEQ ID NO: 43569 - DNA, 263 bp, Glycine max
gatgctagcattcctgctaaacaaattgatcttgactatgccagttggttgggtcagaatcagatcccaatgacattaatcttcaccaaatgtgacaagcggaaaaagaaaaagaatggaggcaaaagaccagaagacaatgttaatgattttcaggatttgattcgaggtttcttccaatccgtgcctccgtggatcatgaccagtagcgttactaatcaggtcgtgatgagatactcctccatatggcccagctacggaac

SEQ ID NO: 43570 - DNA, 262 bp, Glycine max
caatactagcgatactgataagagagataccaacaagaaaagaaaaaaagaagagttgagattccctttgaagaaaagatggcatcccataggcaaagctatgaagctggtcaaactaagggccgaactgaggaaaagacgaaccagacgatgggcaatattggagagaaggctcaagctgcaaaggagaagacccaggaaatggcccaagctgcaaggagaagacccaacaaacagcccaagctgccaaggacaagacttg

SEQ ID NO: 43571 - DNA, 266 bp, Glycine max
tggaaatggaggccaacattgctgatgtggatactgatgatgaagtcaatgaggcagaagaatatgaagcttggaaagtgagagagattggtaggatcaagagggatagggaggatcgggaggcaatgttgaaggaaaaggaagagattgagaaggtgagaaacatgacagaggaagagaggagggagtgggaaaggaggaatcctaaacctgctccacaccaaagcagaaatggagatttatgcagaaatattatcacaaaggtg

SEQ ID NO: 43572 - DNA, 241 bp, Glycine max
caaaccttgctctatactacacagtacacacactagaagaataatggcttccatcctccactactttttagccctctctctttcttgctcttttcttttcttcttatccgactcagtcacccctacaaaaccaataaaccttgttgttctacccgttcaaaatgatggttccacagggctccattggtccaacctccaaaaaagaacccctctaatcaagtaccagtcctggtggacctca

SEQ ID NO: 43573 - DNA, 136 bp, Glycine max
gctgactgaaatgaccttacgaggtatcccagacatcaataaggtattcataaaaaatactaaagttcagaagtttgatgagaatcaaggatttaagcctaatgaggaatggatgcttgataccgaggtgtcaacc

SEQ ID NO: 43574 - DNA, 166 bp, Glycine max
ggttaactgtgagcagcagtactcatccaaaacgttacaaggaaccttcttgcaattcaaccaattgttctggagcaacaaccaacaattgcttaatttgcccgggggaatcaaggcaagggtgcaaaaaaaccacgtttggcttcatgtcaattattcccttcac

SEQ ID NO: 43575 - DNA, 160 bp, Glycine max
gggtgctgcagataagcggacagagaacaaaggagaaggaggagatcgaggaggagggaagggtgctgcagataagcggacagagaacaaaggagaaggaggacaagaacgacacgtggcaccgcctcgaacgctccagcggcagctttctccgccgctt

SEQ ID NO: 43576 - DNA, 185 bp, Glycine max
atgatactcgtcatacgcgttcacagacccggtagatttgagagtatcttcctgtctagcactccagctcaccagtcctacatgctcgggctccgcgggcatattctagtggcctgcatacgtcaccatattccaggaggcatccactgtgctgcatgttgtagatgcctggcagcaacaagggg

SEQ ID NO: 43577 - DNA, 240 bp, Glycine max
caccaccaatgtatgtttgcatgaaaattgcattcacgcccatagcaagtggaccattttttactaaatatgcggcaatttggttctcatcagcagggatattggtggtgtctcatgccctctcatatgtagcaagaaaaggctgaaccatggtgtgttacttgtgggatatggtgcaaaaggcttctcaattcttaggcttggcaacaaaccatactggatcatcaagaattcgtgggg

SEQ ID NO: 43578 - DNA, 258 bp, Glycine max
aaacaaccaaatcttatccatcacaagatcaaggtcctatgaatgttctgccaacccctcatctgatcttaactacccttcgtttatagttttgtatagtaacaaaacaagatcaacagtccgagagtttaggaggatcgtgaccaatgttggagatggtgctgctacttacaaagtcaaggtgacacaacccaagggctctgttgtcaaggtgtcacctgagacattggcatttggctataagaatgagaagcagag

SEQ ID NO: 43579 - DNA, 254 bp, Glycine max
gcaactgatgttgctgcccgtggtcttgacatcaagtcaattaagtcagtggtaaactttgatattgcaaaagatatggacatgcatgtccatcgcattggaagaacaggccgtgctggtgacaaggacggggttgcatacactcttataactctgaaagaagcacgatttgctggtgaattggtcaatagcttagttgctgctggtcagaatgtgtctgtggcgttgatggatcttgctatgaaggatgggag

SEQ ID NO: 43580 - DNA, 258 bp, Glycine max
taaagaatttaagatatactatgatgagagcgcggttcccattactgttgctgggagttgttttcctggcatcagtttctgtctcatttggcattgcgtattgggaaaagcagaaccccagtcacaacaagtgcctccgaagttgcaatagcgagaaagactcctacaggaaccaagcatgccacgctcgttgcaacctccttaaggtggaggaagaagaagaatgcgaagaaggtcaaattccacgaccacgaccac

SEQ ID NO: 43581 - DNA, 264 bp, Glycine max
ggtgatgctaccaagagaagcaaagaggcttctaatgatcatgccaatgacatggctcagaagaccaaagactacgccagtgacactgctcagagaaccaaggaaaaactccaagacattgcatctgtgtttggtttttccacatggtgctcatctagaatgtaaatggtgctactacagctcatgaggcacgagctttatttggatgaccctttatctcagtatgagacaaggatgtgttcaggtttaagggggtattaaatc

SEQ ID NO: 43582 - DNA, 255 bp, Glycine max
gtttcaaattcagaaataattgtggaatctgttcgaatagcgtgaagacagggcagggaactgccatttacactgcagagtgcggtcacgcgtttcacttcccgtgcgtcgtttccgtttcccatgcacgcaccaacgtctgccccgtatgcgacgccacgtggaacgacgtgccgcttctgcaaaacaacgccgacaaacaaaatcaaccgattcatcatcatcgttccgattctgtctcctcctacgatgacg

SEQ ID NO: 43583 - DNA, 261 bp, Glycine max
tccttctctacttttcaagaagcccattattcgcttcaagattctctagaccagctgtagatcctcagtacaaggatttaaggcattttcagtggcattgggaaaagggggagcctgtcattgtcagcaatgtgcttgaatgtacatctggtttaagctgggaaccgcttgtcatgtggcgtgcattacgtcatgtaactaataccaagcatggccaacatttggcggagaaaacaattgattgcttagattggactgagg

SEQ ID NO: 43584 - DNA, 239 bp, Glycine max
caacaattcattaatgatgttggtgccctaaaccttgaagacttgtcgatcttgccaaggtttgcctccccttagactctttccatttctgaaggagctttcaattggagggtttgttgggattgtgagtattaatgctgatttttacgggagtagctcttgttcatttacatccttggaacctttgaatttcttcgatatgaaggaatgggaagaatgggaatgtaaaggtgtgacag

SEQ ID NO: 43585 - DNA, 240 bp, Glycine max
ccaaaacactaaagctaacttcaacacctttaattttcggaaagtaattcagcggctgaataccaagcggagaagatgagtcaggagcagccacggcgtcccaaaggccaaaaccccatcaaatacggcgacacttttgtcgtctccggcgaccttgcacagaagcccgtcgcaccggaagatgctgccatgatgcaaagcgcggaagctcgagtgctcggacaaacccaacccggcgga

SEQ ID NO: 43586 - DNA, 240 bp, Glycine max
aattcttccaccaagttatgggttccttgtgttgcttcttttctccctcttaggtctctcttctagatccagcatgtgaactcatcgttccatattggaccttgacctaaccaagtttaccacacagaaacaggtgccttcactgttccaactatggaagagtgagcatggacgtgtctaccataaccacgaagaagaggcaaagagacttgagattttcaagaataacttgaactatat

SEQ ID NO: 43587 - DNA, 234 bp, Glycine max
caagaaagaacttccttataaccaaaaccaacaacaactatggcaagttatcagaagcactacgatgatcagggtcgcaaggtcgacgagtatggcaatgttgagaggcaaactgacgaatatggcaacccggttcatgccactagtgtcacttatgtagccactaaaagtgttggtggctacaatgatgacactaataagcaacatgataccaccggtgtctatcctgagaaa

SEQ ID NO: 43588 - DNA, 168 bp, Glycine max
cgaggagccagggcagcttgtcagaatttcgttaaacattcacggcactcgtgtggtacagaagctgattgagactctcaaaactaggcagcaaatttcattagttgtagcagctcttgaaccaggattcttggccctcatcaaagatcttaatggaaatcatgtggt

SEQ ID NO: 43589 - DNA, 247 bp, Glycine max
cgcagaccgagctagctagctagcaagcaagcacagagatggaggcaaagcgaggccatgccctcatgtgcttggcacgtgtttcactcttcctctgcgctctaaccctatccgctgctcacggaagcaccacggttcaagacatcgcgagaaagttgaaactcggggacaacgagcttctgcgcacggagaagaagttcaaggttttcatggagaattacgggaggagctactccacagaggagga

SEQ ID NO: 43590 - DNA, 246 bp, Glycine max
gaatggtggatgagcaacaggcgattgccataggggttccggcagcgcgtgaggaactatagaggcggatgcgttagggctgctcacgcgcggggttgatgaatgccagatgtttagaaatctccctgagggactacgaagggacatcaagtaccatctgtgtttggatttggtgagacaggtgccactctttcagcatatggatgatttggtgctagagaatatttgtgaccgtgtgtagtccct

SEQ ID NO: 43591 - DNA, 232 bp, Glycine max
  unsure (1)..(232): unsure at all n locations
gctcaggccacaagaaatcttgaaactgcaaatcagatggagatggtcgaaataagtatttttgaaggacaccgatgagagggcatgtgcttatatagcaggaccagcgccaaaccgttggggttttactgttgatggagtagacttgntagagncaanttagtantcantaantantaagtantagcagncaaaagcgtactcacaacagacacaaggctttcagaaaagc

SEQ ID NO: 43592 - DNA, 239 bp, Glycine max
ccaccctccacctggtgctccgtcttcgtggtggcatgcaaatctttgtcaagaccctcactggaaagaccatcacccttgaggtggagagttctgacaccattgacaatgtcaaggctaagattcaagacaaagagggtatcccacccgaccaacagaggctgatctttgctggaaagcagcttgaggatggccgtacccttgccgattacaacattcagaaagagtctaccctccac

SEQ ID NO: 43593 - DNA, 233 bp, Glycine max
gggagtaaaattccctttctaagtatttaatgtaattgctcactgaactagagaccactatttaaggaggctagggctttgttggggaggcttgaataccagagagggaacttcgatgctgcacttcaagtatttcagggtatagacatcaagggtttggccccaagaatgatcaaggctattgccgaaaaaccaagcaaaggaaaccggggttccaaggcagatatcatggt

SEQ ID NO: 43594 - DNA, 235 bp, Glycine max
  unsure (1)..(235): unsure at all n locations
agaaaacctaagcttagaattagaaacaaagaaaagaagaaaggaaagaattgatcgttgaaaatgcagggaggaaagaagcgggagagtccattaaggaaacagctacaaacattggtgcttctgccaaggcatgcantgagaagaccaaggccacntntcaagagaaggcagaaagaattacagcacgntantcggntcaaaaggagnttgcaacccaaaagaaagaggcaaa

SEQ ID NO: 43595 - DNA, 232 bp, Glycine max
acttgctctatactagacagtacacacactagaagaataatggcttctatcctcgattactttttagttctctcgctttcttgctctcgtcttttcttcttatccgactgagtgaaccctataaaactaataaaccttgttgttctacccgttcaaaatgatggttgcacagggcaccattgggtcagccttcagaaaagaactcgtctaatgaaagtacgagtcctggtgg

SEQ ID NO: 43596 - DNA, 167 bp, Glycine max
cgcaacgagttcatctctcttctctccaggtatgttgctgggggcaaaggaatactacaaccacatgacctgctgtacgaggtagaaaagcttcttgaagaggatgaagggatgcagaaactcaaagatagcccttttgtcaaagagcgtgaatctcaaaggaagca

SEQ ID NO: 43597 - DNA, 264 bp, Glycine max
cgccaatttgtgtggttggaatttttatccatggccacaagattacttacttcttccgaccactttgggacaacccccctgcccccttcacaagtatacctcactactatgcagaaaatgtctctatggaacacctttgccgccttcatggctggtcccttcgttccaagcatcgtcgcatttttgatgctgttatcttcagcaatgagttagacatgctagagactagatggcacgaactttctccctatgtatcaaagtttg

SEQ ID NO: 43598 - DNA, 257 bp, Glycine max
acgagtgcaagtaccgcatcaagaagctcatgaacgaccacggctgcagcgccttcgacgtcatcttgcacgacggttcccccaacgtcggtggcacctgggcccaggaagctatgagccagaacgccctcgttattgatgctgtcaagttggccactcagttcttagcccccaagggcaagtttgtatccacaattttcaggtcgcaagattacagttctgtggtgtactgtttgaagcagttgtttgagaaggtt

SEQ ID NO: 43599 - DNA, 249 bp, Glycine max
caaacgttggtctgtactacacagtacatgcactagccgcccaatgcgttccatggtcgactactttttagacctctgtgtttcttgctcttttgttttcttgttatccgactcagtcacccctacaaaaccagtcaaccttgttgttgtacccgttcaaaatgatggttccacagggctcccccctccccccctccacaaaagaacccctctagtgcaagtaccagtcctggtggacctcagtggaga

SEQ ID NO: 43600 - DNA, 286 bp, Glycine max
  unsure (1)..(286): unsure at all n locations
acttgcattgtattctagttatgttagttcaatgctcaacaacactctgatctactatgcgtcttcactattttgcaaccacacccttcacagacatcaaccntatccccacccctctcatataaatattatggcttcgagggtggtttcggttttggtgatagcgatgatgttgtttgccatgaactgtaatcggcactagtgttcggccacatgccttcaaccaaagaggaaggtcacgattttcaggaggctaaagccaagacacaccaaactgcgaacaagg

SEQ ID NO: 43601 - DNA, 266 bp, Glycine max
gaaaagggaaatgaacagcccaaacgtgatgcctgcagaccttgttttcatcattgacgaaaaaccgcatggcgtcttcactcgtgacggaaatgaccttgttgtcacccagaagatttctcttgcagaggcactaactggttatacagtgcacctaactacccctagatggtagaaccttaccaatccaatccaccatggtaatcatcccaactatggagaagttctcccaagagaagggatgccacttccaaaagatccatcaa

SEQ ID NO: 43602 - DNA, 129 bp, Glycine max
gttgggatgaaatagactatgaatttgttggaaatgtgagtggtgatcgatacatggttcacacaaacgtttacagaaaaggcaagggggacagggaacaacaattctatctatggtttgatccaactg

SEQ ID NO: 43603 - DNA, 256 bp, Glycine max
caaaatcaggaggcctccctattcctgaacctattgctgatagacttggtgtcaattatccatttcctccacatcttgagtatgcttaccctccgcctgatggaaatatattgaccaatattgtgaatgctctaattgctgttccccgcttttacactcaggttctacacttgatgaacaaaatgaacatcccagctccatttcgtatggcactgcccacacctccattacctccagaggtaccagcactgccaca

SEQ ID NO: 43604 - DNA, 100 bp, Glycine max
ggaagaacaagaaggacatcagtgggaatgctagagcgttgagaaggttgaggacagcgtgtgagagagcaaagagaacactctcttctaccgcgcagac

SEQ ID NO: 43605 - DNA, 261 bp, Glycine max
gttagtctcaatggctttctcataactggaggacaattcctctcctacctcatcattttggccttcacaaaagcaccaggaacatggagttggatgttaggagcagcagtagtaccagccctgatacaaatcgtattaatgatgatgctgccagaatcaccgcgttggctgttccgaaagggaagagaagaagagggtaaagaaattctaaggaagatttgtccaccccaggaagttgaagcagaaattaatactttgagg

SEQ ID NO: 43606 - DNA, 130 bp, Glycine max
gaccgcggcagctagcgaggcagcaagcacagagatcgagccaaagcgaggccatgccctcatgtgcttgccacgtgtttcactcttcctctgcgctctaaccccgtccgcgcctcagggaagcaccacg

SEQ ID NO: 43607 - DNA, 249 bp, Glycine max
tgagttcatcaactggtggtcgccttcagttccccatctatgacaagtacctcactggcctggaaagggctgtaagaaaaatgaagagcaattcagagtcgtctctcctggtggctgtaagatcctctaaaggtgagaagattctcgaggttgatggaacagtgacaacacagccagtccttgagcatgtaggaatatccacatggcctgataggctaatcttgacagatcatgcacttcattttgaac

SEQ ID NO: 43608 - DNA, 248 bp, Glycine max
gatggctcttagcagcctttttgtcctaatgacccattatggattggaatacccaaatttctatgaaaaactatatgccctcttagttccatctatcttcatggctaaacatcgagcaaggtttttccagcttcttgattcttgcctcaagtcacctcttcttccggcttacctggctgcttcctttgcgaagaaattgagtaggttgttgctttcagttcctccttcaggggcattagttattacgg

SEQ ID NO: 43609 - DNA, 246 bp, Glycine max
ggtggatttgcaatacgattgaaaagatagagcctttggggttaaagcttctcaggaactatcttcaatttcccgtttgggccgtggggcctctccttccacctgcttcactcatgggttcaaaacatcgttcaggaaaggaaactggcatagctcttgatgcatgcatggagtggctggattcaaaggatgaaaattctgttctctatatttcatttgggtcactgcacactatcaatgcatctc

SEQ ID NO: 43610 - DNA, 246 bp, Glycine max
gtaggatcgcggcgttccacatgttctctccgatgaggattcagggcctggagggtctccgacagcgcgtgggtgacgacatggtgaagagcgcgtggaaggagatggagatgaaaggcgtggtggaggttcgcggtgtgtttcaggaagggtctctttgtaatattctggaaagtgtttttgggagtaatgataagagtgaggagttgggggatatggttagggaagggtacgagctgattgcga

SEQ ID NO: 43611 - DNA, 251 bp, Glycine max
ggatggagtttggggtgatcgcatccctgcttggatcaaatatgccactgttgatcctaccagatttgccgcaccatatgatggtgtctactgggatccaccactttcagagaggtatcagtttaaatatcctcgtccaccaaagccaaaggccctgcggatatatgaggctcatgtggggatgagtagctttgaaccccgcataaactcttacagggaatttgcagatgagattttgccccgtattcggg

SEQ ID NO: 43612 - DNA, 211 bp, Glycine max
  unsure (1)..(211): unsure at all n locations
tgttgttcaatctaacaaacttctctatatcgtttactttttcaacacaacatacgatagagnntanntaggncnnncatatnnatatcatngcttcnanggaagtttcggttataaatnntnggatgatngtgtgtggcataaagtgtaactggcactagtgttggcgagatgccttaaaccaaagaggaaggtcacgattttaaggagg

SEQ ID NO: 43613 - DNA, 200 bp, Glycine max
gtcttccatagccccccagaaatgaggagcaccatcttctttgcgctctgtctcttgtgtgctttcagcacctcatacggtgtgtcagccatcgctgatttcgtgctcgatagtgaggataaccctcttgaaagtggtcgtagatattatatcgtgtcagacatagcagcatttggtggagtaagagcagctccagcggg

SEQ ID NO: 43614 - DNA, 164 bp, Glycine max
ggtggactagctgtaataaaagatatttccaggttattagacaatcatattctgcagcatacaatactatatcttcacactacgtacagtacatatgattgtatgctgcagaatatgattgtctaataaggtggactagctgtaataaaagatatttccaggtt

SEQ ID NO: 43615 - DNA, 233 bp, Glycine max
gaaagagagagaagaagaaaagaagaacaaagatgcaatcctcaaaggagaagatgaaaaacatggcaagtgctgccaaggaacaagtcgacatctataaagccaaaatagacgagaaggcagagaaagcaacggcaagaacagaggaggagaggttgatagcccatgagcacgcagaggcagaggagtgggagagacaaggtggcgctggggtagggagaagggggtggtgg

SEQ ID NO: 43616 - DNA, 123 bp, Glycine max
taactagtcgaggtccgacagttacagacccggatactgaggaacaaggcgaagtattttatgttccaagggatgagaatttagggcacttgaagtctaaggatgctctttggattggaacag

SEQ ID NO: 43617 - DNA, 277 bp, Glycine max
caaaacctaagcttagaattagaaacaaagaaaagaagaaatgaaagaattgatcgttgaaaatgcatggaggaaagaaagcgtgagagtccattaaggaaacagctacaaacattggtgcttctgccaaggctggcatggagaagaccaaggccactggtccaatagaaggcagaaagaatgacagcacgtgatccggtgcaaaaggtagtgggcaccccaaaagaggagtggcagagattaagcaggcggagctggacaagcatgcggcgcgtca

SEQ ID NO: 43618 - DNA, 209 bp, Glycine max
gacatagcaaaggctacaaagcaggaatcacaagaggtgaaagaggaattaggtggacaacaccgggatgccgagctttgataattgagatgtttgagtcacttggaagctgttaattaggccagagtagtggtctaaatcgggcagaaatagatgggtgtggagatgtgatatggcagtatctggctgtgggtgatgaaggggttggg

SEQ ID NO: 43619 - DNA, 256 bp, Glycine max
cggctcgatgcacggaggcatgtagcgcgttggagtatgtatatgtgtggcatgcgttttgtgggtactggggaggggttaggcctaaggtgccggggatgccggatgcaacggtagttccgaccaagttgtctcccggagcggagatgactatgacggaccagggcgttgttaagatcatggagattgggggtggttgtgccccgcgggtggggggtgtggttggagtgggggctgtgttgtggaggtggggggg

SEQ ID NO: 43620 - DNA, 246 bp, Glycine max
ggaacactgttgatctcaaagatcagggaagaataccctgatcgaatgatgctcacattctctgtgttcccatcccctaaggtttctgacactgttgttgagccttacaatgcaaccctatcagtgcaccagctcgttgagaatgcagatgaatgcatggttttggataacgaagctctctatgacatctgcttccgcacgcttaagctcattactccaagctttggggatctgaaccatctaatt

SEQ ID NO: 43621 - DNA, 247 bp, Glycine max
gttgagatccaaaccgacgaatacggcaaccctgttcatgctgctagtctcacctatgtagccaccagaactgctgctggtggttacagtgatgacattaatacgcaacattataccaccaatgcctacggcgtagacactggtagacagcattctagtggtggctacgatggtgacactaataaacatcggtggcccttactatggaaccaacaccgcagacaccggtactggtcccagaagtgga

SEQ ID NO: 43622 - DNA, 215 bp, Glycine max
ctatcgatagtgataagagagataccaacaagaaaagaaaaaaagaagagttgagattccctttgatgaaaagatggcatcccataggctaagctatgaagctggtcaaactaagggccgaactgaggaaaagacgaaccagacgatgggcaatattggagagaaggctcaagctgcaaaggagaagacccaggaaatggcccaagctgcaaagg

SEQ ID NO: 43623 - DNA, 226 bp, Glycine max
gggggtacacccatctctcggcagatgagggaacttgattatggggttgatattgctgtgggaacacctggtcggattattgaccttctcaacagaggtgctctaaatttgaaggatgttcagtttgttgttcttgatgaagctgatcagatgcttcaggtgggctttcaggaagacgtggagaagatcttggagaggttgcccccaaaacgtcagactcttatgt

SEQ ID NO: 43624 - DNA, 217 bp, Glycine max
tagcaaaacaataatgggagttatgtaaagtgcctggagaggctttccatgtagttgcttatgattttggaatcaagcataatatacttaggcgcctagcatcttatggctgcaaaatcactgttgttccatgtacatggtcagcatcagaaactttgaagatgaagccagacggggttcttttcagcaatggccctggtaatccgtctgctgttcc

SEQ ID NO: 43625 - DNA, 251 bp, Glycine max
gtcgcggttggtgcagccgtggcgatgcgtgcgaatacgcccatgggtgttcgaatgctggctgcacccttccaggtacagaacggaggcctgtaaggatggcaggaactgcaagagacaggtgtgttttttcgcagacacccctcgccagctgagaattttgccggtaacaacatcttcaccctcttcaaatgacatgccatgcaagaagaaccttaacaagctcttaaaccatgcttcaaagtcaaaca

SEQ ID NO: 43626 - DNA, 238 bp, Glycine max
ttcaaaccttgctctatactacacagtacacacactagaagaataatggcttccatcctccactactttttagccctctctctttcttgctcttttcttttcttcttatccgactcagtcaccctacaaaaccaataaaccttgttgttctacccgttcaaaatgatggttccacagggctccattgatccaacctccaaaaaagaacccctctaatgcaagtaccagtcctggtgga

SEQ ID NO: 43627 - DNA, 252 bp, Glycine max
gtgcggtttcctttgttggtgttgctgggaactgttttcctggcatcagtttgtgtctcattaaaggtgagagaggatgagaataaccctttctacttgagaagctctaacagcttccaaactctcttgagaaccaaaacggtcgcattcgtctcctccagagattcaacaaacgctccccacaacttgagaaccttcgagactaccggattgtccagtttcagtcaaaacccaacacaatccttctccccc

SEQ ID NO: 43628 - DNA, 246 bp, Glycine max
gtttcggtggtggaggctatggcaatgaccagtacccttatcagtttttgcatggccctggcgataggttgatgaggttggggccctccgcgacgaaggaagcgaggaagaagagaatggcaaggcgcagaggtttctgtctcatcacaggcatcatagtggtaatcaccagaatcaagggtctgaccctcatgcaagactggggggtgataattgcaacactgctttggctgcgcctcatcacgc

SEQ ID NO: 43629 - DNA, 235 bp, Glycine max
attgaataagaactttgtgaagcttgtttcttggtacgacaacgagtggggatacagctcacgtgtcattgatcttcttgtattcgttgccaagaagtctctttaaggtgttacttcaaagtagcttgtcttcacattattaccgtatgtttatgtttagctgcgatttagtgtcttgctcgagcaaaaaatgagaggtctgaataaatcggtttctgaaaccagtggtgttact

SEQ ID NO: 43630 - DNA, 233 bp, Glycine max
cgattccgggagcttactggcacctatccccaaaatataactgttgtaagttatgatttcaaggaaaaaagatttgcacatctacaccgatctgctatcggctttccagaatcaaggttcttctataccggcactcctgctacatcaaatgcaaaagcaactgctctaaaaggtgaggaattggtcagaactcaattccaaagagatccatttggatgtcgaggttcacttta

SEQ ID NO: 43631 - DNA, 232 bp, Glycine max
ctcaagcaagggctcatagaattggtcaaaagagggatgttcttgttcttcggtttgaaacggttcaaaccgttgaagaacaagtcagggcttcagctgagcacaaacttggcgttgctaatcagagcattactgctggttttttcgacaataatacaagtgctgaagatcgaagagaatacttggaatcactcctgcgtgagtgtaagaaagaagaggttgcacctgtttt

SEQ ID NO: 43632 - DNA, 245 bp, Glycine max
agcagaccgagctagctagctagcaagcaagcacagagatggaggcaaagcgaggccatgccctcatgtgcttggcacgtgtttcactcttcctctgcgctctaaccctatccgctgctcacggaagcaccacggttcaagacatcgcgagaaagttgaaactcggggacaacgagcttctgcgcacggagaagaagttcaaggttttcatggagaattacgggaggagctactccacagaggag

SEQ ID NO: 43633 - DNA, 246 bp, Glycine max
atgtctatatacccatctcctactggggtgatgattggtcttgatttggcatataatttgcattctgcgtttgggaactggttcccagggtcaaaaccactacttcagcaggccatgaataagatcatgaagtcaaatcctgcactgtatctgttgagggaacggataaggaaaggtatgcagttgtactcttctgagcccactgaaccatatttgtcttcccaaaactatggagagatattcagc

SEQ ID NO: 43634 - DNA, 254 bp, Glycine max
ggcctccgaggccactagaccgcagatatagaagatgagtatcggctacatgagacctcaacagagccagatgtatctctagggtccacatggctgtctgattttcctcaggcctgggcggaaaccgggggcatgggactggcagttcgccaagctcctctgatcatacttctgaaagcaacctctacccccgtgtccataaaacaataccccatgtcacaagaagccagactggggatcaagccccacataca

SEQ ID NO: 43635 - DNA, 177 bp, Glycine max
  unsure (1)..(177): unsure at all n locations
tgangttgtggtttcctttgttggtgtttgtgggaactgtcttcctggcatcagtttgtgtctcattaaaggtgagagaggatgagaatctccctttctactgtagaagctctaagagcttccagactctctttgagctccataacggtcggatacgtctcctaccagagattcaac

SEQ ID NO: 43636 - DNA, 235 bp, Glycine max
tttcattgtttttcagctcattgcatgttatttttcttccttatcttgtgtaggtggtcatgagcttagcaaaactactggaaatgctggtggcagagtagcttgtggtaagtatagactgcaatattaaatgctgtcttttttgacattccttattaccctgcaaaatcaatttttgacgtggttgtgatgccacaattaaccttacaaagatctttatagagattatcaagta

SEQ ID NO: 43637 - DNA, 240 bp, Glycine max
cttgtctacgaaggaaacagatagaagctttgggctgagaaatctcaggtacattgagaccctcaaagaagctttgcacagggcatgccccggagttgtctcctgtgctgctatcctcgttctctctgccagagctggcattccgtcgctaagaggtccccatatccctcttaacccaggcataacggatggtagccggagcagagccgatgtggtccagcagttcctcccagaccacaa

SEQ ID NO: 43638 - DNA, 237 bp, Glycine max
ggccatggatcagattggtagatatagatactttccatcaactcaactgcatacagcatctggcgcgtttagagcactcaatgtttatcacagatctgtcatcccaatcccttatccataacctgatggagaatttacttaactcgtcggtgattggtacaacaccaaccacaagaacctctacgacgcacttgatgtccctgatggccaatcaggtgctgtgttagtaaccttaaa

SEQ ID NO: 43639 - DNA, 229 bp, Glycine max
  unsure (1)..(229): unsure at all n locations
gaagtgttaggattacggcgacgtgagcggttcgctgcccgcgacgttgtgagaagtccactgaaccgtatcatttagaggtagaggagcagaggcagcgagagggagtgatcgcggaactctaaacagaagagattcggcaactgagnagacgtgccaaatctagttcaaggaaaaccattacctccgaagatgaaccattcaactcgagatgcccaaccccatctat

SEQ ID NO: 43640 - DNA, 171 bp, Glycine max
ccttgctctatactacacagtacacacactagaagaataatggcatccatcctccactactttatagaccactctctttcttgctctaatcatatcttcttatccgtatcagtcagtcctataaaaccagtaaaccttgtagatctacacgatcataatgatggttccaca

SEQ ID NO: 43641 - DNA, 268 bp, Glycine max
cgctcttgatgcccttctcatcaacgagtatttgtgtttggtgtcacggtgtttgatatggtaccaagagaatgaacagtgcatggtgactggtggtgacgtgttgcagaagagagggctcaaggagagtgaaaggtggaccaacgtgtacttcttgctcgggttctttctgctgtatcgtgtgctttgcttcttggttttggctagaagggtttcaagatcgaaaacttaatagacaccgagaaattatatatggtgataaaacgct

SEQ ID NO: 43642 - DNA, 125 bp, Glycine max
aaatcctacatctggcttcaaactgtggatggttctattcagcaagtagaggaagaggtagccatgttttgccccatgatatgccaggaagtacttcaaacaggcatgggatcttccaaaaacta

SEQ ID NO: 43643 - DNA, 111 bp, Glycine max
gatttccattgaggtccaccaggactggtactggcattagaggggttaactgtgagcagcagtactcatccaaaacgtaccaagcacccttctgccactccacacaacata

SEQ ID NO: 43644 - DNA, 260 bp, Glycine max
tacggacttgttttcattcaatggagttagaagtttaaagggtcaccttaagaaaaagcacataagtgtcccagttggccactcgtttttcgcttctttggtccttgtgatgcctgaatctgacttcaatagggagcttggcgtgtttcagttgactgcagaactcctatctgtgaatggaaatgtgatagaaaaatctagccagccatgcctgttgaggtttagaagctcaccgattcgactagtccgaacccttatga

SEQ ID NO: 43645 - DNA, 117 bp, Glycine max
cgaagaggaatggctcccaagcgtttaatcttgttgactgtgctatgcttctcagcactgtcactgagtacgggtcttgcggaggataatggacttgttaggaacttctacaaggaa

SEQ ID NO: 43646 - DNA, 237 bp, Glycine max
tggtgatgctataagaaactattaccatgaaatgcatgtcatccaggtcatgcttgttcctttgtactaggtggagagtgctttcgtatgtgttgagcacgcgttagacccggtgaacaagcctggtatgtctgagagtttctgcctatctagcactgaagctcaacaatcctagttgcaaggattcagcaggaacagtttagaggcctcctgacgataccaaagtcgtggagataa

SEQ ID NO: 43647 - DNA, 177 bp, Glycine max
tgtgataaaccgcgatcacaggttgctgcaccttaaaaccggaaagaaaaggaatcgttacttgatttcaagaagctctcagtttcttccgactgctttgtgtacgagttcttgaggtgaagaaaatcactctctgtgctggccagagacttcgtgaatcagtttcttttccagaca

SEQ ID NO: 43648 - DNA, 238 bp, Glycine max
tgtaaagctaacttcaacacctttaattttccacaagtatttcagcggctgaataccaagcggagaagatgagtcaggtgcagccacggcgtcccaaaggccaaaaccccatcaaatacggcgacgtttttgtcgtctccggcgaccttgcacagaagcccgtcgcatcggaagatgctgccatgactcaaagcgcgaagctcgagctgctcggacaaacccaacccggcggagcagc

SEQ ID NO: 43649 - DNA, 252 bp, Glycine max
  unsure (1)..(252): unsure at all n locations
tgcaactatgtttgtcttaatcttctccatactagcagtcgttttcacaatattgtccaagcccacacagcatacgtcatcgacanganctgnangagtnacantttagcatctgcatgagccacatcaatcgttgcttgggctatcactgctctagcatttgggttggcttgcaagcaaataaacataggagggcacagaaggtggaagcttgaggtagtggaagctttcataataatactcacattgaca

SEQ ID NO: 43650 - DNA, 159 bp, Glycine max
  unsure (1)..(159): unsure at all n locations
ccactctccacttggttcttcgtctaccgtggtgggatgcaaatgtttgttaagaccttgacgggaaattcatcacacttgaggtcgagagctccgacaccattgacaactttaangctaagattcaggacaaagagggtatccctccagatcaacaga

SEQ ID NO: 43651 - DNA, 244 bp, Glycine max
tacgtctcaggttttggacttactcggctgggtttgggcccgacaaagtctgccacaatggcaccaaaacgaaacagcttgaaccaatcttctataaccactgcaatgagttcaaaggttgcagcttccttgaaccactacttggcacccgaggtgcgcaatactggtggcaaattcactcagaaatgtgatgtatattcttttggtatagtgctgttagaacttttgacaggtagaatgccag

SEQ ID NO: 43652 - DNA, 233 bp, Glycine max
tgaatatgtgtgcgaggaatatggaggcagagtcgagcttgcaaaggcttattacgatgggttgacaaactctattgtcaagaattttaatggaagtggaatcatcgctagcatgcagcagtgcaacgactttttcttcccatgggaatttgcttggttccaaggaaattcccatgggaagagttggggatgacttttggttccaagaccccaatggggacccaatgggagtg

SEQ ID NO: 43653 - DNA, 241 bp, Glycine max
tctgagcattattatgcaaaacaacaagcagattatatcatttcacaggcagacgaagacaaggatggtcgtcttactttgactgagatgatcgagaacccatatgtattttatagtgctattttcaacgatgatgaagatgatgatagcgattatcacgacgagttccggtaaattcgtgttaggatacccagaaaagtttggcacaattctagtgacaaggaatcagtatttgaagatt

SEQ ID NO: 43654 - DNA, 100 bp, Glycine max
catatgtactgtacgtagtgtgaagatatagtattgtatgctgcagaatatgattgtctaataaggtggactagctgtaataaaagatatttccaggttg

SEQ ID NO: 43655 - DNA, 251 bp, Glycine max
atcactaccttggttcggttcttggtcgctatgatggagatgtgtatccaaagctgtacgaggaggcatggaaggatccattgaatgattcagtgcgtgccagatggcttccaagaatatattcgaccaatgctaaagcaacaacttcgtaatgctagactctaaattacttttttataactgcactgttgatactggagaaagttatgtattgctttcaatttaaaagacagtaataaagttctacgaaa

SEQ ID NO: 43656 - DNA, 168 bp, Glycine max
caaacatgatccggcatcctcagcatccagcactaacaaagtcacacattaagccactgacactgcacataaatccaaggactacgcaaatgatattgctcagaagtcataggactacacaggtgacactgctcactcatcataggactacaatggcgatgctgcgca

SEQ ID NO: 43657 - DNA, 147 bp, Glycine max
gggaatgcatggccaatctggctgtcaattccggccaggtctaaatactcggccatagaccgatagcgaacaattagcgcgagggaaagatggaaaggactttgataagagagtcagagagtgcttgaaattgtcgggggggaagcg

SEQ ID NO: 43658 - DNA, 232 bp, Glycine max
cacgcactctccgcgcaagctataccgttactgccagccagtgatccagctatggtcaacgcaaactcaaagctgaacttcttggccactggaagcaatgccgagaacaagcagaggacatggctcgcacgttcgctagacaatgtgagaggccagatacctagtcgtgtacatgagcatgcaatcgctgaggctgcagacactgtcgaggaggcatcatcggaccatagag

SEQ ID NO: 43659 - DNA, 207 bp, Glycine max
cacaactataagatagaacttccttataaccaaaaccatcatcaactatggctaatcatcacaagcactacgatgcatcaaggtcgcaatgtccacgagtatggtcaacgttgcagactgcagacttgccgaatactcgcaacccggttacatgccactagtgttcacttacgtagccactaggattgtttagttgctacaatgctt

SEQ ID NO: 43660 - DNA, 211 bp, Glycine max
caagattggacgcattggaactgtgccagtgtgacgtgttgagaccggtggcttgaagcctggaatgctggtgactgttgcaccaactggactgacaactgaagtcaagtctgtggagatgcaccatgaatctcttacagaggcacatcctggtgacaatgtgggattcaatgttaacaatgttgctgttaaggattgaagcggggttatg

SEQ ID NO: 43661 - DNA, 172 bp, Glycine max
gtgtggcaccagctggactgacacgtgcagtcaagtctgtggatatgcagcatgaatctgttacagaggcacatcctcagtgacaatgacgcattccgtgtcaagaatgatgctgttaacgattgaaagcggggttatgttggctcacactcaaaaggtgacacctgcaaag

SEQ ID NO: 43662 - DNA, 259 bp, Glycine max
atggagatacatgtgtaccgtgtctccaagacttggaagctgggcgagcagcgggacaaagtgtattcccgaggttgatacgatacgcctgaagaacagctcaagagcatagggaacgtgcttgaggaggaaccgaaggaagggctgcaggttccgacaattgacttgagagcgatagactcggaggacgaggctgttcgagtgaaatgtcgcgagaagctgaagaaagcggccgaggcatggggtgtgatgcacgtgg

SEQ ID NO: 43663 - DNA, 232 bp, Glycine max
ggagggtctgaaagtgagtgtcagcgctgagtaccaagcggaggagatgagtgcaggtcagccacggcgtcgcagaggccaaaacgccatcagatactgcgacgtttttgtcgtctccggcgaccttgcacagaagcccgtcgcaccggaagatgctgccatgatgcaaatcgcggagactcgagtgctcggacaaacccaacccgtgcgacagctgtccgtcatgcaatct

SEQ ID NO: 43664 - DNA, 235 bp, Glycine max
cttgatgatcgaggcgtggcttgaagcagatgatacattaacttgcacctttctaacactcagccaacgcatgataatgagaattgtgatggctaaagtgaaccaacactcttgcttcttgaccaccttagacatggtcaagtcataggtgtgtgagtaaggttcatagcttatggagagaagaattaatagccagagaaggatgagagccatccacccggcgatacggtgaatt

SEQ ID NO: 43665 - DNA, 217 bp, Glycine max
taggagctgttttgcatatccaaggatggctatggcagggttgatttgcaggatgtcaagaaaggtgttggagtatcagcagttttcgtggctcggaataggtttgctgtgcttgacagaagcagcaacctagtccttttgaaaaatctcaagaatgagattgttaaaaagactgttcttcctattgctactgatgctatattctatgcaggaacgg

SEQ ID NO: 43666 - DNA, 273 bp, Glycine max
gacgttcgttcgtgtctcaaaaaaaggggtactaccactctgtagtgtatatggatgctggaaatcaatgtgttttgtatttgttcacttccttcgtcgtcccccccggagcccgtttcgaaccgccgcgttatgaagccggcgtcaaagcgccctccatttaccattccgagagaggtccaacgacttcccaggtcctcgccgtcctcgccggcctcccggtcggtggcatcctgctcctcctggcgggattgaccctggcaggaaccctca

SEQ ID NO: 43667 - DNA, 272 bp, Glycine max
attgataaatcatatcattaaattattaaataagttttgaagttgatacttgtgtctatattgagtatgcttttggtcattgtgcgagcagaaggatttacaaaagtggtgttagtggaaaacgttgtgatggaagtagcactgctcctccttgcacagggtgggttgaaatgatggctcctgttttctcaagagctgcttggcgttgcatttggtatatgatccagaatgacttgatccatgcatggggtctagatatgcagctaggctac

SEQ ID NO: 43668 - DNA, 269 bp, Glycine max
cgaaacagttgaacaacttaggtctggtggtcaatttactgagtcctcagagtgtaaatatgttgtatggatttcgtttagtggcttagggaataggattttgaccctagcttctgcttttctctatgctctcctcactaaccgtgttctactggttgaccctggagcggatatggttgatctcttttgtgagccatttccagattcttcctggcttcttcctagtgactttcctcttaatgctcagtttaataatttcagtcagaatt

SEQ ID NO: 43669 - DNA, 269 bp, Glycine max
gaaactgagaaaccgttgtggaccagttcaaatgccttatactctgcttttgccttcgagggattcttcctcagctcctcatgcctgagaaaggttctgctgagtatgaggagctgaggaagaatccccagaaggcttacttgaagactattacaccaaagtttcagacccttattgacctttctgttatagaaatcttgtcaaggcatgcatctgatgaggtgtaccttggggagagcgctgatccaaattggacatctgatacaaga

SEQ ID NO: 43670 - DNA, 265 bp, Glycine max
attagaaggaaatattgaatgataagaaaaaacgagaagtaattatgatctgtttgttctgaacaaaaaaaaaaaaaagatcatacatagtagtgttggtgggttgcaaagatgcttgggggtcttctccataggggtcataagataaaagggacagtggtgttgatgcgcaagaatgtgttggacgtgaatagcgtaaccagcgttgggggaattattggtcaaggtctcgacttagttggctcaacactcgatactcttactg

SEQ ID NO: 43671 - DNA, 272 bp, Glycine max
attgacaccaacagcttggagaaccagctcgaccagatgcctaggagattctatcttgctgggaaccaagagcaagagtttctaaaatatcagcaagagcaaggaggtcatcaaagccagaaaggaaagcatcagcaagaagaagaaaacgaaggaggcagcatattgagtggcttcaccctggaattcttggaacatgcattcagcgtggacaagcagatagcgaaaaacctacaaggagagaacgaaagggaagacaagggagccattgt

SEQ ID NO: 43672 - DNA, 267 bp, Glycine max
cttgtgttgcttcttttctccctcttaggtctctcttctagttccagcatatcaactcatcgttccatattggaccttgacctaaccaagtttaccacacagaaacaggtgtcttcactgttccaactatggaagagtgagcatggacgtgtctaccataaccacgaagaagaggcaaagagacttgagattttcaagaataacttgaactatatcagggacatgaatgcaaacagaaaatcaccccattctcatcgtttaggattg

SEQ ID NO: 43673 - DNA, 270 bp, Glycine max
tatggatgtacaacaatgaagacactcctgttgttgccgtttctattattgacaccaacagcttggagaaccagctcgaccagatgcctaggagattctatcttgctgggaaccaagagcaagagtttctaaaatatcagcaagagcaaggaggtcatcaaagccagaaaggaaagcatcagcaagaagaagaaaacgaaggaggcagcatattgagtggcttcaccctggaattcttggaacatgcattcagcgtggacaagcagatag

SEQ ID NO: 43674 - DNA, 266 bp, Glycine max
agaacattttagaggcctcctacgataccaaattcgaggagataaacaaggttctgtttagtagagaggaagggcagcagcaaggggagcagaggctgcaagagagcgtgattgtggaaatctcgaaggaacagattcgggcactgagcaaacgtgccaaatctagttcaaggaaaaccatttcttctgaagataaaccttttaacttgagaagccgcgaccccatctactccaacaagcttggcaagttctttgagatcacccca

SEQ ID NO: 43675 - DNA, 261 bp, Glycine max
tctcgagccgaatcggctcgaggagaacttcctcttcgtttcgctgactttggggttttgcataggaatgaggctagtggcgcactgagtggattaacacgtgttaggagattccagcaggacgatgcacatattttctgcagggagtctcagataattgatgaacttcaagcagttcctcacttcatcctttatctgagactccctgcagaaaaaggatgaagtgaggaacagcttgaatttcatcaattatgtctataa

SEQ ID NO: 43676 - DNA, 273 bp, Glycine max
  unsure (1)..(273): unsure at all n locations
attctcgtcgcattggtcgcttaaaacactcatcaagtcatcaccaatggccaaggctagttttttcccctttgtttctgctttcaagtggtgctgcttcgctttcagttccagagagcagcctcagcgaaacgagtgccagatccanaaactcaatgccctcaaaccggataaccgtatagagtcagaaggagggctcattgagacatggaaccctaacaacatgcattcagcgtggacaagcagatagcgaaaaacctacaaggagagaac

SEQ ID NO: 43677 - DNA, 258 bp, Glycine max
gcaaagatggtgaatatatcctaataattgagaccacaacttgtagagtattaaggtattggctagaaacaccaaaaactggaaccttggaagtctttgctgatctaccaggtttcccagacaacatcaaacggagtccaagaggaggattttgggtgggaatttactcaagaagagaaaaaattatccaatggattctatcatatccttggattggaaaagttttgcttaggcttcctttggacatcccaaaagctt

SEQ ID NO: 43678 - DNA, 207 bp, Glycine max
gtcgcgttgtgttgcgtcgtgtcgtgcgctgttcctctgtctgtcgtttttgttttcagaccaaaccctagctccgcatcgcaaccatgtcgaccaagcaaggtggaaaagctaagcctttgaagaaacccaagtctgataagaaggattacgacgaggttgacatggctaacattcagaagaaaaaggaagaggagaaggcgctaa

SEQ ID NO: 43679 - DNA, 110 bp, Glycine max
gacggcagcacgcgcaaaaatggtgaagtttctgaaaccaaacaaagccgtcatcgtccttcagggacgctacgccggcaaaaaagccgtgatagtgcgaaccttcgatg

SEQ ID NO: 43680 - DNA, 236 bp, Glycine max
ccaaaactggaaagcacggtcacgctaagtgtcactttgttggaattgatattttcactgccaagaaacttgaggatattgtgccctcttctcacaactgtgatgttcctcatgtgaatcgtactgattaccagctcattgatattgctgaggatggatttttgagtctgcttactgaaaatggtaacactaaggatgacctcaagcttcccactgatgagagtctgctcactcag

SEQ ID NO: 43681 - DNA, 283 bp, Glycine max
tttgttttggagggtagacctttaagggcttgtcttggaaccacaaaatattgtcatgcatggatccggaatgtggtatgaggatgactggtctagatagaattttcaaattatgcttaattacctgtgcttgtaattgagggaaagatctctatgaccagccttgcagcaatccggattgtctgtatttgcatgagattggctctcaagaagatagttttaccaaggatgaaataatttcagcatacactagaagtcgagttcaacaaatcactggtgccac

SEQ ID NO: 43682 - DNA, 284 bp, Glycine max
ggcgaaaatggtgatatacaaagaatggattgtagtagtcgtggtggttggcgctttctgatgcacgtgtataaaaggcattgtactttgaaattgcaattggtgtacatttcctctccctctccattttttgttgctccctcaaagtttgagagattcaggttcagatctgatcaacaaaaatggcgactgtgtccctctcgccaaatacaagctcgttttcttaggcgatcaatcggtcggcaaaaccagcatcatcactcgcttcatgtatgacaaattcg

SEQ ID NO: 43683 - DNA, 279 bp, Glycine max
aacataattggagcaaaatatttccgcatggatggttcatttggagaagatgacataatatcacccagggattcaaatggccatggaactcactgtgcatccactgctgctggaaactcagttgagtccacaagcttctttggccttgcctcagggacagcaagaggaggagttccatcggcacgaatcgcggtgtacaaaccttgttggtcatctggctgcgatgatgccgacatccttcaagcattcgatgaagccatcgcagatgatgttgacgtc

SEQ ID NO: 43684 - DNA, 281 bp, Glycine max
cttcgaatctggaagccacagtgtggtggaacttaccaaagctaactatgaaaactgtgaagtcgataacaacatcaaagcctttaatagaggaccagctagagtcaccctcaatcgcacaggagaattctacttctcctgtaccttctcaggtcattgcagcagtggccaaaagctaagcattaaggtcactgattcttcatcaccagcacctcagaaagcaccagctgaaggtccttcagcttctgctcctccaccacagaatgctccagctgaaggtc

SEQ ID NO: 43685 - DNA, 268 bp, Glycine max
ccgaatcgaggcctccgaggacacgtggccgccgcggaagagcgtcgtctcctgcgccggcgtctgccgcagctggagacatatcaccaaagacattgtcaaaacgcccgaactctcctccaagatcaccttccccatttctgttaaacagcgctagctgaagatgggaagttccttcttgctgcacgcaaatgcagacgtccaacctgcacagattatatcatctctcttgacgcaatgatatgtcaaaggggagcaactcctatgt

SEQ ID NO: 43686 - DNA, 280 bp, Glycine max
cgccaaccaaaaccttctccgttaagaataactctctctctctctctctgaaatgggcgaggaatctcaagggattaagctgtttggtgcgctgattacattgaagggtggggaagtaaagaaaggagaaaaaggaagcgaatatgagagggtggagaagagagcagagaagataataccctgcccgagatgcaagagcatggaaactaaattctgttacttcaacaactaaacgttaatcagccgaggcatttttgcaagagctgccagaggtactgga

SEQ ID NO: 43687 - DNA, 226 bp, Glycine max
gaagactgaatctatcagaatatccactggattcttcgctctttgcctatgtttctccccagtctattaactccaagcttcttcacacgtctcagttcaggttcctagacaaagctgcaattataaccccacaagacggcataaacccagacgggtctgcatcagatccttggagtctttgcagcatgcaacaagtggaagagctaaaatgcttgctgagagtgat

SEQ ID NO: 43688 - DNA, 270 bp, Glycine max
cctcgagccgaatcggctcgaggacatttttcaaacatttgaaggacacaacacagttctgcaccaacaggttgcaggtgatattttgaaacaatacaagggaaagttcaaaggtggaactttcgcagtgacatggaactacttgagagaatccatgaatacttatctgtcacagccaaatccggttactgctcggtgggaaggcgaagaccatttacgagatcctaaatttcattggatgcgttcagataccgaacatctagattactt

SEQ ID NO: 43689 - DNA, 277 bp, Glycine max
aaaggagtgatttggagtttggagcgactgaactaatcattaatttgcactcgctgtttcagcttcatcacccttcttttgcatcatttatatctcttgagaaatggcacaagaaacctttctattcacatctgaatctgtaaacgagggtcaccccgacatgctgtgcgaccagatctctgatgcagtacttgatgcgtgccttgaacaggaccctgacagcaaggttcctgtgagacatgcaccaagactaacatggtcatggtcttcggagaga

SEQ ID NO: 43690 - DNA, 272 bp, Glycine max
tccggccaactggatcaccagctcttcccgcccaaccacaccggtttcctcttttcacggtttgaaactctccaaaagtagcagcaaatcatccaagcaaacctgctcaatatgcttaaccaaaatgaagcaaggatctggccatgctatattcactgcagaatgttcacattcattccatttccagtgcattgcttcaaatgtgaaacattgaaaccaaatatgtccagtgtgcagagcaaagtggaaagaaataccttgtcaggtcccag

SEQ ID NO: 43691 - DNA, 261 bp, Glycine max
cgaaattcgatttcccccaatttctagggtttcgctgaaaccctaccctgcgattttgcgattcttccttcgaactttacttggttttcagttcccttttaaccatccagatcaccatgtcaagtttggacgagccagttggccttgacaagttgccaagcatgagtaccatagatagactccagaggttctcatccgctgcttgctgtcccagagtagataattttactttgggtctgggaaactgctggattgaaggac

SEQ ID NO: 43692 - DNA, 258 bp, Glycine max
cgcgccgattgatatttgggaatcgcagtattcgaaatactactatggatgcaaagagagagggcgacatttccgtcctgctgtacgtgagcggaagtccaaaggctacttgttaattgcaactagtggaggactgaaccaacaaagacatgggataacagatgcagttgttgttgcaagaattcttaatgctacactagttgtacctgagttggatcatcaatctttttggaaagatgacagtgactttgccaatat

SEQ ID NO: 43693 - DNA, 266 bp, Glycine max
aaatcatccagagaggatgcaaaaatgtaattagcaagctccaaaggagaatagacaaggaaggccatcaaattgtacctttgctaacagatttgtggaagaggatggagaattctgggcatgcaggtggatctgggacaatctgttggatttacggaagattgaccagcggattgatagaatggattatagcggagtaatggagcttgtgtttgatgtacagttcatgttgaggggtgcaatgcatttctatggatactcatatg

SEQ ID NO: 43694 - DNA, 257 bp, Glycine max
gttggacaagaacaggagaaaggcaagctgcaagaatgagagttaggtaccttaaagcagttctcaggcaagaagtagcatactttgatttgcatgtcacaagcacatcggaggtcatcaccagcgtctctaagatagcctcgtaattcaagattgtcttagtgaaaaggtcccaaactttttgatgaatgcgtccatgtttgttgggagctacatagtggcttttgcattattgtggagattggccattgtggggt

SEQ ID NO: 43695 - DNA, 269 bp, Glycine max
aaaacatggggtggtttttcctttgaatgtttcacacagtggaagtctcttctcaatttggccattccaagctgtgtttcagtgtgcttggagtggtggtggtatgagatcatgattttgttgtgtggtttgttggtaaccccaaggctactgtggcttcaatggggattttgattcaaaccacttctttgctttacattttcccttcttcattgagcttcagtgtgtcaacaagagttggcaacaagcttggtgcacagaagccctca

SEQ ID NO: 43696 - DNA, 257 bp, Glycine max
tttttgaatactttgagcatgagacaccttataatcgtgaaccattggcaaataagatttctgatcttgaacggcaatttccagagttgaaaacatactggagctgtgatctttcccctgcaagttgggttcatttgcttggtacccaatatacagaatacctactggtccaacattacaaagcttgagtgcctgcttcttgacctttcattccctgtcaacaactttgcagagttcaaatactgatgggctacata

SEQ ID NO: 43697 - DNA, 263 bp, Glycine max
caacagcacaaagcgggttactgtatgttcaagctaacatctctctctctctatcttagtgcctccttgccagaagttaaaatggcccaagaacactttcctattcacatctgaatcagtgaacgaggggcaccctgacaagctctgtgaccagatctccgatgctgtgctcgatgcatgcttggagcaggaccctgacagcaaggttgcctgtgaaacctgcaccaagaccaacatggtgatcgttttcggagagatcacaa

SEQ ID NO: 43698 - DNA, 202 bp, Glycine max
cgacgtcttcgacgagtccaagctctcccgcctccccggcacctcggccattggccacgtccgctactccaccgccggccaatccatgctcaaaaacgtccaaacttcctggccgactacgcttcgtccgcgcgtcgctcaacggacttgcactacgtcctcgacgccgaacacaggtcactcacacactcgcacggtgctc

SEQ ID NO: 43699 - DNA, 269 bp, Glycine max
ggaaggcactgcttaagggcctcagcccagctgaaaatcggagtattcctccactgaaatatgagtacttttatggcctcttacgtgactttcccgacttatcatttacaatcaatggtggtattgctagtattgatgaggtcaatggagctctaaaggctggggctcatggtgttatggttggacgtgcagcatacaataacccttggcatattctgggacacgttgatactgcaatttatggtgcatcaagtagtggtcttcacgtc

SEQ ID NO: 43700 - DNA, 271 bp, Glycine max
ctcgagccgcaaaatttgtcatcacggataaagtggttactaaggatgtccaaaagaggtatgagcaagaggtcattgaatttggaggctcttcaatcatgttaaccatattagctacagtggcattgctaaatctttttggtctcctttggggaatgaagaggattatgatggatttggaattcagctctagccaattgatgatgcagattacactgagttcattggtggtaatgatcagtttaccagtgtatgaggcacttttcttcgt

SEQ ID NO: 43701 - DNA, 191 bp, Glycine max
tctggttatatctgagtctcgatctgatgcacttgttcatatagctgcattggcaattcgaagtgagaatggtttactgctctaaaggtggaacataatcccgacgatcatatgcagtcttactcaaggtcattacttcagtgatgccagatactctcggtgacagactgattgggcttgtgatttcaaga

SEQ ID NO: 43702 - DNA, 137 bp, Glycine max
ttagaacatcgagtctcatgacttccttaagctccgtagtgctggtccttgtagctctaattctattacctcatgttcttgctgactatgagaacgtcccggtgtaccagattcccattgagaatctagcactttac

SEQ ID NO: 43703 - DNA, 217 bp, Glycine max
catgtgtttgacttgactcgtccatcttcgtcgttatcgtctgcttttgttgtttgtgtgattgttctttctctcatctgaaaatgtcttgctgcggttgtaaatgtggttgcggaagcgcctgcaagtgcggcaactgctgccgatgctgctagatgtatccagacttgagcgactccgagtcaaccaccagtgagaccttgggcatgggagtggc

SEQ ID NO: 43704 - DNA, 213 bp, Glycine max
cttatctctctctctctctatctctgccgaatcactgttcgctcgacccttccacttcgtattccctgtttccggtattcgcgtcctatctggctgcacagctggcatccacttacgatgctctgtcccgtaccagatctggatcaactgtgacaaggttgggtgcagtaatgttgtatcaatctgccttctgaccggtacgcgtggggatac

SEQ ID NO: 43705 - DNA, 262 bp, Glycine max
gatgagacaggctctcgctaaagatcaaccttggaagttgaaagaatcacgtgtgctggagatattgcaagcgatagacagcaacacagatgggctagtggatttcaccgagtttgtggcagctacattacatgtacatcaattggaggaacatgattctgacaagtggcagcagcggtcacaggctgcttttgagaaatttgacttggataaggatggctttattactccagatgaacttagaatgcatacgggtttagag

SEQ ID NO: 43706 - DNA, 252 bp, Glycine max
gtccactttgaaggagcttgatggtactaatcctggacagaatccatatgtcctttgtcgtttgtttaagaaacatgatgagagccttgaagtttcacactgtgatgaagcagagccgactggttccactcctgtggcttaatccacagagggaataccatctgatcttgctggtggtgcaggattccccttaaaagttaacggagatggttaacaacaaggaatgattccttgaaaatccgagggaggcat

SEQ ID NO: 43707 - DNA, 258 bp, Glycine max
ggaaggaaaaatggagttgttcttctacgcggtgttcggcggtttgggagcggttgttgcagtgacggagctgagcaagagcaacaaggaccgaatcaacacctcttccggattcaattccttcaagaacaactaactcatcggctaatccctcatgatgggtggaaaattggtaacagggccaaaaggccaataactttaccagtccttatggttttgggaggggggccttaggccactcctccatgccgggtttgg

SEQ ID NO: 43708 - DNA, 241 bp, Glycine max
gctgacctgacaatgattataggagccatgtatgctgctgtcattcttgttcgcattaacaattgccaaactgttcaaccaattgtagccgttgaaagtacagtggtctatcgcgaaagagctgccgggatgtatgctcctttggcttatgccctagccccggggagcagattgatttacttcaaagaataattttagtttctagtgttcaatgcttgttatgacgtcaatgccgtgttac

SEQ ID NO: 43709 - DNA, 249 bp, Glycine max
tttgatttcaactttgaagtttagttgttttgtggaatggcagcgaagagcaaaatcctagtccttggaggaacaggatacattggaaaattcatagttaaggcaagcggaagagcagggcaacccaattttggcctaattaagagggacaaccttttctaatctggaaaggcttaacttaatgagaggctcaaagggtcctgagttaatcctccttaaggggaaggtaatggtcaaggaaggcttggt

SEQ ID NO: 43710 - DNA, 239 bp, Glycine max
cgagcccgtgcccatggaattgacgggggaggagaaggacgcagagcagaagaaggctgaggctctgaaggaaaaggaagcgggcaatgcagcgtataagaagaaggattttgataccgggattccacaatacaccaagggcttggaattggatgaagaagataattcggaacccaataaacggggcggcggccaattgggaattgggaaggtagaaggattcattaaaggatgggaac

SEQ ID NO: 43711 - DNA, 234 bp, Glycine max
cacacgtaaacacattcagacaccaccatgataactctagctccttctcttgatactccaaaaactgatcacaaccaagtttctgatccccaaactagccatgtcttcaaatcaaaattaccagatatcccaatctccaaccacctccctctccactcctactgcttccagaacctctcccaatttgcccaccggccttgcctcatcggcggacccgcgtccaaaccttcacct

SEQ ID NO: 43712 - DNA, 213 bp, Glycine max
gcatgattgtggtgtgctttgttttcatttcatcatatgacagccttgtgggtttctttggtgtttcttgatgcatacttaatttactttattattgtgtatttatctcttccatttacaaaaaaaaaagtttgtgtaggtttccttctttgaagtaaaaagaaatcaactatgtactaaaaatggaataatggtgtgttatattcgtgtttt

SEQ ID NO: 43713 - DNA, 229 bp, Glycine max
cagaccttattttttctgtcatttgcttcaaatttcaggagattaattatgcgctcaacccacaacaagaataggccttgctggattggctgttaatgggcaaaatctggcactcaatattgcttgaaaagggcttcccaattccggttaacaacggaaccatttccaaggttattgggccataagacgaagcaaaccaggaaggaaaccttcaatttatggggaacaa

SEQ ID NO: 43714 - DNA, 262 bp, Glycine max
  unsure (1)..(262): unsure at all n locations
ttcattcttataataatcattattttcttccacaccttcgtccgcttctgncgccgtcgccgccgtcgcctcttctctcgttcgcttccgaccaattcctccgccgccgcctctctcgacgacccgtgcctcgacccttccgtcatcaagtcccttcccacttttactttctccgccgccacccaccgctctctccaggactgcgccgtttgcctgtcggagttcgccgacggcgacgagggccgcgtgctcccgaattgta

SEQ ID NO: 43715 - DNA, 247 bp, Glycine max
ctcgagccgcttttctcttcttattttcaaacatggagtggcatagcaggcacaccataggccaaggctcatcagccaccgtctccaccgccacatgccgtggcggtgtcttcgccgtcaagtcaacggagcttccacaatcaagagctctcaaaaaggagcaaaaaataatgtcctccccaagtagtccctaagggggtgcctaccaagggtgtgacattaacattggggaccacaagcccctggt

SEQ ID NO: 43716 - DNA, 204 bp, Glycine max
tataaacctgattataacagattactgcatgccaggaatgactggctatgatctgctgagaaaaatcaaggaatctaaatctcttagaaacataccagttgtgattatgtcctcagagaatgtagcatcaaggatcaacagatgcttggaagagggagcaggagagttctttctgaaaccagttcaacaggcagatgtggacaa

SEQ ID NO: 43717 - DNA, 100 bp, Glycine max
tgataagatactttgtatgcatggtggactctctcctgagttacacaatcatgaatcagataaagagtttgccgcgtcctattgaagtgcctgaaatggg

SEQ ID NO: 43718 - DNA, 154 bp, Glycine max
tcgaggattcaatttattggcagttaaaggatggtctctcacctgaggctgaggttgtttatgtgggatctctcaaggctgatgttgatgcaaatgagcaagagaaagtttcccttcagttgctggatggaatcaattgcgtgcctacttttat

SEQ ID NO: 43719 - DNA, 137 bp, Glycine max
tttcaaacagtcggtaactctttcttttcttttctttctttctccgatcgcatcgctcgcaaccacaatcatgccttcccgaagaagaactctcttgaaggtcatgattctcggtgacagcgggggtggggaagacg

SEQ ID NO: 43720 - DNA, 249 bp, Glycine max
cgaattatgagcaaggccaaggctgctgctgctgcttccaaggcggcgaaggctcccaagaagttcaccatcgagtgcactgagcccgtggaggatgacattttcgacattgcttctttcgagaagttccttcacgaccggttcaaggtcggcggcaaggttggcgtgctcggcgatcaagtcaccatcacccgcgagggctccattatcactgttgtctccaaagtcgcgttctcaaaagcttacctg

SEQ ID NO: 43721 - DNA, 185 bp, Glycine max
caatcacaagctctcatgatttcggtttagcaatagatggaccggtaaaagaccatacacatatcacgactcatgtgatgggtacacatggttatgctgcccctgagtacatcatgacaggccatttgacaaccatgagtgatgtatatatctttgtagttgttctcctagagctcctcacagga

SEQ ID NO: 43722 - DNA, 258 bp, Glycine max
caggacaacgaaggaatccccccggaccagcaacgtctcattttcgccggtaagcaacttgaggacggccgtacccttgctgactacaacattcagaaggagagtactcttcacctcgtcctccgtctccgtggtggcatgcagatcttcgttaagacactcaccggcaagaccataaccctagaggttgaaagctccgacaccatcgataacttcaacgccaagatccaggacaaggagggtatccccccggaccag

SEQ ID NO: 43723 - DNA, 264 bp, Glycine max
ccagaatattgtaattggtaatgtggctctatatggggccacatctggtgaggcatatttcaatgggatgacagctgaaaggttttgtgtgcgtaattctggagccaaggcagtagtggaaggtgttggcgatcatggatgtgagtacatgactggtgggatagtagttgtgcttggaaacacaggcagaaattttgctgcaggtatgagtggtgggattcttacgttcttgatatggatggcaaattcctatctcggtgcaac

SEQ ID NO: 43724 - DNA, 257 bp, Glycine max
  unsure (1)..(257): unsure at all n locations
aagcaacctctaacctacctctttttcttctctctcaacaacttcaccttcttcactctcgatcatgacacacntcaaaggcaagtaccatgatgagcttatcgccaatgctgcgtacattggcactcctggaaagggcattcttgctgctgatgagtcaacagggacaattggcaagcgtttggccagcatcagtgtagagaacattgaatccacaggcgagctcttagggagctgcttttcactgctcctggtgt

SEQ ID NO: 43725 - DNA, 251 bp, Glycine max
cagatattaatgatgttgagtatcaatggtatatacgccgaactagacgatatatatcgcataaggcgacactgtctaccgaggaggccaaggatcccctggagaaggcagtgctagatggtagacagctagccctgaagattagtgccaattctgtgtatgggtttacaggggctaccattggtcagttaccatgtttagagatatcatcgagtgtaacaagctatggtcgacaaatgatcgagcacacg

SEQ ID NO: 43726 - DNA, 266 bp, Glycine max
accaaaccaaaaccccacttccaatttcctcttctacgtgcctctagcttgttctaatttgaataatttggcatggacaacatgaggctcatgaggaaacacaacactactcacacatgcatggccaataattcacacacaccttcttcttccctagccatgcacaaaggttcccacatgatatccaaaaccaaaccaaagattcgcataatccacatatttgcacccgagatcataaaaacggatgtggagaacttcagggagct

SEQ ID NO: 43727 - DNA, 251 bp, Glycine max
gaagaacctgatcgatatgttctgcttgggaaccatagagatgcatggacgtatggtgctgttgatcccagcagtgggacagctgcactactcgatattgctcgtcgattttctgctctattgggcttgggttggaagccgaggaggacaatcattctctgcagttgggatgcagaggaatttgggatgataggatccactgagtgggttgaacaaaaccttattaatcttggttccaaagctgtagcata

SEQ ID NO: 43728 - DNA, 157 bp, Glycine max
cccttgccgactacaacatccaaaaggaatccactctccacctcgtgcttcgcctcaggggtggcatgaatcttgtcaagatttgatggagaatccctgagtgatctgaacatatattagcaacagcagagtccataaagtttttgacatagtgaac

SEQ ID NO: 43729 - DNA, 263 bp, Glycine max
cctgtgttcactctgcttctcttgcggctagagtttcagcgcagtttcttctagacttaatgaacatgggtaaggctaaggttcacatcagtattgtggtcattggccatgtcgactctgggaaatccactatcactggtgacctgatttacaagcttcgaggcattgacaagcgtgttattgagaggtgtgagaaggaagctgctgagatgaacaagaggtctttcaagcatgcctgggtgctggacaaacttaaggctgag

SEQ ID NO: 43730 - DNA, 270 bp, Glycine max
tatcggggacagagactgatgatcagatcctgtagcgactacgtattgctgatgctgagattgagcaagggtaatcttcgcaaatatttgatttcatcctatacaatgacaatctttaggagtgtcatgagagacttaaggtaaatgcttctgaagcaaagacctccagagtcttttggatgtcttttgaccattaatcatcctgatgttaagtatcatttggtgcagaaactattgggacttgacggctatgtcactgctccacctata

SEQ ID NO: 43731 - DNA, 258 bp, Glycine max
ctcgagccgctggatttaggattgataaattaagccatggtcatggaaacagcacaactgctaggtcttgcaaaaggggaatgagaaggggatcctaaggactgaaatcaattgggcgctcgcttgggttgggagtatctagggctgtgttcccagaagatctgaaagtgtcagaaaagaagatatgtgatcctcaagacaagtttctgctcgtatggaataaactttgtgttatctcatgcattttggccggctcta

SEQ ID NO: 43732 - DNA, 251 bp, Glycine max
ctagttttcgtagcatggccatgccatggcgcaggctaggaaaggttccctctccgaatgaaaactggctatggtcagcgttcttcggaggtaaaatgcggaagttttaaccttgctgtggaagcagagaagatccgagataggaaaagcattcctgaagagtgcgttgaaccaagaaaggagtacattaatggcgaacaatttagatcagactctaaaacagttaaccaacaaggctttctttgatgcta

SEQ ID NO: 43733 - DNA, 280 bp, Glycine max
gccatggagcagctttacagtcttggagcattggatgaagagggccttttaactaaattagggaggaaaatggcagaatttcctttggatccaccgttgtctaagatgttgcttgccagcgtggaccttggatgcagtgatgagattttgaccataattgccatgatccagaccggaaatatgttttacaggccaagggaaaagcaagcccaagccgatcagaagagggcaaagttttttcagccagagggtgaccatcttaccctacttgcagtttatg

SEQ ID NO: 43734 - DNA, 274 bp, Glycine max
tttggagttggggtcccattgttcaatcacaatgttagaagtactcatacgatcaagtggagtttgtggataatacataaattattgcttgctgcagcatatggcttcattttatttgcaaatttctccaaatggagagagaagctgcctccaaggccatctttccacaactatgttgctgtaatgtttgtcttcagtgtgattaccctgtttgcttgtggactagcagcaattgacgctggacttggcaattggttgtatgatctcactgtgc

SEQ ID NO: 43735 - DNA, 272 bp, Glycine max
tgtagcaggtggtatttgtgattcagtgtgcggtgaagtggtttctaagcaccgggcggcggccagtgccgttggtggtggcggtgttggttttcgtggcagagttgaatggggttggggtggggatggaagaattagctaaggaggttcatgctaaggtttccacatgtagggctatttttaaagagttgcttgagacacttgtgaaggttgcacaggtgttgccttgggggaaggatgttaccgtgaagaacattgttaagaatgaccga

SEQ ID NO: 43736 - DNA, 278 bp, Glycine max
ggaatgtttgaggcagagttacatgatattcttagcaaagctgaagaagcaccatttttcacctggtccagaatcatcggcatgccaactttttccacttgatgatatacctttcaattctttatccttttcatcaatggtggttaccttaagtttgtatgttgaggatattaaggctggaaagctcaaattccattatggaaccattaacaaaaggccgggtacaagtccttctgatattcgtgcctatacactggatcaccatatgcattcatgag

SEQ ID NO: 43737 - DNA, 238 bp, Glycine max
  unsure (1)..(238): unsure at all n locations
gccgagatggcgtgcatcaggttatgatgttgaatccagtgcttcaagtgatgttattcttaaggccagtgctgctagtgtggcganagagaaagtatataagggacagacagttggcccagtcagatttcaaagtaaatttcaaaattatcttgatntgaanattgatgatggaaatattgatatataggactaaactcatgaacagatagattttcgatcaaagcctaggtttgat

SEQ ID NO: 43738 - DNA, 266 bp, Glycine max
cacttgtcccgccacaagcccttctgtaccaatcgatcttgctaactccccaatcgcgcaaaccacgcgtgacgccgatacgccctccgtggacaccgccacgtgctcaaacgcgaaggcgagaactgccacgtcctcgtcctagaccttgtggttggtcggctttccgtggtagaggtcgtcgttgtccatatagggcaggttgtcgtggatgagcgccatggtgccgttgacgagctcgcatgtggtgatgcagagcacggggc

SEQ ID NO: 43739 - DNA, 209 bp, Glycine max
ccacagtcagacacaataaaaatcaaagagcataatgtcaggcatcattcacaagattggcgagacccttcatgtgggagggcacaagaatcaggaggagcataagggtgagcaccatgctggagaatacaaaggggagcacatggtgaacacagtagtgagtacaaaggagagcatcatggtgaacacaaagctggagacccccatgg

SEQ ID NO: 43740 - DNA, 283 bp, Glycine max
ggttgatgtcggagttgcgtaaaatggtctccgtgtctggtgatccaatccaacgactgggagcatacatgttggaggctcttgttgcaaggctggcctcttcaggaagcacaatctacaaagtcttgaaatgtaaagagcctactggtagtgaactcctttcacacatgcatctactttatgaaatctgtccatatctcaaatttgggtacatgtccgcaaatggagctattgctgaagccatgaaggaggaaagtgaagtccacattattgattttcagat

SEQ ID NO: 43741 - DNA, 279 bp, Glycine max
cgaaaagtatcatcggcccctgttgctattgatgccccgggaggctttctgttcgagtggtggtcggttttctgggatatatttattgcaaggacaaatgaaaagcactcagaggttgctgcatcgtatattgagacacaattaataaaggcaagcgagcaacaacagcagcagaaccagcagcagccacagccccagcaatcacagcatcagcaacaacacatgcagatgcaacagctcctgttgcagagagcacagcaacaacagcagcagcagcag

SEQ ID NO: 43742 - DNA, 207 bp, Glycine max
caaagtgatgataggttcccgctgcatcactttgagtgggcttggggaaactgaaggaaaatctgacattttggaatttgaaaatgttggattgaatggatgtgttcgagccagtggcctggatcttggtggtttgagtgaatgttttgttaccctccgagcttggagattagatggacgctgtactgaactttctgttaaagctca

SEQ ID NO: 43743 - DNA, 267 bp, Glycine max
ggtacaccggagttcatggccccagagctttatgaggaggaatacaatgaacttgttgacatatattcctttggcatgtgcatcttagaaatggttacctgtgagtacccgtacagtgaatgtaaaaatcctgcacagatatataagacagttacctctggtataaagcctgccgcccttgctaaagtaaatgatcctgaagtgaagcaattcatagagaagtgtctagttccagcatctatgagattgtctgcatctgaacttctg

SEQ ID NO: 43744 - DNA, 248 bp, Glycine max
gtccgtcaaacccttggccctgatcaggccctctgccgccgccgacgtcgccagagtggtgaagcacgcggcggcgtcttctagcctcacggtggcggcgcgcgggaacggccactccatcaacggccaggccatggcggagcagggcctggtcctcgacatgcgcgccatccaggacccgtttgagattctctggatagaaggttctccctacgtcgacgtttcgggaggggcattatgggaagacg

SEQ ID NO: 43745 - DNA, 258 bp, Glycine max
cggaacctcaacatgacatgaaaggtaagaagctctggtgaactcaactcactcgtggtaagacagaagaagaatatcgtttcgctcttaccttcttcaccttcattctctctctagagaatggaaccggaatccggaacttccacttctcggaatccttcgcagttgtcatgggtgaatctgtctagaaatctgttattagcgtatcaaagctttggtgtggtgtatggagatctgagcacttcacctctctatgtc

SEQ ID NO: 43746 - DNA, 255 bp, Glycine max
ggccttctttgaggaaccaattatgctagttgcatttgtcttgttaggaaggactctcgaacagagagctacgattaaggcagccagtgatatgacaggacttcttagtttattgccaccaaaagctcgccttcttttgaacaatggggaaacagaggttggctcggttgttgaagttccttctgacagtctttctgttggagaccaaattattgtattacctggagatcgtatttccagctgatggagttgtga

SEQ ID NO: 43747 - DNA, 250 bp, Glycine max
agaaaagagaattagggtcacgagggtttcatcctgcggcatcagacatgggaggaggcaatgggcaaaaggcaaagatggctcgcgagaagaacatcgagaagcagaaggccgcctcaaagggaagccagctggattcaaacaagaaagcaatgtcgatccagtgcaaggtgtgcatgcaaacatttatgtgcaacacatcgggagtgcagtgtagggagcatgctgaagccaaacaccctaaatctga

SEQ ID NO: 43748 - DNA, 266 bp, Glycine max
cggggctacccgctgagtttaagcatatcaataagcggagagatttgaacaaattaaaactcactttggctttccccacaatgacgagtttgtatgtaaaaagcaactaagtttccggttgtgaatcattaattaattagtactgttcttatatatctgcatactagtttgagtcaaagaagaaattaaggaaattaagaggtgatcaaagattattaattagctcttttgctgatgagagacacagtgaagttagttgtttatta

SEQ ID NO: 43749 - DNA, 260 bp, Glycine max
tttgttcacatcctcaacagccaaaaatttagctcaactccaaaatatggagatagaattttgtgaatcaattaaagagatagtgtctaaggagggggatgaatcacatgaggatgagataacatttccgcagctcaattgtttggtacttaaagacttaccagatctcagaagcttctacgaagggagtttaagtttcccatctttggagaaattgtcagtaatcaaatgccactggatggaaactttatgtccgggta

SEQ ID NO: 43750 - DNA, 191 bp, Glycine max
acatattcgtcgaacacgtggttgatgtcgaactctccgaccgtctcgtccacgtcctcgcttcagcagcacaacaagaccaaaccctcgatttccaagacatcatcaaacgtttcgcgttcgacaacatctgcaaaatcgcgtacgggtatgacgcagagtaactgacgccgtcaactgaacagagtaag

SEQ ID NO: 43751 - DNA, 262 bp, Glycine max
caaatatgcactcatggcttaccactatgaccctcaagtctctctacctgagctctcatccatttcactctacactccaaaacttgttgaagttgtcaaagagaggccaaaatggaatgccacagaattcttcaaacaatccaccccaacacgccttaccttcaccaactaccttgcagctggggagcagtgttcttcccaaagcattggagagagttctatgtgtacatgaacatgaggttcactgaggatgccaagtcca

SEQ ID NO: 43752 - DNA, 267 bp, Glycine max
tacccacccaaagctgttgctaagatggccgctgttgctgcactgtgtgtgcaatatgaagctgatttcagaccaaacatgagcattgtagtcaaagctcttcaacctttgttgactgcacgacctggacctgccggtgaaacaccaaattaatctttgtatcactttctctctatatttgtgagtatgtgcacaagtgtgcatgcaaaatataagagactgcttcagaagctggtggtttgctttgcaccggttgtacggtgagga

SEQ ID NO: 43753 - DNA, 192 bp, Glycine max
actagcttgctaggtctcaaacagagagagccatactgcagtctctggaccatccacatctacccattttatatacacactttgagaccgacacattctcctgcttggtgatggagtgttgacctcgtggggactgcatgtacaaatgtaattacctactgcgaagtactcttctgagatttctgccaggat

SEQ ID NO: 43754 - DNA, 275 bp, Glycine max
cacggttctctctctgaggttaattgttataacgatagagtattgagcacgaggaggctatgacacagcagagtaccgatggatactggaacctgcagatcgtgatgctgttttggccaatgttgccatcaagagtggcaaaactacaatgtcattgtggaaattgccactatcctctccccggaagagcttttggcggttagacgcgcctatctcaaccgctacaagcactccttggaagaagatgttgcagctcatacctctggccatctacg

SEQ ID NO: 43755 - DNA, 266 bp, Glycine max
atcactttatgactccctcagaaacgcaaatcataaaccgccaaaactcgttgacctagactacaacggcgttgaagaccaatcctcaacacaagaacaaatatcaaccaatctcaacaccatgtaccggcactggtgtcaagttcaaagactccaacgctcttcttcggtagcccttaccgtgcaggagaagatagtgatcccggtggtggcactgtggagaacattcctcacggtccggtccatatatggaccggtgataacac

SEQ ID NO: 43756 - DNA, 265 bp, Glycine max
cagaagctagtttccacgattttcggatcgacaagtcaaaagagcgatatttcactcaccagagaagaaccacaacaatggcggatcaactcaccgatgaacagatctccgagttcaaggaagccttcagcttgttcgataaggacggcgatggttgcatcacaaccaaggagcttggaactgttatgcgttcattggggcaaaacccaactgaggcagaactccaggacatgatcaatgaagtggatgctatgggaatggtacc

SEQ ID NO: 43757 - DNA, 202 bp, Glycine max
  unsure (1)..(202): unsure at all n locations
tgcgcttcagcacaatggggtgctacaagtatgtttcggagctatggcgcaagaagcagtctgatgttatgagattcttgcagcgggtgacgtgctnggagtatcgccagcaccattctatgtcgtttgacacgtcactcgccagataagtcgtcgcatggttcaagctagcaggtacgtgatacgtgtcgctacgaggtgc

SEQ ID NO: 43758 - DNA, 254 bp, Glycine max
ttccttttgaaggttagaagtgctacaatacaaacaatgggaggtactcagggagatgtgaagttttgggtaatgtggggagcccattttgtgtgaagggtcaagattgcccttaagttgaagggagttgaatacaaatttttggaagaaaatttgggcaacaaagagtgatttgcttctcaaatacaaccctgttcacaagaaaggttccagtgtttgttcaaaatgagaagcccatagcgagtctcttgtga

SEQ ID NO: 43759 - DNA, 249 bp, Glycine max
ccttgctgagtaagttacggatgacgtatacgcacagatcacgttggtgccggaatctaatcttgatgatccgatgaaccctgacccgtgcactgctgttcctccaagtgcaccagttcactcgttcatcaagacttgacagcttcagataccagcacccatggtggcttctctgttctcaggcaacatgccatggaatgccttcctgcgttggacatgtcacaaccaggcccatctctggaattggtt

SEQ ID NO: 43760 - DNA, 254 bp, Glycine max
aaacaaaaagaggttgatgcaaatggtagttctcaattgcagccatcaccatcaagtaattggttttcttcaaagtcaacaaaaaaggtgcctctttcctctgtgacatcaataattgaaggcttgaagagctctacattcagaagttgaagccattagaagttaattaccgttttaatgattttgtatccccattactgacaaatagtgactttgatgccaaaccaatggttatgcttttgggtcagtactca

SEQ ID NO: 43761 - DNA, 282 bp, Glycine max
aggtaattatatacaagactgtccaagagatgccacctaaccccaaggagccttgggaccttgaaatggactatgatgacactttgacgttggaaattcctattgaacagctaccagatggtgatggtgcagatatagcaatttctcccaatcaggttggaactcatactgttcaaggggtggcctccacttcttcaaccggtgtggctactgctgagcctgatttagaattgcttgctgtactgctaaaaaatccggagttggtatttgccttaacttctg

SEQ ID NO: 43762 - DNA, 276 bp, Glycine max
aaacagcagtgatagagctccaaaatagattgaaagcaagtaccatggaggtaaagatcttcaatctaaaggttaagaccttacagtctgagaattggagattgaaggaacaggttgctggtcatgcaaaagtgctggctgagctggagactgccaaagcgcaagtcaaattgctcaataagaaaattaggcacgaagctgaacataatagggagcagatcataactcttacgcagaaagtttccaggttgcaagaccaagaatgtaaagatgttg

SEQ ID NO: 43763 - DNA, 226 bp, Glycine max
  unsure (1)..(226): unsure at all n locations
ttctcgctgtttgcggtccttcactcgccttttctcacttgtccccgtctnctccgatcttgtacgatcatcatctgccggcccttgagatggtcctgctttcggattcgatctcggttccacctacccccccgtcggattgtggcaccactaccgtgtcgacatcatcgcccatgaccagggttacagaaccacgccgtcttacgtcgctttcactgcttccgag

SEQ ID NO: 43764 - DNA, 275 bp, Glycine max
ggagcatgaacccaaggttgggtgattttggtttggcaaagcttatggatcatgacaagagtcctgtttcaacactaactgcagggacaatggggtacttagctcctgagtatcttcagtgtggaatggcaaatgagaagactgatgtgttcagctatggtgtggtggttcttgaggtggcttgtggaaggaggccaattgaaagagaggggcagaagatggtaaatttggtggattgggtttgggggttgcactctcaagggacgatcattgag

SEQ ID NO: 43765 - DNA, 276 bp, Glycine max
cttccgcgctaattttagggtctgagcaatctggttggtagaacctcttggtcttagagagtcaagttttatgtctggattagacgatcaaattcctactgccttcgatccttttgctgatgcaaatgctgatgactcgggtgctgggtcaaaggagtatgtgcatattcgcgttcagcagcgaaatggtaggaaaagcctgacaaccgttcagggattgaaaaaagaattcagctataacaagatacttaaagacgttaagaaagagttctgttg

SEQ ID NO: 43766 - DNA, 278 bp, Glycine max
ctcgagccggtggaaaacatggctgagacaagtaagaatggagctagtactggttgtgctcaggaacttctaggaggtgaagaggaggaagagagatctgtggcatcggtggaaaatcaacttcgtaaggaaatgactgtatatgagaaatttatcctggggatgctcacaaactttggtagcatggcattagaccgaattcacaatactctcaagatgttttgcattgccgatcccccatatgacaagtcactccagcaactacaaagctttttgtc

SEQ ID NO: 43767 - DNA, 264 bp, Glycine max
atagttttctcacaaaggaggaagaatggcatctttcatttcactctctttgttgcttctctttctcaattaccccttcctttccctctcaaccaaccctgaagaatggcatccaacaggggtcaaggtggaattcagcagttgttggctgctgaacaagaggcacaacggattgtgaatgctgcaaaaaatgaaaaattggctaggttgaaacaggccaaggacgaggctgaaaaggagattgctgaataccgagctcaacta

SEQ ID NO: 43768 - DNA, 288 bp, Glycine max
attgaattcaaggataaagttaagaatgttggtgccagtcttgtaaagcaggttgctaatgctactaatgatgtggctggtgatgaatattgagggagggagcatttcaattgtcttgcaggaaccacatgtgctacagtccttacacgagcaatatttactgaaggctgcaaatcaatcgcggctggaatgaatgcacatggacctgaggcggggtataagtatggctgtcgatgctgtggtcacaaatttgaaaagcagagctaggatgattagcacatctgaaga

SEQ ID NO: 43769 - DNA, 278 bp, Glycine max
atttagaggggaaggcggctatgggaatgggatgaggaagacgagatcgtatggggacatgagtgaatcggtggggagaggggaagagaagagggttgtgagtgtgactccgctgagggatatgacgccagagagggttttcgggaagatgggacatttgcagaagttgttggatcggtttttggcttgtaggcctactgggttggctaagaatagcaggatggttttgattgcgctgtatcctgtggttaaggagagttttaagttgtatgctgata

SEQ ID NO: 43770 - DNA, 278 bp, Glycine max
gcaaatatgtattcagagttgcgggaagaggctcgtgatcatgcatgcttacgtaatgcatattttgagcaggcacagcaagcctatcttattggtaataaagccctagcaaaggaactaagtgctaaagggcaactgcacaacatgcatatgaaggttgctcatggacaagctcaagaatccatttacctccagaggtttgttgttctccatgctttgattcctgctctccatgtaagtttggaataaacaagtttatatggcagatgatgttatca

SEQ ID NO: 43771 - DNA, 265 bp, Glycine max
gaagaattaaaggaagcctaactggtgtaactattgggactgtgacagaatcccaaaaaatttggagaactttccaagcgcttggaaacatagcctttgcttactcctactcaatgatccttattgaaattcagaaaacaacacaaacaacaaattgaagtctaaattaaaatggtggttgttatggaacaggacacaatcaaatcccctccagcagagtcagagacaatgtccaaggctactttaataagtgttttggtcacaa

SEQ ID NO: 43772 - DNA, 258 bp, Glycine max
aatccctctttcttcctcttcctcagtagtgcgattttcgattctcttctctgcaactatgcctaaccctaaggtcttcttcgacatgaccatcggcggtcaacctgccggccgcatcgtgatggagctctacgccgacgtgactccgagcaccgccgagaacttccgcgcgctctgcaccggcgagaagggcgccgggcggagcggcaagcccctccactacaaaggctcgtccttccaccgcgtgatcccgaactt

SEQ ID NO: 43773 - DNA, 256 bp, Glycine max
cagaatggcagcacttggtggcaatcgtgatgtggcaggaagccagaacagccttgagatcgatggtttagctcgctttgctgttgaagaacacaacaaaaaacagaatgcccttttggagtttgaaaaggtagtaagtgcaaaacagcaagtggtttctggtaccttgtacaccatcactttggaggcaaaagatggtgggcaaaagaaggtttatgaagccaaagtttgggagaaggcatggttgaacttcaag

SEQ ID NO: 43774 - DNA, 265 bp, Glycine max
ctttattcacaatgagaagcccatagcagagtctcttgtgattgttgaatacattgatgagacatggaagaacaaccccatcttgccttctgatccttaccaaagagccttggctcgtttctggtccaaattcattgatgataaggtttttggtgctgcatggaaatccgttttcacagctgatgagaaagagcgtgagaagaatgttgaggaagcaattgaggctctgcagtttcttgagaatgagataaaggacaagaagttc

SEQ ID NO: 43775 - DNA, 260 bp, Glycine max
gtacagcatttttggagcaccccatatcagacgatatacttcagttactctttgaagtctccaactcttctaacttggaaaagtccttagagattctcattcagaatgccaaatccgattctgggcgtttggaactagcttctaaaaagattcttcctgcagtacttaatatagttcactcactcactcatgcttcacaccaccatcagcgtaatcatattctttctttgtccttcaaagtcctcagaaacttgtgtgct

SEQ ID NO: 43776 - DNA, 250 bp, Glycine max
cggggttggaaatgagacaatggcttttcctccgaagattctctctgtggtcgatgaagaaggaacctgacttagaatccgcactctcacgcaatcgccgttggatagtcaacaaccaaatcaagaacatcatcctccgctaccccaacaacgaaatccccatccataccctccagaacaagttcaaaaccctagatctccaaggcaaagcccttaactggctctccaagtacccttgctgcttccaaat

SEQ ID NO: 43777 - DNA, 236 bp, Glycine max
ctctctgctcctaggggttctccttcgagttgaccgaaacgatcctccaaccgcgtttgtttatgggacagggaaatggctcccaaaccgccagtacggggctggttggtggacttgaccaaggtgaagttgttaaccaggagggatttgccccaaggctctcagatcgtaagggggaaacaagccagaaggtgcactttgtgaggaacctcataagagaagttgctggttttgca

SEQ ID NO: 43778 - DNA, 216 bp, Glycine max
ctttttcctcttttttgaacttggcagtgttgatgagttgcggaagcctttatctaacaaagatgtgtatcagcagtttttaagttcacctgatgaggtcaagattcagaataatgtgaatgatgatctttgcaaggagaatctgcagcttgccgatgaaaatctacgaaaggaacctcgtgttgtggaactcaggaccagtataaaataattggt

SEQ ID NO: 43779 - DNA, 234 bp, Glycine max
cgaaatttctgcagaggattgcttacctcaatgttggaatctatccattcacttccatcttccttattgtgtattgcttcgttcctgctctttcacttttcactggccagttcattgttcaaacccttgaagtcaccttcctagtttacctcttgggcataaccttgacccttgtcatcctcgctgctttggaaatcaagtggtctggcattgagcttgaagagtggtggagga

SEQ ID NO: 43780 - DNA, 261 bp, Glycine max
cgaattcaaggatgaaggagcaagcttatgaacaatcaccaacactcttcttgtcagatattcaacaggtttggagaaagcttcaagacgctggtaatgagattgttgctcttgccaagagcctctctaacatgtcaagaacttcctactctgagctggtgggaattccagcacagagcacatttcaagatgagaagcaagtcgaatttgactgttgcatgaaaccagaacagacacaagcatgtgctatgtacaaaattt

SEQ ID NO: 43781 - DNA, 258 bp, Glycine max
gttaattgttaaatcatggtaggtatagaaagaaaactcaatttggcttcttacaattgcaggctgttttgtgggatcgatgacatatattgtctcttcttggggagcttgaacaacttgtccctactcaacaagcaatatggattgtcaaagagtactgatgaggccatgtttgttattgaagcttacaagacactccgtgaccggggtccataccctgcagatcaagttgtcaaggagcttgatggcagttttgcc

SEQ ID NO: 43782 - DNA, 237 bp, Glycine max
  unsure (1)..(237): unsure at all n locations
agcacatctggagtggaaccttgatggtcttctggagaaaatttgggaatatctcaacttaactcgtatttatactaaacctaaagggatgaatcctgattatgaagaccctgtaatattatcctctaagaagaggacagttgaggacttctgcgatcgcattcacaaggacatgcttaaacagtttaagtatgctttggtctggggttcaagtgcaaaacacaagcctcanagagt

SEQ ID NO: 43783 - DNA, 280 bp, Glycine max
tattgcttcttcccttttgtcttcaaaggaagagaattcgcaatttgcaattttgcattggcgggcactgaaatcgagagagacatccgaggtccaatttgtcagaaccaatagctcgaagcttctcgtgggctgctccgatggatcgctccgaatattcgctccggaaacggaatcttcctccgacggctccaagtcctacgccttggagaagaacctcgccgggttcgcgaagaagcccgtgctctcaatgacggtggtggagtcgcgagacttcctc

SEQ ID NO: 43784 - DNA, 270 bp, Glycine max
actgactctaattttaaccaccattctcacttctcactcttcaatcacaatgttaatctcatcacctaaacaacccttcctcctcgtaaccatcttaatcaccatcttgttattgggcccaggcccaatcctcgctcgcaacgcccacgtcatcaatttccggtcaccgaacctctacccggaatccctaacgtgggacccacgcgcgcacacttcctcctcggatccctccgccagcgcatcatcgccgccgtctccgacgcgggggtc

SEQ ID NO: 43785 - DNA, 267 bp, Glycine max
atttctccctcaccttctcgctccccacacgcccctctctctcctcccatggccgaccagctcaccgacgaccagatcgccgagttcaaggaggccttcagcctcttcgacaaggacggcgatcgttgcattactaccaaggaacttgggactgttatgaggtcacttggtcaaaacccaactgaggcagaactgcaggatatgataaacgaggttgatgctgatggcaacggaaccatcgatttcccagagttcctcaacctgatg

SEQ ID NO: 43786 - DNA, 262 bp, Glycine max
ctttctctctctccaaatcaaaacccatcacaattcacaacaacatacaaattgcaaatcctatcttttctcttctcatataaaagaacccttctttcgaatccttcccgctcttttccctctgatttaattcatgcgcagatccaaaccctaatccatctctccgagaaatattgtgtccacagtcaatttggactgtaagttggacctcaaaacaattgcacttcaagctcgtaatgcagagtacaatcccaagcgtttt

SEQ ID NO: 43787 - DNA, 287 bp, Glycine max
cagagcaccatttcgagtccaaggcagacgccggtgcctccaaaacctaccctcagcaagccggtacccttcgcaagaacggctacatcgtcatcaaaggacgcccctgcaaggttgtggaagtctcgacttccaaaactggaaagcacggtcacgcaagtgccactttgttggaattgatattttcactgccaagaaacttgaggatattgtgccctcttctcacaactgtgatgttcctcatgtgaatcgtactgattaccagctcattgatattgctgaggatg

SEQ ID NO: 43788 - DNA, 288 bp, Glycine max
gtttctgcaatggaaatgcaagccatcttaacagcattggttatggaagcaactgtggaagtagcagcaatgttgatcaagttaacactgtctgggcagcttcagagggcaagcataaagacctcacaagcaatgcaaactctcatcgatctatccaaagagaagcagctctaaacaaattccgcttgaaaaggaaagagagatgctatgagaagaaggttcgatatgagagcagaaagaaactagcagagcagcgtcccagagtgaaaggacaatttgtgcgtcaag

SEQ ID NO: 43789 - DNA, 280 bp, Glycine max
aatgcctgccttgcctcatagtggtagttcttcgaagcctttaatgatgtttagcacagatggcactggaacccttacgtcaccatctaaccagttggctgatgtggatcgctttgtggaggatggatctctagatgaaaatgttgagtcttttttgtcccatgatgacacggaccctagagatactgttggccgttgtatggatgtaagcaaaggcttcacattttctgatgtaaattctgtacgggcaagcacaagcaaagtttcctgttgccatttc

SEQ ID NO: 43790 - DNA, 276 bp, Glycine max
gccggcgattccacgtcactctccggctagctcccggcaataacgggcacggcggcaggagtgccttcgagctgggcgcggcggtgcgcggatctgtcctacagcgggaagcttctgatgcagagcgatttggacttgacattgggaaagttggaagctcacgtgatgaagctatctgagatattcaagaagggcgtgtcgatgcatggctactccgtagtagtttcaaggcctggttttggagcttgcaaagatgacatgaggttctacttaagg

SEQ ID NO: 43791 - DNA, 291 bp, Glycine max
tgcagtgacaaacaacaagatcttttcaatgccatgggctccatgtatgctgctgttctccttattggcattaagaatgctaatgcagtgcagccagtggttgctgttgagcgaacagtcttttatagggaaaaagcagccggaatgtattcagctttaccgtatgcttttgctcaggcaagcaaatcctcattctaaaaatcttgtctttgtagtgttactatatcctcacaaatcatcatcgttgttggaaagtctcacattgtctgtctcaatttctggggtgtagct

SEQ ID NO: 43792 - DNA, 290 bp, Glycine max
gaataatactcaagtgcaatcgcctcccgtactgaacgaaagaccatatttgagtcacccacacccacaaaacttattgccccttttacactaggcttgtcagactctcggcgatctaagttaacagcagagaggcagcaggataactatgaatttctctctaaatgcataaaagaaaatttgggattcaaaaatggtaaacctattgcagctcgtattatatacaaatgtctacttcattggcattcatttgaatctgagcgcacaaccatttttgattccataatcga

SEQ ID NO: 43793 - DNA, 208 bp, Glycine max
cgcagatctaatggtttcacacactttcttcactctagatcattctcttcttcatcatggggcaccccaatagcttctactaatcgatagtcaaattttgttgggttcggatgccggtggtagacaggatggactattgtggtacaaggactcggggcagcacttgaatggggatttttcaatggctgtaatccaagccaataacttg

SEQ ID NO: 43794 - DNA, 288 bp, Glycine max
ctttgcaatctacacaatattcagtattcaccatgggagccacaacttttacacatgattattcatcccctgttgctccatcacgcatgttcaaggccttgatcactgactctagaactttgctgccaaagctcttaccacagatcaaaaaagaggtcaatctgatccaaggagatggggaagctggaagcattgagcaagttaactttgctgaagctttccccttcaagtatgtgaaacacaggattgatgaggttgataaggacaactttgtgtgcaaatacacta

SEQ ID NO: 43795 - DNA, 281 bp, Glycine max
atggcaaagcttcatgaggctgccagttctaacagtgtcgatgcatataaacaatatgccatagccagtcatgaattgaacaaggcttgcaatttgcgtgggcttcttaaatttaaagagacagcagttaagattcctattgatgaagtggagcctgctagtgaaatagttaaacggttttgcactggggccatgagttatgggtcaatatcattggaggcacacacagcattagcaatggctatgaataaaatgggagggaaatccaacacaggtgaggg

SEQ ID NO: 43796 - DNA, 287 bp, Glycine max
cccttgccgactacaacatccaaaaggaatccactctccacctcgtgcttcgcctcaggggtggcatgcaaatctttgtcaagactttgactggcaagaccatcaccctcgaggtcgaatcctcggacaccattgataatgtcaaggccaagatccaggacaaggagggtatccctccagatcagcagaggttgatatttgctggtaaacaacttgaggatggaagaacccttgctgattacaatattcagaaggagtctaccttacacttggttcttcgtttaaga

SEQ ID NO: 43797 - DNA, 268 bp, Glycine max
gagctatcttttatacgcaaggctaaagaatctggagttgtttatcttcttggtcacggggatataagagcaagaaaagactcatggtttatcaagaagctaattataaactatttttatgcctttctgagaaagaactgccgaagtgggatcacaaatttaagtgtaccccattcacatatgatgcaggttggcatgacctacatggtttgaccatgaattttccaacccaaacaattgacaggtaatatggaattatagtttggta

SEQ ID NO: 43798 - DNA, 263 bp, Glycine max
tatgcctgcaatatatagcttggaggaataaattctctgttggcaatagagcattctgggcatcttcccctgattaaagataccccaacgatgattttggggatggatgtctctcacaattcacttggtcgattagatagtccatcaatagcagctgtaagactagtttggttttgtatttcttgtacctctatatttttggatttttggttatctctgcagcatatcgttctgttgcctaatgttggattgtaggttgttgg

SEQ ID NO: 43799 - DNA, 264 bp, Glycine max
gaaatttattacatgttgaaggctcggggagcgaaagtgccgaaaaccaggaagactccaatgactgttgcaaatcctcgtgaagttccggaatatgaactcaacccgttagagctacaggttcggaagagtgatggtatttcaaagggaacataccaagtagctaaatggaatggcaccaaggttgcagtgaagatacttgataaggacagttattcagatcctgataccataaatgctttcaaacatgaactcacattatta

SEQ ID NO: 43800 - DNA, 154 bp, Glycine max
gttaatttgttgagagagagcaatcaagaacattcatggagtcttcacaggagagagcagacaacaccaattaaccaccacctgataggctgatacaatacagtctcctatcctttttcgacaaccagactggctgcgaaatctagttcgagtt

SEQ ID NO: 43801 - DNA, 150 bp, Glycine max
ccatgatgttgttcttggaagacggaacactaggactcacaatggtcatcagttgaggctatgattcatcaacggatatgcactttgcaagagtattaacccatatgaagctgctgcttatggtgctgcagtgcaggctgcgattctcag

SEQ ID NO: 43802 - DNA, 155 bp, Glycine max
ctctcaccttctacattactctctcttctcctacacatttctaaaggttccattgcatcatctgactcactcctcagtagctctgagactgaaccctatccccatacaaaccttatccctcccccaaatgcccagcctcagatcaaccagattcc

SEQ ID NO: 43803 - DNA, 206 bp, Glycine max
ctttgtcttttttctattatagaatgactcttatatttgttcaaatcaatatatatgctgactttcctctattgctctgttcagcaatggaattagctttgtctttggagaagttagtgaatgagaaacttctgaatgtgcacagtgtggcagatcgcaacaatgaccctcaattggcagacttcattgaaagcgagtttttgtct

SEQ ID NO: 43804 - DNA, 196 bp, Glycine max
acagctttgacaatttatctaaaatcaattacctattctcctttgctcgcattctcagtcactctttcggtgtttgccttcagatccgacggagggcaaccccatttagttaacattcagtttcagaagacagttagacttcaattaattgtgctgtacgtggatttcaagcttgacgagagttacacgccgagca

SEQ ID NO: 43805 - DNA, 155 bp, Glycine max
cttctctctggctttcctttgacgcttctgacactgctccttttgcttctctccgtgtcctaatggctctccccgactcttcttcctgccgcaactccctgttcccctccttcatctactcctcttcctccaaaacgctcccttcacacaacata

SEQ ID NO: 43806 - DNA, 198 bp, Glycine max
  unsure (1)..(198): unsure at all n locations
tagcctttgtttactcttcttctcttgcggctatggttttagcgcagttcttctagatttaagtatgatgggtaagtaaaaggttcacatcagtattgtggtcattggccatgttgactctgggaaatccattaccactggtcacttgatttacaagctttgaggcanngacaagcgtgttattgagaggtttgagaa

SEQ ID NO: 43807 - DNA, 238 bp, Glycine max
catttgggagttaggttatgcacgctctgcttccagcgagtgttctttcttcgtttcaacaccttaatttgcaactgatgattgtgccgcttgagcactggcacaagaaaactttctattcacatctgaatctgtcaacgagggtcaccccgaaaagctgtgcgaccagatctgtgatgcagtgctcgacgcgtgccttgagcaggacacatgacgcaaggttgactgtgaaacatgc

SEQ ID NO: 43808 - DNA, 254 bp, Glycine max
gcaagcattactactcttatatgggcaacaagtttgatattgaataatcctagtgtactagaaaaacttaaagcagaactagacatccaagttggaaaagagagatacatatgtgagtctgatttaagtaagttaacatatcttcaagctgtagtcaaagaaactttaagattgtaccctccagctcctctctcaagacctcgtgagtttgaagaggattgcactataggtggctacactgtcaaaaagggaac

SEQ ID NO: 43809 - DNA, 251 bp, Glycine max
cttggaattgcgccccatgctgacaattctgggatcactcttctgcttgactgtgctgattttccagggttgcagttcctcaaagataaaaaatgggtcaatgttgaacctatagaaggggcaattgttgtaaacattggccaaattattgaggtgatgagcaatgggatatacaaagcgccagagcatagagctgtagtaaataagttaaaggagaggttttcaatagtgacattctgctatccaagccc

SEQ ID NO: 43810 - DNA, 258 bp, Glycine max
gtggtgctggtccagatagctaatcctgcgagggggcgagggaaagatgtgaaagaagtgcaagccgagacgaaggccacggtgaaacgaattaatgaaacatttgggaaacccgggtatgatcccgtcattctgatcgaggagcctctcaagttttatgagagagttgcttactatgttgtcgcggagtgttgtttagtcactgcagtaagggatggaatgaatctcataccgtatgaatatatcatcagtcgtcaa

SEQ ID NO: 43811 - DNA, 267 bp, Glycine max
cagatggtgaggacccatttggtgattcaaggcgaattgcctgcaaaaggtgtggtggctttcatgtctggatacacaccaagaaacaaaagtctcgggcaagatggtgccaggattgccaagattttcatcaagctaaggatggtgatggatgggttgaacaatcttcccaaccatttctttttggcttattgcagaaggttgatgctccttcagcatatgtgtgtgctggtagcaggatatatgatgccaccgaatggtatatct

SEQ ID NO: 43812 - DNA, 268 bp, Glycine max
caatgatcacattcaaacccacaccaacaacagcaccagcaacatggttcgaaacccgaagaaacggtcaagagcttctaggcgtgcacctaccactgtgctaaccacagacaccaccaatttccgagccatggttcaggaatttactggcatcccagcacaacccctcacatcctcgtctttcccgagaaccaggttggatctctttgcttccgccgcaacaccaactttgatgagatccaacgttaacgttaaccctttggaccct

SEQ ID NO: 43813 - DNA, 268 bp, Glycine max
atgctctgtagctggtcctgggtttgtgaatattgtcttgtcgaagaagtggatagcgcagaggttagagatgttgctgattgatggtattgataagtgggcacctcgacttcccgtgaagacagttctggttgatttttcctcacctaacatagcagtcgaaatgcatgttggacacctgagatctaccattattggggacacattagctcgcatgtttgaattttcacgtgtggaaactcttatccgcagaaatcatcttggtgac

SEQ ID NO: 43814 - DNA, 267 bp, Glycine max
attgcaggatatcagtcaacctaaaacagaatatgacttacctgctggtgtactgtctgtctctcttctgagacatcagaaaattgcattggcttggatgcttcagaaggaaaccaagagtttgcattgcttgggggggattttggctgatgatcagggccttggaaagacaatttcgatgatttccctcatcctggcacagaggacattacagtcaaaatcgaaaatagatgatacatgcagtcataaaactgaagctttgaattt

SEQ ID NO: 43815 - DNA, 264 bp, Glycine max
agaaaaaataagcaaactgaagagcctgaaaaaaacatctccgtcagcttgcattgtttttcctcctaagatcttccggttgttggagaaaccattgcatgagtttcgggggcacagaggtgaagttttggatctctcttggtcaagcaataattatcttctgtcatcttcagttgacaaaactgttcgtctatggcaagtgaatcatgaccgttgcttgaaagttttctcacacagtaattatgtgacgtgcatacaattcaa

SEQ ID NO: 43816 - DNA, 142 bp, Glycine max
cttcgctcaagctgtgacatacggtttaattgtttatgacatgaaccgagttgactgggactgagagccattcttttggtatctatttatcagtttcgtcacattgttgtactttactttctacggtatgatggctgtggga

SEQ ID NO: 43817 - DNA, 166 bp, Glycine max
ccttggtgtgggtagccacatgcaggagcttaggagggttacgtacgggatcatgggggagaaggataacatggtcagcatgcatgatgtcatggatgctcagtgggtttatgctaattatagggatgagacttatttgacgagggttgtcatgcccttggagatt

SEQ ID NO: 43818 - DNA, 261 bp, Glycine max
cgcgtcgctccgcaccagtttcaccgcacgaatatcttgctgtttggcgcgatccgagaaaaactctgtaaacatgttggtttaccaggacctccttacaggtgatgagcttctctctgactccttccgttacaaggacattgagaatggaatgctgtgggaagttgaggggcagtgggttgttaaaggcgcagttgatgtagacattggtgcaaacccttctgctgagggtggaggcgaagatgcgggcattgatgatgc

SEQ ID NO: 43819 - DNA, 249 bp, Glycine max
ctgctatcttgtgcagtgcagagtttgttgtgaaacacaatttgccatcacaagctgttgacattcttgctctgacaatggccacagacactgaaacttctttcaaggacagctgtatcaagatggctggttttgacatgcgcaaattggctgcagataaagcttacaagattgctggcgtcaccgctaacgatgttcaagttattgaacttcacgattgtttcagtgcaaacgaactcgttacatacg

SEQ ID NO: 43820 - DNA, 246 bp, Glycine max
gcgatccgcgacaaactctgtaaacatgttggtttaccaggacctccttacaggtgctgcgcttctctctgactccttccgttacacggcaattgcgcatggcatgctgtgggccgctgcggggccgtgggttgttaacggcgcagttgctgtcgacattggtgcaaacccttctgctgcgggtggcggcgcagatgcgggcgttgatgatgcagctgttacggttgttgacattgttgacacatt

SEQ ID NO: 43821 - DNA, 253 bp, Glycine max
cggctcgagattggactgggaagcaattgggaaaattcttgcacgaggtcatagtcgtgttcctgtatacagtggaaaccccaaaaatataattggcctcttactagtaaaaaaccttcttactgtaagagctgaaacagagactccagttagtgctgtttccatccggagaattcctagggttccagcagatatgcctctatatgatatcctcaatgagtttcaaaaaggcagcagtcatatggcagctgta

SEQ ID NO: 43822 - DNA, 249 bp, Glycine max
cttgaatatctctcacaacaacctgtcaggttctatccctgactcccttagtgaaatggtgagtttgtcagccatcaacctctcctacaataatttggcgggtccagttcctgacggtggcgtattcaattcttctcatcccctggatttgagcaacaacaaagatttatgcgggcatattcaaggtttgcgtccatgtaatgtttctctcactaaacctaatggtggatcaagtaacaaaacgacggt

SEQ ID NO: 43823 - DNA, 270 bp, Glycine max
aagtgaatgctaagggtaaacccgaatatgttctaaagcgagctgaagatctcgcagctgccggccaaaaggcagaagcagtcgatttcctctatgaacaggttacgtcaaagagaaatcgtacttggagcaagatgagcgagaagattatggtcaagttcatcgagctttgcgttgctctccaacgcggcaagcaagccaaggacggcttgcaccaatacagaatcatcacacaacagattccctcgtcgttggaagttgtgttgaaga

SEQ ID NO: 43824 - DNA, 267 bp, Glycine max
ggacatgcatctatggtggggttcctaagggactcaggtgcgtgatctccagaaaggtgtcgaaattgtaattgccactccaggaaggttaattgatatgcttgagtcaaatcataccaacttgcagagggtcacataccttgtattggatgaagctgataggatgttggatatggggtttgatcctcagctacggaagattgtctctcagattcgtccagatcgtcaaactttgtattggagtgctacctggccaaaggaggttga

SEQ ID NO: 43825 - DNA, 247 bp, Glycine max
cgcaaggcgtgcaccaacggcgagtgtggtgacgggacttccatggccaatcacttcgagcgacactattgcggcaagtgtggcgtgacctatgtctagcagaaggccgatgcttaaattcgttggaagtgaatccactgtggtgctaaatacattgtagttattcaaaagttctggttaatgtaattgtgcaattagcgttatgagtgtctgggcgtagactagacctttatgaatactgtttcgc

SEQ ID NO: 43826 - DNA, 234 bp, Glycine max
gaatcatatttcatttatttgttctcacatttctatttagtatgtctgctcttgttacctatttacccgtttaatgtattagtctagttgcattgcatcgagactaatacattaaacgggtaaataggtaacaagatcaccatactaaataaaaatgtattagtctcgatgcaatgcaactagcaaatttcagtttgcttgacttgtttgtacttaaaaacaaacaccaaaagg

SEQ ID NO: 43827 - DNA, 262 bp, Glycine max
tgaagtgttcggattgcggcggaggagaagaaggttgttccggcgaaggggaagcactaccgcggcgtgcggcagcggccgtgggggaagttcgcggcggagatccgcgacccggcgaagaacggagcaagggtttggctggggacgtttgacacggcggaggacgcggcgttggcgtacgaccgcgccgcctaccgggtggggacggtgcaagagcaagtggggagtcaagtggcagagtgtacacgtggcgagcagttat

SEQ ID NO: 43828 - DNA, 269 bp, Glycine max
ctataataaagccatggaagctcaaacctggttcttggttattgccttattcctcttccttctactcaatcggcttgcaaaatatctcaagccaaaacctaatgctggtcacaaacttccccctggtccaaaaaagctacctctcgtaggaaacatgcatcaactagcagcagcaggtccactcccacatcgtgcactccgagaacttgctcataaatatggacctctgatgcacctccaacttggtgagatttctgcagtggtagtat

SEQ ID NO: 43829 - DNA, 267 bp, Glycine max
ggaagatacactggcaatgagaaaagagattcaagatcttaggacaaatgctcgaatttttcagcttagcaagtgcactgcatgcaccttcacccttgatttgcctgccgtgcacttcatgtgcatgcactcattccacctgcgctgccttggtgataatgaaaaagaatgccctcagtgtgcacctgaatataggtctgtcttagaaatgaaaaacaatttagagcaaaattctaaggatcaggacagattttttcagcaggtgaa

SEQ ID NO: 43830 - DNA, 265 bp, Glycine max
cggctctgatgctcggtgtcgccgtcgtttgcctccacggcgcgttccgcgtgccggaggatctgttcctcgacgatcaggagaattctcaggctaccggattcctctccttcctcaccggccctgcctccgccgctgccgccgccgccgccgccgccgccgcttttcccagcgttgcctcacgcgtttaggtaagaaataaaaaatctcagtgagatcgtcagatctggtgctgtttctccccgatctgatgagttttgacgcc

SEQ ID NO: 43831 - DNA, 267 bp, Glycine max
ggccacttttctgtttctctacatcaccgtcttaaccgttatgggagtcgccggggctaagtctaagtgtagtaccgttgggattcaaggaatcgcttgggccttcggtggcatgatcttcgccctcgtttactcaccgctggcatctcagggggacacataaacccggcggtgacatttgggctgtttttggcgaggaagttgtcgttgcccagggcgattttctacatcgtgatgcaatgcttgggtgctatttgtggcgctggc

SEQ ID NO: 43832 - DNA, 259 bp, Glycine max
tgggagtgctgctgattggagatatgctgcagagcagtttgtgaagaagcttccagataaagtgattgtacacctgaatgcaattcttcaaaattgacgtttgatggtgttgatacaatgggcgagagctagctgaagagaggtgcagaagatatcctttgtggcgcattctctaggaggcttggtggcaagatatgctattgggagactttatgattattcttcaacattggcacttgttggtaccagtagagactat

SEQ ID NO: 43833 - DNA, 254 bp, Glycine max
ccgcactccaccgctttacgccggttatcagggaaggagcagagggcgtagagcgccgtggcggcttcttttctttcccttcccttcccgtcgcggaggagtgtcacgagggcattgatggagcccggcacgctccgatggtggccttgttgacgtggaggacggcgaggctggtgagcagggtggcggcgagggcgcggcagtcggagggggcggcggaggagaggaggagagagattaaaggggagaggagg

SEQ ID NO: 43834 - DNA, 266 bp, Glycine max
tgccaatgagctgggaggtgcaaagttggcaagaagaaccttatccacgatgataatccaggcgttgtcacaggtgtcattagggctaaagatgttgactatttatccagggtagcagatgataaatggacaggagatgccattatttattcccatcttggtggagaagtggtttaccttccaaaggatgcatccatcccagttaccttgaaaaccagagaatatgaagttttcacaatagttcccgtgaaggaattgagcaatgg

SEQ ID NO: 43835 - DNA, 258 bp, Glycine max
atcgaattgctgtcgttagaagaggtgatttggaggatgtagaagagggaacagaagaccacaagtacccaagaatttcatataaacaacttagagaggccactggaggcttcagtgcttcaagcttaattggttcaggccggtttggacaagtctacgaaggaatgctacaagataatacaagagtagctgtgaaggtgttggatacaacgcatggtgagatttcaaggagctttagaagggaatatcaaattctga

SEQ ID NO: 43836 - DNA, 276 bp, Glycine max
gtgacgtgccctagccccatatctagtctccctctctcaatctcacatctctcgtcgccaccgccgcgccgcacggaggcacccacggaaccaatctagccatcagttgaaacagtgagcttacaaaaaatggcaactgcacctgcacaattcctacaagctttggccatgagttgagggcttgtcttcgttgccgccttgtcaaaacctatgatcaggtcttagtaccctactaccctttatttttcatcattgttttttgtttacaatttctgt

SEQ ID NO: 43837 - DNA, 267 bp, Glycine max
ctctaacctacctctctatcttctctctcaacaacttcaccttcttcctacgcgatcctgtctgcacttcaagggcaagtaccatgatgagcttatcgccaatgctgcgtacattggcactcctggacagggtattcttgcgctgctgagtcaacagggacaattggcaagcgtttggccagcatcagtgtagagaacattgaatgcaacaggcgagctcatagggagctgcttttcactgatcctggtgttacttcaatatctcag

SEQ ID NO: 43838 - DNA, 256 bp, Glycine max
cagaaggtagttgaaataataaacccagaggatgattacatttggattcatgattatcatttgatggtgctaccaacttttataagaaggcgttttaacagggttaaaatgggatttttcctgcatagccctttccatcgtcagacatatataggactcttccagtcagggaagagatactgaaagctttactaaactctgatatcatcggattccatacctttgactatgctcgtcatttcctttcctgttgcag

SEQ ID NO: 43839 - DNA, 177 bp, Glycine max
tgaacactgaatgatttgtatggtgaaggaggttcaaggaagaaacaacagctcacttacttcctttaaattgtggaatgctacttttatttttggatttgtgaccattcatcctcaatgatacatacctttaacaaaggaaggattccttcatcagagatgttgaactcaaagcat

SEQ ID NO: 43840 - DNA, 176 bp, Glycine max
gaagaagagaaagaagcatgaaagcacagatagcctggtcagcatgcatgatgtcatggatgctcagtgggtttatgataattatagggatgagacttatttgaggagggttgttatgcccttggagattctcttgactagctataagaggcttgttgttaaggactctgctgtca

SEQ ID NO: 43841 - DNA, 161 bp, Glycine max
caagatgatggcaatcttgtgttacttgatctccaaggaaccattttgtggcaaagttttgataccccaactgatactctccttcccggtcaattacttaccagatacacacaactagtgtcttcaagaagccagactaaccattctcctggtttctataa

SEQ ID NO: 43842 - DNA, 203 bp, Glycine max
cgtggctctgccaacatggatgtgctcattgcgctgggaacaaacgcagcgtatttttactctgtttactctgttttgagagctgccacctctccgcatttcgaggggaatgatttctttgagacgagtgcgatgcttatttcgttcattctgcttgggaagtatcttgagattctggccaaggggatgacttctgatgcgat

SEQ ID NO: 43843 - DNA, 278 bp, Glycine max
ctgagatactaaaaggttgtgggctacatgctgatattggaataacagttctgatagatcgtagcgtcttaaaagttgaaaagaacaacaaacttggaatgcatcaattgctacgggacatgggaagagagataatctgtgaaagttcaagaaaggaaccagggaaacggagtcgatagtggcttcatgatgatgtacttgatgtattgacaaataatactgggacagtggctattgacgggatggctctgaaattgcatttcgccggtagagcttgc

SEQ ID NO: 43844 - DNA, 276 bp, Glycine max
tttgggagttaggttctgcacgctctgcttccagcgagtgttctttcttcgtttcaacaccttaatttgcacacgctgcttcttcagcttgagaaatggcacaagaaacctttctattcacatctgaatctgtaaacgagggtcaccccgacaagctgtgcgaccagatctctgatgcagtgctcgatgcgtgccttgaacaggaccctgacagcaaggttgcctgtgagacatgcaccaagaccaactggtcatggtctttggagagatcacaac

SEQ ID NO: 43845 - DNA, 291 bp, Glycine max
cggatcgagctccaatagtgttgttgatgatcttgtgcagcaatgtcgcacgacgaggtggttctgttggatgcatggggaagcatgtttgggatgagggcatggattgcattggaagaaaagggtgttaagtatgaacacaagatggaggatctcaacaacaagagctctttgcttatgcagatgaaccctatttacaagcaaattccagttctcatccataatggcaaaccaatttctgaatctgcaattatagtgcagtacatttatgaggtctggaatgacaacaaa

SEQ ID NO: 43846 - DNA, 276 bp, Glycine max
agagacgcaagcatgtagaacatgaacttgatttggtacagcaggagatcccggagtgcagaaaaaaatcggtggttgctgagcaagcaaaaacgcaagtactgcaggagctggatagcactaagaggctaatagaagaactaaaacttaacctagagagggcgcaaaccgaagagcgtcaggcaagacaggactcagaacttgcaaagcttagagtggaagagatggagcaaggtattgcagacgactctagcattgcagccagggcacagctgg

SEQ ID NO: 43847 - DNA, 279 bp, Glycine max
gcgctgctcaatttgtccatttttgacaagaacaaaagtaggattatggacgaggaagggtgtctaggatcgattgttgatgtgttgagatttggacacaccacagaggcaaaggaaaatgctgctgcgacgttgttcagtctatcggccgtccatgactataagaaaataattgcagatgagatgcgagcagtcgaggccctcgcaggactgttgcaagaggggactccaagaggaaagaaggatgctgtgacagctttgttcaatctttccacacac

SEQ ID NO: 43848 - DNA, 277 bp, Glycine max
ggatgcacttgatcgaccttcagatagctcccaacaccaactcatgtagaatattgggaggcactccttgtgcgttgtgattgggagctagctgaagctcaaagaaaggatgcacttgatcgagctagggtgcgtggagaagaacctcctgatgaaagaattgcagaagaaaggggtctacattgcagtgttgagccagatgtgaagaggcttttgcaggggaagacacttgcagagttggaggctttacgggtcacatgaatcagaaagcgtatgg

SEQ ID NO: 43849 - DNA, 276 bp, Glycine max
ttgccacccagttttgaatatatttttattccttctttgtttcttcactttcttccatacacataaccatgtcttctcagactgttgtcctcaaagttggtatgtcatgtcaagggtgtgctggagcagtgaacagggttttgggaaaaatggaagttcctgttgggctgcgattatataattatgtggttttcttgttcacaattaacttttggacaccatcaagaataccctgcacaagtgaagtgctgttatggtgggttacttcttattaaa

SEQ ID NO: 43850 - DNA, 281 bp, Glycine max
gcgtagtaactcggatcggctcccctcgagcgaatcggtcgacggctcgaggtgtaactagctgcacagttgtgatggcatacgtctctggaagaagttctgctctgaacccaaatgcacctatgttcatacctgctgcacttcgtcaggtggaggatttttcacctcaatggtgggatcttgtgacatcttcaacatggtttcgtgattattcgttgagccaccataaggaggaagaatttgcatcagttgccaatgactctactaatgatgatatggag

SEQ ID NO: 43851 - DNA, 257 bp, Glycine max
atcaggaacgccacaccatcagtttccttctgctagcacacagacggttatagaggaatctgagtatgagtttgagaatgatcggcaaagatatgctggactagaggcaacaaagccaggtgaaaagcctagggtggttgttcttggtacgggttgggctacgtgtcggttcctcaaagggatagacaccaaaatttatgatgttgtgtgcatatcaccaatgaatcacatggtctttactcctttgcttgcttcaa

SEQ ID NO: 43852 - DNA, 250 bp, Glycine max
gctgcctcatattagagaaaggaaggttgtgtatgtggaagatattgctgaaggtcttgagaatggtcctgcagccttggttggcctctatagtggtcgcaatgttggtaaacaagtggttgttgttgctcgtgactgaatgcagatgctttcgttggacattgctgtcttgttttatgattttggtgttgaatattcagggcgctttgtatgtttttggcaatcatttgcaattgtggtattggtgata

SEQ ID NO: 43853 - DNA, 254 bp, Glycine max
cgtgttccatgccactatcaagacaacaatcgaccaagcgtatctggagttttatataagacacaaggatggcaccccaattagttcagaaccagagcgacaccgtgtgattcaatgcttgcaagctgcagtggagagaagggcatttgagggtgttaggctagagttatgcaccgaagacagacaaggacttcttgcagaagtgatgagaactttccgagaaaatgggctgaatgtgacaagggcagagatat

SEQ ID NO: 43854 - DNA, 262 bp, Glycine max
caacatttctatgttcctgttgcacaccatgctgctgccgttcattttgttgtgaaggacagtgatgtggtgggttcacagctcattggcgttgtggcaattcctgtggaaaaaatatactcagggcaaaacgtacaagggacctaccctatcctgaacagcaatggtaagccttgtaagccaggtgctgttttgatggtatccattcagtacattccaatgcatacacttatcatgtattaccaaggagttggagctggtc

SEQ ID NO: 43855 - DNA, 238 bp, Glycine max
gcttccttaagctccttagtgctgctccttgcagctctaattctatcccctcaagttcttgcaaactatgagaatcccccagtgtacaagcctcccactgagaaaccaccagttacataagcccccagttgagaagcctcctgtttacaaacctccagttgagaaccctccaatttataagccaccagtagagaagccaccagtgtacaagcccccagttgagaaacctccagtgtac

SEQ ID NO: 43856 - DNA, 260 bp, Glycine max
tggaaactcagggattggtggtggatggcagctagcatggaaatggtctgaaacagaaggtgttttcaagagaatatatttgcaccaagaaggtggtcctggatctagacgtgggtccatcatttcacttccaggctgtgatgcgccgacactaacagatggtgagattgtccaggctgccgctctagtgagtcaatcagccctttacaacaaggagcttatgcatcagcagccagttggaccagccatgattcatccat

SEQ ID NO: 43857 - DNA, 261 bp, Glycine max
ctcgagccgcaaaaagattagctttatactatctgcatttcgtggtcaagttgctactctaacgatgcatccttatggatgccgagtcatgcagagagttctagaacattgcacagacgagagtcaatgccagtttattgtagatgaaatcttggagtcagtctgtgctcttgctcaggatcagtatggtaattatgttacgcagcatgtcttggagagaggaaagcctcaagaaaggagtcaaattatcaacaagttgtc

SEQ ID NO: 43858 - DNA, 261 bp, Glycine max
cggtgctgaagtggtggaatgtgcctgtgtcattggtgtgcctgatgtcaaggggcagtgcaggcgtattggaaagccactttatgttcttgttgagccgcgtaaagcagataaatgttacccagattgacatactaaaggacgctgggtgtgagccacacaggccataatgtgatccttaagttttaggctgatggagtcgtgttcatggcaattgtcaaatatcatcctgggaaatgttcatcctgtttcatatcttta

SEQ ID NO: 43859 - DNA, 111 bp, Glycine max
ctcgagccggctgtgggagagaatggatattacaagatctgcagacgtccaactgtgtgtggactagattccatggtgtcaactgtagatgctccatatccatccagccat

SEQ ID NO: 43860 - DNA, 241 bp, Glycine max
gtttgtgcacatggcaagcttggacttctacttgcaccagaaccaagatggggcttcgcttttggattggaacaagaggttcaggattgctgctggagcagctagagggcttcaatacctgcatgaagtggtggcaccaaacatagtacatggatgtgttacgtcctctaatattctaattgatgttaacttttgtgctaggatttgtgattatgggcttaactttttggcacctgtggaa

SEQ ID NO: 43861 - DNA, 264 bp, Glycine max
cttagattcaaacgtccccagaatcaacaatcccgtgaccttctgcacattccttctcagatcgattggagacagagcggcgcagttacacccgtcaaagaccaagcaagctgtggtgcatgttgggcgttctcagctactggtgctattgaaggcataaataagattgtcacagggtctcttgtaagcctttctgaacaagagctgatagattgtgatacatcctacaacagtggttgtggaggtggactcatggattttgca

SEQ ID NO: 43862 - DNA, 224 bp, Glycine max
gtgatccttgggtcaaaatattctacgtctgcagatctttggtcttttgcttgcatttgttttgagcttgcaactggagatctgttatttgaatctcacagtggtgagcagctttgctagggatgaggaccacttagcattaatggtggaagttcttggaatgatgccaactaagatagcacttggtggacgttcattccgtgctttctttaatgacatatggt

SEQ ID NO: 43863 - DNA, 263 bp, Glycine max
gttttatttatggaaggctaggtatatagagaaaaaggacgtaattctattacgaaattattgtttatttaataaatttcctaatgtgaaaacaaatattatattttaaacatttttgaaaagtgaaacatctcagtatcaaaaaataacagaaatcaatagagattccgaaagtagtggtgagcgaaattggattaaggaataacaataactactaaactaaacagtgtggaataattgacccagcaggtgaaagtcctgtt

SEQ ID NO: 43864 - DNA, 174 bp, Glycine max
atgagttggtgaaggtagtggtgcaagtgttgaacctcttgcttctgagactgctggctccactgctgtggttgccattttgactcaaacacacataatagttgcaaattgtggagattcaagacgtgtcttgtgtcgcggaaaaccagcactgccattgtctgatgaccacac

SEQ ID NO: 43865 - DNA, 130 bp, Glycine max
atcattctcatattattgtcgccacttcgacctcaatcaccctcgcgccctcgctcttcccttcctggtggcgacaatgtcgactcctgctaggaagaggctgatgagagacttcaagaggctgccacaa

SEQ ID NO: 43866 - DNA, 258 bp, Glycine max
gctttgctttgcgcaccgtttcgtttcgtttcgtttcactatttttttcagatatttagacgaaaacaagaatccgcattctgattctgaagattcatgtctaatctcatttctttcttcccttggttggagctcgttttttaggagctcagcagttgatggactgttaccccaagagcagtgacaagaaaacattaaagaggtggttttttattgataaaagagttgggtgaagtggaaatctgataaatattattt

SEQ ID NO: 43867 - DNA, 263 bp, Glycine max
tttatgaccctcgcttgtgtgccacttccaactaacaagaggtattatgctgcaaatatttgcaacctcacttacgttgctgttgatgaatccagaattattgtaaagttcgcttttttcgttctgtcttttcattcttttttcaaagtgaattcctgggattttttgttttcaattgagggcactaaaaactactgtggaactggtgctgataaagcatatggccgtgatattgtagatgcacattacaaagcttgtattta

SEQ ID NO: 43868 - DNA, 238 bp, Glycine max
ccccgctggtgatccttcagctgagaggttgcgctccaaatttcagcacctgacgttgcgatgatgaaccatggtatggtattgagcaagaatataccttgttgcagaaagatgtaaattggccacttgggtggccacttggtgggtttcctggaccacagggcccatactactgtggaactggtgctgataaagcatatggccgtgatattgtagatgcacattacaaagcttgtat

SEQ ID NO: 43869 - DNA, 240 bp, Glycine max
aaggaaggcactggagacactgccgagtgccgtaaaatgcagattttcgtccgcacggatcggactcacctcattgaggtgagtccggcccagaccgtcgccgatgtgaaggccgccgtcgaggcgctgcagggcctggaggctggcgagcagcgcattctgttcaacggtgtccagctggaggatggccaggtcctggctgcggctggcgtgagcgacgatagcacgctcatgtgcctg

SEQ ID NO: 43870 - DNA, 239 bp, Glycine max
gcaacggtgaaggtgaagaagaacgacctgttcaagctctgatggttcttaaatatgggggcgttcttacacatgctggcagaaagcaggctgaagaactaggaagatatttccgcaataatatgtatccagatgtctgcagctgcttttgccaaaggtcttcttgaccttgaagggcagctcacaccaatcctggtttcacttgttagtaaagactcctccatgttggatggtcttga

SEQ ID NO: 43871 - DNA, 240 bp, Glycine max
ggctatctaaggttccggagggtgtagacaacaacaggggcaatgtttacattggcagtacaagcccgacaaatgttgcaagagcttactatgagcaatttcaaagagatttctctctttttctcaagtgtcgtgcagaggaattagttaaaggaggtcgtatggttctaacatttttgggaagaagaagcgatgatccctctagcaaagatggtggctacgtttgggagcttatggcta

SEQ ID NO: 43872 - DNA, 233 bp, Glycine max
gctcaaatgaatcaggggattttttctatcacgtcagcactcttaactttggagacccttttaggaagcatgagatgcactgcaggttcaagcagaagccaccatggccatgggtggcaataactacttctattggtatccttgttattgcactccttgttggatatattttccatgccactgtgaatcgaattgccaaagtagaagatgattaccgtgagatgatggaactt

SEQ ID NO: 43873 - DNA, 254 bp, Glycine max
gttatgacaaggctcattttgattatggtttggaggaagctgattaggaaccccaacacatattccagcctctttggtctcacttggtctttgatctcattcaaatggaatgttgttatgccagcaattgttgctaatcgatatcaattttatctgatgctggtctagggatggcaatgtttagccttgggttattcatggcattgcagccaaagattattgcgtgtggaaactcggttgcttcctttgctatg

SEQ ID NO: 43874 - DNA, 255 bp, Glycine max
ggaatggactggtttggccaatagattactgagtaagggcaatgatattctgtgttgcgattatgctaggtttgatggtgtgattgccaagcaagttatgagcaagatggcagaaatgataaacagtctttgtggtggtgatggaaagttgatgcgtgaaaggacgcacctgctgttggcgtgttgttcaaggatggcgatttgtaagaaagatgtttggagagttgaatgtggaatcccttgctggatttccgc

SEQ ID NO: 43875 - DNA, 253 bp, Glycine max
ctcgagccgctcgagccgggctttccaacaagaatgtttcaccaaaagtttgctagaagatatggttttctcctccttgatcatgttgcttctcaggatccgcttagtgtttcagttttaattcttcatcagtttaatattttgcctgagatgtatcaagttggctacacaaaattatttttccgaacagggcagattggtgtgcttgaagatactagaaatcgtaccctccatggcattttacgtgtccaaa

SEQ ID NO: 43876 - DNA, 255 bp, Glycine max
ttttgacaagtttctccatggttcaactttagaggaatgctattcagctgttgcttcggtggcaaatggctagcttgatcttcttgataaccagggaaaggatattgcagacagtgagttgcttgattatatatcagaatcaagtacgatgagcaaatctttcgctgattatggtctgcagaagtcttgagctgttgccactgctagacgtctggctgactttcttggcgatacaatggtcaaagataaaggtct

SEQ ID NO: 43877 - DNA, 231 bp, Glycine max
cgttcaatagaattttacgattaagatcacccactcgaggcattacgtggcacaaaggttcaggagtgggacctcttgagccaagtaatgcgtcgagttggtgatcttaatcgctctgtacaattgtacgataacgcatatggtatggatctgcatcgtacacgagatgatccagcttacatgtccatcatagcagttcttgggtatggtcctgcagatgcaagcactgtt

SEQ ID NO: 43878 - DNA, 210 bp, Glycine max
cgcgatacgacgcacctgatgttcgcatgttgtccaaggatcggaatttgtcacaaagatgtttggagactccaatgtggaatcccttctgcatttccgctcacagttatttgcaatagcatttttaatgaaatgctcactagacatagctacgaaaaattactgcgccaggctaaagctcacagtacgttttaacaatccttcaaaaat

SEQ ID NO: 43879 - DNA, 230 bp, Glycine max
gtctagagaaaatgccattatggcagaaagcaattttgtgttgaatgggacattttgtgtctcggaggagcaagtagacatggtattctgggatgaagtagaaatttgtagaaatgatgaagagcatctagggaacatgagttacagattggccggtgccactgcaaatcgtttcttgaaccattcgtgcagcaagtttggtaacaaccttctggagactcttttcctgg

SEQ ID NO: 43880 - DNA, 244 bp, Glycine max
atgcaatggagtggtctggtcaaaaacaatttggggcgtctggtacagtcccatttttagttgatggtgcagaagcaggaacgctgaaaagccatggacctctctctttcctcaaggtatacgaggctggtcacatggtccctatggatcaaccaaaagctgcacttgagatacgtcgaaactggatgcaatgtgttacgattatctcttaatgatgttgaaactcctctcggttctatgttgg

SEQ ID NO: 43881 - DNA, 246 bp, Glycine max
gccgagcatgaagcgcaagggaggtgtagaactgagcggaaggaatgtcttacataggaaatgggctcttctgctttgtgtggcaagcttctatgctggaatgttcttcaccaataggctatggtcaatggctgaatataacgaaatttcaagggcttctactgagattgaaagaataaactcaaactctgagggttgtactctaaatctagtcaatatgtctgttacacttttacttatgttgta

SEQ ID NO: 43882 - DNA, 268 bp, Glycine max
aagacaccctgcaatttgctctgtactccaaccatggatgagttattttcaaatagggagggctcatcagcacagaagggccttctcaaaagtccagcactccttaagtacatctttgaaaggagtggctatcccaaagagcacgagcaattgaagcaactccgagagataacagtgcagaaatacggggttaagagtacgatgagtgtaccggtggatgaggcccaattcctatccattcttctaaaaatcatgaacgcaaagaaaa

SEQ ID NO: 43883 - DNA, 239 bp, Glycine max
ccttacatcaccgagaataacacgatacggctcattgggaggaattatataatacacgtgaacgtgctcggcagttgttagccaatggaagctctgaaatccctgaggagactaccttcacaaatgttgaacagttcctggagcctcttgaattatgttatagatcgctgtgtgcatgtggtgaccaaccaatagctgatggaagccttcttgatttcttgcgccaagtttccacacat

SEQ ID NO: 43884 - DNA, 261 bp, Glycine max
tgattccaggaaccagtgttgaagaggcttacaacaagctaatagttgaacttgagaaaagtgttcctacattggttggcattgaatgtcccaaggatgagaaacttcctcgtcgcaaaatttttgacaaacctaagacgcgctgcttcactattctccctatggagtttaatcttgtggtccgtcaaaagtttttaaattttgtgaggttcattatgaagaaaagggacaagcttagttgtcaagttggaatcaacccat

SEQ ID NO: 43885 - DNA, 186 bp, Glycine max
gctaatgcactgcatgtgggctctatcgaaattatctttgatagtttcgcaagtactagatataacatacttggtgctatactttacgttactacatatcagagcagtactgacaatgcacgacgtagtatacctacagcgcctttacgcggaggacggcccattcgggtggttcactttccgaat

SEQ ID NO: 43886 - DNA, 270 bp, Glycine max
taaacttcttactgatgtgaagttgtactagggtcagcatattcctgtctctaatatcagtgtagggcgaaatcatgcagttcgaatacccttaatggcacaggatgagattctgtcttctgatgcaagtgacttcataactgtgttggtgcataaaaatagcacgcctcaagctactgcaattcatgtgggagctatagagattatcattgaaagtttcgcaagtcctgaatgcaacatagttggtgcaatgcttttggttgataacta

SEQ ID NO: 43887 - DNA, 254 bp, Glycine max
  unsure (1)..(254): unsure at all n locations
catctaggggcatcatgggagtggcatatgttgattgtgttgatgaggaggattcctttgaggaagtttctttaagtgcagcacttaatggtgttgagggtttggactatatggaaagaattcctcttgccacatctgagggttttcctcatgtgcttgcagacagcatacgacccgaaganattgnatntgggtnagnanagaatgaggaaaaggaatggaaagatgnatgggatgaaagggataaggatttt

SEQ ID NO: 43888 - DNA, 254 bp, Glycine max
tgagaaatcagggggaataacgtgtccaggaggagcattttcaaaccaacttgcaatgttaacagcaagaaattacatgtttccagagattaaaactaaaggatattgtaattttggcaagaagcttatagtatttacgtctagtggtggacattattctattgagaaaactggtatggcattaggattaggaattgataatatagttaaagttccttgtgatgatcaaggacgaatgcgcacagatgcattag

SEQ ID NO: 43889 - DNA, 253 bp, Glycine max
agtttttgatattctcttgagacactcccaagagaatatcaaaaacagtctacagtttttgatattctcttgggaaactctcaagattttgaaattgctggtaatactcttatgccagctttttctgttccacaggctactgccagatcttctgagcatgcggaatcctctgcatgatctggaatttatgttttctttcgcttgttcattcgtttaattcaataaaggaaattgggcatgaccctcttgttga

SEQ ID NO: 43890 - DNA, 224 bp, Glycine max
  unsure (1)..(224): unsure at all n locations
tgcttaggaaggngtgcgcatgacctattttgttttagatccacagaatccttttgtgggaaataggtgtatnnnaaatctgacgttccctcagtgcacttcctcgaagtgttaatagtttgcctctgtctatatgttgaggtgctggtgcaaagattgctagtctcatgagtatggcaaatgctgttctgtcagtgtggagttatttggttgtagatctcggc

SEQ ID NO: 43891 - DNA, 225 bp, Glycine max
gcatataggaagattcccaggcgaggagtgagatggatgggcaggagcaggatgtgtcgttgggagctaacatgtgccccgtgagacatcggctttggacggcgtcgcagagccaagacgacggcgaggactagcatgagccggcgctggcgccgctggttgaccctacggagtttacgtgttgagtcggttgacatagccgggatagcagcgtttgtggccact

SEQ ID NO: 43892 - DNA, 263 bp, Glycine max
ctcgtggccaaaaactcatcttcaaaggaaaggttttggaagaccccatgactttgactgcatccaaattgactaatggatccaaactcatgcttgtggcttcccaatgtttatatcaaggggatggtcctgtcttgaagaaagctcaggttgttcccaaatcgaggaaagatggtcactcaggctctagcaacgacatgaagaaaattcctgttaagaaccggatggaacggtggaaagcaacaggagttgtggcattgtct

SEQ ID NO: 43893 - DNA, 257 bp, Glycine max
attttgaaccaagacccaatgtttcaggttatggtggcaatgatgttgatgctaagccaaagaaaaatgtcatgaaagattttgaaccaagacccaatgtttcagcttatggtggcaatgatgttgatgctaagccaaagaaaagtgtcacgaaagattttgatccaagacccaatgtttcatcttacaatgacaatgacattgaagcagtggaagaaaagaaaatcatgaaaatactgcatccaatacctaaagtt

SEQ ID NO: 43894 - DNA, 252 bp, Glycine max
ctttgtgctaaataggtgtatgggaaaactgactttccctcaaggcacatcccgaagtgttaagagaatgcctctaactataggaggacgagctagagcaaagaatgctattctcataaatatgccatatgctgtctttcaatgtggagatattttgttggagatctcgtctatgtagttccaaagatgacttctccctacattaaatgtacagtctctttcttcatagcatttggatatttagctgatgac

SEQ ID NO: 43895 - DNA, 245 bp, Glycine max
atactgaggattatggaatccggctttcacataagcaatgtctttgtcttgtagatcctaacccgtgttctgatgcatggattttggaatctctgtatcgtaccttatttcattgtgatatcattgtgtcactggatggactgccaccccaatgcaggatgttcaggttacaattgattgctttatttcctctcaggaatgtgttcccaggtcttattgtgttttaaatccacaaaatccttttt

SEQ ID NO: 43896 - DNA, 258 bp, Glycine max
cagctgacgatgcgggatcctactgagtatctggaatccggcttgcacttcagctgttacgactggctaattccctaaaccgagttctgcatcaccctcttgttaagtactgtactcgcatatgtgaacatttcgaaaactactgtgatcgtcgtaatgactgtctcccctgtgcatgatgttcaggttacaattgaatggcttatttcctctcaggaatgtgttcccaggacctattgtgttttaaatccacaaaat

SEQ ID NO: 43897 - DNA, 246 bp, Glycine max
agttcagtgtctacaataccaggtgattttgtcattggtgttaagttgacaaacatagacaatatgtgtgcatataggacttaatacctggtaattcaggttctcgtcatttgggcaccattcctcatccatttcacagcaaactgtttggaatcatatggcaacagtgagtacaccattgaatattgattctagcaagcagagcttatgacaattttctatcgaccttctcagtagaggcatttt

SEQ ID NO: 43898 - DNA, 218 bp, Glycine max
gaaagtatggacgtcgagtaagtatcataggtagtggtatcagcttatcttattggatcagctctgaatgcttcagctgttaacctgataatgttgatcttaggccgggttatgcttggtgttggcattggatttggaaatcaggctattccgctttatttgtcagagatggcaccaacacaccttcgaggaggcctgaacatgatgtttcaagttgc

SEQ ID NO: 43899 - DNA, 247 bp, Glycine max
tggtcatggtctttggagagatcacaaccaaggccaacgtagactatgagaagattgtccgtgacacatgccgcgaaattggattcatctctgatgatgttggtcttgatgctgacaaatgcaaggtgttggtcaacattgagcagcagagccctgatatcgcccagggtgtgcacggtcacttcaccaagcgcccagaggaggttggtgctggtgaccagggtcacatgtttggctatgccactga

SEQ ID NO: 43900 - DNA, 243 bp, Glycine max
gaagagatgacattgattccaggaaccagtgttgaagaggcttacaacaagctaatagttgaacttgagaaaagtgttcctacattggttggcattgaatgtcccaaggatgagaaacttcctcgtcgcaaaatttttgacaaacctaagacgcgctgcttcactattctccctatggagtttaatcttgtggtccgtcaaaagtttttaaattttgtgaggttcattatgaagaaaagggac

SEQ ID NO: 43901 - DNA, 254 bp, Glycine max
ataaggaggaaataacaatacctattgtcacgataattatcataattacttccaatgggacaaaaaggaagaatcctcatcagacttcttcagattttgtcgccttatgactaagttccgccaggaatgtgaatcgctaggcttagctgacttcccaacctctgagaggctgcagtggcatggtcattttcctggaaatcggactggtctgaaaccagccgttttgtggcttgtaccatggtagattcagtgaa

SEQ ID NO: 43902 - DNA, 256 bp, Glycine max
ggcgttgggattatctcttatgtggtgcctgtttatatagctgagattgcacctcaaaacttgagaggtggccttgggtcagtgaaccagctctctgttacaattggcatcatgctggcttatctgttgggtctttttgtcaactggagagtccttgcaattctaggaattttgccttgtacagtattaatacctggattatttttcatacctgaatcccccagatggccaagatggggatgatagatgagtttga

SEQ ID NO: 43903 - DNA, 263 bp, Glycine max
accggatttcattgtgatatcagttgtgtcagtggatggactgacaatccaatgcagtatgtacaggttacaattgattggtggatttcctctcaagaatgtgttcccaggacctattgtgttgtaaatccacaatatcctatatggttagataggtggatgggaaaactggctttccctcaaggcacttcccgaagtgttaagagaatgcctcttgctatagggggacgatctagtgcattgggtactattctcatgaatat

SEQ ID NO: 43904 - DNA, 262 bp, Glycine max
gccctagaaaaccccttgaactacgcgcgcaactacctcggcgacatgctcgacgcgtgcgtgtcccgcgtgatctacctcgactccgacgtcgtcgttgtcgacgacgttggcaagctcctggcgcgccccaatcacgcgcgagcgcgtgcatcgccgcgccagactactgtcacgcgaacttcaccaagtacttcaccgacgagttctggaacgaccctctactctcgcgcgtgttcagcacgcgcaagccgtgctattt

SEQ ID NO: 43905 - DNA, 231 bp, Glycine max
tgttgatggtgtcaaggggtgccattgtttaagaggaaggagagctggttcatatctttatctggatgtacatattgaggttgatcctttctctagtgtaagtgctgcacatgacattggtgaaaatgttcgtcatcaaattcacaagtctcatcctactgtggttgaagttttcatacacatagatcctgccatgtcacatgcttctcatcagcgagatagttggagtgg

SEQ ID NO: 43906 - DNA, 231 bp, Glycine max
ctggaacaatgtggtttcttacctcattgaagagtatagtagtggccgaacccctaaccctgatgttctgtgcaatacaagaattaagtttggtccattcttggatgcgattggtggcatgggttttgactatgttgcctctgggcattatgcaaatgttatccacccatgttctgatcggagggatgaaccttctgttctggaactatcacaagacatggtaaaggatca

SEQ ID NO: 43907 - DNA, 222 bp, Glycine max
tatggaaagaattcctcttgccacatctgagggtgttcagtgtatgcacgtccagagttactggcttgcggttgctgtgtgcagacagttcaagccagtaactctggagctgggtggaaaatctccattcattgtgtgcaaggatgctgatgttgatgcagccgttgaggcttcacattttgctttattttttaatcaggggcaatgttgctctgctggttc

SEQ ID NO: 43908 - DNA, 222 bp, Glycine max
catgaaatcagtagttgattactttcaagaaatgtatggatatacaatcatatattctcatctaccctgccttcaagtaggaagccaaaagaaggtgaactatttgcctatggaggcatgcaagatagttgggggtcagagatatacaaaagggcttaacgaaaagcagataacttctctgctaaaggtctcatgccagagaccacgtgaacaagagacaga

SEQ ID NO: 43909 - DNA, 304 bp, Glycine max
atttcctctcagaaccctcgatcactcccacgcgctcctatatcctctccttcaccgtcgctctctccaacgatcacaacaacatcgtcatcccatggcaaacgccgcatctggtatggcagtccatgatgactgcaagttaaggtttttggagctgaagacaaagaggacacaccgtttcatagtttttaagattgaggagcagcagaagcaggtcattgtggagaagcttggtgagccagcccaaggctatgaagatttcactgccagccttcctgctgatgagtgccgttatgctgtttat

SEQ ID NO: 43910 - DNA, 306 bp, Glycine max
ggccaggcaagccccactcaaccaccacacctctcctcgttcacgctacccctttctgctcttcttctacctttcaagttttaaaagtataaagatggcagagacattcctatttacctcagagtcggtgaacgagggacaccctgacaagctctgcgaccaaatctccgatgctgtcctcgacgcttgcctcgagcaggacccagacagcaaagttgcctgcgaaacatgcaccagaaccaacttggtcatggtcttcggagaaatcacgaccaaggccaacgttgactacgagaagatagtgcg

SEQ ID NO: 43911 - DNA, 267 bp, Glycine max
  unsure (1)..(267): unsure at all n locations
cgttcaatagaattttacgagtaagctcangcactcgaggcgctacgtagcacaaaggatccagagtgggagctcacgagccaagtactgcgtcgtgtgcgagaacttaatcgcacagtagtagagtacgcgaaggcatatggtatcacgctgcatcgtacacgagacgatccagatcacaagtccacgggcgcaatgcagggttatggtcctgcagatcaaagcactgtactggagttgacttacaattatggactcctgcatacg

SEQ ID NO: 43912 - DNA, 292 bp, Glycine max
  unsure (1)..(292): unsure at all n locations
ctgccacctcaatgcaggatgttcangttacaattgattggtttatttcctctcaggaatgtgtccccaggacctattgtgttttaaatccacaaaatccttttgctttaaataggtggatggggaaactgactttccctcagggcacttcccgaagtgttaagagaatgcctctttctatagggggcggagctggtgcaaagaatgctattctcatgaatatgccaaatgctgttctttcaatgtggagatattttgttggagatctcgtctttgaagtttctaagatgac

SEQ ID NO: 43913 - DNA, 290 bp, Glycine max
tgcactcctgatcacagacaaacaccacagccaaaatggacgcgatcaagaagaagatgcaggcgatgaaaatcgagaaggacaacgctctcgatcgcgccgatgccgccgaggagaaagtccgtcagatcacggagaagctcgagcgaactgaggaagagctgagagacacccagaagaagatgatgcagaccgagaatgacctcgagcaggcacaggaagacctcaccgctgccaccactcaacttgaggagaaagagaagaaagtccaggaggccgaggccgaggtc

SEQ ID NO: 43914 - DNA, 269 bp, Glycine max
ccaaattgttttctcggatccggataagcgtcaatttctcaaccgattgctggctccttacatatcacgtggaatattttgggagattttgaagctatggatgaagggttataaggtcattgttcttgacgtgcctttgttatttgaggctaagatggacaggttcaccaagcctgttattgttgtatgggttgatcctgagacgcagattcagcggctcttggcgagagacaagtccggtgaggaggatgctcggaataggattaatg

SEQ ID NO: 43915 - DNA, 139 bp, Glycine max
ccgtgttctgatgcatggcgtttggagtttctggagcgtaccggatttcgttgtgatgtcgtttgtgtcactggatggtgtgccaccccactgcaggatgctcaggttagacttgattcgtttgtttcctctcaggggt

SEQ ID NO: 43916 - DNA, 266 bp, Glycine max
agtgtatgtgtagtagcatttttaatgagatgctcattagatatagctatgaaaaattactgcgccaggctaaagctccaagtatgtgtttacaatccttcaaaaattctgtttctttgtgtgtgtatggtgatgatgacttaattagtgttcatgaatatgtcaagccttactttagtggttctaaattgataagctttctagctggtcatgatatcaccattactggatggtattgacaaaactagtgcaactttgcaatttag

SEQ ID NO: 43917 - DNA, 233 bp, Glycine max
  unsure (1)..(233): unsure at all n locations
ggggtggcagtccatccagtgacacaaatgatatcacaatgcagaatgttcaggttacaataagtactgataacacattcctgaaatcagntaaaccaatcaattgtaacctgaacatccttcattggggtgcgcatccatccagtgacacaaatgatatcacaatgaaatccggtacgcttcaggttacaattgattgatttattccctctcaagaatgtgttcccaagacc

SEQ ID NO: 43918 - DNA, 260 bp, Glycine max
caagtaactctcgaactccattgttggagtctggtttgcaagatgacacaagggtaattgtggagtagtctggaaggatgtcttacgttgctcagaaccgtaatcagccccaagaggaagattggttagagggaaattgttgccgttgatattagatctcgctctatattggagaaagtgtcgtgcttgcagaagcacgatgtgttagtggaaaaagcttcaagtatgaggtaattggtgctgggtcacatgcggcagga

SEQ ID NO: 43919 - DNA, 274 bp, Glycine max
gttatgtgagcaaaacttggtggtccacatttgcagtttcatctttcatgtccttttgaaggcagaacaaaacacacttaaattgaactgcaagatcttcagaatcctttccaagcatcaagaacttcatggaagacttcagaaatcagatccctatctgcatttcgcaggaagtttcatcaactgatatagagatgcattttggagcctctcaagtacattctttgtgtcaatatcttctagaagactttcgtggcatacatctctcaagtca

SEQ ID NO: 43920 - DNA, 264 bp, Glycine max
cttagaaagaattctttctaaggttgcacaagatatggttgaggcatggtttgattgtgttgatgaggaggattcctttgacgaagtttctttaagtgcagcacttaatggtgttgagggtttggactatatggaaagaattcctcttgccacatctgagggttttcctcatgtgctttcacgcaacaatggaggcatcaggcaaaaggagatttgtctctggggatggtgaagagatgacattgattccatgatccagtgttg

SEQ ID NO: 43921 - DNA, 219 bp, Glycine max
ggtggccatatttgtatgctatggtgcatgatagttcagtgtctacaataccaggtgatattgtcattggtgttaagttgacaaccataaacaatatgtgtgcatatgggctcaatcctggtattgtagacactgaactatcatgcaccatagcatacacctatgggcagccatcagccaagagactcgttgcgagagccactgagtagaccaagctgt

SEQ ID NO: 43922 - DNA, 233 bp, Glycine max
gagcaatccgcgggtggaggagccggtcgctcagctaatgctcataattggcctcctatgcccagcttcatcccggtggcaccgtgcttttatcaggacattgacgtggagatccctgtacaattccaggaaacagttcgcctagtatactatatatatctaacggctatattagcactggtggtaaatgtagttgcatcacttttactcatattattcgctgccggaggaat

SEQ ID NO: 43923 - DNA, 229 bp, Glycine max
gtagatgtcagcattgaatatgatgcatatacaattccaaatgattatggttcgttaattattgccaaggttggaaatcacaaacaaattgttagtttccatattgctggaagcaaaggccgactgggatatacttcattaataccatatattgagccagttatgcacgctcaaagtgctgaagtttactttgacttcttccctatggaggttgatagtcaagagggag

SEQ ID NO: 43924 - DNA, 223 bp, Glycine max
gagggttttcctcatgtgctttcacgcaaaaatggcgaggaaggcataaggggatttatctctggggatggtgaagagatgacattaattccaggtaccagtgttaaagaggcttacaacaagcgaatagttaaacttgagaaaagtgttcctacattaattgagcatgaatgtcccaaggctgtgaaacttcctacgtcgcaaaatttttgaccaaccgaag

SEQ ID NO: 43925 - DNA, 231 bp, Glycine max
aaggttcatggttggcactttgttagaaagatgtttaatgagttgcctgtggaatcccttctagatttccgctcagagttatatgcgatagcattgtcaatgggatgcgcattagatatagctatgatacattactgcgccaggctaaagctccaagtatatgtgtacaatccttcaaaaattttatgtctatgtgtgtgtatggtgatgataacttaattagtattcatg

SEQ ID NO: 43926 - DNA, 230 bp, Glycine max
gtcctattatgttttagatccacaaaatccttttatgttaaataggtggataggaaaactgactttccctcagggcacttcccgaagtgttaagagaatgcctactgtctatagggggcggagctagtgcaaagaatgctattctcatgaatatgccaaatgctattactttcaatatggagatattttggcggcgatctcgtctttaaagtttctaagatgacttctcc

SEQ ID NO: 43927 - DNA, 225 bp, Glycine max
gtaaggcaagaggagatttgtttctggggatggtgaagagatgacattgattccgggaaccagtgttgaagaggcttacaacaagctaatagttgaactgtgcgaaaagtagttcccacattaggattggcattagaatgatcccaagagagtgaaaaaacttccacgatcgcaaaatgttttagacagaacctacagacgcgctagcttcactgattctcccta

SEQ ID NO: 43928 - DNA, 228 bp, Glycine max
ctggtgggcccgacaatgatttcggcatcaagtacaacgtcaacaacggtggtccagctccagagagtgtgaccgacaagatcttccaacgcaccaaggagatttccgcctacaaggtccttgatgctggcgagcttgacctatccaagattagtagctccacctatggtcccatggaggttgagatcgtcgactcgctcaaggactatattaccctactcaaggaca

SEQ ID NO: 43929 - DNA, 266 bp, Glycine max
gacactcacaaatcgcgatatgttgccttaaaaattcaaaagagtgctcagcattacactgaagcggcaatggatgaaataaagattcttaaacaaattgctgacggggatccagatgacaagaaatgtgttgtaaagcttttggatcactttaagcattcaggacctaatggccagcatgtttgtatggtttttgaattccttggagataatcttctcacacttatcaaatatagtgattatcgaggagttccccttcccatggt

SEQ ID NO: 43930 - DNA, 254 bp, Glycine max
caaaaatggcgaaaaaggcaaaaggagatttgtctctggggatggtgaagagatgacattgattccaggaaccagcgttgaagaggcttacaacaagctaatagttgaacttgagaaaagtgttcctacattggttggcattgaatgtcccaaggatgagaaacttcctcgtcgcaaaatttttgacaaacctaagacgcgctgcttcactattctccctatggagtttaatcttgtggtccgtcaaaagtttt

SEQ ID NO: 43931 - DNA, 257 bp, Glycine max
ctctctctcaccaaagccttcctagaacgataaaaaaaagaagagcaattttccctcaccaaagaagaagaagcaaacaatggccgatcaacttaccgatgaacagatctccgagttcaaggaagccttcagcttgttcgacaaggacggcgatggttgcatcacaaccaaggagcttggaactgttatgcgttcattggggcaaaacccaactgaggcagagctccaggacatgatcaatgaagtggatgctgatg

SEQ ID NO: 43932 - DNA, 249 bp, Glycine max
aaaaaattactgcgctaggctaaagctccgaggatgtttatacaatccttcaaaaattctgtttctgagtgcgtgtatggtgatgataacttaattagtgtacatgaatatgttaagcctaactttagtggtgctaaattgaaaagctgtctagctggtcataatatcaccattactgatggaattgacaaaactagtgcaactttgcaatttagaaagttagtagattgtgatgttctcaagagaaac

SEQ ID NO: 43933 - DNA, 268 bp, Glycine max
ccggctcgagctcgagatcagaaccttaatcgtccccctcatgctctccgcctcccccaaaatccaatctcagctcagcgaacccttgccctaatcggtcaccacgatttccccaaatcctggccctctctcctccccgaactcatcgcaaatctccaaaaagcctcccagtcctccgattacgcctccattaacggtattctcggcactgctaactctattttcaagaaatttaggtttcagtataaaaccaatgacctattgctcg

SEQ ID NO: 43934 - DNA, 153 bp, Glycine max
tgagaatacaggtatagcattggcctgtgctatgaatagttcttttagggggcgcgccagttctgatatttacaccatctgctctcaagactgtgaattatggaatcctgcttgcacaaaagcaatgactatgtcattgtaatccaagacccg

SEQ ID NO: 43935 - DNA, 230 bp, Glycine max
cccggatttcattgtgatatcatttgtgtcactggatggactgccacgccaatacaggatgttcaggttacaattgattggctgatttcctctcaggcatgtgttcccaggacgtcttgtgttttaaatccacaaaatccttaggtgttaaataggtcgttgggaaaactgactttccctcagggcacttcccgaagtgtgaagagaatgcctctttctatagggggagg

SEQ ID NO: 43936 - DNA, 221 bp, Glycine max
tcaataaccagtgagagtcacaatcaaatagtagggaatgggttaatccttggaacagggctgattccatattgtgcaaccttctttgtattcactgactacatgagaggtgccataaggctttctgcgctgtctgaggctggggttatttatgtcatgacccatgattcaataggacttggagaagatgggccaacccaccagcctattgagcacctagc

SEQ ID NO: 43937 - DNA, 245 bp, Glycine max
cagttggtattcctgagaatacaggtatagcattggcctgtgtcatgaatagttcttttagggggcgcgccagttctgatatttacaccatctgctctcaagactgtgaattatggaatcctgcttgcacaaaagcaatgactatgtcatttaatccaaacccgtgttctgatgcatggagtttggaatttctgaagcgtaccggatttcattgtgatatcatttgtgtcactggatggactgcc

SEQ ID NO: 43938 - DNA, 243 bp, Glycine max
ggagctccaccggtcggagttcctcaaaagggaggagaggattctttcaacactgaaatgtcctcaaattgtggcctaccgaggctgtgacaacacgttcgagaacggcgtgcagtggttcaacatgttcatggagtacgcgcctcacgggaccctggcggagcgcggtggcgggatggaagaagcggtggtggggtcctgcacgcgccaaattctgcagggcctgaactaccttcactccaa

SEQ ID NO: 43939 - DNA, 242 bp, Glycine max
gagatgtgtctctggggatggtgaagagatgacattgattccaggaaccagtgttgaggaggcttacaacaagctaatagttgaacttgagaaaagtgttcctacattggttggcattgaatgtcccaaggatgagaaacttcctcgtcgcaaaatttttgacaaacctaagacgcgctgcttcactatttgccctatggagtttaatcttgtggtccgtcaaaagtttttaaattttgtga

SEQ ID NO: 43940 - DNA, 247 bp, Glycine max
ccagaaactgtattttggccagttttcatagtggccactcttgctgccattgttggaagtcaagcagtgatttcggctaccttttccattgtaagccagtgttgtgcactaaattgttttcctccggttaagattgttcatacttcaagcagaatatacggacagatttatgtcccagaagtcaattggatattaatgtgcctttgtttagctgtgacaattggcctaagggatattgacatgatgg

SEQ ID NO: 43941 - DNA, 243 bp, Glycine max
cttcctcaccgattgctagcctggaatttcgatgctcagtcatctcttttaccattctcttctctcttgctcttgcaggagagagccatgtccatgcatcgctacctgaggaagattattgggaagctgtttggccaaacactcccattcccactgcactgcgagaacttctaaagcctctccctgcaggtgttgaaatcgatgaactccctaagcaaattgatgatacacagtacccaaaaa

SEQ ID NO: 43942 - DNA, 241 bp, Glycine max
atatgcaggtcgtagtatttttgttgcgcctttcagaggcggaaggctcatgcgggtgggtacatttcccaatatcagtgggcacgttgaaccagacatggatgacttgtttcagcttttgagtaccactaccaatggtgattttgttcaagggaaagatctcgcaatggttaaagttaatgtagcatgtgctgctgtttgcttgacatcaagttacactccaactccattgttggaatct

SEQ ID NO: 43943 - DNA, 256 bp, Glycine max
ctatcaggatccgtgggaaccagctagcagagatgccatttattggtacccgatatatgtacaggccacaaggaatgtgccgccggcttctaaatgctgttgaatggggactcggctctttaaatgttgagttattggtcataccagctatctcagaactcagagaaacttggacttctgtttttgggtttgagtcacttgaatctacaagcagcaaatattacataataagaacctgttggtatttcctcatgta

SEQ ID NO: 43944 - DNA, 256 bp, Glycine max
gctgtgtttttaattgatggatttgcttgcagatccgcttatcgccaatgctgcgtacattggcactcctggaaagggtattcttgctgctgatgagtcaacagggacaattggcaagcgtttggccagcatcagtgtagagaacattgaatccaacaggcgagctcttagggagctgcttttcactgctcctggtgttcttcaatatctcatggtgtcatcctctttgaggaaaccctctaccagagcacagctg

SEQ ID NO: 43945 - DNA, 254 bp, Glycine max
ctcgagccgatcgcggaatcatgtttcgcggaaatcaccaaagacggcgccgtatctcttatgggatttcttgaaatggtggcgaagtgtcagaaatcgacggaaaaaatgttcaggattctggatttgtacgaagcgatctccgactactggcctcagatcgaattcatattctccttcgagtcaacggttaacattcgcacacagaccgttcgtcgatggtgaaactcggcgacgctgttagaacgatgcta

SEQ ID NO: 43946 - DNA, 222 bp, Glycine max
atagttgttgcaatgcttctggttgatacttaccataccaaacctgaaaattcagttcatactatttttgttacgtctttcaaaggcgaacggctcatacgggtggttacatttccgagtaccattgtgcagattgaaccatacatgaatacgaggtttcaccctttgagtaccactaccaatcgtgagtttgttcaaaggaaagatctccaatggttaaag

SEQ ID NO: 43947 - DNA, 274 bp, Glycine max
gtcctattagtggtgagttaactgtagaaacatctgcagttccaattcattcaattgatcttcagttgtttcgagttgagtccattcttctcgggtagtaaattgtgaccgaaacctctctggttcaaacaacacagatacagatggagatgtgtgccgcaatatgacgctgcctatttatgtaatagtaccgcgccttttgacctgtccaacaactttagctggctggcaatggaaacattaccgctagagttgattcggacaaagtaagatg

SEQ ID NO: 43948 - DNA, 273 bp, Glycine max
gcactattgctatgatgatgctgaccttaaaaagcttcaaagatcattccctgctaatgcatcatacaacatgcaaaggttcaaagggttgggagagatgatgcctttacaactatgggaaacaaccatggatccagaacgcaggttattgaagcaattaaaagttgaggatgcagcagaagcaaatattgttttttcgtctcttatgggtactagggtggatgttcggaaggaactcatacgaaattctgcaagcctgattgatcttcatca

SEQ ID NO: 43949 - DNA, 251 bp, Glycine max
gtaagtcaattaccttcagaagctgtcgttgtaaatgttacatgtggtagtggacgtggtggtttacccaccactgcttggattagttctgcagttaacaatcgctcctcagacatcaacaaaaggattcgcacagcacttgggaaaggtaagaaaattgtttttcttactagagttgatccttatacagtagctttattggctgttctttttggcgttaagaatgaaattctgagttctaacgccactaa

SEQ ID NO: 43950 - DNA, 246 bp, Glycine max
attaagcatggtcataaattgagaatagtatggccagtaacccctgaaattcatcattacactgaagggccatgcaggtatcttggtcatctgattggtcatgaaggagaagggtctttatattacatattgaaaaaattgggatgggctacgatattgtatgctggcgaatcagattggagtttggactgttctttctttaaagttgtaattgatcttactgatgctggtcatgagcacatacaa

SEQ ID NO: 43951 - DNA, 242 bp, Glycine max
aactggtgacccagatgctgggattagcatccaccagaattgcattaccagttgagcttgcagaagatgggcccatttatgtcaatgccaaacaataccatggtatactgagaaggcgacagtcacgagcaaagcttaaggctcaaaacaaactcatcaaaagtcgtaaggtatgcttcacaaattacagttatacattattttgattcaccctgtttatcctaccttattcgtgtatggtc

SEQ ID NO: 43952 - DNA, 228 bp, Glycine max
cccgcatgtgccgtagcagttgagctgaaaccgagaagaagaagatggagatgtatcagatctggagcaggagaatagcgttgggagcgttcgcgtttgttctgcttttcctatcggcctcagcagacgacgtcgttgtgctctctgaagataacttcgagaaggaagttggtcaggacagaggagctctcgttgagttctatgctccttggtgtggacactgcaaaa

SEQ ID NO: 43953 - DNA, 245 bp, Glycine max
gttcatccatgaatctgtgagacttatgcatgaggctggttatgagattgggaatttagatgctacattgatacttcagaggccaaaactaagcccacacaaggatgctatcaaggccaacttatctgcactgcttggggtggactcttctgtagtaaatatcaaagcaaaaactcatgaaaaggtagacagccttggagaaaatagaagtatagcggctcacacagtggttcttctaatgaaga

SEQ ID NO: 43954 - DNA, 246 bp, Glycine max
actcgagccgcggctcgagatgatattctgtgttgcgattatgctacttttgatggtttgactaccaagcaagttatgacgcaagatggcagaaatgataaacagtctttgtggtggtgatgaaaaattgatgcgtgaaaggacgcacctgctgttggcttgttgttcaaggatggcaatttgtaagaaagatgtttggagagttgaatgtggaatcccttctggatttccgctcacagttatttg

SEQ ID NO: 43955 - DNA, 248 bp, Glycine max
atttgtttaaattgtctcttgatgatgttgaaactcctaaaggttctatgttggatcttaaaatttctcaatctaaaattgcacttcccaagaacacagttggaggaaccattctgcgtagtgatctattggcaaattttttgacagagggcaattttagagcaagtgttcgatttgcagcgcactcatcgtattaaaggaatgattaaaatggtggccacagttggtattcctgagaatacaggtat

SEQ ID NO: 43956 - DNA, 248 bp, Glycine max
aaaggatgttgttaaaggtttaaagaagcggattggaagtaaagttcctagagttcaaattcttgcactgactctgctggagacaatcataaagaattgtggggacattatccacatgcatgttgccgagagagatgttcttcatgagatggtgaaaatagtaaagaagaagcctgattaccatgtcagagagaagatattgattcttatagatacttggcaagaagcttttggagggccaagggcaa

SEQ ID NO: 43957 - DNA, 240 bp, Glycine max
aggagtttgtgctgcggacagggagtgttggtgctgggtgctctcaattgctctcagatatgcaggctttcaaggctgcaaatcctggatgtattttggaggattttgtaagatggcactctcctcctgattggacagataatgaagcaagtacagaggatagtgatgtttttgatagtggtgagccattgtctgccagaggtcagctaagtcggcgaatgcaaaaagaaggtaatttat

SEQ ID NO: 43958 - DNA, 189 bp, Glycine max
aaaagctcaatttattagtggaaaaaccttcaaatatgatataattaatgctaattcacattcttcagaagattttcctgaaaaggaagatcaagaaaaacccaaaaagattaatgccagattgagacaaagaatagatcctacaatacaataaggttcaagctcagatggaaacaaatttatttaaat

SEQ ID NO: 43959 - DNA, 198 bp, Glycine max
ccgattgagggcacgcttcttatacgggcacttccacaataacaatatttagccgacctttgacatttctattagggctacccattggtctactatcgttatatctgatgctaatagcatagaaatgcgagcgcttatatttttggcttcgagtcctacagtaagtgtatgcttatcgaatgcaacaacaggccaacc

SEQ ID NO: 43960 - DNA, 268 bp, Glycine max
gctcgattctcggctcgtggcttacaggttagtttactcaagtgcatgccataacgcatctagtaggctgattcagtgtgcctatttatattgtcatggtgcaagataattcagtatctacaagacccggtgattttatcattggtgttaagttgacaaccataaacactatgtgtgcatatgggctcaatcctggtatttcaggttctcgtcttttggagcacattcctcagtccatttcacagcaaactgtttggactcaaatggc

SEQ ID NO: 43961 - DNA, 196 bp, Glycine max
aaggtacagcacttaataatattaagggtttagactatatagaaagaattcctcttaccacatctaaggattttcctcatatactttcacacaaaaatggcgaaaaaggcaaaaggagatttatctctagggatggtgaagagatgacattaattaccaggaaccagtattagaagaggacttacaacaagctaat

SEQ ID NO: 43962 - DNA, 239 bp, Glycine max
cggacaccatcaattttgaggcttttccccacaacctagtacggccgcagagagattcaggaacaagttgtgttgaaattttcacacgaggcattacttacagcttggtcaactcaggtgcgtcccgcaacgactcatctggctaataggtgcccatatttgtatactatggtgcatgctagttcagtgtctacaataccaggtgattttatcattagtgttaagttgacaaccataaa

SEQ ID NO: 43963 - DNA, 248 bp, Glycine max
gctaccctttttaataagggtcgcagagtccacagttatctttttccccatattccagttaggatgttttaatgcatcagcaactttaacatctttcagtttatcaactggccaatccctgctcgagccgttttaatgagatgctcattagatatagctatgaaaaattactgcgccaggctaaagctccaagtatgtttttacaatccttcaaaaatttgtttctttgtgtgtgtatggtgatgata

SEQ ID NO: 43964 - DNA, 244 bp, Glycine max
caactgatgagagattggtaggcacagaacatgaggcacatgatccttttctaggtggaattcaaaaatatgccactcccatgatgcccctagatgaagaaattctttctaaggttgcaaaagatatggctgaggaatggtttgattgtgttgatgaggaggattcctttgaggaagtttctttaagtgcagcacttaatggtgttgagggattggactatatggaaagcattcctctgccaca

SEQ ID NO: 43965 - DNA, 251 bp, Glycine max
gcatgttattagtggtggctacaacatcgagacaggacctggctgtatgcttgcacttatgaactttgatatgggcggttctgctgcactttttggagcagcaaaagctctaggtcagatcaaatctcttggtgtggaggtctgtcatttatatcattgctcactacttttcattttattgtttcacattatctgttatcttgctaactttcaatctactgttaaaagcctctgcttggtcaatagttagt

SEQ ID NO: 43966 - DNA, 247 bp, Glycine max
cataacactaggattgccagttgtaggagggatcagttccgagttttccaacttaaggaaagctgcggttacagattacaaaagttttgttggttcaatctcatcactctcagctaggattgttgagattagagaacttgtttcccagtgtggaaatggcaaaggaggcaactttgtgagagaaatgaacaattttcttgaaaatgctgaggaggaattagattagtgagggaggagcaaacaaggt

SEQ ID NO: 43967 - DNA, 266 bp, Glycine max
cactaccaatggtgattttgttcaaggaaaagatctcgcaatggttatagttaatgtagcatgtgctgctgttggcttgacatcaagttacactccaactccattgttggaatctggtttgcaaaaagacagagggttaattgtggagtattctggaacgatgtcttacgctgctcataacgctaatcagccccaagagaaagatttgtcactagggaaatttttcctttgatattaaatctcgctctagattggcaaaagtttcc

SEQ ID NO: 43968 - DNA, 248 bp, Glycine max
  unsure (1)..(248): unsure at all n locations
cttgtggagacagctgactttgcaaggaactcaaatgacagnattgcagcaccatcatctgacacataacaggatactttatccacaggatagtccacagcaagaatagaaagcactgtattagccgtgatcaatggtggttctttcagaggatggtgctgcaatgctgtcatttgagtcccttgtggagacagctgactttgcaagaaagtgggttccattttgcaaaaagttttcaattgaaccac

SEQ ID NO: 43969 - DNA, 258 bp, Glycine max
ctactattggcatggacgaaacaatagaactatatatgaattaagtcccaagacactgtcatctggatttgatgattatccacgtgcttcacacccaagtgcagatgagcgccacgtggatcttagatgttggatgttacttgcaaccgattgtctgcaatacattgaagagttgttggataaggaaactaaacctggcaaagtataaatttgaaaaaattatggttctactgctaaattgctatcagatgtcgagtt

SEQ ID NO: 43970 - DNA, 259 bp, Glycine max
tgagaacttcagcaatagaatgaaccctccaagggtctctgtggacaatgctagttgccatgattgtacactgattaagattgatagtgttaacaaacctggaattctgctggaagttgtgcaaatcttgacagaccttgacttcgtaattaccaaagcttacatatcttctgatgggggttggtttatggatgtatttcatgtcacggaccagcaaggaaaaaagataacagatagcaaaaccatcgacctcattgaa

SEQ ID NO: 43971 - DNA, 253 bp, Glycine max
attggagcctctgaggctgaagcggttgttagttcttctttggcttgtcttactagaaaacaatcaggtgataagtgttcagcacctgcatcggcatttgcccagtgtcaattgttaaatattagttactgccctccagcagaagacaacattccagaggctaagagtttagtagtagtggtgtataacccacttgggtggaatcgtactgatattgtcaaaataccagttaatgatgctaatcttgttgtca

SEQ ID NO: 43972 - DNA, 181 bp, Glycine max
ccggctcccaactcgttaccaacgcgcgtggacactccgaaactcaaagaagacggaaaaatgtatatcaaagctgttgtttgaatcaaaacccccatggatgcaacacttgcatgagggttaactaataacccgcagagcaaaatcataatttcataccaccaccattccacacaacata

SEQ ID NO: 43973 - DNA, 253 bp, Glycine max
ccttgatgagattgtgttgagggttttcaatggaggtatacatgatgaaaatgaccatgtttattgccctaaaattgtgcggattggtctcaaagcacatcattctatcaaggctgtttccctggatgaacttatgaaacaaaaacgttccagtgccaacaaatcatctaccaataaacagagtaacaacggtcccgcaggaagtaatgatgatagtctccgggctgcaattttagatgaggccacaattgtc

SEQ ID NO: 43974 - DNA, 249 bp, Glycine max
ccggaatttaagtactattcatatacccggagtattctccgacggctgttgcgacttctggactgaccatgtgtcgaatctggctcacatacaggagttcacgatggtatgagctagactacgctgcgtccatacggatgttcatgcagggcgacagcacatagcagattgccttcggtcccggattcacgtctagcagcgcagtctggaaggctctcaggaccatcatccctgctagagagagtagtc

SEQ ID NO: 43975 - DNA, 246 bp, Glycine max
aaaaagtttcctctactaaagcacaatttgttagtggataaaccttcaaatatgatataattagcgctggatcacatacttcaggatatattccatagaaggaagatctagatcaatccaaaaagattgataccagattgagacaaagaatagatcctctatacaatgaggttcaggctcagatggaaacaactttgtgtaaattgtcacttgatgatgttgaaactcctataggtgctatgttgg

SEQ ID NO: 43976 - DNA, 244 bp, Glycine max
attgtattgaggatctattctttgtctcaatctgggcctgaacctcattgtattgaggatctattctttgtctcaatctggtatcacatgtgtttaaattgtctcttgatgatgttgaaactcctaaaggttctatgttggatcttaaaatttctcaatctaaaattgcacttcccaagaacacagttggaggaaccattctgcgtagtgatctattggcatattttttgacagagggcaattt

SEQ ID NO: 43977 - DNA, 248 bp, Glycine max
ttttattttgattaatttaggcaagttacctcatggagatatttagcgggggtgagttggaccgtcgggtcatggaaaagcttggttatcttaattattcttatactccttgggtatctgagaacctagatatctctgagagagcagtatattacaaatttgagaagcgtatttcaagttataaaggtgaagtgacaagtactcaacaaagatctccccttccggatggcaagggttggcttgtggaa

SEQ ID NO: 43978 - DNA, 242 bp, Glycine max
ttgatgccaagtttgagtctcaagaagaccctttgttcattcaggccaccaggtttaactccgagagaagccgtttggcgcagagttttgaatacaattacggggattttatacccttgctccggccattcttgagagggtacctcaacaagtgcaaggacttgcagtctaggaggttagacattttcaacacccactacgttgagaaaagaagacaaataatggctgccaatggggagaag

SEQ ID NO: 43979 - DNA, 249 bp, Glycine max
tgtttgttctctctttagttcatatctatgctagggaatccactcttaccattaaactgaaattgtgacagaaaaaaggcaaaatggagagccagccactagaaaaagcaaaaccaaaatacagaaaaggcttatggtcacctgaagaagataataaactcagaaaccatatcattaagcatggtcatggctgctggagctctgtccctattaaggcaggcttgcaaagaaatgggaagagctgtagac

SEQ ID NO: 43980 - DNA, 246 bp, Glycine max
ccttttctagattattggttgacaaacaaaagagttgacagatatgactacaacactgcctcgttgattttcatattcctgtcatgcactattgcaattggcaccaacctaagccaatttatctgcattggcagattcactgctgtttcttttcaagtactgggacatatgaagacaatacttgttttaatcatgggattctttttctttggaaaagagggtctcaatctccaagtggtttttgga

SEQ ID NO: 43981 - DNA, 239 bp, Glycine max
ccaagtcatactttggaggatgaatgacacaaaggcatgggaagtggacaccttgagagggcacatgaataatgtttcatgtgttatgttccatgccaagcaggatatcattgtgtcaaattccgaagataaaagtattcgcatatgggatgcaacaaagagaactggaattcaaacattccgccgaaagcatgacaggttttggattcttgcagcccatcctgaaatgaatctgctgg

SEQ ID NO: 43982 - DNA, 241 bp, Glycine max
tttttcctttgatattaaatctcgatctagattggaaaaagtttcctctacaaaagcacaatttgttagtgggaaaaccttcaaatatgatataattggtgctggtgcacattcttcaggagagttacctgagaagggagatcaagaaaaacccaaaaagattgataccagattgagacaaagactagatcctcaatacaatgaggttcaggctcagatggtgacgaatttgttctaaatt

SEQ ID NO: 43983 - DNA, 265 bp, Glycine max
ctgacatgcaatgctacaacgaatttatgcattatctggaggaaaagaagcgtgccgcagtttccaagttggatgacaagaccactttatttcttgttcctccatcagagttctcagagaaaatactgaaggtacctggtaggttgagcatatctggtgttattctgaggttggagaaccctggtttaaatcatggtcctgaacacattcaaagagatatgacaaacgaaaacctgctgtcctataatgagaatatactgcatcc

SEQ ID NO: 43984 - DNA, 264 bp, Glycine max
gttcaagggaaagatctcgcaatggttaaagttaatgtagcatgtgctgctgttggcttgacatcaagttacactccaactccattgttggaatctggtttgcaaaaagacagagggttaattgtggagtattttggaaggatgtcttacgttgctcataacgttaatcagccccaagagaaagatttgttagagggaaatttttcctttgatattaaatctcgctctagattggaaaaagtttcctctacaaaagcacaattt

SEQ ID NO: 43985 - DNA, 231 bp, Glycine max
gtttttcttactagagttgatccttttccagtagctttattggctgttctttttggcgttaagaatgaaattctgagttctaacgccactaaccctatgctgacgcgacttcttgagaactgtaagagtctcaaatatctggttgatgagtgtccttttgcatttgtgaactagtatgtaatattttattcacttaaataaagcgcattactatgtgcaatgagtgtgttt

SEQ ID NO: 43986 - DNA, 240 bp, Glycine max
ctgatgagagattggtaggcacagcacatgagggatatgatcctcatcttggataaattcaaaaatatgccactcccatgatgcccctagatgaagaaattctttctaaggttgcacaagatatggttgaggaatggtttgattgtgttgatgaggaggattcctttgaggaagtgtctttaagtgcagcacttaatggtgttgagggtttggactatatggaaagaagtcctcttgcca

SEQ ID NO: 43987 - DNA, 244 bp, Glycine max
atgcggctctagcaccagttgtagcaatagtgcagaatccgatcgtaatgcttgaagctgcattcggtagagagagagcatgtgaattgggatttcaggttaagccatggattaaaataagccttgccccagggtctggtgtcttgagcaagtatgtggcgaggagtgggttgcagaagtatttgaatgagctaggggtcaatatagttgtgtatggattcacaaatccattggaaattcaggg

SEQ ID NO: 43988 - DNA, 275 bp, Glycine max
cttggttaccaatttttgtgaattgtctctatcctgtaagtcaattaccttcagaagctgtcgttgtaaatgttacatgtggtagtggacgtggtggtttacccaccactgcttggattagttctgcagttaacaatcgctcctcagacatcaacaaaaggattcgcacagcacttgggaaaggtaagaaaattgtttttcttactagagttgatccttttccagtagctttattggctgttctttttggcgttaagaatgaaattctgagttct

SEQ ID NO: 43989 - DNA, 277 bp, Glycine max
tggtaacaaatttgtttccatctgagcttgatcctcattgtattgaggatctattctttgtctcaatctggcatcaatgacctgaggttcaagctcagatggaaacaaatttgtttaaattgtctcttgatgatgttgaaactcctaaaggttccatgttggatcttaaaatttctcaatctaagattgcacttcccaagaacacagttggaggaaccattctgcgtagtgatttattggcaaattttttgacagagggcaattttagagcaagtgt

SEQ ID NO: 43990 - DNA, 265 bp, Glycine max
tgacacaagatggaaagatggaagtgagtagaagtagatgcagtccagctgaaggtcatgcaaatcgagctcatgacgttgtaaatcatgcatctcatgaaagcctcaaggatcaaattcctgctgctgagaagaggtatgctactaaggataacaagtcagccatcattatgaagcttagacaaagagttgttggtgatcataaacttcttactgatagtaaagtgtatcagggtacagcttactccagtatctgatattagtg

SEQ ID NO: 43991 - DNA, 264 bp, Glycine max
agcaagcagagcttttgtcaattgtctattgaccttctcggtggaggaattttagtggacaaaactgtagattggatcacacttataccaaattctccaattagtcacttgttgagagttgctgccttgaagaaatgtagattgatggtcaagcattgtgatgtctgggaatgcagcagtcctcaggagtgattgggcctcattggtaccagtgtttttaacttccagctacagtacagagtatcatgatgcatgtgagtggac

SEQ ID NO: 43992 - DNA, 263 bp, Glycine max
  unsure (1)..(263): unsure at all n locations
cagcagagcgaaagatggaagtgattagagatagaggcattcctgctgatgtactttgaaagcgaggtcatgaatttgaaaaacatgttgctcatggaagcctcaaggatcaaattcgcggtgttgacaagttgtattctagtaaggttaataagtttgcaaaaattatgaagctcagacgaagtgttgttgtgtgatctgagacttcttactgatgggcaagcgtnccgggcgtaagcatattcctgtatctgatattagtg

SEQ ID NO: 43993 - DNA, 220 bp, Glycine max
gggtcagttgttgttgccaaggttggaaatcacagacaaattgttggtttccatgttgctggaagcataggaagactgtgatatgcttcattgatacctcatgttgagccatttgtgcaagctcaaagtgctgaagtttactttgacttcttccctgtggaagttgatagtcaccagggatttgctcacattggtgaattgcaatctggtgtctatgttc

SEQ ID NO: 43994 - DNA, 248 bp, Glycine max
ctctagagtaattgcggaatctgctagaattttctaataatggcgaaagacgttgagcaggtcacagagcaaggtgaatactccgcgaaggactaccatgaccctcctccggcaccgttgatcgacccagatgagctcacaaagtggtccttgtacagagccgccatagctgagttcatagcaacactcctttttctttacatcaccgtgttgaccattattggctacaagagacagagtgacaccaa

SEQ ID NO: 43995 - DNA, 245 bp, Glycine max
gtttccaaatatgcccgtggcgacggactagaagttgttgggaaacaggatcatcaatccctgtgatccgaacatggggattgatgatcctgtttccaaatatgcccgtggcgacggactagaagttgttgggaaaaggttggccttgatgtctgagaaatttggcatcccagttgagtttcatggagttcctgtttttgctccaaatgtgacaagggaaatgcttgatatcaggccaggagagg

SEQ ID NO: 43996 - DNA, 237 bp, Glycine max
attttatgtgctggaacatgccctgtaagagttcctatcttacatcctcttgcaaaaacatcaggtggagttttggttctccatgatgattttggggaagcctttggtgttaatttgcaaagggcatctgccagatcagcaggctctcatggtttgttagaattgcgcacgtcagatgatattctcattactcaagtcgttggtcctggggaagagtcacatgtagatacccatgaa

SEQ ID NO: 43997 - DNA, 278 bp, Glycine max
ctctttggcacgtcaagtttttgatggcgttgccaagaaggatgctgtcttgtgaaactgtttaatagggaattatgcaagaactggaatggttggagaagcactggcttcattcgagcaaatgagtgttcgaggaatgaaacctaattcttctaccttgtcagggctgctctctgcttgccctgcgtctggatcagtacaagtagttcgtcatgtcgctagttttgttgaagagcagaaagtaaaactggatgcggttcttggaacggctcttgttg

SEQ ID NO: 43998 - DNA, 270 bp, Glycine max
ggcttacaacaagctaatagttgaacttgagaaaagtgttcctacattggttggcattgaatgtcccaaggatgagaaacttcctcgtcgcaaaatttttgacaaacctaagacgcgctgcttcactattctccctatggagtttaatcttgtggtccgtcaaaagtttttaaattttgtgaggttcattatgaagaaaagggacaagcttagttgtcaagttggaatcaacccatactccatggaatggactggtttggccaatagatt

SEQ ID NO: 43999 - DNA, 276 bp, Glycine max
tcaaccttcttatacaatatctttggattttatgcgcagttcttaccaatagtattgaagtgcattgatgctagtaggaaagaggtcgagattgaacttagcaaactagtgaaactatgtcggtgggtgcatggcaagagttatttatcaattgaaagcttgaaaaagggtcggcagaagctgaagaagcttatacaaaagtatactgatattctgcaagaacccgtgtctattttctttagccaagaagttgcacaaagaggagcaaaagtgcaa

SEQ ID NO: 44000 - DNA, 269 bp, Glycine max
tgtttttttaagcaaatagaagttaacatttttcatattgtctcaaacacgttacacgtacgtacacaaggatggaagaaatatgttgtgctaataattttggcaagaattacttcaccaaggcaaagccatatttcttaacggtggcactgcagtttggtttcgcaggagggtacatcttcaccgtagccagtttcaacagtggaatgtgtcgttttgtgttcattgtctatcgcaatgccttcgctgcattggccctcgctcctttt

SEQ ID NO: 44001 - DNA, 216 bp, Glycine max
aacgccttcagaacccgtgaacggcaagcactcggatacgggtatggatgaacgatacgtgtacggtgtctctgaaatgcagggctggcgcatcagcatggaggatgcgcacgcgaccgtactcaagctggatccgcagactaataatgcgttctttgctgtattcgacggccatggaggctccaccatagccaagtattccggctcccatattca

SEQ ID NO: 44002 - DNA, 272 bp, Glycine max
aattaaggaaataagaactcaagtaccttggaaatggcgatgccaattcccatgttgaaaggtcttcagagatttagtgcgatttatgatttcaggcgcgcatgcaagaacatgaaggaaaaagaactcaagtaccttggaaatggcgatgccaattcccatgtttgtaaagtatgttttgaatctccaactacagtaattctgctttcatgccgacatttttgtttgtgtaaatcttgttcacttgcttgttttgagggtccaatatgccg

SEQ ID NO: 44003 - DNA, 241 bp, Glycine max
ggaagaaatctcaaagtctggttgtccttgtgaatgataaagaaagaatcatagaagttaggcagaaggctgctgctaacagggacaagtttcgcaacagtacagcaggtggaatgtatagacctggttcatattcaagcagtggagcctatggtgacagatatgatgatgatcgttatggaagcagggaagaagatagaaatggctatggttatggaaaggaaagagaatggggcaatag

SEQ ID NO: 44004 - DNA, 241 bp, Glycine max
aaaagatctcgcaatggttaaagttaatgtagcatgtgctgcagttggcttgacatcaagttacactccaactccattattggaatctggtttgcaaaaagacagagggttaattgtagagtacggtggaaggatgtcatacgttgcacataacgttaatcagccccaagagatagatttgttggagggaaattgttcctttgatattaaatctcgctctagattggaaaacggatcctct

SEQ ID NO: 44005 - DNA, 233 bp, Glycine max
gtgaagttaccactggcagaatcaagcatcacaacagcaaaattcatctccaacaatcccaacatgttaacttctgaagatgagtattacagacagctgataaaaaactgtccactgtttgttccagttgaaacaaaccacaaagatgggattagcctcagttctgcaaaatttactggaatttctaatgttcaaaacttgtacataactggtcacagcaatggaaccataac

SEQ ID NO: 44006 - DNA, 230 bp, Glycine max
  unsure (1)..(230): unsure at all n locations
ggagggtcctagacctcgaatgctaggaaacattgagctgattttcagttcataacaaataatcaaggcaaaatatggacaagatgcatgtaatgttggagatgaaggaggatttgctcccagtgttcaagataacagggaggggtttgttttactcgtggatgccattgagaaggctggttatactggcaagattanaattggtatggatgttgcagcttcagagttta

SEQ ID NO: 44007 - DNA, 253 bp, Glycine max
ggcacataacggacatgtacttgtacttctcattgctcttgttacctcattcattattatcacagaaggcgttactacccctaatcctgaaatagcatctctgaatcggaatagtttcccaactggcttcatctttggcacagcatcctcggcatatcaatacgaaggtgcagcaaatgagggtggtagaggaccaagtatttgggataccttcacccataaatatccagataagataaaggatagagacagt

SEQ ID NO: 44008 - DNA, 255 bp, Glycine max
aattctcacaggggacaacttgatgtattcctatggacttttatatctccctctttcctcctattctctactatgtgccacccaattagtcttcaacgcggtgttctctttcttcctcaattcccagaaattcacagcattcataatcaattctgtcgtcctccttaccatatcagcttctctgcttgcaatcaactccgattccgacgaggactcaaccggtctttccagagaaaagcatgtaattggattctt

SEQ ID NO: 44009 - DNA, 263 bp, Glycine max
cagcttcccgcatacatgctgcacttagggaacactctctaaaactgagaactaaggcggttgcatcttccaatccagaggctcaagcacgcaaaatagttgcagcaatgaagattcagcatgcctttaggaaccacgagacaaagaaaatgatggcagctgccgctcgcattcagtgtacataccgtacatggaagattcgtaaagaatttcttaacatgcgtcgtcaggctgttaaaattcaagctgcattccggtgcttt

SEQ ID NO: 44010 - DNA, 245 bp, Glycine max
gtgtatggtgatgataacttaattagtgtcatgaatatgtcaagccttactttagtggttctaaattgaaaagctttctagctggtcataatatcaccattactgatggttctaaccataaactcgccttctactcaggatccacccataaaacattagacatctgcttaaagttttatgggtggctcctgaggacaaggcgagtctatggtcacaacttcattatgtttcgtgcaataatctgg

SEQ ID NO: 44011 - DNA, 237 bp, Glycine max
ttgccccagagcaaggtaccgacgcctcattgagggagctctcggctactttagaggtccagctgaagcttcagtcgatgcagttcactttgtcttaaaagaacttgtgaggaaatcaatagctgaaactcaggaactgagacgtttcccaactctccaagccgaaatagctgcaggtacaaatgaggctttagagaggttccgtgaagagagtaagaagacagttatccggcttgt

SEQ ID NO: 44012 - DNA, 253 bp, Glycine max
cgagattccccctaaacccgtttgcgttgttgtttgcgaagaaatggcgactaagaggagcgtgggaacgttgaaggagggtgatttgaaagggaagagggtgttcgtgagggtcgatctgaacgtgcctttggatgacaaccttaacatcaccgatgacactagagtccgtgctgctgttcccaccatcaagtacttaactggtcatggagccaaagtgatcctttctagccacttgggacgtcctaaaggt

SEQ ID NO: 44013 - DNA, 202 bp, Glycine max
atcagggctcaccgacgaccagatttctcatccatgaatgaacccaacaagtccttgtaatcaatcatggatgagaaatcagggctcaccgacgaccatatagcggataatgttattggcgtcattttcgcagctcgtgacaccaccgccagtgtgctgacgtggatcgtcaagtacctcggtgaaaaccccagtgtcctag

SEQ ID NO: 44014 - DNA, 247 bp, Glycine max
agatgacattgattccaggaaccagtgttgaagaggcttacaacaagctaatagttgaacttgagaaaagtgttcctacattggttggcattgaatgtcccaaggatgagaaacttcctcgtcgcaaaatttttgacaaacctaagacgcgctgcttcactattctccctatggagtttaatcttgtggtccgtcaaaagtttttaaattttgtgaggttcattatgaagaaaagggacaagcttag

SEQ ID NO: 44015 - DNA, 235 bp, Glycine max
tgcttggactcatctgaagagcatcaaggttgcactgagcggacagaaaaccttattcttgcatcagatcctgatcgtgagggggaggctattgcttggcacatcattgagatgttacaacaacagggtgctctacatgataatatttctttagcaagagtagtctttcacgaaataactgaaatatctataaaaggttccacacaacatacgagatagctataggtggatgtgc

SEQ ID NO: 44016 - DNA, 257 bp, Glycine max
ctcaagtccaacctacccctttttcttctcccaccaacttcagcgtcctcttcctcgatcatgtctcacttcaagggcaagtaccatgatgagcttattgccaatgctgcttacattggcactcctggaaagggtattcttgctgctgatgagtcacaaggacaattggccagcggtttggccaccatcaatgtagagattgtggattccaacaggcgtgctcttagggagctgcttttcaccgctcccggtgctct

SEQ ID NO: 44017 - DNA, 262 bp, Glycine max
cttagatgacaaatggaaggtatacctacgcaggaaccgtgagggacaaatggatcctaaaggtgatatatgggctgccccatatcgatggggctgcatggtaatagcatacaagacaaataaattccaaaagcataaattggctccggtagaggactgggcagatctgtggcggcccgatcttgcagggaggatttcaatggttgattctccccgagaagttattggcgcagttttgaagtatatgggggcttcctacaat

SEQ ID NO: 44018 - DNA, 257 bp, Glycine max
tggatggaggcatctgctgttggcttgctgcgcaagggtggccattagttgggtcagaggcctggagagttgaatgtggagtgcccttctggatttccgcacacagttatttgtgatcgcattgttgacgagatgctcattagctgtagctatgagaaatgactgcgccatgcttatgctcctagtatgactgtaggatcctacaaagcttgtgcatctttgcgcgtgtatggtgttgctaacttcattagtgtcca

SEQ ID NO: 44019 - DNA, 240 bp, Glycine max
agtttgtactattgatgtctggtgtgatgaatgtggtgtcccttctggatttccgcgcagagttatttgcaatagcattttctatgtgatgctcattagatatggctatgactaattacttcgccatgctagagctccaagtctgtgtttacaatccttcatgaatgttctttctgtgtgtgtgtatggtgatgataacttaattagtgttcatgaacatgtcaagccttactttagtgg

SEQ ID NO: 44020 - DNA, 268 bp, Glycine max
agcagaacctggcaaactgctgataagatgaagtcacaaagaggaccactgcagcctggtgaagacaatgacaactttcggatcaagcgttatgttgcaaagtataccataaatccagctatagcgaatggtttgtcgcaatatgttggttcagttgaggcgggtaagttggctgatcttgtattatggaagccgtcattttttggagcaaaaccagaaatggtgatcaaaggtggtgaggttgcatatgctaacatgggtgacccaa

SEQ ID NO: 44021 - DNA, 233 bp, Glycine max
tatgccacttgcattcgttgcgagattaagctttgtagactttgacgccatcgaggtgttgtggagatttagatattctggtgtctccttctagaagggaatttcaaagatatatatgttgtcttcgaattcatgggatctgattgacatcaggtcatcaaagctaattatgatctgagtaccagaacattaccagtttgacttgtatcagcttctacgaggcttggtgtata

SEQ ID NO: 44022 - DNA, 250 bp, Glycine max
tctgaggttcattctgaagccaagggacaagcctagttgtcacgtttgtatcgtcccatactccatggaatggtctggttttgccaatagattactgagtcagggcgatgatattctgtgctgagattatgctagttttgatggtctgattaccaagcacgctatgagcacgctggcagttatgataaacagtctacgtcgtggtgatgaacaattgctgcgcgacaggacgcacctgctgttcgcttgt

SEQ ID NO: 44023 - DNA, 279 bp, Glycine max
ccttttacgattttgtgatgttgttgtggttgttaggtttgaagagcaaaactaatcttacttgatgttttgtgctgcaggttgggaattagtgcctttggtggtcaccatgttccttcttagaaggcaaacccagaatcaccatgagaatgattcctcatatcaagatacaaaggtggctgaactcaagacagctcttgggcccctctctggtcgtcaattaaagtattgcacagatgcatgtctaaggagatatttagtagcaaggaactggaatgt

SEQ ID NO: 44024 - DNA, 264 bp, Glycine max
caattttgtgaggttcattatgaagaaaagggacaagcttagttgtcaagttggaatcaacccatactccatggaatggactggtttggccaatagattactgagtaagggcaatgatattctgtgttgcgattatgctagtttttatggtttgattaccaagcaagttatgagcaagatggcagaaatgataaacagtctttgtggtggtgatgaaaaattgatgcgtgagaggacgcacctgctgttggcttgttgttcaag

SEQ ID NO: 44025 - DNA, 252 bp, Glycine max
cgctcgagccgattcggctcgagccaacatggaacctttaggagttacaacatcatcaagagaccatttaaactcctaacggacccatgttggatcttaaaatttctcaatctaaaattgcacttcccaagaacacagttggcggaaccattctgcgtagtgatttattggcaaattttgtgacagagggcaattttagagcaagtgttgatttgcagcgcactcatcgtattagaggaatgattaacatgg

SEQ ID NO: 44026 - DNA, 267 bp, Glycine max
ctcgagccgattcggctcgaggacctattgtgttttaaatccacaggatccttttgtgttagctaggtggatgggaaaactgcctttccctcagggcacttcccgaagtgttaagagaatgcctactttctatagggggaggagctggtgcaaagaatgctattctcatgaatatgccaaatgctgttctttcaatgtggagatattttgttggagatctcgtctttgaagtttctaagatgacttctccctacattaaatgtacag

SEQ ID NO: 44027 - DNA, 268 bp, Glycine max
gccacagttggtattcctgagaatacaggtatagcattggcctgtgctatgaatagttcttttagggggcgcgccagttctgatatttacaccatctgctctcaagactgtgaattatggaatcctgcttgcacaaaagcaatgactatgtcatttaatccaaacccgtgttctgatgcatggagtttggaatttctgaagcgtaccggatttcattgtgatatcatttgtgtcactggatggactgccaccccaatgcaggatgttc

SEQ ID NO: 44028 - DNA, 254 bp, Glycine max
tctcgcgccgattcggctctaggatagctgcagtttatgtagaaaccattcaaggagaagatggaatttacagtgccacaacagaatttctacagtctctgcatagtgcttgttatgaagctggggctcttctcgctctcgatgaggttcaatgtggtttaggtagatcagggttactttgggcccatgaggcatttggtgtcttcccggatatgatgacccttgcaaagcctcttgctggaggcctacctatt

SEQ ID NO: 44029 - DNA, 257 bp, Glycine max
aattttcacaagaggaatttcttacagcttggtcaactcaggtgcgtcccgcaacgactctgttggctgaagggtgcccatatgtgtatgctatggtgcatgatagttcagtgtctacaataccaggtgattttgtcataggtgttaagttgacgaccataaacaatatgtgtgcatatgggctcaatcctggtatttcaggtactcgactttcgggcaccatacctcagtccattgcacagcatactgttttgaat

SEQ ID NO: 44030 - DNA, 281 bp, Glycine max
tattcggctcgagcatgttcgcaagaggagcttcttacagcttggtcaactcaggtgcgacgcgcaacgccactgctagatgattggtagtgacaccttgaactgaggttcggcggcggaggctatggctgggagccacctcgacgaggtcaagcgcatgctagaggagtaccggaggcccgtcgtcaagctcggtggatagaccctgaccatctcgcaggtcgcggcgatcgcggtccatgagcacggggtgaaggtggagctggcggagtcctccaggg

SEQ ID NO: 44031 - DNA, 250 bp, Glycine max
tgcgacagtgtcagggacacggtcaagtgcaagtttccattcatcgaaaaacgaaccgagactgcatccaaggaacttgagaaaaaggcttcctctctgagaaaccttgagaggaagttctacagctcatattctatggtaggcattagccttcctgattctgcacctgacaatggacaagttttggatgcacgcgacccacttgctgagaaaaaactggaactggcaacctgccaaaggcgtgttgaag

SEQ ID NO: 44032 - DNA, 248 bp, Glycine max
gaaagaattcctcttgccacatctgagggttttcctcatgtgctttcacgcagaaatggcgaagaaggcacaaggagatttgtctctggggatggtgaagagatgtcattgattccaggaaccagtgttgaagaggcttaccacaagctaatagttgaacttgagaaaagtgctcctacattggttggcattgaatgtcccaaggatgagaaacttcctcgtcgcaaaatttttgacaaacctaagac

SEQ ID NO: 44033 - DNA, 278 bp, Glycine max
tgtcgagttgttatgcattcccgttctgtgtgcatatgggctcgctcctggtatctcaggttctcgtcttctgggcacgaatcctcagtcgatttcacagttaactgtttggaatctggtggcagcagtgagagcatcattggatttggagtctagcaatcagaggttgtggcgatttcctatcgatcttctcggtggtggactattagtgggcttgactggcgattggatcgcacttatagctgggtgtcgagcgacgagcttgttgagagttgctg

SEQ ID NO: 44034 - DNA, 258 bp, Glycine max
  unsure (1)..(258): unsure at all n locations
ctcgtctttgaagtttctaagatgacttctccctacattaaatgtagagtatctttcttcataggatttggaaatttggctgatgacaccatcaattttgaggcttttccacacaacatgggaccccttggagagatttaggagtgagttgtgttgaagttttcacaagagggatttgttacagcttggttaactcaggtgcgtccagcaacgacctgnatggctgatgggtgcccatatagtatgtatggtgcatga

SEQ ID NO: 44035 - DNA, 256 bp, Glycine max
gaagcagagggagtagcggcattaaaaatgcagatcttcgtgcaaactctggacagggaagactataaccctcgaggtcgagagcagcgacaccatcgacaatgtcaaggccaagattcaagacaaggaaggcatacctccggatcagcagcgtttgattttcgccggaaaacagcttgaagatggaagcgaccctggccgattacaacatccagaaggaatcaacccttcatctcgtcctcaggcttcgtggtgg

SEQ ID NO: 44036 - DNA, 271 bp, Glycine max
tggttgtcaacttcagacgttgatcagtttctctgccacaactattttgtgtgtgtgttgttccaatgggtgatgaatccagtttgcttaaagaaagcacatcaatcaatgacaccaatatggtggaagaggttgaagaaagggatccagaaagcaatccattgaatgagccacttctcaagaggaacaggactttgtcttccaatccacttgctcttgttggagcaaggtttcctacatagaaagcttggactacgagatcaatgagaat

SEQ ID NO: 44037 - DNA, 239 bp, Glycine max
atggaaagaattcctcttgccacatagtccaaactctcaacaccaataaagtgctgcacttaacactgttgagggtttggactatatggaaagaattcctcttgccacatctgagggttttcctcatgtgcttcaacgcaaaaatggcgcaaaaggcagaaggagatttgactctggggatggtgaagagatgacattgaatccaggaaccagtgttgaagaaggcttacaacacgcta

SEQ ID NO: 44038 - DNA, 241 bp, Glycine max
atagggtgcaggagacatatcattctgacttaaatggtaaggactttgcatatgatggggcgaaaagtctgtttactgttggctctcttcctcaaaacaagcttgactttgaagttgtacttgaggatgtcacctctaacaggactactggtaattgcagccctgatggtctaggggatcatgcctgtgacatcaagaggatgcgacgtccttctcgtcgaagtcattcaaagtagtgata

SEQ ID NO: 44039 - DNA, 247 bp, Glycine max
cggatttggttaatgatcgtccatctacggcacagttcagagagaagcttccctggtttcttgatgcactgccatcagctgattgtgccaagggtggtcatggagcttacaccaacagtgtagatctgaatggttatgagggtggtgtcatccaagcttctgagttccgtacttatcacacaccagttaatagacaaggtgactatgttaatcaatacgagctgcaagggacttttcggcaagattt

SEQ ID NO: 44040 - DNA, 261 bp, Glycine max
attacattggtggccacagttggtattcctgcgactacaggtatagcattggcctgtgctatgaataattctattagggggcgcgccagttctaatatttacaccatctgctctcaagactatgaattgtggaatcctgcttggacaaaagcaatgccgatgtcattgactccaaacccgtgttctgctgcatggcgtctggcattgttgtagcgtaccggatttcattgtgatatcatatatgtcactcggtagactgcc

SEQ ID NO: 44041 - DNA, 254 bp, Glycine max
gagaatacaggtatagcattggccgatgctatggctagttcgtttagggggcgcgccaggtctgatatgtagaccagctgctctcaagactgtgaatggtggaatcctgcttgcagagcagcaatgacgatagcatttaatccgaacccgtgttctgatgcatggagtttagaatttcttgaagcgtaccggatttcaatgggatatcatttgggtcactgggtggactgccaccccaatgcaagatgttcagg

SEQ ID NO: 44042 - DNA, 260 bp, Glycine max
ggcagtgctactgttgttgtcatggttgtggactgtgttgatttcgatggttcattccctagaactgcggtgaagtcgttgttccaggcgttggaaagaattcaggataactcgaagaggtccaagaagctgccaaaacttgttcttgtggccacaaaggttgatctccttccgtcgcaggtttctcctgcaaggttggatagatgggttagaaaccgtgcaagatccggaggagcgcctaagttcaacggggtttatat

SEQ ID NO: 44043 - DNA, 246 bp, Glycine max
ccatatgacgagatcctgagataccaggattaagcccatatgcacacatattgtctatgggcttaatcctggtatttcaggttctcgtcttttgggcaccattcctcagtccatttcatcgcaaactgtttggcatcaaatggcaacagtgcgcacaccattgaattttgattctagcaagcagagcttttgtcaattttctatcgaccttctcggtggaggaattttagtggacaaaactggaga

SEQ ID NO: 44044 - DNA, 245 bp, Glycine max
gcaagaggctctagacacgctaattatgggaaacaagactactattttaatagcacatagggctgcaatgatgaggcatgtggacaatattgtagtgcttaatggaggacggatagtggaggagggcagtcatgatacattggtagccaagaatggtttgtatgtccgactgatgcaacctcattttggtaaggctttgcgtcaacatcggcttgtttaggatgggagtatgtgatgttgtgaga

SEQ ID NO: 44045 - DNA, 240 bp, Glycine max
ggcaaaaggagatttgtctctggggatggtgaagagatgacattgattccaggaaccagtgttgaagaggcttacaacaagctaatagttgaacttgagaaaagtgttcctacattggttggcattgaatgtcccaaggatgagaaacttcctcgtcgcaaaatttttgacaaacctaagacgcgctgcttcactattctccctatggagtttaatcttgtggtccgtcaaaagttttta

SEQ ID NO: 44046 - DNA, 237 bp, Glycine max
caaccctaacgcgtgcagagcagagagagacgcagccatggggcgaagacccgcgaggtgttataggcaaattaagaacaaaccataccccaagtcacggttttgccgtggtgttcctgatcccaagatcaggatttacgatgttggtatgaagaagaagggtgttgatgagtttcctttctgtgtccatctggttggtatgggagaaggaaaacgtttctagtgaggccctggaag

SEQ ID NO: 44047 - DNA, 194 bp, Glycine max
tcaaagaaggcgtcttcataaacgcctttcttctccgtttccgtttcctcgttcgaattcgctttttgatctgcgaaaatgagagagtgcatctcgatccacattggtcaggctggtatccaggtcggaaatgcttgctgggagctctactgcctcgagcacggcatcgggcccgatgggcaaatgccaagtga

SEQ ID NO: 44048 - DNA, 244 bp, Glycine max
gctcaaggagatcaagcgcttctacgtgcagaacggcaagacgatccccaactcggtgtcgaccatctccggcgtgcccggcaactcggtcaccgactccttctgcaccgcccagaagtccgtcttcggcgacaacaacattttccagaagaggggtggcctggccggcatgtcccaggccctcaacgccggcatggtcctcgtgctctccatctgggacgaccaccacagcaacatgctctgg

SEQ ID NO: 44049 - DNA, 264 bp, Glycine max
cacaaacctgcttgctgttcttgttcatcctccggatcatcccgggagaattcctcccgaggggggacaaggcggtgatcatgagataggaaaggatgtgactacacagtatgttgaaggttgggattggatggctcctatagggataggaatactggaatatgggatgaggtttctatttctgttactgggccagtacaaataattgatccacacttggtttcaacattttctgatgattataagaaggcatatctacataca

SEQ ID NO: 44050 - DNA, 256 bp, Glycine max
gtacgagggggattgggtggacgggaagtacgatgggtatggggtggagacgtgggcgcgtgggagccgctaccgtgggtgttactggcaggggctgaggcacgggtttggggtctataggttttacaccggggatgttatgctggagagtggtctaatgggcagagccatgggtctggggttcacacttgcgaggatgggagtcgctatgttggggagtttaagtggggggtcaagcatggccttggccattacc

SEQ ID NO: 44051 - DNA, 251 bp, Glycine max
aaaaatctaagattataatgaaattggcggatattttgcaatcagataatctgcagaatgtgcaggcattgacgcgtgcacgtgttcccatagtaaagctcatggattcagtgacaggaatatcttgtgacatatgattaacaatctcctagctgttgtgaataccaagcttcttcgggattatgcacacatagatccaaggttgcgtcagtggctttcattattaaacattgggctaagtcaagaagagt

SEQ ID NO: 44052 - DNA, 244 bp, Glycine max
agcttagttgtcaagttggaatcaacccatactccatggacttcactggtttggccaatagattactgagtaagggcaatgatattctgtgttgcgattatgctagttttgatggtttgattacaagcaagttatgagcaagatggcagaaatgataaacagtctttgtggtggtgatgaaaaattgatgcgtgaaaggacgcacctgctgttggcttgttgttcaaggatggcaatttgtaag

SEQ ID NO: 44053 - DNA, 244 bp, Glycine max
tttaatgtagggagaagtcatcttagaaacttcaaagacgagatctccaacaaaatatctcaacattgaaagaacagcatttggaaatttggctgatgacaccatcaattttgaggcttttcccacaagctggtgcagtttggagagattcaggaaaaagttgtgttgaaattttcacaagaggaatttcttacagcttggtcaactcaggtgcgtcccgcaacgactctgttggctgatgggt

SEQ ID NO: 44054 - DNA, 99 bp, Glycine max
caattttagagcagtgttgatttgcagcgcactcatcgtattagaggaatgattaaaatggtggccacagttggtattcctgagaatacaggtatagca

SEQ ID NO: 44055 - DNA, 255 bp, Glycine max
ctttcagaggcggaaggcccattcgggtggttacatttccgaataccattgtgcagattgaaccagacatgaattcaaggtttcagcttttgagtaccactaccaatggtgattttgttcaaggaaaagatctcgcaatggttaaagttaatgtagcatgtgctgctgttggcttgacatcaagttacactccaactccattgttggaatctggtttgcaaaaagacagagggttaattgtagagtattttggaa

SEQ ID NO: 44056 - DNA, 253 bp, Glycine max
ctcgcaatggttaaagttaatgtagcatgtgctgctgttggcttgacatcaagttacactccaactccattgttggaatctggtttgcaaaaagacagagggttaattgtagagtattttggaaggatgtcttacgttgctcataacgttaatcagccccaagagaaagatttgttggagggaaatttttcctttgatattaaatctcgctctagattggaaaaagtttcctctacaaaagctcaatttgtta

SEQ ID NO: 44057 - DNA, 244 bp, Glycine max
ctttttccatacaacatactatcatgcgacatggagattttccgtctccgggttgagtggtactaaatcttacgtagcaatgaatgcaatggacgaagggcctctagccagtcgtaagaagctacttcgtgctcagacataacgagaaattctgcagtctcttgatcacccttttctcccaactttgtacacccattttgagaccgacgaattctcactcttggttatggaactctacccaggt

SEQ ID NO: 44058 - DNA, 238 bp, Glycine max
gttgaaactcctaaaggttctatgttggatcttaaaatttctcaatctaaaattgcacttcccaagaacacagttggaggaaccattctgcgtagtgatctattggcaaattttttgacagagggcaattttagagcaagtgttgatttgcagcgcactcatcgtattaaacgaatgattaaactggtggacatgtggttttccctgagaataccggtatagcattggcctgtgctat

SEQ ID NO: 44059 - DNA, 242 bp, Glycine max
gaaaacgcagacgagtgcatggtgcttgacaatgaagctttgtatgacatctgctattgtacccgcaagctaaccaccccaagctttggtgacttgaaccatctgatctcagctacaatgtctggtgtcacttgttgtttgaggttccctggtcaacttaactctgatctgcgaaagcttgcagtgaaccttattcccttccctcgcctccacttcttcatggttggatttgctccattgac

SEQ ID NO: 44060 - DNA, 277 bp, Glycine max
tattctgctcgagccattctccaccacatctccttcttctacaatctctaccacatatcctcatcaggagtgacgaatctacgagggtgtcattggcatcgatcttggcacaagctactcttgcgttgccaactacgagggcaccaatgtcgagatcattgccaacgagcagggtagcttcaccactccctccttcgtctccttcatgagcgaggagcgtctcatcggtgaggccgctaagaaccaggtcgctatgaacccggagagtactgtcttc

SEQ ID NO: 44061 - DNA, 252 bp, Glycine max
tcccatactccatggaatggagtatgggttgattccaacttgacaactaagcttgtcccttttcttcataatgaacccatactccatactatggactggtttggccaatagattactgagtaagggcaatgatattctgtgttgcgattatgctagttttgatggttcgattaccaagcaagttatgagcaagatggcagaaatgataaacagtctttgtggtggtgatgaaaaatgatgcgtgaaaggacg

SEQ ID NO: 44062 - DNA, 262 bp, Glycine max
gaagcccgggcccacttccgagagaaactttggccttttttaccctgacgagaggagggtttacaatgttccgttaacggtggaagagctcaaggactaccacgaccgtccgtcggcgccggtgagcggcggcggacagcagaaggagacgccggcgcccgttgtgagcggcggggtttcgaagagtaccactgggaacacatggtgcgtggcgaaccccgacgcggataaggtcaagctgcaggcggctctagatttcgct

SEQ ID NO: 44063 - DNA, 261 bp, Glycine max
tgctcattacatatagctatgaaaaattactgcgccaggctaaagctccaggtatgtttttacaatccttcagaaattttgtttctttgtgtgtgtatggtgatgataacttaattagtgttcatgaatatgtcaagccttactttagtggttctaaattgacaagctttctagctggtcataatctccgttacgggggggattttgaaaaaactattccactttgcaatttagacagttagcagattgtgattttctcaa

SEQ ID NO: 44064 - DNA, 245 bp, Glycine max
attcttgctaatcatttctgcagcagcagtgggagtatcacttcctttcttgatcggttcaatcttctatagtaaaattgaagggtggttagaaaagtatccaaagagagcttctgttctaagatctgctggtgggggaaattggtttcatcaatttcaggcagttgctttaatcagggtttctccattcccatacataatctacaactattgtgccgtcgcaacaaatgttgagtattggcctt

SEQ ID NO: 44065 - DNA, 243 bp, Glycine max
caattgggcaaatgcatccatagtgactagggtggatatctggtatccgaaaacttgcagtttgccctgtcaatcctccagggtccaaataactcagttttctctcatgaactatttgggtcaatggattagtttgatccaaaacttgagataatggatgtaatccaaaaaaagattcataagtaaaggttatgatgttcaatacagaaaaacttcaactgtatgtcccaactccagtgacag

SEQ ID NO: 44066 - DNA, 306 bp, Glycine max
ctcttctccaagaatagagttttcacgtagtacatcgtgttaaaggatacagggttcacaattgaaacattcgtaggtcatttggccatggtcgacctctggagaacgtcaaaccaccaccggtcaccttatctacaagctcggaggtattaacaagcgggtcatcgagattttcgagaagaaagctgctgatatgaataagaggtctttcaagtatgcctgggtgcttgacaagctcaaggctgagcgtgaaagaggaatcaccattgatattgctctgtggaagtttgagaccacaaagtacta

SEQ ID NO: 44067 - DNA, 275 bp, Glycine max
cagagcagttcctctgctctatgcttggcgatgattctgatattaacttggctgttgttagagacgttctttgtcagtgtggaaatgatattgaaagggtatgatgacaatctgagattgtacttcaggcctcagatatattgcttgatttagctgcttccacaaatgagaaaccgaatactgctagacatcctaactacggagtggacaacatagatgatgagaggttctttgctgaccccaatgacagtttgatagacaggagattagagtgc

SEQ ID NO: 44068 - DNA, 242 bp, Glycine max
cagtaaggacagggttaacctttccccatggtaacatgctggcaattccaaggaagaagacaggaattcttgacgattttcgttctagcggttggctcgatgcaatgaaatcgtcttctcctactcacactaaggtatccaaggatgttagtcatgggattggatcacctgattctgcttatagtacctggctgctaaagtttccatcagcactagcatcttttggatcaatttaccaactg

SEQ ID NO: 44069 - DNA, 161 bp, Glycine max
caaatataaccaatataagtggctggctacacgaggggtagatgaagaagctcttctcaaaggacttccagctgatctgaggagagacatcaagcgccacctttgtctggaactagttcgacgagtcccattgtttgatcaaatggacgagagaatgctgg

SEQ ID NO: 44070 - DNA, 245 bp, Glycine max
gagctagtagagaagatggaagcgctgcgcaacacaatcggggaggtcaatggccaattcaaggacgccgacctgacgaccttcgtctgtgtatgcataccggagttcttgtctctctacgagacggagcgcatgattcaggactaaacagctacgaaatcgacacccatgcaattgtggtgaaccagctgctgttccccaagaaagataacccgtgcgagcaatgtaacgcgcgccgcaagatg

SEQ ID NO: 44071 - DNA, 246 bp, Glycine max
ctttttgactcctggaatcatataccagtgcgacctgggaacacaaactcctgacatgaagatatttcgtgagattgacatccctgggtttgatcgctctgagtttcatgtcaatcaggtttttgtgccttctaaagacggtacaagattccaatgttcattgttgccagaaaggatattgttttggatggttcacacccttgtctgttatatggatatggcggctttaacgtcagtcttacacca

SEQ ID NO: 44072 - DNA, 241 bp, Glycine max
ctcgagccgctcgagccgtttgcaatttagaaagttagcagattgtgattttctcaagaggaactttaagcagatgtctaatgttttatgggtggctcctgaggacaatgcgagtttacggtcacaacttcattatgaggcgtgctataatctggttatgcgagaagcttatctcgtcaatctcgtaaatgtgttacgagaattgtatatgcacagtccagatgtagctcgccaattgagg

SEQ ID NO: 44073 - DNA, 238 bp, Glycine max
ggtgttgttactgctgctcttttctcttttcttttctctttagttctctcttcccctttctttttctttttcttcttcttctgagcttgtttaagcttttcttccattaacatattatcataatgtgtggtattcttgctgttcttggttgttctgatgactctcgagccaaaagggtccgcgtgcttgagctctctcggagattgaagcaccgtggccctgactggagtgggctcca

SEQ ID NO: 44074 - DNA, 239 bp, Glycine max
caaggatcaaattcctgctgttgacaagttgtattctactaaggttaataagtttgcaaaaattatgaaccttagacaaagtgttgttggtgatcttaaacttcttactgatgggaagttgtatgagggtaagcatattcctgtatctaatattagtgcaggggaaaatcatgtagttcaaatacccttaatggcacaggaggaaattctgtcttctagtgcaagtgatttcagaactg

SEQ ID NO: 44075 - DNA, 231 bp, Glycine max
cttccaaattctctgctgttggcttagacacaaccgatcttgttgcattatctggtgcacacacttttggtcgtgcccaatgccaatttttctcccaaaggttattcaacttcagtggcacaggaagccctgatccaaccttgaactcaacctatttggccactcttcagcaaaattgtccccaaagtgggagtggatctacattgaacaaccttgacccttctacccctg

SEQ ID NO: 44076 - DNA, 251 bp, Glycine max
ctagcacacaaaacttgctatagcagtaagctataactcatttgaggctctgtgagaattgagaaatggctaaagatgttgaggttcaagagcaaggaggagagtactctgccaaagactaccatgaccctcctccagcacctttgttcgacccaaagagctcacacagtggtccttctatagagccctcatcgcggagttcatagcaaccttctcttcctttatgtcactgtgctcaccattattggcta

SEQ ID NO: 44077 - DNA, 250 bp, Glycine max
tgtcaagcttcatgctgaggaagggagtgatgaagtttattgccaggtggtgctggttcccgaaagtgagcaagtgcagcagaagttgcgggagggggaatttgatgctgatggtgaagaggaagatgctgaagctgtgatgaagtcgacgacgccccacatgttctgcaagactttgactgcttctgataccagcactcatggtggattctctgtgcctcgtcgcgccgcggaagattgcttccctccc

SEQ ID NO: 44078 - DNA, 213 bp, Glycine max
ctaaaattgcacttcccaagaacacagttggaggaaccattctgcgtagtgatctattggcaaattttttgacagagggcaattttagagcaagtgttgatttgcaacgcactcatcgtattaaaggaatgattagacatgggggcccagttgggaattcctgagatgacaggttaaccattggccgtgggattgaaaagtcctttaaggggg

SEQ ID NO: 44079 - DNA, 247 bp, Glycine max
tttcgatcaggaagacaacagtggtttaagtcttgcactccaggaagacagtgcaaaaacagggaaggttacctctgctgggatgtattttcttgggtttcctgtttatcgattagatcaaacaatgaactctatagctgctgctaaggatccagatacgtcatttttcagaaagctggatgcgtttcagccctgtgaattaacagaattgaaggctggtacccatgtatttgctgtttatggtgac

SEQ ID NO: 44080 - DNA, 246 bp, Glycine max
caaagggtggtccacacccaactaagtcaagctcctattcgaattcccttcccagtttttcaagactactgcaaaggttcatgttatgcagatgaacattacctgccaacgtatgtgcagcataaatttttggaggggaattccgataggagcttgacttgggttgattggtcaaagggtggtccacacccaactaagtttttgagatcggagattactgttaagttcttggagagtttaagggat

SEQ ID NO: 44081 - DNA, 246 bp, Glycine max
ctcacatggaaccaaatttgtttaaattgtctcttgatgatgtggaaactcctaaaggttctatgttcgatcttaaaatttctcaatctaaaattgcacttcccaagaacacagttggaggaaccattctgcgtagtgatctattggcaatttctttgacagagggcaattttagagcaagtgttgatttgcagcgcactcatcgtatcaaaggaatgcttaacatggtggccacagttggtcatt

SEQ ID NO: 44082 - DNA, 266 bp, Glycine max
gctgtctctgcttctctctctaccccccactctctctctaaaccaagacggcctcttcctcctccaagccaaactccaactctccgacccccaaaacgccctctccgactggaaccaccgcgacgccaccccatgcaactggaccgccgtcacgtgcgacgccgcatccggaggcgtcgccactctcgacttctccaacctccaactctccggccccgtccccgccaccaccctctgccgcctccctcgctcgcctccctcaactt

SEQ ID NO: 44083 - DNA, 264 bp, Glycine max
ggaaatttggctgatgacaccatcaatttagaggcttttccccacaagctaatgcagttcagagagattcaggcacaagttgtgttgaaattttcacacgaggcatgtcttacagcttggtcaactcaggtgcgtcccgcaacgactctgttggctgatgggtgcccatatttgtatgcgatggtgcatgatagttcagtgtctacaataccaggtgatattgtcattggtgttaggttgacaaccatactacaatatgtgtgc

SEQ ID NO: 44084 - DNA, 267 bp, Glycine max
ctcgagccgaatcggctcgaggagtgggaaaaagtgcagggagaggtttgagaacctgtacaaatattacaagaagacaaaggaaggaaaagctggaagacaagatgggaagcattacaggttctttcgtcaacttgaagccttatatggtgaaaacagtaaccaagcctcggtgccagaaaccaattttggcagtggtagccttcgtttccacacaagcagccaaggaaataacccttctcaaacaaatcaagaaatgtttcagtc

SEQ ID NO: 44085 - DNA, 252 bp, Glycine max
gggcatcaggatcttgttggtttagtaatctcaatgctgcccaacaggttttgtattctgaagtataaaagagagaagataaaagatatctctcttcttgtcaagcatctgcaaattgtttacatctaaagcagctccatgcatttgtcgcctcataatacaaaacctgttgggcatcaggatcttgttggtttagtaatctcaatgctgcttctaggagattttagtttagtattacttaccttgcttcag

SEQ ID NO: 44086 - DNA, 255 bp, Glycine max
tggggttgctcgaacatctccagaggacgctaatagggcaggaacaacacatagactggtatcaggagtggaagctaaaattgtgaatccacatacaggagaagccatgtttccctgtgaacaaggagaactttggatcaatcacctagtattatgaaaggttatgttggtgaccctgaagcaacttcagcaactttggtggatgggtggttaaggactggggacctctgttattttgataacgaagggttcttg

SEQ ID NO: 44087 - DNA, 259 bp, Glycine max
agaacggttccaatttaacaaatttataaaccggttcatcgtataaatgaattaaaaaagaactaataaccaacgcatcgcttcggattatctagatctaaagaactagtcaaaacaaaaaaaaaatataaaaaaagatatatatagcaactgttcttttatgcttcacaatagttcagttgctataaaaatatacagataaatgaagaggtgaaagaaagagagaaaaaaaatcaatgatatagaattctaatatgta

SEQ ID NO: 44088 - DNA, 170 bp, Glycine max
aagcagacgagtggtgggtggggcagaattgatagggatgatgctgttgatgctatgcttaaatatgctgatgctggcctcaccacttttgatttggctgatatatatggacctgctgaagatctatatgggattttcattgatcgagttcgtcagagcgtcctccagaa

SEQ ID NO: 44089 - DNA, 164 bp, Glycine max
tgcacaagctcttgtatcatcatcatatcttaccttctcagccgaggctacaagacaaagtcttggaccaagatcactccaatctccatttggcttctcaagaaaagcctcctttcttgctaaggcagctgctactccccctgtcaagcaggatcagaaagact

SEQ ID NO: 44090 - DNA, 250 bp, Glycine max
atcggatcgcactactaagagagatccgggtttagaataggataggttatttctttatatttttgaccaggaacagggcctaccacccgccatcccagaaataacctttcctattctttccccggatcccactactagagagatgttcatttcttagaatatcctatatacgtaggtgggaacaggggaaggggtcagatttatcttgacgatcataagagtaataataatgtgtataatgctacagcag

SEQ ID NO: 44091 - DNA, 254 bp, Glycine max
aaaccttgactggtacaagggtccaactctgcttgatgcacttgaccagattagtgagcccaagatgccctctgacaagcccctcaggcttccccttcaggatgtgtacaagattggaggtattggaactgtgccagtgggcgtgttgagaccggtgtcttgaagcctggaatggtggtgacttttgcaccaactggactgacaactgaagtcaagtctgtggagatgcaccatgaatctcttacagaggaaca

SEQ ID NO: 44092 - DNA, 283 bp, Glycine max
gtgcagggttgggtagcagtaagtttttgtccctttgtaatctaattcactgttgtgcttggctgcttgcaggtatccttacttggcactagttcttaactttagtcagacatgggccctatattgccttgtacagttctatgctgttattaagataagttgaaaccaatcaaaccattggcaaagtttctaacttttaagtcaattgtcttcctgacatggtggcaaagtgtggctgttgcatttcttttttatatgggagcttttaggggatcattggctc

SEQ ID NO: 44093 - DNA, 282 bp, Glycine max
ctcaattacagataggattcagattttcacctgatcgatgtacacaaagggaggtgcaacaacaacatcaacatcagactccactgttgcacctccctttgtgtacatcgatcaggtgaaaaactcaattacagataggattgaacttctgcccagaattcttgggtgggaaaaggtggggctttcacgggagaaatcagattggagcaactaaaagaccttggctgcaagtgggctattcttggacattctgagcgcagacatgtaattggagcaaatgat

SEQ ID NO: 44094 - DNA, 102 bp, Glycine max
aggcatgcttgtgagggctgctactggaaagggtgttacttatcaggctcgtaacacaaaagatgtcactatggaagtggataacatgcatgaaaagcagct

SEQ ID NO: 44095 - DNA, 233 bp, Glycine max
gcactatagtaaaaaaaggacattcattcatctatggatacccttattgctcccagcaaccactctccccaagaagatgctgaagatcacagaaaggcttttgaaggatggggaaatatgagaacacagtcatagtaattttgggtcatagaacagtgtatcagaggcagcaaatcagaagagtttatgaggaaatttaccaggaggatcttgtgaagcgcatagagtcagag

SEQ ID NO: 44096 - DNA, 224 bp, Glycine max
ggctcccaagggattaatctttttggctgagttatgcatctcagcactgtcactgagtcgttgtcatgcggaggataatggacttgttatgaacttctacaaggaatcatgccctaggcagaagacatcatcaaagaacaagtcaagcatcacaacaagcgccacaagaacacagcattcaccaggcacagaaacatcatccatgacagtgcagttcagagttg

SEQ ID NO: 44097 - DNA, 249 bp, Glycine max
gccaggcaagccccactcaaccaccacacctctcctcgttcacgctacccctttctgctcttcttctacctttcaagttttaaaagtataaagatggcagagacattcctatttacctcagagtcggtgaacgagggacaccctgacaagctctgcgaccaaatctccgatgctgtcctcgacgcttgcctcgagcaggacccagacagcaaagttgcctgcgaaacatgcaccaaaaccaacttggtc

SEQ ID NO: 44098 - DNA, 244 bp, Glycine max
aaaagatgctgacacaagaattgcttttggttgtggccaagttcaaactggggtgtttctaaatggggcagctccaaatggcctatttggacttggattggataatatatctgttcctagtatcctagccaaagaagggcttatttcaaattccttttcaatgtgctttggacctgatggtgctggaagaatcacgttcggtgatactggcagcccggaccaacgaaaaacaccattcaacgtc

SEQ ID NO: 44099 - DNA, 204 bp, Glycine max
ggcgttttcgtcacatatatcgtggtcagcccaaacgacacttgcttactagcggttggatcttattcgtgaatgcaatgaaacttgttgctggagattcatgcattttcgttagaggggaatctgtagaacttcgtgttgtgattcgtcgcgcataccacaatctcagcaatatatcgcaagcttcagctctgatatcgggtc

SEQ ID NO: 44100 - DNA, 238 bp, Glycine max
aagggtttgacccaccgcttgaccacggagaacgtggtggacgtgcttcaactcgcgcgtctctgtgacgcgccggatctccatcttcgctgcatgaagctcctcgccaacaatttcaaagcggtggaagcaacggaggggtggcagttcctcgtcaaacacgacccctggctcgaactcgacattctccgcttcatcgacgaacacgaaaccaggaaaaagaaatcgaggaagtata

SEQ ID NO: 44101 - DNA, 233 bp, Glycine max
atagctctctcatatctcatacagactacagtaatattttatttgcactactactactactttatttaagcagaagcaggcgagtgaggtagagcgaagagtgaagagaatggctcccaagggtttaacctttctggctgtgttaatatgcgtttcagcactgtcactgagtccttctgttgcgggggaagggcaaaataatggccttgttatgaacttctacaaggaatcat

SEQ ID NO: 44102 - DNA, 298 bp, Glycine max
tgtggaatcttccaaaatgtttttttctgcgagctcttgtatgatcctgccgctgggtcactgaagaagttgccggctaatataaaagtaaaatattcaagtggacaaacatctgatgctgcagctagaaagaggaaaggaaaatgtatagagggagatggtgtttcagagtccacaaaggaaggaaaaacattaaatgataaacgtttagcaaccttggacatttttgcaggctgtggtggcttatcagaggggttgcagcagtcaggagtttcatcaactaaatgggctattgagt

SEQ ID NO: 44103 - DNA, 291 bp, Glycine max
  unsure (1)..(291): unsure at all n locations
ncgaatcgtgaggctgccaggaaaagccgactgaggaaaaaggcatatgtgcaacaattagagagcagtaggttgaaactgacccaacttgagcaggagctccagcgatctcgccagcagggaatatttatttcaagtactggagatcaggcacagtcaatgagtggaaatggtacttaaccattgtgtacctccgattgtatgttttgagggttaaacatattggagtagttttaggggatgttttgaggctgataataataatccatagtcagtgcaaaaacgattgac

SEQ ID NO: 44104 - DNA, 288 bp, Glycine max
ctgtcttgcttctttgtcgcgtcttgttcgttgcttggtttcttccctgctatgttgtcatgtgttgttgtgtgcaatttctaggacatgcttggacctcgctgaaatttgcaaagaagtcgggctctctcctggcgtgttgaatcttctcactggattaggacctgaagcgggtgctcctttagcagctcatcccgatgtagacaagattgcctttactggaagctctgcaactgggagcaaaattatgacagctgcagctcagctgatcaagcctgtctcactaga

SEQ ID NO: 44105 - DNA, 254 bp, Glycine max
gtcccaaagagctaacaagagattcaacgcccgcgcatcggctaatcgaacgaggaccagaaaaactcacctcttcggcatcaaagatctcggtcacaagactctccttcagagtgatccactctatcagtatatacttgaaaccagtgtctatccaagagagcacgagtgcttgaaagagatacgcaagatgactgcaaaacacccactgtaaaatataatctatgactatttactatttagttacttttcgt

SEQ ID NO: 44106 - DNA, 244 bp, Glycine max
cggaaacggccccgaagagtggctcaaccgccacgtggatttcgggaaagtgtttttcggtggggacagtgccggagcgaacatcccacaccacatggccattcgggtcgggtcccacggacttcctggtgcagacccgattcaagggtctgaatttctgttggagcgaccctgtgcgggtgtgaactttaaaggaatggttttggtgcatccttacttttggggcgtggagcgagttggatcc

SEQ ID NO: 44107 - DNA, 268 bp, Glycine max
cggcagaagactgtggaagattttgatgattggacaagttggcttctttacaaaggaggagtaggagtaaaaggagaaaatagttgggagtcttggtgggacgaagaacagatgcatatccaaacttggaggggtcgtattttggagacaattttgagtgcaaggttcttcttgtttcaatatggtgttgtgtataagctgcatcttactggaaatgatacatcacttgcgatctatggattctcatgggctgtcttggttggaattg

SEQ ID NO: 44108 - DNA, 275 bp, Glycine max
caagcttcaagtgatcataaccgagatgggtctaagaattcaacaaagaggagaggtcctcaagggtgtgcccttggttcagccaggggatcatttgttctggtataaccgacctggccttattctttaccttatcaattttgtgctctttcagaatgcttttcagctggctttcttcgcatggtctgcgcttcagtttgggattaaatcctgtttccattcgcacacggaggacgtggtgatcagaatcacaatgggggtccttattcaaatct

SEQ ID NO: 44109 - DNA, 264 bp, Glycine max
caatatagcccaagccctatacaaccaaaccctaacacacacccatttgattcagtttccatggctagcctcaaggttgcatttttcgctgcagtgctctgcatggttgtggtgagtgccgccatggcacatgcagctatcacgtgcgggcaggtgacgaatagcctgatcaattgcatcggttacctccagtacggaggaacgccgccgtcgggatgctgcaacggagtgaagagcctcaatgccgccgccaagaccaccgcc

SEQ ID NO: 44110 - DNA, 232 bp, Glycine max
gggagaagaggtcgagtttcacagcagcaatggtgtacgtcaaggctcagaaatcaaaagcctacttcaagagatatcaagtcaagttcaagagaagaagagagggaaaaaccgattaccgtgccaggattcggttgattaatcaggacaagaacaaatataacactccgaaataccgatttgttgttcgctttagcaacaaggacattgttgcacaaataatatctgctag

SEQ ID NO: 44111 - DNA, 286 bp, Glycine max
gagagtactaaagaaaatatggagaggaagaataggattcttgtatttgggggaactggttacattgggaagtatttggtgagggcaagtgtctctttaggccatccaactttggtatacactcgccctcttaatgcacaagctcctccctctaaggcacaagtttgcaaggagtttaactccataggggtcacacttgtccatggtgaacttgagcatgagcagatcttggctgtgattaaacaagtagacattgtgatatgcgctctggcatcccctcaagtga

SEQ ID NO: 44112 - DNA, 285 bp, Glycine max
gaacaactgctggttcagggtgaaaacaaatgtagccaagccccacaagggtgagattggcatagtgtttgaacaccctacccaaccagcaaaccaaccaggtggttggatggtaaaggaaaaacatttggagaaatcactagagaaattaccaagcctcaaaaagagtggttccacgccatccatgaacacggcctcaaaaatgttcaccatctctgaagtcaaaaagcactgcacctccgactctacttggatcatcatccatggccacgtctatgactgcac

SEQ ID NO: 44113 - DNA, 279 bp, Glycine max
cctcgagccgaatcggctcgaggtttgcactcagtccctacttccactttgagtcaccaggacagcctcgaaacctcgtccacttcttgtgcggtttatcatgggggatagtcagtattcgttttctctcaccacatttagcccttctggaaagcttgttcagattgagcatgctttgacagccgttggctctggacaaacgtctttgggaataaaagctgcaaatggagttgtcattgctaccgagaagaaattgccatctatattggttgatgaaac

SEQ ID NO: 44114 - DNA, 291 bp, Glycine max
aggttttacatccaattgacctggacaggcttaaatttgttggagattcactaaagatactgcgccaagaggttggtggtcatgcagctgttttgggttttgtgggagcaccttggacaatagcaacatatatagtggaagggggtacaacacgcacatatacaaccattaagagcatgtgccacactgccccacatgtattgaggactttgctttctcatttgacgcaggcaatagctgattacgttattttccaagtggagtctggggctcattgcatacaaatatttg

SEQ ID NO: 44115 - DNA, 273 bp, Glycine max
tcgtgaacaatctccttttcaaactaggcttggttagctgtgctgataccaatgttggtgatgcaaaagttcgtggaattagtggtggtgaaaagaaacgcttatccatggcatgtgaactgcttgcaagcccatctgttatatttgctgatgaacccacaacaggacttgatgccttccaggctgagaaagtcatggaaactctccaacaacttgcacaagatggtcatactgtaatttgttctatacatcagccaagagggtcagtgtata

SEQ ID NO: 44116 - DNA, 279 bp, Glycine max
gttttcataattcctgaaacaggggaaggaaatggcctcacaacaacacatccagaagatgcagctccgccagaacttccgcaatctctggcactctgatcttttgagtacaattcaagctgacaccccttattgttgcttttctctgtggtgtgcaccgtgtgtatcatatctactccgcaaacgagctctttacgatgatatgtcaagatacacatgttgtgctggttacatgccctgcagtggtcggtgtggagaaagtaaatgtcctgaactctg

SEQ ID NO: 44117 - DNA, 272 bp, Glycine max
cgcgagctgccgccctttttttttttgtttttttggaaaaaatttgactggattagtttaaatttaccaacccggatacgatattcccttcacactgatcacccgtttcaaaaagggttctctacctggttaaaatagggggcaaacaaggaaccccttattagaatgggaaccccttattctcaaacacaaagtggttatttaacaacccggttagaaggttgatggtcctaccatcttctataaaggccctcttaattaatttttaaaaa

SEQ ID NO: 44118 - DNA, 270 bp, Glycine max
gaaaagcaaaatggtgaagatttgctgcattggtgctggatatgtggggggtcctactatggcagtcattgcactcaagtgcccatccatcgaagttgctgttgttgatatctctaaatcccgcattgcagcctggaacagtgaccagcttcctatctatgaacctggccttgatggtgttgtgaagcaatgccgtggcaagaacctcttcttcagcactgatgttgaaaagcatgtctttgaggctgacatagtgtttgtctctgtcaa

SEQ ID NO: 44119 - DNA, 256 bp, Glycine max
attctctagaagacatcttgtactcctctttgaataatgataggactttgcttgattttagatatgtctctgctctcaaatctcataaaccttaacctctccgatatcaccgcgaaggtgatcgcagagtacatatggatcggtggatcaggaattgacctgaagagtaaatcaaggaatctcccatgaccatttagcgactcttcagagctgcccaagtggaactatgatggttccagcataggtcaaactcctg

SEQ ID NO: 44120 - DNA, 251 bp, Glycine max
agcaaaagcaagaagaactagtctaagcagaaatggcctcttcagtgatggcatctgtggccctcaaacctgcccctttcactgttgagaagtcctcagttagaggccttccctccctctcaaggaactcctcttcattcagagttgtggccagtggtggcaagaagatcaagactgacaagccttatggacttaatggtggcatggctttgagggaaggagttgatgcatctggcaggaaaggaaaggga

SEQ ID NO: 44121 - DNA, 267 bp, Glycine max
gagaaatcatatcaggttaagtagtgtttgtactcttaattcatatgatttcttttgctgcagacttgcagttaaaaggtgatattaaccttgcctttttaatgcagccaaactgaagaaaatgctttgtctgatgttgaagttctaaggttagcagctgcagtggaatcaaattcagtacatccagttggtcaagcgattgtcaatgctgctcaggctgctaattgtcatgatgctaaggtaaaagatggaacattcctggaagaa

SEQ ID NO: 44122 - DNA, 264 bp, Glycine max
gcttcacatgagttgtttccctttcaatatccgtgcttcttaagagcaatatccgattgttcatatattaataaggaaactgtagtgcaatgttataatgtgatacaagatatagccagggaggagtacgaatcggtgttgaatataaactcaacttctaacacattaaccggtgtgtctgacgaacattttctgagcttggaaagtgaaaaaaccaacggaaccaacgttgttgtgacacaagagcaggacttcaaaagaagg

SEQ ID NO: 44123 - DNA, 257 bp, Glycine max
caaaggttgctgtaggagataagattgcagtagtgctaagtgctaacacctgcagtgaacaatggcctctgcatcagcatctctgctcaagtcttcacttgttcttgacaagtctgagtgggtgaagggacaaacccttcgccaaccttctgcatcagttgtgagatgcaaccccaccaccccatcaggcctcaccatcagagctggttcctatgctgatgagctcgttaagaccgcgaaaacagtggcttcaccag

SEQ ID NO: 44124 - DNA, 251 bp, Glycine max
caggagatttcgactatgatgatgaagcagaaagacgtctcgtctcgctgcaacgccggatccaccgcaaggcggacggcgacggcgacgttctgggccccgtgctgtaccgcgaccggctcgccaggacgttcaacaccagcggcttcgcgaagttccgccacctcgctaagatttcgcggccgaacaggaataagaggaggaggaagagtagggaggcgagtgaagaggttaagcccgtgggggagaac

SEQ ID NO: 44125 - DNA, 266 bp, Glycine max
agaaaccgacgtgcccttcctccatcttcacctttgattattggatcttcttcatcttgatgcccaaactcttaatttttatttagttcaatgtcaccggaagaacacaattgcacataaatccaattcgagcaagacgattgacccaacttggaataggatttccggtgacattgaactcaacaaaagttaggcatcacaagatggaagaaaagcaatgtgaaggagagaaacaagcattagcgactaaggcaaagaaacttagt

SEQ ID NO: 44126 - DNA, 279 bp, Glycine max
ccaagttatgattatatctttttccagaagatctaccattatacctacaatgatagatgctctggtaaatgatataataagaacttggtccagagcatctatcattgtaggtataatggtagatgctctggaccaagttattatgatacctacacggattggccatactatggctatcgacaacggaaaagagcatttacgtatttatataacagatcgaatggtaggccataaattaggagtatttgcacctactctaaatttccgaggacatgcgaa

SEQ ID NO: 44127 - DNA, 286 bp, Glycine max
gctcctcctcagtctttcagttgcaatcttcacatcagcgtgccaatatggtctcccattcctagcaaaatgtaccccttgtgatccatccctctcagatgtgtgccccaccaacgggcgttctggaaacttcaaacaattcaactgcccaaaaggctactacaatgatcttgctactcttcttctgaccaccaatgatgatgctgttagaaacatattctcaaccaacacccctcttgaataccaaccctcctccatcataattttctttgcactgtattgcata

SEQ ID NO: 44128 - DNA, 298 bp, Glycine max
tcgcatgcatccgtatgcaactcgagcatttcgctctaaccaaagtattctttctcttcatattgtgatatataaataagaggacaagctactacaggctttagtgttaattagtttccacttgcaaatggaactggacatcatgttgcgacaaggtaggtgtaaagaatggaccatggactcctgaggaagatcagaagctcttagcttatatagaagaacatggccatggacgatagcgtgtcttgccagcaaaagctggacttcagaggagtggcaaacttgcagactaagatgg

SEQ ID NO: 44129 - DNA, 266 bp, Glycine max
ctgtgctagaggaggtgtacttaagcaagaaacatcctgatgctgtcacatatacggcattgtttgatgcattgggaaagaaaggtagattggatgaagccgctgagttgattgtaaagatgctcagcaaaggtttggatccaactcctgtaacattcaggtcagttatccaccgttattgtcaatggggtagagttgatgatatgttgaacttattggatagaatggtcaaaaggaagccatttagaaccatatacaatcatgtt

SEQ ID NO: 44130 - DNA, 268 bp, Glycine max
tgagggtgtttccctctgacgcgtttgggttagaagcaaatgtagcattgacagaacagggccttgtatccgtgtctgaaggctgaaccaagctccagtcagttctatatctttgtcgtcaaatgactaattctgccttggatacaattgccaggaacaggcctaatatgacacgttttagactatgtattatcgagcctcaagctcctgaccatcttacccatcaacctctggatgctggttttggagctattgtagagcattgcaa

SEQ ID NO: 44131 - DNA, 291 bp, Glycine max
  unsure (1)..(291): unsure at all n locations
ttcgaattcggactcgaggaatttaattctccaaaaaaaacatagatattgtgcaagcatggcttcaagacccggaattctctctgattggccatggaagcctcttggaagctttaagtatatgttactagctccttgcatcgttcatagctcgtattctatgatggtgaaagataacagtgagaaggacatgtttaactttctcatattaccctttttgctatggcgtatgcttcataaccanatatggatcactttctctcgttaccgaactgccanaggcaacgcaag

SEQ ID NO: 44132 - DNA, 276 bp, Glycine max
agatttgatcgaattgaaattttaaaaatgactgggataaacttaagaattcaattattgaaattgaataagtacacaatttaattggattggtcgaatggtatcaaaaaaatggagtactaactcccatttcttatttattattgaattaaccgatcaacttgctttgttatcgaacatttctttttgatttcaaaaattttccggaaaaaatttgaatctatttttatatgcgaatcaatcctactacttctggtcctgaggtttctgcgcttg

SEQ ID NO: 44133 - DNA, 205 bp, Glycine max
  unsure (1)..(205): unsure at all n locations
cggctcgagcgactccatctattattcatccacactacctctcatccaaatccgctnctcgatgccggcggcggcgcgcatcatccgggacatgcagtccgatgccggtaacaagatgtgcattgactgctcccaggagaatccgcagtgggactccgtctccgacggcgactgcaagtgcctcgaattctccggcaagcaccgt

SEQ ID NO: 44134 - DNA, 220 bp, Glycine max
aagaaaatcctcacccattttcttcgtagccaaacactctgctcattctcagttatgtcgtggcaagcgtatgtggatgatcacctactgtgtgaaatcgaaggtaaccacctcactcacgccgctatcatcggccaagacggaagcgtttgggctcagagcaccaacttccctcagttcaaacctgaggaaataactgccatcaataatgactttaatg

SEQ ID NO: 44135 - DNA, 266 bp, Glycine max
gtcatcacaatggggttcctcgtgcaatttgttgtttttatgttattcccttggtttctgagtgtgagagctgaggaaaattactcatcacagcattgtgattttccagccatattcaactttggtgactccaattcggatactggttgcatggctgcagcattttaccctgaggttttgccatatggtgaaactttcttccatgagccagttggtagagcttctgatggtcgccttatcatagatttcattgcccagcatctagg

SEQ ID NO: 44136 - DNA, 260 bp, Glycine max
aagcagaaccacgtgctgccttgaacctcgcatcttatggaagtagtcatgctttcaaactagccaaggaagatgttgttttgtattcagctaaggttatccctggtaatgagtctcgtgtaatgaaaatgctaaaccgcatatcggagattggatcaacaattgttatgggaaaaaatgaaggtttgcacacatctggccatgcatatcgtggagaattggaagaaatacttagaatagtgaagccacaacattttctt

SEQ ID NO: 44137 - DNA, 274 bp, Glycine max
gcttttgactgggccagtgttgccagaggaggctgatgggaagttagaagaaaattgggccaattggcttgatgcgtttgcgaatgagtctattgtgtattgtgcatttgggtctcaaatcaatttggagaaagatcaatttcaagagcttttgcttgggtttgagctttcagggttaccctttttggttgctctcaaaactcctagagggtgtgagagtgtggaagaggcagcctgaggggtttgaagagagggtgaaggggagaggggtggt

SEQ ID NO: 44138 - DNA, 290 bp, Glycine max
gttggaaagctaatggaaaactacatagctgaaatagccaccgaccgaaatttagccgttacaaagttcaccagtttggcagaattaattcctgaacagtcaaggccaacagaagatgggatgtatagagccatagacatctttcttaaggctcatcctgctctaagtgacatggacagaaagaaagtttgcagcgtgatggactgtcagaagttatcgcgagaggcatgtgcgcatgcctcaaaatgaccggctacctgtccagacagtggttcaagttctctattatg

SEQ ID NO: 44139 - DNA, 285 bp, Glycine max
actcgagccgaatcggctcgagttatggttgtaatattcaccaaaaccgtttaaccacttcaacacacccaaattggtcatacacgggttttatctatggtttcataaatcgttaaataaattacactacatcctattggtaaattcccaggaaccatgagcgtgcgagcgcctagaccaatcaattcctgtaaagaaaaaaaaagtacaaaagactttgagtatgctttaaagctgataagaaagattagtaagagattataaaacaaaaaagaaatatataaa

SEQ ID NO: 44140 - DNA, 284 bp, Glycine max
ctaaatttcgatatgtgatgtggttttctgacagtcattttgatacatacatggtgtgttttccaaataagttaccaaatcaaattggttcttcaaaagcaacattttcttcctcccttatttcggttacccactcttggttgggaatgaatgaaggaagctggcagagcttggctacaacagaaatgccaagaaatgcaaagagaagtttgagaacgtttacaagtaccacaagaaccaaagaaggacgaagtgggaaatcagaaggcaaaacttatcgcttc

SEQ ID NO: 44141 - DNA, 240 bp, Glycine max
aggattccggaaatcatgtctgtagctgctctttttatttatgtgataaatgtaaaacgctttggtttggcttggccgttgtgcattaggttgaaaaaataaatgttataattactcagaatctcagatctttctcatactttgcccctgattataagtctctcaaatttcaactaattcatcttactttaaaaaaaatgttaattaattaatcatattaaatatatgttaattgtttat

SEQ ID NO: 44142 - DNA, 282 bp, Glycine max
atggaaaaaagggagtgaaaagtctgctcgctgttccaattagcttcgtcagtgagcatattgaaactctagaagaaattgatgttgaatacaaagagttggctctagaatctggtatagaaaagtggggccgtgttcctgctctaggatgcgaacctaccttcatttctgatttggcagatgccgttattgagagtctcccatatgttggtgccatgacagcttcagaccttgaagctcaacaatcctcgttccatgggcagtgtagaagagttattggca

SEQ ID NO: 44143 - DNA, 291 bp, Glycine max
aagagataagggtgctgcagaacaagagaatgaagaggcgcttccatatgatgtgcgccttaaggaacctcatgcagcagtatccggaattattggtagcacctttgcttcctggatttggaatggaaggagcttgtctagcattgattccagagaagatccagaggtgtcaacaagcaagagatctcgacataatgctgatttgtttggctcagtttgctactcctttcagcatggcagattcacaaaaaaatatggggacttaaccagggtagatgctcgtttagatat

SEQ ID NO: 44144 - DNA, 259 bp, Glycine max
gagacagagacgcagccatggggcggagacctgcgaggtgttataggcaaattaagaacaagccataccccaagtcacgtttctgccgtggtgttcctgatcccaagatcaggatttatgatgttggtatgaagaagaagggtgttgatgagtttcctttctgtgtccatctggttagttgggagaaggaaaatgtttcaagtgaggccctggaagctgctcgcattgcttgcaacaagtacatggccaaatttgctgg

SEQ ID NO: 44145 - DNA, 266 bp, Glycine max
ctcctccttttgtgcttccaactcttttctttgttatattattctctttcactttctcccaacccttggaatcgacatgactatcctcattgagcaatctgatcactttgggcttataatgatgctggaagtgagaggcgtgaaggagtggagaacttctacagaaaaaatcacacttaccaatcagttgatttcgtgaagaaaatgagagaggagtatgcaaaattgaacagggtagagatgagcatatgggaatgttgtgaact

SEQ ID NO: 44146 - DNA, 265 bp, Glycine max
gacaagattagctgtgaaaaaaagaaccacacactttacgagttcccagatctcagcgtggcggagaagtgatagaaccacttgttagtaagcagtggtttgtgactatggagcctcttgctgagaaagctcttcaagcagttgaaaaaggagaactgaccataattccggaaagatttcaaaagatttacaaccattggctttccaacattaaggattggtgtatcagcagacaactatggcggggacacaggatacctgtatg

SEQ ID NO: 44147 - DNA, 260 bp, Glycine max
caaggaataatgtgtcaccacaaaaggcatctttgaagttcttgatatatggtggtgcagggtggattggggggcttataggaaacatttgtgagaagcaagggataccctttgaatatggcatggctcgcttagatgatagatcacagatcttgtttgattttaggaccattaagcctactcatgttttcaatgcttctggggtgattggagcattaaatgtgaaatggtttgaagctcataagccggaaactatacgt

SEQ ID NO: 44148 - DNA, 271 bp, Glycine max
ggagagaataatgaggcaaatgtctttctcatttatgaatatgtgtcaaatgggactttccagacttatctctctggagatagtccaggcaaggttttcaattggtcagagcgattgtctgtactaattaatgttgctaaggctgttcacttcctacacactggcatgatacctggtttcttcaaaaatcgacttaagaccaacaatatcttgctgaatgagaattggatggcaaagttgagtgactatggattatccattatatcagaag

SEQ ID NO: 44149 - DNA, 230 bp, Glycine max
aatatgtaaattcggatcgaggaactatggaaagctgactatgcatttcttcatcgttagattcttctcatgatacagatgcagatcttcgtgaaaactttgacaggtaagaccatcaccctagaggtagagtcctccgacaccatcgataacgtgaaagctaagattcaagacaaggaagggatcacacctgaccagcagagacttatctttgcgggtaaacagcttga

SEQ ID NO: 44150 - DNA, 293 bp, Glycine max
aatattagtgcgagcatgtcgtcaagtatctcaatacgtgcagaagaaagaagcttggtcagcacatagatccactggtctaaggctagaatatgtacaattgaaagctgtttggccaaagctttttctctaacgaagaagacatcaacttccatgtgctttgtacgactgtggaacacagggttgtgagcaatggacacaacactttggtggtcatagaagaggacacgagtagtgaatggtacttgtaattctgttaaaagagcatgaatccatgttaactcaatggaagt

SEQ ID NO: 44151 - DNA, 286 bp, Glycine max
tctttcctaaagaaaattggaacctggctctgttgttaaagttacgtaatattgcttgagtagaggggcttgagaaaactgtgcaagctttggaacttcttcaaagtctggtacttcaatggctaccgaagaggctcataaacttcaatcacttcctccttaccctcaggtaattcacatcaatagtcagaatcccttttttattgtaagaggtctctccaaaattattaaaccttggagaaattttcctagtaaagttggcagatttcacactggtgtaattgat

SEQ ID NO: 44152 - DNA, 288 bp, Glycine max
cgtcgcccgacaacttgggtgttccattttcctgttacctgaggacataatagaggtcaaccagaagatgattctcattttagctgctagtataatgtattggagcctcaagaaacctgaagaaaacatcacccctgaagcatcgcctaaagcttcagtagatggtgaaagcgaaacagatttagttgatgaggtatcccatttagccattgacgaggtatccaatttagccattgatgagacaattcggagaatgctagctcttcttaagttagtactggttgaagt

SEQ ID NO: 44153 - DNA, 260 bp, Glycine max
gagcaagctcatcctagagttttaaaaatggcagcagcctcctccatggctctctcttccccatccttggctggcaaggccgtgaagctgggcccatcagactccgaagtcgggagggtcagcatgaggacgaccgtcaccaagcagtcctcctccggaagcccatggtacggcccagaccgcgtcaagtacttgggcccattctctggcgaggtcccgtacctactcactggcaagttcccaagtgactacggctggga

SEQ ID NO: 44154 - DNA, 268 bp, Glycine max
ttctttctagaacaattctctctcactatgacctagcatccaaacaactatcataagtggtgtcaaacttggcagagacgtaaatttggccatatctgcaatcatagctgccattggggtgtgctctgttaactgtggctacaaccattcctagcatgaggcctcctgtgtgcagcagtgtcagataacaacaccatgaatgcattcaggccagtggcaaacaattggctttgctatttgcggcactttacacagtagcagtgtgtgg

SEQ ID NO: 44155 - DNA, 283 bp, Glycine max
aaaagcctgagactagaagaggaagagcagtttctgatatcaagcttagaggacaacatgccgttccttcagatgcttcagagtgtggaatccccacagtttttccctttgaaagagccaaactttcaaacacttctgaggctgcagcacatgaagaagccatgggagggaatagcctacattccaagaatggaagcacaagtgcaagcagcattggagctagagagttgtgtgacacatgacatgttggagatgcagtcaccagtgaagtcagaaagcaatg

SEQ ID NO: 44156 - DNA, 272 bp, Glycine max
ctaattcatggggtgatgagtgggtttttacaagaaaagacgaaagtgacttaggtccattttcacaatggaacataagtggaacttacagagggaattggaagtttttagatactacaaatggttctaccggatttccagacatcagaaaaataaatggaaattctgtaattgaattagttagtatgcccacaaagataactggtgtacattatgtgcagggggtagtcatattccatgatgtatttgacaatgaatacaatgttggtgga

SEQ ID NO: 44157 - DNA, 261 bp, Glycine max
cagtggtaagttcttgaggaagttcagattgccagaaaacgctaaagtcgatcaagttaaggcttctattgaaaatggggttctcactgtcaccgttccaaaggaagaggtcaaaaaacctgatgttaaggccgtgcaaatctctggttaaaagtccaatatatagaaaatactgtgttttgcttcttgtgagttataaggaagatcttacaatgtaaactgtacctgttgaaataagcgtcagttgttcttgttgagtgg

SEQ ID NO: 44158 - DNA, 286 bp, Glycine max
attcggctcgaggtttttcattgtttcatttaatctacaatggctgcttcaacaatggctctctcttcatcatcattggctggccaagctatcaagcttgccccctccacccctcagcttggtgttggcagggttagcatgaggaaaacagcctccaagactgtttcttctggaagcccatggtacggcccagaccgtgtcaagtacttgggcccattctctggtgagcccccatcctacctcactggtgaattcccaggtgactatggttgggacactgctgggc

SEQ ID NO: 44159 - DNA, 268 bp, Glycine max
cggctcgagcactaagatggcttcctttgtatccttcctagtgctgcttcttgcagcccttattctcctgcctcaagggcttgctacttactacaaaccaattaagaagccaccagtgtacaagcctccagtgtacaagccaccagtgtacaaaccaccggtttataagccaaaaccaccggtttacaagccgaaaccaccggtttacaagccaccatataagaagccaccatacaagaaaccaccttatggaaagtaccctccagta

SEQ ID NO: 44160 - DNA, 228 bp, Glycine max
gttacatagtttttcattgttttacttaatctacaatggctgcttcaacaatggctctctcttcatcatcattagctggccatgctatcaagcttgctccctccactccctgagcttggtgttggaatggttagcatgcggaaaacatcctccaaaactgtttcctcaggatgtccattgtacggcacatcacgtgtacagatccttgggcccatcctcaggtgagcc

SEQ ID NO: 44161 - DNA, 273 bp, Glycine max
gtaccaaacaccttgtccgtggacttcatcaatttggttgaggcggaagtagctaggttagaagcgttaaaatcaagcaagatgaaagagcttgtattaaagaaaagaacagagctggaggagatttgtcgaaagactcatttgattccagaaatagataatgcagtggaatccgctgttgatgccatagaatctggatctgtggaccctgcttgcattcttgaacaaattgaacttcagatttcccaagtcaaagaggaagcttttggcaga

SEQ ID NO: 44162 - DNA, 273 bp, Glycine max
cagaatgttgtcaagaaaccaaagacatttgaatcaactccaatgaaaaaatatttcatggttatagggatcaatacagcttttagtagcacgaagcacagagatactgttcatgcaacttggatgccacaagttgtggaaagaaagaagttggaggaagaaaagggcataatcatacgattggtcacggttctacatctggtgcattcttgacaaagctattgaagtagaggagaggcttcatgctgactttttgaggctgaaccacattga

SEQ ID NO: 44163 - DNA, 155 bp, Glycine max
gccgtgcctcagattttggtctgatgaggatagacaacaagggaaggatcctttcatacagtgaaaagcccaaaggataagagttgaatccaatgcaattgggactaacgtgttagggccttcaaaagattaagctcagaagaaaacatacattg

SEQ ID NO: 44164 - DNA, 259 bp, Glycine max
atacttgatcgacttgaccaagctgtatcgaacatgatgacacgggaaattgcattgctgatcatacaacctgaatatgctcatgctccatctgagtcctctcaggaattcgctagtgtacctcctaattccactatctactacgcccctgtgatacttgcctgggtcaaagataaagcatcgtgggatctgaatacacgagatgaggttgaggctagtcggaagcaataggaagcacggtatgccgcttgtaaggtta

SEQ ID NO: 44165 - DNA, 248 bp, Glycine max
aagtgccaccctagggttggggcttggattcgctatgccaagtttgagatgaagaatggcgacgttgtgaggtcgaggaacgtgtacgagagagccgtggataagctctccgatgatgaggaagcggcgcagttatatgttgcttttgctgagtttgaggaaaggtgtaaggagactgagcgtgcaagggccatatataagtgtgctcttgatcatattcccaagggaagggcggaagatttgtatcg

SEQ ID NO: 44166 - DNA, 246 bp, Glycine max
ctgcattactctctcactctcttttaggctcactcaccaacacttctttcactactttcattacgaacgtatattatatggctcctgaacttgtccccaccgttgcgttcacgaaacccgcaacccttccaaggcgtgcctacgtgacattcctcgccggaaacggtgactacgtgaaaggggtcgttggtcttgccaaagggttgcgaaaggtgaaaaccgcgtacccattggtggtggcggtcc

SEQ ID NO: 44167 - DNA, 249 bp, Glycine max
atcagagacaaagtaaatctttggggaatccgttgatcagaaatagtgttattgtgaatgataattccggcatcttgactttaaaaaatacgttggttactactatgctcctagcggcaagccttaccctgataactggatcattacggatgtcgtttatgagtttgaaggatctctaatctcaaggtcagggaatctggttgaagggaaccctggagcaatgaatggcgatgagacggtgccatatct

SEQ ID NO: 44168 - DNA, 278 bp, Glycine max
caaagttctctcctccataaagaattctccttcctatcaagtttctattcaaagtctccaatattcctaaacacttttcctaaacataaaaagccttatttccaacaaagtggtatcagagcttcaagatcctcaaaagatggcgaatggaggttttcctttccaaatgccgatgctcacaaagaacaactatgataattggagtatcaagatgaaggcgctactaggagctcaagatgtgtgggataccgtagagaatgacttcgaggagcaatatg

SEQ ID NO: 44169 - DNA, 278 bp, Glycine max
gtcaagttggcacgaaaaagaattaaaagcagattatgacactactaatagtagtccagttttaaaaacaccatctcctatggaaaaacaagctgcgagtctttacacgagaaagatattcatgaaattccaagaggagttagtagagactcttgcaaatcctgctataaaaattgatgattcaggaacaatcactacatatcgagttgccaaatttggggaaaaccaaaaatctcatgttgtgacttttaattcttttgagatgaaagctagttgca

SEQ ID NO: 44170 - DNA, 270 bp, Glycine max
ccctcgagccgattcggctcgaccactccacacaaccatcattgaacccttctcatcctccacttaagaagaaagccacccaccaattggcggagatcaagcacgcccgtctcgccatggtgggcttcttgggctttgcagtccaagctgccgccactggcaagggcccgctcaacaactgggccacccacttgagtgacccactccacacaaccatcattgacaccttctcatcctcctcttaagaagaagcaaaagaagaagaattgt

SEQ ID NO: 44171 - DNA, 274 bp, Glycine max
ggcagagtggccttgctgccacgatccactgagattcagcccttgtcgctttgattcgtctgcaaaggattctacccgccgctcgatgggaattgcgcattggcaagcaatctggtttctctctcctctctctctctctgctctgagtcacaggttgtgaaccgttgttggcacttggcagataattattgcatctaatgagtcatctgcaaaaattgtgtctctgaatgaccatcaagtgatccagtgcgattggaaagaacttcccaattac

SEQ ID NO: 44172 - DNA, 265 bp, Glycine max
caattctaaagtttacgaaaaggattgtcaacccatgactcgcaaacaaagtgcatgcttccttgattaggaatgtcttcaagagtcaaactcactaggaagactgcactttgtttgcaactcatgggtttacaattctaaagtttacgaaaaggatcggattttctttgccagtgagacatatgttccaagtgaaacacctggtccattagtgacatatagagccgcagaattgcaggctctaagaggacatggaacagggaag

SEQ ID NO: 44173 - DNA, 283 bp, Glycine max
caaccaagtgcgatgacgatgactatggctgtaaggagggtacttggctttgcttcaaaaaaacccccttttctgaatctctatcaaaatgcaaacttgcgccatattctcccttctcctcgtcatatctccgcattttcaggtataatgtacacttagtaatttctgtataggtgattcatgtgtaatccacaatggagtctgcattggtcaagatggatttggattttacgtggatggtgatggtaatatgataaagaagcctcaggttggttgtatgtct

SEQ ID NO: 44174 - DNA, 284 bp, Glycine max
cataaccatgggtatctccaccatcgcttctccttttgactccatcatcttcgtattggacgacaccttgtacccctccagcaccggaattgacaagtgcgtcaagaaaaacatccaactctttctcatccagaaatgcggattctcagaatcaaagccttgacccaacgagttgagctcttcaaaacctacggaagcacccttgccggcttaagagtcagtaataataacaccactacacaattccgatcactaatttctaacacgccaataacataatcatc

SEQ ID NO: 44175 - DNA, 287 bp, Glycine max
gtccggtccaggcttaatcttgatgttgctgtcgcatctgactctcctcctgcacctgctccaatagaatcgtttacggatatgtgtttgcatccgagtatcatgaaggacattgcttaccatgaatacaccaggccaacttcgatccaggcaaggccatgccaattgctctcagtggaagggatctattgggttgtgctgaaaccggtagtggaaagactgcagctttcacaattcctatgatacagcattgcttggcccaacatcccattcggcgcaatgatggt

SEQ ID NO: 44176 - DNA, 279 bp, Glycine max
cggctcgaggagaattagagatggaaaagagcagagtgcttattgttgggggaactggctacataggaaaaaggttggtgaaggcaagtttagctcaaggacatgaaacatttgttcttcacaggccagagattggtgttgatattgaaaagttcagcttctattgtcattcaagagatttttgccctcggagtttggtactgatccggcaagaatggcgcatgcattggaacctggaagagtaacatttgacgacaaaatggtagtgaggaaagccat

SEQ ID NO: 44177 - DNA, 286 bp, Glycine max
cttggagttcggtccctggtgctggagcaggcacagtcacttcgaacaggtggaacttcactcacccttttcaaaaacggatggagggtgctcgatgcaattggagtagctaatgacctcagaactcaattcttagaaattcaagggatggtgtgaagtccgtggatgggagggaactacgcgccttcaatttcaaacaagaggatccaagccaagaggtacgtgcagtggagaggagagtgcttttggaaaccttggctagtcagctacctcgggataccattca

SEQ ID NO: 44178 - DNA, 296 bp, Glycine max
tcaaggattgaagttttgttgctctggtacggcgttatgttcaaggattgaagttttgttgctctggtacggcgtttgtggatttgtatgctgagaatttacatatggtctagaaattagaggtaccgtgccattactagtgcttactaccgaggagctgttggtgccttacttgtctatgatgtcacacgccgtgctacatttgagaatgctgcaaggtggttgaaagagttgagagatcacacagaccccaacattgtggtcatgcttattggaaataagtcggatcttcgaca

SEQ ID NO: 44179 - DNA, 138 bp, Glycine max
tcacaagatacaggggaactcggtgattatccgcaagaatgtgttggatatcaacatcactaccactgttaagggcgtcattgcaaccggcattaacatcattgcaggcgtcgtcgcacacgttactcctctcgcgtc

SEQ ID NO: 44180 - DNA, 258 bp, Glycine max
ctctgcttcaacttgctccctcagaagcgaagaagaagccacagagaactagtctcctactctcacccgcaagacaaaaatggcatctcacatcgtgtggatacccccgtatgggtcccaagagagagctcaagttcgctctcgagtctttctgggatgcaagagcagcgcgaggattcagaagggctctgattcaggatcattgagcaatggtgtctggatagtaatccagacactcctcactatgacagtctgagc

SEQ ID NO: 44181 - DNA, 277 bp, Glycine max
agtaaaggcccttgaggagagtggtggttggttggatcgaacaactgttgaggacatggatattgctgttcgtgctcatctctgtggatggaagtttgtatttctcaatgatgttaagtgtctttgtgaacttccagagacctatgaggcatataagaaacaacaacaccgctggcattctggtccaatgcaattgtttcgcttgtgttttcttgatatacttcgttcaaaggttagttgggtaaagaaggtcaatttgatatttcttttcttcctc

SEQ ID NO: 44182 - DNA, 260 bp, Glycine max
gaagcattagcaaaagcaagaagaactagtctaagcagaaatggcctcttcagtgatggcatctgtggccctcaaacctgcccctttcactgttgagaagtcctcagttagaggccttccctccctctcaaggaactcctcttcattcagagttgtggccagtggtggcaagaagatcaagactgacaagccttatggaattaatggtggcatggctttgagggaaggagttgatgcatctggcaggaaaggaaagggaa

SEQ ID NO: 44183 - DNA, 258 bp, Glycine max
acggcatcagattgcgagggtgctggtgaacagttctgcgttactaccttgataccaagttctcatgaaactactgattctcctgttgatgctattccaaaaacaaatgatggattaattgactggtcacaagacttctttggaaaaccagcattcttgactgtttcaggtcaactcaatggtgaaacttatgccactgctctctctgatgtgtatacatttggtcctacattccgagcagaaaattctaacacttct

SEQ ID NO: 44184 - DNA, 258 bp, Glycine max
gtggcacaatcatcttgatccaaccgtaaagaaggatgcatggacagaggaggaggaactaatacttgcttactattaccaaatatacggcagtaagtgggcagaaattgcaaggattcttcccggaaggtactttgtttgaatgttaatatgcaggcttcaaaacattcatcaatacgtatgtataaaatatgattttaatcatgttaatatgatttgattttggttataatttttcaaaaaaaaaaatctgtttat

SEQ ID NO: 44185 - DNA, 259 bp, Glycine max
tccaaatcagcacaaagcaccacgccatatggcacgagtcctttcacagtctccatccggcagccaatagccccgtcgaactgcaccgcatacaacctcaccggaacacccctcacacacctacaacaccatcatatcactccatccaccgccacgtgtccagattacttccgttggatccacgaggatttgaggccttgggcccgtacgggcatcacgcaagacacggtggagagggcaaagcaaacggcaaatttta

SEQ ID NO: 44186 - DNA, 278 bp, Glycine max
cgaggttattaatgctggacggtttgatcaaagaacaacacatgaagagaggcgtttgactttggagacattattacatgatgaagaaaggtatcaagaaactgtccatgatgttccctcactgcaggaagtaaatcgcatgattgccaggagtaaagaggaaattgaactgtttgatcaaatggatgatgaacttgattggattgaggagatgacacgttatgatcatgtgcctaagtggcttcgagccaatacaagagaagtaaatgctgctattg

SEQ ID NO: 44187 - DNA, 266 bp, Glycine max
ctcttctctcactttgagtttgcgactctggaattccgctacaatggtcgtctcacagaaagttaaggatgctgagatcaccgagcaggattcacttcttctcacgaggaacctgctccgtcttgccatattcaacatcagttatatcagaggactatttcctgagaagtattttaatgataagtctgtacccgcgttagagatgaagataaaaaaacttatgccagtggatgctgagtctcgcacgatgattgattggatggaga

SEQ ID NO: 44188 - DNA, 263 bp, Glycine max
gcgcaacccagctgttattgcagacaacgtaggagctaatgttggagatatcgctgggatgggttcagacttatttgggtcttatgcagaatcatcatgtgcagctttatttgtagcatccatatcatcgtttggaacaaatcatgatcacacagccatgtcatatcctctcatcataagctccatgggaattgtggtttgcttgattacgactctttttgcaactgatctgtttgaacttaaaaacgtgagccaaatagaac

SEQ ID NO: 44189 - DNA, 261 bp, Glycine max
gttccaagttagttagaggccttgttgcttgcatagctctctgatctgaaaatgagtgcgtcgaggttcattaagtgcgtcaccgtcggcgaggtgctgtcggcaaaacctgcttgttgatttcctacaccagcaacactcttcccacggactatgtgcccaccgtttttgacaatttcagtgctaatgtggtggtggatggaagcaccgtaaacctaggattgtgggatacagctggtcaggaggattaccatagattaa

SEQ ID NO: 44190 - DNA, 272 bp, Glycine max
cctcgaccgctcgagcggctcgagggactcgagtgtgcctccaaccttgtacaagagtgactgcctaaactaattggagagactttgcccacgagagacttcaccaggatccacattcccttccttcaaacggaaccatgtttcagcatgtgtgttcttgaatatgtaaccaaaatctggagcaacagccatgaatttgaaacaattgctcacaaatagtttcagaatctgagttccagcgtcagagtcaagggactttgacactatgacca

SEQ ID NO: 44191 - DNA, 267 bp, Glycine max
gcaacattgaaggcaggtacgtcggttctggcaaaggggagctcattggggacaaccactctggtgtggtgcagctgcacaacgtggaggacgtgcagaagctcatagaggaccacaagctggatcacaagctcatcgtgctcgatgtgggtctcaaacattgtgggccctgcgttaaggtttatcctacagtggttaagctctcgaggcagatggactcggtggtgttcgctcggatgaacggggacgagaacgagagctgcatgc

SEQ ID NO: 44192 - DNA, 255 bp, Glycine max
agcagaatcaggcatgtcatagttaataactatattaacacgttctatgtcaatcccccttcctacttgcacagggtgggaagagctggtagatttggcacgaagggtcttgcaattacttttgtgtcttctactgctgactctgaggttcttaatcaggtgcaatctaggtttgaggttgacataaaggagcttcctgaacaaattgacacttcgacatatatgccaaactgatgacgttttggaactattagg

SEQ ID NO: 44193 - DNA, 264 bp, Glycine max
ctaagagcaggttgatcatcttttgggttgtgctctatttttgttccatcacacactcgctacctgcttcaaagcagtgccatttccctgccatcttcaactttggtgactccaattcagacactgtaggtctctctgctgcctttggacaagctgcttctcctcatggagagtcctacttccatcaccctgctggccgttactgtgatggccgtctcattgttgatttcttagccaagaagctggggctgccttatttgagtg

SEQ ID NO: 44194 - DNA, 259 bp, Glycine max
aacactcatagcgcagagcacatagcatagctcatccttgagttaaaaaatggcagcagcttcttccatggctctctcatccccatccttggctggcaaggccgtcaagctgggcccatcagtcccagaagtgggaacggtgacacttaggaagaacgtcaccaatcatgtctcctcagggagcccatggtactgcgcagaccgcatcaagtacttgggctcattctctggcgagcccccgtcctacataagcggtgag

SEQ ID NO: 44195 - DNA, 259 bp, Glycine max
ctgctcgagggtgaccacttatttacagttaaagttacaataccaaaaaggattagtacaaaggagcgtgagttgcttgaagaacttgcttctctaggtgacacaagcagacgttcaaaatcccgtcctaggactcactcttccacaggtggtacggaaagtccgaaagctcaaaaggatgaaagtacaacatcaacagtcgaagaaaaaactgaaaaatcagaagatgaaaatgatgtatggatagttgaaggacttg

SEQ ID NO: 44196 - DNA, 260 bp, Glycine max
acacattaacctttctcattccccatctcctcaccttattcagccactgctaatttctaggattccgaaatggacgctggcggaaagatcaagaagggcgccggaggaagaaagggcggcggccctaagaagaagccggtttcaaggtccgtcaaggccggtctccaattccccgtcggaagaattggccgttatttgaagaaaggaaggtacgcccagcgtgtcggtaccggtgctcccgtttacttggccgcagttct

SEQ ID NO: 44197 - DNA, 249 bp, Glycine max
ccggatgacgagcatcaaactctacttcttcgatttccattgcgaacgtatactatctccttcgactttctcatcaccttcttcgctcttcgatctacgtccggtgactgctccggataccaccaccaccactcgccgatggccacgctcggaggcttacacgactcgcactgctctcagaacagcgtcgataccgaagcccttgctcgatgcgccgtagacgaacactacaagatgcagtcttcgctt

SEQ ID NO: 44198 - DNA, 284 bp, Glycine max
cgcagatcctactgctgaagaagaatctattatggaaacccatgtgacaatagttttggatacatccggtcaactaatatctctttacaagcctggtgggccagctcttgcctatacttctgctatccaggattgtgtcgggctaacggggcaaagagtacaggaactaaagagctacttagacaaagaaaattctgctatggaggtggtggtttgagtagaattattaattacacagtaatcttttttgtcctgaatggttgtttaaattatcctagtatttg

SEQ ID NO: 44199 - DNA, 278 bp, Glycine max
tctcgagccgctcgagccgattcggctcgagctcattctcccatttcctctcagaaccctcacccactcaaccgcgctcctatatcctctacttcaccgccgctctctccaacgatcacaacaacatcgtcatcccatggcaaacgccgcatctggtatggcagtccatgatgactgcaagttaaggtttttggagctgaagacaaagaggacacaccgtttcatagtttttaagattgaggagcagcagaagcaggtcattgtggagaagctggtga

SEQ ID NO: 44200 - DNA, 274 bp, Glycine max
gcaagatcataggaggaaaatggagcagaagcagcagagcatagaccccttcaaaggcaaaacaaggttacccagttttgctattccagaaagatatgaacttaatttaatacccgatctctctgcatgtactttttctgtcaccgtgcaaattagccttaccatcaatgcaagcaccgagtttcttgtcttaaacgccctggaacttgtcatacaaaacactcactttaccaactctcaagggcaggtgagtagtttttagtaatcaaaacct

SEQ ID NO: 44201 - DNA, 271 bp, Glycine max
ttgcaaactagttttgtcttgggaacatcatcacattacattagattggtggtaatggcagcgtcactacaagcagcagctactttcatgcaacccaccaagttgagcaggagcaacactttgcagcaaaagtctactcagtccatttccaaggcttttggtttggaacctgttggagctaaaaaggtcacatgctcccttcaggctgatcttaaggacttggctcacaagtgtgttgatgctaccaaaattgcaggattcgcccttgcca

SEQ ID NO: 44202 - DNA, 260 bp, Glycine max
gtttcttccatgcaccaggacaccatgggtttactaatggagcgttgagagcatgctgtggtggaggtggacccttcaatttcaacatttccgcaaggtgtggtcacacaggttcaaaagcatgtgcagatccgtccacatatgcaaattgggatggaattcatttgacagaagcagcttataggtacatcgccaaaggtctaatttacggtccattctcatatcctcccctcaagacctctcccaacaagatagcctag

SEQ ID NO: 44203 - DNA, 259 bp, Glycine max
gttcttgaggtgttagaggattttccttctgtacaaatgccatttgagtggttagtccaattggttccacctctgaaacctagagcattctccatatcttcttctcaatcagctcaccccaatcaagtacacttgactgtgaatgtggtgtcttggacaacaccttacaagaggaaaaaaaaaggactatgctcgtcgtggctagctgcattagatccctgtgatgtaggtatccatgttccaacctggttccataaag

SEQ ID NO: 44204 - DNA, 259 bp, Glycine max
gcgagattcaaggaaagctgtttatcttcagcatggagtttttgattcatcaatgggttgggtatctaatggtgttgttggctctccagcttttgcagcctatgaccaagggtatgatgtgtttctggggaattttcgtggtttggtttctcgggaacatgtcaacaagaacatatcatcacgtcaatactggcggtattccatcaatgagcacgggactgaggatattcctgctatgatagatagaattcatgaagta

SEQ ID NO: 44205 - DNA, 258 bp, Glycine max
ctcgagccggaagactgtagccgagaacccagtggtgctttattccaaaacatggtgctcccattcttctgaggtcaaaatcttgttcaaaaagctcggcgtcgacccattggtcttcgaattagacgaaatgggtcctcaaggcccacagttgcacaaggcggcaagcacattggcggctgtacagatacactgaagctgtatcggaaaggagaacttgaacctttgctatcagaagctaatgctaaaaaaacaggg

SEQ ID NO: 44206 - DNA, 191 bp, Glycine max
atctccatttccatttcctctctctcagtttccaagaatcttaagctatgggaaagtcttcccaaccgtgagcgctgattaccagaaggccgtgagaggcgagagaactcaaggctcatcgtgagaagagatggctctctaatgtcgttgcaggatctctgactagcgtactcaacgtgcctcgacaaaga

SEQ ID NO: 44207 - DNA, 271 bp, Glycine max
ctcaaacctgaaaatgtgttggtccgagatgatggtcacataatgctatcagattttgatctttccctcagatgtgctgtgtcacctactcttattagaacttcctatgatggtgacccttcaaaacgggcaggtggtgcattctgtgttcaacctgcatgtattgagccatcatcaatgtgcatccaacctgcatgttttattccccggttatttcctcagaaaaacaagaagtcacggaagccaagagctgatcctgggttgccgtcca

SEQ ID NO: 44208 - DNA, 280 bp, Glycine max
agtgaatattaattgataaattttaatatttattttgactagtttacaattatgtttttttttttattgtagatagtttataatgagataaaattataattgttaaaaaaattgaaaacctaaattattgtaggcagaaaaggcaaaactgttataacaaatatagtaatgtataccttattgacataatataacatacggcgcacgtgttcaaggccgatattcccgggctgaagaaggaggaagtgaaggtgcagattgaagatgataaggtgcttca

SEQ ID NO: 44209 - DNA, 279 bp, Glycine max
cttcacttttaagttaaatagtttttcattgtttcatttaatctacaatggctgcttcaacaatggctctctcttcatcatcattggctggccaagctatcaagcttgccccctccacccctcagcttggtgttggaagggttagcatgaggaaaacagcctccaagactgtttcttctggaagcccatggtacggcccagaccgtgtcaagtacttgggcccattctctggtgagcccccatcctacctcactggtgaattcccaggtgactatggtt

SEQ ID NO: 44210 - DNA, 249 bp, Glycine max
attcggctcgagctgtctcgaggtgagtctgtcgatctacataactagaaacattgtgatgaaaatgaaggaccatgtcttcttcgctgctacaattttcgtagcatggcaatgccatgcctacgatctgttccctctccgaatgatcactggctatggtgcccgtactccggaggtgatatgcgcaagttggaggcttgctgtggaagcacacaacatctttcgctttgagaccattcctgaagagtg

SEQ ID NO: 44211 - DNA, 230 bp, Glycine max
gacctatctggtgcagtgtacaccaatgactagtgccgtgtagttgagcctcatcaaaattgcatgaagactggacgtcctgattcagagtacctctactggccgttgaacccacgagactgtaaattgcccaaattcaatcccagaaagtttctcaaactcatgagaaacgaatcattgtcattcattggtgattaccatctcccgcaaccaagttcagtccctacttt

SEQ ID NO: 44212 - DNA, 177 bp, Glycine max
  unsure (1)..(177): unsure at all n locations
tggaaacatcattattccaatgtcgttgtgccatgccccccccaacccagcagncaagttctccaaaggtccagtgccgggataagctgatacgttcaacttggctgctcacttggctgacccatggcacaacaacattggaaacatcattattccacaatcgattttgccttgaac

SEQ ID NO: 44213 - DNA, 252 bp, Glycine max
ggaattgtcgtaactttttgattcctaaattctctaaaattcgtaattctaatttcgttaggggaaagagattgtttgtgtgtgagtgagtatggctggaaaaggcgagggtcctgctatcggaatcgatttgggaacgacgtagtcttgcgtcggcgtgtggctacacgatcgtgttgtgctcttatccaggggtcagggtttcagaatttcccaatcctacgtggctcacaccgacacagaacggtagat

SEQ ID NO: 44214 - DNA, 280 bp, Glycine max
tgaatctcagaattctctaaaagagatctttttctgctctttgaagaaagaagggtctttgcttgattttggagatgtctctgctctcagatctcatcaaccttaacctctccgataccaccgagaaggtgatcgcagagtacatatggatcggtggatcaggaatggacctgaggagcaaagcaaggactctcccaggaccagttagcgacccttcagagcttcccaagtggaactatgatggttccagcacaggtcaagctcctggtgaagacagtga

SEQ ID NO: 44215 - DNA, 274 bp, Glycine max
gagtttacatcatacttccactactgccgaacgttgcggtttgaagataagcctgattattcttatcttaagagactatttcgggacctattcatccgagaaggttatcagtttgattatgtatttgattggactatgctgaagtatcctcaaattggatccagttctagagcccgagtgagtacttaactagtgtggtttcattgcatttctagcgataattaaaggttcttgttaatcattttttggctgcattttcaacagccatgtggga

SEQ ID NO: 44216 - DNA, 257 bp, Glycine max
ccactccttcactgctcatccaaaagttgacccatttactggggagatgtttacacatacagagtaatttcaaaggatggttatatgcatgatccggtacccataacagtatcagatcccatcatgatgcacgactttgccatcacagagaactacgcaatatttttggatcttctttgatttttaggccaaaggtatcccaggtgtttcggtcctatatcctcgtaaagctatattcaaggttggaacttcttttt

SEQ ID NO: 44217 - DNA, 265 bp, Glycine max
ggcaaaagctggaaaactcgacccagtcataggaagagatgatgaaatacgaaggtgcatccaaattctctccaggaggacaaagaacaatcccgtgctaattggtgaacctggtgttggaaagactgctatttctgaaggactggctcagagaatagtgcacggagatgttcctcaagctttgatgaaccgtaggcttatatctctcgatatgggagcacttattgctggagcgaagtaccggggagaattcgaggataggctg

SEQ ID NO: 44218 - DNA, 263 bp, Glycine max
tggactctctatgggaattcaaggtactgaagtggcgaaagagagctcagatattgttatattggatgacaattttgcatctgtggtcactgtcttaaggtggggaaggtgtgtttacaacaacatccagaagttcattcagtttcaattgacagtgaatgtggcagcacttgcaatcaactttgtggcagcagtgtcagctgggaaagtgccactaacagcagtgcaattattatgggtgaacttgatcatggacacattag

SEQ ID NO: 44219 - DNA, 256 bp, Glycine max
gtcgtgccagcatctgccatccctgatggctggatgggattggatattggtccagattctgttaaatcattcagtgaagcattggatactacccaaaccatcatatggaatggaccaatgggagtgtttgagtttgacaagtttgctgttggtacagaggtatgtatgcaagaacacccacccacatatgaaattccattcaaattttatgttaaaccaaagttcaccgtcaatataaaaaatgtccactctaagc

SEQ ID NO: 44220 - DNA, 249 bp, Glycine max
ctactcttgttctttattgtgacaatcaaagtgttgtatccattgatcataattctgtgttccacagtcgcatgaaacatatggaaatcgatatcttttttgttagggaaaaggttccggccatgcagctttcagtctgacacatcccagctctggatcagtggtcagatgtgctgaccaagcctcttccttcatcaagatttgaagttctcagtggcaaactcaatgtgaagagtttttccctgaaaa

SEQ ID NO: 44221 - DNA, 249 bp, Glycine max
gggacactgggtagatcagacaagagaggttctgcaacagataacaaagtgaatcagggaggacccattttgctctagcatttgaacttcctggtggctggcataagttgaaggatgctatgattttgactgttcttcagatgctattgggaggtggtggatcattctcagctggtggacctggtaaagggatgtattcacggctatatctcaatgttctgaatgaatatccacaagttcattcaattt

SEQ ID NO: 44222 - DNA, 269 bp, Glycine max
aaacaagtagttgagaactaagaagaaggaaatggcttcctcaatgatctcctccccagctgttaccaccgtcaaccgtgccggtgccggcatggttgctccattcaccggcctcaaatccatggctggcttccccacgaggaagaccaacaatgacattacctccattgctagcaacggtggaagagtacaatgcatgcaggtgtggccaccaattggcaagaagacgttcgagactctttcctacttgccagacctcgatgatgccc

SEQ ID NO: 44223 - DNA, 263 bp, Glycine max
agaggtggagagatatttagagaggctcttaatgcacctggatgtgaagctgcccatattacagaaattgaagcaagcattgagtgtgacacttttatgcctcgagttaatacctctgtatttcagacatggtattcatcattccctttggtggaagacaacctccgctattctttcaccacttatgtgcgtgtaaggagttttccaccagagtccccggatcagaatgctgatccattttttgataataattcagacgcttt

SEQ ID NO: 44224 - DNA, 276 bp, Glycine max
gaagaactgaagaaaatgattggtgcagtcacttatattgagtgcagctccaaaacacagcaggtaaataccttaacttcattggattcaactattttgagccatattttgaagtgaatccaagctgtatattgagatgaagttaaagaaaacattgtctctaaagtttaatttatatgtattagtgtaaaattgtttattcaataagaatctaccatgttgtcacatcatattgcaaaagtatgatgtggtaatatggtgaagaacaataatata

SEQ ID NO: 44225 - DNA, 268 bp, Glycine max
gcttaatctctctcattccccatttcctcacctccttcaaccgctgctaaattctagggttccgaaatggacgctggcggaaagatcaagaagggcgccggaggtagaaagggcggcggcccaaagaagaagccggtttcaaggtccgtcaaagccggtctccaattccccgtcggaagaattggccgttatttgaagaaaggaaggtacgctcagcgtgtcggtaccggtgctcccgtatacttggctgcagttctcgaatacctag

SEQ ID NO: 44226 - DNA, 270 bp, Glycine max
gcaagaatggccagaatagcttcacttgagagcatgctgaacatatcatctaattcacttgtagcaatggcttctcaactttctgaggcagaagaacgagaacgggccttcactaatcgtggacgctggaaccagttgcgctcaatgggagaagccaagaatttgcttcaatatttgttcaattctgttggagatgctaggtgccaactgtgggaaaaggacactgagatcaaggaaataaaagatcagctcaaagaacttgtaggtcta

SEQ ID NO: 44227 - DNA, 258 bp, Glycine max
gtgtgtcataacaaaagaggaagaacataggagagaaatctattcatatcatcatatcataggacaaaagcgagcaaattcagaggatgaatggggtcacacaccttgaaccagatgagtctgagtttgttgaagttgatccaactggaagatatggcagatacaatgaaatccttggcaaaggagcttcaaagacagtatatagagcattcgatgagtatcaagggattgaagttgcttggaaccaggtcaagttgt

SEQ ID NO: 44228 - DNA, 273 bp, Glycine max
ggaatttatgatcattgatgagaatcaagcggatgataccttgatcttgagtttgaggtctatccaatatgacattgcgtgggaacgctgtagacaacttaaggctgaagatgctgttgtcaagggtaaggttgttaatgcaaacaaaggaggtctggtggctcaagtggaaggccttaaggggtttgttccattttcacagatatcatcgaaatcagctggagaagaacttcttgagcatgtgattccttttaagtttgtagaggtggatga

SEQ ID NO: 44229 - DNA, 279 bp, Glycine max
atcgtgccaatactatgatagatcatcttcttgctcaacagcaatcacaacctgaatattacaccgatcaaatcatcaaaggacttgccctggtaatgctacttgcaggaacagatacatcagcagtaactttagaatgggcaatgtctaatttattaaaccatccagaaatattaaagaaggcaaaaaatgaattagacactcatataggacaagatcgtctagtagatgagcctgacattccaaaactcccttaccttcaaagcattgtctatgaga

SEQ ID NO: 44230 - DNA, 274 bp, Glycine max
ggaatcggctcgcgctgagccgaatcggctcgagttgcagcagaaagaactcaaagacagagatcatcatggtcaggggaaagactcagatcaagcgtatagagaacgccacaagcaggcaagtaactttctcaaagcggcgaaatgggttgctgaagaaggcctttgagctatcagttctgtgtgatgctgaggttgctcttatcatcttctcttcaagtgggaagctctatgaatttgctagctccagcatacagtgttcaattgaacgata

SEQ ID NO: 44231 - DNA, 259 bp, Glycine max
tgctgtctctcgtgttgatgattactggcatcattggcaagatgtgtttgctggagctcttatagggatgataattgcttcattttgttacttacaattctttccacctccatatgacgtagatggttggggacctcatgcatatttccagatgttggctgaatctcgtaatggtgctcagccctctactgtcaataatgagattcatcatgtgcaatctgctgagcttcaggctgtatctttgtatatcccacctcaa

SEQ ID NO: 44232 - DNA, 250 bp, Glycine max
aatgaatctgatcagggcaaagagcattgagaaaggttgggacttgaagttgggggaacttgcaaggatttggaaagggggttgcatcataagagcaatatttttggacagaatcaagaaagcatacgacagaaatcctaaccttgcaaaccttcttgtggatccagaatttgcaaaggaaatagtggatagacaatctgcatggagaagagttgtgtgtcttgctatcaactatggcactagcacacca

SEQ ID NO: 44233 - DNA, 258 bp, Glycine max
accatggctacgctgattgctccttccaaccactctcctgtggaagatgccgaatctctccggaaggctgtcaaaggttggggagctgatggaaaagccatcatagcaatactaggccatagaaatgccacccaaaggaccctaatcagagaagcataccagaatctcttccaagaggatctcatcaaacgccttgagtctgagctctctggtgactttgagagggcaatgtaccgttggatattggaacctgaagac

SEQ ID NO: 44234 - DNA, 253 bp, Glycine max
gccgtttcgaatctgcacaagaacaccaagaaatccttctccgagacgatcaagatcatgtactatcattttagtgagagatctgggctgaaggctcctctgatcgccgatgatgtttatgaaataattatgaagaatgctgctcgtctagacagtgagataatctatgacagagactttgactatgattattttggattcaaaacccttgagaggtcttacctcttgaaggttcaagggaaggttgtggaaa

SEQ ID NO: 44235 - DNA, 248 bp, Glycine max
gtatttttgatgcaaaggctggaattgcattgaataagaactttgtgaagcttgtttcttggtacgacaacgagtggggatacagctcacgtgtcattgatcttcttgtattcgttgccaagaagtctctttaaggtgttacttcaaagtagcttgtcttcacattattaccgtatgtttatgtttagctgcgatttagtgtcttgctcgagcaaaaaatgagaggtctgaataaatcggtttctgaa

SEQ ID NO: 44236 - DNA, 248 bp, Glycine max
agggcagatatttttaccaatcttccagctcttcgcaaacttgacaacatgcttctcggaattttagacagtttcactgctacagagttttggtatgtagaccaaggaattgtagccccagatgcagatggttcggcctcttttcggaaaacaattcagcggcaagaagagaagtggtggcttcccgtacctcgtgttccccctgcaggactcggtgaagactcaagaaaacagttgaatcactctcg

SEQ ID NO: 44237 - DNA, 202 bp, Glycine max
tgtcattttccctcagtttctcgctcgccacacgcccctctctctcctccaatgggcgaccagctcagcgacgaccagatcgccgagttcaaggagggcttcaggctcttcgacaaggacggcgatggttgtagtactactaaggaacttgggactgtgatgcggtcactagggcaaaacccaactgaggcagaactgcagg

SEQ ID NO: 44238 - DNA, 249 bp, Glycine max
actcgagccgaatcggctcgagcttcaactttgcatctcaaggcgttaaaaaatggagaaggcacatatgcaagtcccaagagctaaactgggtaaccaaggcttagaggtttctaggttgggctttggatgtggaggactatctggaatttataatgcccccctctcgcatgaagaaggatgttcaatcattaaggaagtgttcaataagggtgttaccttctttcatacatcacatctttaccgaca

SEQ ID NO: 44239 - DNA, 270 bp, Glycine max
  unsure (1)..(270): unsure at all n locations
ctagttctagatcgcgagcggccgccctttttgtgtcatgtactgcaagctctcttagaaccctaggacgtcgggtttcgattcgtagccacaaccaacgaagtttctgtcaattcagcttgaccgacgattagcttcttccaccttttctccctatctgcgncaccagaaccgtttgtgttaaatggccaataactctcaaccctccagcatgcagtttcggccagtcattcaagctcagcaacgcaaccatttgttccaatgaattca

SEQ ID NO: 44240 - DNA, 293 bp, Glycine max
cggctcgagcggctcgagcggctcgaggaatgttagagtattatgaaattggtcctgataacaaatgagaacctccgcctgctctatgacactaaaggccgattccgtcttcattccatcagggatgatgaggcaaagttcaagctctgcaaggttaggtcagtacagtttggccagaaaggtatcccatacctgaacacctatgatggtcgcaccatccgttacccagaccctctcatcagggccaatgacactgttaagctggatctggaggaaaacaagattgtcgattt

SEQ ID NO: 44241 - DNA, 287 bp, Glycine max
gcaccacatacacctgaggcctcctaagcaatggcttcccttgcagcatccactgctgctgcatcccttggcatggcagacaagcgtggacagcccatcaacttcagtggtgccacaaggcgagctccatctgcttctagtcctggctccttcaagactgtggctccggtctccaaaaagaaggctacaccagcacctccaaagaaagctgctgctgctgcgcctgccaatgatgagcttgccaagtggtatggtcctgacagaaggatcgtcttagcagacggtct

SEQ ID NO: 44242 - DNA, 289 bp, Glycine max
gcaattatttgtggctatatatatcagtgtccaccatttcggttaagctaccaggggctaggagagcccttgtgctttgcagcatttggtccttttgccacttgtgctttttatttattacatgccagtgcaagggtgaagaaccatttcccattaagtggaacagttctttcagcatcaattcttgttggcttcacaacatcacttatcttgttttgcagtcatttccatcaggtggaaggagacaaggaggttgggaaaatgtcacctttggttagacttggcaata

SEQ ID NO: 44243 - DNA, 282 bp, Glycine max
  unsure (1)..(282): unsure at all n locations
ctaagctcactctttctaagtttcttctatcatctctccaccatggttctctcctaaaccgcctccgaatccgacgtctctgtccacacaacatacgactcttttntngncggatgtgctgttcactggttccagatggcgtagtagtcgataccgatgtcggcagcataccagatcatatacgacgagtgatgttggatgggaacccaaggttgtctttggcatcatttgtgacgacttggattcagccagagtgtgatagactcatcatggctgccatta

SEQ ID NO: 44244 - DNA, 278 bp, Glycine max
gtttagatggcataattatgaaagttgaagatgttgaacctgttctcgagctaaaggaatatttcgacagaagaatggaagaaagcaatctactgagcttgaccaaagccactgtaacacatattcaagcagctggaatgggtgatcgcgtttgtgtagatctctgcagtctcatgagacctggtgaaggacttcttgttggatcttttgccagaggattatttcttgttcactcggaatgcttggagtcaaattacattgcaagcaggccgtttcgg

SEQ ID NO: 44245 - DNA, 279 bp, Glycine max
ctcttatacaaaaaatctagggtgggaatttcctggtattggagaatttcagtgctacgacaaatatcttaaagctgatttcaaaggagctgcattaagggcagaccatcctgaatgggagctacctgataatgctggggaatcaaatgatgtacctgaatctacagaatttttcaaatcaggaggaacttatcaaacagagaaagggaaattttttctaacctggtattccaacaagttgctgacccatggtgatgaaatcctagatgaagccaacaa

SEQ ID NO: 44246 - DNA, 283 bp, Glycine max
agcaggtattcgtgctgagtcagattctagagataattattctcctggatggaagtattccaactgggaaatgaaaggggttcctctaagaattgaaattgggccaaaggatttagcaaataagcaggtcatcaactttgccagtgttttatcaattctcatatttgtcattttgcttccacactgttagtttttcagtgaacaccaaataaatctctttgaattttgcataggttcgcactgttcgacgtgataatggtgcaaagatagacattgctagtgc

SEQ ID NO: 44247 - DNA, 277 bp, Glycine max
ataaaaagaaaacataatgcagagagaggtagaagaatccagaacccgttgtttgtctcccattcccgttcctatataaagctccttctttcacaaccttcacctacttcaactctctacaattcgctctgtgcagtttcctacgctctcttttctgcaattttcttttttgttccttctctgcggttatctttttgagcttcaatggcggacgctgaaaccttcgctttccaggctgagatcaaccagcttctcagcctcatcatcaacaccttct

SEQ ID NO: 44248 - DNA, 274 bp, Glycine max
ggtcactgttggggaactaagccactgtgctctggggttctatggtggccattggagcccgaatggagattcaattttagctcatggatatggtggatctttccatctttggaaaaatgttggtaatgataattggctgccacaaaaggttccctctggtcattttgcatcagtgactgatattgcatgggctagatctggtgattatattatgtccgtcagtcatgaccagacaactagaatttatgctccatggaaagttgaggctcctctc

SEQ ID NO: 44249 - DNA, 270 bp, Glycine max
tttcaatctgcacaacctgctcagtcgagtggtgcttttggctttggcaactttggccagacacaacctgttggtgcaagcagcttcggtggcactccaggaatgtttggtcagaataattttggacttgtgtcttctacccccctgagttctgtggctgtacaagcagttccgaatacaaatccatttggaacacttcctgcattgcctcagatgtcaattggtcgagttggaactactccttcaattcaatatggaatctctagcatg

SEQ ID NO: 44250 - DNA, 261 bp, Glycine max
actgatgtgtcctcaaccgacacacgccgctcatcacacacagtgaggattcccttgtactcccaaccctcaaaggcaaactcaatggcatacgcactccgtgtgccaacaccgaacgtctcagtggtggacctcgtcgttcaggtctcacagaagacctttgcagacgaagtgaatgcagcattcagagagagtgcagacaatgagctcaagggaatcctctctgtgtgtgatgagccacttgtgtgcgttgacttcagg

SEQ ID NO: 44251 - DNA, 261 bp, Glycine max
cagagttgggagttgaatcctctctgattcgatgacgacccgaatcgcgcccggtgtgggagccaatttgttgggtcaacatgccgccgagaggaatcaagatgccactgcttatgtcggaaatctcgaccctcagatatgtgaggagttactatgggagttgtttgttcaggctggtcctgtcgttaatgtctatgttcccaaggatagagtcaccaaacaacaccagggttatggttgcggtgaattccgcagtgaaga

SEQ ID NO: 44252 - DNA, 253 bp, Glycine max
cttcatttaaggcctcttcgcatcttcgcgagcctgtgaggaatcttcttcagtccctctcatctcaagccaaaagggtcattgtcatccatgactcgttaatggcatcagtggcacaagatgccacaaacatgccaaatgttgagaattacacttttcacagcacgtgtgcctttaccaccttcctttattattgggaggtaatgggaagacccccggttgaaggcttcttccaagccacagaaattccttc

SEQ ID NO: 44253 - DNA, 243 bp, Glycine max
caggcattcattgcccatcttgatgagcctttgcgcacaacgtttcagtggtttatgcactacaaggatataatagcactgcctataacatcatggaatgttcagcaaggatttgtcactgcaactttactgcgagttctaaaagcaagggactgggatccttacgaggcgcagaaaatgtccgttgacagtgcaaattcaacggtgcacaatgagattgccaatatattatctaacaccatt

SEQ ID NO: 44254 - DNA, 253 bp, Glycine max
ctacaatggctgcttcaacaatgactctctcttcatcatcattggctggccaagctatcaagcttgccccctccacccctgagcttggtgttggaagggttagcatgaggaaaacagcctccaagactgtttcctcaggaagcccatggtacggcccagaccgtgtcaagtacttgggcccattctctggtgagcccccatcctatctcactggtgaattcccaggtgactatggttgggacactgctgggct

SEQ ID NO: 44255 - DNA, 244 bp, Glycine max
gaagcattagcaaaagcaagaagaactatcctaagcagaaatggcctcttcagtgatggcatctgtggccctcaaacctgcccctttcactgttgagaagtcctcagttagaggccttccctccctctcaaggaactcctcttcattcagagttgtggccagtggtggcaagaagatcaagactgacaagccttatggagttaatggtggcatggctttgagggaaggagttgatgcatctggc

SEQ ID NO: 44256 - DNA, 247 bp, Glycine max
ctccgaatttcattttcagaagcctctttgggaatcaaattggagtgtctgcaatccactccgaagcatgatgcattgtgcgagcattgtctcggctccgtcctacgcgttcccttttcgctctggctccgctctccactactccaactgcgatctcgctctctaagcgcagttggaagccacctccgagcatggcaaaagcccagtcagagccaccgtttctatagagaaagagaccccggaggcc

SEQ ID NO: 44257 - DNA, 194 bp, Glycine max
cttcagtttaaagttacatagtttttcattgttttacttaatctacaatggctgcttcaacaatggctctctcttcatcatcattggctggccaagctatcaagcttgccccctccacccctgagcttggtgttggaagggttagcatgaggaaaacagcctccaaaactgtttcctcaggaagcccatggtac

SEQ ID NO: 44258 - DNA, 222 bp, Glycine max
tattttttgatgagcgcacattatcgatctcctattaactactcaaatatacagcttgaaagtgcttcagaccgtgttttttatatatatgagacattacatgaatgtgaaagctttttgaatcagcatgatcagacaattaggaaggattccatcccaccggataccttggatattattgataagttccatgatgttttttgacctcgatgtcggatgatc

SEQ ID NO: 44259 - DNA, 270 bp, Glycine max
gtttgttgatcgagataactagaaacagtgtgatgaaaatgaaggtccttgttttcttcgttgctacaattttcgtagcatggcaatgccatgcgtacgatatgttccctctccgaatgaacactggctatggtgcccgtacactgcagatgagatacgcacattttagacgcttgctgtagacgcacaccatcatctggcgctttgagaacattcctggagagtgcgttgacgcaacaaaggtatacatccatggcgaacaatatagat

SEQ ID NO: 44260 - DNA, 275 bp, Glycine max
tcggaatcggctcgactcgagcgaatcggctcgaggacatagtagcacaaaactcacgcctaagttacgagattgatggaaactcaaaggcaccgcttggttctaataccaccaccatttcaaggacacttaactccaatgcttcaactagccaccatccttcatttaaaagggttctccataaccatatcacatgctcatttcacctcccccgatccttctaattaccctaactttagttttctacccttgttctatgatttatccgataccaa

SEQ ID NO: 44261 - DNA, 261 bp, Glycine max
gtttacaccgagcagccacacctcccgcagcagccatggttctcaaaactgaactatgccgattcagtggtgccaagatctacccaggaaagggcatcagatttgttcgttgtgattcttaggtttttcctgtttgcaaactcaaaatgtaagatgtatttccacaatcgcctgaagccttcaaagctcacctggactgcaatgtacagaaagcaacacaaaaaggacattgctcaagaagctgtgaggaagaggagacgt

SEQ ID NO: 44262 - DNA, 277 bp, Glycine max
agcacttgcaaactagtcttgttttcggaacatcatcacttacattacactggtggtaatggcagctgcactacaagcagcagctactttcatgcaacccaccaagttgagcaggagcaacactttgcagcaaaagtctactcagtccatttccaaggcttttggttgggaactgttggagctaaaaaggtcacatgctcccttcaggctgatcttaaggacttggctcacaactgtgttgatgcaaccaagattgcaggattcgcccttggcacct

SEQ ID NO: 44263 - DNA, 265 bp, Glycine max
ctcgaaccgtgaggatggtatcttcaaggaggtcttacgtaagaagcctgattttcatcactaaccatggccaactattagtaatgccgcaaatgattttttgaaaacattactagtaaaggatcctcgggcgagattaactgcggctcaaggtttatcacatccatgggttagagaaggaggtgaagcattggagattcctattgatatatctgtcctcagcaacatgcggcagtttgtgaaatatagtcgaatgaaacaattt

SEQ ID NO: 44264 - DNA, 267 bp, Glycine max
attgtcatgtcctatcatacccatgtaccagtgtacattccaagatatacctttagctggctggtgaaacccatgtggttgatcataaaatttcttcacagagcagctgatctgactctggtgccatctgctgccattgcgggggatctcctagcagctagagtcacagcagctaacaagattcgtctttggaacaagggtgttgattctgaaaaattccatcccaaataccgctcccatgaaatgcgattaagactaagcaatgat

SEQ ID NO: 44265 - DNA, 264 bp, Glycine max
  unsure (1)..(264): unsure at all n locations
gatgaagagggcaagggatgatatgtatcctgcctctcaattcaaacgcccctttgcttcatcacgtgctgattcctatggacaaaaccaagtccctggaagcggagggggaggaggaggtggcaatggaggtgttgttggcgggggagcaaatacttcccaaaagcttactaccaatgatgctttatcctatttgaaggaagttaaagacatgtttcaggaccanagagagaagtacgacatgttccttgaggtcatgaaaga

SEQ ID NO: 44266 - DNA, 257 bp, Glycine max
atccttatgaggaattccagaaactaaagcatcatcctgcaattaaatcatttctggaaggtggaacagttatccagtatggagctcgcactttaaatgaaggtggttttcagtctatcccatatccagtttttcctggaggagcaattattggatgttcagctggcttcatgaatgtgccaaagatatagggaactcacacggcaatgaaatcaggaatgcttgcagctgaagttacatttggtgcacttaatgaa

SEQ ID NO: 44267 - DNA, 252 bp, Glycine max
attcccaattcctaattgtttaaacctaattctcatttcttcatcgttcgattcttctcctcctaaagatgcagatcttcgtgaaaactttgaccggtaagaccatcacccttgaggtggagtcctccgacaccatcgataacgtgaaagctaagattcaagacaaggaagggatcccacctgaccagcagagacttatctttgcgggtaaacagcttgaggatggtcgaacccttgccgactacaacatcc

SEQ ID NO: 44268 - DNA, 273 bp, Glycine max
atgagcgtggttggactagcattgaggtaatgagagttgcattctcactgatcgtatacccagctggtacaatgtcaaccgtgccggtgacgcgatgggtgctccattcactggcctcaagtccatggctggcttccccaccaggaagaccaacaatgacattacctccattgctagcaacggtggaagagtgcaatgcatgcaggtgtggccaccagttggcaagaagaaacttgagactctttcctacctgccagaccttgatgatgcaca

SEQ ID NO: 44269 - DNA, 255 bp, Glycine max
agcaaaagcaagaagaactagtctaagcagaaatggcctcttcagtgatggcatctgtggccctcaaacctgcccctttcactgttgagaagtcctcagttagaggccttccctccctctcaaggaactcctcttcattcagagttgtggccagtggtggcaagaagatcaagactgacaagccttatggaactaatggtggcatggctttgagggaaggagttgatgcatctggcaggaaaggaaagggaaagg

SEQ ID NO: 44270 - DNA, 267 bp, Glycine max
tgaagaggcagacagtgaatgccatgaaacacatgcagctgttagtgcgagttcaatgtcagattcagtctcgaaggatccagatgttggaaaaccaggcacgatatcaagctgatttcaagaatgataaggatgcagccagtatcttgggcaaactcacttctgaagcaggaaatgaagagtgggatgatagcttactgaccaaagaggaagtagaggcaagattgcagaggaaggtggaagcaatcatcaaaagagaaagagcaa

SEQ ID NO: 44271 - DNA, 238 bp, Glycine max
cggatattgtctgctctaaaacagtttttggatgctgaatctattatcaatactgctttggatcaaactggaaaatgggatcaaggtgatttgttgcgaacaaaagctaaacttcaaattgcacagggccagttaaggaatgcaattgagacatatacgcagttgcttgctgttcttcaaatccagagtaaaggttttgggtctgggcagacgctatacaaggaaaacagagatcgtg

SEQ ID NO: 44272 - DNA, 267 bp, Glycine max
cattaacctcttcttcttccactttcattccaaagcgttattccttcttcttcttcctctccattctcttcgctcttcgatcctcgtccgggggctgctccgaataccaccaccaccacgcgccgatggccacgataggaggcttacgcgactcccaaggctctcagaacagcgtccaaaccgaggccctcgctcgattcgccgtcgatgaacacaacaagaagcagggtggtgaggacacaggaacaggttgttgcgggaacctgc

SEQ ID NO: 44273 - DNA, 266 bp, Glycine max
gtttctattaagcagaaggatcggtctgctatgagtgttgggccgggaatggatttgccgatcatgcatgacagtgatcgctatgagcttgtgcgtgacattggttctggcaacttcggtgtagccaggcttatgagggacaagcacaccgaggaacttgttgctgttaagtatattgagagaggtgaaaagatagatgaaaatgtacaaagggaaattataaatcacagatcactgaggcatcctaacattgtcaggttcaagga

SEQ ID NO: 44274 - DNA, 238 bp, Glycine max
gcttgttgaggaaggagtggtctcagtgctttgaagagaggaattcgatttgggtttgtagattcaagaggtcctcgtgaactttatggaaaaggcagtacgatttgatggggatttgaatcaagttgaaatcaagtatcacttagaagttgagaatgtgaatgggattcaattacaaacagttctggaggcaatggatgtagttggtattctagagtatgggcttgctacagttgct

SEQ ID NO: 44275 - DNA, 258 bp, Glycine max
tattatcatccgcagctgcttttattcgcaccgcaaacagtgagccatggccgtcggaaagaacaagcgcatctccaaggggaagaagggtggcaagaagaaggcagctgatccctttgccaagaaggattggtatgacattaaggctccttctgtttttcaagtgaaaaatgttggcaaaaccctcgtctctcgtactcagggtaccaagattgcttctgaaggactcaagcatagagtgtttgaggtctccttggc

SEQ ID NO: 44276 - DNA, 259 bp, Glycine max
tttcttacaaggctctactctactgcttcaccttctgctctagaaaattcagtggtgatacatggcttcggctactctctctgtagccaaaccagcccttcaggcaaatgggaaaggcttctctgaattctctggcctccgcagctcatcaggcttccttccctcttctagaaaatcatcagaggctttccattctgtcattgacttccagacatatgcagttggaagcagtcgcggatacaagcagggtgtgacagaa

SEQ ID NO: 44277 - DNA, 244 bp, Glycine max
atcgagccgcgcgacgcgcccttttttttttttttccaaaatgggttagctaccactacactattttaagtagagattacaagctcacaaaatctaagaccaaaccggcaaccccatttggtttgtttgaacttaaactacattcccattggttttggctttttgagatttcatcacccggaattttgggttccggttttcggacttcaagggaaattaatggatgagaactaatgaataagct

SEQ ID NO: 44278 - DNA, 269 bp, Glycine max
gttatccctcacaaaccgccggctgtctcaggtaaacagaaagtgaaaatgaagagaatgatagccttggggtttgagggttcagcgaacaagattggtgttggggtagtgaccttagatggcacaattctttctcacccacggcacacatacatcactcctcctggccaaggctttcttcccagagagacagcacagcaccacctccaacacgttcttccccttatcaaatccgctttggaaactgcacaaatcactccacatgacat

SEQ ID NO: 44279 - DNA, 263 bp, Glycine max
ggaaattggttgtgcatactctcatggtgggcacatgttaaaagccagttgtcttgtatttgtggaggaggataggaatgtaattaacatagagagaaagatttgaccaatgttcaatctctccactgtcattaaaaggagtcaaggatgctggatatgagaaaatgacagttgtgcaggaggctactcttccagtaattctcaaaggtaaggatgtccttgccaaggccaagacaggcaccggaaaaacagtagcctttttg

SEQ ID NO: 44280 - DNA, 241 bp, Glycine max
gtgtggcaattcagatatagctatagtcgatgtcatatagtctcattgctggcaattatccaatacggattctgagtaccatgacagaaggtacatccgcacatacacatttcaacgtagaaaatggggctctttttagtactattaccatgatacggcttgcactcgttggtttaccatccaaagcatcagggtctctgataccattcacaagtgctccaaatgccctcttggctgatct

SEQ ID NO: 44281 - DNA, 270 bp, Glycine max
ctacaatggctgcttcaacaatgactctctcttcatcatcattggctggccaagctatcaagcttgccccctccacccctgagcttggtgttggaagggttagcatgaggaaaacagcctccaagactgtttcctcaggaagcccatggtacggcccagaccgtgtcaagtacttgggcccattctctggtgagcccccatcctatctcactggtgaattcccaggtgactatggttgggacactgctgggctttctgctgacccagaga

SEQ ID NO: 44282 - DNA, 268 bp, Glycine max
gttctccacatcctcagccaaagcaacctcctacaacgtggtggacttcggggccaaacccgacggcgcgacggacgcaaccgcggcattcctaagcgcgtggaacaaagctctgtagttcgaacaaacccgcaggcattcacgtgccgcaacggcaggttcctgatagcacgtgccgttacgttccatgggcaatgtgcgaaccgtgctatctccataaccattcgtggaaccttggtggctccttcccaatacacgttcgtgggga

SEQ ID NO: 44283 - DNA, 261 bp, Glycine max
tgaaccggaggcagggagtatccttatagacaacattaatatttcatcaattggtcttcatgatcttagaagtcatttgagtatcataccacaagatccaaccttatttgaaggcaccattcgaggcaatcttgatcctcttgatgagcactctgataaagagatttgggaggcccttgataagtcacaacttggagatataatccgtgagacagagcgaaagcttgatatgccagtgctggagaatggagataattggag

SEQ ID NO: 44284 - DNA, 258 bp, Glycine max
atcgagcgaatcggctcgagctccatgaaggtgaatgaggagactagtgatggggatgactaatagggtccccaagggaaagggggagaaaaatgtgggggtggttgagagcaaattggtgtgcacccttgaggagctttacaaagggtgcaagaagaagttgaagatctcaaggactgttcctcacgaattcgggaaaatgaagactgtggaagaggtcttgaaaattgacatcaaacctggttggaaaagaggcac

SEQ ID NO: 44285 - DNA, 249 bp, Glycine max
gacaagcccataatgcattcaccatatcttttgggaatttatgcttcagagggatggttcatgaggctgatggaagctagtaagcaatttgtgactaaggacccaaagaaggcccacctattttacctacctttcagttctcggatgctagaggaaactttgtacgtacccaattcccatagttctaggaacctgattcagtatctgaaaaattatgtagacatgattgccgggaaacatcgtttctgg

SEQ ID NO: 44286 - DNA, 229 bp, Glycine max
ctggttgattcggatctagagtcttcagtttctcctcgttgttcttcgctttcctgttttcaatttcgattctttcgtcaatttaataagatgtttgggagggcaccgaagaagagcgataatacgaggtactacgaaatcctcggcgtctccaagaacgcttcgcaggatgatctgaagaaggcttacaagaaagccgccattacgaatcaccccgaaaagggcggtg

SEQ ID NO: 44287 - DNA, 262 bp, Glycine max
ttaggacagcacttgcaattgcttcccttttgaacaggacactggtcatgcctccactatggtgcagaattgataggttatggtttccccatcctggtgttttggacgggtctataactagacaaccttttctctgtcctttggatcatgtatttgaggtaaatgtcatgttgaaagaactcccagaggaagagtttggctctggagtagatattagggagtactcaatacttgataatccctcgctcgcctcagaggtgaa

SEQ ID NO: 44288 - DNA, 260 bp, Glycine max
gtttgtggcatcaactacattgcaactgatatcaacccacatgcagtgagagtgacccatgagacattggaagcacatggggttggagctgacttgatagtaacagatattgcatccggactagaggaccggctagcagggttggttgatgtcatggttgtgaaccctccttacgtgcctatccctgaagatgaagtgggtgttgaaggtattacgtcatcttgggctggtggggagaacggccggagtgtaatcaataa

SEQ ID NO: 44289 - DNA, 255 bp, Glycine max
ctctctgcttgcggtgcttcacaagccaaatctaacttgtctctgatttctccgatctagtactactatcaatggccggaaaaggagatggtcctgctatcggaatcgatctcggcaccacctactcctgcgtcggagtgtggcagcacgaccgtgtcgagatcatcgccaatgaccagggtaacagaaccacgccgtcttacgtcgctttcactgattccgagcgtttgatcggtgacgccgccaagaaccagg

SEQ ID NO: 44290 - DNA, 253 bp, Glycine max
ggattgcatctgtaattacccaacagaggagccagatgaagataataatgatggcaactttcgcttattcacgtatagagaattgaattctgccacacgtggttttcacccatcggaaaagattggagaaggaggctttggcactgtctacaaggggcagcttcgggatggaactttggtggcagtgaaagtgctttcaattgagctagattccttgagaggagagagggagtttgtggcagaattgaataca

SEQ ID NO: 44291 - DNA, 287 bp, Glycine max
cctcaaccgtctcggatgagatgatcgtgttcagggagcttaacaagcttgaagtccaaggggttacgggaataatgttcaagaaggcctttgaccaggttgaaggccaaggacatcaatcttcaagtgaccgagaagttcaaggagcgggtggtggacgaagctacaaccctagctatggtgcacgcccgctgaggcgagccatcatgaggctgctggaggacaccttgctgagaagatgctcgcagggagtaaggaggcgatctgcatatagatgtgatcgaggg

SEQ ID NO: 44292 - DNA, 289 bp, Glycine max
  unsure (1)..(289): unsure at all n locations
cgctngagcggattcggctcgtgcttagttctttgcgatttctatagttcaattatgggacagccttcagtctctctctctgttctctttgcctgctactcttgtcgagtgcatgcttcgcgagtagctccagctagctcatcgagtgccgacccatcaacctcaacgcgttggaacccgaccaccgcgttgagtccgacgttgtgtgattcagagatggtgctctcagcaccctgagctgaaatgcgccggtgtcactgcctacagactcgacctcaaccgcaatggc

SEQ ID NO: 44293 - DNA, 283 bp, Glycine max
gcccttggtttcctgtttttcagtgagtgctgcttcgctttcagttccagagagcagcctcagcaaaacgagtgccagatccaaaaactcaatgccctcaaaccggataaccgtatagagtcagaaggagggctcattgagacatggaaccctaacaacaagccattccagtgtgccggtgttgccctctctcgctgcaacctcaaccgcaacgcccttcgtagaccttcctacgacaacgggtcccaggaaatctacatccaacaaggtaagggtaattttg

SEQ ID NO: 44294 - DNA, 272 bp, Glycine max
cagctacttgaatatatctatcagcaagaacatagtccctgatgaaatcaaagggagggtgcttcatcattccttccctgtttctcttttcctgccccgcaatgtccgattggagcacaaaacattgaagcttctgaagtattggacctggcaatttgttattgttaggccagtatgttccattctgattattgcactccagcttcttgggctgtaccccagctgggtcagctggacgtttagtattatactgaacttttcagtctccatgg

SEQ ID NO: 44295 - DNA, 287 bp, Glycine max
aagagatactactctgagtctgactactttaagcaagcacttcgccaaggtgcaccagcaaagcctagggtaccaaggattccaagaatgccgcacttacatgatttccagtttttcaataacccaaggctaaatgaattgtatgaaaaggaagtgcggtaccttatgcaagcgaaccagaagaaagataccattgatggtgaagacgaagatcagttggacgctttgacagcagaggagcaggaagagaaggacaattatagaggagggtttgcgtcatggacaag

SEQ ID NO: 44296 - DNA, 289 bp, Glycine max
gcaacagtgagaacaccattggattttgaatctaacaagcagaacctttgtccattttccaatgaccttctcggtggaggaatcctagtgggacaaaactggagattggatccacacttatacaaaattctcccattagtaacctgttgagagatgctgcctggaagaaaggctgtttaatggtccagattgtgatgtctgggaatgcagcagtcaagaggagtgattgggcctcattggtacaagtgtttttaacaaacagcaacagtacagagcattatgatgcatg

SEQ ID NO: 44297 - DNA, 271 bp, Glycine max
catcatgttggtgcctcagcagctgacactggagactcatctctgcagttgtcaagagctgctagcattgttatggtgattgcatattgtgcttaccttgtcttccaactgtggactcacaggcagctatttgaagcccagaatgaagatgatgaagagggtggcagtgattcagaagcagtgataggattctggagtgggtttacttggctggttgggatgactatgaccattgctttgttgtctgaatatgtggtgcaaacattgaggt

SEQ ID NO: 44298 - DNA, 181 bp, Glycine max
ctttatgattatttggtgaagaaaaagttgcacaacactgctaaagcattcatgacagaagggaaggtttctcctgatccagtagcaattgatgctcctggaggttttctttttgagtggtggtctgttttctgggatattttcattgtgatgacagatgagaaacattctgatactgctg

SEQ ID NO: 44299 - DNA, 274 bp, Glycine max
gaataagtacagtagaattcgacagtgtccggcgaggaggcggaggcgaatatgaggaagaagttcggcacccgattccccgcggctcgtatcaatcagataatgcaagcagatgaggatgttggacagattgcactagcagttcctgttttagtttcgaggtctcttgaattgtttttacaagatctaattgaccgtacttatgaaattactcttcaaagtggagcaaagacactgaattccttccacctgaagcactgtgtgaagaggcaca

SEQ ID NO: 44300 - DNA, 269 bp, Glycine max
cttgttttcaatgatgatatccaaggcaagaaagaaaaaccttgcaggtttgttagcagcactcaagatggttagtgggaccctggcagagatgacttatttgttccttggtgctggggaggctggaactggtattgcagaacttattgctcttgagatttcgaaacagacgaatgctccaattgaagagtgccgcaagttggtttggctggtggactcaaagggtttgattgttgatctcgtaaaggctcacttcagccattcaagaa

SEQ ID NO: 44301 - DNA, 272 bp, Glycine max
gttagcaaaaatcaatagcttcgattattcatgatctggtatgaagtatgaactgtttgactaaaccatacttttgcagattactgatgaaggtggtggaataccaaggagtggtctctcaagaatttttacgtatctctatagtacagcagaaaaccctcctgatcttgatgtacataatgaaggagtaactatggctggatatggttatgggattcctattagtcgtctttatgctcgatatttcggcggggacttgcagatcatctcta

SEQ ID NO: 44302 - DNA, 214 bp, Glycine max
gaatccggtcgaagctctgagatgtttgatctgcacaatgttgtcatatctatacctctgcctggaattcgggaagctccaagtgtcagacagatagatggagagtggaagttggactccagaaactctgtgttggaatggtccattctccttattgatcagtcggatcgcagtggttccatggacatttcctgttcccccagctgatccgtca

SEQ ID NO: 44303 - DNA, 190 bp, Glycine max
gcctggtagatttgagagtttcttccaatctagcatggaagttcaacaatcctacttgcaaggattcagcaggaacatttaaaaggcttctaacattacaaaatccaagagattaaccaaggtcctgttaattaaagaggaagggcaccaccaagggaaccgaagctgccagagaacgtgattgtggaaa

SEQ ID NO: 44304 - DNA, 440 bp, Glycine max
agcattatcatcgaatctcagaacataacaggtgaaacacgaatcaagcagaggcgctatggggttcacagatccacacctaaaccgctaaattaaactgcgagcgatacatgataaactaagaccaccactcagatcaccaccatcttattcagatccaaaggaacggacgcagggggagtcgacgatgacggagggagggcggccgaacagaccagatcagagagatctaggagagctgtccgcagtcagcgaccttgaccaccttggaggtggagccgttgcgggtgcccaccttctcgatggccttgacgacgtccatgccctcgacgacctggccgaagacgacgtgcttgccgtcgagccaaggggtcgcgacggtgcagatgaagaactgggagccgttggtgttgggcccggcgttggccatggagagcaca

SEQ ID NO: 44305 - DNA, 432 bp, Glycine max
agagatcattcatgtgtctcattggtttctaccatattccttttcatgtgatcgtatcttcatagcccacacctaaaccttcaagccggagacagccttccgccagacgcattcgtaactactagacgggtcggtagacctgctttccgttacaaagacgtccagctactaagcacactccacactctcatggttcaattgtatgagacgtctacttctcgtaaacccagtcgtgctgagcggacttccagctctggacctcgccgtccttgaaccagagagcaatctccttcttgccgttctcaacggagtcggagccgtggcagacgttgcggccaacgtcgagggcgtagtcgccacggatggtgccgggggcggaggcgagggggttggtggcaccgaggatggagcggccggtcttgacggcgtcac

SEQ ID NO: 44306 - DNA, 254 bp, Glycine max
tgaagctgggcccatcagccccagaagtgggactggtgaccatgacgaagaccgtcaccaagcaggtctcctcaggaagcccatggtactgcccagaccgagtcaaggagttgggcgcatactctggcgagcccccgtcctacctaaccggtgagttcccaagcgactacggctgggacactgctgggctttccgcagacgcataaaccttcgccaagaaccgtaaactcgaagtgatccactccaggtgggcc

SEQ ID NO: 44307 - DNA, 392 bp, Glycine max
ccgcacccaccacgaacgctggcaagttaccacctccaaatagagcaacccatggaccacttatcacctgcatcaccatctgtggtatcacaattgccagattgagcactcccagagacaaaccttggcctgcccctgaggtgctggagaatattgatgctagagcaaagggtatgctgtaagtaatcgcgagtgggattccgaggagagagaagagagccaacgcgccggctttgacggcggcgggaggaggcaggggttcctggtgggcgttggggagtagggtgtattgtcgagaatgttgggccatcttagtaaccaaaaccgtcatggccaaacaaaccgcggcggccgaagcgggaggtgcaacggtcgctgtggtatcccacgat

SEQ ID NO: 44308 - DNA, 581 bp, Glycine max
tgtagaatgtatatagtaaggattgaatgacatggtgatgggtctcgtgtatttatcattactaacattgtcacactaaataatttcaggagtttaattaaaggcatgctactgtaaaaccaatccaaaatcttctttgctatcacctgttaaagtgtttatttattatgaaagttaataaattttgtatcttgctaaccaaactcaatgcttttagcatactaattaagaaattaaaaaaatatttattataagatcacaggagaaaatagaaaaaattatggacaaatagatacttattaacatttgtcataaattcattttatacgaagaattatgattggataatagtataaatatgaaacttattgcatggacttgtgttatgcaggctggcacctaaagtggtgactgtggtggagcaggacctaagcaacactggttcattcttggggaggtttgtggaagccatacactactactcagcattatttgactctcttgggtcaagctatggggaggagagtgaggagaggcatgtggtggaacagcaactattgtctagggagattcgaaatgtg

SEQ ID NO: 44309 - DNA, 638 bp, Glycine max
tcttctctagtgtgtcatctgatttgtagacaagaaaacgtattcatggacccatgtcttgatagcatcccatatctcaagtccatcaacagcataagggtagtcctctatcacaaggcgaatgccatgagggcacgatggatcctcaattgccattcctctttttataagatcagcaggcaatgcttgatctgtaaaaacccaatccttgtaaactacagcagacatttccacagaataccttccccacaaaaatgtttgttctataacgccaccgtcgttgaccagtgataaccgagcaaggccatttatgttcatggtgtcacgatagtgagggtgaaggagtttataaatagggtgaacaacactgagatgcctatttgttgctatgatgaatggctcaacaactgcatgagtgtttaaccaatggctgacaagttgatgatagcacgagtcattcacaactacataagcctttgctagcagccaaatagaactttcaacaccttcatctgcaggcagaaaaacttgactaaaagcaccagattgatctccctgaggatgtggcaaactcaactctatggcaagtggccttaaagttccgtcatttttcaggaaaaggatggttctggtagcat

SEQ ID NO: 44310 - DNA, 416 bp, Glycine max
gcgtaaataattttttattttataataaaaagcaagcttcaaaattacagatcaatagagtccaagtaagagacaatgggtgcttcttgccccattcctcattgatatgtctttgcccttttatgcacacaccttttcaaaattaaccttcagtggatggcaatggaactcgcctacgatattcagctagagcccacattggaaaaatatttctatacattgggtaatgcatcatgcagtttttcaagaatactccagtgatttcctgttggggccaatcaccttcttccaactgggaattaatgagcaactttgcagcttgatgaagaggagtaaggtctctctctgactgtccagcataaattagacccataagagcccatgctggttgtacaacgtttgatcgacttccttca

SEQ ID NO: 44311 - DNA, 485 bp, Glycine max
tcccttattgggaaagcttattgaatttgcgataacgatactcagcataggtttttgttgaaaacttgggtgggttctgatcattgatgagagaaggaagaggccctatcactgcctgatgtggaggcgcaacaaacactgcccatgacatgcgatttcgttccttattcaccaagcttctatgcagaacactcttgtactttccgttactcaacaccttatccctgtagtcatcaacaccaatgggcgaggtctgcataaccattctcttttcctctttgttttctctcaagttgatcaccaacatgtaccatgagtgcattttgcaagtaattgaccgcaacccaactattctccttccaaacttggaggcctggaacttcgtttgggacgagtatggtaagggcactcatgtcagtgtgaggttcaactcccaaagctagatgtggctgtggacatggtggatacatatttatcttcatttc

SEQ ID NO: 44312 - DNA, 383 bp, Glycine max
aaaggaggatgaagttctatatgaggccacatttgacttaccagaagctttcgggaatgtgggtgctgttttagtacagaatgaggaccacaatgaggtgtttctaaagagcatagtccttgatggcttccctaatggtcctctgcactttacctgcgattcatggattcagccaaagagtgatagtcctgtgaagagagtcttcttttctgacaagtcatacttgccatcacaaacaccaagtggattgagaaagttgagggaagaggaattgaagcaaaaaagaggaaatggagaaggagaacgcaaaagcactgataggatatacgactatgatgtatacaatgatcttggtgatcctgatagcaacattgacctcaaaa

SEQ ID NO: 44313 - DNA, 383 bp, Glycine max
  unsure (1)..(383): unsure at all n locations
cgaatgacccttcacaggtttgggaacacttcctcttcttcgctgtggtatgagctcaactacattgagtccaagggaaggatgaagaagggtgatagggtgtggcagatagcgttcggaagtaggtttaaatgcaacaatgctgtgtggaagtgcaacaaaagcattaagacaccggttgatgggccttgggctgattgcattgatcgtaacccggtccatattcctgaaatcgttaagctctaggatggagaattgttcaagaagataaagcacattggttattactttggttccagttatgaanacaaacccatagatgagttcttttcatcacccttctctttctgcttactgtagccgtaccgcaaatctctcatttg

SEQ ID NO: 44314 - DNA, 274 bp, Glycine max
  unsure (1)..(274): unsure at all n locations
actcgaaccgaattcaaatcggctcgaccgctcgaactcgagccgcgggaatccttcccgtggtgatctcttccatgctgctcccaatgtagatcattctccggactttgtgaggccngctgtcgcggcgtggttgccctggctgcgccctgctctcggttttgctggctggcgtcttgactttgttcgcggtttctctggtacctctgtctccgcctctcttgccgcctcgcctcctgtctttgccattggcgactcttgggcccgcttgggc

SEQ ID NO: 44315 - DNA, 478 bp, Glycine max
  unsure (1)..(478): unsure at all n locations
tcccctttctctgaatcaagcccgttgagcttcaatttcagctcatttatgtacgatatggcgtcacctaacaacgatgccttgtccatcttggatacatttggaactacagctcgtagagcatagaatctatgaatcaactttaatatcctttatatctaggcttccacgtaattcaacggctcctctctgccgttagccggctttcgccccctctaccgaagccgtttctccggctccatcactctgctgtctgcatgtatcaccatggaagcttccagatccgagtgatccgaatcaccaccaccggcaccggcaccaccactaccagaattaatatttgcagccggcagggatgtgaaggacagcatcccatcgtcaatgctgctccgagnatcgggaagcctcttcttgttgttctcctcaattgcatcaacaccgggaaagaactcccgttgtaagactcttcttgctctct

SEQ ID NO: 44316 - DNA, 381 bp, Glycine max
gatgcatggaactttttattttggataaataaatatacgaagcacgtttgttagctaagatcacatcaaattcgaggtgattaattcatgattaaaattcagctcttgtgtgcaatcgatttttattgttgaagacacaagggacacaagtgtggacattttatagccacgcaggattcttcactggtgagacaacagctttcacctgcaggtagttgtgaagactgtagattcctttctccctgccaataccactcatcttgtatccaccaaaaggaattgcagcatcaaaaacatcaaagcaattaatccacacagttccagctctcagtgcccgcatcaatgtgttggctgtgctcacgttcttagtaaacacacctg

SEQ ID NO: 44317 - DNA, 451 bp, Glycine max
ggtacattgaatttatttcacttcatttcatcataagaaacattttagctattgaaatagcccgagcttacattcatcaagcacaaagtattaatttgggggagacaatatggtccttttattaaaccttcagcaactattctgtatgcagcctcagtcaagtgaacactatcccacccaatatgctttgaaggatcatcacaagcactcacgcctggattgccacaatctgctgatgtgttgtaattgtatggacctcccattccacaacagactttaagaccagtaaaaccaaactttgtgggatcacgatagaaaagcaatgcagcattgaaataatcagcatagatgatattagcacgaggataaagtcttcgaagcttatctaattcactttggagctcattattgtaatattcggcgaacttgtttaaccactttaaacacccaa

SEQ ID NO: 44318 - DNA, 404 bp, Glycine max
acatgatattaattttttattgatgaaaagcacatgaactgcagtaacatctggatcaccatccatttctacaccacacccaacaaaaagttaaattcaaagcccaaactggaaaagcggtggctagcaaaatcactatgagatttttttttttctttttcaagagaaaacaaaacaaaaagaccttgacaaaatcctaaactctattaactccaaataccttagccatgggtattaacagcttcccacaacaaattcttaggggcagggtttgtcaagtccctagcctgtagggcagcagtcctgagggtcctaattgtccactgattggcctcccaaaatgacaagctcctataaggcaaattatgctttttgcaaaggacactgaccaaaggcgaaatgtt

SEQ ID NO: 44319 - DNA, 359 bp, Glycine max
atccaagcagaatcaatcacttgaaactgtattaaacaattatttagtcgaataataaataacagagcggcggcgtccagcaagcagaaagcaaaaataagtttagaaaacaattaattagtaaattgcaggcaatagagaagcatctacatctttcaccattattctttataatcaacctcactaccttatatccacgtcttcaatgtgagcaatctttggccagtcttcgccttggggttcccggcaacgttgtttgagaaacccacacctccgaattgtcaaagttgaaatggatttgggcagaccctcctctggtaagcattggagcctgcggcagttccaaagagtcaattcct

SEQ ID NO: 44320 - DNA, 392 bp, Glycine max
cggctcgcggtccggcgcgagtgttttgttcattctggctgacctgcggtcgccgtctcgggcggctgggcagagttcccctggtgccgggttcgcatggggggtgctattcggcttcgggccgggtctctccgttgagaccgttgttcttcacagtgttcccttggcgggatacctcgtgctgatgcggtgactcgtgatttccgagtgatccatcaggcaccctcggccatccctgggaccgtttgttcttcttcctcgtttcgcttgtggctttctcgtcgcctcatgttgtcccagcctcatttcctctgacccagatcgtgtgtttgttcttgattttttccccgttctctcgtccgtccttcttcggccttgcctttcgttttcgc

SEQ ID NO: 44321 - DNA, 483 bp, Glycine max
cagaagaaattataaatagtcaaacaagtatcccaagacagattagaagataaaatacaacaagatcttatcactaaaaaacaaaaattaaaaaaaaatgacaagaagaaaatcaatttttgaaaaattccaagccacggaacatgatactgctctagatagaaatcacaactctagtttctattgcatgttcaacaattttggtcctcaccttaagttgactctacttctgccgcttgtaaattttagccaaaaaggacttcaatacagcttgaactgctttgctaggatgagcctcaatggaggaaacaagctttgcatagctcccgttctcatactcctcaaatacagcctattcattcggattgagagtaaataatccaatgaaaatcagcatctatcatgatgtgcacaaagttttgcaacttaatatgcatgattttcttgcaaaatgtgtggaaatgctattattcttttaacatc

SEQ ID NO: 44322 - DNA, 623 bp, Glycine max
acacaatgcagtttggtcatctacagattttgacaatgctgtgaaagagcacgcaaaactttattgttgtgtgacccagacttggaaccacaggattgattaccttgtccgtcatcactccatgatctcaaccacagctcgtcctacgatcttgccctgattgagatcctcataggcgccattcgcctcctcaaatttgcatttccttgatatggtgttttggagattgaaggcaccactctccgcgagcttcactatctgaggaaggtcttgcctagcccttgcgccatatgagccaatgattttcacctgtcgtcggacaagacgggttatatcaacctctcccattacgttcgttgcagcaagcccgatcataacagctttgcctccatcacgcacgctcttggcgcactgggaaaatgttaacgccttaccaagtgcctctatagccacatctacacccctaccatcagtaatttcctttatcctttcaactgcatcatcttttgctgcatttacagtgtgggttgctccaagtgttgtagcgttctgaagcttctcatcaaggacatccactgcaatgacttgggaagctccaaaggcttttgctatctgtaaacagc

SEQ ID NO: 44323 - DNA, 298 bp, Glycine max
catcggctgcagaggtgcaacctcactcgctacccagctttacagacccgtcttttatcagctttatgctaaggctattgaagcgccctctcgaatagtgccgcgatgccttcctccagtccgtgccagttttcatcatcgctacaaattcgtcgtagctaattttcccatccttgtctgtgtcaacttcttgcaatatgtcattgaccacgtccatggtatcagctcccccgtcctccatcagggcttcctgaagctcctcgggctcgatgaaaccgttgccatccttgtcgaaaaa

SEQ ID NO: 44324 - DNA, 219 bp, Glycine max
ttgctgtttcgctatcataaccaggctttcaaatgttcctctacccacatttttggatgacgaaagggcttgaacctgcatttgtcgcctaacaacatctagggggtatgttattgtctgacctagcaaacctgcaactgatccgcaaccgagctttgctatgataccttttctgtgctcttcaggaacgtggctcttcatcttctcgtagaagtagaa

SEQ ID NO: 44325 - DNA, 400 bp, Glycine max
ggataactaattaataattagtaattaataattcaaactaataaagttcattgtgtaaggctgtgttccacagccatattattgattgacaaacaagggcaaaaaagacagctcttatgtactattacgtgtaacgcatgatagaggatctcacgtaatgacaaataataacaataataactagcaagctgttggataaatgctgctgttgatttctttgctagccaaagaagtgtctttggcacaatgtccatccggtaactgattcaatgcttcttcttcctccttctcttcattgtcacccttggcatccaaaaagctgggttgatttgttgaagataaaagcctagcccacattctatcagttatcactacgtggttctgtctctcagtgattcta

SEQ ID NO: 44326 - DNA, 420 bp, Glycine max
accttggcggttatgcgttcggatatggcgcggatgcctggaagggcgggaagatgagccccttggcgtggtgtttttcggatacctgcttcgccagcccctccgaggcggacagcagcatgtcgtcgcggacgcggatggcgccggagatgacgacgccgaggccgaaccccgggaagatgtaggcgttgttggactgccccggcaccagcaccttgccgaccagctccacgctgtcgaaggggctgccgctcgcgaacaccgagcggcccttggtccaggtgtaggcctgctccgccgtgcactccgagtgcgaggtcgggttcgacagcgcgaagatgaccggcttctcgttctgggacgccatcgccttcaccacctccttggtgaaggtgccgcccttgcccgaggtgccgatca

SEQ ID NO: 44327 - DNA, 310 bp, Glycine max
ctgtgtacgtctagcaacgatccgcaccgagctcgccagttttgctcgttagtttggggacggcgatggcgtccggtcaggaaagcagggaggagctggcgcgcatggccgaggaggggcagaccgtcgtccccggcggcaccggcggcaagaccctcgaggcgcaggagcacctcgccgaagggcgcagtcacggcgggcagacccggagtgagcagctgggccatgaggggtacagcgagatgggcagcaagggcgggcagacccgcaaagagcagctgggccacgaagggtacagcgagatggggag

SEQ ID NO: 44328 - DNA, 357 bp, Glycine max
ggcctcaaaattaatttcattcaaaatcaatttggtcatgggtcatccctacccaaattaacattcacaaacttccattttcctagccctacaaattggtcctggctaaataggcagaccaactaaaagatcttgcccacacattaatttgaacagcagatcttcttttgattgggtttaaccggtgccaactactctggaaagagtaacaggggcctagaaatcttctttgcttcaggctttaatcaatgccataaatcgggcccgaagggtcaagaataccccccaaaaaaatgctactaagctttggaaaacaacccggaaatgaagaggcctgaatttgggatttatccaccc

SEQ ID NO: 44329 - DNA, 434 bp, Glycine max
ccaaacactactcaataattttgtttctgtaatttctgtgttctgtcttttttttgtgacctccttacagaggcacttttggatttcaagcaatgcattgaaaatgttttcgtcaaatacaaaacaagagcagcatacaatatttcacttattgatctcataattcaaggacttaacaataacaggctcatttgtccatccaaatcacacatcgaagacactgtcctttaatcattaaatcaaaagctttgttgatatctttgaactccacttcatgtgtgacaaacccatccaaattcagttccttgtccaagtagcgtttaatgagaataggcacatgagacttgggtttgagtcctccaaacatgcatcccacgaggctcttcccactaacgaggatctcactacagctaaggctcaacttggagcctggc

SEQ ID NO: 44330 - DNA, 328 bp, Glycine max
cgaactgaatgtttctgcatgacatcgtaccagtacatcatcagtcgacacatgtcgaccgagtcaagaaatgcgttcccctctcgtccttctcaccacaacttggcctcacaccaacatttcaaccgcttagtacgttcgcttgaaaggcgggacgggcttgcactcggcctcgtccagcgtgttcgcaatgaccccccgatactgcagctcgacctcgggcgagttcgggtccctctggaaagacagggtgtgcttcatccacttgtcgtcgtctcgctccgggaagtcctctcgggcgtgagcacctcgggactcctgtcgcgcc

SEQ ID NO: 44331 - DNA, 377 bp, Glycine max
actctggcaataacatactaataaatactggactaatatatcgttattcctcctagccaaaaaatttcttaacctataagataagatattaatctgctatattggcaaaacaaaagtttaccgcttagataatgcaggaaccgaaccatttctagggatgcattcattctctaattcagagagttcgctctcaaagaaggctttggggagagccctgacacactggtctgcttcactgtcatttataactaacgagatattcaccttagatgcaccctgagagatcatttgaacagtgatcccaagagttcgaagaacatgaaaggccttctccaatattagtgatgacttctgaacatttccaatgagagagatta

SEQ ID NO: 44332 - DNA, 407 bp, Glycine max
gggagaattgtgcatggaatatatactttattcttataatgttttattgcaatttgaatcaagcttttaatcattaacaaatctccattgttgactacatcagacgtcatccactagtgttgaagcaaaagcaaaaggggtatatattctatcgtctatgaagcattctaattgataaataaccttaaagttgaaaaaaaaacatatatagtatatagactatatattgtaaccccccattttgtattgacaaatgcccccgtaatcctttagcatattatgaagcaacaattctctcaaaatgtccaagcctattatcagccaatcttgaagcataggttaaatttttatactcgaaccacgtaaactctttgtataagctttcttttcctttcataagtgaagat

SEQ ID NO: 44333 - DNA, 258 bp, Glycine max
atgtagggatggccatgggtacaatgttaagtttgtcccaaatgccctggttattaacattggcaaccaaatggagatactgagcaatggaaaatttagggcagtttttcacagaacaccagggaacaaagatgagacaggattgtcggggcccgggttcatagaacccaaaagggaacaagaagtgggtcctaacccaaagttggttaaccaagacaatccaccaaaatccaaacccaagaaatccagggattatgc

SEQ ID NO: 44334 - DNA, 264 bp, Glycine max
cggggataagattaaagattcaccattggcctttgtttttgttacttttttaaagtcatttcctgttcttgacaagtgcgagtgggtaaaaggccaaacctttcgccaacctttcgtgagatgtaacctttcttaagcatcagttttaaccatcaaagctgcttcttatgctgacgagctcgtaaaaaccgccaaaacaggggcctaaccggggcgtggtattttggcaatggatgagtaaaatgcaacctgcggaaagcgttt

SEQ ID NO: 44335 - DNA, 572 bp, Glycine max
ctaaatgggactggctcattaaacttttttacttcctacgtatcctatgcatgatgactatctggttgaaatattttttcagtgctctttgcaaacaagatcttgttcggggatctgccaccaatttgcagcatgaaggacatgaaactcgaaagggctaactggatggcgaattgcttcttgaaagcccaactatggttgccactaggtagagttttgtacatatactgtgaaaagatgttgtcattaactagatttttagttatttcattataggcttgcagacgaagatccacaacagcttctggtgatatttggccagatatagcttggttcaattgctccttgaaataggttattggaagatcagcctcacggtcattccttgcacaatgattctcatagacctcgaggaaagtgctatacatcaaatcatcttctaccatgcgaacctgggaccaaacaggaataattatcggtgtgtgaatgcatatgtgacggcgtcttgattccttgtgcttctcaaacatttggttcatcacacggaaaagctgcagtatgcgttcatcact

SEQ ID NO: 44336 - DNA, 212 bp, Glycine max
gggttatgtcactgcatcacatacgccagaaacaccaggtaatttgtctactactcatgggatctcttgtcaactcggttctgataccagtcattgcaaggttttcatggagtctgaagatgtaccacggacacttgacttgtcctgcctgtcttcttatcaggagttgtacatgagactcgctaacatgcctggaatagagacgtctgata

SEQ ID NO: 44337 - DNA, 619 bp, Glycine max
gagcatgaccccccttattggagaggtgccatttggataaacatgaactacatggttctttctgcactacatcactatgcacataaggatggtccatatagcggcagggcaaaggaattgtatgacaagctaagatcaaaccttatccggaatatagtgcagaattacgatgcaacaggtttcttctgggaaaactatgaccagaaggacaaaggaaagggaaagggtgcacggtcatttactggatggacttcactcattgttctgatcatggcggagtcctacccaacattgcacaggtgagatatagatcgcgaacaaccacagcagaagatagctatggcaattggaatggaggggctggcagctggcgcttgtttagcccggtttgcaaccagaacactgggatagtttgattcgtagcatctgctgccttaatcatgaaaattttgacaacacctcctggtcaatctgttcagcatcatttatagagtgttagtggtcatccctgttcactctcatactgtaaactagctcctcgaagaactgattttggggggccaaaaccaccccaggaaagcatgagcatatggaaaacatgttcttgaaagctgacact

SEQ ID NO: 44338 - DNA, 696 bp, Glycine max
acccatgattcaggtggaatagtccccatcatgaatgggaagaggctgacatagccaacatggtgtactaactgcagctgaggggcttgtaatgtttctcgcaagaactctcgtctcatattattgttgtctttcacatcaaaccatctcattcgaaccttttcagtatggttaccataatcaaaataagcaccaattgtgtcatccaagtgtaacttgttaagtgttccaaaatcggaaagttgatttgacatcttatagtaatccttctcaagagcactatccattttaaggaactctgcaatggaacagatgcaattcgtagctagaagcatccaacaacgaaggtcaacatggcgttcttcatcattaggatgagatgcacgaggatagtcatccaatccagatgtcaaagtctttgggttcaactcctttgtcgttatgttgtctcttccatgccaatagaaggtgccttcatacttacctgattgtgtactgttgaaccactgaaaccaagcatttagccgtatataagccctttcaagaaaacttgaaatcttttccgcttcctcatctgaaaactgctgtgcatgtattccacttgctaaatcacgtatcgcaagaaataaagtaggaggatttccattggaaggatactgcagaacaaactcctcgggaactttacttaaagcttca

SEQ ID NO: 44339 - DNA, 483 bp, Glycine max
cgtcatcctcggaagaacggttgaagtgaaaatagcaattcccaggagtgaacaacatcaacaccaaaacccattacagagtatagggggtggttattattataataataataataataataatgatgataataataataatagtaatgactattgcagtgaccacaacgttaggactaaaaagatatttgtagggggtttacctggtatatccgaggaggagtttaagaactactttgagaggttcggtcggataaccgatgtcatggtgatgcaggacagtgtaactcaccggccatgggggtttgggttcatcactttcgagtccgaggaatcggttcaaaacgttatggtgaagagttttcatgacttgaacggtagacaggtggaggtgaagagggctgttcccaaagaggggaaccatggctatgatgggtttagtaaattaagatataagagtgaaagaagagttcctaagagttt

SEQ ID NO: 44340 - DNA, 576 bp, Glycine max
ctactttcctgtttgaatacatggattccgcattctttaggggttgaggtctcttccaaaccctcatatgtaacctccgcatggttccattcattttctaaaggtacatacaaattatcttcaaattccattatttgaagatcaaaaagatatgtatgatccattcccatcatgaaataaccactaccacggaaatatttattgccattgatgatcaccttagatattaacattccagagtcatcatccataggtccaataacaagacaaagaactttgccggggaacttattgcgaaaccagaaagaaattgaaggtcccctactttggtgatcaaaccactctggaatcctttctcctggcaaataaaactgagtttttccagtctcatgcagttcctgattcaggaacatgcttgtacttgaggaagtcaaggatttacagtttgttgctaagaaatgttttaagctaggtggaatgcctctaatttcctgaagatgcttgcagtcattcacattaagcttccttaaaaactgaaattctttgatgcattcaggaagcattgtgaaattattc

SEQ ID NO: 44341 - DNA, 420 bp, Glycine max
agaaagtaaagatcattttatattattttttaaaaaaatacggggtgcactaattgaatccaacatcatgtgccccatcaattgaattacaatgtattctttatgaataagcctataacttttacccacacaaataactgttttacaataatttcctggcaaagcatccaggagatttggctaattagtcactgctccccattagatggaggtccaccacgaatccgctcctgtagatgttccaagctagccacccgctgcagggatgctgtttgacccatcttgttcccacctagcactactgcagcattctgctgcacattttcaattgaagaaatgccccccaatccattgttgactatcggatcatgactgggaataggattagtagatgtgggttgatagaaatgatgatgtgga

SEQ ID NO: 44342 - DNA, 409 bp, Glycine max
gaggatccccaaacttattgtcctttttgagaagttccgtcatgggctttgctatgctggagaatcccttgataaagcggcgataataccctgccattcccagaaagcttcgaacttcactgacgttggatggttgcttccaatttgaaacagcttctaccttagatgggtccacttctatcccttcagcagtcaagatatgccctaggaaggctatcttttctaaccagaactcacacttgctgagcttagcataaagttgatgtgctctgagtcttccgaggacggttcgaaggtgctgctcatgatccctgcgactcttgacatagatgaggatgtcgtcgataaaaaccacgacaaacttatccaattcgttccataaataccttattcatgaggttcatgaata

SEQ ID NO: 44343 - DNA, 379 bp, Glycine max
cttaaacgtctccccgtgcttgaagaagacggagagaccgaagtccgtggccttgagcggggagtcctccttgttattgaggaacaggaagttctcgggcttgagatcccgatggaagacccccatggagtggcagctgtggacgacggcgacgatctcgcggcagagcgaggcggcggctcgctcggtgtagtggcccttggctatgatgcggtcgaagagctccccgccctcgcagagctccataacaaggttgaccgagtgcctgtcctcgtatgctccccggagctcgacgatgttgcggtggcccgtgaggtggtgcatgatctgcacctcccggcgcacgtcctcaatgtcgtcgcggtggacgagcttccgc

SEQ ID NO: 44344 - DNA, 525 bp, Glycine max
cggggcgcgccctggccgcggcgggcacgcggcacatgttcggggtggtgggcattcttgtcacctccctcgcgtcccgtgccgccgcggccggggtccgcttcctcgctttccgcaacgagcagtccgcggggtacgccgccgccgcctacggcttcctcacgggctccccgggcgccctactcaccgtctccggcccaggatgcgtccacgggctcgcgggcctctcccacgccaccgccaacgcctggccgctcctcatgatctccggatcctgcgatcaggctgacgccggcaggggcgacttccaggagctcgaccagatcgccgccactaagcccttcgccaagctcgccgtcaaggcaacaaccatcgccgacatcccgcgcctcgtcttccaggccctcgccgacgccgtgtacggccgtcccggagggtgctacctcgatatcccgtccgacgtcctccaccaaaccctccctgaatccgaggccgcggctctcatagcagcagcagccgccgatt

SEQ ID NO: 44345 - DNA, 521 bp, Glycine max
tccggtcgccgccgtagacaccgttgttgttgaaaacgattacattttcaggcagctggtacctcaccaacgtctgaacctccattgcactgaagccgaatccagaatcgccctccacagcaaccacgagtcgttcaggttcagctgctgcagccgcaatacagtaccccaatccaacccccatcgtcccccatgtccctgcatccagtcttgtccttggttcattctgcacaagtacagccctgccaacatccatggtatttgccccttctgataccactactggagcaggactcccctcggcaaggattgcatcccggatgatccgcaatggtgtcatgaaattgaatggcacaacatccttcgctagctgcgcctccatcttaagaacattgtcattggccttcttggtgatcgcttcgacccatgggtgcgaccttgccaagcagaatggattgtccttgatctcccggttgatcagctcagttactctcttcgcgtccccaacaatccccacgtgt

SEQ ID NO: 44346 - DNA, 516 bp, Glycine max
gcgaatctcttctggtgtcttgcccttgatcatgtcagcaacagtctgacaggtcaggtcgagtagacccttgatgttcagatagtttgcagccaagatgaggtcgaaaagcgtggcctggtcgaccttgacgaagtccgcatcccagttcttgaggtcctcaccggaggcggcggtgctgttggcggaggcggcacccacgtcgtcggaaccggccttcgaggcggcggcggcggcggcggcggcatgtacgtgcttgttgcagtactcgattaccttggataggatcttggagttaacgttaggaagagggatgccgttgtcggcgcagtcatcctcgatcatgtggcggatggtctgcgactccatcgccaccgcctcttccacctcgaactcctcgccatcggagcttttgagggttatcatcttcttctcgccctcggcggccatcgattcgatcggagtggggaaaggtggtgtgcactcggcggatcggatcgaggacggaaccctagc

SEQ ID NO: 44347 - DNA, 189 bp, Glycine max
ctcgcacttggtgcgctcatcttctccttccttgtcacgtatgcctcgtgcgctagaccggtcaacttcacagcctcagacttcaccgccgatcccaactgggaggctgccagagccacctggtacggcgcgcccaccggcgccggccctgacgacgatggtggcgcgtgcgggttcaagaacgtgaac

SEQ ID NO: 44348 - DNA, 366 bp, Glycine max
ttgcttgagcaacagcacaaagcgggttactgtctgttcaagctaccatctctctctctctttcttagtgcctccttgccagaagttaaaatggcccaagaaactttcctattcacatctgaatcagtgaacgaggggcaccctgacaagctctgtgaccagatctccgatgctgagctcgatgcatgcttggagcaggaccctgacagcaaggttgcctgtgaaacctgcaccaagaccaacatggtgatggttttcggagagatcacaaccaaggccaacgtggactatgagaagattgtgcgtgacacatgcaggaacattggttttgtctctgatgatgttggcctagatgctgacaactgc

SEQ ID NO: 44349 - DNA, 287 bp, Glycine max
gccgaaaacaacggttcggccactggctagagaataagcgaagtccaagcgtgtagaaagacaccgaagctaatgtgtaagtctaggctgaaacggagggaaaacgacacggaggcgcgcggcgacgggcggcatggctgttcggccttgtttttgggctgaaaacgaggggttcgccatgcgcacgggccgaaaacaacggttcgggcacggctccggaaataagctaagtccaagcgtgtagaaagacaccgaagctaatgtgtatgtctttggtgaggggcacg

SEQ ID NO: 44350 - DNA, 283 bp, Glycine max
aggatcccctgtcaccacactatgctcgtcttgtttgttgcggaagaccacttggttcctacaacattttggttaggacgtggaactaaatgccatagctcattccttgtgaagttgttgagctcctattgcatcgccatcacccaatccgaatcttgaagtgcttctgctaccttgtgtggctcaatagaggaaacaaaagagtaaagcttacaaaaatgtgcaacacgagatctagtggttagcccttttgaatgtcgccggaggatggtgttcacggggt

SEQ ID NO: 44351 - DNA, 564 bp, Glycine max
ctttttggcttaacaaggttgcccttgatagttcctccaatgctactttttttcctatgaaagccaaatcaaaggaggaaccacccgcaaagcctttagcagaaccatcttcttcagtgttggcaactcaagaatcggtctctcagtttattactcaagttgcaagtcttgtcaagtaagcagatgcttaagtcttgtttccttctattagtaatagcaaatgtataagctttttgctgcatgattggagtggagcaatcaactatgaaaaacttcatgtccaattttctcctgcaggcttgttgattcaagagacattgtggagttgaagctgaagcagcatgacgttgaagtaacaatcaggaaaaaggaggctatgcctcagccaccacctgctcctcaaccttctgtggtgtattcaccccctccaccagcgttgccatcatcaccaccaccaacccccttaacaccacccgcgaaatcgccaagcagatcgccgattccaagcctctcctcgccttcacgatctctgatttactccccaaaatcaccgcaactgcaccc

SEQ ID NO: 44352 - DNA, 181 bp, Glycine max
ccccacttgtttctctttccgcactttgctgttatgtgagtgtagccatcagctgatgcaggggtgctcttttcccactcaccaaactttggaacagcagcaccttcatcaggagtttcatcccctcggtaagatggtctcaatcgggaccttcctggggtaccatggctgctatcatatg

SEQ ID NO: 44353 - DNA, 370 bp, Glycine max
aagatcctccgtggtgtaacaaaaaaattctgaggaagcttttagaaattggtatttctctacgtatggactatgctgactgcaattcccttgctatccaactgtgacaatggctgcaatgagttggattctgttggagaaaaaacagcaatcaacttgtcctttgtgagctgttcaggtccttgggacttaattacaaatgtgtgaaaaatggtatcatttgcagcagcaagtttagactctacaacactgatctgtgcttcgttaaatgtttggattacttttgaaatagggtgactgtcaagagggcagctcacctttacaatgacctcatcttgaaaagcttgaatatccacatcaggagcttttt

SEQ ID NO: 44354 - DNA, 301 bp, Glycine max
ggaaccttaattctgggaaaacattcaaaatcaaaccgatccatggggggtccgctttaacatattaatttatagctgggctggggcaggacacttagtggggggccatgaaatttttttaacaaaaaacaaccccctaatgacttatccggggaattagctcccactcccaacattgggcttaacctaaccgtttttaggggctgcatagctttcaaacggggggtctaacactagttttttttcaaaaagttcttgtcccattgggcaaaaagcttagggtccctttttaagccctttt

SEQ ID NO: 44355 - DNA, 256 bp, Glycine max
aagggactcattgaccttctcgcaggttataaaaaaaagcaaaatggtgaagatttgctgcattggcgctagatatgtggggggtcctactatggcagtcattgcacttaagtgcccatccatagctgttgctggtggcgatatctctaaatcccgcattgcatcctggaacaacgaccagcttactatctataaacctggccttgatggcgttgtgaaccaatgccacagcaagaacctcttcttcagcactgat

SEQ ID NO: 44356 - DNA, 427 bp, Glycine max
ctaaaggggatatttatagcttcgggaccgtgcttcttgaattggtgacaggtgaaagacctacccatgtggctaaagctccagaaacttttaacctacattaggagagtggaaaaagttcattgaaaagcctgaaagagcacttctgaagtgctttccttcacaacttcaagcaactagagtcatggctgtcttggacatactctcaactcattcaccagatgaggaatacataggagaaaagatggaaccatcatggggtgaagatcctgtcataaaggcttcctttgaaagatttagagagagactgaagaaactagaaacactgattgatgagaggaatggaaacacaaagttgaagaacagaaatggagctggcattgtaccgtacgagcttttgaaacctttctcaaagccaggtgtgact

SEQ ID NO: 44357 - DNA, 450 bp, Glycine max
ggcggccgcccttttttttttttttttatttaggacgaataatttaaggaatatattttccttttggagaaaatacaaacatataataattcatagttaaatttattacattgttaagagttactccattcaaagcagtcgattttgtaaaaatttccggaaccattttgcagagagttttggagatcggttcaaattatttttgtgatccacaaaaatcaatccaaatcgaggtatataaccattactccattcaaagcagtccagcagtgaccagacaaaatatccctttactctcacgccatcccttattgcataatcaacattcaatagatgacgataatgataatcaattctgtaaaaatccataagagattcctcaggtgatagtgttggatcatctaattcatttattccattttcagttatataaatcaagggattgttgta

SEQ ID NO: 44358 - DNA, 448 bp, Glycine max
tagacttccggcttcggctcgagtgccacagatttattatcttggtcttctagctgtgaatgtcagctggccatgttctccatgtgttcattaacggtcaacttgcaggaactgtgtgggggggattgggaaatcctaaattgacatttagtgacaatgtgaagctgagggctggcaataacaagctttctttacttagcgttgcagttggtctcccgaatgttggtgtgcactttgaaacatggaatgcgggggtgttaggcccagtcactctgaagggtctaaatgaggcgcctcggcagtgttggagtcaatgataggtaagaatggcgtttcccctgcagcaaaacagagtttggcctccagattatctcacttattcaaagagcctggggtttgtgacctcaatctcataagtgaactcattatatcatcaacccaagatcaa

SEQ ID NO: 44359 - DNA, 230 bp, Glycine max
aagatcgtgtaattatatcacgttcacggtttagttacatgagattacaaacgaaaataattttgtgtttaagtaatgacggtgggcttgtcacgtccgaggtattccttgagcttggtaaactcaagagccgcatcgatcaagggctggaggccctccgcagtatccttcttgaattgcgacgggtctttgctgtacctctcgatatacacacgtacagtcgcgccctg

SEQ ID NO: 44360 - DNA, 443 bp, Glycine max
cttaagtctataaaattctttattaaatgaatcttgaaactataataccaagaacaacaactgatgaaaatatccatataaataatagcacctataataataatgttatgtacaagatcctacaaaaatagaatcaagggtagtagagtgacaaacaaggaagctactattgggggccttaaagaagaggacaaggaaggatttatctgaacaataaaattgcaagtaggtgttgaaatattgcttgttgtgagtcttgccaagccttcaaaattgcaggccatgtaattctgatcctgtgtctggtagtacatattaaatgcatatgaggcatttccattggcatccaagttgctgcaagaagaaccatatccaagtgcagtgcaatcagcaaaggtgcatgcatagtttatattatcagcaagtttgcttaggtcctgtgc

SEQ ID NO: 44361 - DNA, 374 bp, Glycine max
aagggatatcacattaatttcacatggatggagctttaatttaacaaagaacaatccaaacacaattttataaaatgaaaagaacttactctacgacacataatgcgcgtccacaatactttaaaatactccatttaaacactactatagggacagggacaacaaaaaatcatcctgggtcaaaatgcccaaaaatttctgagttcatactaatgaaccctatgcaatattcatccaaaaattagcctagcccatccacaacttcaacactttatccttaccaccagaggctaccttctctccatctggactccaatcgacagaaaaaacttcatcagcatgaccaggaagatcttgcttcaacttacgagttc

SEQ ID NO: 44362 - DNA, 243 bp, Glycine max
ggcacaaaaaagctttagttgggtaaaaaccttggctaattcaatgccttaggaatgttccatgaaagatggagttttttttctaggaaagacattttgaacctgaaccctccggtggggggaaaactaccgccatgcgggattttttaaaggagggacaacagctttaacttgaagggggcttctaagggtggagattccccttactttcccttggccactcattttatatcccccaaaagg

SEQ ID NO: 44363 - DNA, 109 bp, Glycine max
ataattacgatttgatgttttcaattatttatatgatgaacatagttcagaaatatattgagataaatcccaggcaatatatcgattatttctaggaaacacatgccgg

SEQ ID NO: 44364 - DNA, 130 bp, Glycine max
tgaatttcttccaaggcactatcacgaggtcaaacttttcttgctcctatctgcgttgctgcttcctgattataatgcatgactgctaaatcatacaaatatattccagcgcactatctacatcccacaa

SEQ ID NO: 44365 - DNA, 436 bp, Glycine max
ctttccaccgccagctccgcctgccaccgccgtccccttccccgccgaacccaacgaccaccttccaccacccattcccgaaccaccttctaaccacccaccctacgccgagatgatatacacggcaatcgaggcgctgaaggagaaagacggttctagcaagagggcaatagcgaagtatattgagcaagtgtatacgcagcttccaccgaatcactcagacttgttgactcagcacttgaatcacttgaagagtaggggattgctccaaatggtaaaaaaatcttacgcccttcctagatctgtgcccgtgtctgttcctggacctgcacccacacaagggacatcagcagtgccggctgctgttgttgccatcacgacgactccgaggcccagaggtcggcctcgcaaggcccaaaatccagttcagaactcg

SEQ ID NO: 44366 - DNA, 480 bp, Glycine max
gggtaaacacaaaattcccatatagtttcatcgacctcgtaatcagaatcacaaaagaaccagaataacaaaatcttttgctacgctgaactaactgtattttctccttactaattatagagtataaactccgaatgataactactattcacccaagaaggagaggtaatggaacttcacataaatcgcaaaaagatatttactgtttgacacaacagttaggaacaacttcaaatccatccgaccagagaccttaatcataacaaatgacaacattttcattttcgaaggaatgccacggttgcaacacgggagcctacagatccaccaaacatgaatgtcggatatgtgcggacatgatttacatactgaaatgggggctctctgcacggttcctcgtccttcactgccccaagttcctgtgcagtagcaatttttcgttggttgaaactctccacttcttgaaccaattcatccttt

SEQ ID NO: 44367 - DNA, 284 bp, Glycine max
tgctttctctaagcttctgttcccttcagtcagagacaacacgttcttcgagagctgtggtgtcgccgacctaataaccacgtgccttggtgggaggaacagaagagtggctgaggcctttgcacgaaatggtggcaaaaggtcttttgatgaactggaggcagagatgttgcgtggccaaaaactccagggagtgtccacagcaagggaagtctatgaagtgttgacttatcgaggatggcaggagctgtttcctctgttatcaacagtgcatgagatctgta

SEQ ID NO: 44368 - DNA, 238 bp, Glycine max
ccttcgcctgtgatcatgtcgtcttgctgcggcggcaagtgcgggtgcggctccagctgctcctgcggcagcggatgcaacggctgcggtatgtaccctgacgtggagaccgccgccaccagcagcgtcaagaccacggtcctcgccgcgccgaccaccaaggccagcgccggcggctttgaggcggtcaccgagggcggcggctgcgactgcaacacctgcaagtgcggtaccagct

SEQ ID NO: 44369 - DNA, 199 bp, Glycine max
ggggaagaagattaatacctttttacaacgtgcggtacaagaagtaggtaaatagaaacgggggaacaaattaaaggtcccttgggtgccattaatttctagctccgctttttttatgaggtccaaaacaaattggggtttgttgggcgcaacaacttttattcttttttccaaaacttttaacctttcaaattatggg

SEQ ID NO: 44370 - DNA, 407 bp, Glycine max
gggaagaagattaattcatttttacaacgtacgttacaagaagcagttaataaaaaacgtgggaacaaattaaagttacattggatgcaattaatttctagctccgttctttttatgatgtacaaaacaaattgggttttgctgggtgcatcatcttttatttttttttccaaaacttttaacctttcaaattatgggctgctgcaagttcaccagagaggataaaagctgatttgcctgcttcccttaaatagggaacatttccattcatcaactttagcagctttttgctgatcagtaggctaataccctcctcggattttagcccgttgtttccaaacatttggttcaaaaatgcttttggtaccccactcccaccatgtgttatgctccataaatcccaaaaa

SEQ ID NO: 44371 - DNA, 273 bp, Glycine max
gctgcagttgactggtggacatttggagtttttctctacgaacttttgtacggcagagcaccctttaaaggttcaaacaatgaagaaacattggccaacgtagtgttggctgggtctgcgaggtgggtgggaggggggagtgtgttagcatggtagctcaccttttcagtgcaccactaggagagtcagaaactgcagttggtgttggcacggttggctcatcagaggccataatgttggctgggttggcattcaaaaggagatggcagagta

SEQ ID NO: 44372 - DNA, 202 bp, Glycine max
acaagctaaactgggcccggatttaaattaccaaactgtgacataactagagccagaaatcccagccaacgtaccaaactcttaaacaaaaaagtccaacaacggacagaaacagccaacatgtagataatctggatcaacctaaggcaatttcaagatcaacttgaggcatatgatttactcatagatccaagagtgttgg

SEQ ID NO: 44373 - DNA, 109 bp, Glycine max
gacaaaaatgttaaacctttaattaactatgggatttaaaaacctagttgcaatgtaacatgaattgaaaagacagcaacgtaaaatacgccctaaaatgaaagacaaa

SEQ ID NO: 44374 - DNA, 152 bp, Glycine max
caaatgcggacattttggaagcaatttatccggcagtcgccaagagattacatggggatgggctttctgatcctgccattgcaatcggtacaggcttccttggaaaggcccataaatcatgtgcagcgacacacactgggtagagggggcag

SEQ ID NO: 44375 - DNA, 330 bp, Glycine max
ctttttcttttttttttttcttttttcagcagaccatccttttatttaagttggaggttggaatggatcacctcacattaagcaagttgagctgcattgcatcattcatcaccacattcaattattcatcattttacccacattcccaattccaaatccaataggggctaatcattggaccaatactccatacacccaatgttaatcagcctttctctcctttggataatcctccccaaacttctccaaataccacctacggttggcccgggcccttggacccaaattcgcaaaagtgtaaacaaaaaagcccagcccggcccatgacca

SEQ ID NO: 44376 - DNA, 302 bp, Glycine max
aaggtcatatagtttatttttattacggataatgtccgggatcatccacaagattgaggagaccctccatgtgggagggcacaacaaagaggagcacaaaggagaacaccatggtgagcacaaaggtgaacacaaaggagaacaccatggtgagcacaaaggtgaacacaaaggagaacaacaccatggggagcacaaggacggacttgtggataagatcaaggacgagattcatggtgatggccatgactagggttggcaaaagaagtacaacgacaataagaagaaggagcatggacatg

SEQ ID NO: 44377 - DNA, 226 bp, Glycine max
ggggaacacaaaaaaacttagtcctttacacatccattatttttacactggtaggggaaacaggggaaaaggggatgtattttttattcataacaacaaccctttaaattgaaaagttgggggcattgaagtaaactaaatgtcccacacacgagggagaattaattgttattattttgacatttttggagggagtttttttacaaacttaacaggttccatggga

SEQ ID NO: 44378 - DNA, 266 bp, Glycine max
tcttttttttttttttttaaacttttttttcttttattttttaaatattttttttgtgtagaacacaacaaaacttaattttatgcacatacattatttttacactgtttgggtaaacagggaaatagggcatgttttatttattaataacaaccacactataacttgaagagctgggtgcattgaactaaactaaatgtgccccccgcgaggcagaattaatagttataattttgacatctttgcagggagttctttcacaaact

SEQ ID NO: 44379 - DNA, 322 bp, Glycine max
gaatgatgacaaatttatggtatccacttgattttaaaagtacagtcatggtataaagtagtaattcttcatagttacgcctgtatataacctgcaatatctattatctacccaaattacaaaaaaaacaaaatagttcatcttgtgggagattctgacactgacctagtgggcgaagaccgaacaggttttggggggatttccaaagtaatcatattgccttcaagcatatctactactctagtcatagtaggtctatcctttggaaaggtttgaccgcaccataatcccactacagtcattcactttactaactcaattt

SEQ ID NO: 44380 - DNA, 660 bp, Glycine max
aggacttcaggggcagaaggagtggttaacagagatgaatgtgcttggaattgtggaccatccaaacctagttaaacttataggctactgtgctgatgatgatgagaggggagtacaacggcttttagtgtacgaatatatgcctaatggaagtgtggatgatcacttgtcgagtaggtcaacttctactctgtcatggccaatgagactaaaagtagctcttgattctgctcggggactgaagtatctgcatgaagaaatggaattccaggttattttccgggacctgaaaacatctaacattttgttggatgagaactggaatgctaaactgtcagactttggtttggctaggcatggaccagcagaaggtctgacccatgtctccacagcggtggtcgggactctaggctacgcagctccagagtacatgcagactgggcgcctgaccgcgaagagcgacatatggagctacggcgtcctcctgtacgagctgatcaccggccgccgccccatcgaccggaaccgcccaaagagcgagcagaagctcctggactgggtgaagccgtacatctcggacgtgaaacggttccccatcatcgtcgacccgcggctggaggggcactacaacctcaagtccatgacgaagctgtccagtgt

SEQ ID NO: 44381 - DNA, 694 bp, Glycine max
tgcgcagaactcctcatagttaatcctcccatcattgtctgtgtccacttctgatatgatctcctttattgtactcgtgtcacccatctcatgctcgatcaaagcagactccagctcatctcttgtgatgaaaccgctgttatctttatcgaagtactggaatgccttaaacaaatactcgtctctttcgagcttgtgtctatgcattgtggcagtgatgaactcaacatagtcgatggatccattcccatcaacatcagcagcctccatcaactgctttacttcagcttccgacagctttgatccaagtttggctagtcctgctttgagttcttcatacgtgattgtgccactattgtctgtgtccatgttcatgaacatttgctttagccccttgatctcttcctcgttaaggtttgaggcaataacctttagggccatctttttcagcttattcattgctctgaactgcttcattctagaaagaacagcactgtcgataggcttatcagatgcacctccaccttctctgagccatgaatgttgaagaacttgagctgaagtcagtcttttctttggatctcgtgtcaacatctttctaaccaagtctttagcactctcagaaattgatggccaaggttgactttcaaagtcaatctcctcatgcagaatagcatcaaatatccccttttca

SEQ ID NO: 44382 - DNA, 501 bp, Glycine max
gaagttaatcatgggaggaacaatttaaagcacaattacaccaccgttttgcaaccacaaaggcctttcattaaattctgaaaatgaaactcagaaaggcacttcccagtcataaatacgataactcaaaaaagttttattgcgagtccaaaacgaacaaggggatatcaaactcacagcacccaaactcaaaactttatgcccatttaccgcacgggctgctggttgtaatgactcttttctttcttcttggccgccgcaagccttgcactccttgctgcagcctcggcagcggcaattttggcagctgtgtccgtctctctgctcgatttcttcttcttcattgatgccatcttcttcaagcgctccttcacatccacagcagaagtatcttcatcaggtcctgcactggcagtctcctctgacccatcaagtgcttcttgggtttcttttccctcctttgaactcttgtccttctttttcttcttcttggaggccttg

SEQ ID NO: 44383 - DNA, 209 bp, Glycine max
tctctgtctgctttcgctcatgcatcatatgcatggaaccaagacaaattactctagcagactagcacgcaaactgaatcgcgtttagtttagtttttttggccccggataaaggctgctagcttggttgtaataatggctggctgtgtccagaactcttgtagaagacagaactcgtccaaaacaacatcgacactgcattcatggtt

SEQ ID NO: 44384 - DNA, 425 bp, Glycine max
tcttccactgcttccatggaggtttttcaacagaaaaacctcgatcctgggcttggtggccctgttggtgagtgcatggatgatgttatggacacttttgggtacatggagcttttggaggccaatgatttcttcgaccctgcctctatctttcagaacgaggataacgaaaaccctttagtatatttcggcacactggagcagcatgtgccgttgcatgatgagcaacatgaaatgttgcatcatcagcaagggagaacagaagaggttgatcatcaggttcctgtgtgtgaagagatccaaggagatgaagaaggtggtgatggtgttggagtagacgatgagatgagtaatgtgttcttggagtggctcaagtctaacaaggatagtgtcttctgctaatgatttgaggaatgtgaagctca

SEQ ID NO: 44385 - DNA, 549 bp, Glycine max
ggaaaaccagcctcgccggctgcgagatctacacgtcctgcgagccgtgcccgatgtgcctggggctcattcgcctggccaagataaagaaggtggtgtacggagccaagtcggaggtcgccgctgccgccgggctcaacggcgtcctcccagaggtcttcagagagtactaccagaaatccggcgtggagatgaggcaggccgagggcgaggcggcaacccggatcgccgaggaggtgttccagaagaccaagggcaagtttcgcaacaagtaaacgcgctggagatggcgcccggcggaccgcggatggctgttgctagtggaatgattgccgtttccaagcttttgtccgggggaccgttgatcagaggtcacatgtccagagaccggaataaattccgccccccccccccctactccatttcacatggtttgttgtatcagcgtgttattttttttaacgtccgcctcgacctgtgacattttttttcttaataatgtacggtgctactctatctgtctccgaataaataaataaatagatttgt

SEQ ID NO: 44386 - DNA, 338 bp, Glycine max
aaaaacaaaaccggaaaaccgccctttttttaaggggattcaaagggccccccccccccaaattttaacataggcggggggggggggggggaaaaccataggcccttgttttttttttccccaaaaaatttttggatttttttccataaaaaagggcccccccccccccccatttttgctggggggtttttagggggggcccaaagggccggagtttccttgatacttgagccgacccccttgtctctggcccagggtggaaaaattggaaaaaacccccgaaggggtggccctaaacccacccttaatggacccgcccccgggggtgggggggggtt

SEQ ID NO: 44387 - DNA, 540 bp, Glycine max
ggttaatttgcagtagataagacagaaaatcgacaaactctgaatcaggacattgtatgtgttgtcgcttgttggatttctccgggatcaaatactctagctgatctgtctcctcattctcggtaaaaaggtcataatcatcagtgaaatacttctgtgtctcctgtcccaattctagcatttccatgtcaattgggccggttatcccaatcatttgagcaagcattacggacacaggctcgttaggaaataatacttcaccagtatacaattcagaaaggatgcaaccaagagaccaaatatcaatcctctgatcataaggtaggcctagaatgacctcaggagctcgataagagcgtgattggacatagagacataagttgtctgtcaagaagcaactactttccagatcaatgactttaatttcacatctactgtagctcttgataagaatattttctggctttaggtcacaatgaatgatcctcagacggtgcaagtaaaccaaggcctccaaacattgccgagctataacctgta

SEQ ID NO: 44388 - DNA, 565 bp, Glycine max
aacccacagagagaaatcacacaaagcagaaaacatccctttctcatgccaaccaattcctcaaatggctgcgccattgctcctcctcgccagcttggtccattcggtgtggaatgaacccggacagtcaatgcgctcataggtgtgtgcaccaaacagatccctctgcgcttggatcagatttgcaggcaatcgacttgatctgtaggtatcgaagtacgaaaggctagcagtcattcctggcgtgctaatgccagcctccaccgcgcgtgccacaacccacctccacgcgttctgccgctgcaccatctcccttgcaaactctctgtcaacaatcaaattggcgagctcacgattcctgtcgtacgcgctcttgatcctatcaaggaacctcgcacggataatgcacccgcccttccagatcctggcaagctctgcgaggttaaggttccatcccttctccacgctcttggctcgcagcagattcattccctgcgcatagctgcaaatcttggaggcgtagagcgcttgcctgaccctatccaccagcaccttcttgtcgaca

SEQ ID NO: 44389 - DNA, 382 bp, Glycine max
ttttctcgtctgcagcatagcctggatctcctctatcgtccgcggccggtcgtcccagtcgtcggcgtttaagctgctgccgtcgcgcgaccgctcaacggagcgacggtcggcgtagtcgtgggcgtacttggggtcccaaaaggcggacgtgtcgacgctgtacgacgacttactgctgccgcacggcgcggcgccggcgccgccgccgccgccggacatggagagcacggattcctgggagaggcgcatgcgctggtcgcggacacgggcctgcacgcgcaccagcgcctgcatgcagcgcagcgtcatgttggcttgcttgcggacgttgtggccgcgcaccagcgcctgcagcttgacgaggcccctgagcgcgcgc

SEQ ID NO: 44390 - DNA, 551 bp, Glycine max
aagaggagaggctaaggaggaagtcagcagctagcaacccgacgccggtagatctgaccccgtctacctccttggaagtcaatctttcggtgccaccgcctccagctcctcccccagttcttcaccaggccgaggaggttggggtccctgaagccgagcaggagcagagcaagcatgtcgccgtggaggaggcccctgctgccgccccagcgcaggcgtcggtgctgccacctgctgtgccaacccaggagctcgccgcagtcaagatccagaccgccttccgaggttacctggcaaggagggcactacgagcactgcgaggccttgttcgattgaagtcattggttgagggtaattcagtaaagcgtcaatctgcaagcactctgcgctgcatgcaaactctatcacgggtgcagtcacagatatcttccaggagagcaaagatgtccgaggagaaccaggctcttcaacgccagctcctacttaaacaggaactggagaatttcagaatgggtgagaactgggatgacagcacccaatccaaggagcaa

SEQ ID NO: 44391 - DNA, 551 bp, Glycine max
tgatcataaccagctcacagggccacttccatcagatatcatatcatggcaatcccttgttactctaaatttgagccaaaacaaactctctggacatatcccagattcaattggtctgttacccgtccttggcgtactcgacctgtcagaaaatcaattctctggtgaagttccttctaaacttcccagaatcaccaatctcaatctatcctccaattatttgacagggagggttccaagtcaatttgaaaatcttgcttataacacaagctttttggacaattctggcctatgtgctgataccccagcactgaacctcaggttgtgtaattctagccctcaaaggcaaagcaaggactcatctttgtctcttgctttgattataagccttgtggcagtggcctgcttcctggctttgttgacatcactcttgatcatcagattttatagaaaaagaaagcaaggattggatagatcatggaagctcatttccttccaaaggctgagtttcactgaatcaaacatagtgtcatcactgacagaaaatagta

SEQ ID NO: 44392 - DNA, 532 bp, Glycine max
tgaaaagaggagctcacatgatcaacgatgtatccagtggacagcttgatccaattattctttttgtggcagctgaacttggagttccatatgttgcaatgcacatgaggggagatccgtcaactatgcaaagcgaacaaaatgtacagtatgataatgtctgcacggaagttgctttggagctatacacacaggtgagagaagcagagttatctgggattccattgtggaggctggttcttgatcctggcattggcttctccaagaaatccggacataaccttgaagtaattatgggattggaatccattaggagggagatgggtaaaatgagtataggtgcttcacatgtgccaatattactgggaccttcaaggaaaagctttttgggtgaaatatgcaatcgtgccaatccagttgagagagatgttgctactgttgcagccgtgacagctgggattttgaatggtgctaacattgtaagagtccataatgctggatatggtgtagaccctgcaaaggtttgtgatgc

SEQ ID NO: 44393 - DNA, 365 bp, Glycine max
acatggtgtcgacaatgtggatcgccgcacgaactaattagaacgtgatccatgacacaacaatattagtatatctacacgcatgcagtttatatagtacatattgtcatgctgtatgtttttacattctaggttccttgtcaacattctcttcaaaaagtttcctaatgtgtagtacgcgtaaagggctgtagattggttctaagctccgtggggaccagttcaacacgacacatattgcgccttccagcatatcctgttttgcatgaaaagcctggtgatttggttgcgcacatcaaattcacagtcttgttgatgccaaatggatcggatcgaatcacgactcatccactccaagaattgca

SEQ ID NO: 44394 - DNA, 530 bp, Glycine max
cctccctagaagcaaccagcttggggcaaccctcaatttcgagttttagcttgttatagatagagtgccaagagaatcatgtgtttgtaaatccaaagaggaccattttagatttggaccacggaagtcatgcattttcagttcttccagaaaggcattgttgaacagaatttgctcgaggcaggactcaatgaggcgagttccatgaattctggcctttttcaagctggatggcaaatctttcagcaaaattttttcacatccacgcaactctagttcatgaatgctagcagccttgggaactgaatcctctaagtgttggcaatcagaaattaccaatttattcagagaaggaaggtgttgaggcagggtccttctcaaccaaggacagcgttttatagaaagatctttaagacaagacaaaccttcaccttcaaaactgcaccattctttccatgcactcatttcctcaaatttcaaaacttcaagagatctgaatggaagatttgaggaatcattaccacaaaact

SEQ ID NO: 44395 - DNA, 599 bp, Glycine max
  unsure (1)..(599): unsure at all n locations
cgggaggccgtcgatggcggtcgtggcggcgctgctgctggcgtgcgcggcgctgctcctgctcctggccctcggcgcgctatcgctgcccggggcctccgacggctccggaggacgcggtgcggggctctcgctctcgcgcccccgctcgcgcttccgcagatccgccttcgactcggggctagagacgcgtggggagaagggggagccgtggacggaggtgctgtcgtgggagccccgcgcgttcgtgtaccacaacttcctctccaaggaagaatgtgaccatttgatttcactggcaaagcctcatatgaagaagtcaacagtagttgattcagcaactggaggcagcaaggacagcagggtgcggacaagttcaggaatgtttcttagaagagggcaggacaaaattattcggacaattgagaaaaggatagcagattacaccttcatacctgtagagcagggtgagggtcttcaagttctccactatgaagttgggcagaagtatgaacctcactntgattacttccatgatgattacaacaccaagaatggaggccagcgtatagcaactcttcttatgtatcttttcgatg

SEQ ID NO: 44396 - DNA, 254 bp, Glycine max
aaacgcaaaacacatttgaccttgaattcaacaatgggagggaacaaatacaaaacacattggtttccagcttccatttaccctacagagggggggtccccctttttttgagacacgaacgaacgtccctacttcttaataaccaaagtttggccacaaaacaaaacccccaaacctccttggggaagagggccctacatcatttatttaatttccccatataaaccacattacaacaacccattaaggctccc

SEQ ID NO: 44397 - DNA, 714 bp, Glycine max
cctgccgtcgctgctgctgcggatggtgcacaaccagatctggatcagcgccgcgcgctaccagacggcgcgcggcatgcaccgcatcgtcgaccgcggcatcgagttcgaccaggtcgaccgggagcgcggctgggacgaccagatcatcctcaacggcctgctcttctacgttggctacctggcgatccccagcgcgaggcgcatgccggcgtggaggtcggacggcgccgtggcgatggcgctgctccacgccgggcccgtggagttcctctactactggttccaccgggcgctgcaccaccacttcctctactcgcgctaccactcgcaccaccactcctccatcgtcaccgagcccatcacatccgtgatccatcccttcgctgagcacatggtctactacgtcctgttcgccatccccatgctgtcgactctctacatggggaacgcctccgtcctgggcatcgtgctctacatcgcctacatcgacttcatgaacaacatggggcactgcaacttcgagctggtgcccaggtggatgttccagctcttccctcccctcaagtacctcatgtacacgccgtcgttccattctctgcaccacacgcagttccgcacgaactactcgctgttcatgccgctctacgactacgtatacagcaccatggacaagtcgtctgaccagctgtacgagacctcgctcaggggagc

SEQ ID NO: 44398 - DNA, 504 bp, Glycine max
gtatagcaactcttcttatgtatctttcggatgttgaagaaggtggctttttttttttcccttcgacgacaacaaacagcagcttgtcaccattttataatgagccgtctgaatgtgccaagggtgggctatctgtttaaccaaagatgggagatgcgcttctgttctggagcatgaagcccgatgggtccctaaatcccacaagcctgcatggtggatgcccagttataaaaagcaacaaatggtcatcgacgaaatggatgcgtgttcatgagtacaaagtttatatacaaaaagacacagacctgaggtcatgcaccggttcaaatgcgtggacattttggcacatgtcgagagtttcgattttccatagaggattaatttacagttcatcttttctagctgttactcaggcaatgtcttaagctccgtgttgtacattaacatgttaggctgatgaacataaacgataaacctgatgattcaaagatggatgtgttgggt

SEQ ID NO: 44399 - DNA, 560 bp, Glycine max
gtattaggaatgcttgaagtatgcacagagtttgctcaaaatatctcttttaatttaaaaagattacaaagttcacttccagctggttatctggatgcaacgacgctggcggattatctcgtgaagaagggagtccctttcagaacttctcacgagatagttggaaggtctgttgctctatgcgtctccaagaactgtcagctagctgagcttgaattggctgacctaaaatctgtccatcctgtatttgaggatgacgtctatgaatacctgggggttgaaaacgctgtaaacaagttcatatcctatggctctactggttcagaacaagtgaaaaagcagcttgaggattggcgcatccagctcggggtgagctcataagggttggcatggttcaagaaataagctcgcaaattagtgcttgcgatttttgaaggtgtatgttgacgtcgtgaactttttctgtgcgtttgttcattcatttcgaacactggaatgaatgatgtaaacatgttggacaccttgagcctcttttatatataattattgcactgggtttt

SEQ ID NO: 44400 - DNA, 635 bp, Glycine max
tggtggatttgtacccctactatgcgtaccagaactcgcggagcaatgtgtcttttaacttttcgctgttctcgccagagtcccaggatgtgattgacccaaacactggactggtttacactaacatgttcgacgcccaggtcgattccatcttctttgcgctcatggctctgaacttcaagactttgaagatcatgatcactgagtcagggtggccaaacaaaggggcggtcaaggagactggagccacaccagacaatgctcagacctacaataccaatttgatacgccatgttgttaatgacagcggcacaccggcgaaaccaggggaagagattgatgtctacatattttcattgttcaatgagaacaggaaacctggcatcgagtcggagaggaactggggactgttttttcctgataagagctctatctacagccttgattggacgggccgaggcaatgtggatgttatgactggagcaaacattacaagtgctaatggtacctggtgtattgcttcaactaatgcatcagaaactgatctgcagaatgccctcaactgggcatgtggtccaggcaacgtagattgttctgccatacagccaagccaaccctgctaccagccggacact

SEQ ID NO: 44401 - DNA, 258 bp, Glycine max
ggcggccgcccttttttttttttttttttttttgttttttaattagttttggttttttgacccccgaggaaagaacatttcacattggattcatcaaatacaaattaaggtgccgggggggttatccccctttttatgagacacgaacgaacggccctttttcttatttctaaaaaagcaaaggttgacaacaaaacccccaaaccttcttcattgggaagaagggggacctacattatttatttccccacataaacc

SEQ ID NO: 44402 - DNA, 378 bp, Glycine max
acccccacgcaaaacacatttcacattggattcatcaaaaaccaatcacattggcagggggggagcccccctttttatgaaacacgaacgaacggccctttttctaattgccaaaaaagcaaaggttgacaaaaaaacccccaaaccttcttcattgggaagaagggggccctaccttatttttttccccccataaaccaacctttttagttcataaccccccattaattggcctccccttcatgcgggtgggggtggtgctgacactgggggtctttttacaattttcgcccccacctttggatcccttggattttttggaggtggttcccttggattttttggattttttggaggtggttcccttggattttgggc

SEQ ID NO: 44403 - DNA, 146 bp, Glycine max
acaccaacgcaaaacacatttcacattgaattcaacaaataccaatcacattgccagagtgggagtacccccttttaaggggcacgaacgaacggcccctccaccaattaccaaataagcaaagccagacaacaaaacacccaaac

SEQ ID NO: 44404 - DNA, 297 bp, Glycine max
aaaaaacaaaacttgaaaactgacttttttttaaggggattcaaaggtcccacccccctcaaattttaacattggctggggcgggggggggtaaaaccataggccatagtttttttattccacaaaatatttttggatattatttaataaaagagggcctccccacaccccaaaatatgctgggggttattaagggggggaccaaagggccggagtttccttgatacttgagctgacccacttgactttggccaaggttgaaaaaattggaaaaaacctccgaggggattgccctaa

SEQ ID NO: 44405 - DNA, 342 bp, Glycine max
aaaaaaacaaaacttgaaaactgccttttttttagggggattcaaggggcccccccccctcaaatattaacataggggggggggggggggggaaaaaacataggccatttttttttttttccccaaaatttttttggattttatttcataaaagagggccccccccccccttaatatttgctgggggttatttagggggggaccaaagggccggagtttccttgatacttgggctgacccccttgactttggccaaggttgtaaaaattggaaaaaccccccgagggggttgccctaaacacatccttaatgtacctgcccccggggttggggggtgttttg

SEQ ID NO: 44406 - DNA, 211 bp, Glycine max
ttttaacattggctgggtcgggggggggaaaatacataggccatagttttttttttccccaaaatttttttgggttttatttaataaaaaaggggtttaccacaccttaatatttgctggggggtattaagggggggaccaaagggccggaatttccttgaaacttgggctgccccccttgattttggccaaggttgtaaaaattggaaaa

SEQ ID NO: 44407 - DNA, 518 bp, Glycine max
gtttacgtgtgtccagaaaccttcgtgcgtccaccacaacccagcaagagcactcggtgatctcactggtatcaaaaagcacttctgcagaaagcacggcgagaagaagtggaaatgtgataagtgctcaaagaaatacgctgttcagtctgactggaaagcccactcaaaaatatgtggtacaagggaatacaaatgtgactgtggtaccatcttttccaggttgatgcatacacacatgtatcaaatttctacgtcatatatatatatatatatatatatatgaaatttgactcatcaatattcatccatggtttcagtgcataagttgcatgcagcacttgtccttttataaataaaatgttacatgggatctttccttgaccacacacacccttgttgacttaaaaaatggaattacttactttccatctttgaatttattttcgtatacctttaagttagtttatctgttttgaaaatttttctctagttttgataaacctttctttatcata

SEQ ID NO: 44408 - DNA, 417 bp, Glycine max
ctggagagccaaagtttcataactggagggaaaagcttcaacagtgtgggtttagaggcatatctctagctggtaatgctgccacacaagctagtctactccttggtatgttcccatctgagggctataccttggtggaggacaatggcattcttaaacttggttggaaggacctttgcttgctcactgcttcagcttggagaccacccttccatagtgccattacccatcacaactaggcttttgtgttggcctttttcatcatcatctcattattctaatcatgtgtagcatccaccccctctttgttacttaatttagagagagattgttaaggtgatcccatagcacgtgatttttcttgcctaatgtgtaccacttcagcagtaacatattaaaaagaagatatagttaaaa

SEQ ID NO: 44409 - DNA, 501 bp, Glycine max
cccatactccatggaatggactggtttggccaatagattactgagtaagggcaacgatattctgagttgcgattatgctagttttgatggtttgattaccaagcaagttatgagcaagatggcagaaatgataaacagtctttgtggtggtgatgaaaaattgatgcgtgaaaggacacacctgctgttggcttgttgatcaaggatggcaatttgtaagaaagatgtttggagagttgaatgtggaatcccttctggatttccgcttacagatatttgcaatagcatttttaatgagatgctcattagatatagctatgaaaaattactgcgccaggctaaagctccaagtatgtttttacaatccttcaaaaattttgtttctttgtgtgtgtatggtgatgataacttaattagcgttcatgaatatgccaagccttactttagtggctctaaattgaaaagctttctagctggtcataatatcactattactgatgg

SEQ ID NO: 44410 - DNA, 590 bp, Glycine max
  unsure (1)..(590): unsure at all n locations
tgacaaaactagtgcaactttgcaatttagaagttagcagatgtgattttctcaagagaaacttagcagatgtctaatgtttgtgggtagctcctgagtacaaggcaagtttatggtcacaacttattatgtttcgtgtaataatctggaaatgcaagaagcttatcttgtcaatctcgtaaatgtgttacgagaattgtatttgcacagtccagagaagctcgccaattgagaaggaaagctctctctcgtattgaatggctgcaaaagctgatgtgcctaccatagcacagattgaagagttcattcgatacagaggatgatgaatgctcctgattcaaataacaatattgatctactgttgagcattgattgttgggtttacaaggagcaggtaaagcttttccaaacaagattgtttttgatgacaagcttgtgttggctaacacacaagaattctttgatggaaattntccagtggattcttggttaccaatttttgtgaattgtctttatcctgtaagtcaattaccttcagaagctgtcgttgtaaatgttacatgtggtagtggacgtggtggtttacccac

SEQ ID NO: 44411 - DNA, 146 bp, Glycine max
ccagttgttgttccagctcctaagcctgctgttaccaagcctcaaccaacccccagtcttgccagaataccaataagaggagcattgttatatgttgctggctctgtctgctcatagttatctctttcatcagcaaagtcatcata

SEQ ID NO: 44412 - DNA, 379 bp, Glycine max
aaaaaaatgtacagccatttattaaactatatgtcccatgcggaaaacttaattttatacatacaagcaaaacacactcaccttagttgaacttagctaagtgcaaaggaaaccaagaatcaattgctctctatctaaaaataaacactttttaactgacatgaaattccccacttgcttgtgcttccttgactctcttttcgtactcatcttcttcagtctcagccactgcttcttttgtttcatcctcttcttcttcctccccttcccagccaaatccttcaattgacctggatgctggaggtggagccttggcctcctcaacaatattcatgatgtcctctatactctgaagagaaaaggttgggttttcttttct

SEQ ID NO: 44413 - DNA, 187 bp, Glycine max
  unsure (1)..(187): unsure at all n locations
atttcaatgcaaagatttccgactttgggttggccaagttgttactggtgtgctttaaaanaacgaggtgcgattatcctaggaactctaggatatgtggctcctgaatggttcaagaatgttgctgtgacggttaaagtggatgtttacagctttggggtgatgttgttggaaaatatttgctgca

SEQ ID NO: 44414 - DNA, 437 bp, Glycine max
aaacctaagtattgaatctttgttagaagatacaaaacaaagactcatacggacttttactacactatcaaagctttgagaagcaagaagaagctttgttagtgttttggattcgaatatgacttgatgtcatgtgtatgactcagtataaacactagaaccgcaacgcatcttaaaagcataagtattgtatcattgttagaagatacaatgacgaagactcatacggacttcgactacaccatcaaagctttgagaagcaagaagcagttggttagtgttttggagtcgaatttgacttgatggcatgtgtatgagtgagtataaaaactagaaccgcaacggatcttaaaagcctaaatattgtatccttgttagaagatacatagacaaagtctcatacggaattcggctaaatcatcaaagcttttagaagc

SEQ ID NO: 44415 - DNA, 428 bp, Glycine max
caagcgccgccagaaaatttctacttgatatatatcctattttatacaccaagtttccaaaacatgggtttttaatttaagaactcatcataataaagtatggtgtgataaattgatggccacccttttgatttcacagggaaaaagaaaacctactacatccaattttttaaattaattaataactctctcttccttgggaatattcaattgaaatgttgctgctccaaccatggccaaaaccccgattgatcatccatgccacaaaacatgttgcttaggctttcttttttgaccatttggtcaatcttttggcatgatggaaggtctggtcttgaagaggtttggaaaagctgagcaactcctgcaggcctagcaaaagaaggaggaaagaggggtctgctttgctgatgtgaaaaatgaggact

SEQ ID NO: 44416 - DNA, 468 bp, Glycine max
atgcattcatattgtcttataaatatggcaaagtatatactacagaattcttaggtattcatgttaaaacatccttatacatatatcaaagatataaaattaactgaacaaaaaaaaattatgagtttaaatctctcatcaacaaaaactaatatatttaaaactaatatttgcccataaaaataataaaatccttatacatgtatcagaaatctttaatcctgaagtgtggcagaggagaagtcccatcaaggcctcttcccagggaataggaaacatagccttgcactgtagtttccctgtacttcggaggattatcttctgatactaaatcctttatggggccataaagctttgttgatggctgaagacttgtgctaaaaaagcttgcaactgatactcttggacctacacggtttgccaccactctgtgctcaacactcttgaatttgtcatttgttataagct

SEQ ID NO: 44417 - DNA, 493 bp, Glycine max
cactagacaatactcgcctgacatccactggagactcagctttgttgttttcatcggtgatgacatcgagcgtgagttgcagttttaggacgcagagatagatagatttctcaaagtgcagggtggacgtttgcggcaagcagtcttggagaaggttcaggcaacacagcttcagagtgtctcactaattgaagacaaaatccttcagaaacttcgcgagaaaagaagctatggtagaaagcatcaacaagaggaacattgaactcgaagatcaaatggagcagttgactgtggaagctggttcgtggcaacagcgagcaagatataatgaaaatatgattgctgctctcaagttcaaccttcaacaagcgtatgtccaaagcagagatagtaaagaaggatgtggtgacagtgaggtcgacgatacagcttcttgctgcaatggccgttccctcgattttcatctgctttcaagggagaacaccgacatgaa

SEQ ID NO: 44418 - DNA, 509 bp, Glycine max
acctcctcaccgaagcaataccctcttcccttcgcaacctcacttcattaaaacaccttcaactcacttacaagctgttcttgccgagtcgcataccgatcaactcggtaacctccggaacctcgaaacgcttttcctctctggctgcaacctcgtgggtcccatccctgacaccctcagtaacctctctcacttaacgaacttagattttttgaagaacggaatcaccgctcacattccgcagtggttcacgcgcttgaagcgcgtgacacaaattcaactatttaaaaacaaacactccagggagttacccaaaggaatatggaacatgagagtttgagattcttcgacgcgtccgtgaacgagttggctgggacgattttgacggagttatgcgagttgccactagcatcgttgaatttatacaataacaagctcgaaggggttttaccaccgattcttgcgcattctcccaacctctatgagcttaaattgttcagtaacaaact

SEQ ID NO: 44419 - DNA, 494 bp, Glycine max
tgcttaatgaggcctaccgcctacactttattttcagaggcactctcatttctttaacaggttactggtccaatgcatcgggaggttgccaattgctgccgcacttggcatggaataaagatactcaaaggtggaaggtgtcttcaatgttgccaagtgatttatgcaaccagtacaaaattggacccaaaattactggaatgaagggttcatgaacaaccaaacttggagctgcaggaaaaaaacaaggatggttctaaaaaattcagtaacgtgaagccaccaaaaactacaaggtcttggattaatacaagtgtgacacttgcaaaatgcaagaaaaaatgtacggagattgttcctgtacgacttatgcaaattcagacatcaggggagaaggtagtgattgcaccatttggtacggtgatctgttagatataagactgattccagaagctggacaagatcggtatattagattggcagtgtctgaaaca

SEQ ID NO: 44420 - DNA, 163 bp, Glycine max
  unsure (1)..(163): unsure at all n locations
ctgctaccaaaccaggaataggcatttttgtagctgctcagaggctcaaccaagacgggcggcagggatctgagagcggntggctgaaatcaactatctcgggaaactacagcatcctaaccttgttaggttaataggatactgctttgaggatgagcatcgg

SEQ ID NO: 44421 - DNA, 139 bp, Glycine max
gctttcagcgtataggcctggtttcaagtcacctgaacagctttcacgtatccgacacactggtgtgacaccagagatcttgaaaaatgttggaaaagcaatcacaaccatccctgacaaattcacacctcatagcagc

SEQ ID NO: 44422 - DNA, 394 bp, Glycine max
gaccaagtcaaccaccaccacgaagtcctccctcccctccgatctatgccgccacttctccctcccggagatcaagtccgccaccaacaacttcgacgacgtcttcatcgtcggcgtcggcggattcggccacgtgtacaaaggctacatcgacaacggctccacccccgtcgccatcaagcgcctcaagccgggttcacagcaaggcgcgcacgagttcatgaacgagatcgagatgctctcgcagctccgccacctccacctcgtatctctcataggtttttgtttttgtctatgaatgttaatttgttcgttagaaatatccgtttttttttttttaccgtaacctccacctcgtgtccttcgtaggttattgcaacgagaacaacgagat

SEQ ID NO: 44423 - DNA, 411 bp, Glycine max
tgttttttttttttttttttttttttttcttatttttttgcagggaaaaacaatctaacggggtttgtttcttacacttgctaggggctacaaagtttacctgatccgagaaaagttaaaaagcaagcaaatcaaaaccaaagattacagaatagcaaaagaacaaaaaaacatagccctggtgttagatatccaacttttccatggggctccgcaaaatctgtctggatcatgattctgaacttgcaatctccaacagaaggatccttgtcagtgatcatggaaagggcggggaatttgcatgcactatccatctgggcatttatctgatagtagctattaaacgcataagaaatgttaccatgaacatttaaattgccacacgaagttccatacccaagactagtgcaa

SEQ ID NO: 44424 - DNA, 287 bp, Glycine max
gcgagcgagggaacagcctccacggttttgaataatggggagaggagggatcggacgcacggtggccttggtcatatccatagagacctacgatcctgcccaggcattcgggatggaccatgagccaatcattatcaaggtgggcacggctgttgtcactggcatgaatggccgattggccatggggaggctcggttctctctgtgaacaggtgaagcaactgaattttcaagggtatgaggtgattctggtaacctcaggagctgttggtgtcgggaggcagaggc

SEQ ID NO: 44425 - DNA, 249 bp, Glycine max
agatgacatactacaaaatggcatcattgatatcaaatagttgcaaggctggtgctattcttgcagggcacacagctgaggtctcggtgcttgcatatgaatatggtcgaaacctgggtctagccttccagttaattgatgatgttcttgatttcaccggcacctctgcatcccttgggaagggttcattgcctgatattcgccacggaattattactgccccgatgctatatgcgatggaggaattcc

SEQ ID NO: 44426 - DNA, 265 bp, Glycine max
aaactacttgtcgggtgctgttccggagagcatggggaaccttattgccttaaatactttagatctagaacaaaacaatttgaacggtctgattggatcatgggttggaaagttgaacaacttggtaagattatctctttcagacaataacttcagtgggcccattccatagtccattagttggtaatagagatcgagtgagctaggcctaccgatgcttgttttctagtacactgcaagtagcactttcttgcacacgtgcgtg

SEQ ID NO: 44427 - DNA, 173 bp, Glycine max
attcttgaagagatcggttgcttttgcaccacaaggtcgaggatgtgtgcaactgttgatcaagctgcggctgcggctcaagctgcaagtgcggcaagaagtaccctgacctggaggagacgagcaccgccgcgcaggccaccgtcgtcctcggcgtggccccggagaagaag

SEQ ID NO: 44428 - DNA, 241 bp, Glycine max
caaaggttggcggtgttcctgtaactccaaatggggaccttaagaaccagtttgttgagacaaccgttggctttgacaccatatgcaaggtgaacgcacaacttatcagcaatgtatgcactgatgctctatctgctgagaagtattactactttattcgcctgatgggacgcaaggcttctcatgtggcattggaatgtgctcttcaatcacatccaaacatggttatcctaggagagga

SEQ ID NO: 44429 - DNA, 144 bp, Glycine max
gaggatgaagaatgctcatccacctactgcatttcatttaaagtgtgcaatactgcagctgcacctgctgtgaaggagattaggaggacaatgagaatacaagcactgcgtagccatgttttgtacagtcatgatggtagcaag

SEQ ID NO: 44430 - DNA, 105 bp, Glycine max
aactactattaggagcaaaggagtattccactgctatcgatatgtggtcattaggttgcataatggcagaactcttgccaaaagagccactcttcactgggaagt

SEQ ID NO: 44431 - DNA, 251 bp, Glycine max
gctgtggtttcaagaccagagttggcggatagttacgtacacaggcggcaaatgtgtctcttagccgctgtttaagtgcaccgctgtaagtttgggtgtccatgtccatgctgtggtttcaagatcagagtccatggcggatagttatgtacacaagcgacaaacgtggttcttagcttaggttcatgaccagttccacgtagtacatatagcttatatgtatatatacaatctattttttactatgcaaa

SEQ ID NO: 44432 - DNA, 207 bp, Glycine max
gcactcttcaatagagattcaactggaggttactcagtccaatgaagagggcaatgattcatactcagtagcactgacagccaactttatattatgttgctcagggactcaaaaactgggaaagctgctccggtgaatcgactttcaccagaaaatgctcatgaaaaacttctgtttgaacaagctgaggcaagaagtaatttgagg

SEQ ID NO: 44433 - DNA, 261 bp, Glycine max
cacattgccggccgccgagagaagactgtgattagcaaggagaacaacttcaagcagcccggggagaggtaccgcgcgatggacccagcaaggcaagagcggttcatcaccagatgggtcgacgcgctctccgacccccgcctcacccacgagatcaggaccatctggctctccaactggtctcaggccgacaggtctctgggccagaagctcgcgagccgcctcagcgccaagccgagcatgtaagatcaaccagacaag

SEQ ID NO: 44434 - DNA, 391 bp, Glycine max
gaaaatccaattataaaaatcgtacagatggaatggccctcatacagaataacatgcggaacttaagctatacaaccaatctggagaagaaacagtcaacccttgctctcccaaccaacaaacaaatgaaggaaaaggggctaaggtaaggaccaatgcttctttttccctttcttatttcttctgaatatagagagcagcatacgcacgcacgcacgctccttgttgctatcgtcttcttttccgcctgtcttaaatcaagtctatgtagaaagcttagcactaagctcggctgccacggcatcaatgaattcctctgtgttcaaataatgctcccttgaaagcttggatccatgaagaataagtgccaaatccttggtcatcttcccag

SEQ ID NO: 44435 - DNA, 352 bp, Glycine max
ctctctctttctctttctctctcatccagatcttgcaaaaaaaaaaaacacaatggcagcgagcgctcccactccacgcgaagagttcgtgtacatggcgaagctggcggagcaggccgagcgctacgaggagatggtggagttcatggagaaggtctccgcctccgccgagagcgaggagctgaccgtggaggagcgcaacctcctctccgtcgcctacaagaacgtaatcggcgctcgccgcgcctcctggcgcatcatctcctccattgagcagaaggaggagagccgcggcaacgaggaccacgtcgccgtcatccgtgactaccgctccaagatcgaggccgagctc

SEQ ID NO: 44436 - DNA, 452 bp, Glycine max
agatggtgtcgacaatgtggatcgccgcaagaactaattagaacgtgatctatgatacaacaatattagtatatatagacgcatgcagtttatatagtatatattgtcatgttgtatgtttttacattctggtttgcttgtcatacattctcttcaaaaatatcctaactgtgtagtacgtgcaagggtttgaagattggttctaggttccgtgggaaccatttcaacaataaacatttagcgcgttcatgcatatcctgttttgcatgaaaagcctaggtgatttggttgcgcacatcaaattcacagtcttgttgatgccaaatggatcggatcgaatcacgactcatccactccaagaattgcagcctacaaaaacaataggtgatcctgatattaaggcctggctatccttgggcacaaagacaaagaagaaaggtggtgggaagaag

SEQ ID NO: 44437 - DNA, 232 bp, Glycine max
aatacatagaatatgtttgtacaatatttattatattatattatatataataaaataagagactctgaagtctgaacacggtgctcacataatgttgaggagttttagcatgccctgcaatggaggctgtcaaggatttgtataacagaattttgggtatatgtctttgcataatttattttgcgattggtatggtgttggcttctactctacctaaacagactgaaaaatt

SEQ ID NO: 44438 - DNA, 199 bp, Glycine max
acccaaaatcggaaagatggctatgatgataaccacttgtagcaatgaacaccgtaatgggtggctaactcaagcgttaggcttgaggatcttcacggtctcccaagtgaaatcaggatcgtcacgtccaaaatgcccataagcagcagttttctggtacctgaagttgcctcctctcatgagatcaagatggattgct

SEQ ID NO: 44439 - DNA, 193 bp, Glycine max
attcaatgacatgctgtgcaatcaatacagcacaataaagggctgatacgaccgactgtctacagcacgtttacgcagttcaggtcacggcttgcctgctgcagacgaatgaccatcgactcttccgacttgcgcacccacacacgcgggacatagtactttttgttcgggacgtctgcaccatccgggttgc

SEQ ID NO: 44440 - DNA, 258 bp, Glycine max
agcattagcaaaagcaagaagaactagtctaagcagaaatggcctcttcagtgatggcatctgtggccctcaaacctgcccctttcactgttgagaagtcctcagttagaggccttccctccctctcaaggaactcctctcattcagagttgtggccagtggtggcaagaagatcaagactgacaagccttatggaattaatggtggcatggctttgagggaaggagttgatgcatctggcaggaaaggaaagggaaa

SEQ ID NO: 44441 - DNA, 243 bp, Glycine max
ggtggatgagcaagggcttcagttcagtccccgcaaggtcaccatttcaaccagcgggcttgttccacagcttaaacgtttcctccatgaatcaaactgtgcattagctgttagtttgaatgcactactgatgaggtaagaaactggatcatgcctataaatcgaaagtacaagctggagttgcttcttcagacacttcgagaggagctttgcttcaaaaagaactacaaagttctatttgag

SEQ ID NO: 44442 - DNA, 238 bp, Glycine max
actgcttcaccttactgctctagaaaattcagtgctgaaacatggcttcggctactctctgtgtagccaaaccagagcttcaggcaaatgggaaaggcttcactgaagtctctggcctgcgaagctcatcaggctaccttccctttactagaaaatcttcagaggatttccattctgtcattggcttccagacgtatgcagtaggaagcagttgaggatacacgaagggtgtgacaga

SEQ ID NO: 44443 - DNA, 234 bp, Glycine max
aatatttaccgccccgccggagcataagaagaaggatccgtgtcacagtcactgctcatcgccatgtctcgggttgataacagaaattcctcagccaccaagcgtgctaggactgatggacaacttgtaacatgcgtaattgcactcaaccaaggccggctgatcataattacaaatctgctgccaagcctctacaagctccacagggttattcatcctcagctccttacttag

SEQ ID NO: 44444 - DNA, 231 bp, Glycine max
gcaagcacaatggacaaaacaagatatgagaatgccattaaagtttgtgctttagataaagatattgaagactttagccatggtgatcttacagaaataggtcagcgagggattaacatgagtggaggacaaaagcaaaggattcaactagctcgtgcagtctacaatgacgctgacatctatctcctcgatgaccctttcagcgcagttgatgctcacactgctgctatt

SEQ ID NO: 44445 - DNA, 255 bp, Glycine max
ccatccttggctggcaaggatggggaagagagagccatggaggaggctgctgccatttttaaaactctcttccccatcctacggctggcaaggccgtgaagctgggcccatcagcccccgaagtcgggagggtcagcatgaggaagaccgtcaccaagcaggcctcctccggaagcccatggtacggcccagaccgcgtcaagtacttgggcccattctctggcgagcccccgtcctacctcactggcgagttcc

SEQ ID NO: 44446 - DNA, 258 bp, Glycine max
ctcttccagaagcagctgccgaagatgcctcgggagtatatcacccgcttggtgctcgacaagaaccacatcagcatggcaatcgtcaagaaggggtggcgcgtggtgggcgggatttgttatcggccgttcgagtcgaggggctttgcggagattgtcttttgcgctgtcgatagctcggagcagatcaagggatacggttcgcatctgatgaactcgctgaaagaccacgtcaggaaggctcatcccacgataaat

SEQ ID NO: 44447 - DNA, 239 bp, Glycine max
cttgtttggaattttggcggcactgatccttcagccaaacagtggggataatgatcagtgccgccactgtttggctgaaggatcttcgtataatctctattttgtcagctggaggagtttttgcaacactgttgattgttgtctgtgtgttttgtgttggaacaataaatggtgttggattccatcacactggtcaattggtcaattggagtggcattccattagctattggtatccat

SEQ ID NO: 44448 - DNA, 246 bp, Glycine max
tagaaaaataaacgtatggtatgaaatcatacgacgtatatgtaataattatgtgttgccattttgagtatatatatatatatatgtgtgtgaaagagaaaaatgtaataaataacttgataagagagaaaaatagagataaaagaaatgaaataaaaataaatgagtgtatggttatgattatgtttgcacaccatatttcaggggggagtacacgtgattgcatagtttctttctgtcactata

SEQ ID NO: 44449 - DNA, 255 bp, Glycine max
taattattaaaaaaattaaataaatattaaaaagaaaaagctgtaagtaagggcgtcttaaagttcctcggccaaattggagtacagaatcattcccaaagatctatgtggcatatgcgaaccgtgaataccatagttttaataaaatttgaccaatagtagagagtaggcaggaaggaatgtattagaaagtgtattcttaattgtaacactcttaagaagtatatatcaaaccaccttaaattcatgtatgtt

SEQ ID NO: 44450 - DNA, 255 bp, Glycine max
gtgcatcactggtttgttggttaatagaatttgttttcccttttataatctgttgactttgtttcaagcaacatggttgatagtcttccttctttcaggatctgctccactcaccgctgttcagttgctttgggtcaacttgatcatggacactcttggtgcattagccctggctactgaacctcctaacgatggacttttgaaaagacccccagttgcaaggggagcaaactttatcaccaaacctatgtggag

SEQ ID NO: 44451 - DNA, 260 bp, Glycine max
gcatttgtaggattcactcactgccattcgaggtggccgtattcctcctcccggaagcatgccatcttttgaagaaattaaggatatcttaggtttcaatgcttactatgaagaagagaagcgttatgctacaaccaccaatccgcagctttccaagagagagagcagtaacctatacagtatacaacggcgagatcaagttgatacagagcagacaaatcaaagtttcaaagatccaattgtggaagttataacacctg

SEQ ID NO: 44452 - DNA, 237 bp, Glycine max
ggagaccaagaccaagtccactggcaagaccctcctcgaggccatcgatgccatcgacccacctcagcgaccaactgagaagcctctccgtctcccactccaggacgtgtacaagattggtggtattggcacggtcccagtcggtcgtgtcgagaccggtatcattaaggccggtatggtcgtcaccttcgccccagctggtgtcaccaccaagtcaagtccgtcgagatgcaccac

SEQ ID NO: 44453 - DNA, 218 bp, Glycine max
ggctcgaggcctattggaggcaacattatggctcatgccacaactacgagtgtagctctcaggaaagggacaggggaagagcggatctgtaaagtgataagttctccttgcttagcggaagccgaagcaaggtttcagatttgtgcagaaggagtttcagatgttaaagactaactgatttcagaatgtttgaatttttgttttcctatttgcatatc

SEQ ID NO: 44454 - DNA, 262 bp, Glycine max
ctctactgctattctcatcctcctctgtctctctctctccaccattgccatggatccttacaagctccggccatccagcgccttcaattctcccttctggactacaaattctggtgctcctgtttggaacaacaactcctctttaaccgttggagctagaggtccaattctgcttgaggattatcatcttgtggagaagcttgcaaactttgacagggaacgtatcccagaacgtgttgtccatgccaggggagctagtgca

SEQ ID NO: 44455 - DNA, 253 bp, Glycine max
cccgcggatacttcgtatggcggtgatctcttcgatgcttcaaatgattacgttgaatggttggactcacagcctgagttatctgcggtttatgtttcatttggtacccttgctgtgttggctgatagacagatgaaggagcttgcacgcgcgctgctagattccggatatctcttcttgtgggtcattagagatacgcaaggaatagaagataactgcagagaggaactggagcagaggggtggaggttctg

SEQ ID NO: 44456 - DNA, 249 bp, Glycine max
ttttgctggtgatgtcttgtcagtttgctactgtaatctgacaatatgcctttcaatcatagctacatccttcggccaatctcagttgcaacctttgtttcctttcatggaggctttgcctgatgaaatgcatgttgctgttccctttcttcttagttttatcatgggtgatccagtgaagatggcatcagtcagtattgaaaataagcttcctcctgccaaaaaaattgaacaattgtcatacaacct

SEQ ID NO: 44457 - DNA, 248 bp, Glycine max
cggctcgagcggctcgagcggctcgagggatggttggatgagaagaccctctccccggccaaagcaggctacggaatggacgttgccatcaaaaagttgaaccccgaaagcacgcaaggcttccaagagtggcagtcagaagtgaactttttaggaaggctttctcaccccaacctggtcaagttgttgggttattgttgggacgatgatgagcttcttcttgtctatgaattcttgccaaagggaag

SEQ ID NO: 44458 - DNA, 242 bp, Glycine max
gtactttcatgcattttactttaaaaaattcttttattcacttctttaccaatttcgtttcaatttctttctcaaaatttcatcttacgtggtagggcaaaatatggcattgatgagatgtgccgcgatcaatggaattgggctagcaaaaacccttatggctatggagatcaggaggattccagcgtttaactatatatatatatagtgatctctatgggtccttttccgaactcccccac

SEQ ID NO: 44459 - DNA, 230 bp, Glycine max
taaagattttatccaattgaaattttaaaaatgaatgggataaacttaagacttcaattattgaaattgaataagtaaacaattaaattggattggtcgaatggtatcaaaaaaatggagtactaactcccatttcgtatttattattgaattaacgatcaactgcttggttatcgaacatttcttttgatttcaaaattttccggaaaaatttgaatctattttatatg

SEQ ID NO: 44460 - DNA, 234 bp, Glycine max
ctcgtcatggagaagttattggaaaagctgcgctgtcgcactttgacagttaccaacgggtctgaagctatacggtatgccatgggcgaagtcaaatttgatgtcatcatgatggagtttcgactacctcaggtcaacggcgctgacgttgctcgtatgatacgagatacgaagaatgccaacacccataccccgatcgttgctgtcactggatatctcaaggaactacaggcg

SEQ ID NO: 44461 - DNA, 224 bp, Glycine max
ggttcttagatattaggatgaagtttgattcaaccatcagtgttgcgttcatggtcactgcaactgatgagaagtccatgactggctatggttctcctgtagagttcctatctcatgtggattacgggctttgaggacgatccgtctttggctatactgtgtgctgtgggtggttatgattccaatgctggtgcaactgcaaatgtcttggagtggtcaacgcc

SEQ ID NO: 44462 - DNA, 218 bp, Glycine max
taaaagttgcaaatgcttataaacatccttatattattgcagaatttatagctggacaattatcgcttagaggctcgtctcgtatagcaatgataatagctattgaattaactgcacaggcgggtacaaaacgagttcaagtacaaattgcaggacgtatcgacggcaaagaaattgcacgtgttgaatggatcagagcaggtagagttccgccacac

SEQ ID NO: 44463 - DNA, 222 bp, Glycine max
ggaagaacaagacgacaacatcacattggaggaggttcattcaccctgttaggtggcgctgtaagtggctagaattgcaagtgaagaaacttaactctgtagcactgaaatatgataaagagctcgcggcatacgatcatagaaagcagcttgagttttcaaagttctcaatagatgatcttaatgtcaagtcagtacctatatatgatggcatccacacaa

SEQ ID NO: 44464 - DNA, 245 bp, Glycine max
cttccattaacgggtggtgcctctcttccatctccccagccaaattctctctcaagaaggccacattaggcccttctgtcttcgcaaccgttagcactccttcttctccttcttcttcttcttcttcttccttcccttctctcattcaagacaggcctgtctttgctgcccctgcccccatcatcaccccaactgtgagagaggatatggcaaaggaatacgagcaagctattgaagaactccag

SEQ ID NO: 44465 - DNA, 245 bp, Glycine max
ctcttggtttcatagttgaccgtcctttgaagttcaagcaattgagccttcgaaaggggcttaatttgaagagacgtcatcgggatttcttgctgaaatttgaagaaatgccattggtgtgcccctataggaatcctgctgaggctttggccaaggagtcattggaggcagagaagagatcttgtgcactggtgagggaggttcttgcaatgacggttgagaagcggactttaattgaccacttg

SEQ ID NO: 44466 - DNA, 241 bp, Glycine max
ataaaacaaaaggatgtgtatgaacagcataaagaattaattttactgggagagagggttgttcttgcaactcttggttttgatctgaatgtgcatcatccttataaacctcttgttgaggcaataaagaaattcaaagtagctcaaaatgccctagctcaagttgcgtggaattttgtaaatgatggacttcggacatcactttgcttgcaatttaagccccatcacattgcagctggag

SEQ ID NO: 44467 - DNA, 240 bp, Glycine max
tgcaattcgaggaactggtgaaaagaggcattcttccattcaaagatgaaaattttgctattgatggcaccttggataagagtttaaattggatttctgaaatgaaggatattagactcaaagaccttccaagttttatcagaacgaccactttggatgatactatgtttgatttcttgggttctgaggcacgaaacactttgagatcatcttcaatcatcattaacacattccaagact

SEQ ID NO: 44468 - DNA, 226 bp, Glycine max
gaagatggagaagtatcagatctggagcaggagaatagcgttggcagcgtttgcgtttgctctgctgttccaatcggcctcagcagacgacgtcgttgtgctctctgaagataacttcgagaaggaagttggtcaggacagaggagctctcgttgagttctatgctccttggtgtggacactgcaaaaagcttgctccagaatatgaaaagcttggtagcagcttc

SEQ ID NO: 44469 - DNA, 224 bp, Glycine max
ctcactgtcaggaggttaatcacagcagtggcattcttttttctcactttcttttttatgatccccattgcatttgttcaaactctggcaagtcttgatggaatccaaaaagcggcaccatggtcgaagccacttgttgacatccctttcattaagtcattcattcaaggttttctgcccggtattgtgttgaagctattcctcatcttcttgccaacaatatt

SEQ ID NO: 44470 - DNA, 235 bp, Glycine max
aaaaaactttcgaaagattttatcgaattgagattttaaaaatgactgggataaacttaagaattcaattattgaaattgaataagtaaacaatttaattggattggtcgaatggtatcaaaaaaatggagtactaactgccatttcttatttatcattgaatttagcgatcaacttgcattgttatcgaacatttctttttgattgcaaaaattttccggagaaaatttgaatc

SEQ ID NO: 44471 - DNA, 227 bp, Glycine max
gcaaaaccctgcagcccatgctgcagcgacgttttgctgctacattttaggccatactgcaaatggcagacaacttgctccagattactcccgtgtagcactccagattttcccatcaatgacaaattggtcacgcctccaagtgctgacagctattgcagctgctacagtagctgctgcaactgcatggtgggctgcccatggactgcttcctttatgtggtccac

SEQ ID NO: 44472 - DNA, 200 bp, Glycine max
gtcaaaagcacccttgggggtagttatggaatcccaaaagtacactataaatgaggacaaggagaatattatgggatggttatggacatagttgctccaagtttgtggagtcacaggaatacctcaagccagatgatgtcttctgaaatggtctcatgtgtagcggttgagtccttatcaatacttgagcagatgcactc

SEQ ID NO: 44473 - DNA, 246 bp, Glycine max
gataattggtcacactttttttatgaaatggattgaatttatattagtccgcatacagcaaactaattcgattaaatctaacgtacgtattcaatcaaataaatacattatgtcagaatttagaaattctatgttgaaaatctttcttgttttcttatttattacttgtttatattatttaggaagagtacccccccctttttttagtaagaaattgtcagaaattcaagaaacccatgaaattta

SEQ ID NO: 44474 - DNA, 240 bp, Glycine max
  unsure (1)..(240): unsure at all n locations
cacaagcgcaccaggaacatggaggtggatgttaggagtagcagcagtaccagcattgacacaaatcatattgatggttttgctcccagaatcacctcgttggttgttcagaaagggtaaacaagaagaagccagagatctnntgaggaggattaccctccccaggatgttgaagatgaaatcaatgctttgaaggaatcaattgaaacggaactcaatgaagagcttcagcttcaaaca

SEQ ID NO: 44475 - DNA, 247 bp, Glycine max
gttcacacagcactttcccatcaatcaagaagcgacttgataaggaaattgaaacaaacgtctcgatcactgttgctccatcagaaacgggagaagcccttaaggtctcaggtcgaggagaacttcaacttggagttcttattgaaaatatgagaagagaaggattcgaaatctcagtttctccacccgaagtcgtcttcaaagaggaaaacggaaagaaattcgaacccatcgaagaagtcactat

SEQ ID NO: 44476 - DNA, 230 bp, Glycine max
  unsure (1)..(230): unsure at all n locations
atgagatcctatgaaagtaaaaatcttttntatnttacttataaatattactataaatattgggttgaattgagcgggtcgtacttaaataagaatttcttttccttttttcttagtttctatcgaaaaaaaaaagattcgatagaaactaagaaaataaccaaattgattcgccgagaaagaggagagagagggattcgaaccctcgatagttctttgttccgaactat

SEQ ID NO: 44477 - DNA, 227 bp, Glycine max
  unsure (1)..(227): unsure at all n locations
ctgagtcttgcaattgaagttgaagtcttgcccttctctcttcaactccacacacaatacattattanccatggcngccnccgnctccactgtcggagctgnccacagagctcttttgaacctgaatgggtctggacctggggtttcagctcccagttcatccttctttgggagcagcttgaagaaggttattggctcaagggtccccaacacaaagatttcgtctg

SEQ ID NO: 44478 - DNA, 227 bp, Glycine max
tgtatttcctctctcccatctctactagctgtgactgttgtcagaagcattgaggaagttatagagggagtgacttaggaatactaaaggatgtagagcttcttcggcagatatctgatgcttcgcgtggagcaattacttcctttgtgcagaggactactaataagaagggtcaagttgttgacgtagctgataaacttacctcaatccttggatttggcataaat

SEQ ID NO: 44479 - DNA, 258 bp, Glycine max
gcctacacaatcacaatcccaaaacacacatcaattccatcaatacaaatcacataaccgtcaaaatggtcaaagctgtcgccgtcctccgtggagactccaacatcaagggtaccgtcacctttgagcaggctgacgagtcctccaacaccaccatctcatggaacatcaccggccacgacgccaacgctgagcgtggcatgcacgtccacgcctttggcgacaacacaaacggctgcacatccgccggtccccact

SEQ ID NO: 44480 - DNA, 232 bp, Glycine max
caaaattctcagaagctaacaagctaggtgaaggtggatttggtgaggtttacaagggcttgcttccaagcggacaagaagtggctgtcaagagactctctaaaatctctggacaaggtggggaagaatttaaaatgaagtagagattgttgcaaagcttcaacacaggaatttggtgaggcttctaggattttgtttggaaggggaagaaaagatacttgtctacgaattt

SEQ ID NO: 44481 - DNA, 221 bp, Glycine max
gaagaacttaaccgggttagttgaatggtatggcaagaacaagagactgagaaatttggtgaaccttgtcatagtaggaggcttctttgccccttcaaaatcaaaagatagggaggaaatggcagaaataaaaaatatgcatgacttaattgataagtaccaactcaagggtcaatttagatggattgctgctcagactaataggtatcgcaatggagagc

SEQ ID NO: 44482 - DNA, 259 bp, Glycine max
ctggcgccgaatgttcggcaggtgatcaaactggcgaatctgcttagttcttgggtatgctcccatatcctcggcgtgaaagatacgaagcagcgggcgggaatcatgaagtatttcatccagacttcgatggaagcacgcaatctgaacaatttctcatctatggcatcgttgatggctggtctgaattccgctccgatcttacggctcaaacggactaaagagtttttgagcgcaaagacgaatgctcagaaggttg

SEQ ID NO: 44483 - DNA, 260 bp, Glycine max
gacataagtataagccagacatttgaagttccttttttgaatctaacaatgaaaggtggagatgattattatgtcatggatcctataatacaagtttctagtgaggaggaaggagatcttctttgtttgggaatccagaaaagtgacagcgtgaatatcattggacaaaacttcatgactggttacaaaatagtcttcgatcgtgacaacatgaatcttggttggaaggaaactaattgttctgatgatgtgctctcaaa

SEQ ID NO: 44484 - DNA, 241 bp, Glycine max
gattcccatagctaaagttgatgtcttggagttagatcttagctctatgacatctattcggaattttgcatcaaatttcaattcatctggtctttcattgaatattttgataaacaatgcagggatttgtgcagctccttttgcactatccaaggataacattgaacttcaatttgccataaattacttaggccactttcttttaacaaatatgttgttggatactatgaagatagcaaca

SEQ ID NO: 44485 - DNA, 269 bp, Glycine max
tcggattctgctcgaggtgaacaatggcctctgcatcagcatctcttctcaagtcttcacttgttcttgactagtttgagtgcgtgaagggacaaacacttcgccaaccttctgctgcatcagttgtgagatgcaaccccaccactccttcaggcctcaccatcagagctgtttcctatgctgatgagctctttaagaccgcgaaaacagtggcttcacctcggaggggtattttggccatgtctgagtccactgctccctgttcgaag

SEQ ID NO: 44486 - DNA, 257 bp, Glycine max
agaggtagaggaaagggtaaaaaactaactgttgccaattttgaggatccagcgagtggcgaggatgaaaaagttcccacgcaaaagagaagagggaggccacaaaaaccgctaaaggacgactttgatgaagaagaggtagagaaaatagaagacgacagtgacaatgttaagaatggaaccgcttacaaagagatgaaaagccccactgcaactgaaaatggaaggaaaagaaagcgaaactcacaggtaaaaga

SEQ ID NO: 44487 - DNA, 157 bp, Glycine max
aagtatacttcctgatgtaatgccacactctcttaaggtcagagcgatggctatgtttgaagctgtacaggagattgccatatacattcataggtttctcaatcttgacctttttcagcagggatggtatcagattaaaattactatgagatgggaa

SEQ ID NO: 44488 - DNA, 250 bp, Glycine max
tggaaggccaaattggagaagatgcatgagcaggttgacaagatcgcagacaacattctcagagagcatcaagaaaagcgcgaaagggcactacgagaaggcaaggttgacctagaggaggaggatcttgttgatgttcttttgagaatccaacaaagtgacaacctcgagatcaaaattagtaccacaaacatcaaagcccctatattggacgtatttactgctggaacggatacttcagcatcaacac

SEQ ID NO: 44489 - DNA, 258 bp, Glycine max
tcgcagcacgcgtagatacgtcataaaatactacttacatgaaatcctgtacagaaattaaccccatatgttcttgtgctggcattgtcaacagagtggtgttcatcatgcagtaaatccatgcccttatagaggcattttcggttctgatggagagaagtatgcaagagatgtacaagatatcattaacttcggaacttctggaaatgttgcagccttcatttctgaagccatacagggagtggggggtatcattga

SEQ ID NO: 44490 - DNA, 223 bp, Glycine max
atgaatatggacgaggaatcagagaaagtggcagtggagttggctgcacaaggagttattggaaagagagttgatgagatggaatccgatttcatgatggcccttgactacatgatccaacttgctgagaatgaccaggatgataagcgtaagtcactgttggaagttatcaaagagacagtattatcacatctaaccaaaaaatgtccaccccatgttcaag

SEQ ID NO: 44491 - DNA, 247 bp, Glycine max
agctgtttcatcgaaaacaagatggtatctgttgagaggataaagcaatttacaaatattccatcagaaccagcatggaatatcaaggatcgtatgcctccttcaaattggccaagtcaaggcaatgtagatatcaaagacttgcaggtcagatatcgtctaaacactcctctggttcttaaaggcattactttaagcattagtggaggtgaaaaggttggtgttgttggtcgaactgggagcggaa

SEQ ID NO: 44492 - DNA, 249 bp, Glycine max
gggtgaaaagggattgaaggattgttgttcttttctattggggttatatctgtgctttatgggaagccctatctgtcttcttgttgttttatttcgattcgatgtggcacattctacctttcatttctgtggcgtctcattgattggtattatgaatctcgaatttgcagggttttagaaaggttgacccagatcgatgggaatttgcaaatgaaggatttttaagaggtgaaaaacaacgtttaaaaa

SEQ ID NO: 44493 - DNA, 244 bp, Glycine max
ggacaagaacattgatatatcttcagataagcgtgctttgcaaaagctacgccgtgaagcagagcgtgtcaagcgtgcattgtcgactcaggctcaggctcgtcttgaaattgagtcgctgctggacggcgaagacttcaccgagtctctgagtcgtgcacgttttgagaagcttaacgaggacctgttcaagaagacccttggcccagtggagaaggtgatgaaggatgctgacctcaagaag

SEQ ID NO: 44494 - DNA, 269 bp, Glycine max
aattcggctcatgcgatacgattagatcctgaaccctttgaacatcgtattgcagtcatggatataagcctaatatgatacagatatctgcagtctcgatattttttgagacaatgccatatcgattgaatgaaagtacaggatacatcgactatgaccagatggagaaatctgctacactcttcaggccaaaattaattgttgctggagctagcgcttatgcacgtctctatgattatgaacgtgtacgcaaggtttgcgctaaacag

SEQ ID NO: 44495 - DNA, 242 bp, Glycine max
gttaaagataaaggcagctgcggatcatgctggaccttcagctccactagggctttcgacgcaggctatgcacacgtatttaggcgtagagtatctctcttaactgagtagcagctatctggactatgctggtcctttcaagaacttatggctgtcatggtgggttgccatcacaagtctttgaatacattaaatacactggtggactagagactgcggaagtatattcctagacaggagaa

SEQ ID NO: 44496 - DNA, 214 bp, Glycine max
ggctcgaggcatttttggaaatgtggccattggagcccgttattctccgcgtgttcatggattgaagcgtgtgtttataattgactttgatgttcatcatgggaatggaacaaatgatgctttctatgatgatccagatgtatttttcctttcatttcaccaagatggaagctatcccggtactggtaaatttgatgaagttggaagtggagat

SEQ ID NO: 44497 - DNA, 256 bp, Glycine max
tcggctcgagtggcacttgatcttcctcatggtggccatctttctcacggatgtcagagtgctatggtaagataacttctattgtgattctatcttgcatggtggctgccactggaggcattatcttcggttatgatataggaatttcaggtggagtaacatctatggtgccatttttggacgaatttttcccagatgtgtacaccaagatgaagcaagacaccaaggttagcaactactgcaaatttgatagcca

SEQ ID NO: 44498 - DNA, 271 bp, Glycine max
agaaaggggcacaccttgggctgggtggagcaactattggtgtggactcttcagcttggcccagcaatgacttgacaggtggtggagtattaggaatgctaggttatactggtattggtgcctctggattaggttgggaaattcaacaagattttgaagattttgtggatccacttgccactttggagaacataagtaccagggctttgtctagtcatcctatgagaccttttttcttggttggttctagcaatacacacatttacttgtg

SEQ ID NO: 44499 - DNA, 258 bp, Glycine max
cttcttccatggcctccaagcggattctgcaggagcttaaggaactccagtgagaccctccaacctcttgcagcgccggtcctgtagcggtaggtatgtttcattggcaagcgactatcatgggtccccctgatagccctcatgctgggggcgttttactagttactatccaatctcctccggatcatccattcaagccacccaaggctgcatttcagactagagttttccactcacatatgaacagcaatggtagta

SEQ ID NO: 44500 - DNA, 265 bp, Glycine max
aaaccattcaagcaatcacatcaccatggcacccaagatcgctatcgtctactactccacctacggccatgtgaagacactggcagaggccgaggccgagggcatcaaggctgctggcggccaggtcgacatctaccagattccggagactctctccgaggaggtcttgaccaagatgcatgcaccgcccaaggccgaccacccagtcctcaacgacccaaagaccctcgagcagtatgatgctttcctgtttggtatcccaacc

SEQ ID NO: 44501 - DNA, 253 bp, Glycine max
ctcatccatcatgaaaggaggaaagtccaagaccgaatctaagagagccgatgccaaacttgctgtgaataagaagggcgccgccaccaagactaggaaacccgccggaaaggggaaggcagcgaaagatcctaacaagccaaagaggcctccaagtgctttcttcgttttcatggaggaattcaggaaggtgttcaacaaggaacatcccgacaacaaagcagtgtctgctgtgggcaaactgctggagcaa

SEQ ID NO: 44502 - DNA, 247 bp, Glycine max
ccgtgttgcttcctatgagctgttcttatctgattctcaaagaacgacttcagaaaatttgtccgccttgtttagcctccttttacgtcattcagcaaccttcgagatcttctcctgtctatctgttgaaattctgttgccttgaccggaagggcttgttacacgatgtaacgaaagtgctctcggagcttgaacttaccattcaaaaggtgaaagtgaccacgacccccgatgcagagtcttggac

SEQ ID NO: 44503 - DNA, 243 bp, Glycine max
tcgagacagaatcggggtcaacgtgggtggctgacctgaagcaagcgtcttcggcggcggtggtgatgttcgagaagccgttgatgaatctgagcttcaaggacctcattgttgcaacgtcacacttcgggaaggagtcgcttctagcggagggaaggtgtgggccagtgtatagggcagtgctacccggggacctccacgtggcaatcaaggtcctggaagaggccaggacgttgatcctga

SEQ ID NO: 44504 - DNA, 264 bp, Glycine max
ccaaaagctccaaagtgaattacataggcttcagggacttcactctcatgctaatatcatttatgctgattattacaatgccatattgtcattatatcgtgatcccacaatgtttggttttactaatcttaaaacctgttgtggaatgggaggtccatataattacaacgcatcagcagattgtggggatccaggagtgaatgcttgtgatgatccttctaagcatattggatgggatggtgttcacctgactgaggctgcata

SEQ ID NO: 44505 - DNA, 251 bp, Glycine max
gattgatgaggcatggaaacacttcaattccatgcattataaccatagtatcagtccaaggatggaacattatgcatgtatggttgatttgcttggtcgatctggattgcttttagaagccattgaatttattaactcgatgccttttgatgctgatgcattggtgtggcgtacctttcttggttcttgtcgggttcatcgtaacaccaagcttggggagcatgctgcaaaaaagattcttgagagggaac

SEQ ID NO: 44506 - DNA, 255 bp, Glycine max
gtgtttagctagattgcactgttttaacttttcttattgatttttatccatctatctacgtttttggtctaatttttgttcaagcaaaaaacgggccaaggcccctaaacgaacaataaattaaattaaagcaaagtgaaaaatggcagatcatttgctgttaaggatgagatattctgcttgtttgagggggctctagacaatttgggcagcctgagacaacagtatggactggccaagtcagccaatgaagtg

SEQ ID NO: 44507 - DNA, 240 bp, Glycine max
ggctattgagggattggctctgaaattgcattcaaacaaaagatattgcttcaaagctgatgcttttgcagaaatgaagagattgagactgttgcaacttgataatgtagaactcactggagattataggtatctttctaagcaactgagatggatctcttggaaaggattttctctaaaatacatacctaagagcttttatctggaaggtgcaattgcaattgatttaaaacacagtag

SEQ ID NO: 44508 - DNA, 246 bp, Glycine max
ggcggttgcaattgcatagcatagagaaagtgcagagagagcacagcgtaacgactcagtcaaacactctgtaactctttattttattttctttctttctttctccgatcgcatagctcgctcgcaaccaccatgccttcccgaagaagaactctcttgaaggtcatcattctcggtgacagtgggttcgtctctttctctctctctctctctctctctctctatcttcttccatttctagggttt

SEQ ID NO: 44509 - DNA, 240 bp, Glycine max
gctgcagtgaagaaaattcctctgtacaagcacattgctaatctggctggaaacaagactttggtactacctgtgccttcattcaatgttatcaatggaggctcacatgcaggaaataagctagcaatgcaggaatttatgattctccctgttggggcatcttccttcaaagaagccatgaaaatgggcgtagaagtataccatcatctaaaggctgtgattaaaaagaaatacggacag

SEQ ID NO: 44510 - DNA, 238 bp, Glycine max
caggtagttttctggaggaacagcaacaggggcaacagcagcagcagaagaagctatgtgataacatgtgcagcaggtgactcacagacagtggtgattggtcttgctgcagactcagggtgtgggaagagcaccttcatgaggaggctgacaagtgtgtttggaggagcagcagagccaccgaaggtggcaaccctgactcagacacactcatcagtgacaccaccactgtcatatg

SEQ ID NO: 44511 - DNA, 262 bp, Glycine max
aagaactaaaagctattattaaagttattcccctgtggtctagagggatcatgatgtatcttaacattggaggctcgtttggattgctgcaagcgaaatcccttaaccgacatatcagtccaaatttcgaagttccactgggtctatgagtgtaatcatgatatttacaatatttgatttggatagctctttatgatcgtgtcattattcctcttgcatcaaagcttagaggcaaaccggttaggatcagtgccaagagaag

SEQ ID NO: 44512 - DNA, 257 bp, Glycine max
ggctatgacccttgtgattccaattatgtagaagaatacttcaatagaaaagatgttcagtcatcttttcatgcagatactaaaagagacactaacgtagcatggaaggtttgcaataattccatattgaggacttacaacttctctgttttctcggtcctacctgtctacactaaactcatcaaaggtggccttaagatatggatttatagtggagacgcagatggaagagtgccggtgataggaacacgatattg

SEQ ID NO: 44513 - DNA, 254 bp, Glycine max
tgatcatggtagtgtaacacatataccttcatggggaaaattttggctttcggtacttggtgtagttgatcggtgtggtattaaccctttgcccccagagttctggatccttcctactttttccccaatgatccagctaaaatgtggtgctattgtcgattgatatatatgcccatgtcttactgatatggaaaaaaatttgtgggttcaataacgccattagtcttaaacttgagagaagaactctttactca

SEQ ID NO: 44514 - DNA, 239 bp, Glycine max
gcataaacatgaagagaatgttgcgtctgttcgtcgacggctgtctcatgaaaaagacaaatggttaagttcctgtcctgacaccttaaagatcaacatggagtttcttcagcgttgtatatttccacgctgtacttttagtatgccagatgcagtttattgtgctatgttcgtacacacactccattcccttggaacccccttttttaacacagtcaatcacatagatgttcttattt

SEQ ID NO: 44515 - DNA, 241 bp, Glycine max
gcatattcaagaatgaaacagtcagccgtaaagcatttgctttacaatataggctttggtccatttgtgctggctggtactacagttcccatcccgttcttaagggcaacagatatatcaccaattgctctcctgtcagacaatgtacttggtggcatacaacaggatactggtggaactggaacagtgggagcattgcaagagctttttagtggtgacggacagtccaaaaagggccgga

SEQ ID NO: 44516 - DNA, 240 bp, Glycine max
gagagatagcgagcagtgtcagacacagagacaggggtttgggattcgagggattgacgctgcgtctcttcctcttctctttcgctcgatccctcattcctaatcctccaatccaaccacctcagcctcacactcacatatacacatatctgaacgcgtatcgtccctcctatggcttcaaagcgcatcctcaatgagctcaaggacttgcagaaagacccatcaacttcttgcagcgct

SEQ ID NO: 44517 - DNA, 226 bp, Glycine max
tttcagagacagcttcggctgctgatgtaagacgtgcctacaagaaactcggcttacaatggcatccagataagaacgtcgacaagagggaagaagcagaggctaaattccgagaaattggtgctgcttatgaggtctattatgattatctgatggttacctgacctttctcctacagtctctaatcaggacgtgcctggtcattgtggaatgggaaatgcgaaca

SEQ ID NO: 44518 - DNA, 227 bp, Glycine max
gggcaaacaagtgagcatgcacaacttatcagaagctttggtgtttatcgggttatagttgctgtaaataagatggatgctgttgtgtactccaaagatcgatttgattttataaggcagcagctgggagtttttctccactcttgtggtttcaaagattcttcgctatcttggattcccatgagtgctatggaaaatcaaaatttggtggcatccccttctgatgc

SEQ ID NO: 44519 - DNA, 242 bp, Glycine max
acgaagttccagattttgtgcatccttttagtccatatccatttctggggacactcatattggaacagtttaagaatttgtccaagcctttctgtgtgttggtggatagttttgaggaactagagcatgattacatagactatcttacaaagtttgtgcccataaggcccatcggtcctttgttcaagaccccaatagcaacaggcacaagtgaaatccgaggtgattttatgaagagtgat

SEQ ID NO: 44520 - DNA, 238 bp, Glycine max
ggaaatgatctattcctgtggctggcctgtttgtcagatctataatggcatgcagcccaatttcaccgccattattgagcgttgcaatctttggagaggttgtgatgatattcaagattcatgggctagcttggaaagtgtaatagattattacggtaacaaccaagacgtgattgtaccaaacgcaggtccaggtcattggaatgatccagacatgttgatcatcggtaattttggg

SEQ ID NO: 44521 - DNA, 238 bp, Glycine max
gggatcattgtgtggatcttggtggttaattggcatcgcgtggagctcaccgtgagcataatcggggttgcttcccacgcgctttcgaggaacatggctttgttcggggtcctcccttgtttgaccgttgggctggtgctgtgtttcgtgccaatcgtggttttcatggtgtttgcgaggtttaatgggaagattgtggtgaagagtttgaagcctggatatgcttgtgaatggaagg

SEQ ID NO: 44522 - DNA, 260 bp, Glycine max
ttggtttccttgaatcccagcttcaggagttggacggtccaaaagcgagtgcttgcagactattttgatgtgatatcaggagcaagcacaggaggacttgtatctgctatgataactgatccaggctacaataatcggcctctgttcgctgccacagatatcaagccttatgacatggaccactgtcctaaaattttcccacagcatagtggcctcggtcggtcgatattagcaaagatgacaagatctctgggaggacc

SEQ ID NO: 44523 - DNA, 262 bp, Glycine max
ctgaggttgttgttgttgccaaggctgtaaatgatggtcccgcttctgtgcgtgatgctcttgaagccaacgccaaatccatgcaggcgcgtgccacgtcgaagcgtaccaataacaaggcggttaaggaccgtcaagccagcgtcactcctgagcaacacgagcgcaagtctcagttccctgaacgttatgcccagcagaagaagcacttgagccttcctttgttccccaccaccaccattggttccttccctcagaccaa

SEQ ID NO: 44524 - DNA, 255 bp, Glycine max
ggtcagtggcgattcttccggagagactgctttgaggatggcgatgcagactagggagcagcatatcaggaggtacatggccacgagcagcatttgcagtgctcaggcactgcgtgcaaacatggctgccatgtatgctgtgtagcatggacctgaaggcctcaagaacactgcacaccgggtccatggcctcgctggggcatttgctctgggaatacagaaacttggaactgtggacattcaggaccttccctt

SEQ ID NO: 44525 - DNA, 263 bp, Glycine max
caaaaggctgtggaactccagcgctggaaattagaggaagagaggagattggaggaggcaaggctcgccgaagaagctgcattggcagttgcagaaaaggagaaggcaagatcaaaagcagccatggagaatgctgaggttcagcagaggattgcagagttggaatcacagaagagaatcaatgcagaaaagaaagcatttatggaatcagaagaataaagaaaagcagtggatgctttatcaaacaattatgtgaggtatag

SEQ ID NO: 44526 - DNA, 256 bp, Glycine max
attttctaattctagataattttggtgcttgggagtccctaatgattaaatgaaccaagattttaccatgactgcaattttagagagagagagagaaattccaaaaccatgtcgtcccacagtcatctaagtttcgcctttggggttctaggtaacatcgcctccttcgtgtgctttctggcaccactaccgacattttatagagtttgtaagaagaaatcaaccgaagggctccaatcaattccatatgtggctg

SEQ ID NO: 44527 - DNA, 258 bp, Glycine max
cggccgccgtccccaccgatgcgatggcggtgcgtgcgtcaggacgccgacgacatccggatccgtcatgtgtgtgccagatgttgccgatcgtgtgatgagaccaacctgttgaacgccgttcaccacgtcgcgagcttcaaggccaagttcgccatgacctacgccagcaaggaggttcacgatcatcgcttcggcgttttcaagtccatctccgcagagccaggctgcacgccaagctcgacccttccgccgtcc

SEQ ID NO: 44528 - DNA, 253 bp, Glycine max
gcacaattggcaaaggaagtagaataccttcttaggaagggatggattccttgcttggaattcgagttggagcacggtttcgtgtaccgtgagcacaacaggtcaccaggatactacgatggacgctactggaccatgtggaagctgcctatgtttggttgcactgatgcttctcaggtgttgaaggagcttcaagaggctaagactgcataccccaacggcttcatccgtatcatcggattcgacaacgttc

SEQ ID NO: 44529 - DNA, 227 bp, Glycine max
gtattagggagatggctaaggagtgtatcactgtccattgatcacagcatagtctatcatacccgtagatgtagctccttagctaattgggctacaactatgccatgttaggcttcactccatatagtcctttatgacgtgagataaggaaattaactactattcagcttctatctaaccaccggcttgaactgctgactgaactacaagctcatctgagtcagaag

SEQ ID NO: 44530 - DNA, 246 bp, Glycine max
aaaggaagaagcttaactcatacgagcctccttgcattgtcgctctactcttttctcgctgtctgggagctccattcatcacccctattcacttacgaagcaaccggactcgcctcaacaagagaagctgcatcccgtaggcagaaagagaaccgctgctttgacttgactctcccctgtaaccctttgccctcctgcctgcagattgccacaaaagacgtgtgagtacgcccctcatgctttgcg

SEQ ID NO: 44531 - DNA, 263 bp, Glycine max
aggacgctacgaattcggctcgagagctggaggagcaggtggtggattccatgtcaaagctatgtccaatattgatgattgggccaacagttccatcctttcacttggacaaggcagtcccaaatgacacagacaatgttttgaatctctttcaagtagattcatcagccattagttggctgagacaaaagcctgcagggtcagttatttacatatcatttggcagcatggtgtgcttcagctcacagcagatggaggaaata

SEQ ID NO: 44532 - DNA, 248 bp, Glycine max
cttttctttgtcaataccactagatgtctataccttgaactaaatatttctaagattgtgtattgtgatatgaacatttctgcatttgtgcaatatataggactttatgcttggagagacagtaagaagcttacctcattgccatcacatgtttcacctaccttgcatagataagtggctcttcagacatggttctggccaattagcacaaggggctctgaaattgtatatgcgtagtacagaccgcg

SEQ ID NO: 44533 - DNA, 248 bp, Glycine max
gagctcagtacttttctgttggtggcatgttcctgtttgtcttaacatttgctctcggagctggcccagttccaggtctccttctaccagaaatctttcctattcgaataagagccaaagccatggcagtctgtatgtcagtgcattgggatgggaaagctcgtaatatggaatccttctctcatttgattaatggtcttgtacagtaatttttgtaaaaagaaatgtggtggaaaccaaagggaagt

SEQ ID NO: 44534 - DNA, 227 bp, Glycine max
gatggtttggtcagaactcttaaggatctagccaatagtccatattcaccagagtatgatattgctggtatcacagacccatttctgcacatcagattgcttaaacttttgcgagtgttgggtgaaggcaatgctgatgctagcgacaccatgaatgacatacttgcccaggtggctacgaagactgagtcaaataaagttgcagggaatgccattttataagaatg

SEQ ID NO: 44535 - DNA, 238 bp, Glycine max
cacaacttcgttcggcgactcataataagaaagtaagagatatgattgatgatgaagccttgggagccattgccaactttcttggcatcttcatttttgctttggttatagcttatcacctggtcactgcggaccccaaatatgaagccaagtgggatttggacagtttcccaggatggttctattccatgaacccaacccccaaaccaagatcatctgatcctacttatcttcaact

SEQ ID NO: 44536 - DNA, 245 bp, Glycine max
aattattagggaaatagctaggatgctggcaaatgattacaagaagcgtgtgatgattgttgacacctccaatgaaattgggggtgatggcgatataccacatgctggaataggcaatgctcgacgtatgcaagtccctaactctgatatgcaacataaggtattgatagaagcagttgaaaaccacatgccacaagtgattgtaattgatgaaattggtacaaaacttgaagcaatggctgcga

SEQ ID NO: 44537 - DNA, 240 bp, Glycine max
tgcaattacaatataaaatgctattgatgtaacgcaagttatttgtgtctgttgtaacaactctagttaggaatggcgagtgcgttgtcaacactttgcggacaagcatacggtacaaaagaatatgtcatgatgggagtgcatcttcaaagatcatggatagttatgtccataacttcactctttcttcttccggtgttcatcttcacgaggccgattttgatgctcttaggccaagat

SEQ ID NO: 44538 - DNA, 259 bp, Glycine max
tttttcgtctttgctctccaaaaatctgacacacacaggtatctatcatatggggtctcaccaactagaaccatggctattggataatgggaaaccaagggctttgaccaaggagaccaggcatggccgttctgcacacagaatgtcctccacctctttgcgcaagaaatctagccgaactcttgtctcaaaggttccatgtgccactctcagaaactttctttcaaatttgcaagaggttattcttggcaccaagctt

SEQ ID NO: 44539 - DNA, 251 bp, Glycine max
caaggttgctccttctttagctgctggctgcaccatggtcctcaagcccgccgagcaaacacccctctctgctttgtttaatgctcatcttgctaaattggctggaatcccagatggagtgatcaatgtagtgcctggatttggcccaactgctggtgctgcattaagctcacacatcattgttgataaggttagctttactggttcaacacaaacaggccgtgagataatgcaggctgcagctaagagta

SEQ ID NO: 44540 - DNA, 237 bp, Glycine max
cggcgacctttccaatgtaggcctacgcaacgtgctggctcgtccgtctgtgggctccgaaaggatccctgaccttctatactgcgtataccaaggcatgttcgcatgcatcacagtcgccttggcatctggagccgtcagcgagcgaggcagaatgctgccgtgcgttgtgttcatgttcatatggacgactgtcgtctacgatccactcgcgtgctggacttggaacccggcagg

SEQ ID NO: 44541 - DNA, 226 bp, Glycine max
tgtaactttttgattcctaaattctctaaaattcgaaattctaatttcgttaggggaaagagattgtttgtgtgtgagtgagtatggctggaaaaggcgagggtcctgctatcggaatcgatttgggaacgacgtactcttgcgtcggcgtgtggcaacacgatcgtgttgaaatcatagccaacgatcagggtaacagaactaccccatcctacgtggctttcac

SEQ ID NO: 44542 - DNA, 269 bp, Glycine max
ctcgtcttcaatcctttcgttattctcttagtcatccgtctcttcggattattacaaggttgcgaaggtagtggatgacatgctcgttgagcaagagggggtatcgccttgtgccagtgggtctaggtgatgatgatcaatgcattgaggatgactttactgcatggaaagaagaactgtggccagcattggatgaattgcttagagatgaggacgatgcaactgtgtctacaccttatactgctgcagttttggagtaccgggttgtt

SEQ ID NO: 44543 - DNA, 244 bp, Glycine max
cgtgaaattgaaggagtctccgttcactggacaacaagaaaagccatctgcactaatcacttatttgtacattggccacttcttagcaagatggggtgccagaatgtgggaattctctgttggcttatacatgatcaatatttggccagaatcgttgctgtacgcagcaatatatggtgcagttgaatctgccgctattgctgtgtttggtcccataattggaagatgggttgataagttgtct

SEQ ID NO: 44544 - DNA, 242 bp, Glycine max
gcaggagaacaagtagttgataactgagaaggagaagcagatggcgtcctcagtgatctctgccccagctggtaccactgtcaaccgtgccggtgccggcatggttgcgccattcactggcctcaaatccatggctggctgccccagcagaaggaccaagaatgacgttagctccattgctagcagcggtggaagagttcaatgcatgcaggtgtggccaccagttggcagagaagaagttt

SEQ ID NO: 44545 - DNA, 249 bp, Glycine max
ctatacttggtgagtctaaaattaaattcacagatagtgagtctaagcttcaggatttgcttgtgcatgttttggataccttgcaacctgccaaatttcactggcagtgggttgtactcaggttgctcttaatgaacaagccctcgttgaaagactagagaatcgtgatgtgtccttggttgatgctataaagttgtcctcacctagtacagactaggcttctgctgcttctgagaatgagaacaattt

SEQ ID NO: 44546 - DNA, 263 bp, Glycine max
gtgcgtgtgaaaaaggttccaggaaatttgatcatctctgctagatcagatgcccattcctttgatgcttctcaaatgaacatgtcacatttcataaacaacttgtcttttggaaagaaagtgacacctagggccatggtgatgtgaagctcttgataccatacataggcagcagccatgacaggctcaatggccggtcattcaccaatactcatgatttaggtgccaatgttactatagagcattatattcagatagttaaa

SEQ ID NO: 44547 - DNA, 258 bp, Glycine max
aagaagaacaggtacctgagggtctagaaagagcaataatgacaatgaagaaaggagagcaagctctggtaactgtggatgctgaatatttgtgcgactataataattcaaagggaaacacagctaataataaatcctttattatgaagttgagttggttgatttcgttaaggaaaaaccattttggaaaatggatacacaagagaaaatagaagcttgtgagaggaagaagcatgatggaaatctgctgttcaaggt

SEQ ID NO: 44548 - DNA, 257 bp, Glycine max
caagaacaatgggaatagagattctggagcctaacacgtgcattaggggttgctgcaccagtgcctctattccccttcatctccctccctcttcttatacccttctctctcctattgcccgagcaagttagtcatccaggaatagcaacaccgattgcggcccatgcaaaaccgcccaattacatgtttttcttcaagttatttgaatctccaaatctagcacaaaagttacatgtggacgagtggatcccaactct

SEQ ID NO: 44549 - DNA, 254 bp, Glycine max
gccattctcatcctcttctttctctctctaccattgccatggatccctacaagcaccggccatccagcgccttcaattctcccttctggactacaaattctggtgctcctatttggaacaacaactcctctttaaccgttggagctagaggtccaattctgctggaggattatcatcttgtggagaagcttgcaaattttgatagggaacgtatcccagaacgtgttgtccatgccaggggcgctagtgcaaag

SEQ ID NO: 44550 - DNA, 247 bp, Glycine max
ttttccctcactttctcgctccccaaacgcccctctctctcctccaatggccgaccagctcaccgacgaccagatcgccgagttcaaggaggccttcagcctcttcgacaaggacggcgatggctgcattactaccaaggaacttgggactgttatgaggtcattggtcaaaacccaactgaggcagaactgcaggatatgataaacgaggttgatgctgatggcaacggaaccatcgatttcccag

SEQ ID NO: 44551 - DNA, 259 bp, Glycine max
aaagaataggaatccatcgcaacaacaccaacaacatggcagcgcaacgagaggaggacattaaaatgatgttggccgctcaggttcacattggtacacgcaatgctgactccaagatggcggattatatctggcgccgtcgtaacgatggcatccacatcattaacgtgggcaagacgtgggaaaaactcatgctcgctgcccgtgtgatcgtggccgtggagaaccccgaggacgtgattgctatttcggctcgtcc

SEQ ID NO: 44552 - DNA, 254 bp, Glycine max
cggctcgagcgaatttggattagatgtggatcatcacaatgcagttgagccagcagcaagcattttcaacaaaaaagtgaaaatcagaagggcaattgaagctgaaggaatcccttacacttacgtttgctcatatgcctttgctggttacttcttgtctacattgggacaagaaaatgtcacagcccctccccgtgataaggttgtcattctaggaaatggaaacgtcaaaggagtttatgtcacggaggaag

SEQ ID NO: 44553 - DNA, 254 bp, Glycine max
atttatagtaatattactataaatacgacccgctcaattcaacccaatatttatagtaatatttatagtaaaataaatattggcctgaattgagcgggtcgtatttaaataagaatttcttttccttttttcttagtttctatcgaaaaaaaaaagattcgatagaaactaagaaaataaacaaattgattctccgagaaagaggagagagagggattcgaaccctcgatagttctttgttccgaactataccg

SEQ ID NO: 44554 - DNA, 250 bp, Glycine max
cacacaatgtcagcaccatccggtaacccaagcgaagtcaagaacgcctcaaacgttgttgtcccagccaagacagccccagttgcagtcgcccaaaaggattcaaccatcgttggtttcctaaaggatttcgttattggaggtgcctcaggtgccgttgccaagaccatcaccgcaccaattgaacgtgtcaagattatcatccaaactcaagacgccaacccacgtatcatctcaggtgaagtcccaa

SEQ ID NO: 44555 - DNA, 250 bp, Glycine max
accttaacatgtttttttgtgccgagggattttaaacctttgtactttctatgcttaattattattgttatcaactgtgtgacaggttgcaaggattttcctgttcatgttccttttttaccacatagggacccgtttggatgaggtgaaggaagtctttctttttggtttttacaccttgatcatggtgccttctgtgttggcagttttgaacatattttggttctggaagattgcaagtggcatggtt

SEQ ID NO: 44556 - DNA, 247 bp, Glycine max
aaaggtttccagggtaaagagcatttcattaaataagaacaaagaagtgaaattagccaaacgaaagcaaaactatgataatgctgcatctggagggtttgttcctgattatagtcaaggataccaaaaagttgtggatgaagatacaagcaatagatcaagctcagggtcagctgtctctaactcagagagctgtgctcaatttggtgggactgatgctagtgatttgacaggtcctgctcagtca

SEQ ID NO: 44557 - DNA, 234 bp, Glycine max
cggctcgatctctagtcgattcggctcgaggggatcagttgagcactgtttaagagatgctaaactggacaacaggcctgtccatgacgttgtcctggatcgtggttcgatgagaattcccgcggtgcgactgctcctgcgagatctctcgactgggaccgtatctctgccacagcatctatcctgctgtggctgtcgcatatgagcgtgcagtgcaagctgctatccagaggg

SEQ ID NO: 44558 - DNA, 259 bp, Glycine max
cggctcgagcggctcgagctcgagccgaatcggctcgaggcggctataagattaaagattcaacaatggccctctcttatgctactacttctcaagtcatctcctgttcttgacaagtgcgagtgggtcaaaggcagacccttcgccaacctctcgtgagatgtaacccttcctcagcatcagctctcaccatcaaagctgcttcctatgctgacgagctcgtcaaaaccgccaaaacagtggcctcaccggggcgtgg

SEQ ID NO: 44559 - DNA, 251 bp, Glycine max
gcctccacaggtcaacgagctggatggtatctcattgggggagtgggagaacgagaaagagattgatgaggtcgctgcacagtgtggacttcagagggttggtgtcatattcacagatctcctggatgcagacaagggtgacggctcggtcatttgcaagcgtcacgccgactcgtatttcctttcgtctctcgagatcaccttcgcagcaaggtaccaagcaaaatacccaagaccgtccaagtggagcg

SEQ ID NO: 44560 - DNA, 255 bp, Glycine max
gggaaaagcacaacttgttactccacagcttctcaaggaaatgaagatagaagaagaaagaattgaggctgagaaaaaacgggtaaaagaagaggcacagcaacttgctctaatttttgaaactgttgggctttcaaggtgaagcgtaaaggtggtaaaggaaaacaaatttttggaagtgtcactgctcaagatcttgttgacataatcaaggcacaacttcaaagggaggtggacaagagaattgttgatctt

SEQ ID NO: 44561 - DNA, 165 bp, Glycine max
ggccggtcggctctccgaaccctacaagggcattggagattgctttggcagaacaacgaaagacgaggggcttgtttcattgtggagagggaacactgctaacgttatccgttacttcccaacacaggccctgaactttgcatttaagactaatttaagaaagct

SEQ ID NO: 44562 - DNA, 182 bp, Glycine max
tccggctcgagcactcatcttagacgacattgacctacacctcttccatttctcttactttctcagcctatttcgattacccatttggttatttcgccctaatggctcttgctccatccaaagtttccaccttttctggtttttctcccaaacccagtgttgggggtgctcagaaaaaccca

SEQ ID NO: 44563 - DNA, 256 bp, Glycine max
atctcgagcgaatcggctcgaggaggaattgaacctgacaacttgccctacccgtttgtgactcaaggcatgctctctatacgttgctctcaaggaaggagtgcaaattcatgctcatgtttttaaggctggtcttgaggttgatgtctttgtgcaaaatggcttgattagcatgtatggcaagtgtggggcaatagagcatgctggtgttgtgtttgagcaaatggatgaaaagagtgtggcttcgtggagttcc

SEQ ID NO: 44564 - DNA, 254 bp, Glycine max
cttctaacttggtgcattgactcaccatctttgctttgaatcgacatggaagataaactagcaacaacaagtgaaggacaacccataagatgtaaagctgcgatttgtcgcaagccaggttctccattgagtattgaggagatcattgtggcaccaccaatgcctcgtgaagctcggattcgtgttatatgcacttctctttgtcacagcgatgttactttttggaaaatggaggttattaccatcattttctt

SEQ ID NO: 44565 - DNA, 286 bp, Glycine max
tacgcgtactcggcttgcggttcggctcgagtaattctcatttcttcatcgttcgattcttctcctcctaaagatgcagatcttcgtgaaaactttgaccggtaagaccatcacccttgaggtggagtcctccgacaccatcgataacgtgaaagctaagattcaagacaaggaagggatcccacctgaccagcagagacttatctttgcgggtaaacagcttgaggatggtcgaacccttgccgactacaacatccaaaaggaatccactctccagctcgtgctt

SEQ ID NO: 44566 - DNA, 250 bp, Glycine max
ataagaataatatatataaggtacaaatagtaaatcgaggtacccattttatgataaactttccttccatttttgttcctctagtaggcctagtatttccggcaattgcaatggcttctttatttctttatgttcaaaaaaacaagattttttagatacagataacaaagtaaaattctggggttttttattccccaattataatactaaattcaaaaaaaggagagtaatgagtataatctttcgctca

SEQ ID NO: 44567 - DNA, 252 bp, Glycine max
  unsure (1)..(252): unsure at all n locations
gaaaaaaataagagaaaaaccaaaacgcaacgattttttttctccgaaattcttaccaattcgagattaagggggaaaagccatggaagagatgtcgggtttagcaacagcaataaactcttccaacataggatttcagctattgaagaagcatgggtggaaagaagggactggtcttggagtctctgagcagggtaggttagaacctgtggagactcatgtanagaataataaacgaggtttgggagcaga

SEQ ID NO: 44568 - DNA, 274 bp, Glycine max
tagtcaacaacagctgactctctgtactcggctactgtgagcgttttacgctactgtcagctacacttctacattacatagtcatttccagccgttacataggaacatgataagcgtgtggggtaacacgcccttggcgacggtggatcccgagatccatgacctcatcgagaaggagaagcgccgtcaatgccgcggaatcgagctcatcgcctccgagaacttcacctccttcgccgtcatcgaggccctcggcagcgctctcacgaacaaa

SEQ ID NO: 44569 - DNA, 240 bp, Glycine max
caaggatcaaattcctgctgttgacaagttgtattctactaaggttaataagtttgcaaaaattatgaaccttagacaaagtgttgttggtgatcttaaacttcttactgatgggaagttatatgagggtaagcatattcctgtatctaatattagtgcaggggaaaatcatgtagttcaaatacccctaatggcacaggaggaaattctgtcttctagtgcaagtgatttcagaactgc

SEQ ID NO: 44570 - DNA, 239 bp, Glycine max
ccaaaggagaagagttgaaagcaatgcaagtagatacaaccgtgttgggcctttcaaaggatgaggctcagaagaaaccatacattgcttccatgggagtgtacgtcttcaagaaggagatacttcttaatctattaagaaatatgcaccgagaataaattgatcttgttccaaagcttgttttttaagtgctacaaattaatttaatttagatggcgatttccaacggcaaatgattt

SEQ ID NO: 44571 - DNA, 239 bp, Glycine max
tgattataaaaacatgggtttaattagtcgatttattagtgaacaaggaaaaatattatccagacgcgtaaatagattgaccttaaaacaacaacgataaaatacgagcttgttttatagcaattgttattaatcgttgttgttttaaggtcaattgctataaaacaagctcgtattttatctttgttaccttttcttaataatgaaaaacaatttgaaaaaagcgagtcaaccgctag

SEQ ID NO: 44572 - DNA, 242 bp, Glycine max
cttcaagcttctggaagagacaaccgttccgggaatggtggacaagttcggttggtgcacgtgggacgccttttacctgacggtgcaccctgagggcgtcagagagggcgtgaagggcctggttgacggcggttgtcctccgggattcgtcctgatcgacgacggctggcagtgcatcagccacgattccgatccggagaaggaggggatgaatcagacggtggccggggagcaaatgccct

SEQ ID NO: 44573 - DNA, 244 bp, Glycine max
gtcgacctcatctaaagttccgtcgatggttgttcatgtgtccagcacccccgatgaggtcggcctcgccgtcagtcagctcatctttgacctgagcaagcaggctattgccaccaacggtcgatttaccgtggcgctctcgggtggctccttaccgaagatcctgaacaagggcctgcaaaccgttaaaaacgatgtggatttctccaagtggtttgtgtactttgctgacgaacgctgcgtg

SEQ ID NO: 44574 - DNA, 232 bp, Glycine max
agctatccaaacaagcacgccatttgtctcatttgtgttcacttcaatgttgtcaaaagtgaaaattcatttctttgaacatgttggattttgtttgacaggttgcctcaaagaacaatgatgtgcaattggcagattttattgaaagcgagtttttgggtgaacaggtggaagccataaaaaaaatctctgagtacgttgctcagctcagaagagttggtaaaggacatgg

SEQ ID NO: 44575 - DNA, 232 bp, Glycine max
gctctatgtccatttgaagctgttaaagtgagggttcaagcacaaacctgttttgctaagggattgtatgatggctttccaaagttatatgcatcagaaggcacacgaggattctcccgtggactaattccacttttgggtcgaaacattccattttccatggttatgttctcaacatttgagcattccgttgattttttgtatcggaatgtggtcaaaagaaaaaaggagg

SEQ ID NO: 44576 - DNA, 234 bp, Glycine max
cggcaattgcctggcaggcatgaagaacgacgttaccatcatcggcatggaagaagaacccatggagcgtgtcatgggcaaaaaggttggaaagatcttccgtggattgctagagaagaacggcgtcagatttaagatgggagccagcgtggagaaagctacagcttcaaagagcgattcgtcgaaggtcggcgccgtgcatctgaaggatggcaccacacttgaggccgatct

SEQ ID NO: 44577 - DNA, 230 bp, Glycine max
agaaggtggaaccggcattctgacctctgacgaggtcctccgcgcctacgccattgcccgaggtttctccacacaaggtctcggtcaaccagatgagtcccgagccgcacgctacatcctcaaggactacgtcaagggcaagatcctcttctgccatcccccacctaccgatcccccgctggaccccaagcacttcaaccgcgaactctacgacgtaaaccacctccccg

SEQ ID NO: 44578 - DNA, 259 bp, Glycine max
gttctccaaattcaaaacagagaacatgtgactattgcgggagcttcacggctcttctgtactgcagagccgattctgcgaagctttgtttcttctgtgaccgtaaagttcacttcccaaaccagcttttctcgaagcacaagcgcgcgcagctctgtgatgcgtgtggagattcccctgcctcggtgctctgttctgcagaaaactctgttctgtgccaaaactgtgattgcggaaagcaaaaacatttggcgtctga

SEQ ID NO: 44579 - DNA, 254 bp, Glycine max
attaatttcaggaaattccagcaagatagatgacgactttgaaagtgaagtaatgcttataagtaatgttcatcatagaaatctggttcagcttcttggttgttgcagtaaaggccaagatagaatccttgtctatgaatacatggcaaacaacagcctcgacaaatttttatttggtaacagaagatgttcccttaactggaaacaacgctatgatataattttgggcactgcaaggggattgacttatctac

SEQ ID NO: 44580 - DNA, 254 bp, Glycine max
gcactaaacctttaactggatactcatttggtcgggatgggaatataatggatgaaggtactgcttactatattacactctcagagctgaaagaagctactaataatttttcaaagaatattggcaagggaagctttggatctgtttactatgggaaaatgaaagacggaaaagaggtggcagttaagactatgactgatccatccagctatgggaaccagcaatttgtaaatgaggtagccctcttatcaaga

SEQ ID NO: 44581 - DNA, 240 bp, Glycine max
cagatgtcaagtccatggttcataccttttgcatatgtcatacttggcgattcctcctactgcctgttggagtttttgtggtcaggaggcacaatccagggttggtggaatgacacacggatgtggctttataagagaataagctcttacctccctgctttttttgatatcatcttgaagtttttcgggttttcagaatcagcctttgttatatctgcaaaggtagcagaagaaaatgtt

SEQ ID NO: 44582 - DNA, 253 bp, Glycine max
ctggcacgcggcgagttgcggtgcatcggtgcgacgacgctagacgagtatcgcgagcacgtggagaaggacaaggcctttgagcgtcggttccaacaggtgttggtgaacgagccgtccgtcccggacacggtgagcattctgcggggtgtgaaagagcgatatgaggcgcatcacggagtgcagatcatggattcggcgctagtcgctgctgccaagcttgcagaccgctacatcaaggggaggttcatgc

SEQ ID NO: 44583 - DNA, 248 bp, Glycine max
cgggattcgaggtcaagaatcacgtggggcccggtgtggttctgtcctacgttatctctggaatctctgccatgctctctgtcttttgctacactgaatttgccgtggagattcccgtcgctggtggttcatttgcttacttgagagtggagcttggtgatttcgtagcattcatagcttcaggcaacattcttctcgaatacgtgattggtggtgcagcagtggcacgctcatggacatcctacttc

SEQ ID NO: 44584 - DNA, 257 bp, Glycine max
ccttcgctcgctcgccctgatgcggttcattggcgctttactggcactcgtagccttcattatcgcttcccacagcacgcaagctgaatctgtggccctaaatgaggctacctttgatcaccagacaagcaacgatgtgtggtttgtcaagttctacgcgccgtggtgcagtcactgcaagaagctggcgcccataatcgacgagctgtaacggccaagagtctgttggacacggacgtacacgtagctactgtgga

SEQ ID NO: 44585 - DNA, 252 bp, Glycine max
ggaagagtatgagaatatggacgatgtcggcacacttcaaacttgtggacatatctaccatgtgagctgcattattccatggctaacgatgaagagcttctgtcctatctgaaaagtatctgctttacctgaaagtacgaaggcatcatgcacttctggaatataaattactcccattatgtgtatagatttggacatccccaaaaatgacgacacgagcctgtatttggaaacgtaatcacaagcatgcta

SEQ ID NO: 44586 - DNA, 256 bp, Glycine max
cagaacttgaagaagcttacggaggtcttcggtgtagagtgggccaacgatgctatcgttcccaaggtcatggctatggcccagcaccccaactacctctaccgaatgactacatgcttcgccgtctcaacactggcgcctgcactgagtctggatgtcattgaacagtccatcatccccatgatggacaagctggtcaatgacgattccccaacatcagattcaacgtggcgaagtcatatggtcagctcatcaa

SEQ ID NO: 44587 - DNA, 216 bp, Glycine max
gcatagcttcacagtagaacgatactatagctagctacactctttcaaatcacgctcccgatatcgctgctcgtcgtcattcaactcgtgtagcgcgaacctttcgatatcatgctccagtgtatgcaatctctgtgcagtagactcaaaatcgtgatgtctatagatgatgctgccggcatctcgagcatctatcgggaggaaacctattgacca

SEQ ID NO: 44588 - DNA, 257 bp, Glycine max
atcatcatttggtgcagatcaatttgatgatgctgatgaagctgagaaggagcacaagagctcttttttcaattggttctacttgttaataaatatttggtgctcttattgctgcttctgtgttggtgtgggtacaaaccaatgtcagttggggatggggatttggaattccagcagtggccatggcaattgctgtggtgagtttcttctcgggtacgaggttgtatcggaatcagaagccaggaggtagccccctc

SEQ ID NO: 44589 - DNA, 247 bp, Glycine max
gttgactaccgcaaaatggcatcgggtgagcaaggattctatttggttggcactgatttatctggctttcttaagcagaagtttcaacagttgattggagaaggaacagctaccccccaagaagtagaagtagtaatgggaaggacactgcatgttccattgggagctaacggatgtgcctattttccttttgaggaactttgtgagagacctgttggggctgcagactattttgggctattcagga

SEQ ID NO: 44590 - DNA, 238 bp, Glycine max
ggaagatgccttttgttaaggtattgaaaaataaggcgtactttaaacgctaccaggtcaagtaccgtcgtcgtcgtgagggcaagacggactaccgagctcggaaacgtctgattacgcaggataagaacaagtacaactcgcccaaatatcgtttagtggttcgcattaccaatacaaaggtgatttgtcaaattgcgtacgctgaaattgatggggacaagattttggcgcaacg

SEQ ID NO: 44591 - DNA, 247 bp, Glycine max
cttagccttccctacaactccaaacattaagacatcttcatccatggctgcctccgtctccactgtcggagctgtcaacagagctcttttgaacctgaatggttctggagctggagcttcagctcccagttcagcttctatgggaccagcttgaagaaggctattgcctcaaggagtcccatcagcaaggcttccggtggaagcttcaagattgttgctgtagaagacgtgatagagattgatgaga

SEQ ID NO: 44592 - DNA, 251 bp, Glycine max
gaagttaaaagccttagccttccctacaactccacacatcgagacatcttcatccatggctgcctccgtctccactgtcggagctgtcaacagatctcttttgaacctgaatgtttctggagctggagcttagctcccagttcagccttctttgggaccagcttgaagaaggttattgcctcaagggtccccaacagcaaggtttccggtggaagcttcaagattgttgctgtagaagagaagaaagagat

SEQ ID NO: 44593 - DNA, 249 bp, Glycine max
cagaaactgcatcaatgctgtcatcagctacttgtaattcattggtggctctggatgagcttgggcgagggactgcaacttctgatgggcaagccattgcggaatcagtattagaacatcttgtgcggaggtgcagtgtcgcggattgttttctacccactatcatcgattagctgttgattatctcaaagatccgaaggtctgtctctgccacatggcatgccaagttggtagtggaattgcaggttt

SEQ ID NO: 44594 - DNA, 244 bp, Glycine max
atcggtctatggatcaacgggtacctcagcgaatgggtcgggtacaagaaaactatgtacattgccttgatcgcctcggttctgatcaacttcattcactttttcgcccagagcatcggtatgattgttgctggttccgtcttctaggtcttccctggggtatcttccagacgctcaccgtggcgtacgctagcgatattacccccagcacaattaggccatacttgactacatacatcaatct

SEQ ID NO: 44595 - DNA, 236 bp, Glycine max
gccaattgctgctgctagtctcggtcaggttcatcgtgctattctgcataatggagcaaaagtagtcatcaaagttcaaaggcctggtctgaagaagctgttcgacattggtttgaaaaacttaaagttgattgcgagtattttcagagaagtgaaacttttggtggtccacttagagattggattggaatatatgaagaatgtgaaactattttgtatcaagagattgattatat

SEQ ID NO: 44596 - DNA, 237 bp, Glycine max
ataagatgtaccagacatataaaggtctcaagcgcttcagcaagccaaaactttcccgaacaaatttcacgattaaccattatgctggagatgttacatatcaagcagattattttcttgataaaaacaaagatttgttgtagcagagcatcaagctcttttatgcgcttccaagtgtccatttgttgctaatgtcttccctcctttaccagaggagacatcaaagcaatcaaaatt

SEQ ID NO: 44597 - DNA, 253 bp, Glycine max
gttcctttaattctaggtatttggggaggaaaagggcaagggaaatcatttcaaacagaacttatatttcaggctatgggaattgaacctgtaattatgtctgctggggaactagaatcagagagagctgggagccaggaaaattgattcgtgaacgctatagaacagcatctcaagtggtccagaatcaaggaaaaatgagctgtttgatgatcaatgatattgatgctggccttggtagatttgggaatac

SEQ ID NO: 44598 - DNA, 248 bp, Glycine max
aacgtcccaccgattgaacatctcactcgacaaccactaaataacccggcaatacaacaaccatggtccggatcccccaattcctcaccgcggcactcgacatcaccggcgcctccgccgcgtccgagtcaaagacctcctcccctccaacttcgacgacatcgtcctcaactccggcaagcctcagctcgtcgagttcttcgcgccctggtgcggccactgcaagaccctcgcgcccatctacgagg

SEQ ID NO: 44599 - DNA, 254 bp, Glycine max
tgaatctcagaattctctaaaagagatctttttctgctctttgaagaaagaagggtctttgcttgattttggagatgtctctgctctcagatctcatcaaccttaacctctccgataccaccgagaaggtgatcgcagagtacatatggatcggtggatcaggaatggacctgaggagcaaagcaaggactctcccaggaccagttagcgacccttcagagcttcccaagtggaactatgatggttccagcaca

SEQ ID NO: 44600 - DNA, 257 bp, Glycine max
gcgtactttggtgaccttggggtggactcggtgaagatgctagagtactttgcctcgatccctggcacggaagagattcgttcacagtacaacccagctacgtacatgctggaggtgatcggcgctggcatcggtcgcgatgtgaaggactactcggcggagtacaaaagcagcgacttgtgccagaagaatcgtgagcgtacgttggagctctgcaaagtgtcggaggagttcatacgccacctcaacgctaaact

SEQ ID NO: 44601 - DNA, 257 bp, Glycine max
tctggggaaatcctgtgtcccttaagagtccagccgcaaaccctcccctcacactctccaaaccctagcggcactacacacgttatctgtctctctctctctctctctccctctctccttccccaatatgtcgagcgccgatcccgagcaccgagaagaggaggaggcacccgccgtcggcgacgacgaggacaccggagcacacgtcgctcccatcgtcaagctcgaggaggttgctgtcaccaccggcgaggagg

SEQ ID NO: 44602 - DNA, 243 bp, Glycine max
gcgattttcgtttttccaaattccaacagcgagagcaaagtccgttctgttctgcagagcagagaatatgtggcaccagaacttaggtgtggattccacgggaactgtgagagagactgtcttcagtgcgagtatatttgtgcttgttgctctagttctctccgtgtatttggtattcgagcatttagctgcctataatcaaccttaggatcagaagtttttgattggtctcattttaatggt

SEQ ID NO: 44603 - DNA, 248 bp, Glycine max
ggtggcccaaaagctggcagacttagggcattggccaatgagccaaagctattcaatggcttaaagttttatttttctggggattatgtgtcaacttataaggaagatctcgaagaattaattgaagtgggaggaggtactgttttgagaagcaaggaagaattggaatcacaaagacatgaatgcaaaggagattcttcacagttgctgattgtttacaaccttgatcctcctcaaggatgcaaatt

SEQ ID NO: 44604 - DNA, 249 bp, Glycine max
ttcaaatgctgtgcccatgaatatgaaaagttttgctgcagtagcaaaacttttcaaatgctgtgcccatgaatatgaaactcaccaagaaatggcagctgctgctttggcatataaatgcatggaggtggcacacatgagagtggtttactgtaaaaattctagtacgaacagagatcgacatgagttgcaatcaactcttcaactggtttttcaaggcgagtctccttcatcttctgcatccgatgt

SEQ ID NO: 44605 - DNA, 247 bp, Glycine max
cgccagcacggtctgacccaaacggacgtgattgcgctctctggggcccacaccgttgggttctcgcactgcgatcagttcgctaaccgtttatattccttttcatcctccaacccggtggaccccactctggaccccacctatgcccaggatctaatggcggggtgccctaggaaccccgacccagccgtagtgcttcccctggacccgcaatcccctgcggcgttcgacaacgcgtattaccaaa

SEQ ID NO: 44606 - DNA, 241 bp, Glycine max
gttatattgacctcagtttcaacaagttgcaaggagatctcccaattccacccaatggaattcactactttttagtctcaaataatgagctgaccgggaacattccttcagcaatgtgcaatgcaagctccctcaaaatactcaacttggctcataacaacttgacaggccccattccttcagcaatgtgcaatgcaagctccctctatatactcaacttggctcaaaacaacttgacagg

SEQ ID NO: 44607 - DNA, 238 bp, Glycine max
aaaaaactcaatcaccatgggtaaagaaaagggacacgttaacgtcgtcgttatcggccacgtcgattccggcaagtgcaccactactggacacctgatctacaagtgcggtggtatcgacaagcgaaccatcgagaagttcgagaaggaagctgccgaactcggcaagtcatccttcaagtacgcatgggttcttgacaagctcaaggccgagcgagagcgcggtatcaccatcgat

SEQ ID NO: 44608 - DNA, 253 bp, Glycine max
gaaagatataacaaatcagtggcacgggaagctactattaagtatcttgagttggccaagaagcatgggctaactcctgttcaacttgcacttggatttgcaagagatcgtccattcatgacaagttcaataattggtgcaacctctgtggaccagctaaaagaagatattgatgctttcacaacaactgagagacctttaccagcagaagtcatggcagatattgaagctatcttcaagagatacaaagatc

SEQ ID NO: 44609 - DNA, 243 bp, Glycine max
gttttgaacccaaaaagcggagaagcttctcttctcttctctctttctttcaaaccgccatctccttctccttctccttctccttcttcagctgttgaaaataaaaaatggcagacggtgaggatattcaaccactcgtctgtgataatgggacaggaatggttaaagctggatttgctggggatgatgctccaagggctgtgtttcccagcattgttggtcgtccccgtcacacgggagtga

SEQ ID NO: 44610 - DNA, 242 bp, Glycine max
tgagatttgggcagctcgttacatcttggagaggatcactgagattgctggtgtggtggtttcctttgaccccaagccaattaagggtgattggatggagagaaaggttctgatattgtgctctgttgtggccttcttggggctgttggctatgaaatgatcttagaggaataagcgacaaggattaaggtttctcaggttcattttgttacaccaaaccagtgcacgtatcctcgtagtcc

SEQ ID NO: 44611 - DNA, 244 bp, Glycine max
aagagattgaagagacccagcagaccgacaaggacagatggaagggtcttgcctatgatatctcagacgaccaacaggacatcacaagaggaaagggtttggttgactcccttttccaagctccacaggatgctggaactcactatgctgtcatgagctcctacgagtaccttagcactggacttcgccagtacttggacaacaacatggatggattttacattgctccagcttttatggacaa

SEQ ID NO: 44612 - DNA, 236 bp, Glycine max
caaaccgtgacgtccctgccgcgggccgggccgcgagctacggcggatccgacatagtgtggaccccatacgggcccgagtggccgatgctgcggaaggtgtgcgtggctaagatgctgagccacgccacgctggatacggtgtacgatctgcgccgcgaggaggtgcgcaaaacggtgtcgtatttgcacgaccgagtggggagtgcggtgaatataggggaacaggtttttctg

SEQ ID NO: 44613 - DNA, 260 bp, Glycine max
aaaccaactccctccaaactttaaacagtgtccgtgcgtctctctttattttctctgagaaaattcagcaagaaaaatttgcaaatgtcgaatttcctgagcaacactaatccgaaccctaacaagtcctttgaggtgaatcagcctcccactgattccgtgtccagtctcagcttcagtcccaaagccaacttcctcgtcgccacttcttgggacaatcaggttcgttgttgggaggtagcacagaatggagttaatgt

SEQ ID NO: 44614 - DNA, 254 bp, Glycine max
aaataactcaaacaggagcagccatggataccgcaaatgcagctcctttgcacatagcaatatttccatggtttgctactgggccatctggtccccatctcttcacctctccaacaagcttgcacagagaggccacagaatctccttcataggccccaaaaaaacacaaaccaaactacaacacctcaatcttcaccctcatctaatcacctttgttcccatcaaagttcctcatgtcaatggtcttcctcacg

SEQ ID NO: 44615 - DNA, 249 bp, Glycine max
ggattgcctcctcgctccaactacttattcttaggcgattatgtcgaccgtggaaagcaaagccttgagacaatatgtcttcttttggcatacaagataaagtaccctgagaacttcttcctccttagaggcaatcatgaatgtgcttccataaaccgcgtctacggcttctacgacgaatgtaaacggcgattcaacgtcaggctatggaaaatatttgcagattgcttcaactgcatgcctgtggca

SEQ ID NO: 44616 - DNA, 250 bp, Glycine max
gtgactgtgtctcccgatggatcaatttgtgcttcgggtggtaaggacggtactgccaacctttgggacctaaacgatggcaagcgtctctatgcactcgtggctgatgatgtcattcacgcgctcgtgttctcacccaatcgctactggctatgtgctgccacgatcatcgggcattaagatctgggaccttgagtcgaagattatggtgcacgacctgcagccggacattgaagagcctaagggtcag

SEQ ID NO: 44617 - DNA, 258 bp, Glycine max
ctcttgagcacccgtgccggaggtcttggtttgaacttacaaacagcagatactgttataatctttgacagcgattggaacccacaaatggatcaacatgccgaggatcgagcacatcgcattggacaaaaaaaggaagttagagtttgtgtgttagttagtgtgggatctattgcagaggtgattttagagcgtgctaaacaaaagatgggcattgattccaaagtcattcaggcagggctctttaacacaacttct

SEQ ID NO: 44618 - DNA, 262 bp, Glycine max
tgaatatggcattttgctcatggagaacggttaatcccatcttttcttgttaccctttgcgttaaagtttctaaattttaccctttcatggcagtgggaagatcgcatgcagagaggactttgtcgctatgatgttaccgcctgtgaaaccaaggtctgttttcttttgtttttgtcttcctatgcatagatatatggattgtatgactcctgagtttgatgtgttttgtggtgattttgtcgtaggtgatcctggtgaata

SEQ ID NO: 44619 - DNA, 268 bp, Glycine max
cgttacttcactcaaacaagatagtccatcgaaacattcaaccagagaacatcctgttgaggaaattgaaggatggatctatgcaagtgtctctcgcagattttgggaattcatcaaaagatgcgcctgatctaattcctattgcgaagaatcctcagtacactgcacccgaagttttcctgagagcaaatccgaaagaaccgtacgatggctacaaagccgatgtgtggagcatgggatgcatcctcacacaaatgctcactgggat

SEQ ID NO: 44620 - DNA, 252 bp, Glycine max
gctcctttgaaagatttttttttctatggaaaaaggaaagactgtgagtaaatatgtacaagatggaactgtagatctcaaaggaaaacctgttctcaaatctaaaagaggtggttggaaagcatctctttgcttcttgtgtatgaggtattcgaaagaatgacttattatgggatatcatcaaacttggtcctgtatctaacaaggaagcttcaccaaggcactgtcactgcttccaacaatgtaaacaat

SEQ ID NO: 44621 - DNA, 248 bp, Glycine max
aaaatatattcaattttgcgtttctctgcctaaaaggtagacttcttctctgcttcttccgattgaaagatgggtcaagcattcggttgctaccaagtcgatcagtcaaatgtggctatcaagggcattttggaaaatttgatgatgtcctagagcctggatgtcactgcctgccttggtgtcttgggtaccagattgctggtagtctgtcgctgcgagtgcagcaacttgatgtacgatgtgagacg

SEQ ID NO: 44622 - DNA, 253 bp, Glycine max
ataaaatcccactccaccctatcatagtattataaaatgtcaaactttagagccacaatccctttcctccctttcttcttttgtttcatatgatgaaaacattcaaaagctatgatagtattatctatattaacttatccgacactgaagtactttgagattcaccaatcaaagagggcacaacagttttcatcctatttgcaaaagcctctgtaatgaccttgaaaattacattacaaaggcttatggccta

SEQ ID NO: 44623 - DNA, 232 bp, Glycine max
cgagaagcacgacaaagacgcaaactttgcagtgtacagagacaagaacttcaccaactatggaacgggtcgacccggtgggctcgactcgttcaaaaactactccgagggagagaatattccagtgaacgatttccggcgatacagccgtgactccgccggccacaaggacgggtttttaagctgcggcacgagcggcaacgtcgtgcagcagagcttccacacctacgcc

SEQ ID NO: 44624 - DNA, 244 bp, Glycine max
gcttgggcatgtcatatgtatctaatgcagctgtgcagtggaattgatgaaaatgcaattggagcgtgtgcacagcttgtgtttgcacctattgatgaatcatttgcagatgatgctctcttactgccttctggtttccgtatcataccattggatcctaaaacagatggcttggtttcatctaggatctgggtcttatcatcaacactggacacaggatctggtaatgcctgctcagctggtg

SEQ ID NO: 44625 - DNA, 213 bp, Glycine max
ctagaacataacaagagttcaattctctccttcctctacctattcatgtcacaacaacaacaacaacaacaaatccttctctctgagaaagaaccagtgagtctctgaaaaccctagagtgtgagtgcgagagagaaatgtctgaaaccttctgcagcgactgcaagaggcagacggaggtggtgttcgaccactctgcgggggacacggtgt

SEQ ID NO: 44626 - DNA, 243 bp, Glycine max
gtagtaagagccttatttgaacatctatcgtatccaaaaacacaagtttggaaaaacgttaattgtgggaaacaaaggaacagaacaatgagcgggaagccagtgagacctcgtacccgtgtgggaaagtacgagctgggaaaaaccattggtgagggaagctttgctaaggtcaagtttgctaagaacgttgagaatggtaaccatgttgccatcaaaatccttgatcgtaaccacgtcctc

SEQ ID NO: 44627 - DNA, 283 bp, Glycine max
gttcaattactccttcaaatcaggtttgtgcgctctctatctctcttggttagttggaaaattttgttgtgcatgctttttggtgatgtatggaacctgaaagagagttcaagacttattagtggaagagtttctttctattgaggaaaggtatttattgctctctacttaggtaacataagccaacaattttagtagtaattaatggctggagaattgggagttttgaatgcacttgatgtggcaaagacacaatggtaccacttcactgctattgtgatcg

SEQ ID NO: 44628 - DNA, 278 bp, Glycine max
caccagtgtacaagccaccagtatacaaaccacccgtttataagccaccagtttacaagccaccagtgtacaagccaccagttgagaagccaccagttgaggaaggaaacggcggtgatacgcgaaccgcctcacgcgccgtccaagacctgccggcgtcgctggacgtcggtgcgtcggtggcgcaggagtcgcttgagtccgtcggccaagccatcgatgacatggcagcaccgtttggaatcgacagcgagatactctcacggtaggatctctct

SEQ ID NO: 44629 - DNA, 265 bp, Glycine max
ccctccttagccgttaagttagatgacgacaagagaatccattcgctacgttcctctctcgattctcttgtctccaccaaacaaatccctccctccttagccgttaagttagatgaagatttgcagagagcgagatgcatcatcgttgacggtgacgcctcttcgctcctccctggccatgcacaaggacggatgttcaactcaaggtcaaagaggaatacaacagttacagggatagaactgccctgctattcctgctttttcc

SEQ ID NO: 44630 - DNA, 270 bp, Glycine max
atcagaaccatccctgatgttattggggtggtcattcaggcaaaagtcgcgtttgctcggattgtcaaattcctggaggcacctgaacttcagagtgtaaatatcacacaaaggtgtctcaatcagaataagaggggttcaattttaatcaagtctgctgacttttcatgggaagataatgtatcaaagccaacactgagacacatcaatttggaggttagaccagggcaaaaggtggctatctgtggagaggttggctcaggcaaatca

SEQ ID NO: 44631 - DNA, 261 bp, Glycine max
cgtcgaccaaactcacgtcgtagaagtccaacccgtcggcaccgttgagagtgaattccgccaatgtcgccggacgtttggccccgccaacgcactgtactttgccggacccgcagtcggcggtggcgcaagagaattttccgtcagagtcttggccgcagagggtccgtgcccatatccgacccgaccaagacttcgggatttttacaatccttgatttgccgctctcgagggtgaatccagtggtgggaagcggcggtg

SEQ ID NO: 44632 - DNA, 258 bp, Glycine max
tttcctttgtttctatggcttctgcagaagtagagttccgatgctttgttggtgggcttgcttgggccaccgaccacgatgctctcgagaaagccttctctcaatttggcgaaatcgtcgaatcgaaggtccgttagtcgagggattggatcggatttggattctctcatcccttctgatctgttttgcgttacttgatctatgatacttgtcttgcttgatctataatgattcttttattactcacaccaatcggta

SEQ ID NO: 44633 - DNA, 263 bp, Glycine max
gactgagcgaatcggctcgagagagaaggttgatgagattcgtgcgcttcttgggaaagtacgagggtgatccattgagaatagttggtgtaggagctggtgcttggggtagtgtgtttattgctatgctgcaggaggcttatggtagtttaagagaaaaagttctgataaggatatggagaaggccgggaagaatggttgacagggccacggctgagcacttgttcgaggtgatcaattcaagggaggatgtactgaggaga

SEQ ID NO: 44634 - DNA, 280 bp, Glycine max
aacctctcaagtccaacctacccctttttcttctcccaccaacttcaccgtcttcttcctcgatcatgtctcacttcaagggcaagtaccatgatgagcttattgtcaatgctgcttacattggcactcctggaaagggtattcttgctgctgatgagtcaacagggacaattggcaagcgtttggccagcatcagtgtagagaatgttgaatccaacaggcgtgctcttagggagctgcttttcaccgctcccggtgctcttaaatatctcagtggtgt

SEQ ID NO: 44635 - DNA, 279 bp, Glycine max
gctgaccacaaatatgagctgctgtgggtaatacttattggactggtgtttgcgcttataattcaatcattggctgcgaatctcggcgtaaccactggcaaacacctttcagaattatgtaaagctgaatacccattattggtcaagtactgcttatggttattagctgagctggctgtcatagctgcagacatacctgaagtgattggcacggcatttgctttgaacatactcttccacatccctgtatgggcaggagttctaataactggctgcagc

SEQ ID NO: 44636 - DNA, 277 bp, Glycine max
attttggagaattggcaaaaacagggagagctcagctgacctgacaaaaataacagcagcatacatggctcctataatcattgtcaggtcagctgctgttatttttgttggaattaacaattgccaaactgttcaaccaattgtagccgttgaaagaacagtgttctatcgagaaagagctgccggaatgtatgctcctttgccttatgccttagcacaggtcttttgtgaagtaccatatgtgtttttccaaactgtttattactcactcatagtg

SEQ ID NO: 44637 - DNA, 281 bp, Glycine max
caaagtacgatgggattgtttgtgttcatggagatgggatcttggtcgagtaggttgtaaatggactgcttcagaggcaggactgggacactgcaattaagatgccccttggagtagttcctgcaggtacgggaaatggcatggcaaagtctcttcttgattcagttggtgatccttgtacagtacccaatgctgttcttgccatcatacgaggccgtaagcgaaaacttgatgtggccaccatcacacaaggggagaccagatttttcaggtgttgatgc

SEQ ID NO: 44638 - DNA, 259 bp, Glycine max
cgaccgagggttctggatcaatttgaccttaaagcttgggtctatggctcacaagattttgatgttgctgctcttacaaaagcgattcttaaggcacttcggtccttagcagcagaagaaaaagacttgaatctgctccaacttgaattgaagcaaagactgatgggacagaactttttgcttgtcgtagatgatgtttggcacgaacactattggagttgggaggcactataaattcccttcatttatggatcttcag

SEQ ID NO: 44639 - DNA, 286 bp, Glycine max
gccaacggactctccggtggatggggaaccttggaggaggggctacccagctcatcatgccccttgtgttctccctcatccgcgacattggcgctaccaaattcaccgcttggaggattgcattctttgtccctgccatgttccaaatgctcacagcattctcaattctgatatttggtcaggacatgcctgatgggaacttccgccgcttgaagaagtcaggggaaaaagccaaagatgatttttcaagagtcttatatcacggtgttacaaacataggggatgg

SEQ ID NO: 44640 - DNA, 279 bp, Glycine max
ctgctttttcccacactctgctatggcttcagagtcgccgcgcaccctcacttggcttcgactcgctctctcaatcgctgattccactcgttatctcgtcctcgataagttcagatggccatggaggttactcaaatccttttacacgcgcaagcagtcgatggcacattcatgcaacaagccgaagaaagcttgaaaccatttcaggaacagaatcttccaagtttcttgttttctcttactggggcaatcagcaatgacgacaagcctgagagaatc

SEQ ID NO: 44641 - DNA, 162 bp, Glycine max
cgtttcttcctcttactcagtagtgcgattttcgattcgcttctctgcaactatgcctaagcctaaggacttcttcgacatgaccatcgcgggtcaacctgccggccgcatcgtgatcgagctctatgtcgacgtgactcccatcaccgctgagaacttccg

SEQ ID NO: 44642 - DNA, 262 bp, Glycine max
ccataacgaggatgtttttcagccgcagaaaggtaatgttatattcgcatgcactttagatggttggcgatttgggattcgtgagttcgcggagatttatgcttctaagcttggggcgagtgtgaatgccttgctgagggcgttgtggggacagacgtattataaccctaagacgagagatgattgttgggaagaaaggggttggggggaataagaagcctatgtttgttcagtttgtgttggagcccttgtggcaggtgta

SEQ ID NO: 44643 - DNA, 276 bp, Glycine max
caagagcgaccttcttcggtgctcgcaaagtataagtcctcatgggtaaggccaagactcacatcaacactgacgtcattggacatgctcgactctggtgaagtcgactatcactggtcatttgatctacaagctttgaggtattgacaagcgtgtgattgagaggttcgagaatgaggctgctgagatgaacgagagcgtcattcaagtatgcctgggctgctgacaagctcgaggctgagcgcgacacaggaattaccattgatattgctttgt

SEQ ID NO: 44644 - DNA, 277 bp, Glycine max
attttccaccattctgagtaacttcacacaccatataacagaaaatgaggtggggcttgtggaaacttgggcaatcaatccctcgccgtcttgctcacggtaataataaagctgttgcttgtcgatattttgcctcagatgctgagctgaaaaagacagtcctttatgacttccatgttgctaatggagggaagatggtgccatttgctggatggagcatgccaatccaatacaaggactcaattatggactcaacccttaactgtagggagaatgg

SEQ ID NO: 44645 - DNA, 271 bp, Glycine max
cgaaagtcgcggctttgaactcttctacgacgacggcaccggttccggcctccgacccctgccaccaagcatgtcagagtttcttctcggatctggcttcgataggcctttggaacaactctctcagattgagatcaacggtattggaaggtacgagcaccctcctgcttcaaaagcagccattgattcattaccaaccatcgaaatcgatgacacccatttagccatggaatcacactgcgcggtctgcaaggaagcttttgaaacaagc

SEQ ID NO: 44646 - DNA, 272 bp, Glycine max
cccacacacacggctcgtgcgagaaccaggtccgtagttcttagggtgagaatcctcatggattgatcaggaaatatgggcttatgtgttgcaggcagtgcttccgaagcaatgccaaggaaattggcttcatcaagtatcggtgaaagattagttttccacctgccccacccggtttggattcttgcatcaggctatgatgacgtggggatgattttactgtgtgaagaacttaaaattttttgtgacatttagcaaagttaattatcaaa

SEQ ID NO: 44647 - DNA, 272 bp, Glycine max
ggagaaattaggtgacagaattaccgcccttcatcaactcgtttccccattcggaaagactgacacggcttctgtcttattagaagctattggctatatcagattccttcagagtcaaattgaggcccttagcttaccatacttgggcagtggatcaggatacatgagacagcaacaatccgtaagacataataccaacccaccatttctggttcaaggagagaacaattgtatattccctgaagacacctgtcagttgctgaatgaaaact

SEQ ID NO: 44648 - DNA, 278 bp, Glycine max
ctgcactttcaaattgctgagaggaacatactggaggagatgatcaaaatcgtaaggcagaaggcagatatgcaagtcagggataaaattttgatactcctggactcttggcaagacgcatttgggggaccaggtggtaaacatcctcagtactattgggcatatgaggagttaaagcgatctggagtagttttcccaaagcgttcaccagatgcagctccaatatttactcctcctcctacccatccaaatttaagaaatatgcaagctggatatgg

SEQ ID NO: 44649 - DNA, 267 bp, Glycine max
gttcttcagagcatcttcatcaatcaagatatccacatgtattatgaagaaactgacaaaccagctctagcccgtacttcaaacttgaatgaggaacttggccaagttgacacaatactttctgataaaactggaactctgaccatgaactcaatggagttcatcaaatgttctgttgctggggtagcatatggccgcggtgtgacagaagttgagcaagccatgggtaaaagtaatggtttacctatttttcatgagcatattaat

SEQ ID NO: 44650 - DNA, 257 bp, Glycine max
ctcagaattctctaaaagagatctttttctgctctttgaagaaagaagggtctttgcttgattttggagatgtctctgctctcagatctcatcaaccttaacctctccgataccaccgagaaggtgatcgcagagtacatatggatcggtggatcaggaatggacctgaggagcaaagcaaggactctcccaggaccagttagcgacccttcagagcttcccaagtggaactatgatggttccagcacaggtcaagc

SEQ ID NO: 44651 - DNA, 284 bp, Glycine max
cattactactgaaacttaatctcaaagaaagaagctgctgagatgaataagaggtctttcaagtatgcctgggtgcttgacaagctcaaggctgagcgtgaaagaggaatcaccattgatattgctctgtggaagtttgagaccacaaagtactactgcacagtcattgatgcccctggacatagggatttcatcaagaacatgatcactggaacatctcaagctgactgtgctgttcttattattgattccaccactggtggttttgaagctggtatttccaa

SEQ ID NO: 44652 - DNA, 284 bp, Glycine max
cagtgaacagctttaggattctggaggaggagggcatgcatatgccgaccaacacgaggatgaaagcttcaaatttgctgatgcaactgatctcatgtggctcaatatcagtgaaaaaccatagttttggccttattccttcctataagcccaggttttccagttcaaaatttccttccccgctgttctcaacttcttttgtgttgggggagtttgattgcttagccgagaatccaaagctgatgagtctcagattggaagacaaagaatattttagtggaagc

SEQ ID NO: 44653 - DNA, 277 bp, Glycine max
caacaaaacacacttacataaaaaatcatccttatctatgccacttccacttggacttccacctcacccactttctctgcgccatggaaacagtacgttgtctggcatgtgtacttgttcaaggtgacatatgacctaaacaatattagaacttaatctgatcacaaggcagtttttttgagctgatctggatgggaaccggtgaagaaagcacagctaaagttcctaaaccatcttctacttcttcaattcagataccactggcaccttcatatcc

SEQ ID NO: 44654 - DNA, 299 bp, Glycine max
ctcttatatcttaaaaaatacgtaattattattaggagccaggcgtacacttgaagtatgaataaaaagacacaccaaagataccattgttaaaagtttgggcagccctaggcacaaaagaaagtggtgattgatggctactcctccggtgaattcgttgccaatagcataccaagcatggacaagcctgggagtcccagattggttgaacaaaggagacaacgcatggccaatggtgtcagccaccttggttgggattcaaagcatgccgggcctcgtcatcctctacggaagcatcg

SEQ ID NO: 44655 - DNA, 281 bp, Glycine max
cgagaaccggccatccggagagcaatgccttgttgaatgggcaaagccttacctttctaacaaacgcagagtttttcgcgtgatggatagtcgtcttgaaggccagtattcccttacacaagctcaaagggcagccacccttgcttttcaatgtcttgctgtagagcccaaatacaggccaaatatggatgaggtggtgagagcattggagcagctacgcgaatcaaataatgatcaggtgaaaaatggtgatcataaaaagcgtagtagagttagtggat

SEQ ID NO: 44656 - DNA, 291 bp, Glycine max
cgagcttgataagcaataagcaactactccctcgtatctcacagttgttgaaaagcaaggtacatgagttgggtgaaggggttcgtggggcacagatgggtggtgtttgtgtgcgcgatgtgggacatgtcgtttgcggggacatcttacatgttcgggagcatatcgccggtgataaagagcagcatgggtttcaaccagaagcaggtggcgttcttgagcgtggctaaggatttgggtgacaacgttggtcttcttgctggaaaaatcagccaggcttcccctgtttgg

SEQ ID NO: 44657 - DNA, 289 bp, Glycine max
caggagcattgaggaccaaggtggacagcgatggcgcgaatgtcatggttgcattatacgaaaacggtttggtcaccgattgtccaagaggggagaacaaagggcgtgtcctatccaacgactatgttgttagaaagctcgaaaagctctgcactgtcaaagacatctctgccaagaaaacagtatcaggaatggttaactttcccttatgggaaggattcaaaagcagcaaatgtggtttggctgtctttgttcagagcaaatctcaccagatttttggttcacagag

SEQ ID NO: 44658 - DNA, 136 bp, Glycine max
ctcgagttcttggtgtcttggcgatgtcaaggtccataggtgatagatacctgaaaccatggataattccagaacctgaagtcaatattgtgcgtcgagaaaaaaatgatcagtgtcttattctagcaagtgatgg

SEQ ID NO: 44659 - DNA, 203 bp, Glycine max
gaattatttaatgcgcgaaaatgggcagtgaggagaatagtgtgtgatccacttctttcatcgcttcggatcttcaatctcatctccgatctcaaaatgcccgctgtttatggagctccgcttgaccaccttcgaagactccgagaaggagagtgaatacggttacgttcgcaaggtttcaggacccgtcgtcgttgcggatg

SEQ ID NO: 44660 - DNA, 285 bp, Glycine max
ttcaaaaaacaatcccttgagatcaccgttgacttgtccaaacgttccattgtctccaccaatgtctacattggccatggcttccccatgctcacgttcgatgagcaagactttgtggccgagcttccttttaagtataaacccttcattgaatcagtgaacaaacgaggccttaatatatctgaagttgtgtgttctactgcctcggttgggtggtatggggagataaagagcaaaaggacactgaagcttcagtgctttcacacacaagggtctataaatttg

SEQ ID NO: 44661 - DNA, 281 bp, Glycine max
caagaatcagggttatggttgctggaggtgatggtacagttggttggttattaggatgtctaacagaacttcgtgcacagggtcgagagccagttcctccagtagggatcgtaccactggggacgggcaatgacctgtctaggagttttcgttggggtgggtcatttccgtttgcatggaggtctgcaattaagagaactctacaaagggctagtaatgggacagttaatcgtttggatagttggcgagtttcactttcaatgctcgaaggtacacctgtg

SEQ ID NO: 44662 - DNA, 253 bp, Glycine max
tgttgccgtgcagaaatacttcagacatggtccttggtaccacgaagctgatatgaggacaggaagagcaacttattggcagcttacaagccttcaagcattttggcctggcctacaggttcttattggggatgttatcgctgccaattcatctcaccgggagtttttccatgtgtggaagaactatggagtgctaccagagaggtatttgctggattatcagatgcttcaccctactgagaaatattaccct

SEQ ID NO: 44663 - DNA, 251 bp, Glycine max
gccaaattaaatatttggtatactgcatggagaatgctattctaaatcttccaccagaacaggaacagatggtctggttgattgatttccagggtttcaatatgtcacacatatcaataaaggtgacacgtgaaacagcccatgtattacaagaacattatcctgaacgtcttggtctggcaatactgtacaatgcacctaagttctttgaaccatttttcacgatggtaaagcccttattagagactaag

SEQ ID NO: 44664 - DNA, 193 bp, Glycine max
tgaaaatcttccaccaaatgtaattaaacaacttgccaaggagttgaaaagtcttgatgaatcccctcctgagggcattaaggttgtggtaaatgatgatgatttttcgacaatattttctgacattgaaggcccaggtaagtagctttcatgtggtatgttgcatgattgagaactcccattgggtagggcc

SEQ ID NO: 44665 - DNA, 232 bp, Glycine max
gttcggttgggacaaggatcttgccaagaaaatctggtgctttggccctgagacccttggtcccaacatggtggttgatttcattcaaatactggactcccttgcacatatcaaccaccatgttgggtccaagggagtccagtatttgaatgaaatcaaggattctgtggttgctggattccagtgggcatcaaaagaaggtgctttggctgaagaaaacatgagagccatc

SEQ ID NO: 44666 - DNA, 242 bp, Glycine max
cctcgagcgaatcggctcggggctcgagtgcgtttcattctgaacgaaaattgcactctgaaaaattcaagaatcagttggtcaatcagagtacttatgctaagcttggatgcacacaaggatggttttttgctcctctgttccatcctccttccagcaacatagcacatcttgcaaaagtaaaagtcatgaaaacgcatggtggttgggaagacttgcaaattccttccagcatcaggtca

SEQ ID NO: 44667 - DNA, 239 bp, Glycine max
cggaaccgcacgcgagggtctcggtcgaaccggcctcggaggtttccaaggtcgcactcgaccgggcactcgctggtccaaccgggagaaaacactgaccggttcactttgaggttgcctttggaggtgaggaagcaattaataaaccgccaattgcaacgtgcgagtagcttgatcgtgttacccagggaaggtagtttgcggcagggttaccgaaccggaggagaagggagtagtag

SEQ ID NO: 44668 - DNA, 236 bp, Glycine max
ggtatacggtgatattggtacatcaccactttatgtgtatgcaagcaccttcactaaaaaaattaacaacaatgatgacattcttggcgtcttgtctctcatcatctataccattgtgctcataccttttcttacatatgtcttcatcgtattgtgggccaacgacaacggcaacggtggagcgtttgcactctattcgctaatctgtaggcatataaagatgagtttgattccaa

SEQ ID NO: 44669 - DNA, 237 bp, Glycine max
gtgaggagttagtgtccacaattttctgatcatcatatcaaaccctcttcatttgattttttttcttaatttaccaaaaaaatggttctatgagtctcacgagtacgcatgcgatggatccagaaggtggaacaactcgtcaaaactctgctaagagagagtcgtggagaacggttctgactctggcgtaccagagtttaggagcggtgtacggcgatttgagcatttcgccgttgt

SEQ ID NO: 44670 - DNA, 237 bp, Glycine max
gataatgttatatctatgcacgatatcatacaagaaatggcttgggagattgtgcgccaagaatcaattgaggatcctggaaaccgtagccgattgatcgatcctaatgacgtttatgaagtattaaaatataacaaggggactgaggccataagaagcataagagcaaacttgccagcaattcagaatctgcagttaagccctcacgtgtttaacaagatgagcaaactacagttt

SEQ ID NO: 44671 - DNA, 209 bp, Glycine max
ctgaattatacaaaacagcacgtatatctccaattacacttacttatttccataattgcatggaaaatgggaactatactgtaaacctccattttgctgagatacagtttacaaatgataaaacatttagaagtcttgggaagcgcatatttgatatctatgttcagggaaaactgattcgcaaaaattttgatatagagaatgagaca

SEQ ID NO: 44672 - DNA, 196 bp, Glycine max
cagatatgaaccggtcaatgaacccactttggacaactgctttgtatcaacaagttatgatgctactactcactttgagtcgaccgtggatgacgttctcaacatgtatacattgataactggaaaggtaagtgttatgccttggttaccacttgtttccacttcttgaattaatttttgagccacagatagtgac

SEQ ID NO: 44673 - DNA, 190 bp, Glycine max
tttcagcttatcggaagcttgcccggagttatcatcctgatgtgaacaagtgagtttttctttcttctttcatattgaacatcgtctactttctgattctgttcccttgccttgttccccactctcttttttttgcttttaaaatttttatttcttttatttcactgttgctgtggacaaagtggtttgg

SEQ ID NO: 44674 - DNA, 266 bp, Glycine max
gcgaccaggttacgatcacaggaactgcagcaacttatagctgcccttcttgagttcatggctgtttgtaaacgtgccatccgtgtacatttcagattgattggtgaggaagatcaggatttccacacacaacttgtaaatggtttccagtcactgacagcagagttatcacattacattcctgccattctctcagagctatgacaagtgtttgcctctatattttgcttcgatttgttcatattgtagtctcctcattccctttc

SEQ ID NO: 44675 - DNA, 264 bp, Glycine max
gagaatacctcaccggagtttctgcgcgacgttgtgataagttttattctggcggggcgtgatacgacgtcgtctgctctgagctggtttttctggattctgtcctccagacccgacgtgcaaagaaaaattcgggacgaaatcgaaacggttagatcggaaaaatcaaagggcgcgtttggatacgaggaggtgaaggagatgcgctacctgcaaggcgatttcggagacgatgaggttgtacccgccagtgccggttgacac

SEQ ID NO: 44676 - DNA, 259 bp, Glycine max
ctgatttgatggaaaacgggagtctttatgatcatttattcggtactgctaagaagaatctcacttggccaattcgtcaaaagattgctctagggaccgctagggggttggcttatttgcactatggagctcaaccttccatcatccatagggatattaaggctagtaacattcttctggaccacaattttgaagccaaggttgcggatttcggtggcaaagttcaaccctgaggggatgactcacatgagtactagag

SEQ ID NO: 44677 - DNA, 264 bp, Glycine max
agcatgtccaattctcagagagaacatgcattggctatagaacaactggtacctgaattcatcgcactaaggctgaatctttgcagttacatgaatgtggaaaagttttggatgatctattttttgttaatacttccaagactaaatcagcatgattttgagcgcctatcaactcccaagattgttgaagcaagagatgtgcttcttcagaaactgagagaggaaaaatttgcaagccggagaacctgaaaaaccaaggactgt

SEQ ID NO: 44678 - DNA, 254 bp, Glycine max
tttggttcttctttgtcagcttcttctctttcttgtacttcacatattatggaatgatgactgtgtccatcacaccaaaccaccaagtggcatcaatctttgcagcagcattctatggactctttaatctcttctctggtttctttatcccaagaccggtgagtaccattctagtttcgttattatattgaaacaaacatatcttacaatctttactaacataactcttctaccaactttggcttttcagaaaa

SEQ ID NO: 44679 - DNA, 257 bp, Glycine max
atgaattaaggtggtgttggcatacgctgaatctgagttagaaaagcaggtggacgcgtttactgagtcagcattcaaggggaaccctgcatctgtgtgtttcttagaggaagagagagatgaggagtggctgcaagcagtagccgctgaattcaatatctctgagacttgttacttatcacgcatcacccactcgctccatggaatctaatccccgttttcgtctcagatggtttactcctgttgctgaggttaaa

SEQ ID NO: 44680 - DNA, 260 bp, Glycine max
agcaaagttactcacaggtcaagttgttgctgttaaaaggctcaacatattagactctgacgacattcccgctgtgaaccgccagagctttcagaatgagataagatctcttacaggagtgaggcaccgcaatataatcaagctttttgggttctgtacttggaggggacaaatgttcttggtttatgaacatgtagacagaggaagtttggcaaaagtattgtatggagaggaagggaaattgaagctaagttgggcta

SEQ ID NO: 44681 - DNA, 248 bp, Glycine max
ctttccggcaacaagcgacccctgccgtcgaattccgcgacggatttaaaacgatcgcattcggaagttgtgagcttgatgaagggttgctcgcaggtttggcagaagcttatgaaacacaaacatgggtggatcttcaacgctcccgttgatgttgttgggttgcaacttaccgattactacgatgtaattaagcaacccatggatctgggaacggtgaagtccaatctttccatgaacaagtacac

SEQ ID NO: 44682 - DNA, 271 bp, Glycine max
cagaccacccagagctccgccgtggcgctgaagtgcctgatcgtggtgcaccacgtgatcaagcgcggcagcttcatcatgagggaccagcttccgtacagcggcggcggcaggaactaccttaacctctccaaattcagagacaagagcaaccccgtgtgctgggaactctcttcttgggtacgatggtacgctaaacacgtggaacagcttctctgggcttccagaattgtcgggttcttaccgacggaaaaagagagagtttcgggtc

SEQ ID NO: 44683 - DNA, 271 bp, Glycine max
aaagagttttccaagtttatggttgtgttgtgactgcacaagacatggttgaacccagagatcccgtgaaagtgtttgacaaagcagactactatgcacatcctgagcattacaatcccactttccatgaaaaaatagcaccatatgcatctgttattgtcaattgcatgtattgggagaagagatttcctcaattgctgagctataagcagatgcaagacttaatgggccgggggagcccccgtgttggaatagctgacataacgtgtga

SEQ ID NO: 44684 - DNA, 257 bp, Glycine max
ccctcgagccgaatcggctcgagcacaaagcgggatactgtctgcaccagctaccatctctccctctctttcttagtgcctacctgccagaagtcaaaatcgcccaagaaactgtcctattcacatctgcatcagtgaacgaggggcaccctgacaatctctttgaccagatctccgatgctgtgctcgatgcatgcttggagcaggaccctgacagcaaggttgcctgtgaaacctgcaccaagaccaacatggtg

SEQ ID NO: 44685 - DNA, 259 bp, Glycine max
ccaaagaaaaggtgttgttgtggagtaggaatttgacagactcgaattcgaaggaatagaggtgatagggtttgtgattctgatatagcgatgagtgagagtcacgggaacagcaggaggcgaaatgttgaagatcaagatctgggactgtacttcttggaggcgtgcaggggtagggagatgacagacaaagaggaagaggcagaagaagaagaggaggaggaggcaccagggagctcaacaccattaacagctctgg

SEQ ID NO: 44686 - DNA, 278 bp, Glycine max
caaaattcaggaaaaaaaaaaaaaaacatgggggtaaaggtgtatggtccaacccatggatccccaaagagggtcctggggtgtctgattgagaaggaaattgagtttgaaacagtgcatgttgatctcttcaggggggagaataaggacctgagtccctaaagctgcagccattgggaccccttccggttattaaagagggggattatactctctatgaatcccgggcaataatcagatacttagctgagaagtataaagcccaggggactgacttt

SEQ ID NO: 44687 - DNA, 235 bp, Glycine max
accgcgcggtgggggctttcgtgagtcactgcgggtggaactcggtggtggaagggttgatttcgggggtggcgatgctgacgtggccgatgggtgcggatcagtatacaaacgcttctcctccccgaacctcagttcccgaacccgaagcaaaacgacaacccggaagacccaaacggcgttgtttcgttcccaaatctcccaaattccccattctacccctggtggcagatca

SEQ ID NO: 44688 - DNA, 236 bp, Glycine max
caaatgttgatttacgaatttatgcccaatggaacacttagggagagtttgtcagggagatctgagattcatcttgactggcagaggagactccgcattgctcttggttccgccagaggacttgcatacttacatgagcttgccaaccctcccataatccacagagacgtgaagtcgactgctatattgttggatgaaaatttgacagcaaaggttgcagattttggcttgtccaa

SEQ ID NO: 44689 - DNA, 235 bp, Glycine max
cattatttgtctatcttattttgtaatttttagcctagacatcaataaacttttgatgcatgatgatatgagcatttttgattggatgattcaatgcataacatttttgctcttattttatacatgtacggcataattaattacgttttaatacataatttcaggacaaaccttacagcaagtcgaccgaggccaaacccgcaaggctcgtaccattacggtatgataaacacga

SEQ ID NO: 44690 - DNA, 236 bp, Glycine max
ggccaggcaagccccactcaaccaccacacctctcctcgttcacgctacccctttctgctcttcttctacctttcaagttttaaaagtataaagatggcagagacattcctatttacctcagagtcggtgaacgagggacaccctgacaagctctgcgaccaaatctccgatgctgtcctcgacgcttgcctcgagcaggacccagacagcaaagttgcctgcgaaacatgcacca

SEQ ID NO: 44691 - DNA, 234 bp, Glycine max
ccatttgcaggcgttcaattatatggtggaccaagagccagtaacttattaaatatttctgacacacactctttccatctggagtatagctcactggcttgtacagttgaaattgtagatgatgtatttgctgccattgaccacatacatcaccatggaagtgctcatactgaatgcattgttgcagaagactctgaagtcgccgaagctttcttaagtcaggttgacagtgct

SEQ ID NO: 44692 - DNA, 233 bp, Glycine max
atcactagaagtgttggatgcatttctatttctaactaattattgtgcttattattattgttgagaaagaaaagaatggcaaagttcataacattctttgagttgaacacaggggccaagattccttctgttgggttaggcacttggcaagctgagcctggtgttgtagccaaagctgtcaccacagccattctggttggatacaggcatattgattgtgctcaagcgtataa

SEQ ID NO: 44693 - DNA, 234 bp, Glycine max
ctgggccgtgctagaaggtttgattcaataaacaagttgctagcgcagatggtcaaggatggatgccaagccaatgttgtaacatacaaccgccttattcattgctatggctgtgcaaactacctgaaagaagcactgaatgtgttcaatgaaatgcaggaggtgggatgtgagcctgatcgtgtcacatactgtacactcattgatatccatgctaaagctggatttattgat

SEQ ID NO: 44694 - DNA, 260 bp, Glycine max
taacaagattaattgagtctacgttcatccgagcttcatatctgatatccattcttcaccgtaccaatgtctaattcttccatggccagcttgacttttgctgttggcattattggcactgtattatcccttttggtgtttgcctctcccatcaagactttttgtagagtggtaaagaagaaatcaacagagaattacaagggagctccatatataacgacgttcttgtgcacaagtttgtggacttcttatggagttct

SEQ ID NO: 44695 - DNA, 197 bp, Glycine max
atcttttccaaaacaccaaaaatgcctgcgacaacagagaacaacaaccaaggctcattcctgggtcgaataagcatccgcagaaaccaagtgatgtccatggacggaagccacgaccaagagatggaagacctggagcttttccagaagcacatcggagaccgcttctcggagctcttatcctccacctccgaaga

SEQ ID NO: 44696 - DNA, 283 bp, Glycine max
gtttcctctctacatggcagtgcccagaaaacaaacttagaatagagagaacatcaagcaagaacagtgttagcataactctccaagaagttgctgatatatctatcaatgttgtgcctgtgactaaggaagatagtagaatccataattaccaaattcctgatgatgattgctttgctcacttggaggtgcagttcaaattccatggtttgtctaacaaagttgaaggggttcttggaaagacttatcagcgagattttcagaaccctgcaaatttgggagt

SEQ ID NO: 44697 - DNA, 291 bp, Glycine max
ccgagctttagacagcgtcgttgaggccatgaaggaggatgagaagagtgttttatctgttcttggtcggagcaatattgctgctttggttcaattgcttacagctacctctcccaggataagggagaaaacagttactgttataagctcgcttgcagaatccggtagctgcgaaaattggctagtttctgaaggagttctgccacctcttataaggcttgttgaatctggcagcacggtggggaaggaaaaggccacaatatcccttcagaggttgtcgatgtcagccga

SEQ ID NO: 44698 - DNA, 159 bp, Glycine max
cctcgagccgaatcggctcgaggtgcccaaccgtgattgcccatcacatgctcagttcctagcatacatatgttcacgctgatgatggtactccgttactcatcaagaacgcaatctgtgtctttgaacaatatggcagcatcatgtggcgtcacaccg

SEQ ID NO: 44699 - DNA, 264 bp, Glycine max
ctcaggcaataccctcttctccatctaccgctatcataatgggtcttcgaaatgctatcagggaaatagtgaggagaacaaggagctggtgtttagtgtgcagaggaccctcaaaacaattactagagttgagttagaggtacttttcgaggctgagaggtccaatgatgaatgttgtgatttgaaagtgaagggttcccctttcaagagatcatgttgcatatataaacatgttgatttggtggcacagagtagcctgatgta

SEQ ID NO: 44700 - DNA, 286 bp, Glycine max
aacaaaaaaaaatctttccttattgttttccgtgtttcctttgtttcatagcttctggggtttggttttcagacccacaatacaaagttcacaagtgtgtgtaaagattgaagaagaaaatgaccgtagagaagaaaatgaatgattccggcgacgagtttcccgtcggaatgcgtgttctcgccgtcgacgatgatcccacttgcttattggttctggaaactctcctccgaagatgtcaatatcatgcaaccacgactaatcaagcaataaaggcgttggcgct

SEQ ID NO: 44701 - DNA, 279 bp, Glycine max
  unsure (1)..(279): unsure at all n locations
cacaatgattatccgtatcccattcctcccttgcctatccttcgtttactttttctttgctgggcattttcaattctcagtgcatgtctgntgcctttgagactggtttagataaattaattgcttactttcaatttttctacagacaattctgactaggaagaatactataactggaattgaatatagaaatgaccccaccatttttggttgggaatcgattaatgaacctcggtgcctaactgatccttctggtgatactctccaagattggataga

SEQ ID NO: 44702 - DNA, 278 bp, Glycine max
caaaaacgaacagtgtgattcttcttgccgtagatctattccattttgccattcatccatggccgacgaattcaaattcgccgacaaagtccctccttccttcgatcacgtggctacattaattttggattgccatttcaagagcatcatattcaaactggttgtggtattatgtctatcatagtctatgacgatcctgacaaactagctctgatcacttatccagatttggctctaaattatatatcatggtttcaaggactatttatgtccagaag

SEQ ID NO: 44703 - DNA, 291 bp, Glycine max
atctgtcactttttcactgctatcgtgggtgctaagtggtgggttcagcaatttcgggaagtctttgccatttttaaattgagcttccttatctcacaggaaacccaacattcaaagccagaaagtgcacaaagaaaacccttggagatacaccaacagtcacatgcaatgttagtaatgtttataaagttgtgaaggctaagaacggaagcatgccacttgccttagcaatgctttaaccatttgttgtactcgtgggatgcgtgcttgtctgggattatttgtcgccat

SEQ ID NO: 44704 - DNA, 255 bp, Glycine max
gaaaatcgtactatagattctgttgcataggcgttgtctgtggcggttgtcatacaaacgtggtcggggtggaggaagaaactaaaacatgatattaactaaggaatttcactcttcgtctctctcatagtacttcttctggtgccaagaagacggcagtttgcctgcactcgctcagttcttagagcatgaattcagcatccccgcagtttgtttcctcaagaaggatgagtgtgtacgatccgatccaccaga

SEQ ID NO: 44705 - DNA, 299 bp, Glycine max
ctaaagtctaagcaaagaaaaaaatgatccttccctcttcttcacttttattcactctcacaatcctcttgtgttctttcctttcttttgtttgtgccaaccgtctcatccaacaaacatgcaagaattgctcaaaaaatgaccccaacataagctacaaattttgcgttacatcattccaatcagaccataggagccactacgccaaaaacctccaagaactaggactaatctccatcaagataacaaggcacaacgtgacggatactaatgctcatatcaatgagcttttgaagaaa

SEQ ID NO: 44706 - DNA, 296 bp, Glycine max
tccctcctggggttctgctttgagaatggcaaacttcttctcgtttatgatttcttatcaagaggaagccttgaagagaaccttcatgaataggtaataagaaaaattcacttgtgtttggttggtccgagagatataaggtagcagtaggtgttgctgaggctttagattatctgcattctaaagatgatcaacctgtgatccatcgggatgtgaagtcatcaaatgtattattatctgagaattttgaaccccagctctctgattttggactggcaaaatgggcatcaaccttg

SEQ ID NO: 44707 - DNA, 297 bp, Glycine max
gccccactcaaccaccacacctctcctcgttcacgctacccctttctgctcttcttctacctttcaagttttaaaagtataaagatggcagagacattcctatttacctcagagtcggtgaacgagggacaccctgacaagctctgcgaccaaatctccgatgctgtcctcgacgcttgcctcgagcaggacccagacagcaaagttgcctgcgaaacatgcaccaaaaccaacttggtcatggtcttcggagaaatcacgaccaaggccaacgttgactacgagaagatagtgcgt

SEQ ID NO: 44708 - DNA, 293 bp, Glycine max
ctcagttagtgtgacacggagggtgaaaaatgttgggccaccaggcacttatactgcaagactcaaagtaccagcacgtctttccatatctgtggagcctaatgtgttgaaatttgacaacattggtgaagagaagagctttaagttgacagtggaagttacaagaccaggtgagactactgcatttggaggtataacttggtcagatggcaaacgtcaagtgaggagtccaattgtagttgggggggttagagggtagatcattatcaagtgataacacataattaattagg

SEQ ID NO: 44709 - DNA, 276 bp, Glycine max
tcgaagcaatgttgagagctctgaagaggaggaggatagtgaaagttcagattctgagattgattctgagatggagagaattattgctgaaaggactagggaagagaattagtgggaagagaggttcttctagaaagaagggggatttggatgatgatggatccgacaaacattctggcaagaggagaaagagaggtaggtcaaagaagaggagtgctaagagggaagttagtgattcggatgattcaggtgaagaaagaaggaggaggaagagaa

SEQ ID NO: 44710 - DNA, 262 bp, Glycine max
gttaattactatgacattagaaagaaatgtgtgggagttctgtgttatgacttctctgtgatggaggatttcttaaacgagaagacagtgagagatgctttaggtgttggggacttggacttcgtttcatgcagtagcacagtgtatagtgctatgatgcaagactggatgagaaatctggaagttggtattcccacacttcttgaggaaggaatcaaggtgcttgtgtatgctggagaagaagatctcatatgcaattggc

SEQ ID NO: 44711 - DNA, 273 bp, Glycine max
tttcctccttctgcaaccatcaatgtcggcaatcgcggctccccaacaagatgcaggtcctccagcccgccgccaagatgctcgtcgagctctccaagtcccaggactccgccgccggcgacggcaccaccaccgtcgtcgtcatcgctggcgccctcctcgagcagtgcctcctcctcctttcccacggcatccaccccaccgtcgtctccgacgccctccacaaggctgccgtcaaggccgtcgacgttctcaccgccatggccgtccccg

SEQ ID NO: 44712 - DNA, 269 bp, Glycine max
gccagctgaagcatcaccggtggtgtcaaagcagttgtctgacaccatttctagttccaaaatgattgatttgaaagaattgtccttggtcagtggaaaagctgcatggatggcttacctggatacctactgtttggatgccgatggtgctctttttgatgctgcattactttctgccgttgcttccttatctcatttgcaaattcctgttgttgccatgaatgatgatcgcaaaatagtactcgtgtctgaacaacatggacaaaagc

SEQ ID NO: 44713 - DNA, 264 bp, Glycine max
gcagcagcagcagcaacaggcgcggctttcacagcagcagtagccactgtggttcgagctccacctaaagatttcagactcgtcaagcaagaatgggccgctataagaatccaaactgctttccgcgccctcttggcaagaagggctttgagggcattgaagggagtggtgaggattcaagctcttgttcgggggagacaggtgaggaagcaggctgcggtgacattgaggtgcatgcaggccttggttcgtgttcaggcccga

SEQ ID NO: 44714 - DNA, 269 bp, Glycine max
gcttctgtcagcagaaaccgtagcactataattgttccggctggaagctccagggatgaaggatgggcagcattcaggaacattttggcagagatcaatgaagcctcaaggcttttcattctgcccaatcaggtttccttcttttgaaacagacatttttcttcctgcttagccacaagaatagtcaaagttgttgcttttttttattcatcttatttgcttgtttgcattccgcaatagcaaaattctgaatcctcagagcatcttgt

SEQ ID NO: 44715 - DNA, 270 bp, Glycine max
cttaattcccagtttgctagaacacacatctcttctatgcaagggggaggacctactcctacgctggtcaaggccgaggttccgtggtctgctagaaggggaagtctatctgaaaaggatcgcgtcataaaaactgtgaaaggaatactgaataagttgactcctgaaaaatttgatatcctgaagggtcagttaatcgattctggcattacatcagctgacatcttaaaggatgtcatttcacttatttttgataaggctgttctagaa

SEQ ID NO: 44716 - DNA, 270 bp, Glycine max
ctctgacacaagaattaagttgtgagatggagagaagtagtgaagaggagatgttaataacgaaaggtccatggacagagcaagaggattctcttctcttcaattacatcactgtccacggcgaaggtcactggaactctgtcgctcgctacacaggcatgcaaagcattaattatattcatcatcttaatcctagcttctttcttactcacactcatcacgttttcaatcacaggtctaaaacgaacgggcaaaagctgcagattaaga

SEQ ID NO: 44717 - DNA, 269 bp, Glycine max
aaaggatcggtacattctcggcgagcaattgggttggggacagtttggtgtcataaggacatgttctgacaaattgacaggagaggttttggcctgcaaatcaattgctaaagataggttggttacttcggatgatttgaagagtgtcaaacttgagatagagataatggctaggctatccgggcaccccaatgttgtggatctcaaggcggtttatgaagaggaaggttttgttcacctggtgatggagctttgtgctggaggggagc

SEQ ID NO: 44718 - DNA, 258 bp, Glycine max
aaattcctgaatattggatcggaggccaaattaagaaagaccactgaaattttaaatgaatttgttttcaagctaatcaacactagaattcttcaaatgcagatttcaaagggagattctggtagcaaacgaggagatattctgtcaaggtttctgcaagtgaaggaatatgatccaacatacttacgagatataattctaaactttgttattgcggggaaagacacgacggctgccacactttcttggttcatgtac

SEQ ID NO: 44719 - DNA, 256 bp, Glycine max
cgagaacaaaaaaaaaaaaaaaatccgggattcgctcttctcttggaaaagtgaaacccagaagtacgaccgaaagagaagagcgttttaaaagtgagaaaagatggggttgtcgttcacgaagctgttcagcaggttttttgcacagaaggaaatgaggattctgatggtaggccccaatgacgctggtaagacaaccatcttgtaaaagctcaagcttggagaaatcgtcaccattatccccaccatgggtttt

SEQ ID NO: 44720 - DNA, 254 bp, Glycine max
gcctaggcaacaatgtgaggtctatgccttctgtggtggatttgggagctgcactgagaatgccatgccatattgtaattgtatgaatggttatgagccaaagtcacaatctgattggaatcttacggattactcaggagggtgtgtgaagaagaccaagtttcaatgtgagaatccaaattcctctgacaaggaaaaggacaggttccttccaattctcaacatgaagttgcccaatcattcgcaatccatag

SEQ ID NO: 44721 - DNA, 192 bp, Glycine max
agagattctaaagcctctccctgcaggtgttgaaatcgatgaactccctaagcaaattgatgatacacagtacccaaaaacattcttctataaagaagaccttcatccaggcaaaacaatgaaagtacaattcaccaagcgtccctatgcaaaaccttatggtgtatatacatggttaacggatattaaaga

SEQ ID NO: 44722 - DNA, 187 bp, Glycine max
ttcagaaataacgacctatgaacacacaagtattgcttttgcaccttatggagaatattggagacaggtacgaaaaatatgcgccatggagcttctctccccaaaacgtgtcaactcattccggtcaattagagaagaagagttcaccaatcttgtcaaaatggttggttcacatgaagggtccccc

SEQ ID NO: 44723 - DNA, 197 bp, Glycine max
aattggccttggggccaaggatcctgttgatgtcattgcggttgtagagctcatagtcaaagcctactttttcaacaccctctatgaacctttccgagaaggtgcagattttgttcgcggttaccccttcagtctccgggaaggtgtaccaactgcagtttctcatggtctttggctcaacatcccagattacgatg

SEQ ID NO: 44724 - DNA, 195 bp, Glycine max
gcgatatcttgctttcatatggatcttcttagcgaactgacagctgcattacgtcctgccgatgagcctggtgcagaggttccaaacggtgcagctggtcattatctattagggctcatttacagatgcactgacagaaggaaaaatgccatacaacatttcaagcaggcactgtcaatggatcctcttatgtgg

SEQ ID NO: 44725 - DNA, 277 bp, Glycine max
caagtttgagcgttaatacacttagaagtgaaatggcttctcgacccttggtctctatttataatgagaaaaatgagccaaccggcaagcaaatcaagcttccggccgttttccgggctccaattcggcatgacattgtgagcttcatccatgaccaaattcgcagaaacaagcgacaagcgtatgctgtgtcaaccgctgccggtcatcaaacttccgccgaatcgtggggcactggtcgcgcactggcgcgtattccgagcgtccgtgagcggtg

SEQ ID NO: 44726 - DNA, 283 bp, Glycine max
gcctcagctaataacaacaatgcttctgcttcattgggtgtccatcgtcgacgacgcaggaagaaatcagaaataaaaaggagagatcctgctcatccaaaacctaacagaagtgggtacaatttcttctttgctgagcagcatgcaagactaaagctacttcaccatggaaaggacagagagattagtaggatgattggtgaactctggaacaagttaaaagaatcagaaaagacggtttatcaagagaaggccatgaaggataaagagaggtacagagtag

SEQ ID NO: 44727 - DNA, 267 bp, Glycine max
caggtacaaaagatagagatactcaggcaggcaattttagcttggagcagatcagagttgctactgatgacttctcttctgctaataagattggggaaggtggttttggtcctgtatacaagggtcaattgctagatggtacttttatagcggtcaagcaactgtcatcaaaatcacggcagggaaatcgtgaatttataaatgaaataggcttgatatcttgtgtgctcaccctaaccttgtaaagctttatggatactgtgctga

SEQ ID NO: 44728 - DNA, 260 bp, Glycine max
ctctctctcaccaaagccttcctagaacgaaaaaaaaaaagaagagcaattttccctcaccaaagaagaagaagcaaacaatggccgatcaacttaccgatgaacagatctccgagttcaaggaagccttcagcttgttcgacaaggacggcgatggttgcatcacaaccaaggagcttggaactgttatgcgttcattggggcaaaacccaactgaggcagagctccaggacatgatcaatgaagtggatcctgatggg

SEQ ID NO: 44729 - DNA, 258 bp, Glycine max
catttgatcagattaatttattacatgttacttccatctctaaattaatctgatcaaatgcacaatataaactttcgagaacaagcacgtgttgagaaatgaaatgcttttaaagttaaggcgtatacagctttggagtaatattatgggaaattgcaactgaaaagataccttgggataatctcaactcaatgcaggtgattggagctgtaggattcatgaatcaacggctagagattccaaaaaatgttgatccac

SEQ ID NO: 44730 - DNA, 287 bp, Glycine max
tcgcaatacgtggattactattgaaaggtggagattatattgaaacactttctggaattaagacagttgcttttgataaaacgggcacaataacaagaggagagttcactgtgacagatttttctgtatctgtagatgacattagcattgaaactttactgtactgggtttcaagtgttgagagtaaatcaagtcatcctatggcagctgcactagtggaatatggaatgttgaattctgtcaagccaatccctgaaaatgtggagaatttcaaaattttccagggg

SEQ ID NO: 44731 - DNA, 281 bp, Glycine max
cagaatgctactgggcccaaatcagggttgtttgttccagaagtgccatttgaagtccttgtgcgaaggcaaatatcacgtctattggatccaagtcttcaatgtgccaggtttatatatgatgaattaataaagatcagccatcgctgtatggtaaatgtactgcagcgattccctttcttgcggaagcgcatggatgaagttatagggaactttctacgagaaggccttgaaccctcagagaacatgattgcgcacctcatagaaatggagatggacta

SEQ ID NO: 44732 - DNA, 282 bp, Glycine max
tggtgatgaaatggagtatgcggcagacgataatgatatggcagacgtagaagatgatatgtatgaccggggcagagcatttggtgaatcagattcagatgatgacgacgactacgaatatgaccctttggataaccgtatatcagataacactggtgctgaagctaagcgggggaaggatatccaaggtataccttgggataggttgagcattagtcgtgagagatatatacaaactagactagaccagtacaagaatgatgatagcatagcacaatcagg

SEQ ID NO: 44733 - DNA, 279 bp, Glycine max
ctccacgtggctaacagaagaaaaggtttcttgaactacatgcttcttctaagactgactccgacactagctaacacatttagtaattgtgcttcaccaattgtggatgtgccttatcatattttcttcttggcaactgttattggactaatacctgctgcttatgtcactgtcaaggtacgtagctatcagcataataatttttatttagaaatgttattgatattttataataaaaagatagatacgatagcgaaaagtgagatgtaattactgatg

SEQ ID NO: 44734 - DNA, 264 bp, Glycine max
acggaatgtacccccaatcgggcggtaaattccgcccaaagctaaatcctggcgagaaaccgatagcgatcaagtaccaccatggagatgaggtgtcaaatgataacgcacagcatcacatctggagcctatggaaatgcgtggctgcttcatagtctctgggcacgttggcgccgtttaagacaccacaattcctgttctatgcctacctcgcgagtgcaaataacaaaccatccaaacctaaacttgagctgggactgtttc

SEQ ID NO: 44735 - DNA, 248 bp, Glycine max
cacatagtagctattatactctctagagtaattgcggaatctgctagaattttctaataatggcgaaagacgttgagcaggtcacagagcaaggtgaatactccgcgaaggactaccatgaccctcctccggcaccgttgatcgacccagatgagctcacaaagtggtccttgtacagagccgccatagctgagttcatagcaacactcctttttctttacatcaccgtgttgaccattattggctac

SEQ ID NO: 44736 - DNA, 245 bp, Glycine max
cttttctccaaaaccatccaacaagggaaacagaatattattccatttttcaattatggcatcctcaactcaattctccaccactctggttacactatgtctcttccaattcctagcaggttcgtattcaacgacattcacgattgtgaacaagtgcagctacacagtttggcccggcattttatccggcgccggaacctcgccgctccccaccaccggcttcgtcttacaacccggcgagtcca

SEQ ID NO: 44737 - DNA, 238 bp, Glycine max
gtttttgagaaagccaaaggtgtcaaaaaaggaagaggatgaaatttgtgtgccaataaatggtggttacaatgacgatgatgcagacatagagtccttgcttcttcccagaaggttcgggaactctacttctcttgctgcatccattcctgtggcggaataccagggaaggttgcttcaagatttgcacggaaagggaacacaaggcaggccagcaggttctcttgccgtgcctcgc

SEQ ID NO: 44738 - DNA, 241 bp, Glycine max
  unsure (1)..(241): unsure at all n locations
agcgccctgcgtgaagcggtggtgtactcgactccganctcgtactcgtcgacgacatcgccaagctcgcgacaacctcgttgggagaacacaacaacgttttggcggcgccggaatattgcaacgcgaacttcacctcgtacttcactcccacgttctggtcgaacccttctctgtcgctaacgttcgcggacagaaaacagaaagcgtgttactttaacacgggggtgatggtgattga

SEQ ID NO: 44739 - DNA, 237 bp, Glycine max
aaggtggcggaagggttcacttgcattggtctaatattccagttggagatgaatatgtccctttggcaagtgtaaagggaagcgttatcactgggttggtatattacaaagaatgccctgctggtacttataaaaatgtcagttggtctgctagagatctttgtcatgattgcccatctcacaagcttccgcatcgtgccagatatatctctgttcgaggtcgtgtggcagacatcc

SEQ ID NO: 44740 - DNA, 232 bp, Glycine max
cttagggattcaactggaatatcagattcagtgcttctcttatttggtgggaatgtatccagaggtggactagatggtcacctgaaaatgttgggagggtatttggagtttttcatgaaaccagaattagccaagacttacttgagcttaaagatggaactggaagaactgatacagaaaaaacttttggatcccatgttggaaacacaatcgcatagtgagctgctttctg

SEQ ID NO: 44741 - DNA, 237 bp, Glycine max
caaatgagctgtcctttcaaatgtggacaaatcaaatacaagaaactctaaattctaagaagcaaggcgattctgcttttcatgctagagacttctccacggccattgactgctatacacaattcatcgatggtggaactatggtatcaccaaccgtgtatgccaggcgctgcttgtgctacctgatgaatgacatggcacaagaagcacttggagatgccatgcaagctcaatcaa

SEQ ID NO: 44742 - DNA, 239 bp, Glycine max
acaaggtggtatcgggcatggacaaatttcatattggtatgggcagtgtattcatccttcttcaccccaatggagtttgggtttttccgtggcttgcctgagaatctctttatactggacatcattggacaaatgcttttcttgtagatattgtcttgcaattctttgttgcttatagagacagtcagacctatcgtatggtctacaagagaacccctattgctctgcggtatctgaaa

SEQ ID NO: 44743 - DNA, 233 bp, Glycine max
gaaccaacaagaggggtattgagattgagattcaagtaatggggaagagcaaggttcttgtggtggggggaactgggtacatagggaggaggatagtgagggcaagcctggcactgggccatgagactatgtggttcagaggccagagttgagcctccagatagagaagctgcagaggctcctctccttcaagaagcaaggtgctcatctcattgaggcctctttcaatgatc

SEQ ID NO: 44744 - DNA, 274 bp, Glycine max
ccctcgagccgaatcggctcgagcaactcttcaaaagggagaagaaacggaaagaaaactctcaaaaaactattatagcaatggcagaacaaaaccaaaaccaaacaactgaagctggaaggcaccaagaggttggtcacaagagcttctccagagtgatgctctttaccagtatattctggagacaagtgtctacccaagagaacctgaatccatgaaagaactgagagagttgacagcaaaacacccatggaacatcatgacaacctctgca

SEQ ID NO: 44745 - DNA, 266 bp, Glycine max
gaggaatatggcttccttaagctcctcattagtgctgctccttgcagctctaattctatcccctcaagttcttgctgactatgagacgcccccaatttacaagccacctgtttacacaccgccagtttataagcccccagtcgaaaaaccaccagtgtacaaacctccagtttacaagcctccagttgacaaaccacctgtttataagcctccagtttataagccacccgtttacaagcctccagtgtataaacctccagttgata

SEQ ID NO: 44746 - DNA, 269 bp, Glycine max
ctctcgagccgaatcggctcgagcttcaaatcgattaagttcatagagcgaattgaaatatctacttggtaagtgattgagagactgaatttgtagataataagatgggttcgtcgactaatggtggtgtgccgccagggtttagatttcatccaacggatgaagagctgcttcattactacttgaagaagaaggtgtcctttcagaagtttgacatggatgtcattagagaggtcgacttgaacaagatggagccttgggacttgcaa

SEQ ID NO: 44747 - DNA, 277 bp, Glycine max
aagaaaacggttagagttccggcgattagttcgaaggtcgccgatattccgccggatgagtactcgtggaggaagtacggacagaagccgatcaagggatcaccgtacccgaggtgagtggtttgtggccgttgatttggtgttggctttggtcaaaggtgtgttaactgacgttgatttgttttgtgttctcagggggtattacaagtgcagtaccgtgagagggtgcccggcgaggaaacacgtggagcgtgcttcggacgatccgacgatgttg

SEQ ID NO: 44748 - DNA, 276 bp, Glycine max
gggagttaggttctgcacgctctgcttccagcgagtgttctttcttcgtttcaacaccttaatttgcacacgctgcttcttcagcttgagaaatggcacaagaaacctttctattcacatctgaatctgtaaacgagggtcaccccgacaagctgtgcgaccagatctctgatgcagtgcttgatgcgtgccttgaacaggaccctgacagcaaggttgcctgtgagacatgcaccaagaccaacatggtcatggtctttggagagatcacaacca

SEQ ID NO: 44749 - DNA, 275 bp, Glycine max
cttattgaagactacccttatgcagctgatggactcctcatatggtccagcataaagaagttggtcaggacctatgtcaacattactataaaaattccaatgccgtttcttctgacaacgaactccaatcttggtacagagaattcatcaatctcggacaccctgatcataaaaatgctagttggtggcctaaacttgacatccctgaggatctcacctccatgcttaccactgttatttggcttgtatcagcacaacatgctgtcttgaacttt

SEQ ID NO: 44750 - DNA, 269 bp, Glycine max
cttggttacactgaagatgatgtggtctccactgactttatcggcgatagcagatcaagtatttttgatgcaaaggctggaattgcattgaataagaactttgtgaagcttgtttcttggtacgacaacgagtggggatacagctcacgtgtcattgatcttcctgtattcgttgccaagaagtctctttaaggtgttacttcaaagtatcttgtcttcacattattaccgtatgtttatgtttagctgcgatttagtgtcttgctcga

SEQ ID NO: 44751 - DNA, 259 bp, Glycine max
cttgtcttctgaaggcagctggagggaagttatttcaggtgccaacaaatcaatatatgctcctgaccctctgatgttgggagaatcttacaagtagatcattgtctcaaatgggaaaaagctcaccctaacaactaatcccattcaaactgtttcaggacttggaagccatgtggagacacttctacgaaaatctaatactgattttactgtagttatttctcaaatgaatggaaaagatcactcatcccattctact

SEQ ID NO: 44752 - DNA, 254 bp, Glycine max
atcaacatgaaaccgatgtaggaatgggcacaactaaatgtggctaattgatattgcagatggctggagtggggtcagtggtgatgacaccattaataggaaacttgtcggaccgatatggcagaaaagcgttgctcacacttcctctcactgtctctgtcattcctcaagtgatattggcatatagcagggatacccaattcttctacgcgtactatgtggtgaaaactctggctgccatggcaggcgaaggg

SEQ ID NO: 44753 - DNA, 275 bp, Glycine max
  unsure (1)..(275): unsure at all n locations
ggggctaccgctgagtttaagcatatcaataagcggaggaaaaggaaacagcaacggcagttacaaaactaaaggcggcgccggtgtcgcgcacggaagtttagagtccggcatgacggcggtgaagctgctggatttgatgccggtgatgcgaactccgatgaggacgcggcggagatggcgccggaggagatgaatccgaagctgtttggtgtggcgattggagcgaaatgncgagagagggaggaggtggtggagattgtggaggtggagga

SEQ ID NO: 44754 - DNA, 266 bp, Glycine max
gatttatctggtagggttgttatgctggggatccaaggtctggctgctgctggacagtgttgcaagcagcttgaagacttgaatctgcgattctgcgaaggattcactgatactggtctggttaaattagccttaggtgtggggaagtcgttgaaatctcttggtgtggcagcttgtgccaagataactgatatctcaatggaggctgtagggtcacattggaggtcccttgagaccttgtcgttcgactctgagtgcatccacaa

SEQ ID NO: 44755 - DNA, 278 bp, Glycine max
ggggctacccgctgagtttaagcatatcaataagcggaggaaaaggaaacagcaacggcagttacaaaactaaaggcggcgccggtgtcgcgcacggaagtttagagtccggcatgacggcggtgaagctgctggatttgatgccggtgatgcgaactccgatgaggacgcggcggagatggcgccggaggagatgaatccgaagctgtttggtgtggcgattggagcgaagatgcgagacacggaggaagtggtggagattgtggaggtggaggaga

SEQ ID NO: 44756 - DNA, 280 bp, Glycine max
ccctgttggtgctaaaataaattttgtttcttggtctcctgatggttgtcatttgtcctttagcattcgtgtgaatgaggaggacaatgatagcagtaaactcacagtatggattgcagatgtgaaaacagggatagctagaaagttgtttcagtcacctaatgtacatttgaatgcagtttttgacaattatgtttgggtaaataattcttcattgttagtttgcaccattccatcatcccgtggagctcctccaaagaaacctttggttccaagttgc

SEQ ID NO: 44757 - DNA, 280 bp, Glycine max
tgagagaaacacgatgcatttatgttgagagaacttgtgaagagatgggcagaccatcaaattatggctcggtggctttctcggttctttcattattaggatcgatactttattgctcggaggtcacttccgccccttaatgaagttgggttgacttgcttccgcgatttgatttacaaggaactaaatgggaaagttagagatgcagttatttcactaattgatcaagaacgggagggagaacagattgatcgagctctattaaagaatgtattagaca

SEQ ID NO: 44758 - DNA, 278 bp, Glycine max
cacttttaggaggtccctacatcttacgtacatttcccgctgtacagattcatccagttcttagtgttattggcttactagttcatgggggtgaagctattataagttacaaagcttttcccctaaagaaggaagtgaagaaattgatacaccttgttttccatgccatcgcattaatacttggaatagttggaatttatactgccttcaagtttcacaatgaaagtgggattgccaatctctacagcttgcattcatggcttggaattggggttatt

SEQ ID NO: 44759 - DNA, 261 bp, Glycine max
gaaagagactgggcaaaagatgaaacatcactgaagtcaggttttaggcatctagagcacatgccattccctttctggttggccctttttgttgaaggaactcgtttcacgcagacaaagcttttacaagctcaagagtttgctgcttcaaaagggctgcctatacctagaaatgttttgattcctcgtactaagggttttgtcacagcagtacaaagccttcggccattcgttccagccatttatgattgcacatatgca

SEQ ID NO: 44760 - DNA, 270 bp, Glycine max
tgtggctttgaaccattctggtgttagatggtatgtgtttggggatgatgacaccattttcttccctcagaatttggtcaaaactctttccaaatatgatcataggctttggtactacgttgggtcgtactcagagatttatgagggctcccaggtttttggttttggaatggcttttggtggaggtggttttgccatcagttcctctctagcacaagtcctagccaaggtttttgattcatgcatacaaaggtattctcatctatatgg

SEQ ID NO: 44761 - DNA, 263 bp, Glycine max
caaaccgaggcctcttcacatctgaccaaactctcttaactaatgctgaaacagccagccaggtgaaacaaaatgccagggatccctatttatgggcaagtcaatttgcagatgcaatggtgaagatgggtcaaatcattgtcttaaaaggtaatgctggagagattagaacaaattgcagggtggtcaatagttagcaatagtggtgaaggactcaagtgcctgcagcaaagaagatttacaaattctaagtcatgtttctt

SEQ ID NO: 44762 - DNA, 257 bp, Glycine max
gcaggttgagtatcccaacaatgtacatttaatacgtggaaaccatgaagctgcagatattaatgcactgtttggtttccgaattgagtgcatagagaggatggtaaggaatttcatgtactagaaattgtgtcttgtttatattgggttcatcaaccaatcatgaaaaattgttgatcagggtgagagagatggaatttggacatggcatcggataaacaagctgtttaattggcttcctctggcagctttaattg

SEQ ID NO: 44763 - DNA, 260 bp, Glycine max
ttttcatgtaggcaagtctatatccaggaaaagtattgtacctcaaaatgcaaaaaccagaaggttttaagttccatagtggcatgtatatattcattcagtgcccccaaatttcgccctttgaatggcatccattttccttgacttcagggccacaagaagactacctcagtgttcacattagaacactcggagactggagctaccaaatatatgatctattccaagaggcagtgttatcacgatcacaagggtgtcca

SEQ ID NO: 44764 - DNA, 255 bp, Glycine max
ctacatctcaaagtcttggatgactacaaaagagccactcaatatatggagtaagagcagtttcactgtagaaggtatatgggagcacttaaatgttacaaaggatcaatctgattacctttggtattcaaccagagtatatgtttcagatagtgacatcttgttttgggaggaaaatgatgtccatccaaaacttactatagatggtgtccgtgacatattgcgtgtattcatcaatggccagcttataggtat

SEQ ID NO: 44765 - DNA, 255 bp, Glycine max
cccatgtctcaaactccgaatccaacgttgtctctcctacccttgtcgaatctactacgaacactctaggggtgctgaagaatatgaaggtgttcgtgtacgagcttcctccaaagtacaacaccgattggcttgcgaacgagaggtgtagcagtcatttattcgcttcggaagttgctattcacagggcactgttaacgagcgaggttcgcacgtttgacccatacgaagctgatttcttcttcgtcccagttt

SEQ ID NO: 44766 - DNA, 276 bp, Glycine max
gaactgtgatccatcgtcaatctttcagtaacaaacatgagcggactgttcttgttgctgtggctgctgctatcggcaacttgctgcaaggatgggataatgccaccattgcaggtcatatttttattcggttagccaattaagataacattcaaccaagtctaattggctttctatgctatgcaggatctattttgtacataaagagggagtttaatttacaaagtgaacccacaatagaaggtctaattgtggccatgtcacttattggagcca

SEQ ID NO: 44767 - DNA, 275 bp, Glycine max
aacttattgaagaattgagtactccagccccgggttcaaaggacctttatttttcttcaaagtactctaggtcctttattacccaatgcatggcttgcttatggaaacaacattggtcttactggcgcaataatgaatacaccgccctaagatttctctttacaattgctgttgccttgttgtttgggagcatatattggaaccttggctccaaaatcaaaaagcaacaagatcttttcaatgccatgggatccatgtatgctgctgttcttctt

SEQ ID NO: 44768 - DNA, 227 bp, Glycine max
ttgacaaccatgagtgatgtatatagctttggagttgttctcctagagctcctcacaggaaagaactctgtggacaagaaaagacccaccagagagcaggatttggtggaatgggcaaggccattgttgaaggattcccataaactagaaagaataatggacacaagacttgaggatcagtactcaactgaaggggctagaaaatttgcagccttggcttatcaatg

SEQ ID NO: 44769 - DNA, 250 bp, Glycine max
ggaatttcttcttccaatttttcagaactttgcacgaaagaagaaactctgaaggaagtgcatgcatcacttgtaaaggaaggacagaaggctcgtttggagaaatttgagattcctgcaaaaattaaattgctttctgatccatggactcctgaatctggcctagtcactgctgctctcaaactcaagagagaggccataaaaaagacttttgatgaagaactttctgagttgtatgcttcataggctt

SEQ ID NO: 44770 - DNA, 265 bp, Glycine max
atccctccatcaaaagtggcatatgtagctaaagaactatatgatatgggttgctttgaaatctcacttggggacacaattggagttggtactcccggtaatgaattagctagatgtctttctttttgaaaactttatgctacacacagaacataataatatcagcctcatggcagcattcccttgtttggcatttgtcttcaaacactttttactaaacatcagcctattactcacctttcctgtgctttgtgttgatcgtgat

SEQ ID NO: 44771 - DNA, 262 bp, Glycine max
gcatcacctcttcgtcattgtctatgccctgttggttgtacatggaatcaaactttacttaactaaggaatggtacaagaaaacggttagcaccttcagttgaaccttatatttatgtagttgttttggattgaaaaataatcgattaaaatgcacttgacattatgtgattgatagacctggatgtatctggctattcccatcaccatttatgcattggaaagactggttagagcattcagatcgagcattaagtccgtca

SEQ ID NO: 44772 - DNA, 265 bp, Glycine max
gttttgaaggtattgcaaatgtgagatgccttataacccggatgatctcatggtacaatgtgaagggtgcaaggattgggattatgtgattccagcgcctgcagaatgaacgccgtaaagggtgttaaggtgttgtaaaggtcaaatttggtagtaaaatgagaaggggaatggttgtgacaacaggaagctcatagaaaatgtaccatcctgcttgcatgggcatgactattgaagaagctaagaaactagatcattttgtatg

SEQ ID NO: 44773 - DNA, 258 bp, Glycine max
gttgtccccccatgtccttggacccaggtggcctgccacgtgggtccaagaacaagcccaagccgcccatagtcataaccaaggaaagtcccaacgcactccgaagccacgtcctggaaatcaactccggcagtgacgttgctgagagcatcgccgcctttgccaaccgccgccaccgcggcgtgtcggtgctcagcgggagtggcattgtcgccaacgtcactctccgccagcccgccgccccggccggcgtcataa

SEQ ID NO: 44774 - DNA, 268 bp, Glycine max
tccagttctctcttttccccatcacttcctatctgaggcaaaagaaagacactaaaaaaattatccacagcatcaaagttggaatctcccttgtattgatttcactcctgtacttcgtggatcctctctatgagcaagttggagataatgctatatgggctatcatgactgttgttgtcacttttgaattttctgcgggtatagagctacgctaggaaaaggtttaaatcgcggaatgggaaccatattaggaggtggactgggttgc

SEQ ID NO: 44775 - DNA, 252 bp, Glycine max
ttttggcacgaatcagacagaagcaaacacattgagagttgttggaacatatggctatatgtcccctgaatatgctatggatgggaacttctcagtgaaatctgatgtttttagctttggagttctagtgctggaaattataactgggaaaaaaaatagaggattctattactcaaatgaagatatgaatcttctagggaatgcatggaggcagtggagagatggcagtacattggaactcattgattcatc

SEQ ID NO: 44776 - DNA, 254 bp, Glycine max
agacacaaaaaaatggctagtggccgcaatttgaagaacgctgtgattgcattcttggttcctcttccctccatcttcttctacctctcattcctcaaccactacgactcagcaaaatccccatctttttggtcaactctatggtcatggtgctatcaccaccctcttctattagccaacgctctcttcttcctcaacgtcaatgtcctcttctggctcataggcctaatacaatccagccactggatgatcga

SEQ ID NO: 44777 - DNA, 254 bp, Glycine max
gtttcaaggggagttgagtgatgcttcggttgtggcggtgaagaggttggagaggccggggggtggggagaaggagttcagggctgaggtgtccacaattgggaacattcagcatgtgaatcttgtgaggctgagagggttttgctctgagaattctcataggcttttggtttatgagtatatgcagaacggtgcccttaatgtttatttgagaaaggaagggccttgtttgagttgggatgttaggtttaggg

SEQ ID NO: 44778 - DNA, 254 bp, Glycine max
gtatcttgagtctgaagcagaagagttgaggaaatctaatttaagattgcagatagaaaattctgacttagctcgaagattggattctacccagatccttgcaaatgcatttctggaagacccagaggcaggtgctgtgaagcaagaaagtgagtgtcttaaacaagaaaatgtgcgcttgatgaaggaaattgagcaatttcagtctgatcgatgttcagatcttgaagaattggtatatctgcggtggataa

SEQ ID NO: 44779 - DNA, 251 bp, Glycine max
gcaagaatggcacttcgttgcttggtgatgtccctttctgttctcttcactcttggtcttgcgagagaaagccatgccagagacgaagatttttggcatgctgtttggccaaacactcccattccaagttcattgcgagatcttctaaagcctggccctgcaagtgttgaaatcgatgatcaccctatgcaaattgaagaaacacagtacccgaaaaccttcttctataaagaagaccttcatccaggcaa

SEQ ID NO: 44780 - DNA, 245 bp, Glycine max
caagcaacttaattccagaggctcctcctcctagcaaagctgatgaagacagtaagattaaagcctttcttgatactccagccttggactggcaacgtcaaggttcagactttggcactggtagaggctttggaaggggtacagggggacggatgggtggtggacgtggttttgggatggagcggaaaacacccccacaaggctatgtatgtcacagatgcaaggtgcctggacattttattcag

SEQ ID NO: 44781 - DNA, 246 bp, Glycine max
cttgtggctccaacaaaagccatcatgaatgctcgtgtatcagtttaccgatggcatgagttcttccctcatgccagaaacaatattggtgtagtgattgcaatatggtcccctatcatacttgtctactttatggatacacagatttggtatgccatcttctctacaatagtaggaggcatatatggtgcatttcgacgtttgggagagattcgaacattggaattactgaggtctcggtttgat

SEQ ID NO: 44782 - DNA, 188 bp, Glycine max
cggctcgagaaagatgagtgatgatcaaacggcagtgcgttttggtattcttggatgtgctaacatctccatcaagctatgcaaagccctaagcaaagcaccaaatgccaagctccatgccataggcagccgttccctcgagaaggcgacggcgttcgcggctgagcacggccttcccgaggctgtta

SEQ ID NO: 44783 - DNA, 186 bp, Glycine max
tcgtgccttatcgctgtggttttcatcgtcttccttctcttatatttcttctccctcctgtctccgccgtacgccgaaacaatggccgtaaaaggagagggccctgctctcggaatcgatctcggaaccacctacccttgtgtcggtgtgtggcaacatgaccgagttgacatcatcgccaacgac

SEQ ID NO: 44784 - DNA, 185 bp, Glycine max
ccttgatctaagttctgtttccaccatggatcttcaaaccctctacttcacatccattttatccattttcatttttatgtttttggggcacaaaataattacaaagaaacctacctcaactccaaatttaccaccagggccttggaagatacctatcatagggaacatacacaacgttgttggct

SEQ ID NO: 44785 - DNA, 187 bp, Glycine max
cttattctatagggctatattccttcgctgaagggtttaatttgcgccatggcttctctcttcgcgagaaccaagaggttctcatggactactcttctgcttcttctggagctattcacaatagtccttcacacggcagatgctcaaattggtgtttgttatggtatgatgggcaacaatctaccac

SEQ ID NO: 44786 - DNA, 181 bp, Glycine max
caggttggttgctccatatacacctcctcatgtaagtcaccatgcgagaaagtagtcttcacatccaattgaaacaaaggccaatgatgtgtagcagcaagagagataagaatacgaaaggaggaaagcttagcaacaagggaaaaagtatcagtataatcaactccataagtttgagcat

SEQ ID NO: 44787 - DNA, 241 bp, Glycine max
aagattcctaattgattaaacctaattctcatttctacatcgttcgattcttctcctcctaaacatgcagatacttcgcgaaaactttgaccggtaagaccatcacccttgaggtggagtcctccgacaccatcgataacgtgacagctaagattcaagacaaggacgggatcccacctgaccagcagacacttatctttccgggtacacagcttgcggctggtcgaacccttgccgacta

SEQ ID NO: 44788 - DNA, 241 bp, Glycine max
cccagtgatctcagggctgccaatgaattgctaaagcagattaggcaacactcttctcccattggggatgcatcacagaggttggctcattactttgccaatggcctcgaggcacgcttggttggggatggtacaagtacccaaggaatgtatacttttctgagctctaagaacaacactttttctgagttactcaaggcataccaggttttcagttcctccagccctttcaagaagtttg

SEQ ID NO: 44789 - DNA, 212 bp, Glycine max
cttttggtttttgcagaaagacgaagactgtggaagaggtacttgaaaatatatatcaaacctggttggaagaaaggcacaaaaataacatttcctgggaaaggcaaccaagaagcagaagctactgctcctgacgatctaatctttgtggttattgaaaaacacatgctttgttcaagagagatggaaatgatttggttgtcacacagaaa

SEQ ID NO: 44790 - DNA, 239 bp, Glycine max
ctcgagcgtggaacccggctcgttgcttcattaaacaatgtctcttttgtgatgcaccaaactgcacttctccaagctcactacttcagtatctggggggttttcaggactgattttccagaccgccctccatcccctttcaactttactggtgcgcccctaactgccaatcttgccactttaactggcactagagttagcaagattgctttcaattccacagtggagctagttttgca

SEQ ID NO: 44791 - DNA, 191 bp, Glycine max
ttgcaatcaaattagttcattctctttgcgcagttccctacctctcctttcaagatgcagatcttcgtcaagaccctcaccggaaagaccatcaccttgaggtggaaagctctgcacatcgacaagtcaaggcagatccagacagaagatcccggtagaagctatctgcggacagtcagcgcgactgcgta

SEQ ID NO: 44792 - DNA, 234 bp, Glycine max
tctctgtcgaacttgaaggagctcaatgtgagttttaatgagcttgagtacgtgcctgagagcctgtgttttgctacctcgcttgtgaagatgaacatagggaacaactttgctgacatgcgatccttgccgaggtccattgggaaccttgaaatgcttgaggagttggatatcagcaacaatcagattcgtgtccttcctgactcttttaggatgctcactcgtttacgtgtc

SEQ ID NO: 44793 - DNA, 163 bp, Glycine max
gcaacacaaagcagcacctctgtttgataggcttgtgtttgataagacaaaactagctctaggtggacgtgttcgcatcctgttatccggagctgctcctttgcctaggcatgtggaagagtttatgagggtcactagtggatctacattatcacaaggtttt

SEQ ID NO: 44794 - DNA, 230 bp, Glycine max
caaactataggagggttaaggagcaggcggcggttgattatttagagttaaggtccgtggctcagggtgtctctagacaaagagaatttgacctttgtggcaaggaaagagagaattttgtgccttgttacaatgtttcagccagtttgttagcagggtttaaagacggagaggagtttgaccggcattgtgaactgttagttgaagcagagaggtgtttggttcgccct

SEQ ID NO: 44795 - DNA, 280 bp, Glycine max
accgcccccaaaatctcactcttctgccttctcttttctcttctcttcttcctccaaaacaagtaaacaaacaacactctcacattcaccacaacacaaacacaaacacaaacaaagacaacaaccttgtttgtctgcaatcaaaaccttcaagctggcgttcgagaaccaagacacccctgtccgagaaatcaagcccaagaaccggagaatcatgggtgctggaggccctgatgacgaggacaataggtggccaccatggctgaaacctcttctcaaa

SEQ ID NO: 44796 - DNA, 261 bp, Glycine max
cacaacaagactagttgttcacaatgaaaagtcgaatgagacaagcacatggtttggtgaacttatagaagttcatgcaacaactcgaggtggtcaccataggggtaaagtagattagatctacagttgctcctgatgtacacctccaatggatgctgaggagtatgctgagtgtgaggcatgggtacaggactttcctgcccttcgtgaagccatgaagaagagagggattgtggatatggatctcgtgatggtagatct

SEQ ID NO: 44797 - DNA, 247 bp, Glycine max
caggacttggaccagaagaaaacctaacagagagtggcagttcttataagcctcagatatttaccttccgggagcttgcaacagcaacaaaaaattttagggatgaaacctttattgggcaaggtggatttggcatgtttataaaggcacgatcgggaaaataaatcaggttgtagctgttaaaagacttgatactactggtgtccaaggggagaaagaatttctggtggaagttctcatgctttcc

SEQ ID NO: 44798 - DNA, 247 bp, Glycine max
tgtttacacactcaaggagatggaggaggcaacatgttcattcagtgatgagaatctgcttggtaaaggaggatttggcaaagtctaccggggaactttgcggtcaggagaggttgtagcaatcaagaaaatgagttgccagcaattaaagcagcagagggggaacgtgagtttcgtgttgaagttgacatcttgagcagacttgaccacccaaatcttgtttctttgataggctactgtgcggatg

SEQ ID NO: 44799 - DNA, 245 bp, Glycine max
gtgaaagagaatccgaggcgaagagaagagaaaaattaagatggaggggaaggagcaggatgtgtcgctgggagcgaacaagttcccggagagacagccgattgggacggcggcgcagagccaagacgacggaaggactaccaggagccggcgccggcgccactggttgacccgacggagtttacgtcatggtccttttacagagcagggatagcagagtttgtggccacttttctgtttctata

SEQ ID NO: 44800 - DNA, 240 bp, Glycine max
ctcaagaatagtgaatctcctggcaacagcagcaacaatctaccacttagcatgaatcggagcccctcaacttccgttactcctatccctgataagtactgttgtctctctagagaagatgtgctcctttcatcatcggttgtcttggcgcattggctccccttcctctcacttccattgctgctcttgaagcaattaattcaaactacaactatattgaatcttctactccagccattg

SEQ ID NO: 44801 - DNA, 248 bp, Glycine max
gcggcgggagcgctcgatctcgtgacggtgcttgacgttaataacagcatgagcggcgcacagtttcacatgctaaagcgcgccatgcgtttggttatatcgtcactcggcccggctgaccggctcgccgtcgtggcttcctcggctaataccaaacggttgttacctctgaggagaatgacggctcagggacaacgcgcggcgcggcgcgtcgtggatcggctcgtgtgtgaccatggaaacagcgt

SEQ ID NO: 44802 - DNA, 263 bp, Glycine max
gaattcggagttccgtgaggctcctgagaaggatcagatccacgcggcgacgcttttgagcttgggaggccatcgaatcgattcggcgcggaacaaggatgatgtggcggaggcgctgtcgaggcagtactgggaatataatgtgcttgactatgaggagaaagtggtagatggttttcatgatgtatatgggccctataatgattcagtaatgcaaggcaagatgccatctcgaacagatcttgaagcaaaccctggaggtt

SEQ ID NO: 44803 - DNA, 262 bp, Glycine max
atgcaacgaccacaattttgttcctcaccaaaatgggaactcttaagcctattgctatccagcttgctcttccaactgggaatccaaatacttcatccaagcaagttctcactcctcccaaagatgccacctctaaatggctctggcaacttggcaaagcacatgtttgctccaatgatgctggtgttcatacacttgtgcaccactggttacgtatacatgcttgcatggaaccgttgataattgcaactcatcggcaatt

SEQ ID NO: 44804 - DNA, 252 bp, Glycine max
agagaccatggtgaacctagtggtagcacagagaccattgctacatgggcttatgaagatggcggggatcaggccctacacggtggagatagagcccgggactaccatgagcttctgggtcccttcggagaccataacaaagcctaagaaaaaggacgagaagcccagaatcagggcgaacctagcaagcccgcggtgattctggtgcacggcttcgcggccgaggggatcgtgacgtggcagttccaagta

SEQ ID NO: 44805 - DNA, 254 bp, Glycine max
ctcgatcactcccacgcgctcctatatcctctccttcaccgtcgctctctccaacgatcacaacaacatcgtcatcccatggcaaacgccgcatctggtatggcagtccatgatgactgcaagttaaggtttttggagctgaagacaaagaggacacaccgtttcatagtttttaagattgaggagcagcagaagcaggtcattgtggagaagcttggtgagccagcccaaggctatgaagatttcactgccag

SEQ ID NO: 44806 - DNA, 244 bp, Glycine max
ttaattccaaattagaatcctcaaattccaaaattgaaaaggtcaagatgactggtacaggatctccttgtggagcctgcaagttcttgagaagaaaatgtgtgagaggctgtgtttttgcaccttacttttgccaagagcaaggtgctactcattttgcagccattcataaggtctttggtgcaagcaatgtctcaaagctcctcgctcaccttcctgtgagtgatcgttgtgaagctgctgt

SEQ ID NO: 44807 - DNA, 264 bp, Glycine max
atgaagggtggtagcagaaaaaaatggactcacatctccccgaccacttcaagtgtccaatttccctcgaaataatgtcggaccctgtcattctctcttcgggtcacaccttcgaccgttcctccatccaacgttggctcgacgcgggtcaccgaacatgtccaattaccaaactacccctccccgaccaccccgccctcatccccaaccacgcgctgcgaagcttaatctccaactacgcattcctctcacctctcaaccata

SEQ ID NO: 44808 - DNA, 267 bp, Glycine max
atcaccaaagccttcctagaacgaaaaaaaaaagaagagcaattttccctcaccaaagaagaagaagcaaacaatggccgatcaacttaccgatgaacagatctccgagttcaaggaagccttcagcttgttcgacaaggacggcgatggttgcatcacaaccaaggagcttggaactgttatgcgttcattggggcaaaacccaactgaggcagagctccaggacatgatcaatgaagtggatgctgatgggaatggtaccattga

SEQ ID NO: 44809 - DNA, 258 bp, Glycine max
gcaaaataaaagcctggttatacgataatatgggttctaggggtgattatgatgccccaggtcattggtgtactacaatgctttacagtgctgatggaagtagactgttttcttgcggaactagtaaagatggagagtcatttcttgttgaatggaatgaaagtgaaggagccattaagagaacatacaatgggttcagaaagaaatccactgggtttgtgcagtttgacacaacccaaaatcgatttttggctgctg

SEQ ID NO: 44810 - DNA, 272 bp, Glycine max
atcagatttctaaaggtggctattccatcactctgcgtccacctggtgaacatgctcactggttcaccaaagccaccctccaaaggtttgttagatttataagcactccagaagttctagagaggtttgtgacaatagaaaggagattgtgcagattgaaggatcgattcaatcaagtgagaggaacaatttgttggcagaagcagaaggaagcatttcatctactgatgggcgtgtcaaaagcaacaacttcctctaagatgaaagatgaa

SEQ ID NO: 44811 - DNA, 270 bp, Glycine max
atcaaactggatcggggaagacttacaccatgagtggtccttcaggtggagggacatcaaaggatatgggaatcaattatctggcacttaatgatctgtttcaaatgtctaatgaaaggaaggacatcataagctatacatttatgttcaaatggttgagatttacaatgaacaagttagagacctacttgcagaggacaaaacagacaacaaattagaaattcggagctgcaatgatcgggttgagccttcctgacgccatattgcatt

SEQ ID NO: 44812 - DNA, 270 bp, Glycine max
accaacaattgcaatctttacttgaaactctcagtgccactgagccatactacattcgttgtgtaaaacccaataatcttcttaagccatcaatttttgagaataaaaatgttctgctgcaactacgttctgggggattatggaagcaattaggataagctgtgctgggtatcctactagaaaaacctttgatgaatttgtggatcgatttagccttctttcacctgaagcattgactgaattctgcatgaggtcactgcttgcaagagg

SEQ ID NO: 44813 - DNA, 264 bp, Glycine max
ccgagctgaacctgaaacagatgaagtatatgcacagataactttgcttcctgaagcagatcaaagtgaggtgaccagccctgatgatcctctgcctgaatctccgagggtcaagatccattcattttgcagacacttactgcttctgacacaagtacccatgggggtttctctgttcttcgaagacatgcagacgattgtctgcctccactggatatgtctcagcagccactggcaagaattggttgcaactgatttacatgg

SEQ ID NO: 44814 - DNA, 291 bp, Glycine max
tattatcattctcatatctctatttttctttattaatatttactttataatctctcttctctttctttttaatttcaaatcattcattttaaaaaacaaacaaacaaacaaataaataaataaataaataaataataatggctactaatattgctatcggtattgatcttggtacaacttattcttgcgttggagtgtggcaaaatgatcgtgttgaaatcattgctaacgatcaaggaaatagaaccactccttcctatgttgctttcactgacactgaacgtttgattg

SEQ ID NO: 44815 - DNA, 291 bp, Glycine max
gaagatattcgttatgtggttggatttggtgacttatttgcaccatcatggccatgaagacaaattaccttggtaccgtggaaaggtatccttcattctttaaagtctttcttatgaaaaggactggtctatttgtgtcttgacatacttttgttatgtgtatgagtttaattttcatgcattgttagtgtattttttttatattgttaatcaattaaaaatcatcattgatatgacttgtaaaagtcaataaacatatcatacatggttgaatgataatgccaatacata

SEQ ID NO: 44816 - DNA, 292 bp, Glycine max
gcgacgctgttcttgaggactgaaatgcaccggaataacgaagatgatgctgcactttacattggtgcaattttgttcactatgatcatgaacatgtttaatggttttgctgagctagcactcacaattggaaggcttcccgtgttttacaagcacagagaccaccttttccaccctgcttggacttaccaccctccccaatttcttgttgcgtattcccatttctgtgtttgagtctcttgtttgggttggtgtcacctactacatcataggatttgctcctgatgccagc

SEQ ID NO: 44817 - DNA, 281 bp, Glycine max
gctagttttgatggtctgattaccaagcaagttatgagcaagatggcagaaatgataaacagtctttgtggtggtgatgaaaaattgatgcgtgaaaggacacacctgctgttggcttgttgttcaagaatggcaatttgtaagaaagatgtttggagagttgaatgtggaatcccttctggatttccgctcacagttatttgtaatagcatttttaatgagatgctcattagatatagctatgacaaattactgcgccaggctaaagctccaagtatgtt

SEQ ID NO: 44818 - DNA, 266 bp, Glycine max
cacatcatcatcatcttcttcttcttcaatcagttgactcttcgttcctccctctattcatctgtgcgcgttcttctatctttctcttttctctcagatctgtgttcccggtatcgtcgttttgttcattcttttttttggatctcaggatggagcccatggacatcgttgggaaggccaaggaagacgcttctcttcctaaagcgacaatgacgaaaattattaaagagatgttgcccccggacgtgcgtgtcgccagagatgca

SEQ ID NO: 44819 - DNA, 138 bp, Glycine max
ggagccgtagtgccagtcttgattacaagggtcgtggtagaggacgctatgatgatgagcgtaatagtagaagccggagcagatcagttgatagccgctcccctgcacgacgcagtcctagtcctcgaaggagtccct

SEQ ID NO: 44820 - DNA, 244 bp, Glycine max
gtcaaaaacctaacggggaagccgatacccctagaggtagagtcttcggacacgatcgacactgtcaacgcgaagatccatgacaatgagggcatcccgccggatcagcagcgcctgatcttcgccggaaagccgctggaggacgggcgcacccttgtcgactacaacatccagaaggagtccaccctccacctcgtcctccgcctccgcggcgtcggcaatatgcgcaagaagaagacctata

SEQ ID NO: 44821 - DNA, 244 bp, Glycine max
gcttattatggttgggtggctttgaaccacaaaatgggcatgttcgatagctacccagggtctcccactttgggacttgttgatttgggtggctcaccgttgcaggttgtggtagagatagatggttctggggatgatgtgcacatgatgagattgaagctcagctcaacagaacctcggattttggcatactcattgcctgcatttggcttaaatgatgcgtttgataggacagtttctcatg

SEQ ID NO: 44822 - DNA, 252 bp, Glycine max
aaaaaaaagcctcgtctctcgtgccgattctccaggacaattcccttcacccaacctaattggtacttgcttgagatagtaaagttgcaaactttgaagcaattagtgtagaagatgagtacgttggatgcaacaagggctgaacttggtcttcttgttttatatttgggcaaggctgaagcaagggacaaaatatgcagggcaatacaatatggttccaaatttttgagtaacggggaacctggtactgct

SEQ ID NO: 44823 - DNA, 254 bp, Glycine max
gtggttcttgctaaaaagcttgccagagccatcaatgtctgatgacccattgtggaagaagctttcaggccatatggcactgaaagatggccccgtgtattcccactaaccataagtgcgaaccttgtgggttcggctttgcagttggagaacccagtggtgtgttctgttaggaacaatattgtcatacctaagctagtcagtctcgggccattgctggagcatacaaattttacctgtgagggtctataaac

SEQ ID NO: 44824 - DNA, 184 bp, Glycine max
atttgatactactttgtaattgacaatttctcagaacagttatgctggcttgcatttaatgtataatttgtttctcgatgtgcaggttttaaaggacggtatgcaacatttagggaatataatatgtagcaagttgggtgcaagaatggattctgagcctaaacgttggagaatcttagctgat

SEQ ID NO: 44825 - DNA, 239 bp, Glycine max
atttggtgctactgtgcgacacattgtggaaggagagaccaaggtgtcgaaactgggaaagttgaagtataagaatgaaaatgattctgtgcaagatgtgaaagcagaagatcttcggcaaatgtttctggctatgactgaggaggttcgtgttataattgtcaaattggcagataggttgcataacatgcgcacgctatcacatatgcctcctcataaacagactagcattgcgatgg

SEQ ID NO: 44826 - DNA, 304 bp, Glycine max
cgctggtgcttggggcagtgtttttgctgctttgctgcaagatacttatggccaattccgtgataagggtgcaaatcaggatatggagaaggccaggaaagacagttgatagagccactgcagagcacctcttcgaagttatcaattctagggaggatgtgttgaggaggttgataaggcgctgtgcttatctgaaatacgtcgaagccaggcttggtgataggactcttctggctgatgagattttgaaagatgggttttgcttgaatatgattgacacaccactttgtccattgaaggtggt

SEQ ID NO: 44827 - DNA, 305 bp, Glycine max
gagagttctacagaagacaaacaaaaccctccttcttgagagagaaagaagaaagatggctccgaatcttgaatgtcgcatgtacgaagcgaagtacccgaaggtggacatggcggtgatgatacaggtgaagaacatagcggacatgggggcctacgtgtcactgctggagtacaacaacatcgagggaatgatcttgttctccgagctactcccgccgtcggattcggagcgtgagcagcctcatcaaggttggacgaatcgagccggtgatggtgctccgtgtcgacaaggaaaagggttac

SEQ ID NO: 44828 - DNA, 169 bp, Glycine max
tgaatgcaaagcgaactattctttcgccttttactaaagaataccgtgtattcgtcatcttaagcggcatacgtcaattttttaaagagtccttctgttttgaaggctctgcaatgtattttcaatagttgatcttgctcatgaacttcggtccatgtgaatttctgtc

SEQ ID NO: 44829 - DNA, 293 bp, Glycine max
gaagtgttcgagcgacacatggaatccgttggtggccttcgacaccccaatttggttcctcttaagggcttatttccaggccaagcacgagaggctcataatctacgactttcagcccaatggcagcctcttctccctcatacacggttcgagatcaagcagggcaaggccattgcattggacatcgtgcttaaaaatagcagaggacgtagcacaaggtctggccttcatccaccaggcatggagactggtccatggcaatctcaagtactccaatgttctctttggaccaa

SEQ ID NO: 44830 - DNA, 298 bp, Glycine max
  unsure (1)..(298): unsure at all n locations
gctatgctanaattttcataaggcagaagtagagtcaacttaatgcgaacattctggataatggatttggtaacatccatactctctaatctcaatctagtcatccatgggaccagatatgtacagatattgaagatttcaagtgctcttagttaattgtgaaagtcttggaacttagtaatgaacaataaaagacagttctacaagagaactatggtaagccagatccagaaaatcgagctcaagtaaaggccctgtacaatgagcttaatcttcaaggtgtatttgaggagtacga

SEQ ID NO: 44831 - DNA, 304 bp, Glycine max
  unsure (1)..(304): unsure at all n locations
tgcaagcttcgccggtttgcaacacagtgcctacaaccgatgngcgagaaacaagaccagagacaggctttttctgaaagcaaccaaaagtgtttctatgctctaagaaaggtgggaagggaaagaggcctgggaaaggtgggaatcgcttttggaagtcaattgggcttggattcaagactcccagagatgccattgaaggaacctatattgacaagaagtgccccttcactggcaatgtttccattcggggtcgtatcctagccggtacttgtcacagtgctaagatgacaaggaccattat

SEQ ID NO: 44832 - DNA, 273 bp, Glycine max
cgaggcggcacgtgtgacggctgaggtcatagcggacatacggtgagggcgctgcagaggaccgtgcctcccgcagttccggcgatcgtgtttctctccgggggacagagtgaggaagaggcgacggtgaatttgaacgcgatgaatcaactgaaggggaagaagccgtggtcgttgactttctcttatgggagggcgctgcagcagagcacgctgaaggcgtggggtggaaaggacgagaatatccccaaggcgcagagcgcgttgcttgtg

SEQ ID NO: 44833 - DNA, 267 bp, Glycine max
gcgtttccctttcattttccctcactttctcgctcgccaaacgcccctctctctcctccaatggccgaccagctcaccgacgaccagatcgccgagttcaaggaggccttcagcctcttcgacaaggacggcgatggttgtattactactaaggaacttgggactgtgatgcggtcactagggcaaaacccaactgaggcagaactgcaggatatgattaatgaggttgatgctgatggcaatggaaccatcgacttcccagagttc

SEQ ID NO: 44834 - DNA, 216 bp, Glycine max
aggcgggacagcctcgtataaagcggccaccatcgcctgtagtgctttgtgttccacgtgcacctcgtccacccccaccatcccctgtgagtgactccaggaaacacaggggttttcccactgttagatctggtagttccagccctaggcactggggaatgcgaggctggtatcatgatgggagtatttttgaggaacttttaaaagaaggggggc

SEQ ID NO: 44835 - DNA, 240 bp, Glycine max
atggttctggtggtactatactgtttgtaggtgatttgcattggtggactactgatgctgagcttgaaactgagcttagtaagtatgggcctgttaaggaggtgaagtttttcgatgagaaggcgagtgggaagtcgaaggggtattgtcaggtctgagtcttttgagccttctgctgccactgcttgtaaggacgggatgaatgggcatgtttttaatgggaggccgtgtgttgttgcg

SEQ ID NO: 44836 - DNA, 260 bp, Glycine max
cttctctctgagaacaacaccccacactcctctctctctctccgcatccttctcttctcacacctccatggcccacacttcccttccctccgccgatgccggcatggacgctgtccagcgccgtctcatgttcgaagacgagggatggcactcccgtctaaggcagggaaacgcttacatttaccttgtctcaaggagacgtgtgagactcaaatctgcgacctggcagatgcaagaccctgtcttgttctatttgacca

SEQ ID NO: 44837 - DNA, 254 bp, Glycine max
aattttcattttgtattattttggtcatgcgatttcttccagttgggaaagagattcgagagaaattctctggtgcagttgaagcgttctcccggaggaaccctgcaaatgctagtccttgtggtgatcacaccaaacacaggagttttgaggattaaccagtgcaaaaggatttgcactatgcgcaacacaattccactcgatatggcagcagttcaagaagagccatgatctcatcaaacaagccaatatcc

SEQ ID NO: 44838 - DNA, 248 bp, Glycine max
cggggtatgcataccctgatacgtgattctcaaacaacgaaacatgactttgtattttattctgaccgtttgattcgtttggttgtagaacatggcctagggcatcttccatttacagaaaagcaagtaaccactccaactgcatcggtatacagtggtgtggatttctgcaagaggttgtgtggtgtctctatcatccggagtggggagagtatggaaaatgctctacgagcatgctgcaaaggtat

SEQ ID NO: 44839 - DNA, 271 bp, Glycine max
attacctttctctgagtccaagttccaacgaaatgtgaacagtgaaagaaacaaaaaaaacaccatgatgctgaaggcggcaccgcgtgcagtaatctactacctctcggagcacccggctatcgtggggttccggtggagccacgcccaatcatggggcgccacgtggtccttcctcttctcctcaattgcctcctacctcttcctctcagtcttcctatacttctctctttctctcctcttccgccgccgtcaaatccctctcggcccc

SEQ ID NO: 44840 - DNA, 263 bp, Glycine max
ctttgttttctaaataaagagaatcatgtagtaagactgaattgactgcatgtgctcctcaaaagaacaatgtatgaaatacctatgctatgctatatgctatgatacctttattacataagacgagtggttaattgaagagtccgcaccacccgtgaatgtgatcctgtcaattaaccactcttcttatgtaaagggggatcatactaactttgaaattgagtcttcttttggagtggaagcttcagctctatatcctgatg

SEQ ID NO: 44841 - DNA, 263 bp, Glycine max
gggcagagatgtttccctctatgattgctagagctatcaacctcgatgttatatctaatggcatgggtggaacaagaaatggtgctctacaagtgatgcatgctgaggttcaattgctttcgccactagttcctgtccgtcaagtaagattcatccgattctgtaagcagcatgcagaaggtgtttgggctgtggttgatgtttctattgagattggtcatgatgctgctaatgcacagccagtcatgagctgtaggaggctt

SEQ ID NO: 44842 - DNA, 261 bp, Glycine max
gtggagagcgacgccggcagcggcgacgatgacgactacagtgacgacggagatgggagctctggcaacacgtctcgctccagattcgcaaaacgatgtgagtcgttaaataccggggtttcattcctttggtggatagtgggcttttattgggttgtctctggtggcgatatacttctgcaagatgccccacgattgtactggttggctgttgtctttctggcatttgatgtcttttttgccatcttttgtgttgtcttg

SEQ ID NO: 44843 - DNA, 246 bp, Glycine max
ggctcgagcggctcgagcgcgttggtgcaaaccatccttcgcttcaaactctctctctctctttgcgatttctgcaaaccgaacatttcatctccaaagggatcaacaggtcgaaggagaaatggggctgacattcacgaagcttttcagccggcttttcgcgaagaaggaaatgcgaattctgatggttggtcttgatgctgctggtaagaccactatcctctacaagctcaagctcggagagat

SEQ ID NO: 44844 - DNA, 158 bp, Glycine max
tgcagtcatacgtgacaacaacaacacctgatttcaactgtgtctctttacttcgagtcaatagtgcaaattcaagccaaagcaatatgctgatacttcaagagagttgcacagattctactggctcatatgtagtttatgctcctgtggatattgtt

SEQ ID NO: 44845 - DNA, 157 bp, Glycine max
gacaaaaccgagtacttaccattagagagaatgcgagactacaaggatttcctgattgctataaactttgtgggcctgtcaaagagaggtatggttagctgggttcagaatccacaagttaatttgttctactttatcagggaaatcattcaatact

SEQ ID NO: 44846 - DNA, 260 bp, Glycine max
gtcactggacacaaaaatggtgatatccataagagcggttatgtagaacatctaataagctttgtatggacgaactggagggaagggactgccttaaatatagtagatcaaacactgcacaataattcaagagacgaaataatgagatgcatccatattggattactttgtgttgaagataacgtagccaatagaccaaccatggcaacagttgtaatcatgtttaacagtaactctctcgttcttcctataccctcaca

SEQ ID NO: 44847 - DNA, 204 bp, Glycine max
ctttcttggattccacagctcttactctccctgcagagaacagcagctcctcactgtaaacttgttcttctgaagattgcaacattgtatcctcaggctctgtattattggttgcgcacatacttactggaacgacgtgatgttgccaataaatctgaacttggtagaatagcaatggctcaacaaagaactcaccaaagtatt

SEQ ID NO: 44848 - DNA, 257 bp, Glycine max
gtgaagtgcgggttgaaggattagagacattggattatcttgacaacttgcagaaaagggaacgctttactgaacagggggatgctttaacatttgaatcagaagtaagattgtttaccttgttctactttgctttagaaaacacacgtgggtattacatgaaatatgctgtgagtaatgaaatatgacaatttccaagaaatggagcttctgatgataaattaaataaattgctatgaataaaaatcatgtttcta

SEQ ID NO: 44849 - DNA, 255 bp, Glycine max
tatcatccgcagctgcttttattcgcaccgcaaacagtgagccatggccgtcggaaagaacaagcgcatctccaaggggaagaagggtggcaagaagaaggcagctgatccctttgccaagaaggattggtatgacattaaggctccttctgtttttcaagtgaaaaatgttggcaaaaccctcgtctctcgtactcagggtaccaagattgcttctgaaggactcaagcatagagtgtttgaggtctccttggc

SEQ ID NO: 44850 - DNA, 207 bp, Glycine max
gcaaaaaaaaaaaaccacaatggcagcgagggctcccattccacgcgaagagttcgtgtacatggcgaactgtccggaacaggccgagcgctacgaggagatggtggagttcatggaaaaggtctccgcctccgccgaaagcgaggagctgcccgtggaggagcgaaacttcttctcggtggctaaaaaaaacgtattgggcgctcg

SEQ ID NO: 44851 - DNA, 242 bp, Glycine max
aaacaattggcaaaagagactgcaagctcctcaactgaaccagagaacaatgacgaagtggaacagattacaatagcgcgggctttactgaactaccgtttgaaggaaaagatgactatgtctaatccaaatgctccccttccatttcatgaaaggtttcagattcaaaatccaaggccaatcagttctcaaccgcccccagccacttcatcaaagatccttccccaaatttgccagaagac

SEQ ID NO: 44852 - DNA, 274 bp, Glycine max
gcacgtttaagaagcaatggcacgcaagaagatcagagagtataacaactttcattgttgaaccttttatccctcacaatgaggagttttaccttaacattgtctcagagagactagggaacagtataagcttttctgaatgtggaggattgaaattgaggagaattgggataaggtcaagactgtatttatgccaacaggagtgtctcttacatcagagagtattgccccacttgttgcaacacttcccttagagatcaagggagaaattgag

SEQ ID NO: 44853 - DNA, 159 bp, Glycine max
cagttgtgtattttaggagagcccttaaattgaacaaaaactttttatcggcttggacacttatggggcatgagtttgtagagatgaaaaacactcctgctgctgtggatgcctatcgtcgggcagtagatatagacccacgtattatcgtgcttggta

SEQ ID NO: 44854 - DNA, 282 bp, Glycine max
caacctcttaccgtgcgaatctctcaattcatcaaaactaacaacatcatcaccatcgtcgcaccgaaatcaatcgccacaacctcgggatctcagattcgacgcgccaaatcatgtcgaaggcgcgtgtctacaccgatgtcaatgccttcgccccaaggagtattcggattacgagtctctcacccttcaatggggtgatcaagatgattatgaggttgtgcgaaaagtgggcaggggtaaatatagtgaagtttttgaaggcataaatgtcaatagcaa

SEQ ID NO: 44855 - DNA, 263 bp, Glycine max
catgttatgcctaatgatttggtatccaaatatgttatagacccaagttattaagattgtggtagttgttcagttggagctcctgctcgtgttggtttggttgctccaattgatgtcgttgttcctcctgcaacacagggctcgatccctctcagacctctttcttccaggtgcttaacattcctaccaagattaacaagggtactgtggaaatcattacacctgtggaactcattaggaagggagacaaggttggatcttct

SEQ ID NO: 44856 - DNA, 267 bp, Glycine max
tagagagccttgactgttcttattcagttggaatgaggttcaggatgcgttttgaaactgaagatgcggcagatcgaagattcactggattaattgctggaattagtgatgttgatcctgttagatggcccggatcaaatggagatgcctactggtaaggtgggatgacatagaagctgctaggcacaatagggtttccccatgggaaattgagccatctggttctgcttcaaattccagtaacttgatggcagctggtttgaagag

SEQ ID NO: 44857 - DNA, 268 bp, Glycine max
ggaggaatcagagggcaagttgaagggaattcttggttacactgaagatgatgtggtctccactgactttatcggcgatagcagatcaagtatttttgatgcaaaggctggaattgcattgaataagaactttgtgaagctgtttcttggtacgacaacgagtggggatacagctcacgtgtcattgatcttcttgtattcgttgccaagaagtctctttaaggtgttacttcaaagtagcttgtcttcacattattaccgtatgttt

SEQ ID NO: 44858 - DNA, 245 bp, Glycine max
gcgagagagagagagagaatggcagcacttggtggcaatcgtgatgtggcaggaagccagaacagccttgagatcgatggtttagctcgctttgctgttgaagaacacaacaaaaaacagaatgcccttttggagtttgaaaaggagtaagtgcaaaacagcaagtggtttctggtaccttgtacaccatcactttggaggcaaaagatggtgggcaaaagaaggtttatgaagccaaagtttgg

SEQ ID NO: 44859 - DNA, 160 bp, Glycine max
acatcggataaacaagctgtttaattggcttcctctggcagctttaattgaggaaagaattgtttgcatgcacggtggtattggtcgttcaataaatcatgtagaacagattgaaaacattcagcgtccaattccaatggaagcaggatcaattgtgctt

SEQ ID NO: 44860 - DNA, 158 bp, Glycine max
atttggacaaggcaatcgatcacaaggctttgtttgatacattttcggcttttgggaatattctatcttgcaagattgcgacggatgcttctggccagtctaaaggccatggttttgtgcagtttgagagtgaagaatctgcacaaaatgcaattgac

SEQ ID NO: 44861 - DNA, 157 bp, Glycine max
atcgagtttgcaaacttccctgaaagtgttgttaccctagctagagaaaaggcagcagtattagaagacttttctccttctgcaacatccttaaatcatactacacaggaggtaggttctaaacgtaagatagcatttgaacccgatgacatgtctc

SEQ ID NO: 44862 - DNA, 274 bp, Glycine max
ctccttgaagtcgagtgttcactatggcagatgaggtggttctgctagatttctggccaagtccatttgggatgagggtcaggattgcacttgctgaaaagggtatcgaatatgagtccaaagaagaggacttgcagaacaagagccctttgctcctcaaaatgaacccggttcacaagaaaatcccggttctcatccacaatggcaaacccatttgtgaatctctcgttgctgttcagtacattgaggaggtctggaatgacagaaatccctt

SEQ ID NO: 44863 - DNA, 151 bp, Glycine max
caccagcgtgagaagctgcccagcacgcaaacacgtggagcgtgctgtggacgattccaacatgctcgttgtcacctacgaaggagaacataatcactcgcaaatcgcttctgaggtggcaaatgttatccttgaatcatcttagtcaacc

SEQ ID NO: 44864 - DNA, 187 bp, Glycine max
gtaattgctagtatattatcggattcattaaaaagggagagggtttatcactctgtgatgcttcagatgttcttcgagaagcattttctcaaacagaagcacacatgaataactattatgagggatgtacagcaacagtgcttctggtgtggactgatggtgatgaaaatttctttgcacaatgtgc

SEQ ID NO: 44865 - DNA, 193 bp, Glycine max
tcgagttgtaacctctctcttcaaccctaacttagggtttatgttctaaaacccttttcagtgtctcttttagaaaaggttgattggaggagataaaaatgctcgtgttgtttgaaacccctgcgggttttgccctgtttaaagtgctggatgaaggcaagctttctaaagttgaggacttgtggaagaactt

SEQ ID NO: 44866 - DNA, 195 bp, Glycine max
tcagcatatttgttgcaaacagaagcaagcttcttagacttttgggtgacttaaaaaccgataaagaggatgaacagttcgaagctgataaagctcaagttataaaagaaattgcggctcttgaacctagggacctcgcttgagcttcagtttgtgtcgagtaacaagttgcattgtggcattttaccttattta

SEQ ID NO: 44867 - DNA, 196 bp, Glycine max
tatttgacaaggcggcttcaaagtttcaggaggtggctgctttggctttcttcaactggggtaatgttcacatgtgcgcactatggaagcggattcccctggatgagtccgctgggcaagtggtagtggcagagcagcttcaagtggcttatgaatgggtcaaggaaaagtattctttagcaagagagaagtatgt

SEQ ID NO: 44868 - DNA, 192 bp, Glycine max
tttcccctagattcagccacagtttcggaggagaagaaaatagtcgttcgagatggcccgtacgaagcaaactgctcgtaagtccacaggaggaaaggctcctaggaagcagcttgcaaccaaggctgcacgtagtctgcaccaactactggtggtgtgaagaagccacatcgttaccgtcctggtaccgtt

SEQ ID NO: 44869 - DNA, 274 bp, Glycine max
tttgggagttaggttctgcacgctctgcttccagcgagtgttctttcttcgtttcaacaccttaatttgcacacgctgcttcttcagcttgagaaatggcacaagaaacctttctattcacatctgaatctgtaaacgagggtcaccccgacaagctgtgcgaccagatctctgatgcagtgctcgatgcgtgccttgaacaggaccctgacagcaaggttgcctgtgagacatgcaccaagaccaacatggtcatggtctttggagagatcac

SEQ ID NO: 44870 - DNA, 281 bp, Glycine max
cacagcgtgtcccctcctcgctggtgttcaagctggccattctctaggcctacatgtcggaggtacaggcccagcaggtggagcccaaggcccgtgaaagcccaacccgcaaaatcccaaccctcaaaaccttccaaatctatcgctggaaccccaaaaacccttcaaagcacaaggtcaaggactaccagatcaacctaaaggagggtgggccgatggtcctcgatgcgctcaacaacatccagaataagattgacccgagcctcacgttccgccgctca

SEQ ID NO: 44871 - DNA, 274 bp, Glycine max
tatccgcagctgctgttattcgcaccgcaaacaaacagtgagccatggccgtcggaaagaacaagcgcatctccaaagggaaaaagggtggcaagaagaaggcagctgatccctttgccaagaaggattggtatgacattaaggccccttctctttttcaagtgaaaaatgttggcaaaaccctcgtctctcgtacgcagggtaccaagattgcttctgaaggacttaaacatagagtgtttgaggtctccttggctgatcttcaaggggatga

SEQ ID NO: 44872 - DNA, 256 bp, Glycine max
cttcatccttctctgttctcctagaacttgattacttgaacattccctatgacagatgaggtggttcttctggatttctggccaagtccatttgggatgagggtcaggattgcacttgctgaaaagggtatcgaatatgagtacaaagatgaggacttgaggaacaagagtcctctactcttacaaatgaacccggttcacaagaagattccggatctcatccacaatggcaaacgcatttccgaatccctcattg

SEQ ID NO: 44873 - DNA, 230 bp, Glycine max
cgccgaagcagcaatcaaaagctgatcttgcgaagaagcagaagatcgtagaggacaaaaccttcggtctcaaaaacaagaacaagagcaaaaatgtccagaaatacgtccaaaacctcaagcaatccgtgcaaccaaatcccgactcttcaaaactcgctgccaagaaaaagaaggaggaagagaaggccaaggataaggagttaaatgatttgttcaaaattgctgtt

SEQ ID NO: 44874 - DNA, 230 bp, Glycine max
atttttgtgtcaaaatagggaactgtagttcttgttttccaaccagcagaggaaggaggtggaggggctaagaaaattttagatgctggagccttagaaaatgtcgcagctatttttgggttgcatgtgacacctaactttccaataggtgaagtggcctctaggtctggtccattgttggcaggaagtggtttctttgaagcaataataagtggaaaaggaggtcatgc

SEQ ID NO: 44875 - DNA, 223 bp, Glycine max
tccagccacacgcttcagaagacatggcctcattgggtgggttacaaaatgtgagcggcatcaattttcttatcaaagagacaggcgtttaagtgcacttagagtgatgccatggaaatcaaactgtttgcttcctgatgcctaagcacaaggaacctgatgcttaagtgccagatgtttttcctctttgccaacttcttgcttgtgacgctcaagcgccaac

SEQ ID NO: 44876 - DNA, 218 bp, Glycine max
actcgagcgaatcggctcacggctcgagattaagacaagaacgacagtccaagccatggaattggaaatgaaggatgataaaataggactgcagaggagtgagcaactgaaggaactgtacaagtttcttcttgcaggtgaagctgatccacaaactaaaaggccttctgctgcattagctccagaggacctctcagatttggagtggtattacttgg

SEQ ID NO: 44877 - DNA, 258 bp, Glycine max
ggaagaactgtatgaaattgatattcctctgagattcatagcctctgtgggcaccagagtgcatgggttggcatgttggtttgatgtgctattcaatggaagtactgtgcaaaggtggcttaccactgctcctgggtcaccgacaacccattggtaccagttgcgctgtgttctctctcagccaatttatgtcatggcaggacaagaaattactggcaggcttcacttgattgcccacaatgcacaaagctatacaat

SEQ ID NO: 44878 - DNA, 260 bp, Glycine max
gtcaggcggggctacccgctgagtttaagcatatcaataagcggaggaaaagaacctcattcttgaagtcacctctctcggtgtcgtcgccttcgtattcctcctcgtcgtcgtcgattagggaaaccacaattcaagaagatgaatgtgaagagaggctgaatgtttcatcatcacctatggctgcagggtgccctggttgcttatcatatgtaatgatcatgaagaacaaccctaagtgtcctaggtgtaactctctt

SEQ ID NO: 44879 - DNA, 258 bp, Glycine max
caaagtccatgaagtctgctccatttcgccgccacaagaaaccccaccaacaactcttcccttcaccctcttcgacgtcctatggcttcggttccccccagtggagcgtctcttcttctattccttcccaaacccaacaacaacatcatttttcgacaccaccgttctcccaaatctcaaacactccctctccctcactctccaccacttccctcctctcgccggcaccatcacatggcccaatcactcacccctccc

SEQ ID NO: 44880 - DNA, 253 bp, Glycine max
agaattttcaaccagattagccaaaaatttggagcagctgattctgaaagagggaccagagacaattgctgcatttattgctgaacctgtaatgggggcaggaggtgtaatagttccaccatcaacttattttgagaaggtccaagccgttgtcaagaagtatgacattctttttattgcagatgaggtacttccctaattcttaacatactgttatataaggtattctgtggtcgagttttccattctaatt

SEQ ID NO: 44881 - DNA, 254 bp, Glycine max
ggcatcatcgtttcctccatggtttgcttaaatccagtccaatcttaataatattattttcctagttattgaattgaatcgcattcgcaggagaacgggactcgccccgaattccaattggcctccgacggtgttcatcaagcacaactcgctgcacaatcattccaaaaggaactagaggctaataatatcccgcttgctaatgtacgcatttgctactcccccttttcaagaacaacccataccgctaacgt

SEQ ID NO: 44882 - DNA, 269 bp, Glycine max
gcgatgggagaagaagagccagaggtgcttgaatcggaatccaatgtagtcaacgccaacggtaacagcagcaacagcaacgaagaatattccttccccgttcttcgtttcgatgtctctcctcacagaacctaccatttccaccgccagttcatcactccttccaaccctaacaatttcttcaaggccgttaaatggtcacccgatggttcctgtttcctcacctcttccgacgacaacactctccgcctcttcgcgcaaccgggaac

SEQ ID NO: 44883 - DNA, 261 bp, Glycine max
atatcgtatacgctgcagtttgattgcattttacttcaaccatgtcgggtgatttagcatacaagagcattctccagagttcagcacttatgaagtacatctttgaaacgagtgcctatccaaaagagcatgaacaattaaagctactcagagagaccacggtacagaagtgccaggaaaattcggaatatatcatgaatgtgccagtggatgaagcgcagttcgtatctattctgcttaaaatcatgaatgcgaagaaaa

SEQ ID NO: 44884 - DNA, 276 bp, Glycine max
aaggtatggcttctagtagtcttcgttgcattgcttttgcacatgtagaagtagctgaggaggagcttgtagatgaagaagggaatgcaatggcgaaagtgaaagaaaatggtttaacattgttggggcttgtgggtattaaggatccatgtcgtcaaggggtgaagaatgccgtggaagcatgccaaaatgctggtgtgaatatcaaaatgatcacaggtgacaatgttttcactgcaaaggccatagcaaccgaatgcggcatacttcggccta

SEQ ID NO: 44885 - DNA, 206 bp, Glycine max
gtgcctgcaggcttcagaaatttggagcatgatatcacaaggagcttacatttatgtgtgtggtgatgccaagggcatggccagggatgtacaccgcgccctgcacacaattttgcaagagcaggtatatgtttttaaataataaaatcttgaattgccttaaattgatggcatgggtgattgcgaatttggtgccttatattagt

SEQ ID NO: 44886 - DNA, 206 bp, Glycine max
gaaaggcagagttttactgatgaaatagagaagcttaaacacgataaagagcaactcctcgtggaattacagaaatatcagcatgagtggcaggcatatgagatacaaatgcattcctcaaaagatcggttggaaaagttggaacagaatcaacaaaagatggtttcttctgtttctcatgtattgcagaaacctgtgatttctgt

SEQ ID NO: 44887 - DNA, 202 bp, Glycine max
tctcatcctcacaaatacaattatacaaacacatattcattctcctcacataccaaaaataaattatttttcttgttattttccctttgctaacggaaagccatgaaattcgggaagagcctgagcagccagatcgagaaaaccctgccagagtggcgcgacaagttcctctcctacaaggagctcaagaagaagctcaagc

SEQ ID NO: 44888 - DNA, 200 bp, Glycine max
ggaaggagccgtagcagcagcggaagctctagcttgggcagcgaatcacaatggcgagaggattgaagaagcatttgaagaggcttaatgccccaaagcattggatgcttgacaaactgggtggtgcatttgctcctaagccctcatctggaccacacaaatccagggaatgcctgccactcatactcattttgcgaaac

SEQ ID NO: 44889 - DNA, 201 bp, Glycine max
ataagaacctacacaaagcagctactacttggactcgagtacttgcacaaaaatggaatcatgcacagagacattaagggggccaatattcttgtagataataaaggatgcataaaacttgcagactttggggcatccaaacaagtcgttgagctggcaaccatttctggtgccaagtccatgaagggtactccatattgg

SEQ ID NO: 44890 - DNA, 247 bp, Glycine max
cggcattggaggtggaattggaaaaggtggaggttttggcggtggtgtcggtggtggatttggtggtggcgccggtggaggcggtggcggaggcggaggcggtggaggaggaggtgctggtggcgggtttggcggaggagcaggaggcgggtttggtgcaggaggtggatttggcggtggtggaattggacaccactagagcgttgcgaacgttgcatgcatgacaaagttatattttaacgtcctt

SEQ ID NO: 44891 - DNA, 273 bp, Glycine max
tcctcttttgcgttcactctggtctcatagtgacgaacttctgaagaaatggcacatcatcctgtgacacactctcactctatccgcgacacgcttgaacccaagggcaatggaatcctgcaacatcaccaagtggttgcagagtatgaagaaatccctgaggagagcagaaagaaactccaagatggtgtctttggagaagttttgagatccacacaggaagccatagtgctgccaccacttgtagctcttgctgttcgaccaaggcctggt

SEQ ID NO: 44892 - DNA, 259 bp, Glycine max
atttttggttgggggtttccggataaatccttcctcttataaattttgcggcggaaaaagcccaaattcaattggtttaagggaggaacctttcgaacccaatgagggagataaagttgcagaagctcgtcttcaatacctccgttggcgaaattggagatcgtctcaccagagctgctaaggttttggaacagcttagtggccaaacccctgtgttttccaaagcaaggtacacggttcgttcctttgggattagaag

SEQ ID NO: 44893 - DNA, 275 bp, Glycine max
gtctctctctcactcgcgccctcccactccttccaaaacctagcctccttcaaatccaccatctccgccaaccccctccacgcccttctctccctcggcccctaccgccctcgtgactccttcaatgtcgccgccctctgccgtgccgcaatagcttggttccgcaacaacctatggctcgtcgaaaatgagcatccgtagaactgatgcaatggatgtattggatgcttgcagtctggtaaaaatcgaagaccagggagagatgacattgattt

SEQ ID NO: 44894 - DNA, 222 bp, Glycine max
ctacaccaaattcaagatcgatgtaatctctggtgtaggagggaatttacatcggtcttgcatttggtgatgcttatggctatcaggtttatgttccaagactggatgatcctggttcaggtacattcgacatgtgctctacggatacatttgagatatacggtccatgtacgtaccagacatgttatctgtatctataccggaatggatacgacggttgga

SEQ ID NO: 44895 - DNA, 201 bp, Glycine max
ctctcttctccaccacttcttaatctcttcaatcaacaatcatgtcggacgatgagcaccatttcgagtccaaggccgacgccggagcctccaaaacctacactcaacatgctggtaccatccgctctatcgggtacatcgtcatcaaaggtggcccctgcagagttatggtcgtttcgactcccaaaactggaacgcacg

SEQ ID NO: 44896 - DNA, 257 bp, Glycine max
cttctttgcctgccgaattggggggccttgctagcttagttgaccttgatcttagtgagaattcttacgttggtggtggattgcctcctgatttcacccgattgaggaacttgaggaggatgatacttgccaacagcatgctcactggagctctgccggggagattgtttagtgattcgttgcagttcctagtgctgaggcaaaacaactttagtggttctctgcctgttgagttgtggtctctgccaagattgagc

SEQ ID NO: 44897 - DNA, 258 bp, Glycine max
aacacaaagaagagtgacccttcttcttgttattccacttgcgttagttgttgtgggattcaggtattggtgtgattgtttgtaccatccggtggtggagcttgttggaaattggagatgagtcagaggggtttaatatatagctttgttgccaaaggaactgttgttttagcagagcacacgcaatataccgggaatttcagtaccattgccgttcagtgcctgcagaagctgccatcaaatagcagcaaatacacg

SEQ ID NO: 44898 - DNA, 258 bp, Glycine max
gatttttggcatgctgtttggccaaacactcccattccaagttcattgcgagatcttctaaagcctggccctgcaagtgttgaaatcgatgatcaccctatgcaaattgaagaaacacagtacccgaaaaccttcttctataaagaagaccttcatccaggcaaaacaatgaaagtacaattcagcaagcctccctttcaacaaccatggggtgttggtacatggttaaaggaatttaaggacactactaaggagggt

SEQ ID NO: 44899 - DNA, 258 bp, Glycine max
ggaaaacaatggtctggcctttgcaaaaaccttgtttgattcttaatgattttttatcccattgcttggctgtcttcaattatccatgccccttgccattatcacgtttttcagctattctcttgagggtcgaattatcccaagacataaggttctagtggagaatcagattaatattaagctaagatacatcatgttgactagcactgacgaagaattcaacaaaatggtcaagggcataattagaaagcgcctcag

SEQ ID NO: 44900 - DNA, 261 bp, Glycine max
ctcgagccgaatcggctcgacggactcgagctcgaacgaatcgactcgagttcaactctttacttctcataactctgccgcagcaacagccgcggatccaatggcttcagagcagaaactttcgaacccaatgagggagctacaggtgcagaagctcgtcctcaatatctccgttggcgacagtggagatcgtcttaccagagccgctaaggtgttggaacagcttagtggccaagcccctgtgttttccacagcaaggta

SEQ ID NO: 44901 - DNA, 283 bp, Glycine max
tgcagaagacgtatcttccgcccgcaatcttgagtttgccgccgcgaccgtgcatggcggcggccagggaagaagcttaaccaagtcatgtttggagcaattgaccagctgctggcaaagactggtgtgaaggctaaggatattgggatcttggtggtcaattgagcttgttcaaccccacaccttcactctctgccatgattgtcaatcactacaagttgagagggaatgttttcagttataaatcttggtggcatgggttgcagtgctggccttatctcta

SEQ ID NO: 44902 - DNA, 161 bp, Glycine max
aattggagggttcttgactcattgtggatggaattcaactatagaaagtgtttgctctgggggtgccaatgataacatggcctttgtttgctgagcaatttttgaatgaaaaatgcattgttgaagttttgaagattggagtcaggataggggtcgaggta

SEQ ID NO: 44903 - DNA, 290 bp, Glycine max
attttaggtcggtaaagctggtggtgacaaatggaaatcgctgtctgatgctgtgagtattaagattttgagaattcttttttcattattagtttttgcgtatggttctatatgatttaatttattgaccatatctacttatttgtaacctagtttgcgtcatttaatgtttcaggaaaaggcccccttcgttgccacggccgaaaagaagaaacaagagtatgagaaaactattttggcttacaataagaaattggtgaatactttttaccctatactacttactctta

SEQ ID NO: 44904 - DNA, 279 bp, Glycine max
tctctctctctttatcataacatgatgatgctgattcatgtgaatttatgcaggtatctctcgtgattccatgcacaagaggcgcgccaccggcggcaagaagaaagcttggaggaagaagagaaagtatgagcttgggaggcagccagcaaacacaagctatcaagcaccaagacggttaggggattagggttcgcggtgggaacgtggagtggcgcgctttgaggcttgatactgggaactactcttgggggagtgaggctgcaacccgcaagacaa

SEQ ID NO: 44905 - DNA, 285 bp, Glycine max
ctagcatgtgatcaacatgttcagacggatactctgttggacgatgaatgtcaggagacaagaagccctgggatggtatcggaatcttcgaaggcaaaggttgcaaaactggtggatggataccttgctgagattgcacgtgatccaaatttaccctttcaaaatttgttaatcttgctgaattagtatcaagctttccaagagcatttcatgatggcctttatcgtgcgattgacatgtatttaaaggagcaccctggaatcagcaaaagcgaaaagaaaagat

SEQ ID NO: 44906 - DNA, 211 bp, Glycine max
taaagacgtgaaaataatggtgaacatgaggatatgcgtaaaatgaagaatgaattcatggataattgggatggtttgagaacacaagataaagagcgtatacttgttcatgatgatacaaatagacattttgatcatgatgaggcagttattaggagacatcacacgagattgatggtaaatttgcaagatgctcaatatagaggaaaaa

SEQ ID NO: 44907 - DNA, 222 bp, Glycine max
acgggatgtatcaacaagatacaaggagtcaatttccaagagcacaagagggaggaaggagagatggttatatcggaacaacaatatgtctggcattggatcagaagttaggcgagaagttaatgcagggattgcaactgtgtcacgcaagatggaacgcactggagaccagcgacaataatagaggcatggcaattctgcccccagtaatgtggaggaagg

SEQ ID NO: 44908 - DNA, 248 bp, Glycine max
tgtaacgaaggtcacccgacaagctgtgcgaccagatctctgatgcagtgctcgatgcgtgcactgaacaggaccctgacagcaaggttgcctgtgagacatgcaccaagaccaacatggtcatggtctttggagagatcacaaccaaggccaacgtagactatgagaagattgtccgtgacacatgccgcgaaattggattcatctctgatgatgttggtcatgatgctgacaaatgcaaggtgttg

SEQ ID NO: 44909 - DNA, 276 bp, Glycine max
gttctagatggcaaaaccaactactataaagatctgcacatggcttctagtcctaccattagctgaacttggcggctcgagctttctctctctctctcttaattcctgaaaagcaagtagctaaggaaaacaaaaacatcatcacagaaactcacaaaggaaaaacaaacaaacaaacaaaatgtcttctccaagcaagcggcgagaaatggacttgatgaaactgatgatgagtgactacaaggtggagatgattaatgatggaatgcaagagtt

SEQ ID NO: 44910 - DNA, 272 bp, Glycine max
cttacattttttctctcggagcaaaggttttgaatttcagttatagccttttgctgtcttttgttttttattcttttgaaatttggatattttttcagggtattggagtggttaaacaaccgatggaaggttcaaagcctcctcctcctcctcctcctcctatgttggagagaagggcaaggcctcaaaaggatcaagctttgaactgcccaaggtgcaattcaacaaacaccaaattctgctactacaacaactatagcctctctcagcca

SEQ ID NO: 44911 - DNA, 270 bp, Glycine max
ggggaatcttgccataagaggaagggagccactgtttactccttgtactccaaagggctgtattgagttattgatcagatcaggagtcgagattatgggaaaaaaagccgtagtgattggaacaagtaatattgtgggtttgccagcatccttgttattgcagagacaccatgcaacagtcactgtcatacatgccttcacacaaaaccctgaacagatcacctcagaagctgatattgtagtttcagctgctggagtgcctaatttggt

SEQ ID NO: 44912 - DNA, 273 bp, Glycine max
ctcaccttgttctttttcttcttcttcttcttcactgcaatctctctctctctctctctcttcgctttccagaaaatggtgaaccctagatgcttcctcgacatcaccatcggcggcgagttagaaggcaggatcgtcgtcgagctcttccacgacgttgttcccaaaaccgccgagaatttccgcgccctctgcaccggcgaaaagggcatcggccccaacacggcgtccccctccactacaagggcatgtgtctccaccgcgtgatcaaag

SEQ ID NO: 44913 - DNA, 265 bp, Glycine max
ctttttgtctgaaaaatcaaaccttaatttctgcgtttttttctattggatccaacttcactcgccggctagagtttcccgaggcactaccctattgggtctaatcattcgagttcttcgattaacgtgaatttgggtcagagacctcatcatcagagctggcaggtggcgggtaaaagaaaatttgcaggttgaccggtagatatagcaaaggaaggaatttgggttggtagatattgctgctgtcttcatagcattttggatc

SEQ ID NO: 44914 - DNA, 256 bp, Glycine max
agcaacctcatcaacgaagcaatggcatgtgatgctaagcttgttatgcctatcatcattcaaagttgcagcgaggcatttcatggcctcaagtccttggtggatgtcggtgggggcaacggcaccgccatgcgcatcctggctaaggcttgcccttccattcgacccatcaattttgatcttcctcatgtcattgccctctgcgatggcgtggcgatggcgtcaaacacgtgtcaggcaaaatgttccaaagtgt

SEQ ID NO: 44915 - DNA, 132 bp, Glycine max
aatgttttgggaacacatccaacatttgaagaactttgatgtttaatgggtctgtaataatgtcccttgaaaataagttcggtttgtgttgaactcaattgtgtcccattaataatagtactctaatatccc

SEQ ID NO: 44916 - DNA, 267 bp, Glycine max
gctaacatgatcaattcaagctcatttagggatcctaccactgcttggctaggcaaagatgggtactggagggtgctgattggaagcaaaatacacactaggggtatggcaattttgtacaagagcaaaaactttgttaattgggttcaagccaaacaacccctacattcagctgaaggcactggaatgtgggagtgccctgatttctatccagtgctgaataataaaccatcatcaactattggtcttgacacatctgtgaatggt

SEQ ID NO: 44917 - DNA, 265 bp, Glycine max
gtagccataaaaattattcgtagtaatgacaccatgtacaaggctggtatggatgaattggtcatattgaagaaattagtaggtgcagatccagatgataagcgtcattgtgttcgtttcctttcaagttttagatacaggaatcatctttgtttagtttttgaatctctaaatatgaatctgcgagaggttttaaagaagtttggtcgcaatattggccttaggctaacagctgtgagagcatacgcaaaacagctttttattg

SEQ ID NO: 44918 - DNA, 161 bp, Glycine max
cggcttccctccctcctttgaagaaacaaattagaagagtgtgttgtgttgtgttgaagtatcaagctagcaaagatgtttggcatcttaggaggcaataaggggcacaagatcaagggtactgtggtgttgatgagcaagaatgtgttggacttcaacga

SEQ ID NO: 44919 - DNA, 274 bp, Glycine max
attcccatttcttaacgtatgattcttttaaaatgtgtaaatactctgattatttcttctatgatccaaacaatcagattgattcagatcaatttgagaaaatactgaggtacatcagatctggtgttgaaagtggggcaacccttgaaaccggaggagacaagcttggcaacaagggcttctacattcaacctacagtcttctcaaatgttaaggtatatctttttagtttcatttttgcactttatcgaatgagtctgaaaaatgaaaatac

SEQ ID NO: 44920 - DNA, 265 bp, Glycine max
cggctcgagcagatttgcatcaatgaattgaatattaccagagccattagtatgtcatcagacggcccaactcacaacgaatttgatttcgagtttttgggcaacaccactggtgaaccttactcagtccaaaccaacgtgtatgtgaatggcgttggcaacagggagcaaagactcaacctctggttcgaccccaccaaggacttccacacctactccatcttctggaaccagcgccaagttgttttcctggtggatgagacgc

SEQ ID NO: 44921 - DNA, 277 bp, Glycine max
ctcgagccgaatcggctcgacgtgctcgagcggctcgagcggctcgagatcatggttcgagctcagcaacaacgtgatcagactcctgaacttcctgaccttcctcctctccatcccgatcctggtggccggagtgtggctgagcaagcagggcgccaccgagtgcgagcggtggctggagaagccggtgatcgcactcggcgtcttcctcatgctcgtctcactcgccggcctcgtcggcgcgtgctgtcgcgtgtcgtggctcctctggctctac

SEQ ID NO: 44922 - DNA, 276 bp, Glycine max
ctttggagaaagaattgcttctcatgatgacaggtttctactacacttagcggacaaaactggtggcataattgtgacaaatgataatttcagagaatttgtgaatgagtcagtctcttggagagaaattattacaaaaaggctgctgcagtacacgttcgtgggggacatatttatggttcccgatgatcctctgggaagaagtggacctcgattagaggagtttcttcagaaggaagtctgtcttagagatatgcagcccctactcagtgccct

SEQ ID NO: 44923 - DNA, 186 bp, Glycine max
ccacgttagtttcctggtacctgatgatcctgcattggatcatgaagttaagcaggagcttcttgatttagctcaagctatggaggctggggttgcatatataatggggcacacacatgtgaaggcaaggaaatcatcctcattattgaaaaggcttgtgatcaatgttgggtatgcatttcttcg

SEQ ID NO: 44924 - DNA, 141 bp, Glycine max
tgcggttgccattttgataaactgtaccatttattgtagtcctgttttaggaaggacgacgctagagaatgttgtacacgcaggaaaagcatgttcccttaataaaccatgacctatgagatgaggcatggaccatggaat

SEQ ID NO: 44925 - DNA, 196 bp, Glycine max
gccaaaagcagaatattcgttcaggaaattagggttagggttggagagtccttcatcagcatccgtatataaatacccttttctctcacacttgttctaccgtattccttacgctctctcactcacaaacacacactgaactaaaaaacatcaaaagagacatggctgagcaaaccttcatcatgatcaagcctga

SEQ ID NO: 44926 - DNA, 195 bp, Glycine max
atttttctctctcccttagtcaaagggattcatcgttcttcttcccaggttatttagaaaagcaaaatggtgaagatttgctgcattggtgctggatatgtggggggtcctactatggcagtcattgcacttaagtgcccatccattgaagtcgctgttgttgatatctctaaatcccgcattgcagcctggaac

SEQ ID NO: 44927 - DNA, 265 bp, Glycine max
cattacctctaccttcaacaacaatgcggacaatgactataactgttagtggcaatggtggtgaaatgcctcaattatcaccatatactattactgttccaaaaaatggaagatttgaagatctgacccgtgctcttagcattgcatgtgctttgggggctgatgagaccttattagtagctgaggtatacaacaattgcatcatacgtttccttgaagatccaactgattcattatccttaatcagagatgctgacaaactagt

SEQ ID NO: 44928 - DNA, 266 bp, Glycine max
tgcttttctcacccttcctcactctcactttcttcctcctcttctcttcttccgttgctgagataccgcagcgacagaatctccataacggacttcggtggtgtcggcgacggccgcacgctgaacacgaaagcgttcagagcggccgtgtaccgcattcagcacctgagaaggcgcggcggcacggtactttacgtgcctccgggggtttacttaacggagagcttctacctcactagccacatgacgctttatctggctgctgg

SEQ ID NO: 44929 - DNA, 263 bp, Glycine max
gttgaagctttgaaagctgggaaagtcattgcagtaccaactgatacactctatggatttgcttgtgatgcttgctcaatggaagcagttaacagaatttatgagattaaaggccgtagacatacaagcccagtggctatttgtgtcggtgacgtatcagatatagcccgttttgctgtcactgaccatttacctcatggtctgcttgattccctcctacctggggcctgttacagttgttctaaaaacgagggattcaagta

SEQ ID NO: 44930 - DNA, 259 bp, Glycine max
tgggaaacaaatcaagatgtcagaagatcacaagtttacgaattattctgaaagactcagaatcgaagagacaggtgaaccattaaaagatggggaaacacgtctatatggtataaatctggcaagaatgcttggggacaaattcctgaaacagcaggattcccggttcagttcagaaccttatattagtcaagttgtgcatattgatcaagcaagcaaggctttgctattctagctagtgatgggttatggaatgtca

SEQ ID NO: 44931 - DNA, 247 bp, Glycine max
ggaaggcatgtgcttctttagaaccaaactatcaacctccagtaactttcatagttgtacaaaaaagacaccatacccggttgtttgcaaataaccacagggacaggaacagtacagataagagtggaaatatattgcctgggactgttgttgattccaaaatctgtcatccaacagaatttgatttttatctgtgcagtcatgctggcatcagggtacgagtcgtccagctcattatcatgttctg

SEQ ID NO: 44932 - DNA, 211 bp, Glycine max
attcggctcggtgtaagtaggcgcagcgcgaggggcggcctcaggaggagaatgatgtctcacggggagttcgatgacccaaggcacggttcgctgggattgcttcccaggaagcgtgctggtcgtcacaggggaagaagtgaaggcattccccaaggatgacccatccaagggacccaagctcactgcagtctgtggttagagggccggt

SEQ ID NO: 44933 - DNA, 248 bp, Glycine max
cagatcttgaagcaagcaaatatcagatggctgagtacaggatctctgtttatggaagaaaacagagtgagtggggtcagctggctagttggtttgttaacaatgctctttatagtaagaatgccgtatggctaatccagttaccacggttatacaatgtgtacaagaatatgggaattgttacctcctttcagaatattctagataatgtgttattcctctatttgaagtcacagtggatccaaatt

SEQ ID NO: 44934 - DNA, 263 bp, Glycine max
cagacttcgtagggggtacatgattatttcgaggcttaacagagcaccatctatactttatactgtgagttgtagacatgaaggttggagcagtgttgccaaatttctaaccgaagatgtccctcaacttctaaagtcagaggatctaaaagacattcaggaagtactctctcttgcttttaaatctcctcccagtgaattgagagggttaataacatggattgctgaagttcgcaggcaagaagatgggaatctcacactga

SEQ ID NO: 44935 - DNA, 259 bp, Glycine max
aaacagactctctgatgagcactgggagcttaggaacttcagtgctaatcttgttacttcaatatgccaaagatttgggcatatttatcacaatctgcagccacgtgtgatgaagacatttcttcattctttcttggaccctacaaaagctttgcctcaacactatggtgcaattaaagggatagaagctcttggatcaagactgattcgcttgcttatacttccaaatctcgagccatatttgcatcttcttgagcca

SEQ ID NO: 44936 - DNA, 259 bp, Glycine max
agctttactactccattttcttcaatcttcacataaatgatgcagcaattattggaagatgcatgagttctccattgttgatggttttgtggagataagtgaatgcatggcagagatgaccaagtacgtggttaatgaaccatctgttgggcttttcttatccaacatcatgctcaaaatgaagtacccaatatcatcaaagttaaaaaaaatgttgttaagaagtctcatgaaacaattttgcacacagaagatttgg

SEQ ID NO: 44937 - DNA, 188 bp, Glycine max
tgaaaaatctaaacagattagttgatggctgaggaacagaatttgcccctctctcgtgaaggtaattacgatgaagtcaattcccaatctcttcatgtttgccctggctgtggggtttatatgcaagattccaaccctaagcaccctggttattttatcaaaccctctgagaaggacttgagttatag

SEQ ID NO: 44938 - DNA, 272 bp, Glycine max
ctctttgagagatgctcggcacgtgtttgatgtaatgccggagaggaatgtggtgtcgtggacggctatgatatcagcttattcccagagagggtatgcctctcaagcattgagtctttttgtgcagatgctaagatcaggtacagaacctaatgagttcacttttgctaccgtgcttacttcatgtataggttcttcgggttttgtcttagggaggcaaatccactctcatatcataaaattagattacgaagcacatgtttatgttggag

SEQ ID NO: 44939 - DNA, 272 bp, Glycine max
gagatctctttggttgatgcatggaatgttcagagccaatggagggtgtggttatgttaaaaaaccaaattttctattggagactggtccagatgacgaggtcttcaatcctaaagctaagttacctgtgaagactactttgaaggcaagggttttatgtcaatcagctgcctcattcaagtatctctagtttaatgctaacagttatcatactcttcctattcttaggtgactgtatatatgggggaacgatggtactatgatttcaagca

SEQ ID NO: 44940 - DNA, 279 bp, Glycine max
ggcttatgttgcaagcttgtgctgttactgatctgtttgaaccctgatttggataggttatttagaaaagcaaaatggtgaagatttgctgcattggtgctggatatgtggggggtcctactatggcagtcattgcacttaagtgcccatccattgaagtcgctgttgttgatatctctaaatcccgcattgcagcctggaacagcgaccagcttcctatctatgaacctggccttgatggtgttgtgaagcaatgccgtggcaagaacctcttcttca

SEQ ID NO: 44941 - DNA, 176 bp, Glycine max
gtagggttcaggagaagtgccagattgctgccaccttgatgggtgagtggcatcccttgatacggcctcaaagtggcacctgcatgccccgggggcaagaacctagttttggataggatattgtcgtcgaaacaacgattgttgtgtctaacatcttcaccgcctgctcagaggtc

SEQ ID NO: 44942 - DNA, 197 bp, Glycine max
gcaaagtctgcttcttcccatgcttataagttcttgtgtcactctttgtatccatatacccctttgttgggctttggtgttccagactggaatgaataatattggtggagcattagcaatgagcatttcaatatggttaaatgtgacttttcttggattatacatgagatactctcctacttgtgcaaaaacccgtg

SEQ ID NO: 44943 - DNA, 253 bp, Glycine max
attgcgcgtatctctctatcttctctctgcacgtccaaaccctagctccctagcctattccgctttctctcgtccatcatgaaaggaggaaagtccaagaccgaatctaagagagccgatgacaaacttgctgtgaataagaagggcgccgccatcaagactaggaaacccgccgaaaaggggaatgcagcgaaagatcctaacaagccaaataggcctccaagtgctttcttcgttttcatggaggaattca

SEQ ID NO: 44944 - DNA, 242 bp, Glycine max
agctgaggccaatgttttcggagttaacgttcaacattatcataaaaatggtgtgtggcaaacgctactacggcgaggaatacgatgggaccaacgccgaggaggctaagaggtttagagagatcatgaatgagatatcgcagtttgggttggggtccaaccttgcagattttgtgccgcttttcagattgtttagtagtcgcaaaaagttacgaaaggttggagagaagctagacgcgttc

SEQ ID NO: 44945 - DNA, 255 bp, Glycine max
ggccaggcaagccccactcaaccaccacacctctcctcgttcacgctacccctttctgctcttcttctacctttcaagttttaaaagtataaagatggcagagacattcctatttacctcagagtcggtgaacgagggacaccctgacaagctctgcgaccaaatctccgatgctgtcctcgacgcttgcctcgagcaggacccagacagcaaagttgcctgcgaaacatgcaccataaccaacttggtcatggt

SEQ ID NO: 44946 - DNA, 260 bp, Glycine max
cacaaaccaacaacatagatacgttatacaaagattcattcattcatattattagatctctctctctctctttctctgaatttcactcaagttattatcaataaaataaaatagcgaagatgtgtgaaagtggtagtagagtcacatgggaaggttgcagcgtcttgctcgatatcaacgatggtgaccgtctcgttttcgctcgtctctccccctctgcgaaattgaagattgggaataagaactgctctctgcaaccg

SEQ ID NO: 44947 - DNA, 252 bp, Glycine max
agtttgatcactgaacggatgaacaaggttttccgtgaaaatattgagtttttatttgatcgttttgagtgtcaggatctgtgtgccatagtggaattagagaagttgttggatgtcttaaaacattcccatgaactactgtctagagatctttctgtagactcttttagtctcatgttgaatgagatgcaagagaacatttcccttgtatcattttctagtcgattggcctcacagatttggtctgagatg

SEQ ID NO: 44948 - DNA, 166 bp, Glycine max
gcagaatattaccatccatattaacaatttacaagttataatgtcattagagcattcagtttcagatgtaactgaactggttattacaaatcaaagtgccgtttttattcaaaaaaaaaaaaaaaaaaaaaaaaaaaaaaaaaaagagaagagagagggggagagg

SEQ ID NO: 44949 - DNA, 259 bp, Glycine max
gcacttgataagtcatgtcaggttgatctagtgaaggatggtggtcatatctattttattcagtttcttgacagcatggacgcatatccagagcaacgcgcaatggctgcttctgtgttggctgtgattgtggatggtcatagacgaggccaagaagcttgtattgaagctggtttgattcatgtctgcttaaagcatcttcagagttcatgtcctaatgattcttgtactgaacccctattccttcagtggctttgct

SEQ ID NO: 44950 - DNA, 244 bp, Glycine max
caaaaattgttaggctctatgcagccaacaacgacattaactctgcccaccatctgttcgacaaaactcccaaccgaagtgtctacctttggaattccatgattcgagctttcgcgcagtcccaaagatttttcaatgcaatctctctgtttagaaccatgcttggggctgacataagtactgatggtcacacctatgcttgtgttatacgtgcctgtgctaacaactttgatttcggcatgct

SEQ ID NO: 44951 - DNA, 243 bp, Glycine max
ctttgaggtactttcgtgattttgaggtagaaactatcggtttaaaggagacatcaaggcgttgttcagttgccaaatgtgggacaagacttaaggatacagtccttgactgggaggatgcattgccttcaaaggagatgaatcctgctgagaagcattgcaaacaggcagatatagtgttatgcctgggtacaagtttacaaataactccagcatgcaacttgcctctgaaagcacttcgtg

SEQ ID NO: 44952 - DNA, 139 bp, Glycine max
caggactccgccgccggcgacggcaccactaccgtcgtcgtcattgctggcgccctcctcgagcagtgcctcctcctcctctcccacggcatccaccccaccgtcgtctccgacgccctccacaaggctgccgtgaagg

SEQ ID NO: 44953 - DNA, 250 bp, Glycine max
gcgatactccacgggcatgttgccagtgccagttttccagattgcgattttctcgaacgcttcaatggggagaaccaagtgctgcttcggaaggttgcagtgtccggcgacgctctccgcgtcggaaccgtagttcggggcgcagaaattggtggcggtgacggcgaccgtcgtgccggagatgcaccaccgccggtcgaagtcggaatcctcctcgcggcaccggacctcgaagcaggcgccgcagatc

SEQ ID NO: 44954 - DNA, 278 bp, Glycine max
ccaatctgcagcagttgctgaggtatggctttagcaggtgggttcatggaaagcagttggccacctgcaatcccacagcttaacagtgacacagatggagttctcacatgacgacaactttcttttgactgtctcaagggatcgccagttctctgtcttttctatcacaagaacaggcaccggtgaaattagttgtagtcttcttgcgagacaggaggggcacaagcggattatcgggtcatgttcttagaatccgcatggtcaggaatttgcacagg

SEQ ID NO: 44955 - DNA, 271 bp, Glycine max
ctctcagctgtcaccaccacacacaccaaatggggtttcccagaaaatcactattccttcttctgttcctgattctcttcacaaaccttgctgaatctgcttctgactacaccaccttggtctacaagggttgctccaaggaaacattcacagatccaaatggggtatactcacaagccctttcatcactctttggctcattggtctcacaatccaccaaagccaagttcttgaaggccactgcagggagtggccaatcctccatgatggg

SEQ ID NO: 44956 - DNA, 272 bp, Glycine max
  unsure (1)..(272): unsure at all n locations
tgcaatgctgtcacactttgtttagtccttcctgagaggggaagcattgacgcattggatggtggcatgatagaaatggttttggatcctgatttgaacaaaactggggacatttggcacatatgtattgaggatcttccacgaagcaatgttctgtatggatatcgcatagatggacctcgagactggggtaaggggcatcgatttgatagcagcattgtgcttgtcgatccttatgcgaaactagttgaaggtcgaagatatntcgggga

SEQ ID NO: 44957 - DNA, 134 bp, Glycine max
cgtaattctcgagctaatacgtgcagcaaaccccgaattctggaagggatgcatttcttagataaaaggtcaacaaggcacaactgaatttggttctgacgattctactgcatatgagctcttcacaagtaaac

SEQ ID NO: 44958 - DNA, 241 bp, Glycine max
ttcggctcgaggaaatttcttagttgttttttgttgatttggttgtggtgcagacaaaaaacaaggatcagaaccgttgaatcaagttgaggaagatggcactagtctctggaggaagatcaacactgaaccctaacgcccctctttacattcctgccgcgtttcgccaagtggaggatttctctccggaatggtggcagctggtgacgacgctgacatggtaccatgactactggctaag

SEQ ID NO: 44959 - DNA, 155 bp, Glycine max
atgtagtcttctttatggagctgaagacccttctattgtaggaatgatgttggatagtgccttttcaaacttatatgatctcatgatggagcctgtcgatgtttataaaatttggctgcctaaattcactgtaattcctctctaactcactttct

SEQ ID NO: 44960 - DNA, 147 bp, Glycine max
agcagatggaattcagtctttgacaaacaatctctgttatacatatgccaggtgtacacgctctgtatctgttgttcctccagcgtattacgcacatttagcagcttttcgagcacgtttctatatggagccagacctgcagcagga

SEQ ID NO: 44961 - DNA, 144 bp, Glycine max
tctgatttttggtatggtgtggagggttcatttgaagagccaatgggaagagagagtttgcagagactttggcagaaatataaagtggatattgcattttatggccatgtccataactacgaaaggacatgccccatttatcag

SEQ ID NO: 44962 - DNA, 283 bp, Glycine max
ggcatttgctcatcctccccatctctcaaccactccaccccaaaacgacgccacaccccactcctcccctccaaacctttctactctcttaggcatgaggctctcgcgccacagcaacaactaaatctctcaacactagactcgagaaggagccacacgcgctatggcggcgctacgtggtgtggctttaccagcacaaggagctgagactctacctggacgtgagccgggtctggttcaccgacgagttcgcccgtgaaatagagccccgcttgtgtttcaa

SEQ ID NO: 44963 - DNA, 275 bp, Glycine max
aattaatgatccatttattgatgcaaaatatatggcatacatgttcaaatatgattctactcacagtccattcaaggggatcattacgattttggatgactgtagtttggaaagtaatgggaagcaggttaaagtggtgagcaaaagagatcctgcagagatcccatggagtgattttggggctgaatatgtcattgagtcttctggagtttttacaacagtggagaaagcttcatcacatttgaaggctggtgccaagaaagttgtaatatcag

SEQ ID NO: 44964 - DNA, 260 bp, Glycine max
gttgcgcgtagggaggacaataatatggggaaatcagggggtagaagaaagaagggtggttcgaactcaaaccaaggtggtgcggttgataattcgggttcaggtgcagcagcagccccaacggctaacggtggggtggaggtgttggattcgtcgatatttttgaagaaggcgaatgagctgaaagaagaagggaataagaggtttcagaacaaggactatgcgggtgctcttgaacagtacgagagtgctcttcgttt

SEQ ID NO: 44965 - DNA, 259 bp, Glycine max
atctcatgggaaaaccagggaaatttatgagaagttggaggagttgggagaggaaatggcgaaaccggttatgttgcagacacttcttttgtgttgaaagaagtggatggggatgagaaaagtcaaactataaggtatcatagtgaaaggttggccattgcgtttggacttattactttccctccagaatggcctatcagggtaatgaagaacttgcgagtttgtggtgattgccacactgccatcaagtttattagca

SEQ ID NO: 44966 - DNA, 259 bp, Glycine max
acgtgcaccagctctattggacaaccttgcccaagcttttctgatggctcctttcttcgtgttgctagaggtcctccaatttgttggatatgaaccatatccaggattcaagacaagggttaaggcaaggatagatgctgatatcaaacaatggcaggccaagaaacaaaagaaacattcttagcttgaacatgttagttaaaaatgtggtgttatatatagatcacttcaaaagtaccaaaaggaaaaacgacttgtt

SEQ ID NO: 44967 - DNA, 264 bp, Glycine max
atcacaaccttgtttcattcatggaatttgtggacccaatagtatatgcagtcatgaacaagtaattggtagaaagtgttcgtgtcttgaagggtatagttggattgatagccaagattggactttaggttgcaagccgaatttccaacctacttgtgaccacaagacagaatatcgctttgtaccctattatgaagtggatttctatggatacgactatgggtcatctttttcaaattacacttataaacaatgtgagaaatt

SEQ ID NO: 44968 - DNA, 270 bp, Glycine max
cagagattttgtcaacaggttggtattcaggcaatgaaaagtccaagttgctgattaattgcctctttcggatgggaagtgcagcaatccttctctcaaacaagaaagaagcgaagaaaactgcaaagtacaggttggtcaggacactcagaacccagagagcctttgatgacaaatcttatttttactgccataagggaagaagattctgatggaaaacttgggctgacactgaagagggacttgtcttcaagtggctggtgagactct

SEQ ID NO: 44969 - DNA, 199 bp, Glycine max
ggcaattgctgtttcaaaagctatgcgtggacattccctgcaggaaaccaaaaatgatggtcgtttccatgttcataccaagacatatctggatggtgctattttaaaagaagagatggaacgttccgctgatgtgcttgctgctggattgcttgaagtgtctgacccgtctctttcaagtaaatatttcctccgccaa

SEQ ID NO: 44970 - DNA, 261 bp, Glycine max
ggtgtcaaagttgatgtcctgctccaagagtttcaaggatatggtgggagggtgaaacttgcaaggaaataccaccaggcattggaggcatcaatcgctaggaacttccctgacaatggaatcatttgttgcatgagtcacaacactgatggattatacagcgcaaagcgttcagctgttattagggcatcagatgatttctggccaagagaccctgcatcccacgattcacattgcatcagtggcttacaatactatttt

SEQ ID NO: 44971 - DNA, 261 bp, Glycine max
ctcaaaaactatatatacgtggaagcagataaagaagcccatgtcagagaggcttgcaaaggtctgcgcaatatatttggccaaaaaataacacttgttccaatcagagaaatgactgatgttttgtctgttgaaagtaaagctattgatcttgctagagatacttgggtcagattgaagatcgggacatataaaggggaccttgccaaagtagtggatgttgaacgtgcggcagagggttactgtcaaattaattccaag

SEQ ID NO: 44972 - DNA, 161 bp, Glycine max
gcgcaaagaaaagtaaactctgccacaacaatagtgttcaaaatggtagagggaaaaggcagaatttgtgtcactggaggcacaggattccttggttcatggatcatcaagagtctccttgaacatggatatgctgttaataccactattagatctgaccc

SEQ ID NO: 44973 - DNA, 258 bp, Glycine max
gaaaaatggttgacactttcagtatagagagcaggcttcttataagagagtttgatgaagatagagatgttaaggtggtggggaagcttgagaagaactgtgagattgggactaaaaagggggtctccattttcaccaacatgatgggtgaccctttatctaggattaggttctatccccttcatgttatgttggtggctgagctgcttgaaagcaaggagtgtcggtgtggttcgagggtgcattaagagtatgcga

SEQ ID NO: 44974 - DNA, 125 bp, Glycine max
tgcttctcacaaggctgttgatgaatacaaggaggccaaggcgcttggagtggataccgttccggtcctcgttggccctgttacatacctgttgctctccaagcctgccaagggagttgagaaat

SEQ ID NO: 44975 - DNA, 225 bp, Glycine max
  unsure (1)..(225): unsure at all n locations
gcgacttggaagctttatggagatgctctttggtgggcgttatgtgctacttttgatgtcactattttcaatttattgtgggttaatctacaatgaattcttctctgttccttatcacatattcggtgcatctgcttataaatgccaagatagttcatgcagggatgcgcatactattggcttagtanaatacagagaaccatatccatttggtgtgacccattt

SEQ ID NO: 44976 - DNA, 266 bp, Glycine max
cttctttgtaacgcctgtgccatggaggcacttccaatttaccttgacaagatttttcatccctttgtagcagtagtgttatctgtgacttttgttctagcttttggagaggttatcccacaagctatatgcacaagatatggactctatgttggtgctaattttgtggggcttgtgcgtgtcctgatgatcatctgttatccaattgcttaccctattggaaaggttctggatgttttacttggacacgatcatgcactgtttag

SEQ ID NO: 44977 - DNA, 264 bp, Glycine max
atcactttctacttgtacacatctgcatacaaatatcttgcaagggttacgccaaacaattcttgacttaatttctgattttggggacaaaaacagtgtgaagggagtagttgaaaaaaaccacagttgtgaccaagaagaacgcctgctagaatggggtgaaagcaatggtttaatgacacagttaaaaatagcttatattgaaggagccagtcggggtgcaatagcagggaaagatctaaaagttggagacatggctttgga

SEQ ID NO: 44978 - DNA, 200 bp, Glycine max
caaattggcagttgaagcccgtgatggtttctggaattcagctataataaatcctgggaataaatacagaagagctttggttgcagcctccattggaagctacggatcttaccttgctgatggctcagaatacagtggctgctatggacctgatgtaaatttaaagaagttgaaggattttcatcgccgcagattgcaag

SEQ ID NO: 44979 - DNA, 193 bp, Glycine max
ataatatctgcccgtcctgccatcatgatcttgggaatataagatgtttggctttggagaaagtggcagaatcattggagcttccttgcagatatcagagtcttggttgccatgatatattcccgtactatactaagctgaagcatgagcaaaattgtggatttcgtccatacaattgcacctatgctggatc

SEQ ID NO: 44980 - DNA, 267 bp, Glycine max
ctcctctgatctgaatccctttatgttataacattattattattattaccttaaactaaacaacaattattattgttatgttactgtacaagtacttgagtactacattgtatagaacttggaatactatatactacatcttcctccatggagaagaacacaaactgaacttgttgctttctagtttcgcttcacacttcacacttaacgtatccgccaaatctaggggcatattccattccaccaccatttctctagaaaagagac

SEQ ID NO: 44981 - DNA, 270 bp, Glycine max
ggaggatccgtgtgttccgcacctactggaacagaacccctccactgccacgtcagcagaagtgagaacaatgttgatagcgtttctctgtggacccttggatgcaagttggcgtacatttgggtgggtaattcagagacacagtgcccgggtcaatgcgcgtggccgttccaccaacccatttacggtccccagaatccacctttggttgcacccaacaacgatgtgggacttgacggcatgctgatcaatgtggctagtctccttgct

SEQ ID NO: 44982 - DNA, 266 bp, Glycine max
gtttggaatgcatttcccaagcaacgagtcttcggttcgaaaccagcagagagagagaagaagagaggaacaagaagaagaagatggtgtccttgaagcttcagaagcggctcgccgctagcgtcctaaagtgtggcagaggcaaggtctggctcgatccaaatgaagtcaatgaaatctccatggccaattctcgacaaaacataagaaagttggttaaggatgggtttattatcaggaagccaactaagattcactctcgctct

SEQ ID NO: 44983 - DNA, 268 bp, Glycine max
gaatgctcttgccatgcctcagaacccagtatctgttcttcacaatcgacgaggcatcatcgtttcctccatggagaacgggactcgccccgaattccaattggcctccgacggtgttcatcaagcacaactcgctgcacaatcattccaaaaggaactagaggctaataatatcccgcttgctaatgtacgcatttgctactcccccttttcaagaacaacccataccgctaacgttgtttcaactctcttgaatctcccttttgat

SEQ ID NO: 44984 - DNA, 266 bp, Glycine max
aatggttgtagagggaagaaataagattcatggttgaaagggacggctctgccaaagggattgtttttagccaattcacatcattcttggatcttataaactactctttgcacaagtctggagtatcttgtgttcagttgaatggaagcatgtcattggctgctcgggatgctgccattaagagattcactgaagatccagactgcaaaatttttctcatgagcttgaaggctgggggtgttgcactcaatttgacagtagcttca

SEQ ID NO: 44985 - DNA, 272 bp, Glycine max
cttttattaggatcctgccaagaaagagttcggtgagcaattgatatcccatgttgatacattcagcaaagacctgttcgtttcattgaaaggggatgctgtacagcaagccagtcccgcttttgaatacttggagaatgctcttggtaaatttgatgatgggccattcttgcttggccaattcagtttggtaagttaaaatttaatggtcttcaaaaaaaattgttttccttttaaattcgctggctttcaggctgattactaatgcttgt

SEQ ID NO: 44986 - DNA, 274 bp, Glycine max
gttactgctgacttcaatggtgttgagggatgcactattgctggaaagaaaaatgatagggtgattaatgaagatcttctgaaagatgagattgtttcagaacagctgactaggaacgttcaattttttggctttgagtctcagcagaaagtgactgcatcatatgtagtggtcattggtcttggaggtgttggtagtcatgctgcttctatgctcttgagatcagggaatggcaagcttcttcttgtagactttgaccaggtttctgtttcat

SEQ ID NO: 44987 - DNA, 273 bp, Glycine max
atccgcagctgctgttattcgcaccgcaaacaaacagtgagccatggccgtcggaaagaacaagcgcatctccaaagggaaaaagggtggcaagaagaaggcagctgatccctttgccaagaaggattggtatgacattaaggccccttctctttttcaagtgaaaaatgttggcaaaaccctcgtctctcgtacgcagggtaccaagattgcttctgaaggacttaaacatagagtgtttgaggtctccttggctgatcttcaaggggatga

SEQ ID NO: 44988 - DNA, 270 bp, Glycine max
taagaatgccctacatacaggatcacagtgcagaaattccagtggtggaaccatgatattggctttttttagaatggttgtatttttgatgcagcctcttccagtgagattcgtgatgctttgaatgataaagcccttcaagaactaatttgccgtattgattgctcctcaaatgcagagaatgagcttgataaagctatggcagaggaggcatttcgcttgctcactgacaagattttatcaaccatcaacccatgactgcaagcaatg

SEQ ID NO: 44989 - DNA, 273 bp, Glycine max
tcccagcatatcaaccattatcatactgaacttttttcttctaataatggctgcgacaacacgttcccttgcatacaactacgatgatatcctcagcttcacagggcaagacacacgccagggtttcactggctatctctacaaagctctttgtgacaggggaatctacactttcattgatgatcaggagcttcggagaggagacgaaataaaacctgcactttccaacgcaattcaagagtccaggattgctattactgtgctttctcaaaa

SEQ ID NO: 44990 - DNA, 262 bp, Glycine max
aatcttactgctgtgcatgatatattgttaaaaacaggttataaagatgaagaaggtgcagaaaatgagctttcattccaagaatggacacaacaagtacaagatatcttgaacacaaaaaagtttggggatattgcattcagagacaaggatttcaaaaatgcaatcgagtattattctaagttggtggttatgatgtctgttccttctgctactgtgtttgcaaggagagccttctcctacttgatgaatgatcaagcag

SEQ ID NO: 44991 - DNA, 267 bp, Glycine max
tcttgctgtacttgttggtgtgcctagtaaagatgatgcattcaaaactgctcctattaatttcctgaacgagaggactcttaagggcaccttttatggcaactacaaaccacgcaccgatcttccatctgttgtcgagaagtacatgagtggggagctagaagtggacaaattcatcactcacacagttccattctcagagatcaacaaagcttttgatttaatgctgaagggacagtccattaggtgtatcatccgcatgcaaga

SEQ ID NO: 44992 - DNA, 204 bp, Glycine max
cttaaaagagcctttgcttttgctttaggcctttccgaattaagtacttgtatcattttctctcgaagcaagaaaaatgtgcatcgagagtttcaaggttgagagtcctaacgtgaagtacacagagactgagattcagtccgtgtacaactatgaaaccactgaacctgttcacgagaacaagaatggcacttatcagtgggt

SEQ ID NO: 44993 - DNA, 281 bp, Glycine max
gttggaactactaatcatggtctttggtttaagaaaaggtctaagtttgatcttgtaggatattgtgatgtttattttgttggtgataaagtagaaaggaagagcactaggggtgcctattgatttcataaaaaatcgttggtatcttggatatccaagaagtaaacaacaatttccccattaacctctgaagttgagtatgtctcaacagtagattgttattctcaaatcatattgattaagcaacagatgttggttactcattggaatatacaaaaatt

SEQ ID NO: 44994 - DNA, 270 bp, Glycine max
aacgaattctggaaacattttttgtgcattgcttcagccatgcaacctcacccctttccaatgtgtttcgtaactgtgcttattactggacctttggctcctatattgcttattatgtgaaccaccctttatatacccctgtaaacgacctccaaatgaagattgggtttggatttgggatactttgtcaaatttcaaatttctattgccatattattctgaagaatcttcgtagtcctggtggtgaaggtggataccaaatcccaaggg

SEQ ID NO: 44995 - DNA, 272 bp, Glycine max
ggatttacaatcttgtggggcttgctcaaagctcttgaccgatagatctgcatggggtagccagaaatttattgccagcagtgacctctcagttgttgctgtactggtctgtggtcatgtttaccacgcggaatgcttggagactataacgccagaggcagatagttatgatccagcttgtccaatttgtatggttggagaaaagtacatgtcgaagttatccaaaaaaggtctttggaccgagtcagagactaagaccaagaactacaaga

SEQ ID NO: 44996 - DNA, 263 bp, Glycine max
tgtttctccctcccctttctctcttcgttcaatcgtgatcgtaagactttcaagctatttggttctgaagcttttgttcaatggcaaaggacaagcctgtttctgtcaaagatgccgtcttcaaattgcaaatgtcactccttgaaggcattcaaaatgaagaccagctgtttgctgccgggtctttgatgtcaaggagtgactacgaagacattgtaaccgaacgatccatcacaaacatgtgtggttatccactctgcagc

SEQ ID NO: 44997 - DNA, 262 bp, Glycine max
cacaacacagcctcaaaataaaccatgcagatacaaaccctcccacttgcatccccggctccaagaatcacccggcaccactttccgcggccaccgaaatgcgcagttaccgccacaccgccgccattgaaggagaggagaaaccactcaatgccgccggaaaagatagagattttcaagtccctggagggatgggcctcacagcgggtcttaccgctgctgaagcccgtggagcaatgctggcagccccagaagttcctcc

SEQ ID NO: 44998 - DNA, 249 bp, Glycine max
ccagtttggtataatatgttggaaggagggctcatatcccacaaaattttctctctttggctaaatcaagatccatcagaagagatggggggtgagattgtctttggtggtattgactacaggcattttagaggagaacacacatacgttccactttctcaaaaaggttattggcagattgatttgggagatattctacttgcaaataattcaacaggcttatgtgagggtggctgtgctgcagttgtt

SEQ ID NO: 44999 - DNA, 261 bp, Glycine max
aaaaggccatatacttttcttttatctcaaataatggacgggatcatccaccagattgaggagacactccatgtgggagggcacaagaaagaggcagcacaacggagcacaccatggtgagcacaaaggtgagcacaaaggagaacaccatggtgagcacaaaggtgaacacaaaggagaacaacaccatggggagcaacaggagggacttgtggataagatccaggacaagatccatggtgatggccatgacaagggtga

SEQ ID NO: 45000 - DNA, 243 bp, Glycine max
gactattcgggagagggacagcaaggatcaagtgcgtgttgatgtggataaagctgcctctgttgttagggaggtgactgaaggccagaggacatgggaagatgtgtggtcaacttttcctcatcattcctctacatctgcagatgaatgattgagttttattagtcaccatctaggttgacccatcatagttttctgttgcaaaattgtgttttttgagtagcgaatcaaactacagggata

SEQ ID NO: 45001 - DNA, 236 bp, Glycine max
ttttggacttatgctctgcacgctctgcttccagcgagtgttctttcttcgtttcaacaccttaatttgcacacgctgcttcttcagcttgagaaatggcacaagaaacctttctattcacatctgaatctgtaaacgagggtcaccccgacaagctgtgcgaccagatctctgatgcagtgctcgatgcgtgccttgaacaggaccctgacagcaaggttgcctgtgagacatgc

SEQ ID NO: 45002 - DNA, 260 bp, Glycine max
agaaaaccgaccctctcctttccctcttcaccaaccaatggctcccccaaaggccgagaagaagcccgcggagaaaaagcccgcagagaaggctccggcggagaagaagcccaaggccgagaagaagatatcgaaggaaggaggaagcgagaagaagaagaagagaacaaagaagagcgtggagacctacaagatttacatcttcaaggtgctgaagcaggttcaccccgacatcggaatctcaagcaaggccatggggg

SEQ ID NO: 45003 - DNA, 255 bp, Glycine max
gtacagttgaaattaaagtatcaggagaaggaagtaatattgagcatgatgttaaatgcggtgaatctcatgatgaattttgcgatgcaatacacagtcaggatattcagcctattgaaccacttcaaatcgtaatgcttatagttggcacacggggagatgtccaaccatttgttgccatgggggaagcgtcttcaggaagatggccacagggttaggctagctactcataagaactttgaagattttgtcatg

SEQ ID NO: 45004 - DNA, 246 bp, Glycine max
actcgagccgaatcggctcgagcggctcgaggcaggaaaaatggtttagctgaaactgcagaagaggctcgccgcgagcgtgctacaatgtggcagaggaaaggtttggcttgaccccaatgaagtcaacgaaatctccatggccaattctcgccaaaacataaggaagctggttaaggatgggtttatcatcaggaagcccaccaagattcactctcgctcacgtgctcgtcgaatgaaggaagc

SEQ ID NO: 45005 - DNA, 249 bp, Glycine max
cccactttaaaaagcccaatagccgaaacctcaacaaaagcagtgtcttccttcaaatccgactgagcgaagaagatattagggtttttgagtgcagtgcggcgatcctagcactctcttctgcagctttcgccgacagcttcattcaccatgggctgagcaaaccgagaaggcttttttgaaacaaccaaaagtgtttctcagctcgaagaaaactgggaagggaaagagacccggaaagggtgggaa

SEQ ID NO: 45006 - DNA, 124 bp, Glycine max
cggctcgatcgagaacggttctttgaaacaatcaaaagtgtttctcagctcgaagaatactgggaacggaaagatacccggaaagggtgggaaccgcttttggcaatccattgggcttggattt

SEQ ID NO: 45007 - DNA, 258 bp, Glycine max
tgaggccaataaacagtgtatcaccatcatcaccaatgcgtgccagtggggttaatatatggaagtctccaattccttacttgtttggaggcttagctgtgatgctggctatcatatctatggcattggtgatccttgtttgctcatacagaaaacgtgattctcagtcatcatctgaagttaatgaagacgtgaaatcacaagcaatggccaacaatttagagacaaactcagaacctgaggttcttgtcataatgg

SEQ ID NO: 45008 - DNA, 136 bp, Glycine max
agcgggtagaatcctttgcagacgacttaaatacgcgacgggtaagctggctagctatgggggaattcaagcactttgtaattgttaagttcaaggaaggtgtggccgttgacgagctcacaaaagggatggaaaa

SEQ ID NO: 45009 - DNA, 137 bp, Glycine max
aggaattggaatgtgggggtctatcaaagcgttatcaagagggtatgaatacgtgatgggagtgattatctttgcaccagtggccataatggcttggttcccttttgtttccgaattccaaactagactgctataca

SEQ ID NO: 45010 - DNA, 266 bp, Glycine max
agatcaattaatttccaatggccgatcagctcaccgacgaacagatctctgagttcaaggaagcctttagcctcttcgacaaggacggcgatggttgtattaccaccaaggaacttgggactgtgatgcggtcgcttgggcagaacccaactgaggctgagctgcaggacatgataaatgaggttgatgctgatgggaatggtaccattgatttcccagaattcctcaatctcatggcgcgcaagatgaaagacactgattcagag

SEQ ID NO: 45011 - DNA, 218 bp, Glycine max
agcgtagtagctcggaatcggtcgaacgatgctgttattcgcaccgcaaacaaacagtgagccatggccgtcggaaagaacaagcgcatctccaaagggaaaaagggtggcaagaagaaggcagctgatccctttgccaagaaggattggtatgacattaaggccccttctctttttcaagtgaaaaatgttggcaaaaccctcgtctctcgtacgca

SEQ ID NO: 45012 - DNA, 197 bp, Glycine max
tggagcaccgcccccaccttcaacacctcatcaaacctctccctcaagcttctcgactccggtaacctaatcctctctgcccccaacggcctcgttctatggcagagcttcgattcccccaccgacacgtggctccacggcatgaatctaactcgcttcaactctctaacctcctggcgaacccaaaccgacccgac

SEQ ID NO: 45013 - DNA, 265 bp, Glycine max
aaaacatttcacagataactggtatgagtcttacaatttcatacaaatcaggaccagcagtgacattgcaaaacaaattataataatgtcatggcaattctatacaaatcttgtagatctaaagattatgggaggcatctcatagataactgactgaacctgacattgcttggggcaaacgcacgcgcgttatactagatgttggatgtggtgttgccagcattggaggttttctctttgatagagatgtacttgcaatgtcatt

SEQ ID NO: 45014 - DNA, 189 bp, Glycine max
gattggtccggtcaggatgtcagcagcatagcctctgagatatgtggattcatcactgttcttacaggaacaatcatattgcacatgactagagaacaggaagaatctaatatgcaaaagacctcaacatggtttataggtgaggatttgatgaagggtgttgagaatgaacacctgatccgtatacat

SEQ ID NO: 45015 - DNA, 273 bp, Glycine max
tttttatcaatatcataaaagatcttaccagtggggaacagctaaaagatcgggatgctgcacaaacaagtttgacccttctttcgagttttgctcgccaagggagaatttttcttggactttctgttagtgggccggaaattcatgaagagttttttaaaggccttaacatcacagcagatcagaagaaagttttacggaaagcatgctattccttttatgatgctgcagctgaattacttcagtctgagcattcttcacttcgcttaatgg

SEQ ID NO: 45016 - DNA, 273 bp, Glycine max
cagagaacctattgcaattgcaacaccgcacccagaagtgcaccctgggctgtcccgtactcgatcgctgcctcgccggcggcgtcccctgcgcctccgtcaccgagttcgtcggcgagagcggttgcggcaagacgcagctctgcctccaactcgccctctccgcccagctccccccctctcacggcggtctctccgcctcctccatcttcatccacaccgagttccccttccccttccgccgcctccgccacctctcacgcgccttccgcg

SEQ ID NO: 45017 - DNA, 264 bp, Glycine max
gaagattatgaagcttctgcttaaagtgaagaatgggacgccaccgcagaggaagactgcattgaggcagcttacggataaggctcgcgagtttggtgctgggccgttgtttaaccggattttgccattgctcatgcagcctaccctggaggatcaagagaggcatcttttggttaaggtaattgacagggttttgtataagttagacgaattggttcggccttttgtgcataagattcttgttgttattgaaccttgttgatt

SEQ ID NO: 45018 - DNA, 284 bp, Glycine max
aaagcacaaagatacgaaggaagaaaaaagccccagtttgtggaattgagacatggagagcagcagtgggattgagagcacgggggggcgtgcgccactgtcaggggtggtggcagattgtgtgaagcggtggttcaaagacactctgaaggagctaaggcaggtgatgttaacatgcaggtcttggttggtcagatgtactatcatggctatggtgttcccagagatgctcagaagggaagaatttggctgactaaagcgtcgagggttaggtcttcagtttg

SEQ ID NO: 45019 - DNA, 200 bp, Glycine max
caaagagtgcgtcagttcagaccgtggtgtgttttccctatcagaaaggcgttattgagataggcacaactgaactggttactgaggatcctagtctcatacaacatgtcaaggcttgcttcttagaaatctcaaagcctacatgctctgaaaatcttcctctgtccttgataagccacatgatgacaaatatccaacat

SEQ ID NO: 45020 - DNA, 286 bp, Glycine max
gagaacaagaaaaagaggcgcaagatgagcggagggttcaggaggggtatgagttgttcagggagatgaaggggaagggttgtttggtggatagggtgatatatggagcgctggttgaggcgtttgtggctgagggtaaggttggattggcttttgatttgttgaaggatttggtgagctccgggtatagggctgatttggggatttatatttgccttattgaaggtttgtgcaatttgaatagggttcagaaggcatacaagcttttccaattgactgttcggga

SEQ ID NO: 45021 - DNA, 134 bp, Glycine max
ccgaggatgagaaaacactcgttatttgcataaattgcttaacaaagcttgtggggcggctttctcaggaagaactaatggctcagttaccctcgtttctgcctgcccttttcgaagcttttggtaaccagagt

SEQ ID NO: 45022 - DNA, 261 bp, Glycine max
atttggaatgcaatcaggtttggcacagattcattttgattttttatttttctttcaattgattgccagtgttggaaaatgtggtgtttgatgagcatgatcgagaagttgattactctgacaagtcagttacagaaaatactcgtgcagcttatcctatagagtacattccaaatgcaaagttaccttgtgttggccctcacccaaagaatgtcatacttttggcatgtgacgcatttggtgtactcccacccgttagca

SEQ ID NO: 45023 - DNA, 224 bp, Glycine max
ctaattccggagtttgaggctctgttttcggaccagttcagtgtgtcgctcaggaatgaagcgattactatttggaggaggttgggggaagctattaggggcatttttatggagctggagaatttgattcgccgggatccagcgaagatggcggttcccggtggcggtctccatccgatcactcgctacgtgatgaactaccttcgtgctgcgtgccggtcacg

SEQ ID NO: 45024 - DNA, 283 bp, Glycine max
  unsure (1)..(283): unsure at all n locations
agcgtgcgtttcttcctctctttctttctacttttcgcagcaacagataaaaccatcttccacacaacatacgacatcaccncttggagnanaagaagagccaccgctgcgacgccgttcgtttatttttgagtatccgctgtcatgtttgggcgtggtggaccaaggaggagtgataactccaaatattatgatattctcgggatttccaaaaatgccagtgaagatgaaatcaagaaggcctatagaaaggcggctatgaagaaccatccagataagggag

SEQ ID NO: 45025 - DNA, 280 bp, Glycine max
gcttaaaaatgccaaagactctaaggaaggagttgataaggaaatcacatctctacagactgaaattgagaatgcaaaagttgagaccgagactgcagtgagacagttaaatggagctgaatctgaagtaaaagctcttcgatcaatgactcaaagaatgatattaactcagaaagaaatggaagaagttgttctaaagaggtgttggcttgctcgttattggggtttagctgcaaaatatggcatctgtgcagatgttgcagtttcaaagtatgaactt

SEQ ID NO: 45026 - DNA, 281 bp, Glycine max
atgattttactgtgcctagggacagtcacagcactcttgcaattgggaacaagcttattatgtatggtggagactgtggtgatcagtatcagggtgatgttaatgttcttgacatggatacgatgagttggtcaaggttgagaattcaaggttcttccccaggagtcagggcaggccatgcggctgtgaatattggaaccaagatctacatcattggaggggtaggagataaacgttattataatgacatatgggtctttgatatctgcacttgttcgtgg

SEQ ID NO: 45027 - DNA, 277 bp, Glycine max
ctcattctcactctgttttacatacaatgtcgttctgaatcactgcatcttttcttactttcactctctgcagcttcaatttctgcaaaatggatccgtctgcggcattgctgtttaaccacctcaaaggtgcagacccgttcttcctgctagcgggtcctaatgtgattgaatcagaggagcacattctgcggatggctaagaacatcaagactattgcatctgaagttggaataccgttggttttcaagtcaagctttgacaaagctaaccgaac

SEQ ID NO: 45028 - DNA, 291 bp, Glycine max
ctagtcctctctgtaatcccaagaaggacacggtcatgaccaccaaacgcaaacatgcaaattttctgcttcctttattcttcttcttcttcttctgttctcacactttgttctctcatgcagccgattccatcacaggagatacagtaatcagagacaacgatggtggtgatactttggtgtccaaagacctcacctttgaaatgggtttcttcagtttcgataactcttcaagatacgttgggatttggtaccacgagattccggttaaaacattcatatgggttgcaa

SEQ ID NO: 45029 - DNA, 284 bp, Glycine max
agaagaagaagatggagatgtatcagatctggagcaggagaatagcgttgggagcgttcgcgtttgttctgcttttcctatcggcctcagcagacgacgtcgttgtgctctctgaagataacttcgagaaggaagttggtcaggacagaggagctctcgttgagttctatgctccttggtgtggacactgcaaaaagcttgctccagaatatgaaaagcttggtagcagcttcaagaaagccaaatctgttttaatcggcaaggttgactgtgatgagcacaag

SEQ ID NO: 45030 - DNA, 289 bp, Glycine max
tgttgctattatcatccgcagctgcttttattcgcaccgcaaacaatgagccatggccgtcggaaagaacaagcgcatctccaaggggaagaagggtggcaagaagaaggcagctgatccctttgccaagaaggattggtatgacattaaggctccttctgtttttcaagtgaaaaatgttggcaaaaccctcgtctctcgtactcagggtaccaagattgcttctgaaggactcaagcatagagtgtttgaggtctccttggctgatcttcaaggggatgaggatcat

SEQ ID NO: 45031 - DNA, 279 bp, Glycine max
tggcagatgaggtggttctgctagatttctggccaagtccatttgggatgagggtcaggattgcacttgctgaaaagggtatcaaatatgagtccaaagaagaggacttgcagaacaagagccctttgctcctcaaaatgaacccggttcacaagaaaatcccggttctcatccacaatggcaaacccatttgtgaatctctcgttgctgttcagtacattgaggaggtctggaatgacagaaatcccttgttgccttctgacccttaccagagagctc

SEQ ID NO: 45032 - DNA, 272 bp, Glycine max
cgtttttctgcaattctcttcgttttcaagcgattttcttcgtttttctacgaattcacgccgtaaaactatcctgattgtgtgattgcagtatccgtcatgaaaggaggaaagtccaagaccgaatctaagagagccgatcccaaacttgctgtgaataagaagggagccgccaccaaggctaggaaacccgccggcaaaggggaaggcagcgacagaccctaacaagctcaagaggcctccaagtgctttctacgttatcatggaggagt

SEQ ID NO: 45033 - DNA, 268 bp, Glycine max
atttctaactaattattgtgcttattattattgttgagaaagaaaagaatggcaaagttaataaaattctttgagttgaacacaggggccaagattccttctgttgggttaggcacttggcaagctgagcctggtgttgtagccaaagctgtcaccacagccattctggttggatacaggcatattgattgtgctcaagcgtataacaatcaagcagagattggttctgctcttaagaagctttttgatgatggtgtggtgaaacgtg

SEQ ID NO: 45034 - DNA, 147 bp, Glycine max
gccttacaatggcatccagataagaacgtcgacaagagggaagaagcagaggctaaattccgagaaattgctgctgcttatgaggttctcagcgatgaagacaagcgtgtaagatatgacagaggggaggaccttgaagagatggga

SEQ ID NO: 45035 - DNA, 152 bp, Glycine max
atcatatatcatatcagcaaggctaaccctaaatcgctcttactctctttcgtcagtttcgggggaagagatccagcagcaatggtgtacgtcaaggctcagaaatcaaaagcctacttcaagagatatcaagtcaagttcaagagaagaag

SEQ ID NO: 45036 - DNA, 145 bp, Glycine max
tgaaatggctcccaaaccgcctagtacgggtctgtttgttggactgaacaagggacatgtcgtcaccaagaaggaattgcccccacgcccctcggatcgtaagggggtaagttttttcaattgtaatgagtcagtttttttctat

SEQ ID NO: 45037 - DNA, 193 bp, Glycine max
gtttccacactgcataccttaggtcttccgaattcgaagttaatttgcaagatggctaaggaaaaggctcagatcaacattgtggtggttggtcatgtggaccctgaggaggcaaccaccattaacgagctgaagaagcctgttgtggagaaagaagctccagggcatgccatatgagggcatgcacgtacgg

SEQ ID NO: 45038 - DNA, 191 bp, Glycine max
gcaagtttggagtattgggcttttgaagttttggttttcttagctggactaatgcccgactcacagataaccacttcgttgattgcaatatgtataaacacagaattcattgcctacatgatcacttatggtctcagtgcagctgcaagcacaagggtatccaatgaattgggagcaggcaacccggaacg

SEQ ID NO: 45039 - DNA, 186 bp, Glycine max
aaaaatttcaaaggagttgctacatctttagaaggttgtgtaaatggataccttcaatgtgttgcatatgagagggtcccttcaaaaattctggtttatcaagcctcagatgatccactttaccgtggctatagagcagcagttcaatcgtcaagtcaagaagagtctttgttagattttgcatca

SEQ ID NO: 45040 - DNA, 185 bp, Glycine max
cttcggctcacttttgataatatttgtgggttggctttcgggcgagacccacagacttgtgtgtcaagtctgcccgataaccgatttgccacggctttcgatcgagccactgaagccacgctccaacgattcattttacctgaggtattgtggaaggtgaaaaaatggcttcggcttgggatgga

SEQ ID NO: 45041 - DNA, 189 bp, Glycine max
gacgcagtgactaaaccaaacctctcactcgccgtcgtagggtttctcctttcgtttagcaacaacaacaatggttgcagccaagaaaaccaagaagacccatgagagcatcaacaacaggctcgctcttgtcatgaagagtggaaaattcaccctcggttacaagacggttctcaaatcacttaggag

SEQ ID NO: 45042 - DNA, 218 bp, Glycine max
gagaaatgaggagtataagagggcagtattgaaggctaaagagcacatacgggctggtgatatttttcaaattgtactaagtcaacgttttgaacagagaacttttgcagacccatttgaaatctacagagcattgaggattgttaatcctagtccatatatgacttatttacaggccagaggaagtattttggttgcttcaagtccagaaattctta

SEQ ID NO: 45043 - DNA, 211 bp, Glycine max
ttgagaatgtaggtgctgaggattactattgtaggtttgagtacaaagctgccactggggctttcacgcctgaccgtgttgctgtgtattgcaagtgcgagatgccttataacccagatgacctcatggtgcagtgtgaggggtgcaaggattggtaccatcctgcttgcgtgggcatgactattgaagaagcaaagaaattggaacattt

SEQ ID NO: 45044 - DNA, 203 bp, Glycine max
gcaatggcacgtaccaagcaaaccgctcgcaagtccaccggaggaaaggctccgaggaagcaattggcaaccaaagccgctcgcaagtcagccccggcgaccggcggagtgaagaagccccaccgcttcaggccaggaacggtggctctgagggagattcgaaagtaccagaagagcaccgaacttctgatccgaaaactccc

SEQ ID NO: 45045 - DNA, 198 bp, Glycine max
ctcaagctttgtaccaaatagcaattttgctgacccttcaatttaaaggtgagtctatctttggtgtgacatcaggagtaaatgacacattgattttcaacacatttgttctttgtcaagtgttcaatgaattcaatgcaaggaagatggagaagaggaatgtcttcaaaggcatacacaggagcaagttgtttttag

SEQ ID NO: 45046 - DNA, 196 bp, Glycine max
ggactttgtcacatacttgcatcaccatggtcatcatcagaaactgccttggtatcgcggcaaggaatggagttatttaagaggtggtctcacaactgtggatcgtgactaatggttggatcaataacattcaccatgacattggcacccatgttattcaccatcttttacctcaaattcctcattatcacctcgt

SEQ ID NO: 45047 - DNA, 271 bp, Glycine max
ggtactacaactgttagttggatgtcgcaaatacagaagattgttgttttatccactacagagattgagtatgttgcagtaacagaagccactgaagagttgatatggcgtcagggattgttaacggagttgggattcgtctaatacaaaagtgttttgcatagtaatagtcaaagtgcaatacatttggcaaagaattcaacattttagaacaaagcacattggtctccattatcactttatcagatctttgcttgaggatgagatgcta

SEQ ID NO: 45048 - DNA, 266 bp, Glycine max
caaagatagcagattttggcatggcaagactggttttaatggatcaaactcaagcaaatacaaatagaattgttggaacctatggatatatggcacctgagtatgcaatgcatggacaattttcaatgaaatcagatgtctttagttttggtgtactggttcttgagatcataagcggccataaaaacagtggcattcgtcatggggagaatgtagaggatctactgagcttcgcatggagaaactggagggatgggacagctgtg

SEQ ID NO: 45049 - DNA, 262 bp, Glycine max
ggaagagaccctagccactctcccggcgtcgcggtgcgtatctgcgtgaataccctaacgggtaaaacggtcgcgttgtaggttgtgtcttcggacaccatcgacaagagtggttgccaagatccaggaccaggtaggcatccctccggtccagcagctgctcatcttcgccgggaagcagctggagtacggccgcaccctcgccggctacaacatccatgaggagtccacgcttcacctcgtcctccgcctccgtggcggg

SEQ ID NO: 45050 - DNA, 220 bp, Glycine max
ggtcgatgagcgtgttggatgaactggagaagaacttgcagctgtccacttggcatatggagccatcaaggatgacgctttaccgttttggcaacacctccagcagttctctttggtatgaattggcttacacagaagccaaagggaggatcagaaagggtgacagaacatggcagatagcattcggttccggattcaagtgcaacagtgcagtgtggaa

SEQ ID NO: 45051 - DNA, 204 bp, Glycine max
tgctatagcagatgaaagtgtgatggtcataggatatggcaccattttgttagcaaggccacctcatgttaaggctgccaccggagaagaagcctcagcagaagatttaggaggtgccactgtgcactgcgagacatccagggtttctgattagattcctcaagacggactccatgcacttgcgcttgggctgactataattaa

SEQ ID NO: 45052 - DNA, 244 bp, Glycine max
taacaagttcaaattacaatgggtagatcaccttgttgtaacaaaaatggcctcaagaaaggaccatggacaccagaagaagatgatcttataatcagaatgcattcacttttgggaaacagatggtccctcatagcaggaaggttaccagggagaacagacaatgaaataaagaactactggaacacccatctaagcaaaaagctgaaattccagggacagaagacacagacacacccaaatg

SEQ ID NO: 45053 - DNA, 302 bp, Glycine max
aggactccatttgtcaaggcaatgtggagagaggcaagagagtgtatttatgtggagccagatcaaagtactcagagcaaaggtgtattttggtacaacaataagttgtgatgattaatgtagccgggggcttcttgtccgtcaggtgggatggtttgaactttcctttgtgactgtttagtatcatgcttgcttattgggaataaagcccatcttgggagagtattatcggtttgatgggactccatttgtcaaggcaatgtggagagaggcaagagagtgtatttatgtggagccagatc

SEQ ID NO: 45054 - DNA, 297 bp, Glycine max
  unsure (1)..(297): unsure at all n locations
cgagcttggattgaatctttggagagatgttgtgatccattccagcaaaactaaggctagngttctagatactcttcttgaacttgtgcttagagaaaggaattgtgaagtaataaacagaggattgatgagaaatataataaagatgcttatggatttgggtttgcctgtttaccaacaggactttgagaagcattttcttgatgtttcagcaaatttttactgtcgtgagtcccagaaattcattgaatcatgtgattgtggtgattatttgaagaaagctgagagacggttaaa

SEQ ID NO: 45055 - DNA, 253 bp, Glycine max
atgtgggccaatatgatccaatggaggtaagaatatggtacagatacaattatggaggattttgaattcaaggagttgaatgaagttatgaagtactacccgcatggttatcatggtgtagatagggaagaagacctgtttatattgagaggctagggaaagttgatcccaataggcttatgcaagtaactaccttggaaaggtatttgagataccatgtgcagggttttgagaaaaaattgctgttaagttt

SEQ ID NO: 45056 - DNA, 259 bp, Glycine max
gttctaaaccaaatgggcatttatactttatctatttagtcatgttttactagccaaagaaacgggaaggaactgcataccagtcagagtaaggagaaatacttgacagttcactaacaccataaagaacagaataccaccatttattggtttttctaacagagttgctcatttcctgtttcctagggatctgatattatggtaagatctgcgaagaggtcaatggtggatgagctggaagcaatgcttgatgtggtaa

SEQ ID NO: 45057 - DNA, 253 bp, Glycine max
gggaaagttggtctctattcaaacattgaggagctttatttgctcaatcctagagctcttcttccttgctttgtggtgatttgcaaaccttgaacctaaagggtcaaaagtcaaagtttcttacatgttgtgtagttttatagatcccccttattttggcctttatggaggttctttgccattcatctttcgaagaaatttgattctttccccaagtcaaaattgtgcgtcttcgtgtttattgtatgaacct

SEQ ID NO: 45058 - DNA, 249 bp, Glycine max
ggagttttctcaactttccctcaattcctccacggattcttgatttcttataagttatcagattatggaggtgcagatgaatgtggagaagctggtaatatcgggtttataaactccctaatgagaaagaggctgtttatggggcgttagacaaatggacagcttgggaaacagagttccctgtgattgcagtgtctaaggctttaaaaatcttaaggaaaaggggtcactgggttcgtgtaattcaag

SEQ ID NO: 45059 - DNA, 248 bp, Glycine max
gttcagcttttgactactgttgatgctgatgggggtctccctgcgagcccacgcattcgcttcaacaaggatggaacacttttagctgtctctgcaaatgagaatggaattaaaattttagccaatggggatagtctgtttccaaacagcaaaggatagcaatgaaattcttaattcatgggcagcaaacttggagaaattgcttgatcttgtggagaagagttgtcatcaaatacacaaggaaacca

SEQ ID NO: 45060 - DNA, 249 bp, Glycine max
gggtatttctagggattccatgcacaagaggcgtgccactggtggcaagaaaaaggcttggagaaagaagagaaagtattacccatttttctaacacttttcttttaatttcattttttttgtctttttcttgaagttgcttatttttcgtcttgcacatacgatgtggtttgaataagaatgagaatggtttcaattcatctgtgtaaagtggctgttgtgttttatttattttagggcgatgaataa

SEQ ID NO: 45061 - DNA, 249 bp, Glycine max
gcttgggtcattcttacattgggcagttcaatatgaggaccttttccctcttttcttgtcttttgttctttctttctgtcttttccaccactctgttccaccctggtcattccctccaccaccaccctcactctgccacacacaactacagagatgctctcaccaaatccatcatcttctttgagggccagcggtcagggaagctcccttctaaccagaggatgtcttggaggagagactctggtctct

SEQ ID NO: 45062 - DNA, 250 bp, Glycine max
tctcgagccgaatcggctcgagccgaagcccttcagcaaccatgtcgaggagaaaggttagggagccaaaggaggaaaatggcactcttggtccagccgttagagacggtgaacatgttttcggcgtggctcgcatctttgcctccttcaacgacaccttcatccatgtcactgatttgtctgggagggaaacccttgttcgcatcactggtgggatgaaagttaaagctgacagagatgaatcatctcc

SEQ ID NO: 45063 - DNA, 247 bp, Glycine max
attcctggccctgtcggaatggtgccgatcaagagaacaaggttgtcgcttttggcaccattcctggccctgtcggaactccttatgaagggggcattttccagattgatatcacattgccagatgggtacccgtttgaaccccccaagatgaagtttaaaaccaaagtttggcatcctaatatcagcagccaaagtggagctatttgcctggatatcttgaaggaccagtggagcccagcactcac

SEQ ID NO: 45064 - DNA, 243 bp, Glycine max
taatttctactctctcttttttcctaaccctctttctttcagatcattgacctctacgtaatctatgccgtcttcaccgctctcatccaggttgtttacatggctttggtgggatcatttccatttaactccttcctatcaggagtactttcttgtgtaggaactgctgttcttgctgcgcagcatgggacttataaacctgctacgtacataggcataaatcttgttcttgtctttctgatc

SEQ ID NO: 45065 - DNA, 270 bp, Glycine max
ctctatcaataatctgtagagttagcttgtcatggcatatttattaattgagtccttgtaatgttgccaagctgtttctggatttgcggattatttcaactcagtttgaaatacaatgttagttttctgttggctaattgtgggtgctctgttctgttgaattattttattttccagatttttgagaagaacccaaccaaaattaagaactatggtatatggttgcggtatcagagtaggactggttaccacaacatgtacaaggagtac

SEQ ID NO: 45066 - DNA, 257 bp, Glycine max
cttccgaggcatatgaggttcaactcatttctcattttttttcacctttttgcaatgtttcttaaatgtactatgattgtaaagaaatggagtttttatttgtgattgttccaagtgattttgtctgcagttctttgcacaagctggctttccatgtcctgctttgaggaacccttctgatcacttcctcaggtgcatcaattctgactttgacaaagtcaaggccactcttaaagggtccatgaaactcaggtttg

SEQ ID NO: 45067 - DNA, 260 bp, Glycine max
tgcaggttcaactgcaacataggataaaacaagaggctgaacagtttcggcaatggaaggcttctagagagaaagagcttctgcaattaaagaaggaaggaaggagaaatgagtttgaacgccataagctgcaagctttaaatcagcgccagaaaatggtccttcaaagaaagactgaagaagctgcaatggccactaagaggttaaaggagttgttagaagctcgtaaatcttccagccgagacatttcaggttcaatg

SEQ ID NO: 45068 - DNA, 202 bp, Glycine max
tggcaaaccaggcagtgtattcggtgtgggcgattccaccggaagacgtgggcgccagatgcgccaacctcatgaccgccctccgatccgagttcggcgggccccacttccacccccacatcaccgtcgtcggagccatcaaactcaccccggaagacgccgtgaccaagctccgatcggcgtgccaagccctgaggccctt

SEQ ID NO: 45069 - DNA, 277 bp, Glycine max
aaacgccgcgagtggattgcttaccttcaagccggagctggtatagttgctgacagtgtccctgatgatgagcaccaagagcgtcaaaacaaagctgctggtcttgctcgtgccattgatttggctgagtccgcttttgttgataaatgaatttagatatctcatgaacatattcgcagtcatagtcatagtcatatgcataaagttgaagctactgattgtttgtacaatccagatggagcttcaagttcaaacttcattcatgtaggtacaaatt

SEQ ID NO: 45070 - DNA, 281 bp, Glycine max
gcaagtcagaagaattgttgaagaatgcatagcatcaactgttcttccctggtcgagaatgtagcagccagtgacagtttcaacaaccagaaagactagggatccctatattatcatcaaagccagggatcttatcaagcttctatcacgaagtcttcctgctcctcaggcgataaaaatacttgacgatgacatgcaatgtgacatcattaaaatcagtggcatggttcgcaataaggagcgatttgtaaaaagaagacaacatcttgtgggtcccattc

SEQ ID NO: 45071 - DNA, 267 bp, Glycine max
acattttctcaggtcattgcacggttggacaaaatcgttgcaaattgctcaaaacaaggatggtggaaagatacttttaaactcccttggtaagattcctagacggatatccttataaaattttagtttctttggaggaattcaaaacggtgaagtgttataccttgaaatgataaaatcaaccatcccttgtggtttgggtctgtacctcgggccttttagttcgatttgagcaatgctagttgctaaaagactgatattactgtt

SEQ ID NO: 45072 - DNA, 222 bp, Glycine max
cagactgagaggaagagagagggagattctttgtttgctaccttctctcggaaaaatggttacgttcaggtttcaccagtaccaggtggttgggagggctcttcccacggaagcagatcagcaccccaagatctaccgaatgaagctctgggccaccaacgaggttcgcgccaagtccaagttctggtattttctgaggaaactgaaaaaggtgaagaagag

SEQ ID NO: 45073 - DNA, 272 bp, Glycine max
tcgattcgagcgattcggctcgagcaccaattcattctcatacataccttcttcttcttctacttcttcttcttcttcttattcttcttctttcacaattgtaaggccatttaactggattggacctcgaatggatttcattcctgggattgatggtccaagtgagggtgttcctcgggttcttgcttgctttagcaataatcttctccgaggagagcccctcaagcttgtggacggtggccagtcccagagaaccttcatttacattaaag

SEQ ID NO: 45074 - DNA, 220 bp, Glycine max
ggaattttgtgctttacttcggcagcagaaatatctaaataatttgacagagcatgctctccggaaaaatcaacccttgattatatcaaatttgattaatgacaaggacctttcatctgatcacaatattagtggtactcctaagctggagcagatgtgcttgcaagccttgagtatgtatgtaattcctggcatctcatgtatagaaatatatgtggat

SEQ ID NO: 45075 - DNA, 333 bp, Glycine max
  unsure (1)..(333): unsure at all n locations
tgtttgatagaaataatggatcggaacgggccaaagatcanaagtacaattcttcaccatctctatgataagcagagacagagcccttactatgacaatctctgtcgccctgtttcagatttgcttccatttattgccaatgggatcagaggtgtcactaccaacccagcggtactcactactcagttttttcttcacctgaaaacattactcttctccatttggttttatttttatctagtttctgtgtgttggttataataacttttcagtgttctcacatcgcagatttttgaaagagctatttcatcctcaaatgcctacgatgatcag

SEQ ID NO: 45076 - DNA, 312 bp, Glycine max
gtttacgagagatagaagcaactcaacaaattaagggtgaaagctgagaaggttgctgaagagaagctcggttcacaacttgatgttcttgctcctgttaagtattgagtagtttttgttagtgtttgaaattttttatgccacttataccaaattgaactacctttcaattttgcttgaggttgctttgttattggatcatagatttgatatctgatcatcttggaagctgttttttatttaattgtgtgttttgtaaaaaaaaaaaaaaaaagggcggccgctctgtttttaatttaattgtgcgttttg

SEQ ID NO: 45077 - DNA, 318 bp, Glycine max
taacaataaagaacatgcaagcttcaactggagcaagaattcaggtgattcctcttcatcttccaccaggtgacactctactgaaagaacattaaaaattgaagggacccctgaacaaattgagtctgcaaaacaaatggttaaccaagtcataagtggcgagggttagtttgtattggaccattagtgacaccaacatggaatccctttgttggtgttctctcagcttgcgatggtatggttctaaacctcttttgatatttattagagggaaataagtctcctattaatgtgtataccttgtcataattggactgg

SEQ ID NO: 45078 - DNA, 284 bp, Glycine max
tccagagatgggctacaatcctcttgaaactcctccatgtggtgagatatgtgtgagagggaaaactgttttcactgcttactacaaaaatccagagttaacaaaggaagctattaaagatggatggtttcacacaggggacataggagaaatgcttcctaatggtgttattaagatcattgacaggaagaagaatcttgttaaactttcccaaggagagtatatagcacttgagcatcttgacaatgtttatggaatcactcctatagttgaagatatctggg

SEQ ID NO: 45079 - DNA, 270 bp, Glycine max
ttcttgcctgattaatttttttttaagtgttgtttagttaattttgtctgatttttgacctggttagacaaagtctgttttatgctcagaatctacattaaatggttgagtgtatgaagaaagtagcaaaacttgatcttgatctaactgtggaagataggaacctcctctcagtgggatacaaaaatgtgattggtgcacaaggggctcttagcgcatcatgtctcgattgagcagagggagagtctaagggaaatgagccaatgttaa

SEQ ID NO: 45080 - DNA, 271 bp, Glycine max
gagaagaacagagagagatccatccatcaattccaatggccgatcagctcaccgacgaacagatctccgagttcaaggaagccttcagcctcttcgacaaggacggggatggttgtattaccaccaaggaacttgggaccgtgatgcggtcactggccagaacccaactgaggcagagctgcaggacatgataaatgaggttgatgctgatgggaatggtaccattgatttcccagaattcctgaatctcatggctcgcaagatgaaagac

SEQ ID NO: 45081 - DNA, 251 bp, Glycine max
cataagtaaaccagtgcctcagaaagatgctgctcctggtcttgcatatttccacatccctctgccagaatatgctagttttgactcatcaaacatgactggtgtgaaacaggaaccggatggcaatggcattagctctcctctgtgaactccggcttcttcacaaccttgcttgcagcaggagatgtgaaggcagttttcactggccatgatcacatcaatgacttctgcggcaatctaatgaatataca

SEQ ID NO: 45082 - DNA, 275 bp, Glycine max
gtttttgttgttgcagccttttcgttggaaccaaacggtggcatttggggttcgcaaaacgccacgttttgtggtgtgtgctggccctaagaagatattatttggcaaagagtgcagagaagccttacaagctgggattgataaacttgccgatgctgtttctctcaccgttggacccaaaggacgaaatgttattctttctgaatctggaaaccttaaagtgattaatgatggcgttacaattgctcgatccattgagctttcggatgcaattg

SEQ ID NO: 45083 - DNA, 129 bp, Glycine max
ccatttgccattggatggcgctgctagaatttgtactggtgccaccagtttcctctccctttatgtcccagatgagtacccaagtggcaaaaattagattagactaatatatatatattgttttatcag

SEQ ID NO: 45084 - DNA, 253 bp, Glycine max
  unsure (1)..(253): unsure at all n locations
cttccaacgagaatcaaggctttcgccttgcgaacatcggcgactactttatgggccccggcctcgagcagtttattcagcagcttgccgacaacgaccccaaccgctacggaacgccgcccgccgccaaggacgccgtcgagaatctccccaccgttaccgtcgacgacgacttgctgaactccgagctgaaccagtgcgctgtctgccangacgagttcgaaaagggttctaaggtgacacagatgccctg

SEQ ID NO: 45085 - DNA, 283 bp, Glycine max
tggattttcaagaggggcatctgtgtatagaggtgtgacaagacaccatcaacatggaaggtggcaggcccgaataggaagggttgcaggaaacaaggacttgtatcttggtacatttagcacacaagaagaagctgctgaagcatatgatatagcagcaatcaagttcagaggaacaagtgctgtgaccaactttgacataagtaggtatgatgtgaagagaatctgctcaagctccactcttattgcaggagatcttgcaaaacggtctcctaaagaatca

SEQ ID NO: 45086 - DNA, 280 bp, Glycine max
gtaatttgtgctcacatgtttttcagggtctgtgaaaacatcccaattgttctttgcggtaacaaggttgatgtcaagaacaggcaagtgaaagcaaagcaggttactttccacaggaagaagaatttgcagtactatgagatttcagctaagagcaactacaatttcgagaagcctttcctctatttggccaggaaacttgcagggtagagccactagtttctgcatgtgaagttatagaaaattaaacttaaatatttaatttttaactaatgttttg

SEQ ID NO: 45087 - DNA, 258 bp, Glycine max
cttggaaggtaaaaaccggcttctggtttatgagttcatgcaaaaaggaagtttggagaatcatttattcagaaaaggtgttcaacctatggcctgggttacaagggtcaacattgcaattggtgttgcaagaggattaacattcttacattccctggatcaaaatgttatctttcgtgatttaaaggcttccaatatcctacttgattcggacttcaatgcaaagctttcggatttcggcttggcaagagatggtcc

SEQ ID NO: 45088 - DNA, 256 bp, Glycine max
caccaatagaccttttctttgggttgtgcgtcaagacaacaagagggtataccctaatgaattcttggggtgtaaaggtaagattgtgagttgggctcctcaacaaaaggtgctaagccaccctgctatagcatgttttgtcacccattgtggttggaattctaccatagaaggtgtgtccaatgggttgcctctcttgtgttggccatattttggcgaccaaatatgtaacaaaacgtacatttgtgatgagttg

SEQ ID NO: 45089 - DNA, 243 bp, Glycine max
ttcaaacaaccttcattatttttctgtgaacctgtctttcaagtttataacttgatcagtatgcagtatccaaatcataagggtagttgcaaattgcaatcgctacgcatgatgttcagggtggatccttctctgcaaaggactaccatgatcctcctcgagcaccgttgattgatgctgaggaactcacacagtggtccttctacagggatttgattgctgagctcattgcgacaatgatct

SEQ ID NO: 45090 - DNA, 244 bp, Glycine max
gcactggtggggaggaagcttccttatttgcgatggatatctttagaatgtatgagaagtatgctctcaagaatggctggacatttgaagtagtagatatagctcaatctgatcttaaaggatacaatgtacatgtttcatatattaatgcgcaataaatatgacctgattttcagtgctttacaagtgttttgaaatattgattgtggcatccaccatgcattgcaaccttctgttagcaaga

SEQ ID NO: 45091 - DNA, 283 bp, Glycine max
tagcattcccgaccagagtgctatcaccaaggacaatgtcaccatcatcattgacggcgtcctttatgtcaagattgtggatcctaagctggcgtcttatggggtggagaatcccatttatgctgtgattcagctggcacagacaacaatgcgtagtgagcttggtaagattactcttgacaagacctttgaggaaagggacacactcaatgaaaagattgtggaggccattaatatggctgcaaaaagttggggtctggagtgccttcgatatgaaataagg

SEQ ID NO: 45092 - DNA, 262 bp, Glycine max
gctggtggttgctgatgactgctctctgatcgctagcgaacactacagatttcagccaacgaaggaacaggttttctgaacatactctgacaaccagcctggcgtgttgatataggtctttgaaggtggcagaggaaggactaacgataaccattggttgggccgatttgaactttctggccttcgtcctgcccccatgggtgttcctcagattactgtgtgcttggacattggtgccagtggtattgtgaacgtctctgcc

SEQ ID NO: 45093 - DNA, 276 bp, Glycine max
ggaaccagtgctgcttcattacctttccgaaattaagatccttcagggcttggaattgagaatgactactagtacgagattgaaaacttgtttgtatagctttacttctcctggtggtccaatgtatcccactagagccgttcgacatgcagccagggaatcattagatttactttttccggtgggacgttacccgcggcatcttattagtttgttcttcaggttgctttatccgtggtattggccttcctcttgttggaacttcgtggtttcttg

SEQ ID NO: 45094 - DNA, 273 bp, Glycine max
taaaacctctatttccacttgtttgagtcattcttttgtgtttcatttcagagaccaatttattttttgtgggcattttttttcaggaaggtaatgaaggattttgctgtggaactggaggaactggcagagctagttcttgacttgctgtgtgagaatcttgggctagagaaagggtatctgaagaaggtgttctatggatcaaagggcccaaattttggtaccaaagttagcaactaccctccttgtccgaagccagagctgataaagggg

SEQ ID NO: 45095 - DNA, 277 bp, Glycine max
gagcctttggggtcttccgtgtacctccgccaaagggacatcctccaaaagttctaccaagaaagccgaggaaatgggtcttataatgttcccacttcctccttgagtaattcgttgacgaacccttgcaagaaaaagctgtacaggggagtgaggcagaggcactggggcaaatgggtggcggaaattagactcccacagaacaggatgagagtgtggttgggaacctacgacaccgccgaagctgctgcctacgcctacgaccgcgccgcgtaca

SEQ ID NO: 45096 - DNA, 274 bp, Glycine max
tgcttgaaggcacgcaacccgtgagattgttattggcagaaaccacaactgaagctggagaagatcccaggttctgaggaattgtggacgtgaagcgattattgttcaaaaagatagcgtcgaggcttttgttgaaaagctcagaaggtagttccccttcaaagttattgaacctaaggtcaaggaatttaaggtctggaattggaagcacaggctcagggaatcgcccaacaaagcgattgttgctgatgtctgcctcataaagaagcttaag

SEQ ID NO: 45097 - DNA, 276 bp, Glycine max
tttttgttctattagtttcttgtgtgatttcattcgtgcttattagaattgaagctacaactttgaccagctggcatcatgttgtcacattttgttcccttcatgtggcgctcaaaatgagattctttgagcacaaaccttttgagcagaaagctgtaattggatttgggattttaaatgggatctcaattggacttttaaatttgagcctgggtttcaattctgttggcatctatcaaatgactaagctggcaatcattccttgtactgtattgt

SEQ ID NO: 45098 - DNA, 269 bp, Glycine max
gagaggtgtaggataagtgggagctagattcagaaggacgcctgattatccatgaggaagtggaatggaggaaggaaaaacatgcagatgaagattttgattctaggagtgagcgtgatagtcacatatctgcaaagtctggaactaaagcccagaagaagagaaaaacatcagattcaggttgggcttacacagggaaggaatatgctagcaaaaaggcaggtggagatgtgaagaggaaggacaaacttgaaccgtatgcatattgg

SEQ ID NO: 45099 - DNA, 311 bp, Glycine max
aacatcacaagccgatggttgctgacattcggatgcacaatatgttgcagattcagctaagtattcgggaatcacgagccactgtgagtggttacttccatcgcactgaagtagtacacttatagatcgcagcgtgcatagtgcagataccagcatctctcgcgatcggcaacaagattgctcgcttaaaacatggaatgcaacgttgtgctgcatcagtccaatggctaaatcaaagaattgctctctcaagatatgcccatgtaccgctggggaactttgaacttgactggcttatatttattgcggat

SEQ ID NO: 45100 - DNA, 264 bp, Glycine max
cacaagtgcacaaccaatgaaaccacataaacttccttctccggcactctcacgtgcgttcgcagtgccctagggtccgccaccaccgccacgcaatgtggagtggcgtttccttcgaagaccgttaccaccgcgaacttcgaaccgtcgctggcggagctccggcgccatgtccggacgtcggacttcgtggccatcgacctcgagatgaccggcgtgacgagcgctccgtggcgcgagttgtttgagttcgaccgctccgac

SEQ ID NO: 45101 - DNA, 258 bp, Glycine max
gcctattgctgctattggtattgagatttggacaatgcaagatggtatattgtttgacaacatcttgatagctaaagatgataaaattgccgagtcctaccgggagactacatggccgcccctgtctgttaagtttcaatcatttcttcaattatctctccttgttggcctccgacgtgcaggggcagatgattcctccttctctttgttttcctcattctcaccactgccttggctagttgcagtttctgctggttc

SEQ ID NO: 45102 - DNA, 264 bp, Glycine max
cgattatcctaagtctttgggaatagtgctgcaatggcttcaagtcaggaggaggtgacccttttgggagctactggaagcccatttgtgtgcagggttcatattgccctcaagttgaagggagttcaatacaaatatgtcggagaaaatttgaggaccagagtggaactgcttctcaaatccaacccggtccacaaaaaggttccatggtttattcacaatgagaagcccatggcagagtctcttgtgattgtcgaatacatt

SEQ ID NO: 45103 - DNA, 247 bp, Glycine max
cctgctcttggtggatatgagtatgtgattcatcatctgttttctttggtagcagtagcatatgcaatgttgactggggaaggacagctttacacattcatggtcctgatctctgagacaactactccagggatcaatttgagatggtatcttgatgtagctggaatgaaaaagtccaaagcttatctcatcaatggggttgtaatatttatttcttggctggttgccagaatacttctgttcatat

SEQ ID NO: 45104 - DNA, 254 bp, Glycine max
tcttcttctcttgcggctaggttttagcgcacttcttctagatttaaggaagatgggtaaggaaaaggttcacatcagtattgtggtcattggccatgtcgactctgggaaatccactaccactggtcacctgatttacaagcttggaggcattgacaagcgtgttattgagaggtttgagaaggagctgctgatataaaaaagaggtcttacaagtatccctgggtgctggacaaactaaaggctgagcgtaa

SEQ ID NO: 45105 - DNA, 252 bp, Glycine max
tatgaattagatcatcatggaaaaaaggattggtttactaattctgggctgaagtctggcctttatgcatgggttgcccgggcagatgactacaagatcaatagtatctatggagaacatctgcgaaggatgggcgatgtcaaaaccatatctgagcttatggaagaagaagctcgaaggcaagataagcttgtctcgaatttaactaacattattcaggtaaaaaataagcacttaaaagagatagaagtg

SEQ ID NO: 45106 - DNA, 213 bp, Glycine max
atcttgcttgatgataaatggacgccaaagattgcagattttgggatggctcgtcttttcccggaagatcaaagccaggtccatacacgtgtggctggaaccaatgggtatatggctccggaatacgtgatgcatggaaatctttcggtgaaggcagatgtatttagctatggagttttggtattggagttgatcaccggccaacgaaactct

SEQ ID NO: 45107 - DNA, 262 bp, Glycine max
tggcacttggcaggctttcatcttccttcaacaagcctttacgtcctctcttcaatgctggctcagtttactacaagtcctctttgcctgctgaagctgcgtacgacaatgagaaaagctgtgatacgggactggaactgataccctccgagaatttcacttctgtctctgtaatgcaagctattggctctatcattactaacactcggaatgaaggatatcccggtgcaagatattatgggggaaatgagtatattgacat

SEQ ID NO: 45108 - DNA, 266 bp, Glycine max
ctctcattcttctccctaaaatcaaatcatggccaccgccacatcccgaacccttcgattccaatctccgtcactctctctctcctcgaagctccccctctcctccgcgttcacctgagaatccactagaattcattcaggtccagattgctaatgtggaatcccgatttgctagtgctatatcagattctggggagattaaagttaaggctcgggtaaagcatgatatcccccatctgtcaaaggttgggtcttttgatgttgat

SEQ ID NO: 45109 - DNA, 265 bp, Glycine max
cctacccattggatgcacttatgagtgactgcagagaatactttcagcaaactagtaggcgggtttcctttgaatatgcacttttagctggagtgaatgactcagtaaaccatgcattagagcttgctgaattactccatcgatcgggcagcggatatcacgtcaacttgatacctttcaatccaatagaaggctccgagtatcagcgtccttccaagagagcagtgcttgcattttctggtgctttggagtcctctaaaataac

SEQ ID NO: 45110 - DNA, 247 bp, Glycine max
ctgattttggaacatctagatcagttccactagataagactcacttaaccacagctgttggaggaacttttgggtacatagaccctgagtattttcagtctagtcaattttcagataagagtgatgtgtatagttttggggttgtgcttgtagagctcataactgggagaaagcctatttcattcttatatgaagatgagggtcaaaatctggttgctcaattcatttctttgatgaagaagaacca

SEQ ID NO: 45111 - DNA, 252 bp, Glycine max
cgatactttcatgtcatcagtgaaaattcactcatttggggtcttccaatcatatggagaagactattcctttttcaggaatattgagctctgaccctgctcagaacactggtgaagatacactactgtggcggcgcatctttgccggtcatccagagagtgagcagagaggaagtgggttgttcttcagaggctaggtcatatggaaaactattatggatgaactcttatcaactggcctgtctaaagcaa

SEQ ID NO: 45112 - DNA, 292 bp, Glycine max
tgtggaggacagacatttttagtctcagccagcacaatttatctcttgcaatccaaaatgaaacaacatttgttcctcccccttcaacagctcggtctgtgtcaatgagagatatgggtaccgaaatgacccctattgctagccaggagcatcaagaacaggtaccccagtgagggcaacaacaccaatgcgcagcctaattcttcccggccttctactccccccagagcctcccctgcatctactttaactgatctacatagtgacaatctgaatctcaacatgaatgagt

SEQ ID NO: 45113 - DNA, 281 bp, Glycine max
gagaaaggctatgaagatcaaccacaagctgtagtgaacatgtctgctttgtggctcttaccgcgccaaatccttaatggattggctgaggccttaggtgtagtaggacagaatgagtttttcctcaccgagctacctcaatctatgtctagcctagcgtccactcttaatggccttggctcttctgtggcaaatttggttgcaagtttcattctcagtgttgttgacaatgtcactggaggtggaggacatgaaagctggctttcaagcaacataaacaa

SEQ ID NO: 45114 - DNA, 253 bp, Glycine max
gtttgcagttgtctgcatgcattgttattttcaaagtccgctttatcaagctgacaagtcaaataaattattccctctctcctagtagtgggggaatagatttgttcctgtatctgatcgaggtttttataatcgtcataatataataacaatttacgttcaaaaaaaaaaaaaaaaaaaaaaaaaaaaaaaaaaaaaaaaaaaaaaaaaaaaaaaaaggggggcccccccatttggagccccctcgcccggg

SEQ ID NO: 45115 - DNA, 254 bp, Glycine max
cagaagactgctgcatttataaaacgattagcaacgctttcactgtgtgttggatcagcagattccatggctgccttggtcacagtaaagcatcttcttcagaagaatgttaagtgcagaaatttattggaaaatgacattggctgtgggctctgtttcgggcacaattcataaatatctaccatattccacagatcccaatttaagtggtgcccttgcctcagtactttgggaactcaatcttttgtctagtc

SEQ ID NO: 45116 - DNA, 278 bp, Glycine max
cattttcacttctctctctctctttagggttttggctctctctctctctctcccgccttattcctctctacctctcacatccttcacaatgactaacaacaacgacaacatcgccgtgacagatctcacttccgcactcaatgcagagaatcgtgccgacctagatcactgctctcaagagcaatattcagagtctggctgcggttcattccgatgtactggagactctaaccccgaatgtcaagaaacgtgttgaatctcttagagaccttcagggt

SEQ ID NO: 45117 - DNA, 279 bp, Glycine max
gctgatccacacattctaatcactgatccattcatgtggaactgtgacgatggtgagaattaccgtcccacaaggccattcagtttggacaccagcacacgcttcaagctttcccctcataatgagtatctattcttcaattgcagtgaggatcatgtgatcgttaagccaaagccaattttctgtgagcgcttccctgagcgttgtgactcttcgtgtgacagtggtagttatctctgcaggcacatgccagggtgctcctttgctatgagtggtagc

SEQ ID NO: 45118 - DNA, 250 bp, Glycine max
cacaatcacagacacagtttcgctctactacttgaaccctatttgcagcaatggctgaaaacttcgacgacctaaataataaactccctgagctcaaattagattctaagcaagcgcaagggtttctgtcatttttcaaaaccctacctgatgatccaagggctgtacggttttttgatcgccgggactattatattgcccatggtgagaatgctacattcattgcaaagacctatttccacacaacata

SEQ ID NO: 45119 - DNA, 264 bp, Glycine max
attttcaccttttcacaaatggggatggctgcagagtcacagtttcatgtcttggctgttgatgacagtctcatagataggaaactccatgagaaggtcctcagaacctcctcctaatgagttactacagttgattccggtagcaaggctttagagtttctggggttgtgtgagaatgatgagagccacccaagtacaccatatggttgtcccaacaaccatcaggaggtggaggtgaatcttgttataacagattactgtatg

SEQ ID NO: 45120 - DNA, 106 bp, Glycine max
cagaatctttgagagaggatggcgcaggcaagcaaggagccgtgcaagaaagaggcttgtgacattcaagcttgcctctccaagaacaactttcctccaccaaagt

SEQ ID NO: 45121 - DNA, 271 bp, Glycine max
cggctccagctcgagacagctcaaagagctcaatatctctcagtctgggatggtttacttgatcctttgatgtttggggattatccaagctcaatgaggactagagtaggaagcaggctaccgaaattttcgcaatcagaagctgctcttgttaagggttcattagattttgttggaatcaatcattacaccacattttatgcaaaagacaattctactaatttaattggaaccctgctccatgattccattgcagactctggtgccgtta

SEQ ID NO: 45122 - DNA, 255 bp, Glycine max
ctcccctttgccgctgttgttgttgctgcaccaccgaacaacttaccctgtaaatcgcgtttcgtttgtgcaaggttttaaaagatggctgatgctgaggacattcaacctcttgttgttgataatggaactggaatggtcaaggctggttttgcaggtgatgatgctcctagggccgtgttccccagcattattgggagaccacgccatactggtgtaatggttgggatgggtcagaaggatgcttacgtgggt

SEQ ID NO: 45123 - DNA, 273 bp, Glycine max
tccagatgggtcaatagtgcaaattgttatcaatgctcttgtaaacatggagagtacaaagccccaatcctgtgatgtttttgtcaaaaagttgcttcagcagttggcaagttcaaaggaatcttcatttaaggacctgcaagaacttgctggccaaatattcagcaagacaaagtcatctgaagaaacccgaaatgcagagtctgataacaagaaacaaaacaaggaagtccattcaaatagcatttaagccctcttgcaagatttcttcta

SEQ ID NO: 45124 - DNA, 275 bp, Glycine max
gcttgccaaatgcgttaaattatcccatgttggaggagtatgacttcagaaatgatactgtgaacccagatcttgacatggaactaaagcctcaagcacaaccacggccatatcaagagaagagccttagtaaaatgtttggaaatggtagagcaagatctggtataatagttttaccctgtggtgctggaaagtccttagttggtgtttctgcagcttgccggataaaaaaaagctgcctctgtttggcaacaaatgctgtttctgtagatcag

SEQ ID NO: 45125 - DNA, 250 bp, Glycine max
cagaaatttgcgccatcgtcgagagaagcgtgagatacttctcgtttatgatgagagctaaggatctgattataattttgaattgatagtttagttgtcaagtcataaatcagtatcatcactttaaatttcattagaagctgtcaaaatgtcacggaagggtttgatggagcaagacctgagtaagttggatgtaacaaagttgcatccactttctccagaagtcatatctcggcaggctactattaat

SEQ ID NO: 45126 - DNA, 260 bp, Glycine max
tgtggatatgatcaaaagtattctggttctaactccccacctgctacatcaggagttcttggccttggaaatggaagagcaagcatcttatctcagcttcattctttgggtctgatccacaatgtggttggccactgcttaagtgcacgaggaggagggtttttattctttggagatgattttattccctcttcaggaattgtttggacatccatgttgccgagttcttcagaaaaacactacagctcaggaccagcaga

SEQ ID NO: 45127 - DNA, 260 bp, Glycine max
tcttaatgcaaaagatatttgtgtgactgggagaaaacttacagacaaggtctactactggcatacagggtatattggccacctcaagcaaaggactctaaaggatcaaatggccaaagaccctactgaagtcattcgcaaagctgttctgcgtatgctgcctagaaacaaactacgtgatgacagggatcgaaaattaaggatctttcctggcagtgagcacccttttgttgatcgcccacttgaaccgtatgtgatgc

SEQ ID NO: 45128 - DNA, 258 bp, Glycine max
tagtaatggagaatatgtcaaagctggtttggctgaattggagcattggtgttataaggcaactgatgagtatgcaggttcagcctgggatgagctcaaacatattagacaagctattggatttctggtcatacatcagaaaccaaagaaaacattggatgaaataagccatgacctgtgcccagtaagtaggagaaatctttttcattgaaagatttgctatttagaatagttaccattctgtctctgtgtacaggt

SEQ ID NO: 45129 - DNA, 296 bp, Glycine max
cacactctctctcaccaaagccttcctagaacgaaaaaaaaaagaagagcaattttccctcaccaaagaagaagaagcaaacaatggccgatcaacttaccgatgaacagatctccgagttcaaggaagccttcagcttgttcgacaaggacggcgatggttgcatcacaaccaaggagcttggaactgttatgcgttcattggggcaaaacccaactgaggcagagctccaggacatgatcaatgaagtggatgctgatgggaatggtaccattgacttccctgagttcctaaat

SEQ ID NO: 45130 - DNA, 282 bp, Glycine max
tattttcgggccatcagttgaagttgatatacctctttgtttttttcagatgaatacgttatttgccttgggtgcaagagtccggatactatacttacaaaggagaatcgtctcttctttctccggtgtgagaaggtgaattttttatacacttttgcttggttctcttttagtacctatagtttttaagccaagtgtctgcccttacccaccttgcgataagctcctctcaaaggtgatggtttctattaatattttgttttatttatgatcaattagtct

SEQ ID NO: 45131 - DNA, 286 bp, Glycine max
ctattatcatccgcagctgcttttattcgcaccgcaaacagtgagacatggccgtcggaaagaacaagcgcatctccaaggggaagaagggtggcaagaagaaggcagctgatccctttgccaagaaggattggtatgacattaaggctccttctgtttttcaagtgaaaaatgttggcaaaaccctcgtctctcgtactcagggtaccaagattgcttctgaaggactcaagcatagagtgtttgaggtctccttggctgatcttcaaggggatgaggatcatgc

SEQ ID NO: 45132 - DNA, 278 bp, Glycine max
ataatgtcgtcacattttgcatgaactttcagggagttggttatccacttgatattgttgtttgtagtgctttgggtgctgatatgtatgactgtgtttatcctactcgcacagcacgctttggcactgctctcgttcctgagggagtattgaaactaaaacataaagcaatggccgatgacacccgtccaattgatcccacttgcccttgtatggtttgcaagaactacagcagggcttacatccattgccttgtgacaaaagatgcaatggggtct

SEQ ID NO: 45133 - DNA, 284 bp, Glycine max
ggcaagatgtcgtagagatgactgttttcttcgttgctgcactagttccgagatgtcgctgggtatgccggtggcggcgacggtgaactgcgccgacaatacgggggcgaagaacctctacatcatatcggtgaaagggatcaaagggcgtttgaaccgtctcccctcggcttgcgttggcgacatggtgatggccaccgtgaagaaggggaaacccgatctgaggaagaaggttttgccagctgtcattgttcgccagcgcaagccatggcgccgaaaggacg

SEQ ID NO: 45134 - DNA, 273 bp, Glycine max
agaatgttgaagacagaacttacatgagtactctgtttggtcaccaaagtgaaattttaagtattgattgcttacgcaaagaaagggtactgactgctggacgtgatcgtagcatgcaattgtttaaggttcatgaagagtcacgtcttgtatttcgtgctcctgcatcctccttagaatgctgttgttttgttagtaatgatgaactcttgtctggttcggatgatggaagcattgagctttggactgtaatgcgaaagaagcctatttaca

SEQ ID NO: 45135 - DNA, 253 bp, Glycine max
ggacctaacagtgtgggcgtcaatcacaacattctcataacaaatatccctattggatctcttctctatggctttcttgctgcactagtttatgatgctaatgcaccctcaatgccaggaaacttgataacgtctgactcagtagtgtgcatgggaaggcagtgttacttctggacatttgtctggtggggatgcatatctgtcctgggactagcttcaagcatgctattgttcttaagaaccaaacatgcat

SEQ ID NO: 45136 - DNA, 247 bp, Glycine max
tgtgtggaaaagctccttgaagccggtgcaaatgtactaatgtttgatgcttgttacggaagaacctgcttgcactatgcagcttattatggtcattcttcttgtcttaaggcaattctttctgccgctcaatctagtccagtggctgcttcttggttggtccttttttctgtttttgcataaattttctccactgattgattcatgtggtgatttcttatgttggtttttataaaaaaacataaag

SEQ ID NO: 45137 - DNA, 258 bp, Glycine max
cacaagacaaacttcatagttcgtgtgtgtgtgatagatatataataataagttaataacaacaacatcaatgggaggaatgacatcatcgatggctgcgaagttggcgttcttcccgcctcacccagcatcgtacaaggtggtgaaggacgaggtgacgagtcttctgctcctcagtcccttccctcaccgcgagaacgtggaaattctgaagcttccgacgcggcgcggcgccgagatagtgagcatgtacgttcg

SEQ ID NO: 45138 - DNA, 255 bp, Glycine max
ccactctcctccaccaccaccatacaagaagccttataagtacaagtctcctcctcccccagtccactctccacctccaccacactactactacaaatcaccccctccaccctaccactactagaatatagccctttcatatcacacccccacatggatgtatacagacagtgtgaaaatgaaagccatggagggggaaggtgcagttgcagtttgcaaatccacaaagaagtataaatgtttgattattgttat

SEQ ID NO: 45139 - DNA, 254 bp, Glycine max
tctcgagccgaatcggctcgaggaaccattctcttacctatcggatagttgatagaattttttgccaggttccaaggaaatttaccagtaaaattgaagggaagatgaactatgaagattttgtttattttatacttgccgaggaagataagtcatccgaacctagtctcgaatactggttcaaatgcattgatttggatggaaatggagtgctgacacctaatgaaatgcagttcttttatgaggagcagttg

SEQ ID NO: 45140 - DNA, 290 bp, Glycine max
agggacctcttagctatggtgtcacctttccagaacagtgctatgggataatggagatgttggattcttttctcaaggatcactcttgtttttctggtttggaaaggaataagaagagtgatcttaaatgggaggagtttgctccaagggttgaagattacaatcattttctggcaagggcaattgcaggagggactggccagattgttaagggtatcttcttgtgcagcaatgcttacaccaaccaggtccaaaaaggaggggaaacgatcctaaatactgctgcagaa

SEQ ID NO: 45141 - DNA, 282 bp, Glycine max
gtagtttcaaaacttcaaaattatgtagtatgtattatgttgcactctggtgttttgtgtctaaacaaacctcgagccggaaacactagctagggtattgggagctctcgttgtttcggagttatggaccttacgcagccatggcactgctacgaatgccgccgccgccccaccacgccagctctcccagaaggaagctgacatccagatgatgttggccgccgacgtccacctcggcaccaagaactgcgacttccaaatggaacgttacatcttcaagcg

SEQ ID NO: 45142 - DNA, 270 bp, Glycine max
cagttatatggggtcttcttggaccgcgcagaattttcggagacctcggtgaatatgccaaagtgaacttgttcttccttggtggagctattgctccctttctagtttggcttgctcacaaggcatttccagagcaagatggataactctaattcacatgcctgtgttgttgggtgctacatcgatgatgccacctgcaactgctgtgaacttcactagttggatactagtaggctttctctcaggatacatagcatatagatacagaca

SEQ ID NO: 45143 - DNA, 282 bp, Glycine max
ggcattgctaggggccttgtataccttcatgaggattcacgattgaggattattcaccgtgatctcaaagcaagcaacattctcttggatgcagagatgcatcctaagatatcagattttggtatggcaagattatttgaagtggatcaaactcagggaaatacaagtagaattgttggaacctttggatatatggcaccagagtatgcaatgcatggacaattctcagtgaaatctgatgtttttagttttggtgtgctgattctcgagattgtaagtggc

SEQ ID NO: 45144 - DNA, 280 bp, Glycine max
agcttgcacgtaattcctgaactttgctctcagcatcactgtcacctcactaagtcgctcaccaggtgtcgtgtttccaacatgtggcaagcaagaaccccatgtcttgaactgggattcaatcctagggcgcaagctgtcgagcattctcttcaaggaattcaaaagaattccaagctcatcaggaaccacttaggcacatgtagatcgtttggcaagtttttgaacatatttattaagcccaaatttcttaggacccatgctttctttgagaggagat

SEQ ID NO: 45145 - DNA, 297 bp, Glycine max
catcccctaaggtttctgacacagttgttgagccttacaacgcaacattatcagtgcaccagctcgttgaaaatgcagatgaatgcatggttttggataacgaagctctctatgacatatgcttccgcacccttaagctcaccaccccaagctttggagatctgaaccatctaatttcagccaccatgagtggtgtgacatgttgtcttcgattccctggtcaactcaactcagatcttcgcaaactcgccggaatctcattcccttcctcgtctgcacttcttcatggtgggattt

SEQ ID NO: 45146 - DNA, 297 bp, Glycine max
gcttgttgcattgtcaatggctgagatttgttcatcttatccaacttctggtgggctttattattggagtgccaagcttgctgggcccagatgggcaccctttgcttcctggattactggctggttcaatattgttggccagtgggcagtgacaacaagtgtagattattcacttgcacaactgattcaggttattattctccttagtactggtggcaaaaatggtggtggatatgaggcatctaaatatgagttattgctttccatgggggaattttgttcctacacggtataata

SEQ ID NO: 45147 - DNA, 293 bp, Glycine max
ccgaagaagaactctcttgaaggtcatcattctcggtgacagcggggtggggaagacgtctttgatgaaccagtatccttctgtttctgtctacatactccgtgttctttactttgcgatgcaatttgctttctattgtttagtactgcatgtaaactatgtattttcccctaacatatgtaatttaggtatgtgaataagaagtttagtaatcagtacaaggcaaccattggagcggattttttaacaaagaagtgcaatttgaagataggcttttcaccttacagatttgg

SEQ ID NO: 45148 - DNA, 253 bp, Glycine max
caattttcaggcaggactattatcaagaaggtaaccatgtgtattccgaattaaacgttcttgaggcattccgaagagctttaacaacttggagcaggtgggttgatgccaacataaatccatccaagaccacggtcttcttcgaggctattctgcatcccacttcaggtgaagtacaaagaattaatttaatttcaatgtactgatacactatcacctaatcatggattgtcatatatggaaaaaattgttg

SEQ ID NO: 45149 - DNA, 270 bp, Glycine max
agaactaggcccacaagtgtggagtgagaccaagtcaggggaggcaccccaaaagatggcaggtgcgagaccgaacaaggatgacagtaaggactcagatttctggaagatgcttaatgagccagaggaccaggccccaggaggggaggaggtgccggctgaggagcaggacccaagccctgaggcagcagattcagcttctggtgctcccaatgattttcagaacaacgtgcaggtcaaagtcattcgaagccctgcggatttgattcg

SEQ ID NO: 45150 - DNA, 270 bp, Glycine max
tgactgctgaaatacagcaaaagattttgcatttgccaacatcttgggactggagaaatgttcatggtatcaattttgtcagtcctgttcgaaaccaagcatcctgtggcagctgctactcatttgcttctatgggtatgctagaagcgagaatccgtatactaaccaacaattctcagaccccaatcctaagccctcaggaggttgtgtcttgtagccagtatgctcaaggctgtgaaggcggcttcccataccttattgcaggaaagt

SEQ ID NO: 45151 - DNA, 264 bp, Glycine max
tacatatttgctatctttatgcattgtttttggatgatgatgttaggctacatcctggatcaatcggagcactcactcgtgagatggaaaagacccctgagatatttattcaaactggataccctctcgatctgccatctggaagcctgggaagttactgcatctatgaataccatatgccttgttcaatgggctttgctactggtggaaaaacattctttctatggggagggtgcatgatgatgcatgctgatgactttaggc

SEQ ID NO: 45152 - DNA, 291 bp, Glycine max
ttctgcgcaccgaactgaaccaaacgacaatggaagcagcggaaaacgacagcgtcgtactcgaaacgacggagccttccagttcccacggttccgacggcgacgatcacctccgacagagctccgacgtgctggccaaaggcttgtcttcgatgctctcttcggtgattagcgatttcgatttcagagctcagcaaactctccaaagccagaaccacctctcttccgtcatcgatcgtctcaccggagaacttgatcagttacttgaagatgcacctttaccattcataa

SEQ ID NO: 45153 - DNA, 285 bp, Glycine max
gttggatgcatttctatttctaactaattattgtgcttattattattgttgagaaagaaaagaatggcaaagttaataaaattctttgagttgaacacaggggccaagattccttctgttgggttaggcacttggcaagctgagcctggtgttgtagccaaagctgtcaccacagccattctggttggatacaggcatattgattgtgctcaagcgtataacaatcaagcagagattggttctgctcttaagaagctttttgatgatggtgtggtgaagcgtgaa

SEQ ID NO: 45154 - DNA, 286 bp, Glycine max
tgacgcaaagagatgttggtgatggttctggggttgtggccgttgactcttcatccgtttttccagtcagtggaaatgtttatccagatgggttgtatttcactattttacgtgttggaaatcctccaaaaagttattttcttgatgtggacacagggagtgatttaacttggatgcagtgtgatgctccatgcagaagctgtgggaagggagcacatgttcaatacaagccaacaagatccaatgtagtatcatctgtggactctctctgtttggatgttcagaa

SEQ ID NO: 45155 - DNA, 275 bp, Glycine max
taacaatcttacgatttcatgaatcactgagataaatggagtcagatgaagacgattttgttttctacggaacgccgatagagcgtgaggacgattcaatcagtcgcaagaagaaggccattgctgagtcctcaggtcagctccgagctctccctgcttggaagcaagaggttagagatgaggaagggcggagaagattccatggagcatttacaggaggttattctgcgggttactataatacagtgggctcaaaggaaggtgggcacctcagt

SEQ ID NO: 45156 - DNA, 270 bp, Glycine max
aaaacagaaagctcgtgtcactgaacgtcaacgcaggcaacgcatcgctgataacctcaaagccttgcatgaattgcttccaaatccagcagagggaagtcaagcttacgtattggacgacataattgactatgtcaaatatttgcagcttcaaataaaggaacaaagtggaagtagattattgcaagcggactcaactgctataccactagtttttcatgagggttacggccattatatcaaccaaaagatgctgaatgaaccccttga

SEQ ID NO: 45157 - DNA, 268 bp, Glycine max
  unsure (1)..(268): unsure at all n locations
tcanatactaagccagttggatgatcctcaacaagcacttcaatgggtgaacagccgcatcataccgtacctacccgagacaaagatcactggggttcaggttgggaatgaggtcttcactgatgatgacatcactctcattgagcaccttgtgccagcagtggtgaacattcacaatgctctagctcaattaggttactcaaacatcaaagtttcaacaccaagttccttagcagtgcttgatcaatcttaccctccttcagctggt

SEQ ID NO: 45158 - DNA, 263 bp, Glycine max
atgatcgaccttcttatgatggatacaattggaggaaatatggtcagaagcaagtgaaagggagcgagtacccgcgaagttattacaagtgcacacatcctaattgtccagtgaaaaagaaggttgaaagatcatttgatgggaatattgcagaaattgtttataaaggtgaacacaaccattcgaagccacagcttcataagcgaaactcagcagcagggacacaaggatcaggggttatgtctgatggaatggttcaagat

SEQ ID NO: 45159 - DNA, 263 bp, Glycine max
ccttcttctttttgctggagcaatcaatcctcttttttctatgcttttatatctatcctttataagggtgcagcaacccttgagcttccgaatggatccagttatctcttcacttaataaaacttgaacaggggcattgatggtccaagtgagggtgttcctcgggttcttgcatgctttagcaataatcttctcagaggagagcccctcaagcttgtggacggtggccagtcccagagaacctttgtttacattaaagatgc

SEQ ID NO: 45160 - DNA, 255 bp, Glycine max
gtttcataataattgcgacgtggaaaatcgaaagtaaacgtttccgatggtgtcgtggaacaggttgcggctgggaatggacggtgacggcgaggagttgactgcgcaggagaccgctttgtatgaccgtcaaattagggtttggggagctgatgctcaaagaagattaagcaaatctcatgtcttagtctatggaatgaaaggaactgtagctgagttttgcaagaatattgttctggctggagtaggtagtct

SEQ ID NO: 45161 - DNA, 145 bp, Glycine max
cacaaggagagtttgtattggggaacttatcgtcctcacgtgtatctcggaattcgcgccaggactccaaaatctttgatggctggattaatgtggattggtgtgaaggatggcaaataccacttgcggcatttttgccgacatg

SEQ ID NO: 45162 - DNA, 257 bp, Glycine max
gcaagaatggcacttcgttgcttggtgatgtccctttctgttctcttcactcttggtcttgcgagagaaagccatgccagagacgaagatttttggcatgctgtttggccaaacactcccattccaagttcattgcgagatcgctaaagcctggccctgcaagtgttgaaatcgatgatcacgctatgcaaattgaagaaacacagtacccgaaaaccttcttctataaagaagaccttcatccaggcaaaacaatg

SEQ ID NO: 45163 - DNA, 275 bp, Glycine max
  unsure (1)..(275): unsure at all n locations
cgcaattgctcagggacaatgatgtcgcgggcgtgtcgttcggaagagtcagagagccccaacaacctaatcccgtacctcccaaacgacgtcgcattgaactgcctagcacgcatccctcgttcccaccacccaaccctctcgcttgtgtcgacaccaatccgaagcctcctctatccccctctcttgttcaccacgcgctccctcctccaatgcaaccaacncctcctctacctcactctccgctcacgcgattcctccctccagtggttcac

SEQ ID NO: 45164 - DNA, 272 bp, Glycine max
cttgttctttatgtttcccattgcatttgctgatcttagggttggattctatagctctagctgcccaagagcagagcaaattgtgggtcaagttgttcagaggagattcaaccgtgatagatctattactgctgccttgcttcgcatgcacttccatgactgctttgtcagaggctgtgacgcgtccatattaatagactcaaccaggggcaatcaatctgaaaaagctgcaggagcaaacggcaccgttcggggatacgagctaatagacg

SEQ ID NO: 45165 - DNA, 269 bp, Glycine max
ttgatatttggaggaattacaattgtatgtggaatagtgggcactttagctggaggcttcgttctggattatatgagtaacaccttatcaaatgcatttaagcttctctcaattactacatttattggtgctgcattttgttttggtgccttcttattcagaagcatgtatggcttccttgctcttttctctattggtgaacttcttgtttttgccactcagggtcctgtgaattatgtatgtctacgttgtgttaaaccaagtttgag

SEQ ID NO: 45166 - DNA, 270 bp, Glycine max
cgataatcttatacatggaattatatgcttgctgcattgagtacataattgtggagagcgacaacttatctacattatttccaaatgcgcacattagtttgggtggagttgaactcaatgcacacattttgtttgcaatattgaccgcagtggctcttctccctactgtttggctacgtgacctacgcattctcagttacatctcagcttgcggagttattgcaacgattctagtggttctctgcttgttctgggttggtttgttagaca

SEQ ID NO: 45167 - DNA, 268 bp, Glycine max
  unsure (1)..(268): unsure at all n locations
gtgtgttctactatggcaaagaaacctgtgaaatactttgtggtagatgcattcactgagtcagcgttcaaggggaaacctgcagcagtgtgtttgctagaggaagagaaggaggactcatggatgcaaggggtagcgaccgagttcaatctctctgagacatgctacttgactcncattgctgagtcggagagatccgatatttcgctcaaccgtttccgcctcagatggttcactcctgctacagaggttgaactttgtggccatg

SEQ ID NO: 45168 - DNA, 271 bp, Glycine max
gatttgggaagccattattcgcgaccttttaccactgggtttgggaaaggcacggaaggctttgctttcaggttgctcagcaggaggtttagcgacctttcaccattgtgacaacttcgccaagtatttgccaacgaatgctagtgttaaatgcttgagtgatgccggtttttttcttgacgaaagagatatcagtttgaatcatactatgaggtataatttcaaaagtctagttcaattgcaggggatagagaagaacctgaatggaaat

SEQ ID NO: 45169 - DNA, 265 bp, Glycine max
tagggttcgtgcggttcgtgttggagcttcagcaccactggggctctcgaaggtgctcactttctgtctacaggggaacttgtcagtcttagcgagcagcagcttgttgattgtgatcacgagtgtgatccagaagaaccaggatcttgcgactccggatgcaatggtggattgatgaatagtgcttttgagtacatccttaaatctggtggggtcatgcgcgaggaagactacccttattctggtgctgatagcggaacctgca

SEQ ID NO: 45170 - DNA, 268 bp, Glycine max
tggcaagaatggcacttcgttgcttggtgatgtccctttctgttctcttcactcttggtcttgcgagagaaagccatgccagacacgaagatttttggcatgctgtttggccaaacactcccattccaagttcattgcgagatcttctaaagcctggccctgcaagtgttgaaatcgatgatcaccctatgcaaattgaagaaacacagtacccgaaaaccttcttctataaagaagaccttcatccaggcaaaacaatgaaagtaca

SEQ ID NO: 45171 - DNA, 266 bp, Glycine max
ccaaaatccagagtagtaggtggtcttcttagtgcatatgatctttcaggggacaaagttttcctcaacaaagcaatagaaattgcagacagattattgcctgcatggaatacgcctacaggaattccttacaacataaaaaattaaacacatggacgagcacacaaccctagttggactggggtaaattatagaattctgttaatgcatttcagtcttacttaacagtaggagatctgggatattacttaaatgggttgtagtcc

SEQ ID NO: 45172 - DNA, 277 bp, Glycine max
cacattttatgcctccactgggacaacctcaataaggaagatcacataaaaagtaacacacgttatatttttattgagaagcagcaccacaagcattgaagaaacttatcttagttctgtgttgtttaattgtctgtttgatttgagtggtttccaattacagggctgtcttagcttggctttctattattgcacatcgcaacaaagacaagaatcccggggagaaattgatctccgtatctgacgttgtgatggagcactgggcaacttatggaag

SEQ ID NO: 45173 - DNA, 165 bp, Glycine max
ggactcttctctagaagggcaatatgcaaacgacgatgctacaaagttggttgagcttgcttcaaaatgtcttcagtttgaggccagagaacgacctgaaattacgttccttcttactgccgttgcgcctcttcaaaggcagaagaggtagcatctcttgtgtta

SEQ ID NO: 45174 - DNA, 167 bp, Glycine max
gtagggttatcatttctccatttccattttctctctcacttttgcaagaatcgtaagctatgggaaagtcttacccaactgtgagtgctgattagcagaaggacgttgagaaggcgccgaagaagctcagaggattcatcgctgacaagagatgcgctcctgctaat

SEQ ID NO: 45175 - DNA, 169 bp, Glycine max
tggagcttcaataggctaagcctgcatgccccaacggcttgaaccgtatcatcggattcgacaacgatcgccatgtgaagtgcatcagcttcatcgtctgcatgctcccaggcttctaagtgtgactgatttgcaatcaattgtagacggaccccacttcgtgtgtttg

SEQ ID NO: 45176 - DNA, 279 bp, Glycine max
cggctcgagttctgtaagaagtgtggcaagcaccaaccccataaagtgacacagtacaagaagggcaaggattctctgtacgcccagggaaagcggcgttatgacaggaagcagagtggctatggtgggcaaactaagccgattttccggaaaaaggctaaaactacaaagaagattgtgctaaggcttgagtgcgttgagcccaactgcagatctaagagaatgctggctattaaaagatgcaagcattttgaactgggaggagataagaagagaaag

SEQ ID NO: 45177 - DNA, 267 bp, Glycine max
ctaagacgccaaatatttaagctcacttcttcccagagagaggcagctctgctcaggcctccagcgttggctggccatggccacagccagatggaggagcccatccccaggagactcaggcagtggcctggagaggctttgttctgtaacggtgccttttcttagggtccaggcaggaatgaagccaataatttattgctttccattctgccgtatgatgtgcgtgtgcgtgagtgtgtggcccctgtttattcccctcctgtcaag

SEQ ID NO: 45178 - DNA, 271 bp, Glycine max
ctctatacattctctgtatcttttgggggtaacttcttggcagtttttcagtgttcagccatgtcagttgaaactagatttttctgtagattttttacttacccatgtgagcctaacactatcctgtaattcattttctcaggctatgtgtaaatgtagaaccctaatttttctataaaaaaacaaactaactaactgtgtaaagaaagaacaagggaagtaccaatgggtttttccaccttatttttacctctgatctacccttgcagat

SEQ ID NO: 45179 - DNA, 273 bp, Glycine max
cggctcgagggagatggaagagtggaaatttgacactctgtgtgacctctacgacacactgaccatcactcaggcggtcatcttctgcaacaccaaaagaaaggtggactggctgacggagaaaatgagggaagccaacttcactgtatcctcaatgcatggagacatgccccagacagagcgggagtccatcatgaaggagttccggtacgggcgacagccgagtgcttatgtctacagatgtctgggccagggggttggatgtccctcagg

SEQ ID NO: 45180 - DNA, 276 bp, Glycine max
ccctcgagccgattcggctcgaggcgctcgagcacagcccattctgacccgtataccagaaaaccacacatttgaagcatgaactctcagcagcagaagcagccttgcaccccaccccctcagcctcagcagcagcaggtgaaacaaccttgccagcctccaccccaggaaccatgcatccccaaaaccaaggagccctgccaacccaaggtgcctgagccctgccaccccaaagtgcctgagccctgccagcccaagattccagagccctgccag

SEQ ID NO: 45181 - DNA, 264 bp, Glycine max
cgcgcagaagcgtgatgacgaagggaacgtcatcgtctggcaaacgtcgcaatatgacgcacacgttgtgccgccgctgtggctctaaggcctagcaccttcagaagtcgacctgtggcacatgtggctaccctgccaagtgcaagagacagtataactggagtggcaaggctaatagacgacataccaccggaactggtcgaatgaggcacctacaaattgtataccgccgattcaggcatggattccgtgtaggatcaacac

SEQ ID NO: 45182 - DNA, 276 bp, Glycine max
tcgaccgaatcggctcgagcctatctaactaccagaccaacacagccaagcatgatgaactgacctatttctgatcctcactttggacaaggcccttcagccagaagactgacaaagtcatcctccgtctaccagagcgtgcacttgtgatcctaaaataagcttcatctccgggctgtgccccttggggtggaaggggcaggattctgcagctgcttttgcatttctcttcctaaatctcattgtgttgatctctttccttcccaataggtgatc

SEQ ID NO: 45183 - DNA, 277 bp, Glycine max
caacgcgagtggagagcaccaggatctcgggctcggaacgagactgcacggattgttttaagaaaatggcagacaaaccagacatgggggaaatcgccagcttcgataaggccaagctgaagaaaacggagacgcaggagaagaacaccctgccgaccaaagagaccattgagcaggagaagcggagtgaaatttcctaagatcctggaggatttcctacccccgtcctcttcgagaccccagtcgtgatgtggaggaagagccacctgcaagatgg

SEQ ID NO: 45184 - DNA, 268 bp, Glycine max
tgtagccattgggggatctttgtggcttcagcaaattctcttgttaaaccggagtgaaaacttcaggggaagggtggggagtcagccaagtgcctcagtgtgccctgttgaaacttaggtttttccacgcaatcgatggatcgtgtcctaggaagacttttcttttcctctggatttttgttcctcctgtacaagaggtgtctttgcttggtttggtggggctgcggccacttaaaacctcccgatctctttttgagtcctttattat

SEQ ID NO: 45185 - DNA, 271 bp, Glycine max
cctaatctcactcaggcctccagggatccatgggggagtgaaaccaattctcagagaacaacccaccagagccttttaaagagaggccaggcttgggaatgggttgggagagcgcatctgttcattggagcatgagtggatgccagaactgtaggttataaggcagtcactttttctctctactcccacccacacctgcctccctcttacccctgctcccccacactgcaggaggatttgtctctaagaggtgctgccccaaagctcccca

SEQ ID NO: 45186 - DNA, 171 bp, Glycine max
cctccctcctaccacgtcctcctggcctgcattcccattccctcctgccagcactgatagggccccgcccaccgggcaccgaccaccccaggccacatccccacccatctggaagtgaaggcccagggactcctccaacagacaacggacggacggatgccgctggtgctc

SEQ ID NO: 45187 - DNA, 273 bp, Glycine max
ctggcccccaaggacatccgggtaaactgcgtggttccaggaattctcaaaactgacttcagcaaagtgtttcatgggaatgagtctctctggaagaacttcaaggaacatcatcagctgcagaggattggggagtcagaggactgtgcaggaatcgtgtccttcctgtgctctccagatgccagctacgtcaacggggagaacattgcggtggcaggctactccactcggctctgagaggagtgggggcggctgcgtagctgtggtcccagg

SEQ ID NO: 45188 - DNA, 221 bp, Glycine max
ctggctaataaaagcatttgcactatagaaccagagacatctagaaaagcacatggaacttacacaaaaggcttttcatgtgccttacttttttaaaaaggagtttattgtattcattggaatatgtgacgtaagcactaaagggaatgttagaaaaaaaaaaaaaaaaaaaaaaaaaaaaaacaacaaaaaaacctcaaaaaaaaaaaaagactactaat

SEQ ID NO: 45189 - DNA, 272 bp, Glycine max
ctcgaaccggattaaaataatttgaaggcgatcttttaaaaagagcttaaaccgaagggaccaaaagaccttgtcatccatgacgcagggagaattgcgtcattcaaagcctagttaacgcatttactaaacgcagacgaaaatggaaagattaattgggactggtaggatgaaacaatttggagaagatagaagtcatgaagtggaaaactggaagacagaagtccgggaaggcgaagaccagcatagagaagatagggcaattagaagat

SEQ ID NO: 45190 - DNA, 266 bp, Glycine max
cggctcgagattgtctcttatcatttgttcattgaagaacagagacctgtctggaaaatcgatctctacaaattcaattaaataatgatccccaaatgctgaaaaagtgaaatacagcaattcaacagataatagagcaatgtttagtatattcagctgtatctgtagaaactctttgacgaacctcaatttaaccaatttgatgaatacccagttctcttcttttctagagaaagatagttgcaacctcacctccctcactcaac

SEQ ID NO: 45191 - DNA, 255 bp, Glycine max
ggctcgaggtgggctcctcttggggatggaacctggaatttaaaccatcgtcacagctgtgaagatctagcacaagatagaatggtaaaacacaaaaaaaattttaagtgacagtgccatagtttggacagtacctttcaatgattaattttaatagcctgtgagtccaagtaaatgatcactttatttgctagggagggaagccctagggtggtttcagtttctcccagacatacctaaatttttacatcaatc

SEQ ID NO: 45192 - DNA, 274 bp, Glycine max
cctgaatgctcccatgcggcagcggcagccttttgaagactaggccaaggccaaggctccaggtgatgatgaagccatgttcatagatgagaacttctgtactgccctggaatatgggctgccccccacagctggctggggcatgggcattgatcgagtcgccatgtttctcacggactccaacaacatcaaggaagtacttctgtttcctgtcatgaaacccgacgacaagaaggagaatgtagcaaccactgatacactggaaagcacaaca

SEQ ID NO: 45193 - DNA, 270 bp, Glycine max
cagaagcagattaacctcagaaatcctgtctggctggcagatttcaagtaaaaaaaaaaaaaaaggtgggttggggggacccttttctttctagttgtctttaaggaaaattaattttacttttttttttgttctggccgaaatttttatgagatatcccccacttgccttccattttgaaccggttaaagcccatagctgtcagctctgaatgaggaggggaaaagcccctgggtctttctttaaaagcaatccgctgcttaagggctc

SEQ ID NO: 45194 - DNA, 268 bp, Glycine max
cagaaacccaattcaaccccccacccatgtaacacgcgggcagtgacaaaatcgagaacgcacgttgccagcctggagaccaccacgtactgccccccgccatttatcgccctgattggattttgtttttcatctgtccctgttgcttcggttcagttgagggtggagcctcctggggggcactggccactgagcccccttggacaagtcagcggggagtggcgaaagccactgtccggcctggcttctggggacagtggttggtccc

SEQ ID NO: 45195 - DNA, 263 bp, Glycine max
ttttgtttttgttttttactgagaaaggaagggccaagggatgaggtgggaaccgggccctgggggcgccacagactaaggcagagactcccctacctggcgcccagccccaaccagctggccgctcctgcccatgctttttttttttttttttttaaatttttaaaattggagcccctggtgaggttacgcgtgccatgagaacccattttaaaccacgacgctggtccctcagtgttggccaaactctggagtcactgact

SEQ ID NO: 45196 - DNA, 264 bp, Glycine max
cgctgagtgttctgggatttctctagaggctggcaagaaccagttgttttgtcttgcgggtctgtcagggttggaaagtccaagccgtaggacccagtttcctttcttagctgatgtctttggccagaacaccgtgggctgttacttgctttgagttggaagcggtttgcatttacgcctgtaaatgtattcattcttaatttctgtaaggttttttttgtacgcaattctcgattctttgaagagatgacaacaaattttggt

SEQ ID NO: 45197 - DNA, 264 bp, Glycine max
ctggcccgcggcgtccaccacattgactactataagacaaccagcaccggccgcctgcctgtgaagtggatggcgcccgaggccttgtttgaccgggtgtacacacaccagagtgacgtgtggtcttttgggatcctgctatgggagatcttcaccctcgggggctccccgtatcctggcatcccggtggaggagctgttctcgctgctgcgggagggacatcggatggaccgacccccacactgccccccagagctgtacggg

SEQ ID NO: 45198 - DNA, 144 bp, Glycine max
ccaacttcttacttccctaatgaagttaagaacctgaatataaatttgtgttctcaaatatttgctatgaagcgttgatggattaattaaataagtcaactcctagaagttgagagagcaaataaagacctgagaaccttccag

SEQ ID NO: 45199 - DNA, 265 bp, Glycine max
caggaacaagccctccaggaaatgggcctgcacctcagccagtccaagctgaagatggaagatataaaagaagtgaaccaggcactgaagggccacgcctggctgaaagatgacgaagcgacacactgtaggcagtgtgagaaggagttctccatttcccggagaaagcaccactgccggaactgtggccacatcttctgcaacacctgctccagcaacgagctggccctgccctcctaccgcaagccggtgcgagtgtgcgaca

SEQ ID NO: 45200 - DNA, 264 bp, Glycine max
cgaagagaaggactgcgaggaggctcgggggatggaaacgcgggcgagtccgcggcagctcagcacctgtcagagagccaattccttgggtgacttgtatgctcagaaaaactctggagtgacagcaaacggggggccggggagcaaatttgcaggctactgtcggaatttggtgtctgatattcccaatcttgcaaaccataagatgccaccagctgctgctgaagagactcctccgtacagtaattataacacacttccctg

SEQ ID NO: 45201 - DNA, 264 bp, Glycine max
ggcatgggtgctggagaagaaggagcggcacaggcgccagggcagggaagtcagacctgacacccagtacaccggccgcaagcgcaagccccgcttctaagtcaccacgcggttctggaaaggcacttgcctctgcacttttctatattgttcagctgacaaagtagtattttagaaaagttctaaagttataaaaatgttttctgcagtaaaaaaaaagttctctgggccgggcgtggtggctcacacctgtaatcccagcac

SEQ ID NO: 45202 - DNA, 268 bp, Glycine max
cgaagactttctctctccatggatctttcagaccttaattccgctgaaatgcagaagttctactctgaagaacagcaaagagccatggttaatgaaatggtggcaaagctaacgagtgaatgctgggataaatgcatcacgggtacacctgggaataaattcagttccagtgaatctaattgtctttcaaactgtgctcaccgttacttggaaatgagcatgcttatcatgaaaaggtttcagagtatgcaatgaagatcgagggata

SEQ ID NO: 45203 - DNA, 265 bp, Glycine max
ctctgctgagcttcgtcacagaattcaaatcccagctctttgtggacggcctggtacaagggaatgtcacaagcacagaatctatggatttcctgaaatatgttgttgacaaactaaacttcaagcctctggagcaggagatgcctgtgcagttccaggtggtagagctgcccagtggccaccatctatgcaaagtgaaagctctgaacaagggtgatgccaactctgaagtcactgtgtactaccagtcaggtaccaggagtct

SEQ ID NO: 45204 - DNA, 276 bp, Glycine max
cacgcgtacggctcgaggtcacgcgggtctgtctcttgcttcaacagtgtctggacggaacagatccggggactctcttccagcctccgaccgccctccgatttcctctacgcttgcaacctccgggacgatcttcacggcgatctcctgcttctgggacctgccagatcgggtttgtggatcgcaccatattgccaatcatccatgagcacgcagttacgtcagaattcattccatcgacgtggatgcagccgtcaacagcctggtcaatttgta

SEQ ID NO: 45205 - DNA, 193 bp, Glycine max
cgccccctccctgtggagcctgttacctccgcatttgacacgagtctgctgtgaaccccgcaacctcctccccacctcccatctctccttccaggcccatccctggcccagagcaggagggagggagggacgatggcggtgggttttgtatctgaatttgctgtcttgaacataaagaatctatctgctgtta

SEQ ID NO: 45206 - DNA, 288 bp, Glycine max
tctggtggggcaagtccgtgggcatgatgttgaccgagctggagcaagccttgaactctatcatcgacgtctaccacaagtactccctgataaaggggaatttccatgccgtctacagggatgacctgaagaaattgctagagaccgagttcctcagtatatcaggaaaaagggtgcagacgtctggttcaaagagttggatatcaacactgatggtgcagttaacttccaggagttcctcattctggtgataaagatgggcgtggcagcccacaaaaaaagccatga

SEQ ID NO: 45207 - DNA, 281 bp, Glycine max
cggctcgagctggagctgacgctggcccggctcactaagtcagagctggatgacgaggaggtcgtgcttgtgtgcgacaaggtcattgaggaggctgacttggacggtgacggcaagctgggctttgctgacttcgaggacatgatgccaaggcccctgacttcctcagcactttccacatccggatctgaggacactgccgaggctgtaggggcctagaagtccaccatcctgccctgcagtcacatgggtgtggcctccaagctccccaggaaagcagt

SEQ ID NO: 45208 - DNA, 281 bp, Glycine max
cgaggaagtaagttaccaacttgcatttaacaaacaagaacttcgtaaagtcattaaggagtaccctggaaaggaagtaaaaaaaggtctagataacctctacaagaaagttgataaacatttatgtgaagaagagaacttacttcaggtggtgtggcactccatgcaagatgaatttatacgccagtataagcactttgaaggtttgatagctcgctgttatcctggatctggtgttaaatggaattcactattcaggacattctggattattgttccag

SEQ ID NO: 45209 - DNA, 263 bp, Glycine max
gttcggtgatccgggactcactgctgcaggatggggaatttagcatggatcttcgtaccaagagcaccggtggggcccccaccttcaatgtcactgtcaccaagactgacaagacgctagtcctgctgatgggcaaagaaggttccacggtggtttgatcaacaagaaatgttatgaaatggcctcccaccttcggcgttcccagtactgacctcgtctgtcccttccccttcaccgctccccacagctttgcacccctttcc

SEQ ID NO: 45210 - DNA, 273 bp, Glycine max
actggcttaagcatcccataagcctattatttagtgtgaatttgggacttttatttgtatgttgtcttaacttactgagcctgtgacttgtatttagctgtagtcaagcctcaccagccatatctcatctctgagaggaagactggatagtgagtttggttttggttttggttttaaacccttttaccttttcagtctggcagctcctactgctgctttcctaagttactcaaagcactgcttcttggtccttgttttcttttgccttgtact

SEQ ID NO: 45211 - DNA, 273 bp, Glycine max
cggctcgagtgttgcctgtggagtctctgctgaaatgaatcaggattcgagctctaggatgagacagaaaatgaaagcatgttgtttgccaggacactgtgggtttatattgatgtgtaacaagttgatttggaacactggactctcattctgttattctggttttgttttttttgttttgttttttttcttttgtaaaggcaatgagctagtcccagaaaggatccttcagttacatacaatttgtttaatgaaatgtcatggctctgttca

SEQ ID NO: 45212 - DNA, 281 bp, Glycine max
cgcgctgtgccccgcgccgcatttctctccccgctgcttccccttctcctgggcttcctgctcctctccgctccgcatggcggcagcggcctgcacaccaagggcgcccttcccctggatacggtcactttctacaaggtcattccaaaagcaagttcgtcttggtgaagttcgacacccagtacccctacggtgagaagcaggatgagttcaagcgtcttgctgaaaactcggcttccagcgatgatctcttggtggcagaggtggggatctcagattat

SEQ ID NO: 45213 - DNA, 279 bp, Glycine max
tgctttttaacagcctttagaagccgctgctgaaattgatactgggggaagggttccccttccttctagagcagaaaagggagagaggtgttgtattcctgtttggtaacctcagtctcctgtaagacctcctaccacatggcgagtatacaccaatcaggagcgggtagctgcctgcataggagcctcgcttccgattattcccttcccaatattattcatccagacttagccacagtgcacaaaagcaaacctgctagagaggcagtgaacaccaca

SEQ ID NO: 45214 - DNA, 277 bp, Glycine max
cgtacctgaagcgaattggtagcaaagcagcagctggagagccgcagttctagcctcatcattacgatgtttcccttggtcaaaagtgcactaaatcgtctacaagttgcgaagcattcaggccacacatggccatgcagagtcacagaagagtacacctgaattctatgacaaatacggtaatgctgtattagctactggagccaattgctgtattgttacatggacatatgtagtaccacaagtcggacctagatggaggctgtcccctgttggc

SEQ ID NO: 45215 - DNA, 272 bp, Glycine max
gtgccgggataaaaagcaccagcggacactgatgccggagaagctgtcacacaagctgctggaggctttccataaccagggccccgtgatcaagaggaagcatgacttgcacaagatggcagaggccaaccgtgccctggcccactaccgctggtggtagagtctccaggaggagccccaggccctctggcgcaagaaacagtgtgagctaatgccacgctgaaaactacctgtgggctaaggatgtagttcccttgtaagggtgggcaagc

SEQ ID NO: 45216 - DNA, 266 bp, Glycine max
gtgacgcggggccaggcggccgtacagcagctgcaggcggagggcctgacaccgcgcttccaccagctggacatcgacgatctgcagagcatccgcgccctgcgcacttcctgcgcaagcagtacgggggcctggacgtgctggtcaacaacgcgggcatcgccttcaaggttgctgatcccacaccctttcatattcaagctgaagtgacgatgaaaacaaatttctttggtacccgagatgtgtgcacagaattactccctcta

SEQ ID NO: 45217 - DNA, 276 bp, Glycine max
ccgtgctcctgggtgtgctgcaggggcaacagcagagcctacagcagggggcacactccaccggctccagccgcctgcacgacctctactggcaggccatgaaaaccctgggagtccagcgccccaagtcggagaagaaggtgccaaggagatccccagtgccacccagagccccatcagtaagaagcggaagaaaaagggattcttgccagagacgaagaagcgcaagaaacgcaagtcagaggatggcacgccagcggaggatggcacacctgc

SEQ ID NO: 45218 - DNA, 199 bp, Glycine max
ctatttttgtaccatattgctcttaaaaatcttggtttggtacagttcataattcaccaaaagttcatataatttaaaaaaacactaaattagtttaaaatgaagcaatttatatctttatgcaaaaacatatgtctgtcttgcaaaggactgtaagcagattacaataaatcctttactttaaaaaaaaaaacaaaaa

SEQ ID NO: 45219 - DNA, 266 bp, Glycine max
caatggaaagcggagttcctaacaggatgaaagttcccccatcagttcccccagtacctccaagcaagtagctttccacatttgtcacagaaatcagaggagagatggtgttgggagccctttggagaacgccagtccccaggccccctgcatctatcgagtttgcaatgtcacaacctctctgatcttgtgctcagcatgattctttaatagaagttttattttttcgtgcactctgctaatcatgtgggtgagccagtggaaca

SEQ ID NO: 45220 - DNA, 270 bp, Glycine max
cgggaccccactgccttctctgagcctgaaagcttccagccccaccgctggctgagaaacagccagcctgctacccccaggatccagcacccatttggctctgtgccctttggctatggggtccgggcctgcctgggcgcaggattgcagagctggagatgcagctactcctcgcaaggctgatccagaagtacaaggtggtcctggccccggagacgggggagttgaagagtgtggcccgcattgtcctggttcccaataagaaagtgg

SEQ ID NO: 45221 - DNA, 188 bp, Glycine max
ggggcctcagtagcctctaactcactgtgtctgcatgagcatgtggcctctccgtcgcttcaccggtggcgaacccagtgacccagggagacgtggggtgtgctgatgctgctcgccagcccaccagtgcttggtcaggctgccccttccctggacagggctgttgagatggctccggcggcttgggg

SEQ ID NO: 45222 - DNA, 272 bp, Glycine max
ccaagcccctagtcttagagataccctctgagacagagagccaagctaatgtggtagtgaaaatcgaggaagcacctctcagcccctcagagaatgatcaccctgaattcattgtctcagtgaaggaagaacctgtagagatgacctcgttccggagctgggtatctcaaatctgctttcatccagccactgcccaaagccatcttcctgcctactggatgcttacagtgactgtggatacgggggttccctttccccattcagtgacatgt

SEQ ID NO: 45223 - DNA, 239 bp, Glycine max
ggaaatcctggagtctgaagaaaaaggggatcccaacaagccctcaggattcagaagtgttaaagctcctgtcactaaagtggctgcgtcgattggaaatgctcagaagttgcctatgtgtgacaaatgtggcactggattgttggtgtgtttgtgaagctgcgggaccgtcaccgccaccctgagtgttacgtgtgcactgactgtggcaccaactgaaacagaaggcgatttctttg

SEQ ID NO: 45224 - DNA, 264 bp, Glycine max
ccggcctcagctacagcctgggctccagctttggctctggcgcgggctccagctccttcagccgcaccagctcctccagggccgtggttgtgaagaagatcgagacacgtgatgggaagctggtgtctgagtccctgacgtcctgcccaagtgaacagctgcggcagcccctcccagcctacccctcctgcgctgccccagagcctgggaaggaggccgctatgcagggtagcactgggaacaggagacccacctgaggctcag

SEQ ID NO: 45225 - DNA, 239 bp, Glycine max
gtcagattctggagtgaatattttaccactgatagatcacttgaaaaagccatgctttccagacaacatgtacctgtggaatcaagtcatctcttcaaatttattaattggagttccctgctccctgagaggttataaaaggacatgtttataacaatccaaattatggcagttctgagctggctaaaaaatatccagggttcctagatgtgagggcagcccctttgttggctgatgac

SEQ ID NO: 45226 - DNA, 222 bp, Glycine max
cgctacgcaaactgcaggctcagatgaaggactttcaaagagagctggaagatgcccgtgcctccagagatgagatctttgccacagccaaagagaatgagaagaaagccaagagcttggaagcagacctcatgcagcacaagaggacctcgccgccgctgagagggctcgcaaacaagcggacctcgagaaggaggaactggcagaggagctggccagtag

SEQ ID NO: 45227 - DNA, 263 bp, Glycine max
ctcggctttgacagagtgcaagacgatgacttgcaaaatgtcgcagctggaacgcaacatagagaccatcatcaacaccttccaccaatactctgtgaagctggggcacccagacaccctgaaccagggggaatcaaagagctggtgcgaaaagatctgcaaaattttctcaagaaggagaataagaatgaaaaggtcatagaacacatcatggaggacctggacacaaatgcagacaagcagctgagcttcgaggagttcat

SEQ ID NO: 45228 - DNA, 258 bp, Glycine max
gtcgatccagctgccagcgcagtcgccagcgccggcacatcccgctctgggctttaaacgtgacccctcgcctcgactcgccctgccctgtgaaaatgttggtgcttcttgctttcatcatcgccttccacacacctctgcagccttgctgttcattgccaccgtcgacaatgcctggtgggtaggagatgagttttttgcagatgtctggagaatatgtaccaacaacacgaattgcacagtcatcaatgacagctt

SEQ ID NO: 45229 - DNA, 249 bp, Glycine max
cgacgagttccggatagccaaggccagatccacaggcagattcacagctcctgatcgcggcctgaagcgaaactctcctcctgaggccatgtcagggtccgtagccccagccactagatgccccgactcgtacacgttgctggcaatatcatccctagatccagatgctcacgggtagcgagcttacagagccagggtgcagaggtcgcggtagacccggtgggggcctgatgaggataacgtagagct

SEQ ID NO: 45230 - DNA, 270 bp, Glycine max
cggctcgagatttttacatgcagtttctagctccttcaacccagctgaggtcgtgccagggagacagagtctggagaagggcagaggaattttggaaggatccctggctcatagtagggaagctgggatgggggaggggtcaaaattatggcatgactgaacctgcatctgtgttgggtggacatgaatacttagctacctcagcaggaattccttccaggtcgcctttaacagtgaggtccttagagtactatgtccttaataaaaagg

SEQ ID NO: 45231 - DNA, 240 bp, Glycine max
aaatcagttcgtggttacattgtggatgcaaatctgagcgttctcaacttggttattgtaaaaaaaggagagaaggatattcctggactgactgatactacagtgcctcgccgcctgggccccaaaagagctagcagaatccgcaaacttttcaatctctctaaagaagatgatgtccgccagtatgttgtaagacagcccttaaataaagaaggtaagaaacctaggaccaaagcaccc

SEQ ID NO: 45232 - DNA, 272 bp, Glycine max
gtctctctcgctcaaagttttgcataaaattctaaggtcttcttggatctctgcagttcaccaagggacccaggttaataactcctgttctagaaaacatgactttctgtgtgctgatttctttggattatccccagcacagctccctgtgggaggaagctgttgtcagaagcaagctgggggtagtgatggataatgaaaactgtgtagaggacactggtagcgactcactggtgagaaccctgaagcggcgtgctgggggccatctcatg

SEQ ID NO: 45233 - DNA, 271 bp, Glycine max
gcagaccagacttcgctcgtactcgtgcgcctcgctttgcttttcctccgcaaccatgtccgacaaacccgatatggctgagatcgagaaattcgataagtcgaaactgaagaagacagagacgcaagagaaaaatccactgccttccaaagaaacgattgaacaggagaagcaagcaggcgaatcgtaatgaggcgtgcgccgccaatatgcactgtacattccacaagcattgccttcttattttacttcttttagctgtttaactttg

SEQ ID NO: 45234 - DNA, 268 bp, Glycine max
ggcggcctgggcgcctcggaccggcagctgctgctcttctacctggagcagcgtgaggccaacctgaccacactgaccaacgccctggacgccttctttaccgccgtggccaccaaccagccgcccaagatctttgtggcgcacagcaagttcgtcatcctcagcgcccacaagctggtgttcatcggggacacactgtcacggcaggccaaggctgctgacgtgcgcaccaggtgacccactacagcaacctgctgtgcgacctcct

SEQ ID NO: 45235 - DNA, 270 bp, Glycine max
actgccacccagaagactgtggatggcccctccgggaaactgtggcgtgatggccgcggggctctccagaacatcatccctgcctctactgcgcgctgccaaggctgtgggcaaggtcatccctgagctgaacgggaagctcactggcatggccttccgtgtccccactgccaacgtgtcagtggtggacctgacctgccgtctagaaaaacctgccaaatatgatgacatcaagaaggtggtgaagcaggcgtcggagggccccctcaa

SEQ ID NO: 45236 - DNA, 271 bp, Glycine max
gagaaaacgggtaaaataaaaatacaggaatcctttacatcagaagaggagaggatacgaatgaagcaggagcaggagaggattcaagccaaaactcgagaatttagggaacgacaagctcgagagcgtgactatgctgaaattcaagattttcatcggacatttggctgtgatgatgagttaatgtatgggggagtttcttcttatgaaggttccatggctctcaacgctagacctcagagcccacgagaagggcatatgatggatgctt

SEQ ID NO: 45237 - DNA, 273 bp, Glycine max
ctccaagtctatgtattttctggagaccaaaccagataccagatactcacaaagaaagcttttttaataaggcttaaaccaagaccttgtctagatatttttagtttgttgccaaggtagcactgtgagaacatctcacttggatgttatgtaaggcgtgagacacaacagtctgactatgagtgaggcaaatatctgggtcttttcgtcagtttggtgcatttgctgctgctgttgctactgtttgcctcaaacgctgtgtttaaacaacgt

SEQ ID NO: 45238 - DNA, 278 bp, Glycine max
cagcaatactacacaacttgctactttcagaaaacttttttttagcttcaccgatgacaacagaggaagaagggaactgggatttgggtaagttctcctccactgtttgaccaaattctcagtgataaatatgtgtgcagatccctagaagagaaaacgctgactttctttttaagtgtggcacataaggatctgcagaattttccgtagacaaagaaaggatcttgtgtctttttgtccatatccaatgttatatgaaccaattgtattgttttata

SEQ ID NO: 45239 - DNA, 272 bp, Glycine max
cggcaagtgtcgtggacttcgtactgctaggaagctccgtagtcaccgacgagaccagaagtggcatgataaacagtataagacagctcatttgggcacagccctaaaggccaacccttttggaggtgcttctcatgcaaaaggaatcgtgctggaaaaagtaggagttgaagccaaacagccaaattctgccattaggaagtgtgtaagggtccagctgatcaagaatggcaagaaaatcacagcctttgtacccaatgacggttgcttga

SEQ ID NO: 45240 - DNA, 259 bp, Glycine max
ctacgtgcctgcccggagcctgccctacaaccagcccgggacctgctacacactggtggcactgcccaaagaagaccccacagctgtggcctgcacattcagctgcatgatgcagttcactgtcaaggactgtgatcccaccactggggagactgatgacgaaggctatgaggatgagtatgtgctggaagatctggaagttactgtagctgatcacattcaaaaggtcatgaaactgaacttcgaagcagcctgggat

SEQ ID NO: 45241 - DNA, 260 bp, Glycine max
cactcactgagttgctggaacgaggggagaggctgccacggcccgacaaatgtccctgtgaggtctatcatctcatgaagaactgctgggagacagaggcgtcctttcgcccaaccttcgagaacctcatacccattctgaagacagtccatgagaagtaccaaggccaggccccttcagtgttcagcgtgtgctgaggcacaatggcagccctgcctgggaggactggaccaggcagtggctgcagagggagcctcctg

SEQ ID NO: 45242 - DNA, 265 bp, Glycine max
tcgagccgcgtgcaggagcttgtgaacaccttcttcagcttccttcgacgcaaaacagactactttcattggaggagaagaagggatggcagagagcccggcaggaggccgagcggcgggagaacgcggagcgggcggccagactggccaaggaagccaagtcagagacctcagggccccagatcaaggagctaactgatgaagaggcagagaggctgcagctagagattgaccagaaaaaggatgcagagaatcatgaggccca

SEQ ID NO: 45243 - DNA, 268 bp, Glycine max
cgaggagttccggaaagccaaggccagctccacaggcagcttcacagcacctgatcccggcctgaagcgcaagtcccctcctgaggccctgtcagggtccttacccccagccaccacctgccccgcctcgtccacgcctgcgcccactatcatccctgctccagctgccccctggaagccagcctccgcagccaccgtgaagaggaagcggaagagccggtgggggcctgaagaggatcaggtagagctcccacctgctgaactggtg

SEQ ID NO: 45244 - DNA, 273 bp, Glycine max
gcacctactccatgctgggccacaccaccaaaaggtcctgggaggccgagcgagtcatggagtggctcaagacccaggagtggggcctcatgatcctggatgaagtgcacaccataccagccaagatgttccgaacgggtgctcaccatcgtgcaggcccactgtaagctgggtttgactgcgaccctcgtccgcgaagatgacaaaattgtggatttacattttctgattgggcctaagctctacgaagccaactggatggagctgcagaat

SEQ ID NO: 45245 - DNA, 263 bp, Glycine max
cccgctcgagctcgagccgtttcagacagggtctgaaggactggattggccaaacatcagacctgtcttccaccggagaccaagtcctggctacatcccagcctgtggttacagtgcagacaggccatgtgagccaccgctgccagcacagagcgtccttccccctgtagactagtgccgtagggagtacctgttgccccagctgactgtggccccctccgtgatccatccatctccagggagcaagacagagacccaggaat

SEQ ID NO: 45246 - DNA, 270 bp, Glycine max
ctcccccaaaggcagcatctcggaggagaccaagcagaagctgaagtcagccatcctttctgcccagtctgctgccaacgtgaggaaggagagcctatgccagccagccctggaggtcctggagacatccagccaggagtcctcgctggagagcgagacagacgaggacgacgactacatggacatttgaggggccactgcagccccaccgccacgccccaggggaccagccaggcctggaatgccccctgggcaggaccctgggcagga

SEQ ID NO: 45247 - DNA, 265 bp, Glycine max
gtcacagatcaccagccaggtaactgggcagattggctggcggcgagagggtatcaagtatcgtcggaatgagctcttcctggatgtgctgcagagtgtgaacctgctcatgtccccacaagggcaggtgctgagtgcccatctgtcgggccgagtggtgatgaagagctacctgagtagcatgcctgactgccagtctgggatgaatgacatgattgtcatagacaagcagggcaaaggcacagctgatgaaccaagcaagagc

SEQ ID NO: 45248 - DNA, 265 bp, Glycine max
cggaggccagatggaggagatgaccggaagtccttcatctcaagcatccaatgctgaaagcgggctgattttctctaccggcagcccttttccagaggcttggaccaccggccacctagtaggaagtctcacctccttgagctccggcacccttcgcgaagtgtttcggtcacctgtgttatgctccgtcccctttccggctttgatccgcgtaccagaaaaggatacatttcgtgattcctaagcagctctactaaacgggttg

SEQ ID NO: 45249 - DNA, 263 bp, Glycine max
cggctcgagctggagacgacgtgcagaaatggcacctcgaaaggggaaggaaaagaaggaagaacaggtcatcagtctcggacctcaggtggctgaaggagagaatgtatttggtgtctgccatatctttgcatccttcaatgacacttttgtacatgtcactgatctttctggcaaggaaaccatctgccgtgtgactggtgggatgaaggtaaaggcagaccgagatgaatcctcaccatatgctgctatgttggctgccc

SEQ ID NO: 45250 - DNA, 265 bp, Glycine max
gctgctttgccaagctcaccaacacctactgtctggtagcgatcggaggctcagagaacttctacagtgtgttccagggcgagctctccgataccatccccgtggtgcacgcgtctatcgccggctgccgcatcatcgggcgcatgtctgtggggaacacgcacggtctcctggtacccaacaataccaccgaccaggagctgcaacacattcgcaacagcctcccagacacagtgcagattaggcgggtggaggagcggctctc

SEQ ID NO: 45251 - DNA, 251 bp, Glycine max
ctcgagcggctcgagcagaaattctcagaacaggttttcaaagtggcctcctcagacctggtcaacactgggcatcagtgtggttagctacactctgaaggacattcacgatgaccaggactatttgcactctttggggaaggctcgaacagctcaagtccaaaaagatgcacggattggagacgcagaggccaagagagatgctgggctccgggcagctaaagccacgcaggaaaaggtgtctgctcagt

SEQ ID NO: 45252 - DNA, 269 bp, Glycine max
ggaagctgggggaccattttgcaccatgagtttgtgaaaaatctggattaaaaaattacctcttcagtgttttctcatgcaaaattttcttctagcatgtgataatgagtaaactaaaactattttcagcttttctcaattaacattttggtagtatacttcagagtgatgttatctaagtttaagtagtttaagtatgttaaatgtggatcttttacaccacatcacagtgaacacactggggagacgtgcttttttggaaaactcaa

SEQ ID NO: 45253 - DNA, 252 bp, Glycine max
ggagggttaagatactgagaagcttggatgggatactagacgccgacttagacaaggcatgtgggtgaggctctccagagttgccatggggagaagtccagtgttagcatagttacgccctatggctcgctcatacactgtaggtagagataccacagtcagatctggagccgctgggcccagtgggtctctcggtcatcctgccacatagctcgccagagcttggggtcacctgtcgtctggagtcagaca

SEQ ID NO: 45254 - DNA, 263 bp, Glycine max
cgctcgagcgggacagatcgagctagacagccccaagcttctgagtctagatacagaagcccatgtcttctgctgttctgcacttctgggagatacaagggtctactgttcccaaggaagctcgttccagattgtctcgtctactaagatgtccacttctaaagcctggcttcttatgcttaatatgatgttaattagcactctgcgaatctgaatcttgctctcgctctctgccgtcaaatgactcaagtctagtctactgg

SEQ ID NO: 45255 - DNA, 262 bp, Glycine max
tcgccatggtaaatacatggcttgctgcctgttgtaccgtggtgacgtggttcccaaagatgtcaatgctgccattgccaccatgcaaaccaagcgcagattccagtttgcggattggtgccccactggcttcaaggttggcatcaactaccagcctcccactgtggtgcctggtggagacctggccaaggtacagagagctgtgtgcatgctgagcaacaccacagccattgctgaggcctgggctcgcctggaccacaag

SEQ ID NO: 45256 - DNA, 263 bp, Glycine max
gcgccctgtgagtgggccattcggaacattggacagaagcccaaagagccaaattgtcacaattgtggaacccacattggcctgagatccaaaacgcttcgaggcaccccaaattacctggccattcgtcaggacacccacccacccagtgttatattctgcctcgccggagtgggtgttcccgggggcacttgccgaccagccccttgcgtccccaggtttgcagctctcccctgggacactaaccatcctagcccgggctg

SEQ ID NO: 45257 - DNA, 265 bp, Glycine max
actcgagccgaatcggctcgagaaacaccaaaaggacctagttctgtcgaagacattaaagcaaccatgcaagcaagtatagaacaagcgcattgaacagtcctgggcactacatgtaaattaagcccaaagatggggagaaaggaaaaggagagacaaatatagtccatactgagtgtcatcaacaatccagactgaagtcttctattttcatctcaatccccttttctgatttgccacccatgcctcttcaggctggaaacaa

SEQ ID NO: 45258 - DNA, 261 bp, Glycine max
cggctcgaggcaggcaggaacaaacagggctgccttctggccttgtaagacccttattgctgtcctcggaggggctggggacttgtgtctgcggggatcagagcgcacagggagtgcacatatccaggcaccaggactagggctggagtgaggggggggtatttcaattactttctattggtctcccttctctacactcttgtaataaaatgtctatttttaatgtttgtacacaacaatccttctattctagcctgcatt

SEQ ID NO: 45259 - DNA, 260 bp, Glycine max
gaatgaatgacgaggcagcggagaggctgtggagcaggtggaggccgacctgctgcaggaccaagagggctaccgctggaaggcgcacgagcgcctggcagcccgctcagggcccgtgcgctttgagcctggctttcagcccttcgtcttggtgcagtgtcagcccccggctgtggtcacctccttggccctgcactctgagtggcggctcgtcgccttcggcaccagccatggctttggcctctttgaccaacagcagc

SEQ ID NO: 45260 - DNA, 266 bp, Glycine max
tgaaaacaaaaaataaaatatttgttttctgctagatgcaaaactgactaagcatgtatattttaccaaacttatgtattttttgaagttatgcactataaaatgttaaaacattttttgctgggacaaaatgttaagtaatttgcagtatgtagtgcccccagtattgggatttttgagctaatgggcagcagtcagctgggggcttctgagggatgctcatctttaacagtctccctcatgtacttttgctgttttacacagag

SEQ ID NO: 45261 - DNA, 257 bp, Glycine max
ctcgacccgcgcgtagaggcatgcaccgggtaggtttccgcggtgcccccgcggcggcctgaacggacgctccctgccccatcccggctgttgggctgggccgctttgcctctgcttcgccctgtgctgtgttctccagctttgtagcagcagccttgacaaacccaggcgcactgtaccaaggcaatgtaacttttgattttcggtcaatttaagttcttttgtcaccacatattaataaacagttttgacttcac

SEQ ID NO: 45262 - DNA, 269 bp, Glycine max
ccgagctgcgccgcgagctgccacccgaccaggctgagtactgcatcgcgcggatggccccctacaccggccccgcctccgtgccaggtgctctggactacatgtccttctccacggcgctgtacggcgagagtgacctctaatccaccccgcccggccgccctcgtcttgtgcgccgtgccctgccttgcacctccgccgtcgcccatctcctgcctgggttcggtttcagctcccagcctccacccgggtgagctggggcccacgtg

SEQ ID NO: 45263 - DNA, 266 bp, Glycine max
cacttttatcggcattaatttttcagtgtagtttgttgttgtaaaataatgtaatcatcaaaatgatgcatattgttacactactattaactaggcttcagtatatcagtgtttatgtcatagtgttaaatgtatacttgtaaataaaatagctgcaaacctcagtcctttgtgctacttgatgtggcttgcaaagaatagaatccttgtcctgagattctcacttggcttcaggaaggctgcaggtatgattccagaaaccagtg

SEQ ID NO: 45264 - DNA, 265 bp, Glycine max
cgcatttggccgcctccctaccgctccaagcccagccctcagccatggcatgccccctggatcaggccattggcctcctcgtggccatcttccacaagtactccggcagggagggtgacaagcacaccctgagcaagaaggagctgaaggagctgatccagaaggagctcaccattggctcgaagctgcaggatgctgaaattgcaaggctgatggaagacttggaccggaacaaggaccaggaggtgaacttccaggagtatgt

SEQ ID NO: 45265 - DNA, 271 bp, Glycine max
cctggctccggcttcaccaacaccatgcgtgttgttcctgtgccgtgatggaccccagagcccctcctccagcccctgtcccacccccttcccccagcccatccattaggccagcaacgcttgtagaactcactctgggctgtaacgtggcactggtaggttgggacaccagggaagaagatcaacgcctcactgaaacatggctgtgtttgcagcctgctctagtgggacagcccagagcctggctgcccatcatgtggccccacccaat

SEQ ID NO: 45266 - DNA, 252 bp, Glycine max
ccgctgcccccatcacctctactgtctcctccctgggctaagcaggggagaagcgggctgggggtagcctggatgtgggccaagtccactgtcctccttggcggcaaaagcccattgaagaagaaccagcccagcctgccccctatcttgtcctggaatatttttggggttggaactcaaaaaacaaataaaaaaattcattcttttctcgggcaaaaaaaaaatgccaaaactaactaaaaaaaagggggg

SEQ ID NO: 45267 - DNA, 263 bp, Glycine max
ctccagcatggcctggtctcctctcctcctcactctcctcgctcactgcacagggtcctgggcccagtctgtgctcccgcagccgccctcagtgtctggcgccccagggcagagggtcaccatcgcctgcagtggcagcaattccaacatcggggcaggtcatgatgtatattggtatcagcagctccaggaacagcccccaaactcgtcatctctgctaagaacaatcggccctcaggggtccctgaccgattctctgcctc

SEQ ID NO: 45268 - DNA, 261 bp, Glycine max
cgagaacacgtgactgaaatcctgcgccgttcttcagtctggagtgccttcacagatcatcaacatgatttgttcatttctgagtcacaagcagcaggatacctcacaggacctggagttgctggctaccttaccgcaggtacatctacatcagtcatgtctaacctgccacctcctgtagaccatacgcaggcgaccttggctatcagacttggaatattcacgagatacggtacacgcccgcggtcagtgacaggtcca

SEQ ID NO: 45269 - DNA, 262 bp, Glycine max
tcgagcgagaagcctgtgaaggaagccatggcccgattccgcaagaacctcgaggccattgtcagcgtgattgctgagcgcaacaagaagaagcagctgccatattactacttgtccccagaccggattccgaacagtgtggccatctgagcacactgccagtctcactgtgggaaggccagctcccagccagatggactccagcctgcctggcaggctgtctggccaggcctcttggcagtcacatctcttcctccgaggc

SEQ ID NO: 45270 - DNA, 273 bp, Glycine max
ggaactttaagatcatttaccgccgctatgctggcctctacttctgcatctctgtggatgtcaatgacaacaacctggcttacctggaggccattcacaacttcgtggacgagatgttcctggctggcgaaatccgagagaccagccagacgaaggtgctgaaacagctgctgatgctacagtccctggagtgagcaggcgagccccaccccggccccggcccctcctggactcgcctgctcgcttccccttcccaggcccgtgcgcaaccca

SEQ ID NO: 45271 - DNA, 258 bp, Glycine max
aatccgcaccaaccagcaccatgcccatgatactggggtactgggacatccgcgggctggcccacgccatccgcctgctcctggaatacacagactcaagctatgaggaaaagaagtacacgatgggggacgctcctgattatgacagaagccagtggctgaatgaaaaattcaagctgggccggactttcccaatctgccctacttgattgatggggctcacaagatcacccagagcaacgccatcttgtgctacat

SEQ ID NO: 45272 - DNA, 257 bp, Glycine max
ctccccaggagctgagaagcctgaagagggccaggcacggaggagcaggaacgaggacagtcaaatgtgccaagcttgtctttggttgtaactggtaatgtcccatgtctgttattctagttccccactatcttgcaaggattggcagtaaagtcctagtgatggacaacgcggcagtggggaagtgacagccgtggctagatcatcagatgtgtctgtagaatccggtgtgtccctgtgaacatccgccagcagta

SEQ ID NO: 45273 - DNA, 261 bp, Glycine max
tgggaacctagaaggagatgtgagcagcccaaggtcaccagctcacgtggagcagtgctagggcttgagcagagctctgctgctgattccgggcttctgtgaagagtgattcatgctcagtgagcctgtaaatatgatcttacctgaacaagagagtttttctcatgacccacgaggaaacacttcttgttactcacagtagagacctggttagaaagtgccggagagggctaggtgtggtggctcacgcctgtcatccca

SEQ ID NO: 45274 - DNA, 260 bp, Glycine max
agacctttgagacattacacaacctggtacacaaaggggtcaaggcggtgatggacatcccctatgagctgtggaacgagacttctgcagaggtggctgacctcaagaagcagtgtgatgtgctggtcgaagagtttgaggaggtgatcgaggactggtacaggaaccaccaggaggaagacctactgaattcctctgcgccaaccacgtgctgaagggaaaagacaccagttgcctggcagagcagtggtccggcaaga

SEQ ID NO: 45275 - DNA, 255 bp, Glycine max
gaagtttgcctagaaagggcttcccggtgctgatggagaggccgagacccttctgttggacaggctgccctgttcctgggtgaggatgggcttctgcctggcactgggggtggagggtgcacacgaatggcccgccttgaggggtcatggcacggaatatgaaagcctcctccacctccaacacccccaccttggaaggagataaggagggggccccagcaaaagccactggacacacagctctgcttgacgagg

SEQ ID NO: 45276 - DNA, 261 bp, Glycine max
gattgacaacaatgagccctacatgaagatcccttgcaatgactctaaaatcaccagtgctgtttggggacccctgggggagtgcatcatcgctggccatgagagtggagagctcaaccagtatagtgccaagtctggagaggtgttggtgaatgttaaggagcactcccggcagatcaacgattccagttatccagggacatgaccatgtttgtgaccgcgtccaaggacaacacagccaagctttttgactccacaact

SEQ ID NO: 45277 - DNA, 266 bp, Glycine max
atccccttagcagggtccttcccaccagactcagggaagggatgccccattaaagtgacaaaagggtggggtgtgggcaccatggcatgaggaagaaacaaggtccctgagcaggcacaagtcctgacagtcaagggactgctttggcatccagggcctccagtcacctcactgccatacattagaacgagacaatcaaagccctcccagggtggcacacccatctgtttgctggggtgtggcagccacatccaagactggagcag

SEQ ID NO: 45278 - DNA, 258 bp, Glycine max
ctcgagccgttcccaaagaactacccccttttcagctgagccctggggactgttccaaagccagtgaaatgtgaaggaaagtggggtccttcggggcgatgctccctcagcctcagaggagctctaccctgctccctgctttggctgaggggcttgggaaaaaaacttggcactttttcgtgggatcttgccacatttctgatcagaggtgtacactaacatttcccccgagctcttggcctttgcatttatttatac

SEQ ID NO: 45279 - DNA, 255 bp, Glycine max
gacgacttcccctccctgcaagccatcgccagggtcatcacgtagctcccgccagcgtggccagagctgtcgcaccgtgagcgtccttcctccttcctctccgggctgccaggcagccaggtaaggcctggtgaggccacttggcctcttggttggccaggcccaccaggaagtcaccaggcagtccacccgccctgttggcacactcaagcgggagtccacccctgcctcagtggtgggccagtctcggtttgc

SEQ ID NO: 45280 - DNA, 254 bp, Glycine max
gcacccactcagccggcagccagatggccccgcaaggcctccagggatggcccctagccacaggccctggctgaggtctctgggtcggtcagtgacatgtaggtaggaagcactgaaaatagtgttcccagagcactttgcaactccctgggtaagagggacgacacctctggtttttcaatacagttacatggaacttttctgtaatgggtacaatgaagaagtttctaaaagcacacacaaagcacattggg

SEQ ID NO: 45281 - DNA, 132 bp, Glycine max
cttttaccaaaaatcaaagctattcctcagctccagggctacctgcgatctgtgtttgctctgacgaatggcatttatcctcacaaattggtgttctaaatgtcttaagaacctaattaaatagctgactac

SEQ ID NO: 45282 - DNA, 265 bp, Glycine max
gtgacaagttgctaatatgcagaagggatgggtgatacttcttgcttctcatgatgcatgtttctgtatgttaatgacttgttgggtagctattaaggtactagagttgataaatgtgtacagggtccttttgcaataaaactggttatgacttgatccaagtgtttaacaattggggctgttaagtcgaccatacatcactgtgatagaatgtgggctttttcaagggtgaagatacgagtcttaaccacagtgtaacttacag

SEQ ID NO: 45283 - DNA, 267 bp, Glycine max
caagccgattggaaaaagaaatacttgatcgttatcttgatgttgtcctgaagggtaacagagatggattgaagaaattacgactaagaattgaggatccaccacgtaggaagcacatggtgtaccttggaggtgctgtccttgcaggaataatgaaggatgcaccagagttttggattaacagggaagattatctagaagaaggaattgcttgtcttagcaggtgtggccaggcatgactttgaggtccgtgattgctctgaaaat

SEQ ID NO: 45284 - DNA, 266 bp, Glycine max
gagatgctgaagaagtttcagggctcacagttctgtaatcagttttaccggacatactttttgacaattgaacaagagatattcgctgtcttgactgacacttttcataaacctgggttcaaattacatgtcttggtgctacagcatttgttctgtttgctagaaactggtgccctaactgaacctctttgggatgttgctacaagtcaatattcatactcaagtaatgcagtgtttgtacgtgagtttaccataaaacttctaag

SEQ ID NO: 45285 - DNA, 259 bp, Glycine max
ctccaacacatgagatgttgaaatcatcgtgtatcgtggtctgtactttggattgtatgattctgttaaaccagctctcgtgcactgaccctgtgaggacaactggtttaacagggtcattgcaggatagcttttttgccagctttgcccttggatggctcatcaccaatggtgcaggtcttgcatcatacccactagacactgttagaagaagaatgatgatgacctctggtgaagctgtccagtacaagagctcctt

SEQ ID NO: 45286 - DNA, 272 bp, Glycine max
tggcaagaatggcacttcgttgcttggtgatgtccctttctgttctcttcactcttggtcttgcgagagaaagccatgccagagacgaagatttttggcatgctgtttggccaaacactcccattccaagttcattgcgagatcttctaaagcctggccctgcaagtgttgaaatcgatgatcaccctatgcaaattgaagaaacacagtacccgaaaaccttcttctataaagaagaccttcatccaggcaaaacaatgaaagtacaattc

SEQ ID NO: 45287 - DNA, 264 bp, Glycine max
aaacactgttgttctacacgcagatcagactgaaataatatctggtgaccaaaatggcaacattcgtgtgtgggatttgacagcaaattcatgcagttgcgaattgacatgtaggttccagaggtggatacagctgtacgctctttaacagtaatgtgggatgggagcttggtagttgcagcaaagaatcacgggacatgttatgtgtggcgcttgttgcgagggactcagacaatgacaaactttgagcctcttcacaagctg

SEQ ID NO: 45288 - DNA, 252 bp, Glycine max
cttgatttctccagagagaagaagaaacttaatcgatcatcacttcacttcactaatacatcatggcagacgagatccagaacaagtatgagagctctgaggtttaggtccaggatcgttctacttatgactttctcggtaagaattaggatgaagaagataagcctcatccttaggaggaggtcatcgacaccgagtttcaaaaagtcactgtttcagaccatggagagaacaagcatagcctcttagaaa

SEQ ID NO: 45289 - DNA, 251 bp, Glycine max
ccaagaatggcacttcgttgcttggtgatgtccctttctggtctcttcaatcttggtcttgggagaggatagccatgccgagacgaagatttgttgcatgctgtttggccaaacactcccattccaagttcagtgggagatcttctaaagcctggccctggaagtactgaaatcgatgatcaccctatgcaaattgccgacacacagtacccggtaaccttctgctctatagaagaccttcatccaggcaa

SEQ ID NO: 45290 - DNA, 256 bp, Glycine max
cccagcatgccgtgggataaaacagaactttgggttggctatatttctgaaaatggtgagatctacaagcgcggttgtattgctgggaatgatcctctcgtgtggagtctcaactgagcccaagtggtccctgatggggagctgtttttcgtgacagacaaggaaaatggtttttggaatatccataaatggattgagtttgagaataaggttgtgtctgtctatcctttggaagctgagtttacaaggcctctgt

SEQ ID NO: 45291 - DNA, 136 bp, Glycine max
aagagaaagtttgtggcggatggagtgttcttcgcggaattgaaggagtttctgacacttaatttggcgtatcacggttactcgggcgtggaggttagggttaggccgatgggcaccgagattatcatcagagcca

SEQ ID NO: 45292 - DNA, 185 bp, Glycine max
ggtaaataattgagcctcactctatcagtgcagggttggactaccccggggttggactagagcatagtttctcgaaagatgtagggcgtgctgactactaaagtattactgatgaagaagcattggaagcctttagagatatctcagctggaaggtattactgcagctctgggagacatctcatg

SEQ ID NO: 45293 - DNA, 256 bp, Glycine max
atgttaaatatcaatgggggaatgcaaccactgtcgcttggtggacacaatgcaaagaatgcaatgggtattggaggccatactccatccataagcagtggcactgccagtgatcctccatcattaagcggggttctgccaatgtgccaggaaacaatggatctaagtcatggcgtaatagcatcaactcagcatcgaatagtgattcttctgcagttggtggcaacaatcgattcaaccagagaacatctgacat

SEQ ID NO: 45294 - DNA, 208 bp, Glycine max
ctttgttgtgagctataagctaggttatcgtgaggagaatatgaagttgtttggttgctttgttgctgcagtagtcttagtagcatggccatgccatggcgcaggctaccagaggttccctctccgaatgaaaactggctatggtgagcgttcttcggaggtaacatgcgcaagttttatgctggctgatgaagcacacaacatccga

SEQ ID NO: 45295 - DNA, 284 bp, Glycine max
gatgaaattaaaaatgctatcaaggaggaatcagagggcaagttgaagggaattcttggttacactgaagatgatgtggtctccactgactttatcggcgatagcagatcaagtatttttgatgcaaaggctggaattgcattgaataagaactttgtgaagcttgtttcttggtacgacaacgagtggggatacagctcacgtgtcattgatcttcttgtattcgttgccaagaagtctctttaaggtgttacttcaaagtagcttgtcttcacattattacc

SEQ ID NO: 45296 - DNA, 296 bp, Glycine max
attccgctcgagtcctaattgtttaaacctaattctcatttcttcatcgttcgattcttctcctcctaaagatgcagatcttcgtgaaaactttgaccggtaagaccatcacccttgaggtggagtcctccgacaccatcgataacgtgaaagctaagattcaagacaaggaagggatcccacctgaccagcagagacttatctttgcgggtaaacagcttgaggatggtcgaacccttgccgactacaacatccaaaaggaatccactctccacctcgtgcttcgcctcaggggt

SEQ ID NO: 45297 - DNA, 272 bp, Glycine max
ggtcaaacatcatcatgtcggacgaagagcaccatttcgagtccaaggcagacgtcggtgcctccaaaacctaccctcagcaagccggtaccattcgcaagaacggctacatcgtcatcaaaggacgccctcgcaaggttgtggaagtttcgacttccaaaactggaaagcacggtcacgccaagtgccactttgttggaattgatattttcactgccaagaaacttgaggatattgtgccctcttctcacaactgtgatgttcctcatgtg

SEQ ID NO: 45298 - DNA, 279 bp, Glycine max
gtgaatccattccttggagtgagacagctagaaagttagacagcctctctaaaaatttggagattgaacaactcgatgtcaagacaacgttccttcctggtgatctagaggaagaaatctacatggagcaacccgagggcttcaaagttccgggcaaggaaaacttagtatgtcgcctcacgaagagtttatatggccttaagccagcactgaggcaatggtataagaagtttgacgctttcatagcagaacatgatttcaaaaggatggacagcgatc

SEQ ID NO: 45299 - DNA, 282 bp, Glycine max
  unsure (1)..(282): unsure at all n locations
gatttttggcatgctgtttggccaaacactcccattccaagttcattgcgagatcttctaaagcctggccctgcaagtgttgaaatcgattctcancctatgcaaattgaagaaacacagtacccgaaaaccttcttctataaagaagaccttcatccaggcaaaacaatgaaagtacaattcagcaagcctccctttcaacaaccatggggtgttggtacatggttaaaggaaattaaagacactactaaagaaggatatagttttgaagagctatgcatc

SEQ ID NO: 45300 - DNA, 212 bp, Glycine max
tatgtcgttgagtatttggtaccggggttactatctgttcagatctggggaattagctcgcttagatgcaattagcagagcaccagttattcatcacttctctgaaagcattgcaggggtgatgacaattcgctcattcagagagcgctagaatgtgtgtgaagaaaatctcaaacgggtgaatgataatttgcgtatggatttccacacaa

SEQ ID NO: 45301 - DNA, 282 bp, Glycine max
caggtcagaaagcagtgcaatgttgccaacaagcaccatgatcaggaccaagccttatgtgaagaaaatggccaagagccaagactatttcttcaaggagttctctagagccattaccttgctctcagagaacaaccctctcactggcacaaagggtgaggtcagaaagcagtgcaatgttgccaacaagcaccatgatcaggacccttgaattttcctccccttgtctatgatcgaggaagaaaatctgtaatatattatgcaaaaactaattaaggtctt

SEQ ID NO: 45302 - DNA, 273 bp, Glycine max
ctgttaacggactatctacagagcagcgcaaaaggttgactatttctgttgagctagtggctaatccttctatcatattcatggatgagccaacttctgggctagatgcaagagctgctgctgttgttatgagggctattaggaaaatagtggacactggaagaacagttgtctgcaccatccatcagcctagcattgatatatttgaatcttttgacgagctttttctaatgaaacgaggaggacaagagatatatgtggggccacttggac

SEQ ID NO: 45303 - DNA, 276 bp, Glycine max
aaatttagagtcgtaaaaatctaaatatcgaatttttaaagattacatgtaattaattttgattttgcttgtaacatgttctttttaaaaataaataaaggtgatttattttagcaattttgttctctgatatctatatatattttcgcgtgactctgtaggaaaatgaggttgaagagggtagtgagggtaccagctataagcttgaagatggctgatattccaccagatgattattcttggaggaaatatggacagaaactcattaaaggatcg

SEQ ID NO: 45304 - DNA, 296 bp, Glycine max
aaaaaagggacaacgccctgtgtcaaataatgagaagaaaagaaacaatcatgtctgccgcgggccacgtcggctggctcccgaaaagatatcttggaatgtccttgacctgaagaaggagaattacttctcgtgtgccgttggacgaacacagaccaatgctcggtatacgcttggatcaccagatgaagttgttgcatttctcaaggaactagccaatgtctgagacttacccagcttcagaaattccctatattgccaacattgcaacttgccaaatttactctcttgtacac

SEQ ID NO: 45305 - DNA, 277 bp, Glycine max
agggtttggtggccctcttgagatttgttggtcacaaattccagccagcatccaaatttcaagagggctcccaattctgcagagggtttggtggcattggtggaattcttcgttaccagcttgacatcagatcatttgatgagttatctgatgacgacgaagtgtatgaggattctgattaagttcctgttactgcagaacccttactttgttttggaagattggggccttcaaaaatgatttggatattattgattatggttctaagacttagact

SEQ ID NO: 45306 - DNA, 276 bp, Glycine max
ccttcagtcatgtctctctctgcattctcattccctctccatcccagaccaacaacaccaccttctgatcctaaaacatcatcaacccctttgcctttgtcttctcactcccattggggtgcagatctgctcacacaatcccaacgccaactcaaccacgtgaaaagaaggccacatggggtatgtgcatcactatcagaaatgggggagtattattctcagaaacctcctattcaactgttggacaccataaactatccgattcacatgaagaat

SEQ ID NO: 45307 - DNA, 264 bp, Glycine max
agcgtggttatgttgcctcaaactcaaaggatgacccccaaaggaggctgctaacttcacagcccaacgtcatcatcatgaaccaccctggtcagattggaaatggctatgcccctgtcctcgactgccacacttctcacattgctgtcaagtttgctgaactcatgaccaagattgacaggcgatccggcaaagagcttgagaaggagcccaagtttttgaagaacggtgatgctggttttgttaagatgattccaaccaaac

SEQ ID NO: 45308 - DNA, 270 bp, Glycine max
ctgtcttctagaagggaattcaaagatatatatgttgtcttcgaactcatggaatctgatttacatcaggtcatcaaagctaatgatgatctgacaccagaacattaccagtttttcttgtatcagcttctacgaggcttgaagtatatacacacagcaaatgtttctcaccgtgatctaaagccaaaaaacattttagcaaatgctgactgccaactgaagatttgtgactttggtcttgccagagtggctttcaatgatactcccact

SEQ ID NO: 45309 - DNA, 258 bp, Glycine max
ctagagcgctgagaaggttgacgacagcgtgtgagacagcaaagacaacactctcttctaccgcgcagacaactattgacatcgattctttatacgaagggattgatttctatgctacaatcacgagggcgaggtttgaggaaatgaacatggatttgttcaggaagtgcatggaggtgttgctgatgctcttaaagctgttgacctgtatctggagcaaaacaatcttcaaatggaggttgacgtggagaccaggac

SEQ ID NO: 45310 - DNA, 260 bp, Glycine max
cattaccctagaagtcgaaagctccgacaccatcgacaacgtcaaggctaagattcaggacaaggagggaatccccccagaccagcagaggctgatcttcgccgggaagcagctcgaggacggacgcacccttgctgactacaacatccagaaggagtcaactctccacttggtgttgcgtcttcgtggtggtatgcagattttcgtgaagactcttacgggtaagactattaccctcgcggtggagagctctgacacca

SEQ ID NO: 45311 - DNA, 279 bp, Glycine max
cataattgtaattgtgataccgttgcggtcgtgacggaaagcatggaatttcaaaaactagtccttcatctgttccttccaacttatctattctgtcatatagtgaagcaagtgatttctcaaatcttcccacaccgaggtccgagcgtgaaatcttgtcttccccaaatcttaaggcctttacctttaacgagctaaagaatgccaccaggaactttcgccccgacagccttcttggtgaaggaggatttggttttgtttacaaggggtggattgatg

SEQ ID NO: 45312 - DNA, 274 bp, Glycine max
cctgcattcaatgaggagcataggcttccaggagctcttgaggaaactatgaattatcttcatcaacgtactttaaaggattcttcatttacatatgaggttgtaattattgatgatggaagtgctgatgagacaaaaagagtagcttttgaatttgtgaggaaatacacagtagacaaggtaagggtcatccttctaggaagaaatcacggcaaaggagaagcaatcagaaaaggaatgatgcattcacgtggtgaactacttcttatgcttg

SEQ ID NO: 45313 - DNA, 276 bp, Glycine max
catgataaggatatgtatgccagatcccctatcaactcatcttgacaattttccttgtcccatcattatatttcaaggattggaggacaatgttgtgccaccggatcacgctcggacaatctaccaggcggtcaacgaaaaacgtgtgccagttgctcttgtagagtatgacggagaacaacacggtttccgaaacgctgagaacattaagtttacacttgaacaagacatggtcttcttcgcacgattgcatgggcactttgatgtagctgatga

SEQ ID NO: 45314 - DNA, 269 bp, Glycine max
ctgctaattattcttcagtcttgcggaactccattttgatttctccacgttccacgatacccctgatgcagtggtatctaatctcaatgtgctttgtacggctgtggaatattggattcttagtcattgcaatagctgacatattatcacaatgaataactgttggagtctaggagtcttgttgtacgtcttgcagaatttttctgagccatgtcgcttcacacgcaacgcttgtcgcaaccatgtattctgcttctttgacgcccatg

SEQ ID NO: 45315 - DNA, 267 bp, Glycine max
gacgctttgatgtatttgttgaggccgaagcaaataaagctgctggaaagtatgagaatgcctctattgactttcagattgagttttacaagaatgaaggactgactccatatacagaggccaaacttcctcttataagtgatgttcctgaaggatgtgtaatagtacgagagcatgttcccattagtgatctttttacatgtctttggttcaatgaagttgaccgattcacttctagggaccagattagtttctcaactgtcaggg

SEQ ID NO: 45316 - DNA, 273 bp, Glycine max
tagtgattgccttcaaatcacacactctcttcaatttctagggttttgctattgctttgcctccgttccccctttctcacaaaaacaacgccttttctcttctccttcgtatctattctttgcgtttgcttttcggttgattgacggcattcacagcgtaatttgttgctgcattttaatcgatttatctaaccaggactgaatgacctaatggagtccaaaggtgggaaaaagaagtctagtagtagtagtagtaaatcaattttttacgaa

SEQ ID NO: 45317 - DNA, 279 bp, Glycine max
ccagaatggcacttcgttgcttggtgatgtccctttctgttctcttcactcttggtcttgcgagagaaagccatgttcgagacgaagatttttggcatgctgtttggccaaacactcccattccaagttcattgcgagatcttccaaagcctggccctgcaagtgtcgaaatcgatgatcaccctatgcaaattgaagaaacacagtacccgaaaaccttcttctataaagaagaccttcatccaggcaaaacaatgaaagtacaattcagcaagcctc

SEQ ID NO: 45318 - DNA, 289 bp, Glycine max
ctgctttctctctctctctctctctctctctctcttgtttctctacagacaatggcttgtcaattactgattgccaatgcttgtgttggatttgattgaaaaataggttgacttgtgagaatgtccactccagcaaggaagagactcatgagagatttcaaaagattgcaactagatcctcctgctggcatcagtggggctccccaagacaataatattatgctttggaatgcagttatctttggaccagatgacaccccttgggatggaggcaatttaagctaacact

SEQ ID NO: 45319 - DNA, 277 bp, Glycine max
  unsure (1)..(277): unsure at all n locations
tcaaggttcctcaaaatgtatctgatgtttgtgttgctcttcgtcatatcaattcgattgaatatgtgatatgataanataaacattgtggtaggttatatngtggacnctgaggagggaancancattaacgagctgaagaagcctgttgtggagaaagatgctccagggtatgctatatgagggcactgtatgtacggcctcggaggggaaccagataattatgttaactaaataatctggaaccctaatgtatgagtgtgatcatcagtgtgta

SEQ ID NO: 45320 - DNA, 249 bp, Glycine max
caatcctctgatagcgttcggtttcaagtagacaagatgtttcctagcgggcaaaagggtcagaagctacaggggattctcgtggttatgcagaagaactgtgttgcatatcaacagcatcaccagtgttggagggaccgttgaccaaggcttaggcttcatacggcagtgcagtcgatgcacttacttccccagctagccaaatctccagccagctgattagtgctaccaaggctgatggtgcgaacg

SEQ ID NO: 45321 - DNA, 239 bp, Glycine max
tagaacagtggccctaatgaagcccatgtgtcttcgcagtcacaagtttggcagcatggcaatgctatgcgtacgacatgttccctctccgaatgaatactggctatggcgcccgtactcaggaggtgaaattgcgcaagttggaggcttgctgtggaagcacacaacatctttggctttgagaccattcctgaagagtgcgtcggaagcaacaaaggaatacatccatggcgaacaat

SEQ ID NO: 45322 - DNA, 224 bp, Glycine max
  unsure (1)..(224): unsure at all n locations
cttctgagagtgtctgcccgactctcgcatagatgtttcctttcgggcaaaagggtcacaagataaaggggactatggtggttatgcagaagaatgtgttggacatccacagcattgncagtgttggagggattcttgaccagggcttatgcttcataggccgtgcagtcgatgcacttacttttgcagccaccaagatctccagccagttgatttagtgctac

SEQ ID NO: 45323 - DNA, 290 bp, Glycine max
caggagtgggaagttggcgagtggagcaattgcgaatctggtggacgaggttggaggtgctgtcatccatgaagagggtctccccatgaatgtttccgttgacatgtctatttcttttctctcatctgtgagagttggcgatgaactagaaattacttctaggttgttaggaaggaaaggaggttattctgggactattgttcttcttaaaaacaaagcaactggagaattgatagcggaaggtcgtcattcactatttggtagacataacagcaaaatgtaattcgata

SEQ ID NO: 45324 - DNA, 270 bp, Glycine max
cggaattcggctcgaactcgagccgaatcggctcagcggctcgagattgattagaattgacaataatgtctggttcggaggacgagggaggagaagagtacctcttcaagatcgtcataatcggagactccgcggtggggaaatcgaacctgctgtcccgctacgcccggaacgagttcaacatgcactccaaggccaccataggcgtcgagttccagactcagtgcttggaaatcgactccaaggaagtcaaggctcagatttgggaca

SEQ ID NO: 45325 - DNA, 256 bp, Glycine max
gaatggttctatttgttgtgtgtctctttctcctttcatcttggtatcgggttgcccggaacagcatatgccaggaggcagcatttatggctcagtggtgcaaacgaagtagacagcaaaactttttcaagagctattcttgccaagagtgctcatatacagacagtggtgtgtattcctgtgttggagggcgtcgttgagttgggcacaaccgataagatcgaagaagacctaaatttcatccaacacataaaga

SEQ ID NO: 45326 - DNA, 287 bp, Glycine max
gcatatagttttcctcctagctagatacatgatcaagtcctcctccatggcttcaattgccaaaatgcttgaaggcaaagtggcgataatcacaggaggagcaagtggcattggtgccgcgagcgccaagctattcgtccaacacggcgccaaagtaatcattgccgacgtgcaagacgagttaggccagttccactgcaaaaccctcggcacaacaaacattcactacgtccactgcgacgtaaccagcgactccgacgtcaaaaacgtggtcgaatttgccgtgt

SEQ ID NO: 45327 - DNA, 269 bp, Glycine max
gctccccctacgattcgccgattgttttgcagcaaagctccacagaagaagaattatgagaacttctatcccaaggaacagaaggaacatccgagaggaaacgacaaaaaatacgagtccacagataaatcgaacgcaaacacagaggatagtggaaatcttcaggaagccttcatgaagccagttcaccatctagtcagcccagtatcgtcgatagggctattgcttacatcctcttcgtttggtcctcgtgcacagaagcagattag

SEQ ID NO: 45328 - DNA, 268 bp, Glycine max
cctcgagccgattcggctcgagaacaaatcaaagccatggccacctccaacttctctattgctctctccgtctccctagccttctttttggtgctacttaccaaggcacactcgaccgataccgtttctttcaccttcaacaagttcaacccagtccaaccaaacattatgctccaaaaagatgctagtatttcatcctctggggtgttacaactcaccaaagttggcagcaacggcgtgcccacctcgggatctctcggtcgtgccc

SEQ ID NO: 45329 - DNA, 276 bp, Glycine max
ctggctgcaagtcttacttggcatttttcgaccacaaaggggatccaaaagaactgtgtggttctttgcacactggatacttggaactgcggtcacattccttggtgtcctgaatgtatatcttggtttaggagcctaccaccaaaacacatccaaaggcataaaaatttggaacatacttttcactgttcagatatctttgattgtgtttttctaccttttccaagaaaaatgggtgtatatacaaaaccacggagtggttttgggcaaagaaat

SEQ ID NO: 45330 - DNA, 257 bp, Glycine max
cgcagtcctccgcggaggaaggctccggcaactccgccaccgccggcacggagtggacgttctccgcaaagtcccatgcgccctcctcggacccctcctgggacgccatacagcgctgcggtggcgccaccctggcactcggcgacctccgctttgtgcagcgcctggggagcggtgacatcggaagcgtctacttggtggagctcaagggctccaacggttgcctctttgcggccaaggtgatggacaagaaggaa

SEQ ID NO: 45331 - DNA, 245 bp, Glycine max
gagagtggctcccaagggtttgacctttctggctgtgttggtgtgcgtttcagcactgtcagtgagtccttctgttgcgggggaagggcaaagtgatggccttgttgtggacttgtacaaggagtcatgccctcaggctgaagacatcatcacagaacaagtcaagcttctctacaagcgccacaagaacactgctttctcctggctcaggaacatcttccatgactgtgctgttcagagttgtg

SEQ ID NO: 45332 - DNA, 250 bp, Glycine max
ctggatactgagggttacagcgacggaagtgatggcaacactgcaggggctagtcaaacaaaaaggaaaagatgccgagagggaacactgaccactggtatgactcttgttcactgttgcatcttgacgaacaaaagagttgtgttggattagaattatacttttggtgttatcactgtgcaatgatgtcaactagatcattgagtatggtactatggtcttgataagttgatattatcctattacttat

SEQ ID NO: 45333 - DNA, 202 bp, Glycine max
gtgttcatgaacgcctttcttctccgtttccgtttcctcgttcggattcgctttttgctctgcggaaatgagagagcgcatgtcgatccacattggtcagtctggtatccaggtcggaaatgcatggtgggagctctgctgcctcgagcacggcatcgggcccgatgtgcagatgccacgtgacactacagttggcggtggt

SEQ ID NO: 45334 - DNA, 159 bp, Glycine max
acactagtcatgttattcttggggtgcatatgaagattcatgatgggtattttgagatattaggattggacaaactcgcctgtggctcgtgctactctttacagatctctatttagagatgccgtcgatgtcgtcccagatgctgtcgaagccttcagg

SEQ ID NO: 45335 - DNA, 242 bp, Glycine max
  unsure (1)..(242): unsure at all n locations
ctccncgccactcccgccggcctcatctccgcttccatcgcccatgctttcgccctcttcgtcgccgtctccgtcggcgccaacatctccggcggccacgtcaaccccgccgtcaccttcggcgccttcgtgggcggcaacatcaccttactccgcggcatcgtctacgtcatcgcccagctcctcggctcccccgtggcctccctcctcctcgccttcgtcactgcctcccctgttccagc

SEQ ID NO: 45336 - DNA, 271 bp, Glycine max
cctggagaggctgtgaagtacaagagctctttgcatgcattccacacaatcgtcgcaaattacggtgccaagtcaatcttcaaatcgtgctggtgaaacatattgcgtgctgttccaggtgctggtgtcgcttgatggcatatgacaacctggcagcatatcttgttcggaaagaactacggatcagggggaggtcgctaatgtgatgacgacaattcccggggataatcatgcacgattcccttgtcatttgactaaattaggatgacaa

SEQ ID NO: 45337 - DNA, 274 bp, Glycine max
ctcgagcgtgaaaacccgaagtgcttctctcctctgtgctcttctctctcttgctatccttttggctagtcgcagtgctgcaagtgcaactccaagaagcgcagtgccaagccaccatgtttcaacattcaacagaagcctgtttccttccacttctctctttggaattgggtcttctgcttaccaggcagaaggagcagcaagtctagatgggagaggaccaaccatatgggacacctgaactagacaggatactgaaaagatttgggatcat

SEQ ID NO: 45338 - DNA, 267 bp, Glycine max
catacactctcatagctgtagcggcgacactaagatcggagaaagaatggcgaaaacgacgtctctgctgctctttaaaatgctcctcttcggatccctagctctgatccatgcggcgaaatcgtcataggatttgacggacgtgaaccacaaggtttactatgacgttgagattaatggaaaagatgcaggtcgtattgtaattggtgcctatgggaaggctgttccataaactgcagataactatccagcactttgcaccagggg

SEQ ID NO: 45339 - DNA, 268 bp, Glycine max
agagggcaagttgaagggaattcttggttacactgaagatgatgtggtctccactgactttatcggcgatagcagatcaagtatttttgatgcaaaggctggaattgcattgaataagaactttgtgaagcttgtttcttggtacgacaacgagtggggatacagctcacgtgtcattgatcttcttgtattcgttgccaagatctctctttaaggtgttacttcaaagtagcttgtcttcacattattaccgtatgtttatgtttag

SEQ ID NO: 45340 - DNA, 267 bp, Glycine max
caggcagcaaacatgatgaagaagattggccttcttgaagctgcaaaacggaagttcttgggggaagggttgggggcttgctccattgaggaactgcaatggatagaacaacagttggagaggagtttaagtaatgttagaacaagaaagatccaggttttcaaggaacaaatcgagcaactaaaagaaaaggaaaaagtcctacttgatgaaaatgtcaagctcactgaaaatcgcaggctctctgagaagcatggaatcaatcta

SEQ ID NO: 45341 - DNA, 257 bp, Glycine max
caatgtcaaccaaccccgccatttctgcaagaattgtcagagatactggactgccggtggagtgatgaggaatgttcctgtgggtgctggtcgcaggaagaacaagaattttacttctcagtatcgtcagataactgttcctgaagcagcactcttgagttctcagccggacttgccaaatggagtcagtcatccttccttgaactgtaatgccacactccttgcatttgggtctgatacacccttgtgtgaatcaa

SEQ ID NO: 45342 - DNA, 248 bp, Glycine max
gttgaacatacaaaggtcctgaatgttgtctaccgctctgcaactgcacttggatcacgcttaccatctatatctagtgcaaaagctagagtagctggtgctggtgctattctgtggccagtaaccagtagcactcaggttgtgatgaagcgtgcacaaagtgttgctgaagctgttgtcagaactcgctcatcattgtcatcatggtcttgcatgagtgcacggcgccgaaatgtgggttcatcagt

SEQ ID NO: 45343 - DNA, 249 bp, Glycine max
cttgacttggtcactctctcaggctcacacacaattgggaggagcacttgttcttctatcatggataggatttacaacttcaatgggactaaaaagccagatccctcactaaatgtctttttcttgaagttgttgaggaaaaggtgcaaaagggtgatggatttggtgcaccttgatgtcataacccctaggacttttgacacaacctattacactaaccttatgaggacagtggggttattgtcaaca

SEQ ID NO: 45344 - DNA, 135 bp, Glycine max
cgttgtggcacttgcaagggcattgggatcaatgccaggagtttatcgggttgatttgctaactagacaagtgtcggcgccagatgtagattagagttatggggagccgacggaaatgttgtctccaagagacac

SEQ ID NO: 45345 - DNA, 242 bp, Glycine max
gctttcttgagttgagttaacagcatggagagggaggaagatgttaaggttggagcacagaaattctcagagaggcaagcattggggacaggagctcagggtgacaaggactacaaggaggcaccaccagcacccttgtttgagccaggggagttaaagtcatggtctttttacagagctgggattgcagagtttgtggccacattcttgactgtcatgggtgtcaacagggcacccaacaa

SEQ ID NO: 45346 - DNA, 265 bp, Glycine max
cgttgtgagctataagctagtttatcgtgaggagaatatgaagttgtttgtcttctttgttgctgtagtagtcttggtagcatggccatgccatggcgcaggctaccaaaggttccctctccgaatgaaaactggcatggtgagcgttcttcggaggtaaaatgcgcaagtcttaggcttgctgtggaagcacacaacatccgagcctttaaaaccattcctcaagagtgcgttgaaccaacaaaggactacattaatggcgaac

SEQ ID NO: 45347 - DNA, 267 bp, Glycine max
cggaatccttgtcccatttgaagctcaacactgtctgcgaggaggcacagtgccccaacataggagagtgttggaatggaggtggagatggcattgcaactgcgacaatcatgcttcttggggatacttgcacacgcggtgtaggttttgtgctgtgaagaccagcagaaaccctccacctgctgatcctatggaactggaaaatactgccaaggcaattgccagttggggcgtggattatattgtcttaacaagtgtggatcgtga

SEQ ID NO: 45348 - DNA, 159 bp, Glycine max
gcgaacatggtttccatctcgctcggtgtagcggttgcggcttacggcgaacaaattcgatgcatggggtgttaccctgcagcttatggcggttgcgtttgaggcaacacggttggttctgattcaaattttgctcaattcgaaggggatttcgctgaa

SEQ ID NO: 45349 - DNA, 160 bp, Glycine max
tacacattggatgattgaaatgaaaatccttttactagattggtaatgcacttgatctattgttccataactaataactaaagtgagctataagctagtttatcgtgaggagaatatgaagttgtttgttttctttgttgctgcagtagttttggtagca

SEQ ID NO: 45350 - DNA, 158 bp, Glycine max
caagtatagtgtagtattccaatatttgtcaaccctttgagagttagaatggctgctgctattgaaatccccacaatagtgtttccaaactcctctgcccaacagaggatgccagtggttggaatgggatctgcccctgacttcacatgcaagaaaga

SEQ ID NO: 45351 - DNA, 165 bp, Glycine max
gcagattcagatggaaccacattcagggagtaccatctcttttcaacctcaaggtgtgacaccatttttacccagtcttggattcctcgctctcctagcaataccatcaggggacttgttattcttatgcatggacttaatgaacacagtggcagatatactcat

SEQ ID NO: 45352 - DNA, 155 bp, Glycine max
cagaaaatcctcacccattttcttcgtagccaaacactctgaaattctcagttatgtcgtggcaagcgtatgtggatgatcaccacactgtgtgaaatcgaaggtaaccacctcactcacgccgctatcatcggccaagacggaagcgtttgggc

SEQ ID NO: 45353 - DNA, 286 bp, Glycine max
ctgattctgaagaggaagaaaacgataatgagcaaaaagagaaacgcatctcaaacaagaagaaaaagcttcaacggaggatgaaaattgctcaactgaaacaaatttgctcaaggccagatgttgttgaggtgtgggatgctactgcatcagacccaaagttgctggtgttcttaaagtcttataggaatactgtacctgtacctaggcattggtgccagaagagaaaatttttacaggggagctgctgaggcaatcaccaatcctggacttgtagggtttggca

SEQ ID NO: 45354 - DNA, 283 bp, Glycine max
ctcagaattctctaaaagagatctttttctgctctttgaagaaagaagggtctttgctctgattttggagatgtctctgctctcagatctcatcaaccttaacctctccgataccaccgagaaggtgatcgcagagtacatatggatcggtggatcaggaatggacctgaggagcaaagcaaggactctcccaggaccagttagcgacccttcagagcttcccaagtggaactatgatggttccagcacaggtcaagctcctggtgaagacagtgaatgattt

SEQ ID NO: 45355 - DNA, 276 bp, Glycine max
caccccactacgagaccctttgtggagacttttgcgaaggatcaaaatagattctttcaggtttttgctagggccatgcagaagttgagtctcttgaatgtgcagaatggtttggacacagcagcgaccagccattgccatcaactgtgttatcaaaacgtcagatgttggatagatttgaacagcacactctcaagtgttcatcatgtaaagcagcatatgagggattccaaacatggcagacagtcctaattggggcaacagttgtgtttgtgc

SEQ ID NO: 45356 - DNA, 273 bp, Glycine max
gttaattctgatatatatccaggtgaatattcagagatggaaggttacaatggatctgaatacgatcctacttatgaagacaaggatggtgactggatgctggttggagctcttccatagaagatgtttgtatcctcctgcaagacgctgaaaataatcaaaggatcagaagcaaaggggttgggttgtttgtgaccaacaaaacttgcaaaagcaaatcaaatcaaaatagtcacatgcggtcttcaaagacaaataccctttgtgttgtgc

SEQ ID NO: 45357 - DNA, 273 bp, Glycine max
accactcaaacatttttcactaaaacacacactttctgaaaagaacaaggatccattttctttcccccaacatggccagaccacaacagcgttaccgaggtgtccgacaaaggcattggggctcttgggtctccgaaattcgccaccccatattgaagactaggatatggcttggtacatttgaaacagctgaggatgctgctagggcctatgatgaagcagctaggctaatgtgtggtgcaagggcaagaacaaacttccctttcaatccaa

SEQ ID NO: 45358 - DNA, 271 bp, Glycine max
ggcaatgtctgcttggggattctagatggcactgaagtaggactagaaaatctgaacataataggagacatcactttacaagataaaatggtgatttatgacaacgagaaacagcagattggatgggtttcttcaaattgtgataggcttcccaatgtggatcgtgatttggaaggtgattttccacacccatatgcaacaaatttgggtatctttggggaccgttgccctgcatcatatgaagaaacaggctgtgaatgaattgctaggg

SEQ ID NO: 45359 - DNA, 270 bp, Glycine max
acaaatatttggaagatgatttgtattcaactcccttcaatttgagagcaatctgcaccctgtgcagaaatgggcttccaataaccaacaaaaggatcacctcttcctgacttgaagccattgaagcagcacttcacttcttctcttgacttgaagggagttgaatacaaatatttggaagatgatttgaacaacaagagtgatttgctcctcaagtataacccagtttataaaatgattccagtgtttgttcacaatgaaaagcccata

SEQ ID NO: 45360 - DNA, 246 bp, Glycine max
gggatgctgttctgaggttgattaagaatgcaaatccagacatatttgtgcatggcattgtcaacggatcctatgatgtaccattctttgtgtcacggttccgggaggctctctttcattacactgcattgtttgacatgcttgacaccaacgttgctcgtcaagatcccatgaggttgatgtttgagaaggagttgtttggacgggagatagtgaacatcatagcttgcgaaggttttgagaggg

SEQ ID NO: 45361 - DNA, 247 bp, Glycine max
gtcggtgtttacaagactacgtcgtcccacgatcaaccccgatgaccgtccctaacttggtggcttcctccttagcaatggacggtcatcggcattgatcttggaacaacctattcatgtgtcggtgtttacaagaatggccatgttgaaatcatagccaacgaccaaggtaaccgtatcaccccatcgacggttcctttcaccgacagtgagagactcattggggaggctgccaagaatcaggcag

SEQ ID NO: 45362 - DNA, 269 bp, Glycine max
caattatggtttccaatttattaattgtgtgttgagtttttgtttttggattttgggtactaaaacttatgtattggggtttaaatttcatagggttttagaaaaattgatccagataggtgggagtttgcaaatgaaggattccttagagggcacaggcacctgttggcaaacataaggagaaggaaacaaccttcttctcagccttcttcttcttcttcttcatcctcttattattattattcttcttcttctcaacaagcacaaca

SEQ ID NO: 45363 - DNA, 269 bp, Glycine max
ctaattcagtttttttctcccatcataaaaaaccgaccctctcctttccctcttcaccaaccaatggctcccccaaaggccgagaagaagcccgcggagaaaaagcccgcagacaaggctccggcggagaagaagcccaaggccgagaagaagatatcgaaggaaggaggaagcgagaagaagaagaagagaacaaagaagagcgtggagacctacaagatttacatcttcaaggtgctgaagcaggttcaccccgacatcggaatctc

SEQ ID NO: 45364 - DNA, 262 bp, Glycine max
ctcagaattatactgcattggtattttaaaagacaactggaggaggtaagtgcaattatggatggagagttctgtgatgatgcatctcaaaataaagatggcatgaatttagatgaaaaaggaaaaatatgcaacaaagttggtgaaatggatgttgatgagtgctatagcgaccataggttctcggaaaacagtagacttgtgaagaacattggaaaagttgttcttgatcttaggaatcttggatttacttccatggctg

SEQ ID NO: 45365 - DNA, 252 bp, Glycine max
gcttagtgtcatagtgcagaaattacctccaccggaacctaagaaacctaagactattgaggttaaggttgcttgaacaacttgtagaacgaagttaaataaacgtttgtttccctctctagtagaagcaggggaagtaatgttttttctgatttgaaggtttttctgttctcaaagcaatggttttatggtattgtgattttgtgatgttgtaatcagatgatgctatatcagttgtttagtatttgctga

SEQ ID NO: 45366 - DNA, 204 bp, Glycine max
tcttgttgctcgcagtcattctggtagcatggcgatgccatggcgcaagattaccaaggtatcctctccgcatgaaaactggctatggtgagcgttcttcgagagtaacatgcgcaagttctagagctgctgtggaagcacacaacatccgagcgcttaaaaccattcctgaagcgtgcgttgctccaacaccggactacatta

SEQ ID NO: 45367 - DNA, 247 bp, Glycine max
caggagcgttggttggcggtgcgaaacaaagttagttgagagagagaggagctgaggagaatcaatcgagagaaatatgtctggtatcgctcgtggacgccttgctgaggaacgaaagtcatggcgcaaaaaccatccacacggtttcgttgccaagcccgagactctacctgatggcaccgtaaatttgatggtctggcattgcactattcctggcaagaccgggactgattgggagggtggatat

SEQ ID NO: 45368 - DNA, 279 bp, Glycine max
gtccccaaagtaagtacatccacacatcacaacacaaaacactctattactgttttctgtcctcactgtcccttcgttctcacaaagtcacaatggcaccccctctctctcttctcgcaccggagaccctcctcgcacggcggcctctactggtctcgtgtgcgttcttgggccccgccgacagaagcggcaaacgcgcaccgatctttccggcggctccatctcgccgagcaaagtccaagacaactacaaacagtactggtccttcttccgccgccc

SEQ ID NO: 45369 - DNA, 280 bp, Glycine max
acgtcgaggtgagctataagctagtttatcgtgaggagaatatgaagttgtttgttttctttgttgctgcagtagttttccgtagcatggccatgccatcggcgcaggctaccaaagggttccctgctccgaatgaaaactcggctatggtgagcgttgcttcggaggtaaaatgcgcaattttaggcttgctgtggagcaccaacatccgagcgcttaaaaccatcctgaagagtgcgttgaaccaacaaaggactacattaatggcgacaatttagat

SEQ ID NO: 45370 - DNA, 250 bp, Glycine max
gaaggatatagttttgaagagctatgcatcaagaagaagccattgagggagaagagaagttttgtgcaaaatccttgggaacagtaattggttttgccatttcaaagctgggaaagaacattcaagtatttcaagttcctttgtcaataagcaagacaatacactgtggaagagtgcagaatcttggagacaagcagtgatgtgtcataggctaaatttcagaactgcagtattttactgccatgaagtc

SEQ ID NO: 45371 - DNA, 259 bp, Glycine max
tttcaaacaccaatgatgatgctattcgcaatcatttagccccaggataatcaaagagtttcatattaccagtttgtttatctactttgctactatttactgtcttgggataatcacttatggcattgctattccatccgggctcttcattcctgtcatacttgctggtgctgcctatcgcgtctcttcggccggctcttcgaacgattaccgaactcgacagaggactctttgccttacttggagctgcttccttcct

SEQ ID NO: 45372 - DNA, 240 bp, Glycine max
cagctcagtgttgtgagctataagctagtttatcgtgaggagaatatgaagttgtttgttctctttgttgctgcagtattttggtagcatggcatgcatggcgcaggctaccaaggttccctctccgaatgaaaactggctatggtgagcgtctcgaggtaaaatgcgcattttaggctctgtggaagcacacacatccgagcctttaaaaccattctgaagagtgcgttgaacaacaaa

SEQ ID NO: 45373 - DNA, 247 bp, Glycine max
caaaatgataactattaattctgacatctttcccgcgagtcctctcacaaacttagcagctaccatcccagtcatacgatcaggagtgtcacgctctgggttgtattcaaccacgtctccaccaacaatgtgacactcctgatcgtatgactgccatggtagctgctaagtttgtgagagaactacgttgaaacgttgaccaaatcgatactctcaattctgactcgtgtgtgtgacatttagttta

SEQ ID NO: 45374 - DNA, 210 bp, Glycine max
ccgagcgcacttcctctcaccccgacacaaaacatggctatgcacaatcatcaaaccgacgagtaccccagcttcaagcttgtcatcgtcggagaagtgcgacatcgaaagagaccttcgtatagaagcatctcactagtgaattcgagaagaaatatgcaccgaccattggtatgaaagttcatccgttggatttgtgcacgagctgtg

SEQ ID NO: 45375 - DNA, 215 bp, Glycine max
  unsure (1)..(215): unsure at all n locations
atttccttctatgctatcacacatcatcaacaacaaaaagctcttgatagtactcaagcaagctaaggcattattatggcttatcaagtgttgctaatttgtttggtctccaccatagtgtttgcatacatactatggagaaaacaaagcaagaaaaaccttccaccaagtccaaaggcctttgcnataattggcaacctcaaccttgtgtccca

SEQ ID NO: 45376 - DNA, 239 bp, Glycine max
gcaagaatggcacttcgttgcttggtgatgtccctttctgttctcttcactcttggtcttgcgagagaaagccatgccagagacgaagatttttggcatgctgtttggccaaacactcccattccaagttcattgcgagatcttctaaagcctggccctgcaagtgttgaaatcgatgatcaccctatgcaaattgaagaaacacagtacccgaaaaccttcttctataaagaagacct

SEQ ID NO: 45377 - DNA, 236 bp, Glycine max
ggatttccagcctccaggctgattcgaattggtgggagatggaaaattccgattcggcgcagtgcgttcgagttgccgtcaacattcggcctctgatcacatcggagcttatgctcggatgcacagattgcatctcccttgttcccggtgaaccacaggtgcaaattgggtcgcatgctttcacttatgactatgtttatagctcgggatctccatcgtctacaatatatgatgat

SEQ ID NO: 45378 - DNA, 235 bp, Glycine max
tgcaagactggcacttcgttgcttggtgatgtccctttctgttctcttcactcttggtcttgcgagagaaagccatgccagagacgaagatttttggcatgctgtttggccaaacactcccattccaagttcattgcgagatcttctaaagcctggccctgcaagtgttgaaatcgatgatcaccctatgcaaattgaagaaacacagtacccgaaaaccttcttctataaagaa

SEQ ID NO: 45379 - DNA, 257 bp, Glycine max
cacagataatggcaattggaacacttgcattatgctacaataacattgaggtcttcagaggtgtagttaaaatgaggcgaggtaagagcaaatattttgatactaatttccttgtgatttgattttgaggcatactaaacataaagtcaaacttggtatatgtcagggaatgtgtctttgaagtcctaggaattgtgaattgctgcaatttgtatttcatgttatttcatgctcaatcaatctccataaaattaatt

SEQ ID NO: 45380 - DNA, 243 bp, Glycine max
cgcaccatggggcggagacctgcgaggtgttataggcaaattaagaacaagccataccccaagtcacgtttctgccgtggtgttcctgatcccaagatcaggatttatgatgttggtatgaagaagaagggtgttgatgagtttcctttctgtgtccatctggttagttgggagaaggaaaatgtttcaagtgaggccctggaagctgctcgcattccttgcaacaagtacatggccaaattt

SEQ ID NO: 45381 - DNA, 245 bp, Glycine max
caactttgttactctcacacatgtctcgctccgtgcctttggtttcaaccatttttgtcttgcttctgcttctggtggccactggtaggcctttctttcttgacgctaattaatatctacacttttgggtttcttttattgtcatcttagttagttaacaagctattagctactgttcttacaccttaatttcttcacgtacttgtgtgtaatattttattgttcttgatcaatattcctggtat

SEQ ID NO: 45382 - DNA, 274 bp, Glycine max
cttaagtagtaccccgactaagagaaagcgagttccttttgcatcaagtggtgaaacaagtacaagaacagatcttgttgttatgccatctaaacaatcttggtggagtaagaagtttgatgagttcagggagaaggtgaaaggccatccagtatccaagcgattccttaagtatagtgacccagtgaagacaaagggccaggagatagtagaggacttgcgggaaagatatgagaccagtgacagccccattattcacaaaatacaggatatc

SEQ ID NO: 45383 - DNA, 273 bp, Glycine max
tcgcatggattgttgagcattcacatgcctgcatattctgattctattattaagggggtctctacagtcatggtttcatactccagttggaatggtgtaaggatgcatgcaaatcgtgatctagtcactggtttcctcaagaatacccttaagtttaaggggtttgtcatctcagattggcaaggtattgacagactcacatcaccacccagttcaaattacacatactctgtccaggcttccattgaagctggtgttgatatggtgatggtc

SEQ ID NO: 45384 - DNA, 254 bp, Glycine max
cttcttcggaggtaaaatgcgcaagtcttaggcttgctgtggaagcacacaacatccgagcctttaaaaccattcctgaagagtgcgttgaaccaacaaaggactacattaatggcgaacaatttagatcagactctaaaacagttaaccaacaagctttcttttaggctagtgaacgcgaactccatcacagcgacatgtttatttcgggcagatataccgcggtcactcgctaatatcccatactatgaaaa

SEQ ID NO: 45385 - DNA, 262 bp, Glycine max
caattgcaagaatggcacttcgttgcttggtgatgtccctttctgttctcttcactcttggtcttgcgagagaaagccatgccagagacgaagatttttggcatgctgtttggccaaacactcccattccaagtcattgcgagatcttctaaagcctggccctgcaagtgttgaaatcgatgaccaccctatgcaaattgaagaaacacagtacccgaaaaccttcttctataaagaagaccttcatccaggcaaaacaatg

SEQ ID NO: 45386 - DNA, 168 bp, Glycine max
ggctcgacctcgacgacactgaaacattccaagatgcaaatctatgttaagacactcactggtaagacaatcacccttgaggtggagagttcagataccatagataatgtaaagtccaagattcaagacaaggaagggatcccaccagaccagcaacgtctcattttt

SEQ ID NO: 45387 - DNA, 164 bp, Glycine max
  unsure (1)..(164): unsure at all n locations
cggcttcagcggctcgagattctagccaaggaagcagagaaaaccaacctacaagctgaaatcaaacgaaaaccacgaggcagagatcaggctattgaggaagagtatggcattcaaagcanatccaatgccaagtttctataaggaaccacctcccaaagttg

SEQ ID NO: 45388 - DNA, 218 bp, Glycine max
  unsure (1)..(218): unsure at all n locations
ggtttaaacgtgaagtcacagcaaatcaaacagcctaacttcaacgaggtatcaacgtcacagttcaagagaagaagagagggaaaaaccgattaccgtgccaggattcggttgattaatcaggacaagaacaaatataacanccgaaatatcctttgttgtcgttcagcacaagacatgtgacaatatatcgtacatgcgggaatgtctgtgacata

SEQ ID NO: 45389 - DNA, 270 bp, Glycine max
cttctaaagcctctccctgcaggtgctgaaatcgatgaactccctaagcaaattgatgatacacagtacccaaaaacattctctataaagaataccttcatccaggcaaaacaatgaaagtacaattcaccaagcgtccctatgcacaaccttatggtgtatatacatggttaacggatattaaagacacctctaaagaaggatatagttttgaagagatatgcatcaagaaagaagcgtttgagggagaagagaagttttgtgcaaaat

SEQ ID NO: 45390 - DNA, 290 bp, Glycine max
caattatcagatatataaaattcttgcacaaaaagaagcaacgcaaggttgcagaatactacaagaaacaagagaggctccttgaagggtataatgacatggatacaatgactgaaactggttgttttccaggaagtctcactgaggatgaaatgaagcaattagcaagaagtgagagcctggcagttaatgtgtcaaatgcagctaacttggtgctatttgcagcaaaggtttatacttccattgagagcagatcattagcagtcattgcttccactatggattctctc

SEQ ID NO: 45391 - DNA, 285 bp, Glycine max
ctattatcatccgcagctgcttttattcgcaccgcaaacagtgagccatggccgtcggaaagaacaagcgcatctccaaggggaagaagggtggcaagaagaaggcagctgatccctttgccaagaaggattggtatgacattaaggctccttctgtttttcaagtgaaaaatgttggcaaaaccctcgtctctcgtactcagggtaccaagattgcttctgaaggactcaagcatagagtgtttgaggtctccttggctgatcttcaaggggatgaggatcatg

SEQ ID NO: 45392 - DNA, 276 bp, Glycine max
ctacttttggtgaatctgaagagcaagggtattgatggctccagagttcagaaggtgttggaatcagttcacattgcagctaacaaaaacacagttccaggagatgtgtcagctatggttcctggtggtatcagaatgggaactcctgctcttacttctaggggatttgctgaggaggattttgttatggtggcagagttttttgatgcagctgtaaatttagctgtgaagatcaagtcagagacaaaaggatcaaaattgaaggacttcttggcc

SEQ ID NO: 45393 - DNA, 277 bp, Glycine max
  unsure (1)..(277): unsure at all n locations
ggacctttaagcttcctaatgcgatgtantagattgagtagtagcttgagctctctcaagacttctgtatgagtgtatgaacagctttattgtaattaagatgaagccctgactagctgtaagattattacatgnttaggattaatgagagggaatatgttgaggtagggatagagaattgttggaataattggagagtaatggagtgatatgcttggagagtagagaggtgaaagtaggagctttaagcttcgtaataggatgtagtagattgagt

SEQ ID NO: 45394 - DNA, 268 bp, Glycine max
gatttgcatctccctgtggtgtctcatgagtatggaaatggtttggctgtggagagtgcttggattgggaccagggattatagtgctcagttggtggttccggccgcggtggagtttgttaaccggtttgaatcagggattgaggggatcaagaagaggaatcatgaggctgttgtggagatgggggagatgctggcgaaggcgtgggggactcggctagggagtcccccgcatatgtgtgctagcatggttatggttggcttgccgg

SEQ ID NO: 45395 - DNA, 287 bp, Glycine max
cgctagtccgcgcgagcagatgccttccctccaaaccacgtcatcaaaccaaaacccttcatgggtggatgagattcttgagttctcagtggcgaggcgcggggccccccggcggtcggtgagcgactccgtcactttcctggaggcaccattgctggaccaccatcattgcaaaggtggcagtgttgttggtggtggcggcggcaacaacgagttcgagaggttcgatgatgaacaattcatgtccatgtttagtgatgaagcttcagggaacaataacaataata

SEQ ID NO: 45396 - DNA, 254 bp, Glycine max
cgcaaatcccaacggtgaaagtgtgagcaattaaatttcaaaaaccatatccaattttcatgaaaatccaacggttaatgaaactaggatcgtagttttaccgagacagttttgggtttctgcgggaaaataaaaggctacaatgtgaagggtttttctctaagctcagatatggttttaaaattcccaactgtgagaacgtttggacttgggttgtgaacgcgctactaagatttcacggtgatccacggtga

SEQ ID NO: 45397 - DNA, 257 bp, Glycine max
ggcttccactgcacatcatcccctttcaagaaaattcagattcaaagagatgacactagatttgacacgtatgtggttggaaaagaggatgctcctggaattgttgtgattcaggagtggtggggtgtggattacgaaattaagcaccatgttgtgaagatttctcagcttggtagtgggtttaaagctcttatcccagaatcaccgcttcatgcgttatctggttgcacttgttacattttgcatctagtctcctc

SEQ ID NO: 45398 - DNA, 144 bp, Glycine max
caatcttctgatattggttggtttaatgtagcaaggatgtttcctttcgggtaaaagggtcaaaagataatggtggctatggtggatatgcatcataatgtgttggatatcaacagaatcaacagtgttggaggagatagttga

SEQ ID NO: 45399 - DNA, 159 bp, Glycine max
cgaagtttgggctgaccaccgctcagattcttagggttgtgaagaacctggacctcgcgggcatgctggattggctgcgactgacacattttcacaccggttctcagattccctcaacagcgttgcttgacagatggtgtgggcacacgctgcgcagat

SEQ ID NO: 45400 - DNA, 254 bp, Glycine max
gcggcaatgttacatcacagaagagttggatctttctcaccttcttgaaaggctaattcaaggaaagggtcagccaaacaccttgactcaatcagagaaactagatctatggagtagactcaaaattctgagttttacaagaatgacattgtcagtatgggctacaacaatgcttagcttatatacaaaagttcaagtcaatattctaggaaggcatttatacattgatacagcacgtatctcggagtctctga

SEQ ID NO: 45401 - DNA, 232 bp, Glycine max
cgcggactggcgcgggagtacgaagtggaagagtaggtttagagacggtgggccgcagtggacgggtgcacttcccattgggaacggacgcttgggaggcatggtctgcagccacgtccacgccgaaaccataaacccccatcaagccacgctctggactaggacacccgtagactacactaattccaatgctccaccagcaactactcacgttagaccactcttcaccgac

SEQ ID NO: 45402 - DNA, 238 bp, Glycine max
ctggattacaaggatggaaagtactctcaggttgtgtctaatgctcttcctgttcactattctatccgggatcttgaattgcctagggttcgccaccacagtcatcacactatccaactctgcagcactcaagatcccggattggtttttgaacaggaagaaggattacaaggatggaaagtactctcaggttgtgtctaatgctcttgatatgaagctcagggatgacttagagaga

SEQ ID NO: 45403 - DNA, 177 bp, Glycine max
gtaaacgggagctcgctagtagtaatgtctaagggcacacagtatttgcagcaatcatataaagttagtgactcatttcctttcaagtggattaacaaaaagtggagggacggcttttacgtgacttcaatggccacctcagggtccagatggggagtccacatgtctcgtggtgca

SEQ ID NO: 45404 - DNA, 199 bp, Glycine max
tgagacacaatacagagtgagttgttgctccttcgccacaactctctgccaacatgggtatctccagagattctatgcacaagaggcgtgccactggtggcaagaagaaggcctggaggaaaacgagaaagtatgagcttggtcgccagcctgctaacactaagctgtcaagcaagaagacagtgaggaggatcggtgt

SEQ ID NO: 45405 - DNA, 165 bp, Glycine max
catctagtagtgtgagagagagtggtttgtctgtctgaacttaagtagtaaagatgtctggaatcatcggaggaaacaagggtcacaagataaaggggaacttggtgattatgcgaaagaatgtgttggatatcaacagcatcaccagtcgttaagggtgtcatt

SEQ ID NO: 45406 - DNA, 238 bp, Glycine max
ttttccctcactttctcgctcgccaaacgcccctctctctcctccaatggccgaccagctcaccgacgaccagatcgccgagttcaaggaggccttcagcctcttcgacaaggacggcgatggttgtattactactaaggaacttgggactgtgatgcggtcactagggcaaaacccaactgaggcagaactgcaggatatgattaatgaggttgatgctgatggcaatggaaccatc

SEQ ID NO: 45407 - DNA, 207 bp, Glycine max
gtgatttcagtgagtgatcggtgttcacttgatctcatcataatcgtcagcgtcaattgaagcatatgccgatcagaaacatcgccgtcggaaggcctgaagaggcgactcactccgacacgttgaagccgcgtttggctgagttcatctcaaccttcatcttcgtgttcgcaggctcaggctccggcatcgcctacaacaagttca

SEQ ID NO: 45408 - DNA, 225 bp, Glycine max
  unsure (1)..(225): unsure at all n locations
gtcttcttcttcttcttgtgcatggcaactgaaccgagtgatagaatacagagggacacgcttgtcgttagaaagccatgttttggcctcctaacgggttgcccgcaatgcttatctgcttacatttctctcagattctctcaatttgccttcaacttggacctccgntctaantaccctgatgcggatcaggttgcttgatttgaggttggtgattctgtgacg

SEQ ID NO: 45409 - DNA, 211 bp, Glycine max
agggtgcttagtgtaaccgtgcagaaattgcctccacgtgagcctaagaaacctaggactattcaggttaaggttgcttgaacaacttgtggaacgaagtttaataaatgattgtattccctttctggcagaagcaggggaagaagtaatgttgtttgaaggataagatggatcttatcttttgagttgtttcaaggtttttctgttctta

SEQ ID NO: 45410 - DNA, 245 bp, Glycine max
gcgtctggttttggcgggaagcagggagagaggaaaggaaagtagcgaaaaatggcgaacaagctcatcaaccagatgggattgcccaaatccattgttaatatcttcactgctcgcaacattatcacgccaaggatgcattatctcacactgaatttgagttgatggaattgctggacgttgggaaggaagaagtaacatccgcaatggctcatgttagtgaagtcgtgtgtccaccgtgccaa

SEQ ID NO: 45411 - DNA, 269 bp, Glycine max
gtagtagtacactagtacagtgaactcttctgttcattttctttgcaaccaacacgaaagcttcgttatcatcggcaactacaagcatggactaagctatcagagtttaccacttacgcgaccctgaggttctgaagtggaggatgtggaaatcggagagccgtgtgaggaacaccgctgttggggataatttcattgatgtctactttcgcactggggtttataaagtcccctccttaccttacactccagtcatcaggtacacctga

SEQ ID NO: 45412 - DNA, 266 bp, Glycine max
gggtggttaaggaaatattgctgaagcggtactttagcaaggaaattcgaggtggcactcaattgccggagtcagatatagttaaatcttgtcgaaggttgttggatgagaggcaacagtttgaatgtgtggcgattctggaagctattaacgagagacctgacataagtgaagggttgagaaaactacattgccgttcgcttatttttgttggggatatgtcaccatttcactcggaggctgttcacatgacttcaaagttagac

SEQ ID NO: 45413 - DNA, 268 bp, Glycine max
gtttgttgtgagctataagctagtttatcgtgaggtgaatatgaagttgtttgttttctttgttgctgcagtagttttggtagcatggccatgccatggcgcaggctaccaaaggttccctctccgaatgaaaactggctatggtgagcgttacttcgatctaaaatgcgccagttttaggcttgctgtggaagcacacaacatccgagcctttacaaccattcctgcagagtgcgttgacacaacgctggactacattaatggcgaa

SEQ ID NO: 45414 - DNA, 252 bp, Glycine max
atctgcttcaaaatgctgagtttgatatcaagaaagaagctgcttgggctatctcaaatgctacatccggtggttctcatgaacaaatcaagttcctagtaagccaagggtgtattaagcccttgtgtgatcttctcatctgtcctgatcctagaattgttacagtttgtctggaaggccttgaaaacatcttgaaggtgggagaagctgataaaaacataggaaatactggtgatgtgatctatatgccca

SEQ ID NO: 45415 - DNA, 272 bp, Glycine max
gtcggcagcgatgacaaggctagctgtgcggaatcctgggcttctgcattgatttcagaattggagcactttagaagcggaaaggagaaggaaccattgtcatgcaaaagtgttggagcttcagacatagaccttatggatgactttgttgaaatggaaaatttagcagtggtctctgttgaaaaagccactgaaatctcgtctgcttctctgaacgccattagtgagatcaatggcttctcagggattgacaaaaagaaaccatcctgaag

SEQ ID NO: 45416 - DNA, 241 bp, Glycine max
taaaggccatccccattaatcgtcatatgagccagtcaaagagacttggagccttgaataagttcaaatctgggggaatgccaatatctcctctgtactgatgtagctagtagaggactggatattccgactgtagatatggtgattactatgacatcgcacaaactccaacgatatatacatcgcgtgggaaggatgctcgtgcagggcgctctggggtcgccattcccctgtaatcagt

SEQ ID NO: 45417 - DNA, 257 bp, Glycine max
ctcgactctatctctcttcgttttgttcttccttgcgctcctcctcgttcgttcgttctccctcgcgtagatcggcaatggcggagaccgagacgtttgctttccaggctgagatcaaccagctcctcagtctcatcatcaacaccttctactccaacaaggaaatcttccttcgtgaactcatcagcaacgcctctgatgctttggacaagattagatttgagagtttgacggacaagagcagctcgatgctcagc

SEQ ID NO: 45418 - DNA, 282 bp, Glycine max
gtcgatagtagagaaaaatatatccaactaatggctacccttattgctcctagccaccattcccgggttgaggatgctgaagctctccgaaatgctttcaaaggatggggggctgatgacaaggccattatagcaatactgggtcacagaaatgttcatcagaggcaagaaatcagaaaagcttatgaggagatttaccaagaggatctcatcaaacgcctgagtccgagatctctggtgactttgagagagctatgtaccggtggatgttgcagcctgcgg

SEQ ID NO: 45419 - DNA, 280 bp, Glycine max
gtaaaacgtagttactggtttgacatatataagaatatcgacaaaattccactcgttaattgccctattctcataattcatggaacttcagatgaagttgtagattgctcccacggaaaacaactgtgggaactgtgtaaagagaagtatgagccactatggctcaaaggaggaaaccactgtgatttagagcaatttcctgagtatatcaggcatctgagaagttcatagccactgttgagaagtctacatcccaaagatacagcttcagaagaagcat

SEQ ID NO: 45420 - DNA, 266 bp, Glycine max
gacaccttgaggcaagcatacagaaaaattttcaagaaagagaagattggcaacattgaaacccttttgataggatcagcagctggtgctatttcaagtagtgctacctttccgctcgaactggctcgcaaacacatgcaagtcggagcccttagtggaagacaagtatacaaaaatgcgattcatgcccttgcaagcattcttgaacaagtaggcatccaatgtatgtataaagggttgggcactagctgcatgaagttgggtgc

SEQ ID NO: 45421 - DNA, 259 bp, Glycine max
tcaaacttcacagatacaaatgttgcctagcaattctaggttgttatcatgggagacctatgatgaagatgtatcttccctagccgaaagttccaagattacagcttctggactattagaacagatcagcactaccagagacactagtgactatctatggcatataaccagtgctgacataagttcatcagaatcctttcttagaggaaggaacaagcccagcattactgtgcattcttcaggccatgctgttcatgtg

SEQ ID NO: 45422 - DNA, 257 bp, Glycine max
cggagttaggttctgcacgctctgcttccagcgagtgttctttcttcgtttcaacaccttaatttgcacacgctgcttcttacaattgagaaatggcacaagaaacctttctattcacatctgaatctgtaaacgagggtcaccccgacaagctgtgcgaccagatctctcatgcagtgctcgatgcgtgccttgaacatgaccctgacagcaaggttgcctgtgagacctgcaccaagaccaacatggtcatggtc

SEQ ID NO: 45423 - DNA, 269 bp, Glycine max
gaagtgttggatgcatttctatttctaactaattattgtgcttattattattgttgagaaagaaaagaatggcaaagttactaaaattctttgagttgaacacaggggccaagattccttctgttgggttaggcacttggcaagctgagcctggtgttgtagccaaagctgtcaccacagccattctggttggatacaggcatattgattgtgctcaagcgtataacaatcaagcagagattggttctgctcttaagaagtttttgatg

SEQ ID NO: 45424 - DNA, 270 bp, Glycine max
  unsure (1)..(270): unsure at all n locations
atagcccaagccctatacaaccaaaccctaacacacacccatttgattcagtttccatggctagcctcaaggttgcatttttcgctgcagtgctctgcatggttgtggtgagtgcacccatggcacatgcagctatcacgtgcgggcaggtgacgaatagcctgatcaattgcatcggttacctccagaacggaggaccgccgncgtcgggatgctgcaacggagtgaagagcctcaatgccgccgccaagaccaccggccgaccgcaga

SEQ ID NO: 45425 - DNA, 148 bp, Glycine max
caaagctgctgcaaactccaatcttcatcctctaacatacagcttcacataggttgtttccaacttcaaatctcacggctcaaacgtgcgggaccttgcagtcctctcagtaggatacaccacagggtttctaaagtgtagcaacttt

SEQ ID NO: 45426 - DNA, 275 bp, Glycine max
tcggctcgaggcaactcatttcgttagagtgagagagagatagagagagagagacgggtatcaccgtgaaacgcagaagccgccaatacgcacgcactcattcttgagaaagctctatattcgttcgaccatggcactctcttctcgtcgctcatgcatatccatattgatctatggctgtcaaatacttctgtaaaaggcgcatgctactccagttcgtctatttgctagagagtctgcccctcctgcccttacgggagatcagatgctgaaga

SEQ ID NO: 45427 - DNA, 264 bp, Glycine max
ctccgataggcggcgccggcgacttcgccagacagttcttcgccgagtcgaagaagctctggtacctcgccggccctgccatcttcacctccgtctgccagtactccctcggcggcgtcacccaagtcttctccggccacgtcaacaccctcgccctcgccgccgtctctgtcgaaaactccgtcatcgccggcttcagcctaggcatcacgtttggactgggaagcgcgttggaaacgctatgtggacaagcttcggagcggg

SEQ ID NO: 45428 - DNA, 256 bp, Glycine max
tgatctatcatcttctactcgtgttgttaattaaccactttgtgtttgagaataagggttacccattctactatgggtttctttgtttgcctcttattttatctagttagagatccttttatgaaacgagtgatcagtgtgaaaaaaaaaaaaaaaaaaaaaaaaaaaaaaaaaaaaaaaaaaaaaaaaaaaaaaatttaaaaaaaaaaaaaggggggggccccgagaattttcccccccgccgggggtttttttc

SEQ ID NO: 45429 - DNA, 256 bp, Glycine max
ttcatcggaggtggattgctgggcttatctacgaggttgtcttcatcagccacacccacgagcagcttcccagcactgactactagaggggaaaaatgaaataataaaaaaaaaaaatgtgtattattgaatttctccggaatcttcttctgtgtatggttttccttcctttgtgttttctttcctgttgaatcggtggccgttgatctttctctggatggttgatgatcctgaagttttcttttaattaatttaa

SEQ ID NO: 45430 - DNA, 263 bp, Glycine max
gttcaggtgacccatctcgcgggagtcctcggttttggtggattttgcttccttttaggggcacgaccccaagatattccctatgtatattgtttgttttacgtcatctttgttcctcttcgttggatatactataggtccaagaaatggcattactatctactggatttttgctattatgccaatacaatatttttgattgatcttcttttttactcatcaaatgagaagcttttcatggtttgcttttcttttgcggaggg

SEQ ID NO: 45431 - DNA, 261 bp, Glycine max
gtttttcttcctttctctttctttttcttctttgccttaaacaagcataactgaagttcaatggaagtttctgatatttgatcttgtccttcatcatagcataccaaagaggatctgcaattggagaaaagcatctgcttgtaagatttgcagtagacataggaggattagttggaccagatggttccacacactatggtgcacctgatgtcactttgacggcctgcctccctaacatggtggtgatggttccttctgatg

SEQ ID NO: 45432 - DNA, 271 bp, Glycine max
cttggaagaaagcttgtacactgcagtacccacactgccagtatcgttatcttgattgtcaaagcatgggtgacccagataggattgtctggttaagatcaagcaatctctcacgtctatgtgatcagaacagtgatttctttcaatttggcatttttgttgatgctctcaatttggaagttacagcttcacaattcttcaacaaatactgctactgtctatggtggggactaaggaatctaagctcgtgggacagttctcttaacaggta

SEQ ID NO: 45433 - DNA, 189 bp, Glycine max
ttctttctctctcacttagtcaaagggactcggtgttcttctgtcatgttatttagaaaagcaagatggtgaagatttgctgcattggtgctggatatgtggggggtgctactatgggagtcatggcagttaagtgcgcatctattgaagttgtggtgttgatatctgtaaatcccgcattgcaggttg

SEQ ID NO: 45434 - DNA, 266 bp, Glycine max
ctgtcactcttggggaacatggttccagatactacaccaagagtttcaaaggatcggtagatgctttccatgtcaatacagttgatacaactggtgccggtgactcctttgttggtgctttattggccaagattgtcgatgatcagtccatacttgaagatgaaccaaggttaagagaagtactaaagtttgcaaatgcatgtggagctattacaactacccaaaagggagcaattccggcccttcccaaagaggaggctgcactg

SEQ ID NO: 45435 - DNA, 258 bp, Glycine max
aaaagtggtccttgtcgggcatagctttggagggatcagtatagcccttgcaatggacaaattcccagagaaaatatcacttggaattttcctaacagcttttgttcctgatacccaacacaaaccatcacatgtcttagaagagtacattgatagatacccatataccggatggatggacactgagctctggaatagtggaggcaaaacaacattgctttttggcatcaaattcttgtccactaagttctatcaact

SEQ ID NO: 45436 - DNA, 254 bp, Glycine max
attgaatctcagaattctctaaaagagatctttttctgctctttgaagaaagaagggtctttgcttgattttggagatgtctctgctctcagatctcatcaaccttaacctctccgataccaccgagaaggtgatcgcagagtacatatggatcggtggatcaggaatggacctgaggagcaaagcaaggactctcccaggaccagttagcgacccttcagagcttcccaagtggaactatgatggttccagca

SEQ ID NO: 45437 - DNA, 252 bp, Glycine max
  unsure (1)..(252): unsure at all n locations
gccaattccanaagacccttcgaagagaggtaatcttaggatcaaattcaacatcaaattcccagcaaagttgacgtcagagcagcaagccggaattaagaaacttctgccgtattgaactgtatcttgttgtgtatagtcttccaatttgctctcattcttctctgtctcctcttttattttaggtggctttcgtttgtgtagtttgcgtgtaatatgtttagagttgggagaggcaatggtatgacattt

SEQ ID NO: 45438 - DNA, 279 bp, Glycine max
cgagggccacattgtgacaaattatcacgtaattggcaatgccctttcaagaaacccaaattctggtgaggttgttgcccgagttaatattctagcatcagaagggttacagaagaattttgaaggtagactcattggagctgaccgtttaaaggatcttgctgtcttgaaggtagaagcccctaaagatattttaaggcctatcaaggtgggtcaatcgtcatctctaaaagttgggcagcaatgtttggctattggaaatccatttggctttgatca

SEQ ID NO: 45439 - DNA, 273 bp, Glycine max
cttttatccggttccttatttccagggcaacagacatcctcgtatccaatatccaagaggctagctttcttgcttactggccttcatgcattgctgctgcagccatactcactgcagctaatgaaattcctaattggtctgtggttaagcccgaaaatgctcagtcatggtgcgagggactaagagaagacaaagtaatagggtgctaccagttgatgcaagagcttgtgattaaccataaccaacggaaactccctactaaagtgttgccgc

SEQ ID NO: 45440 - DNA, 277 bp, Glycine max
ctgcagtctgcaacaacttcttcttcagttcttcacaccaatcatgcccacgtttgcaacctccctcgcctccaaagctagaattgctaggagcagcactcaacagattggaagtagggtcagttggaacaggaattatgctgccaaagacattaagtttggtgtggaggcccgggctttgatgcttaagggtgttgaagagctcgccgatgccgtcaaagtaaccatgggccctaaggggcgtaatgtggttattgagcaaagttttggagcaccc

SEQ ID NO: 45441 - DNA, 271 bp, Glycine max
ggttaacaacttagatgatgcacacgaacggattgacacggccattgcaactgctttgagagacagcaagcctgtctatatcagcatagcctgtaacttgtctgccatccctcaccattccttcattgatcagcctctcccattttatttgactcccaagttaactagtgaaaggtgtctggaaattgcggtggaaataacatcagagtttttaaataaggcagtgaaaccagtgatggtgggtgggccaaggttgcgaatggcaaaggct

SEQ ID NO: 45442 - DNA, 283 bp, Glycine max
aatttctctctcctctctctctctacaaatccttctttctttcttctcttcgctgctcactgtagccatggctttcagagtaggaggagcgggagggggaaatgcctcttctggcatgggtgttgctgagcatagtgtaaacaccttcctggaattgcagaggaagaaagttcatcgctatgtgatttttaaaattgatgagaaaaagaaagaggttatcgttgaaaaaactggaggccctgctgagagctatgatgatttcactgcatccttgcctgaaaat

SEQ ID NO: 45443 - DNA, 268 bp, Glycine max
cttttgttctgcagtagttgagtttgatctctttagttgcttcagcttctctgataaagtgatacttgattgctatgtgttttgttctgctgtgatggactggattctttgtcattggaattgctgatttgttgtcacagttgattttagtaggctcatcttgtttttctcccatgtcttcaagtatcctacaaagccatatagcttgactcgttgcttcagcagctgccacatactctacttctactgttgattgtgctattgtagc

SEQ ID NO: 45444 - DNA, 268 bp, Glycine max
cctctctctctttctctttctctctcatccagatcttgcaaaaaaaaaaaaacacaatggcagcgagcgctcccattccacgcgaagagttcgtgtacatggcgaactggcggacaggccgagcgctacgaggagatggtggagttcatggagaaggtctccgcctccgccgagagcgaggagctgaccgtggaggagcgcaacctcctctccgtcgcctaaaagaacgtaatcggcgctcgccgcgcctcctggcgcatcatctcct

SEQ ID NO: 45445 - DNA, 271 bp, Glycine max
cgaatgatgaatagagagtagccaaaatgggcatatggagaaacgagatttcagatgaagcaaagatgcagctattgctatcaaggccattggtatctgtaaatgtcactcgtttcagtgtgctgctatgtatgtcaagtgcacttgacacattttgtggtcaatcatgtggagcacagcattatcatatcgttggcatacacatgcagagagtcatagtgatcatcatgcttgctactataccagtgtcatcaatttgggcagcttgagg

SEQ ID NO: 45446 - DNA, 273 bp, Glycine max
gatgctttcacatccagatcagagctttttagggcagaatcaaaatactggaatgaaataatagcaagctatgttcgtgttttacactggaaagaaatcagattaagaaatgttatggacatgcgagcaggttttggaggatttgcagacacattgattaatcagaatcttgacagctgggttatgaatgtggttcctgttagtggcccaaacaccttgcctgttatatatgaccgtggattgattggagttatgcatgactggtgtgaggca

SEQ ID NO: 45447 - DNA, 257 bp, Glycine max
aaacccccaagtggggtccgcagaggtgctcaaccagtgggagaacgaagggaggcacctcacgaagtgggagctttcaagagtcgttaaagagttgatgaagtacaagagatttccaagagccctcgaggtatatgactggatgaacaatagaccagagcggtttagagtttccgagagtgatgcagcaattcagttagatttaattgcaaaacatcgtggagtttctagtgcagaagcattctttctgagtctgg

SEQ ID NO: 45448 - DNA, 298 bp, Glycine max
cgagtacatgcatcataagatgaactcaagtgatcaaaacaaaactaagaaaaggtggtggattgggaagattgtgaagtgtggaaccttcaataaacaaatgagaggtgggaaacgaccagaaaatgagggttacaacatgcttaagcaccagaatatcaatggccttgcttccccgggtctcatgggaatgctctcacctctgcgcctcttctctccccgtcattcaccccgtcgttccttcggttgagaagtaacaaaaattattacaggatctataaaccattgtatatttagg

SEQ ID NO: 45449 - DNA, 294 bp, Glycine max
cacataacccactttctcttgatttctctctctgttgaagaattctattcaatttcctctgtttcagatccaagtcgggtattcgaacccagtcctgcatcagaatggaagggagtaacaccaccgtgcccagcattgttgtctatgtcactgttcccaacaaagatgcaggtaagaagttggctgacagcatcgtcaaagagaagcttcccgcatgtgtcaacagggtaccgggtattgaatcggtgtaccagtgggagggaaagatccaaactgattcgaggaacttcttat

SEQ ID NO: 45450 - DNA, 302 bp, Glycine max
cgtcacagggtaaagagtatgtatttcttgccaattcagataacttgggagctatagttgacttgatgtacttgactcattgatgtagagatcttaaatcatttgatccagaacaagaatgaatactgtatggaggtgactcccaaaacattggctgatgtaaagggtggcactttgatttcttacgaaggaagggttcagcttttggaaattgcacaagtcccagatgaacatgtcaatgagttcaagtcaatagagaagttcaaaattttcaacacaaatcatagtcggtgaacttaaat

SEQ ID NO: 45451 - DNA, 294 bp, Glycine max
cttcatatgagcaaaaagtaaacagaactgaacaactagtaatgggagatccttgcttctttgtggtcttatcgtccttgctgctcctcatagttagtacacaaacaagctcaggtcaacttactcgcggcttctatctaaacacatgccccaatgtggaacagttggttcgttcagctgtggagcagaagttccagcagacctttgtgactgcccctgccactcttagcattttcttccatgattgctttgtgaggggttgtgatgcttccattttcttgcatctccaaacaa

SEQ ID NO: 45452 - DNA, 301 bp, Glycine max
cgatagcaagagagagaaaaagacagaggagagacgcactgctgcaagtgcaactccaagaagcgcagtgccaagccaccatgtttcaacattcaacagaagcctttttccttccacttttctctttggacttggttcttctgcttaccaggcagaaggagcagcaagtgtagatgggagaggaccaagcatatgggacacctacactagacagcatactgaaaagatttgggatcatagcaccggtgacatgggagctgatttttatcatcgatacaagggtgataaaaatagcgaaaga

SEQ ID NO: 45453 - DNA, 261 bp, Glycine max
tcggctcgagctcgtctccttgcggtagctttaccgcattcttctagatttaaagacactgggtaaggaaaagcgtcacatcagtactgtggtccttggccatgtcgactctgggaattccactaccactggtcacctgatttacaagcctggaggcattgacaagcgtgttattgagacgtttgagacagacgctgctgagatgtacaagaggtctttcgagtatgcctgggtgctggccccccttaaggctgagcgtga

SEQ ID NO: 45454 - DNA, 268 bp, Glycine max
ctctttcaagaagcatctgagtggatactataatgtaatatattcatatatagtcactccagcttcgaggatttatgactgctgaatcagaatgggaagcaacgtgaggtcaacaaggcttccactcttagcatcgactgcatcagggcatgctcaagtacaccgtgggattaatgcggacagcagcccataagctgatcgaatggacccaaaagagattcatgaccatatccctcaggctccatcaccagcagctgcattaataaga

SEQ ID NO: 45455 - DNA, 170 bp, Glycine max
caaggaggtggacgagcagatgataaacgtgtagatcaagaactcttcatattttctcgactggatatccctcaatgtcaagtcgaccgtgtgtcacattactcctagagggctctccatggcgtccagatgcattggaaactcgccatcgattcaggagatgttcacga

SEQ ID NO: 45456 - DNA, 220 bp, Glycine max
gtgctgcaatggcttcaagtcaggaggaggtgacccttttccggagctactggaagcccatgtgtgagcagggttcatattgcgcgcaagttgaagggatcgcaatacctatatgtcgaagtcaattcgaggagcacgagggaactgcctcgcagatccaacccagtgcgcaagaaggttccactgttgatgcactctgtgatgcccatagcagagcctc

SEQ ID NO: 45457 - DNA, 270 bp, Glycine max
ataatctcctggttacgatctgattataatattgcaattttcaaagcttatcagttagagtaacatcataagatgtcattgattccaagtatttacggtggagcaatgagcaactcgatcgatctaatatcaacgcgatatgagggatcacgttaaagagcttcatgtacatacgtcctctgaatgtgctgaaaagtctggaactgtgatggcacgtgtggattggaaggtgagacatgaggtacatgtggtcaaagctggtattccagg

SEQ ID NO: 45458 - DNA, 189 bp, Glycine max
atgatattgaagccattgatcctgatatgtaactttgactccaagaatgtgcttgtgaatgaccgagtaaaatgaacatccaagagtcaaagttacatatcatgatattgaagccattgatcctgattatttcaaaaatttgaaatggatgcttgagaatgatatcagtgatgttctggatcttacttt

SEQ ID NO: 45459 - DNA, 148 bp, Glycine max
ctataggctagtttatcgtgaggagaatatgaggttgttagttttctttgttttgaagtacttaatgtaccattggcataacatgggggctgatatcacaggaagcctctcgtagagcagactgaacatggtcagcgttcttaagagc

SEQ ID NO: 45460 - DNA, 187 bp, Glycine max
ctggtctaccaattgaccattctaacatggtcgatctttcaactcaaacttctgcactttgagcagggattggagcccaatgagtatatgtcctcctcatggaagggtgtcatcatcagtcatttccttattggaagcagttctagtaatgctcctgtagatgttggaggttttcataatgaatttg

SEQ ID NO: 45461 - DNA, 261 bp, Glycine max
gagaaaccccgctcactccctctctatcacactcccgtgtttacaaataaatcaaagacacaccagagatcaactctgaacaaaagggatcaaccctacacactagagatcaactctacacacaagtccaacacttgatgttaggataacatcaaggtggctcacaaaacactcaagtcccaaaactcaaaaaaaaaaaaaaaaaaaaaaaaaaaaaaaaaaaaaaaaaaaaaaaaaaaaaaagggggggccccccctttt

SEQ ID NO: 45462 - DNA, 258 bp, Glycine max
cctacttctccaaacaggcccaaaatttggactgagaactggcctggatggtttaaaacttttgggggaagagatcctcacaggccagcagaagatgttgcattttctgttgctcgtttcttccagaaaggtggaagtgtacataattactacatgtatcatggaggaacaaattttgggcgtacagcaggtggtccattcattactacaagttatgactatgatgccccagtagatgagtatgggttacctagactt

SEQ ID NO: 45463 - DNA, 248 bp, Glycine max
gattcttatgctaagaaggagaatgacatgatggttagagggggcattgaacgggctgacctgcttggcgtgctcaaagggaagggaacgaagatggataagcttaggtttgccatcatatatctcatttcgtcggaaaccattaatcagtcggaagtggaagctgtggaagcggcgctgagagagtctgaggttgatactgctgcttttcagtatgtgaagaagatcaagtcgttgaatgtttcgtt

SEQ ID NO: 45464 - DNA, 210 bp, Glycine max
ggaaatggtgagtctactagctctggattgttatctaaccccactagacctgatcttttgcactcaaaaggagaggaagtgggtggaagcagtactttgaaagacaagcttccccactggttacgagaagctgtgagctccccagccaaacttcctgatcctgaacttccacccacagtatcagccattgctcaatcagttcgcctgtta

SEQ ID NO: 45465 - DNA, 247 bp, Glycine max
gtggttctttgggaagttcaatgagatgaaatcaatgaaggcaaagtactacctagccgagaagccaagatcatcgttcgcaaagttttgccgggtcaagtattcgagacttgtccatcccaagatggagtcatcgttttttggcaaccagagtcataggaaccttgtgaatgcaggagggtttccagacactgaattctttgcctcattcgccgagatggcgaagagggtgtggcttctacactgc

SEQ ID NO: 45466 - DNA, 230 bp, Glycine max
gtcgcttgtttgcactgtttggtcaccctgctgaaagtgttagagatacagtagcaatgatcatgcgatcaattgcagaagaagatgctattgctgcagagtccatgcgggatgcttctttgcgtgatggtgctttgttgagacatttactgcatgcatttttccttccgtctggtgagcggcgtgaagttagtcgacaacttgttgctctttgggcagattcctatcaa

SEQ ID NO: 45467 - DNA, 199 bp, Glycine max
ggaacttgacacggatagaagtccaactgtgcaacatgttgtctccagaggcaccacaactctctctcgcttcttataattggtgtcttgtgttcatcgcaatgctggtggataactttctttatcccgtatcggcattccgctctcatttttctcaatctatcaactggtctggtattcggtactatttgaaagatgg

SEQ ID NO: 45468 - DNA, 249 bp, Glycine max
cactcactttcatccacttctccaaaaatggaagaacaagaagaagaagctccaactctgcgactcgagatcctgcaaggccctggcgagggcaaaaccctagaattcaaacccggcaccgccgtccgaatcggccgcgtcatcaaaggaaacaatctccccatcaaggactccggcatctcctccaaacacctcaccatctcaaccgaatccaacaaatggaccctccgcgatttggattcctcaaac

SEQ ID NO: 45469 - DNA, 268 bp, Glycine max
ccaaatactaaaaccggatgttattgggcctggagtgaacatattagcgggatggtcgggggcggttggcccatcaggcacagaagacagtcgcaaaactaactttaacattatgtctggtacttccatgtcctgtccccacataagtggtttggctgcgttgttgaaagcagcacatccagattggagtccaagtgcgatcaaatcagcactgatgacaacggcttataccaatgacaacacagagtcaccaattcgtgatgcaaag

SEQ ID NO: 45470 - DNA, 259 bp, Glycine max
gtggcaaatcattgcaagaatctaagttcttttcaggttggtctatttccagatatcatagagcgtaaagtggcacggcattttgaggaaggagatcttgtaagattctcatgcatttagttacttcctcaagcaatagtcattaatataaattgagacatgttggttatgtctatgtgggaaggtttcggcattagtaactggggaattttataccaagaaggagcattttccaggatttgctcgaccttttgtgttc

SEQ ID NO: 45471 - DNA, 280 bp, Glycine max
caagaagtatcatgatcccattgttcaagagagaattaaactgtggaatgatggattaaaggttgatgaagaagactggcttgatgttctggtctccttgaaagattccaacaataacccatcattgacattggaggagatcaatgcacaaattatagtaatatattttactcctctcttagtatgtttttcgtacttatattaacacttgcactcaaacacaaaccatattcatgaggatttttttcttctaataatcatatatgcatttattttttct

SEQ ID NO: 45472 - DNA, 272 bp, Glycine max
caaacatatgcatgaagtttggtttataaattttcttttccttatatattgaaaagtttatcctaattgactcttaatatcctgattatcatagaatgtgaatagattgttcattttactgcagtggaagagtttgtgcaaagccttcctagttgaagcaaaatggtttgcttctgggaacttgcccagtgccgaagaatacttaaagaatggaatagtaagctctggagtgcatattgtgatggttcatgctttctttcttttggggcatg

SEQ ID NO: 45473 - DNA, 269 bp, Glycine max
gaaggttgcttaatagaagaaccatgggtgaagatctcttttgggctgttagaggtggtggtggaggtagctttggtgtggttcttgcctacaaaataaagctagttcgagttcgtgaaaaagtcactgttttccaagttgggagaaccttagagcaaaatgccacagacatagtttacaattggcaacatgttgcgcctagcattgacaatgatcttttcattaggctcatcttggaggtggtaaatggtacacaaactgcaacaaag

SEQ ID NO: 45474 - DNA, 261 bp, Glycine max
gttctagatcgcgagcggccgctcgcgatctagaactagtctccggcgcctcccgccgccgcctctccaccgacgtgccggcgacgccgcggcggaacgcgtcttcgcggaggcgtggaagacagtgagccccaacatcgacccgccgaagacgccgctggcgtacatgaagccccgaccacccactccttcgactctcccctccaaactcaccgtcaacttcgtcttgccctacgcttctcaattggccgcaaaagaggt

SEQ ID NO: 45475 - DNA, 164 bp, Glycine max
cattgttcaccttctttagtatctgtgcataccgaaggaagcacatgggattctgagacttattcagtagcagcagaatgtttaatagatttatttgccaccttctttgatgtggtgaggtctcagctacctggcgtggtatcagtactgacagggttcattag

SEQ ID NO: 45476 - DNA, 134 bp, Glycine max
tgggacgccacctcacagctaatggttacagtgctccagaatttgagtatggaagttatacattgcaaagtgatgtctttagctttggagttgtaatgctagaactcctcactggacgaaaatcctttgacagc

SEQ ID NO: 45477 - DNA, 220 bp, Glycine max
cctactcctcttaagtcttttattctgagggcagatcaagctagcacgtatgggaattccaattccgctctcatttatgtcactctatctttctttcttgtggaacggggaaccccattgatgattgttggagatgtgaccccaattgggaaaagaaccggaagcgtctagcagattgttccattgggttcggtaagcatgccgttgggggaagggatgg

SEQ ID NO: 45478 - DNA, 267 bp, Glycine max
  unsure (1)..(267): unsure at all n locations
nagccaggttcccaatctccagacctgtgctgttgtgttggatgggttgctcaagtgctggcttgattctgaggcggtgacattgtttagggcgatgatgaaaagtggtcgagctcttgatatggtgattaacaatattatgcttgatggaatgtgcaagatgggaaaacttgatgaggcatgggaacttctttcttgtgttctggttaaagggttgaaaattgattcatatacttataatataatgattaaaggtctgtgtagaga

SEQ ID NO: 45479 - DNA, 247 bp, Glycine max
cagactatcaccttggatgaaattaaagaatcaacagccaacatgtagcacagattattgtgtattgagttacttgttggctgaccataaagatacgttgggtgcaccactgtgcccttgccggcattacgatgataaagctgctgaggttgcacaaggattttggaattgcccttgtgttcccatgagagagaggaaggagtgccactgcatgctatttctcacacctgataacgaatttgctggc

SEQ ID NO: 45480 - DNA, 266 bp, Glycine max
cttgccagatcttgtggacaaggctgtagcaagtgaaggtggaactgatgatgccaaaagaaggggtgatgcttttgctcgtgcattttcagctcacttggcaaggctgatggaggagccttcagcatatgggaagttaggcctcgccaatctcttggaaatgagggaagagtgcttgagggaatttcagtttgctgatgcctatagaagtataaagcagagggaaaatgaggcatcgcttgctgttttacctgacttgctggtgg

SEQ ID NO: 45481 - DNA, 260 bp, Glycine max
cggctcgagcggctcgagactagagttgcaagagaggtgttcaacgagatgcatcagccagatttggtatcatggacttctctaattgttgggtatgctcagaatggtcaaccagaggaagtacttcatttcttcaaattactactccaatcaggtaccaagcctgatcaaataaagggttagaatatttccattcaataagggagtgacatggattgatgcatactgcagatcattatgcatgtgttattgatttattg

SEQ ID NO: 45482 - DNA, 246 bp, Glycine max
ttggaaagctggtggtacttgacctatttgctgaagtaaaacccatttgggtaacctcagaacagttttatggagttccctacatctggtgtatgctgcacaattttgcaggaaacattgagatgtatgggatattagacgcaatagcatctggcccaattgatgcacgcacaagtaataactcaacaatggttggagttggaatgtctatggaaggtatagaacagaatcccattgtctatgatt

SEQ ID NO: 45483 - DNA, 246 bp, Glycine max
caatgtctttgatgccaaccatgatactctagtgtgggcactgcagaagaatggtttcggaaacatgcctataattgtgggagaagttgggtggcctacagatggagacagaaacgcaaaccttcaatacgcgcaacgcttcaaccaaggcttcatgtcgcgctacattgccggaaaagggacaccaatgaggcctggtcctatggatgcttacttgtttagtctcatagatgaagatttcaaaag

SEQ ID NO: 45484 - DNA, 231 bp, Glycine max
caaagatggagataccactttgatagatattcaagtgaaaccaaatgttctgtccttcacatcaattgggcagaagaagtcattctccgtcataattgaagggaatgtcaatccggatatactgtctgcttctctggtttgggatgatggaacttttcaagttagaagccccattgtagtgtatggtgatacataatttagtgtcattaattttttctttctaaagtcaaa

SEQ ID NO: 45485 - DNA, 235 bp, Glycine max
gggagaagtaatcgagcttcagcaatggtgtacgtcaaggctcagaaatcaaaagcctacttcaagagatatcaagtcaagttcaagagaagaagagagggaaaaaccgattaccgtgccaggattcggttgattaatcaggacaagaacaaatataacactccgaaataccgatttgtggttcgctttagcaacaaggacattgttgcacaaataatatctgctagcattgccg

SEQ ID NO: 45486 - DNA, 231 bp, Glycine max
aggtgacctccctcagactatgagctcactttcacgcataaccaccatttatctgcaaaataaccagtttacaggcactattgatgtccttgctaatctgcctctggataatctgaatgtggaaaataataattttactggatggataccagaacagttgaagaacataaacctacagaccggtggtaatgcatggagctcagggcctgcacccccacctcctcctgggac

SEQ ID NO: 45487 - DNA, 239 bp, Glycine max
ctgcttgagctcgagccgattcggctcgagcggacacttgttctcagcctacagacgcacctcaccaccgacactctttctccctcactcacttaaacaatcaacactttcccaatgggttgcacggcgtccaagctagaaaacgagtacacggtgcgccgctgcaaagagcgccgccgcctgatgaaggaggcggtgtacgtgcgtgaccacctggccgccgcccattccgactactg

SEQ ID NO: 45488 - DNA, 275 bp, Glycine max
ctcgagccgaatcggctcgaaggatttgcccccatcccggcaaaggcatacaatggagcagtttatcgatctgtaactggctttgagagcagctccttgaggctgacattcaatttctcaacacaaccaggccacgcacaaacaacagttatccaggctacttttatgaatgagtcctccaatacatatacagatcctgtgttccaggcagcagttcctaagttacttcagttgcacttagatccagctagcaggaatactcttcccgcaaatgg

SEQ ID NO: 45489 - DNA, 272 bp, Glycine max
gttgtgcttgaagaagggctcaacttggctgtgagaagattaggggagggaggttctcaaaggtttaaagagttccaaacggaagttgaagcaataggaaagttaaggcatccgaatattgttactctgagagcctattactggtctgttgatgagaagcttctcatctatgattatgttcccaatggaagccttgctacagcaatacatgggaaagctggacttgccacatttacaccactatcttggtctgttagagtgaaaatcatgaa

SEQ ID NO: 45490 - DNA, 184 bp, Glycine max
  unsure (1)..(184): unsure at all n locations
ctattatcatccgcagctgctttgattcgcaccgcaaactgngagccatttccgtcggaaataacaagcgcatctccaaggggaagaagggtggcaagaagaaggcagctgatccctttgccgaaaaggattggtatgacattaaggctccttctgtttttcaagtgaaaaatgttggcaaaac

SEQ ID NO: 45491 - DNA, 263 bp, Glycine max
ctgttgagagatcttttggtgaatcttttcctcgtctaccatctagtaaaacaaccggagttttgccagaggtgctgaaaaatctggttgatcggaggaaaatggttaagtcgtggataaagaatgaaaaaaataagaatgaaaagagtgatcctattagagttcagcaactggatattcagcagcaagcactcaagcttactgcaaacagtatgtatgggtgcctgggattttcgaattcaagattttatgctaagccatta

SEQ ID NO: 45492 - DNA, 267 bp, Glycine max
ctgcagtctttgtggctcggaataggtttgctgtgcttgacaaaggcaacaaccaagtctgtgtaaaaaatctgaagaatgagcttgtcaaaaagagtgccctccctatttctgcagatgctatattctatgctggaacagcaacttgctatgcaggtcagaggatagggtttttatatttgatctacagcagaggattgttctcggtgatcttcagaccccttttataaagtatgtagtatggtctaatgacatggaaagtgttgc

SEQ ID NO: 45493 - DNA, 266 bp, Glycine max
gttaatggccagatccttggggctgcagagtttgacaacacctttgggtgggataacaagcatgctggagcaagaatacttctttccaaggaattcctggttcaaagggtacaatccctccatgactacaaggggcatgggacaatttcgtctgttccctaatttctgggacctctttgtcttccacccaatataccccatgtggccttcttttcaagatgagtgatagcaacatgcagtatgtcacatccacctccttcctactg

SEQ ID NO: 45494 - DNA, 159 bp, Glycine max
gaattccactcctaatcgccatttacggcgactactccggctcgctcatggttcaggtcgtggtccttcagtgcatcatatggtacaccttgttgctcttcttattcgaataccgcgccgcgaaaatcctaatcatggaacagttccctgaaaccgctg

SEQ ID NO: 45495 - DNA, 149 bp, Glycine max
ttgtctcatagtttctgagcgttgcacatggaacctttgagacaagagttcggctagatttcttgtctcaaaggttccatgtgccactctcagaaactttgcttgcaaatttgcaataggttattcttggcaccaagctttccattctc

SEQ ID NO: 45496 - DNA, 230 bp, Glycine max
gcagaagggtatccacatctggggcaaaggtggcaaggacaagaacactgccattctttggcatggtaccgtccacgctcgcgaatgggtcaccaccatgaccgtcgaatacctagcctaccaactcatcgccggctagggcaaagactccaacgtcacttccttcgtcgacaactacgacttctagctcatccccgtcgtcaaccccgacggcttcgtctattcccaaa

SEQ ID NO: 45497 - DNA, 197 bp, Glycine max
tagtcgttcgagattgcccgtacgaagcaaactgctcgtaagtccacaggaggaaaggctcctaggaagcagcttgcaaccaaggctgcacgtaagtctgcaccaactactggaggtgtgaacatgccacatcgttaccgtcctggtaccgttgctcttcgtgagattaggaaataccaggagagtaccgagctttt

SEQ ID NO: 45498 - DNA, 237 bp, Glycine max
ctggcatgtgaatcgcttgtgcttggcagctaatgttcctttggttgaaagtggaactactgggttcctcggacaggtcactgtgcatgtcaatggagaaacagagtgctatgagtgttcacctaaaccagtccccaagacatatcacgtatgtacaatcacaagtaccccatcaaagtttgttcactgtattgtgtgatccaaagacctactttttgctaatacattggggacaag

SEQ ID NO: 45499 - DNA, 282 bp, Glycine max
cggaaaccctaaacgagaatggtccctcaacgacttcgagatcggaaagcctctcggaaaaggcaaattcggcagagtctacgtcgccagagaagtcaagagtaaattcgtggttgcattgaaggttatttttaaggaacagcttgagaagtacagaattcaccaccagctgaggagggagatggagattcagttcagcctgcagcaccagaacgtgcttcgtctctacggttggtttcatgactcggagcgcgtctatttgattctcgaatatgctcacaa

SEQ ID NO: 45500 - DNA, 274 bp, Glycine max
gtttgatagagctaatggaattgctaattggactttttgatttattctttgctttgcagattattacaggtgcagtcttggctgtgaactttgggcacggcaaagaaattgggaaaggagtgagtgcctttctggttgttgtgatcttcttgttcgttttggcatatgggagatcttggggtccccttgggtggttggttcccagtgagctcttcccattagagataagatcatctgcacagagtattgtggtctgtgtcaacatgatcttcac

SEQ ID NO: 45501 - DNA, 267 bp, Glycine max
aatttctcaagtgggtatgggtggtgttcttgaggccaccaaagaatctcaaagagtatggttcatgggccataatcactggctccactgatggaattggcaaggccatggcttttgaattggcatctaagggacttaaccttctcttggttggtagaaaccctctaaaacttgaggcaacatccaaggaaataagagatagacttgatgttgaggttaagtttgtggtcatagacatgcaaaaagttgagggagttgaaatagtaa

SEQ ID NO: 45502 - DNA, 231 bp, Glycine max
gtgaatgattcgtgctaccatcaactcgtcagccactggctaaacactcatgcggttgttgagccattcgtcatagcaacaaacaggcatctgagcgtggttcaccctatttacaaacttttgtttcctcactatcgtgacaccatgaacattaattcacttgcccgcaaatccttggtcaatgacgcggtattaatggagaaaacattcttgtggggtaggtactctttg

SEQ ID NO: 45503 - DNA, 105 bp, Glycine max
cacgtgtgaagcattttcaacatacccccggacatacgatttacgtcatgcatggactgtcttctctgacatagaagataaaggttgcagtaaagaggatctatt

SEQ ID NO: 45504 - DNA, 265 bp, Glycine max
tcagctttcgccatccccggtcatcgttaccgaaagcttctcgtcggtagcatcggcttggcggtctcaatagcactgtatgcgtcccctttggttgcaatgaagaaagtgatacaaaccaagagtgtggaattcatgccattgcctttatctttgagctccttgttggccagtttgctgtggatgacttatggactcctcattggcgatattttcgttgcggggccaaatgtggttggaactccattgggaatactccagatcg

SEQ ID NO: 45505 - DNA, 263 bp, Glycine max
caggcagctgcgcggatacaatctgcttttcgttcacattcttttagaaaacgaagagcaagagaagtagctgctagtgcaggtggcattggtaccatttcagagatttctgctatgtcaaaacttgcctttcggaactcacgtgaatataattcagctgcttcagctgctttatcgattcagaagagatatcgaggttggaaaggtcgcaaagatttcttagcgttgcgcaaaaaagtagtgaagatcacaggctcatgtga

SEQ ID NO: 45506 - DNA, 255 bp, Glycine max
caaaggttgctgtaggagataagattgcagtagtgctaagtgctaacacctgcagtgaacaatggcctctgcatcagcatctctgctcaagtcttcagttgttcttgacaagtctgagtgggtgaagggacaaacccttcgccaaccttctgcatcagttgtgagatgcaaccccaccaccccatcaggcctcaccatcagagctggttcctatgctgatgagctcgttaagaccgcgaaaacagtggcttcacc

SEQ ID NO: 45507 - DNA, 167 bp, Glycine max
agctcagcacgcagaggagcagaagcctaagccttcaacatggcgagagggttgaagaaacacttgaagaggctcaatgttccaaaatactggatgcttgacaagcttggtggggcctttgtatgtacagtactcacagttgttgatgatattatttgtcattttta

SEQ ID NO: 45508 - DNA, 164 bp, Glycine max
ggatcattttatcacttccttgagagatgaagtgcggatactgaaagagttgcctcccagactcaagctgaaagtggagcgcgggtttctttacaccatgccgcctattagttggtctgatatatcttactataaggatcagattctacccttgatacaaaagt

SEQ ID NO: 45509 - DNA, 101 bp, Glycine max
tgcacgacaggaagcttcttgggattgtgtatagcgggttggaggagcacgagaaggcgctggagcagaatgttttggcgcagaggattttgaagaactgg

SEQ ID NO: 45510 - DNA, 173 bp, Glycine max
ctctgagtccaagttccaacgaaatgtgaacagtgaaagatacaaaaaaaacaccatgatgctgaaggcggcaccgcgtgcagtaatctactacctctcggagcacccggctatcgtggggttccggtggagccacgcccaatcatggggcgccacgtggtccttcctcttct

SEQ ID NO: 45511 - DNA, 234 bp, Glycine max
aagcacgtctacgagatggccggtatgaagggctactctggtcacttcgatgacgagaccatcgaggccatcaggaaccaccctgatgtcgactacatcgagcgcgactcagaggtccacactctcggccacgacgaaccggagatcgagaagaactccccatggggtcttgctcgttctcgcaccgcgactccctgagcttcggcacctggaacaagtacctctacgccgccg

SEQ ID NO: 45512 - DNA, 236 bp, Glycine max
cgtcgcagttgtaaccctaatcagaagaagcgcacttcaagcgagtgacagccaccagccatgggtcgtatgcacagccgcggtaagggtatatcctcttctgctttgccctacaaaaggacacctcctagctggctcaagatctcttcgcaagatgtcgaagaaaatatctgcaagtttgcgaagaaaggtctgaccccgtctcagattggtgtcattctcagagattctcacgg

SEQ ID NO: 45513 - DNA, 118 bp, Glycine max
gttgtgaatgcaggtggagaacggaaacgtctcctaaatatagcaatgcaactacgtaaatgctgcaatcacccatatctcttccagggtgctgaacctggccctccctttacaacag

SEQ ID NO: 45514 - DNA, 251 bp, Glycine max
ctctcaaaaaaggagggaagacagtgggagtcaccaatctaccccatgtgatggtggaaagcttcttgagagagtatttggacattgatttcgttgtgggcagggagctgaaagttttctgtggatactacgtaggattgatggatgacacaaaaactatgcatgccttggagctggttaaagaaggaaaaggatgctccgacatgatcggaatcacaaggtttcgcaacatacgcgaccatgatgatttt

SEQ ID NO: 45515 - DNA, 254 bp, Glycine max
gtgatacaccaggaaatcaatatcagaaaggagtgaaacagcttgttgagaatggccttcacacaatacctaaaaacgtacatacttcctccttctgatcgaccagctacaaattcagaaaattcaaatgttgccaagcaaaaccttcagctacccatcattgatttttctgaattgattggtccaagaaggccccaagtccttcaatctctagccaatgcttatgaacgctacggattttttcagctggtaaa

SEQ ID NO: 45516 - DNA, 234 bp, Glycine max
tgttaattggtaaagatacatgtatttgatgtcctgcccaagaaagagaatccaaccccaggagccctgtcaaatggtgattcaacatagattctacatcttggaaccaagccaattttggagcagctttgtgataatgaaaccaaccagcaaaaagcattaaggctgcaaagaccaatgcaccaattgcggtacaatagagttgtaattcactagttattccagatgctctcc

SEQ ID NO: 45517 - DNA, 170 bp, Glycine max
gtgctttcggtggaggaaatcggtcgtctataccgaataaggaagacggtgatgcagatgctgagggacagaaattttctggttggtgacttcgagatcaacatgtccaagcacgagttcaagtccaagaaggacaactccggcgaccagatctacgttttcttccccga

SEQ ID NO: 45518 - DNA, 254 bp, Glycine max
gcatggcaaaagaggagaggatagggtgcctttagattgggatactcgactgaaaatagccttaggtgctgcaagaggcattgctcgtattcatgttgagaatggtggcaagcttgtacatggcaacatcaaatcctcaaacatcttcctcaacaccaaacagtatggctgcgtgtctgaccttggcctggcaaccatatcaagctcacttgccttaccaatatcacgagcagccggttaccgtgcaccagaag

SEQ ID NO: 45519 - DNA, 247 bp, Glycine max
caaaaggagatttgtttctggggatggtgaagagatgacattgattccgggaaccagtgttgaagaggcctacaacaagctaatagttgaacttgagagaagtgttcctacattggttggcattgaatgtcccaaggatgagaaacttcctcgtcgcaaaatttttgacaaacctaagacgcgctgcttcactattctccctatggagtttaatcttgtggttcgtcagaagtttttaaatttgtga

SEQ ID NO: 45520 - DNA, 260 bp, Glycine max
cggctcgagcggctcgagcggctcgagcggctcgaggaagctttgagagagagagagggaggacggagagtactgacgctacatcaagaagggtatttctagggattccatgcacaagaggcgtaccactggtggcaagaagaaggcatggagaaagaagagaaagtatgagcttgggcgtcaggccgcaaacaccaagttatcaagcaacaaaactatccggaggattcgtgttcgaggtggcaatgttaaatggaggg

SEQ ID NO: 45521 - DNA, 238 bp, Glycine max
ttggaatatgctgtcagctgcttattgcaaggtataaaatttggtctcgtcaattcaagaagccatcttgctcgtgtgctttatcttcttagcttcgatactcctaatgagcctgttggaaggtcatttgataagtactatgaacaagtaccacactgggtttggctttcttggattccacagctcttactctccctgcagaggacagaagctcctcactgtaaacttgttcttttga

SEQ ID NO: 45522 - DNA, 271 bp, Glycine max
caaagctcaccatatactccagagctctttaggaggtgattgcacaactttaatgtttgtccagataagtccaagtgcagcagacttaacagagacactttgttctctgaattttgccgcacgtgtacgaggaattgagagtggcccagcccgcaagcaaacagaccttactgaactgaataagtacaagcaaatggtagaaaaggtcaaacatgatgagaaggaaactagaaaattacaagataacttgcagtcattgcaaatgagactt

SEQ ID NO: 45523 - DNA, 267 bp, Glycine max
ctggaataaaactatgtgagctaaagtatgtttaatttgacaggaagatatagatctcatggccagcttgaattttgatgcctaccggttctcaatctcgtggtccagaatttttccaaatggaactggccaagtaaattggaaaggtgtagcatactacaataggctgatcaattacttgctagaaaaaggtattactccatatgcaaatctctaccattatgatcttcctttagcacttgaggagaggtacaacggattattgag

SEQ ID NO: 45524 - DNA, 268 bp, Glycine max
gtttggcatctgaatccccaaaatatcgaaatctgagagaggcattgattggtaaggtaaggtaatggcggaagagagtaaatctagcagcgaggaaagtgtgaagctgttcgtagggcaagtgcccaagcacatgaccgaacccgaactccttgcaatgttcaaggagttcgcgctcgtcgacgaggtcaacataatcaaagacaaagcaactcgtgcttcccgaggttgttgcttcctgatttgtccgtcaagggaggaggcggat

SEQ ID NO: 45525 - DNA, 246 bp, Glycine max
ctcgagccgtggaagcgcaggagttcggagagatgatggagcacgtcgacgaggtcaatttcgccctcgatgggcttcggaagggtcagcctctgcggatcagaagggccagcttggtgtcgctcttgacaatttgcgccaccacgcaccagagaaggctcctcaggactcaagggatggcaaagacaataattgattctattttgggcctcagtcttgatgattctcccagcaatcttgcagctg

SEQ ID NO: 45526 - DNA, 264 bp, Glycine max
ttcaaaaatatgccactcccatgatgcccctagatgaagaaattctttctaaggttgcacaagacatggttgatgaatggtttgattgtgttgatgaggaggattcctttgaggaagtctctttaagtgcagcactcaatggtgttgagggtttggactatatggaaagaattcctacttgccacatctggggttttcctcatgtgctttcacgcaaaaatggtctctaaggcataaggagatttgtttctggggatggtgaag

SEQ ID NO: 45527 - DNA, 240 bp, Glycine max
attttattgtctgggacaacagtgaccttgtgccccatgagatcatgggtggcctgaaaaatgtctatgcaattggtgccggaatggtagcagcccttaccaatgagagtgctactagcaaatctgtctactttgcacgctgcacatcagccctgatatttgtcactcatttgttggctgaagagcctgagaaacttcagggccactattggctgacacttatgtgactttactaaaagg

SEQ ID NO: 45528 - DNA, 255 bp, Glycine max
agcgcgttggaaagctatgtggacaatcgtacggagctgggcaagtgcacatgctgggcgtgtacatgcagcgctcgtgggtgatcctgaacaccaccgcgatcctgctgacgctcctctacatcttcgcggcgccgctgctgcgggcgatagggcagacggaggcgatttcggcggcggcgggggatttcgcggtgtggatgatcccgcagctgttcgcgtacgcggtgaactacccggcgcagaagttcctgc

SEQ ID NO: 45529 - DNA, 242 bp, Glycine max
atcctgcactacgtgcatggttgaaagtacagtctaatgagggtgtattggtacgtagagttgaaccaacttctgatgcaaataatgtattaaaggagggtgatgtgattgtcagctttgatgatgttcgtgttggtagtgaaggaacagtcccattcagatcaaatgagcgaattgccttccacttcctcattagtcaaaaatttgcaggtgatactgcagagcttggtatcatcagagca

SEQ ID NO: 45530 - DNA, 239 bp, Glycine max
tgcagatgttgaacgttaccctcgcctgtcttggccgtatgggggccaccattgtgctgcagatggtctgcctggtgaatgctgagctgtaccctacattcatcaggaatcttgggatgatggtatgctctgccctgtgtgacctgggtgggatcttcacccccttcatggtgttcaggctgacggaagtttggcaagccctgcccctcattttgtgtggggttttgggcctgactgct

SEQ ID NO: 45531 - DNA, 161 bp, Glycine max
cggctcgagcggacatgtcaccgcccagtcagctgtgttcactcaccattgtcgatcagattctgtctagtgaagggcagacaccagaaaaacccagatccagttttacagcgcaccagagttctgtgactactcatgtcccagttccagatcaaaccagc

SEQ ID NO: 45532 - DNA, 249 bp, Glycine max
ccaaaatcttcttcattatggacttcgtacgcggcggcgagctgttcgggaaaatctcaaagggccgattcgccgaggatctcagccgcaaatactttcatcaactgatctccgccgtggggtactgccactcgcgcggcgtattccaccgcgacctcaagcaggagaatctcctcctcgacgagaacggcgatttgagggtctcggatttcgggttgagtgcggttcgggatcagatccgacccgatg

SEQ ID NO: 45533 - DNA, 241 bp, Glycine max
gccactgcaactctaggttttcaggctacaaggttgggggttagaccatctcctgtagtggcagctatttcatcaagagggccaaattttctcacccttgaaattctgaagcctgatgtggtggctcctggggtgaacattcttgctgcttggagtgaggccattggtccatcaagtttgccaacagatcacagaagggtgaagttcaacatactctcaggaacttcaatgtcatgccctc

SEQ ID NO: 45534 - DNA, 240 bp, Glycine max
gacgaacacgttgaatgtgaaactcagagctggtaccaagaagtttcaaagctaaagtgaaagtatgagtctcttcaaaggacccagaggcatttgcttggggaagatcttggaccattgaacataaaggagctgcagaatattgagaaacagcttgaaggggctttagcacaagcaagacaaaggaagacacaaatcatgattgaacaaatggaagagcttcgcagaagggagcgccat

SEQ ID NO: 45535 - DNA, 236 bp, Glycine max
agatcttgaagggctttcagagggcgctagtgtaattgaagtggttaagaaggttaagccacatgtgctccttggattgtctggagttggtggtgttttcaatgcagaggtgcttaaggcaatgagagaatctgtttcaacaaaacctgctatctttgcaatgtctaatcccaccatgaatgctgagtgcactgctattgaagctctaagtcatgctggagaaaatatagtgtttg

SEQ ID NO: 45536 - DNA, 263 bp, Glycine max
gaagaagatggagatgtatcagatctggagcaggagaatagcgttgggagcgttcgcgtttgttgctgcttttcctatcggcctcagcagacgacgtcgttgtgctctctgaagataacttcgagaaggaagttggtcaggacagaggagctctcgttgagttctatgctccttggtgtggacactgcaaaaagcttgctccagaatatgaaaagcttggtagcagcttcaagaaagccaaatctgttttaatcggcaaggtt

SEQ ID NO: 45537 - DNA, 119 bp, Glycine max
atttgaaattaacaagtagcaaagatgtttgtaatcttcggtggaaataagggtcacaatataaagggtaacttggtgattatgctaaagaatgtgaatgatatctataacattaccag

SEQ ID NO: 45538 - DNA, 253 bp, Glycine max
cggagtttgagcaagattagttctgtcaacagtgattctgttttccttctagttctagattctaaatgtggagtagtgataaagttcagtggtgaccttgggaaacttgatttattgaattcaagtgatccatatctatctgttgctgaatggatcaaaactaatgctgaaatttgtgtcaccccagtggaaccaatatggaaccgattaggaaatccaaattggggagatataggaactctacaggtactat

SEQ ID NO: 45539 - DNA, 248 bp, Glycine max
ggcagccatgacttccaatagagtgattgtcccagtcaagttgttgttatagtatagtaaaggtacttcaacccagtcggtgcacaccctagcggttgtattggggaggatccccgcggaattccaaacaatctcatgccatttgttcagcaagtagcagttggccgacggctgcactgacagtttttggaaatgattataatacaactgatggcactggggttcgggattacattcatgttgttgat

SEQ ID NO: 45540 - DNA, 267 bp, Glycine max
cagagaccgaaatacttcgagatggcccgtacaaagcaaactgctcgtaagtcaactggaggaaaagctcccaggaagcagcttgcaaccaaggctgcacgtaagtctgcaccaacaactggtggtgtgaagaagcctcatcgttatcgccctggaactgttgctcttcgtgagattaggaaataccagaagagctatgagctcctaatcaggaagcttcctttccagaggttggttcgtgaaattgcccaggatttcaagactgat

SEQ ID NO: 45541 - DNA, 258 bp, Glycine max
gaggctttctggtgttttgtcggattcatgaagaaggcacggcaaaattttaggcttgatgaggtgggtattcgcaggcaactggatatagttgcaaaaataattaagtttaaggatgcccacctttttaggcatttggaaaagcttcaggctgaggattgcttttttgtctataggatggtggtggtaatgtttcgaagggaattgacatttgaacaaactctttgcctatgggaagtaatgtgggcagatcaagca

SEQ ID NO: 45542 - DNA, 257 bp, Glycine max
tgtagatcttgttgaagaaatggatgcaacaataaacagggatggagttctggtgaaatgtgagatcaatggtgaggttcaagtgaattcccatatcacaggtcttcctgatttgactctttcatttgcaaatccttcaatccttgatgatgtgaggttccatccctgtgttagatatcggccctgggaatccaatcaaattctttcattcgtgcctcctgatggacgatttaagcttatgagttacagagttggaa

SEQ ID NO: 45543 - DNA, 255 bp, Glycine max
attcatggctagagagattcttattctgcgccatctggatcatcccaatgttgtcaaactggaaggtttggtgacttcaaggatgtcatgcagtttgtaccttgtctttgaatacatggatcatgatttggctggacttgctacaagccccacaattaagttcacagagtctcaggttaaatgttacatgcatcagctactttctggattggaacactgtcacaaccgtcatgtgctgcatcgtgatataaaggg

SEQ ID NO: 45544 - DNA, 252 bp, Glycine max
caactctattttcttctttgggtgatgtgtttgcaatcacagctgctggtgattttgtagcgcatgtgttgaatgcttatactggagaggatgttgctggaaagatcttgtcatttgcccagaagggtccaagaggaatttgcattctctctgccaatggagctatctcgaatgtcaccatacgccaacctggttcttctggtggcattttgacttatgagggtcggtttgagagattatctttgtctggat

SEQ ID NO: 45545 - DNA, 249 bp, Glycine max
aggcaagcccttaactggctctccaagtacccttgctgcttccaaatccacgacaaccgctgccgcctcaccatacgcatgatgaacctcgtcgcagaggaacagtccctcctcgattccctagagcccctcttcgctcgcatcttagctaaactcctcatgctatccctcaccaagagactcaccgtcctcaaaatcaacgaattcaaacgtagtttcggcttccccgacgattacatcctcagaatc

SEQ ID NO: 45546 - DNA, 245 bp, Glycine max
cactggttctcttcctgatagtattgtgaatcttgggcagctcgggattcttgattttcataacaataagctctctggggagcttcctaaggggattcgttcgtggaagaagctcaacgatttgaatttggcgaacaatgagattggtgggaggattcctgatgagattgggggtttgtccgtgctgaattttctggatctttctagaaaccggttttcggggaaagtgcctcatgggttgcaga

SEQ ID NO: 45547 - DNA, 243 bp, Glycine max
aaaacaaagaaaaaaaaaaccctagccaacacaaccatcatggccacctctgctattcagcaatcagcattcactggtcaaactgctctgaagcagctcaatgagttcgtccgcaagaccggtatggccctgaccgtcccaagtacttgggtccattctcggagcagattccatcatacctgaccggagaattccctggtgactacggatgggacactgctggattatcagctgacccggaaa

SEQ ID NO: 45548 - DNA, 248 bp, Glycine max
agcattgaatatgatgcgtgtacaattccaaatgattgtggttcattggttgttgccaaggttggaaatcacaaacaaattgttggtttccatgttgctggaagcaaaggaagactgggatatgcttcattgataccatatgttgagccagttgtgcaagctcaaagtgctgaagtttattttgacttcttccctgtggaggttgatagtcaagagggagttgctcacattggtgaattgaaatctgg

SEQ ID NO: 45549 - DNA, 244 bp, Glycine max
tgtggtgccttatcgctgtggttatcatcttcttcttcctctttcttagatctcttctttctctacgccgcacgccgaaaccatggccggaaaaggagagggtcctgctatcggaatcgatctcgtgtaccacctactcttgcgtcggtgtgtggcaacatgatccgcgttgaaatcatcgccaacgaccaagggaacagaaccacgccgtcttacgtcggattcactgacaccgagcgtctca

SEQ ID NO: 45550 - DNA, 247 bp, Glycine max
attctagccattcgaattcccaatctaaaaccctaataccttcaaagaacgaagtagtggatcagtgatggcacctaaggcagagaagaagccagcggagaagaagcccgcggaggagaagaagtcctcggtgggagacaaggctccggcggagaagaagccgaaggccggaaagaagcttccgaaggagggaggagccggcggagaaggggggaagaagaaaaagaggaacaagaagagcgtggag

SEQ ID NO: 45551 - DNA, 238 bp, Glycine max
tgactatgatgatcaggacaaacttttcttctgtgatgaagaccaagcttttcttcagaaagttccatggttagtggtaaggacagataactattttgtcccatctctattcttgatgccatcttttgagaagcaactaagtgatctcttcccaaacaaggaaacagtttttcatttcttgggtagatatctgttccaccccaccaacaaagtatggggacttgttagcagatattat

SEQ ID NO: 45552 - DNA, 259 bp, Glycine max
actcaattgtgtttttgagggcagaaaatggggatttgtgtgttgggattcgacgagcgaagaagggaatttgtggtggacttgagacttcctcagggtggaatcctgcaggaggaaattgtcatattccttatggtggattttcgcccttttttagggaggatgataatagaatctcgagaatggcaatagcaaatgggttaaaccctagtgtgagtatgatgggaaagggaaaagtcaggccagaagcagtttctga

SEQ ID NO: 45553 - DNA, 249 bp, Glycine max
ccagtgttgaagaggactacaacaagctaatagttgaacttgagagaagtgttcctacattggttggcattgaatgtcccaaggatgagaaacttcctcgtcgcaaaatttttgacaaacctaagacgcgctgcttcactattctccctatggagtttaatctgtggttcgtcagaactttttaaattttgtgaggttcattatgaagaaaagggacaagcttagttgtcaagttggaatcaacccata

SEQ ID NO: 45554 - DNA, 260 bp, Glycine max
gaacttttaaacaagaacttgataaagggtaatattcttctttgtggatattccttcaactttgttgttggctctgcatcaatcaagaaagtctcagaaacagcaaaggcccttggtgcagttggatttgttcttagtgttgaaaacaattccccaggaacaaaatttgatccagtccctgttggtcttcctgggattctcatcacagatgtcagcaattctaaggaacttatagattattataatatcactacaccaag

SEQ ID NO: 45555 - DNA, 256 bp, Glycine max
tgggatttatggttataatatgtggtctaattggaattcctccgtcaaatggtgtcattccacaatctccagtgcacaccaaaagtttagctacattgaagcaccagcacgaagttctatgaaaaagctaaaagcttgggacaagtatatggaagtatgcaagattcttactggcagatgcaaacccctctagttcaccaggaaccttccgcgaagggacttaaagagttgaaagagtcaactattcatttggcgt

SEQ ID NO: 45556 - DNA, 245 bp, Glycine max
ttcaaagacaagcataacaaggaccaattcatgcgatgttctactaggagcatgttatgcacatggagatttaggaaccgggagtagtgtgggagaatatctaaagaacttggagcctgaaaaggaggttggttatgtattgttgtcaaatttgtattgtgcaagtgggaagtggagggaagcagagatggtccggaaggcaatgctggatcaaggggtgaaaaaagtacctggtagtagttgga

SEQ ID NO: 45557 - DNA, 281 bp, Glycine max
cacagcacaagacttaagtagaaaagggaaggtgagtttgttgggcatagcacctcgttctcgcatttttcgaaacacccagaaggcttcgaggggggaatcgcttgcggcgtagctactaatgagaatgttccacgaaatgggtgatggggtggcggcgtggtggacgaatgatcgcgcgtggcgaaggttcttggagggagagagggagcaaaagtagacgagttcggagagcacgcgggtgtcttgatagagaccagagacgtgaacttgtgcctgaa

SEQ ID NO: 45558 - DNA, 275 bp, Glycine max
gacaaagtgcatcaactattctcaaaggttccactttacaacaagatttcaaagcaatacgagcttgactttagagataataaaggaaaggcaggaggaggatttagaatccaaagatcagtaaaaaatttccagctgactttagaggagaatgggaggcaaacgatcctgcagctagggagggtggaaaagtcaaaattcgttatggactacagctatcctttgacaggctaccaggcgttttgcatatgtttggcttccatggatgcaaaact

SEQ ID NO: 45559 - DNA, 258 bp, Glycine max
gcacgccggtgtacagatcggcaacgcctgttgggagctttactgcctggaacatggcatccagcctgatggtcagatgccctcagacaagaccattggaggtggtgacgacagcttcaacacatttgtcagtgagactggcgccgggacacacgtccccagggccgtctttgttgacttagagcctcctgtagttgatgaggtccgcactggtacataccgccagcttttccaccctgaacagctgatcactggtaa

SEQ ID NO: 45560 - DNA, 256 bp, Glycine max
ctaagatagctgaaaacgagagagcacaacaacggcaacaggatctgataccgggaactgagtgcgagtcaaccatacctaattcacaatcatatgaccgcaatttcttccctgttaatctcatagattccaataataatcaatattcacgtcaagaccagactgctcttcaacttgtctgatcataagctggcaagcgattttaaattatgcatggcacaacctttctatggtttcgtctatttgaatagctagc

SEQ ID NO: 45561 - DNA, 247 bp, Glycine max
ctttgttgctgcattagccgctgcaggacttctattgattacttcattggtttcacttgcaatgatgctgcaatcttgtcaaagtagccatgctggaatcattgagcttcagaatataaatgatcagtacaattattgcaaggtttattctctgcatgttaagctcaataacttggaaggacataatttttgctagctctgcaaggacctggctatgaagtatatcaagggaggtcaatatgctaga

SEQ ID NO: 45562 - DNA, 266 bp, Glycine max
gggatttcatcttttaacgaaggagacccatccactgccccgtcactgaccttgacgggccgcaagaaggagcccgatcagctccaaactgctgatgggtgggccaagttcaccggaggcttcttcttcggaggcatttcgggtgttatttgggcctacttcctcctctacgtcttggaccttcctttcttcacttgatgtagtaagaaattgttggcaaaaaatgagtgataacaagatatggaacttccccaggttggtggttt

SEQ ID NO: 45563 - DNA, 254 bp, Glycine max
  unsure (1)..(254): unsure at all n locations
gtttgtataagcatgaaggaggaagatttagagagattggatcttcatttgatggtgaacagtcagtataatgatgagaaacttcgcacagcgttcactgtgacagtggatgctaaacatggtactaccacaggggtgtcagctcatgatagggcaacaacagtcggaatccttgcatccaaagattcacaaccaagtgacttcaatcgcccaggccatattttcccactaaaatnacaggagggtggtgtgct

SEQ ID NO: 45564 - DNA, 263 bp, Glycine max
aaagaattgtcttgtcctctagacaattttgagcttttgatctgctccatgcctggcccagatggtaaatcgtttccactatgcccatactgcaacatcaatcccccatttgaaggtattgaaacactcatcaacacggctaaaactggaacttctggcaagattggcaagggagctggcatgccctgcaacctatgccctcatcgcacttgcccaaattctctggtttcccagggtgtatgtgcttgtccagagtgcagtgg

SEQ ID NO: 45565 - DNA, 261 bp, Glycine max
tcagatttgaaaaccacagttcttgcattacaagacctacagctgaatactgatggctgtcctctaactgccgtccgcacgaaatacagacaagacaagtttaaatgtgtagcggctttgtcttcaccaaaactgcttgaaactttgttctgaagacaaagatgatttgacaagccaatgctagggactcctaactgataacaaagaaatcctcattcctaatctaatcttcccttcaacttccattcattattccctgag

SEQ ID NO: 45566 - DNA, 233 bp, Glycine max
cggctcgagcaggaatgaagcgattacgatttggaagaggttgggggaagcgattaggggcatttttatggagctggagagtttgattcgccgggatccggcaaagattgcagttcctggtggcggacttcatccgatcactcgctatgtgatgaactacctccgtgccgcatgtcggtcacggcagatcttggagcaggtttttgaagactatggcttgaaagagtacccaa

SEQ ID NO: 45567 - DNA, 250 bp, Glycine max
gtttaccgtactagaagttgatgtatttacggtttggttgttctacatttattagcatcttcatgcccgtaatcttacttgggtagggacatgtattatagctctctactgttatggccattcctgaatgaatgttatgtgcccattttaataaaaaaatgaaaattcaacccgttgtgcttccaccaatagtgaagcccccgggttttctccctccaattcttaacccaccaagtacaccaacaccgtc

SEQ ID NO: 45568 - DNA, 170 bp, Glycine max
  unsure (1)..(170): unsure at all n locations
gttgcttccaagttccaaacgacggcgccaatgagntgttacatgcggcctccgggtggtactcttgctccgggagacagtttgattgcaacggtgtttaagtttgtggagcaacctgaaaacaattctaagttgtcggatcagaagcacaaggtgaagttcaaaatcat

SEQ ID NO: 45569 - DNA, 226 bp, Glycine max
ctgggaaacatttctcagagtatgctgcacgcttttatgctgcagaggtcctgttggcacttgaatatcttcacatgcttggagttgtgtatcgagaccttaaacctgaaaacgtactggtccgagatgatggtcacataatgctctcagacttcgatctatctctccgatgtgctgtttcacctacccttattagaaattttgacagtgactcctcaaaacgagg

SEQ ID NO: 45570 - DNA, 248 bp, Glycine max
aacgaccttggggccgttagttctgccatattcggagcaggtgatgttcttggtgtcgctggtgaggatgaaggtgctgaagatgtcgggtgtaaagccatgcatttcggatttcaagctggccttggagcatttttgcatacacgccgagggtagagcggtgctgaacgaactgtagaagaatcttgagctgagcgagttgcacatggagccctccaggataaccctgcacagatatcggtaacact

SEQ ID NO: 45571 - DNA, 237 bp, Glycine max
gtttcttgcaagcctctactatactgcttcaccttctgctctagaaaattcagtgctgaaacatggcttcggctactctctctgtagccaaaccaaggcttcaggcaaatgggaaaggcttctctgaattctctggcctccgtagctcatcaggcttccttcccttttctagaaaatcctcagaggatttccattctgtcattgctctacagacctatgcagttggaagcagtggag

SEQ ID NO: 45572 - DNA, 262 bp, Glycine max
cacaccttcatccttgtccaactatttccctacagttctctgcaacgctcgacagtttaataggacagtcataaatcaaaacttattatatgctatccatgacagccatagaaatgatcttagaccactcaattccactgattttgatgacatgattcacagcggagcttactttgctcaaaagttccagaacgatgatcctgtgcttgatctcattgaccaaaaacttttgggtcgaagtcctagatcaattgttcccggt

SEQ ID NO: 45573 - DNA, 267 bp, Glycine max
agactcgaccgattcggctcgagtcaggccttcgaaagagggccactgaccctgaattgtacttcaaagtcaatggcaaactttatcaaaggcttggcaagataggtagtggtggaagcagtgaggtacacaaggtgatttcatcagactgtacaatctatgcacttaaaaggataaaattaaagggtcgtgattatgccactgcatatggcttttgtcaagagatcgagtatctaaataggctgaaaggaaagaataatattatcc

SEQ ID NO: 45574 - DNA, 253 bp, Glycine max
attggctcaaggcctgaggcagagtgagaagtgtgatgtttacagttttggagtcattcttttggagctggttacagggaggaagcctgtggaaagtccaaccacaaatgaggtagtggttctgtgtgaatatgtaagaggtttgttggagactggctcagcttcagattcctttgatagaaatatacttggctttgctgagaacgaattgattcaggttatgagattggggctaatttgtacttcggaggat

SEQ ID NO: 45575 - DNA, 253 bp, Glycine max
ttcagcaagtgcgttttggaagcagagaccgaaatacttcgagatggcccgtacaaagcaaactgctcgtaagtcaactggaggaaaagctcccaggaagcagcttgcaaccaaggctgcacgtaagtctgcaccaacaactggtggtgtgaagaagcctcatcgttatcgccctggaactgttgctcttcgtgagattaggaaataccagaagagcactgagctcctaatcaggaagcttcctttccagagg

SEQ ID NO: 45576 - DNA, 247 bp, Glycine max
gtctcagaggcctaattcatgtgctttggggttcctacagccacatgttttttctaaccagaaatcgacggattgttcaaaagggtgttgatttcaagcagattgacaaagaatgggactgggacaatttcttgattcttcaagcactagttgcctccatggcatgctatatgtttccctttcttcagcatcttcctctctggaatgtaaaaggtcttattgttgctttggttcttcatgtgggagt

SEQ ID NO: 45577 - DNA, 266 bp, Glycine max
ccaaattgtatcccaaatccgattgcagtgtgtttgatgcctttggtagagtttatagtggtaagatacagacaggacaggctgtacgtgttctaggagaaggatactcgccggatgatgaggaggacatgactgtaaaagaagtaactaagttgtgggtgtatcaagctcgtgataggatgccagtagctgaggctcctcccggttcttgggttctaattgaaggtgtggatgcttcaatcatgaaaacttctactctttgtaat

SEQ ID NO: 45578 - DNA, 260 bp, Glycine max
cgctttctttcaagcttcaagcatttatcatcacttctacatatgacaacacctcagaagacttacagcagaagtgcaacacgaaccaagatgccagcgtaatgcagccagatccgatacattgtacgtctccggcagatgctgcggcggtggcgcaacaaggcccgaatgtccgcgaaccgtgcaccaccgtccgatgtgcccgcggggcacgtggcggtgtgcgtgggcagcaacctcaccagattcgtggtgcgcgc

SEQ ID NO: 45579 - DNA, 275 bp, Glycine max
gtcctacaacagctcaggtgttgtgaagttctagaagttgttagactttcaagggctggatatcctattcgaatgggccatcaagagttttccagaaggtatgggtttctgctttctgaggccaacatatcgcaagatccattgagcatctcggttgctgttttgcaaaaattttatatcccttatgaaatgtaccatgttggctacaccaaattgtatcttcgagcagggcagattgatgcactggagaataagagaaaacaggttttgcaggg

SEQ ID NO: 45580 - DNA, 266 bp, Glycine max
cacagtgtccaatgtatatgctcagaaatgacatttgttcttaaattagctatgactttatattctgacagtttagtatttaaatttctttggtacaggaaagttgaaaaaaagatggaccatgacaagactggatgcgaactcccccagaaggtcctatattgtgcatcaccaactgcggattttttggaagtgcagctaccatgaacatgtgttctaagtgccacaaagacatgatgctgaaacaggagcaggcagggcttgta

SEQ ID NO: 45581 - DNA, 237 bp, Glycine max
aatcaacttggctttctctgtattatccaagatcctcaaatggggttatcagccagataccgtaaccttgacaacactcatcaaaggtctctgtcttaagggtcaggtcaagaaggcattgcactttcatgataagttattggcacaaggatttcggctggaccaagttagttatgggactttgatcaatggggtgtgtaaaattggagaaacaagagctgccattcagttgctgag

SEQ ID NO: 45582 - DNA, 232 bp, Glycine max
ggcacgttttcaaaagctacgccgccggatcggcttccggagttgacaatttcatcagttaccggaaccgcgccaacgtcggcgacgactcgttccagagctacgccgcgaggtcgaagtccggtgccgccacgttcgcgaactacggcatgtcgtttaacgtcggaaacgacagtttcactgagtacggaaagggagcaacggggaaaacctctttcggttttaaatcata

SEQ ID NO: 45583 - DNA, 241 bp, Glycine max
ctgactcacacacacactctctctctctctctagtacctcctcctactcctccttcttcttcttcttccctggcatcggatccagatccaaatccagtttaacaaagaaaatgcagtacaagaacctgggccgatcgggactgaaggtgagccagctctcctacggggcgtgggtgagcttcggtaaccagctagacgtgaaggaggccaaggcgctcctacagtgctgccgcgaccacgg

SEQ ID NO: 45584 - DNA, 261 bp, Glycine max
ggatgatggacggaaggtgtttgataaaatgcgtgtgcgcaatgtgttcgcgtggaccaccgtgatttctgggcttgttgcctgtgggaaattggacactgccagggagctatttgagcagatgccttccaagaatgttgtttcatggactgcaatgattgatgggtatgtgaaacacaagcagcccattgaagccttcaatctgtttgaaagaatgcagcaggttgataatgtgaggccaaatgagtacactttggtgag

SEQ ID NO: 45585 - DNA, 264 bp, Glycine max
cttttgaacaatatataactattttcttctccctatgagagtatattcatttaacccctttcttttatggtgcagccaacattaccaccacatatttttaagaaaggtgccattttgaagcatgcaaagccaaaactagatagtaggtttattttggatgttaatgtgatagatggtacaatgatggctccatctactgcatttacaaagatctggcggatgcgcaataatggcactatagtctggcacaatggaactcaactt

SEQ ID NO: 45586 - DNA, 250 bp, Glycine max
gatgtatttaatactgcaaaagtgagagttcaaccttcacaggtgaaaatgcttcctgtcaaaccaaagttgttctcctgggagagctatgatgaagatctatcttctctggccgaaagttcaaggattacagctcctggactcttagaacagctgaacgttactagagataccagtgactatctatggtacataaccagcgttgacataagttcatcagaatcctttcttcgaggcggacaaaaaccca

SEQ ID NO: 45587 - DNA, 243 bp, Glycine max
attgacacaatttttgaacattattacctaggcatgaaatattctttgataatttccagggctgtgggacgtcagttattgtaggtgttgcagcatcagggcaggaaatatcaacccgtcctttccagttggtgagtggacgagtctggaaaggaacagcttttggtggcttcaagagcaggtcacaggtgccttggcttgtagacaagtacttgaagaaggaaatcaaggttgatgagtaca

SEQ ID NO: 45588 - DNA, 200 bp, Glycine max
  unsure (1)..(200): unsure at all n locations
acctcgagtttgatggtcttgccagtcaaagtcttgacaaaacatttgcatgccaagaacttaancctcgaggtcgaatcctcggacaccattgataatgtcaaggccaagatccaggacaaggaatgtatccctccaaatcagcagaggttgatatttgctggtaaacaacttgaggatggaagaacccttgctgatta

SEQ ID NO: 45589 - DNA, 237 bp, Glycine max
gagggggtcacagtgagaaagagaaagagagaattcgtaaaccctaatttcggaaagatcggcgatgactgcctccaaggatcgcgagaacttcgtctacatcgccaaactcgccgagcaggccgagcgttacgaagcagatggtggaatcaatgaagaacgttgcgaatctcgacgttgaactgacggtggatgagcggaatttgcttgctgttgggtacaagaatgtgattggtg

SEQ ID NO: 45590 - DNA, 256 bp, Glycine max
tgttatccccgtgaggagggggtaccagacagcttcgccagaataatcgcgccacgaatagctgtcgccacttccttgctgcacttcacggggattgatgatgttttcacctcctccagaggatccaccaagaccctcggcaacttcgttaaggctacttttgattgcttgatgaaaacctatggattcctgacaccagaattctggaaggagactcgcttctccaaatctccattccaagagtacacagatctac

SEQ ID NO: 45591 - DNA, 255 bp, Glycine max
tctcgagcgctcgagccgctcgagccgcaaacaaagttttagatggtcttgaattagctgaagatacttgattcctatgggaaaatattaaatataaggatcagaaggaattttgcttttattcagtttgaatcccaagaggacgctactagagctttggaggccaccaacctgagcaagtttatggaccgtgttatcactgtggagtatgccattagagatgatgatgacagagacagaaggaatggatacagt

SEQ ID NO: 45592 - DNA, 227 bp, Glycine max
accaaggccaacgttgactacgagaagatagtgcgtgacacctgcaggaacatcggcttcgtctcaaatgatgtgggactggatgccgacaactgcaaggtcctcgtcaacattgagcaacagagccctgatattgctcagggtgtacacggccaccttaccaaaaaacctgaagaaattggtgctggtgaccagggtcacatgtttggctatgccactgatgaaac

SEQ ID NO: 45593 - DNA, 254 bp, Glycine max
caaaggttgctgtaggagataagatattgaagtagtgctaagtgcctaacacctgcagtgaacaatggcctctgcatcagcatctcttctcaagtcttcacttgttcttgacaagtctgagtgggtgaagggacaaacacttcgccaaccttctgctgcatcagttgtgagatgttaccccaccaccccatcaggcctcaccatcagagctggttcctatgctgatgagctcgttaagaccgcgaaaacagtgg

SEQ ID NO: 45594 - DNA, 253 bp, Glycine max
gcaccatctcattcagaaaggaaaaacaacaactcatgcttgaagaccgttttcaagccctcaaaaaagggtgaggactacaccatcttccaagctctcttcagcattgacatgttaattctgttcattgcaacagtttttggtgttggtggaacactaacagcacttgacaatttaggacagattgggaactcattagggtaccccaaaaagagcctcacaacttttgtgtcccttgtgagcatatggaact

SEQ ID NO: 45595 - DNA, 249 bp, Glycine max
gctaacaatgatgattgatgcggcgattcagatggattgcttggtgagttgtgcactgacatgccctgtattaggtatgacggtccgtcaagtaagaatgtgctaacatttagatgggagaatgcagaggaggaaattcttgggaagaagatgaaggattggttaagatttagtgttgcattttggcatacattccgtggaacaggctctgacccatcttggtcacctaccaaatactggctatgggaa

SEQ ID NO: 45596 - DNA, 234 bp, Glycine max
aggactgcttagcattcacatgccggcatactatgactctatcatcaagggtgtttcaacagtgatgatctcgtactctagctggaatgggatgaaaatgcatgcaaacaaaaaacttatcactggttacctcaagaacaaattgcatttcaagggttttgtcatatctgattggcagggtattgaccggattacctctcctcctcatgctaactattcatactctgttcaagc

SEQ ID NO: 45597 - DNA, 221 bp, Glycine max
catttactttttaaaataatgtaggacacaagaaagatgttagcttccttaccagcttacctggagcatcccaaaggctacaaattttgagtgctgatcttagcaatccagaaagtttcagtgcatccattgaagggtgcattggagttttccatgttgctaccccagttgactttgaactaaaggaaccggaggaagtagtgacgaaaagatccattgat

SEQ ID NO: 45598 - DNA, 216 bp, Glycine max
cggaatcaacccatactccacggaatggactggtttggcagatatattactgagtaaaggtaacgactattctgtgttgcgattatgctagttttgatggtttgattaccaagcaagttatgagcaagatggcagaaatgataaacagtctttgtggtggtgatgcaaaattgatgcgtgaaaggacacacctgctgttggcttcttgttcaagga

SEQ ID NO: 45599 - DNA, 169 bp, Glycine max
cacactataagaattctctaaaaatcaagttgggcactcaatctgtgcgcaatgtcatggacatgaatgcattatttggaggttttgcggcaccttaaattctgatcctgtgtgggtgatgaatgtagtaccagcacacaagccacctactaagaatactacccccgac

SEQ ID NO: 45600 - DNA, 244 bp, Glycine max
gttttgatgaaccaccttggccttctctatctgatgaggcaaaggattttgttaagagacttctaaataaagatccaaggaaaagaatgactgcagcacaagcattaggtcatccatggattaaaaattataaggatgtaaaagtacccttggatattctagtgttcaagctcatgaagacatacatgcgctcctcttctctacgaaaagaagctttaagggctttgtctaagacattagctat

SEQ ID NO: 45601 - DNA, 240 bp, Glycine max
taaaaagattcgcacagcacttgggaaaggtaagaaaattgtttttcttactagagttgatccttttccagtagctttactggctgttctttttggtgttaagaatgaaattctgagttctaacgccactaaccctatgctgacgcgacttcttgagaactgtaagagtctcaaatatctggttgatgagtgtccttttgcatttgtgaactagtatgtaatatgttattcacttaaata

SEQ ID NO: 45602 - DNA, 138 bp, Glycine max
gaggagaatgacgatagggaccacaacaagcatccctggtatcaagtctctagcaccggtggtgcttgtggttgaccctatgaggagaatgaccatacctgagatccgtcaacacccatggttccaagctcgacttcc

SEQ ID NO: 45603 - DNA, 164 bp, Glycine max
ggagggatcgtccccgtgctattccaaagggttccatgcaaaaagcatgggggggttaggttcagtgtgaatgggagggactacttcgagctagtgttgatcagcaatgtgggtggtgctggatccatccaatctgtgtccattaaaggctcaaaaactggatg

SEQ ID NO: 45604 - DNA, 183 bp, Glycine max
  unsure (1)..(183): unsure at all n locations
gtttttgctcttgcacaatcanggtgtattgtacggcatttcagcgagagaacaatcaacggatatgctttntgaacgtcagtagctgatgaagttataagaagtctgttttataacaanaataacgactcacttatcacagtttctgtatatgcttcagacagttacagttctttgaaatgc

SEQ ID NO: 45605 - DNA, 271 bp, Glycine max
gacctacgcaacaataatctcaccgggaaaatcccgcaaatggggacccttttgaaccagggtcccaccgcgttttctggtaaccctggactgtgcggtttcccattgcagagtgcttgccctgaagcgcaaaagcctgggattttcgctaaccctgaagatggtttccctcagaaccccaatgcgcttcacccggatggaaattatgagagagtgaagcagcacggtggtgggtaagttgctgttcttgttatctccgggctctccgtcg

SEQ ID NO: 45606 - DNA, 128 bp, Glycine max
agaagaagcagaagaaaagtgtgagtgcagaaaagaagagtggtgggcgagctcggaagaacgtgtacagaggaatcaggcaaaggccgtggggcaagtgggccgcggaaataagggacccacataag

SEQ ID NO: 45607 - DNA, 254 bp, Glycine max
gctccgtaccagtttcactgcataaatttgagagaaaactctgcaaacatgttggtttatcaggacctccttacaggtgatgagcttctctcggactccttccgttacaatgaaattgagaatggaatgctgtgggaagttgaggggaagtgggttgtaaagggagcagttgatgttgacattggtgaaaacccttctgctgagggtggagaagatgagggagtcgatgaccgcagctgtaaaggttgttgaca

SEQ ID NO: 45608 - DNA, 415 bp, Glycine max
acaaagcgaacaacaattgatcatcaacatataaaaaataatcagaagacactcaatggtacatggcacacattgcaacaccagatggtggatgctacataatacatattattgtcttaaaatatactactacttaccaacccattaaggttcttcgaaccctatttacaatcttatttctagcagcaacacctgttaattgaaactcacagttctcatccaagagaaatctgtacacctcccattcacgctctgaagttgaatgccgtcctacttcagccgagaaaacacaaattccaactgttttgagagcaaatgtgacatcataaaaaactcgaggtcttcccattccagatagctcaactggattagcgaccaacagttcagtatctggtcctcggtttgcaatgattac

SEQ ID NO: 45609 - DNA, 336 bp, Glycine max
ggaactggcaaagatagtctcacatttatattcatgcatgtttatagtatttataaaatgaaagttgaactatggttcttgcggagaatgaattcaattaagtgttagaaaagtgcttgtatcacacgcattaacacctttctttcaacacattctccctcattggtaaaacccataattcttggcattgagtatgatactccttaatccaccaattggtgacagaatcatgagtaggaggccaaatataatgcagatccagttggtgatccaggataagctgaacttcttaggtttgtaaatagcaagccagataatacaggggagaaagtatgt

SEQ ID NO: 45610 - DNA, 381 bp, Glycine max
ccatggcctccgtagcactcaccaccaccgcactcccctacctccgcctccgccgcaacaccgccgccaccctcaaacccaaccgccactcttccatttcactctcctcactcaaaccaaccctcaacgcttcaatttcctccttcccaaatttctcactaaaaaaaccaagcctagttttcaatcaaaaaccctcctctctaaccgtcagagcctccgcagcctccatcactccggcgacgggacggagcacaggttgggggcgtggctcatgctcacgtgctttcagaccttcgtcattacgtcggcgatgttcttgacggcgatggcggcgaatccgctgtgcgcgactcttactctgaattccattaatcaaactat

SEQ ID NO: 45611 - DNA, 336 bp, Glycine max
acaggacaataaaagaagcaatgcattaaagctgaaagtagaaagtacgttcatcttcaaaggagtgtaaaagagggtaatatatattttacagaatttctgaaagagcagaaaaaggaagtaaagacaagaatgatttgtgactcaaatcctggaagggatcataggaatagtgttctgtaagtatgcactggcagcagcaactccacttccaagctttacaggataacccacatctttgagtatcatctctacaccagctagacatcccaacagttgcaactggaaaatatttaaagaattaacaatatcaaaggttgggaatgtcaatataag

SEQ ID NO: 45612 - DNA, 316 bp, Glycine max
tggtcgattgatcaaagtaagagatggtggaactgattggggctggggtgttgctgtcaatgttgttaagaaaccttctggaggcggttatatagttgatactttacttcattgctcacctgtttcaaatgagaacagttttcggtctaaaccatgcccgccttgacctgtagagaaaggtgaaatgcatgtggcttctgttcaattaccattgatctctgccctcggtcaactgagggtatccataccttccgatcttcgacccttggaagcaaggcaaagtatattgcttgctgacaggagctgggcaaccgtt

SEQ ID NO: 45613 - DNA, 460 bp, Glycine max
gggaagctctgcaagtccacgggcatgtagtgaaattagggatggggcacaaggatgcgtcgcgtaagttgtctaaggtcttcaccttcgccgctctctccccctttggcgacctcaactacgctcgtcttcttctctccaccaatcccactctcaactcttactactacaacaccctccttcgcgccttctcccaaacccccctccccacccctcccttccacgccctctcccttttcctctccatgccctccccacccgataacttcactttccctttcctcctcaaatgctgctctcgttccaaactccctcctcttggtaaacagctccacgctctcctcaccaaactcggcttcgccccggatctttatatccagaacgtcctccttcatatgtactccgagttcggcgacttgctcctggctcgctccctgtttgatagaatgccttacagaga

SEQ ID NO: 45614 - DNA, 433 bp, Glycine max
ggaagaaggagtatacggcatcccattcgaggaatggccaggagaacccagactggaagtatgaacagacactgggacagagaattcaccaattgagccttcagaagcactgtccgagagaagttccattacagctgtgtgccatgccctgattgtaggaaaggggcttgtaggcgcggggacatgtgtgaatatgctcatggggtgtttgagtgctggctgcacccggctcagtatcggacacgcctctgcaaagatggtaccagttgcaatcgaagggtgtgtttttttgctcacactgcggaggagcttcgtccgctgtatgtgtccactggatctgctgtcccttcgtccaggtcatctgcctcggctcctaatgtcatggacatggctgctgcgatgagccttttgccgggctcgccttcttcggtct

SEQ ID NO: 45615 - DNA, 506 bp, Glycine max
gcgtgaggttcgttactaattacaagctcaccaaggaagacattgattatatcaaaaataatttgtctgtttcatgtgaggatggctttctggactatcttagaggaattgactgttctgatgttgagttctatgctattcccaaaggatcagttgtttttcttaaggtgcccctattgagaattgaaggtccaattgccgttgttcaattgctggaaacaccttttgtctatctaattaattttgcatcattagtttctactaatgctgcaaggcatcgttttgttgctggaaaaccaaaaactctacttgagtttggactacgaagggctcaggggcctgatggtggagtgggtgcatcaaagtacagttacattgggggatttgatgcaacaaggttcgttgcttttttaataccttaggttgctattgtataacttcactttttcatatggcacaccaatagcaacgttgcagcaggaatgttatttgggattccccttcgt

SEQ ID NO: 45616 - DNA, 439 bp, Glycine max
ggaatgcagccccaatcgggcggtaaattccgtccaaggctaaatactggcgagagaccgatagcgaaacagagagtggtttcagtgagtgatcggtgttcacttgatccttcataagtcgtcatcatcatcatcatcatcaccgttgattgaagaagatgccgatcagaaacatcgccatcggaaggcctgaagaggctactcaccccgacacgttgaaggcggggttggctgagttcatctccaccttgatcttcgtgttcgccggttcaggttccggcatcgcctacaacaagctcaccgacaacggcgccgacactcccgccggcctcatctccgcttccatcgcccatgctttcgccctcttcgtcgccgtcttcgtcggcgccaacatctccggcggccacgtcaaccccgccgtcaccttcggcgccttcgt

SEQ ID NO: 45617 - DNA, 438 bp, Glycine max
aagaactgataataatgtgtttgtatatgggcattttcactaaattttatagtgcagctctgctacttctgtaatcaaaagtttcctgcggcttaattgatatctcgctattttcagctggaataaaaaaggaacttgctgcagctaggaagatgatagctgataggcgtgatcaagagaaaaaagcatatcaagagaaaaaagcatatagcaagatgttccaataacactctggttaatccacatactcaccaggtgcgactttggaagtgcaaaagtcttggtgaaaggcgaaccaaatatatcatagatatgttctagatattatagagcacctgagcttatatttggagcaactgaatatactacagctaggtgtattggttgagcttatgcttggacaggtaggtgattgatgaggggagctcctttgattct

SEQ ID NO: 45618 - DNA, 475 bp, Glycine max
cagaaagcaagctcatcctagagttttaaaaatggcagcagcctcctccatggctctctcttccccatccttggctggcaaggccgtgaagctgggcccatcagcccccgaagtcgggagggtcagcatgaggaagaccgtcaccaagcaggcctcctccggaagcccatggtacggcccagaccgcgtcaagtacttgggcccattctctggcgagcccccgtcctacctcactggcgagttcccaggtgactacggctgggacactgctgggctttcggccgacccagaaaccttcgccagaaaccgtgagctcgaagtgatccactccaggtgggccatgctcggggccttgggctgcgtcttccccgaactgttgtcccgcaacggggtcaagtttggagaagctgtgtggttcaaggccgggtcccagatcttcagcgagggtgggctggactacttgggcaacccaagc

SEQ ID NO: 45619 - DNA, 282 bp, Glycine max
atcgaaagggcattcttacctaattcaaaggcaaaacctaaagttaacactaagaaaaataaaagcatttttattaaaccaaatataccgttagcgtacgcacttacaacataagggtatactaatagtatttctaaattaaatcataagaataataaagcaaatatgaaaaatgatatactgaattcacttctattttgtcctaaaaatgaatgatatccacactcgaaagcactgtctttttcttcgtatgggttatgtggggcaaagattaaatttaca

SEQ ID NO: 45620 - DNA, 441 bp, Glycine max
ctcgagccgattcggctcgaggtaaatcttcacagtggtgtcacaagaactatgtaaactaccttgccatgagaaaggttcttgaagttagagaacaactcagaagaattgcaaagaggataggcttagtcttaaaatcttgcgaaagtaatatgcaggtggtcagaaaagcagtcactgctggctttttgctaatgcgtgccatctagaggcatacaggcataacgggatgtataagacgttaagaggataacaggaagtttatattcatccattgtcagtgccattcagagtaaatccaaagtgggttatttacacttctcttgtatcaactgatcgacaatacatgcgtaatgtcataaccgtagatacctcatggctattggaagctgctcctcacttctatcagctacagcaatctaatcatcttcttcgctgatt

SEQ ID NO: 45621 - DNA, 232 bp, Glycine max
  unsure (1)..(232): unsure at all n locations
gtcttgaaatcaagtatcaatataatggaccaaaggcttccattgttgggaagatatgtgaattgcaatgcaaaggcttgggtccaaccggagtgcaaagagatgcaaggaaaaatgggataacatcaacaatttctttaagaaagttagggagagtagcaaagaaaggcgtgaagatagcaagacatgtncctatttccacgagcttgaagctctatacaaagaaaaggga

SEQ ID NO: 45622 - DNA, 408 bp, Glycine max
acaaatcaaatcgacaagtatatataatcttagcgttatactccaaagtctatctacaaatgaaatcaaatagaaacaggggtaaggcaaaagaaaagaatttaatctttctggatgaacattattctagtccatcaatattatctaactcaccttcacagttgctgatatagcattcccatacaaatcattcttaccgaggttctcaaaattttgaggaaactgcccaaaagcaatttcttggcctttctcttaatccatgaaaaaacaaagggcatctctcactgattgtgaatggtttgagtacatgtcacaatctataattagaatgatttttgcgttgctaatccttgaagagactcttagcaatgaatttatagctccagctttggagttgtgatgatattg

SEQ ID NO: 45623 - DNA, 350 bp, Glycine max
tggtggtgaaattgcctggccaacccaaggttgggtttaagcaatttgctggatatgttgatgtagatgccaagcatggaaggagcctcttctactattttgtggaggctgagcaagaccctcacaagaagcccctcacactttggctcaatggaggtcctggatgttcctccattggaggaggtgcttttactgaattgggacccttttatcctaaaggtgatggacgtggtctccgaagaaattcgatgtcttggaataaagcatccaaccttctttttgtggagtctccagctggagttggttggtcatactcaaatacaacttcagattataattctggagatgcc

SEQ ID NO: 45624 - DNA, 431 bp, Glycine max
tggacttggaaccgaatcaagggggttctaccaaaattactactgcatcatccaatcattcttgcaatggtgagccagattgcatgaattcaagccaaaactgtggaacatctaccctgatgggatgcttgaagagatttacaagagcagaaagattggggtcagaccaaaaatttttctgtcggcagtgtcaggtgaggcaagaaactctcaaacagatgtccattaggaagcttccccttgtttcttgcttccatataaaaagatttgagcactcttcaacaagaaagatgtcaaggaaagtggatcgctacctgcagttcccattttcactggacatgtctccttatctatcatcaacaattttaaggaatcgatttgggaataggatcttttcttttgatggggatgagccggatgcttcagatgag

SEQ ID NO: 45625 - DNA, 468 bp, Glycine max
gctagaaaaccgtatttcaggaccttttcggccattgctgagaaatatggtccaattttcattctcaaattgggttgccaccccaccttagtcgtgaatagcagggaaattgccaaggagtgcctgacaactaatgactaaggttttgcctcaaggcctatcacatcagcagggaaaatcttaggttacaacaatgcagttaccggtttttccccttatgggaagtattggcgcgaaattagaaaaatggccatccttgagatcctctcaagctataagcttgaaaagctaaagcatgtgagagacactgaaacattgtctcttgtcaaagacctgtgctcatcaatatcatgtccaaagaacgtgaatggctcaacaactcacggcctataagcaatttattggagcacatgtccttcaatataattgtgaggatgatagctgggaagagatttggaggggacacag

SEQ ID NO: 45626 - DNA, 469 bp, Glycine max
ctcgagccgaatcggctcgagcttcaattcatggaagtgtgattctaatctccacaacaaacctaaccctaaaaagctaaccctttttttttttttttttaaatattggttctttttttacttaccctagatgttagagccatggacataaccccaacaacaacgatcaacaacaacaacactactcccagtgcaacaacaaaatccccagaaaatgaaacagaaacaccgaccaggatcaccacccccatcactcccacaacgacaaaaacctcatctttctcgaatggtgtcctcaaacgcacccaccaccaccaccaccttcaccaccctatccctccggtggttacctacaaagaatgccttaaaaatcacgccgccaacttgggtggccacgccttagatggctgcggcgagttcatgccctctccgaccgccaccgctgccgaccccagctccataaaatgcg

SEQ ID NO: 45627 - DNA, 426 bp, Glycine max
acagtgttaggatatgggatcttcgggtaaatgcttgccagggcatcttacatctacgtggtagacccgctgttgcgtatgaccaacaaggcctggtctttgctgtagcaatggaagggggagctattaaattatttgattctcgttcttatgacaagggtccctttgacacctttctagttggtggtgacacagccgaagtttgtgatatcaaattcagtaatgacggcaaatcaatgcttctgactactactaataacaatatttatgttcttgatgcatatggaggagagaagcgttgtggatttagtttggaaccatctcctggtaccccaatagaggctacatttaccccagatgggaagtacatggtggcaggatctggaagcggaaccatgcaagtttggagtattgagaccaaaaatg

SEQ ID NO: 45628 - DNA, 470 bp, Glycine max
agactggtctgaactcccaaaggacctcctacacaaaatatcacaactcctcctcgaaagccctctctacctcctccgcttccgatccgtctgctcctcatggcgttcttccactcccccctctcccttcaacccctcaatctccctcaccaacaccttctccctctcccaccgcaccctcctcctcctcaaccctaaccctaaccctaaccctaacccccgcccctggctcgtcaagctctccctcgacccacacgccagcaccgcgcgtctcttccaccctctctcccgcttccccatgaaactgccccgtttcgccctcgacctcttcaccctccccgccctcgacctcggccgcgagttcctcctcaccaacacgcgccacacccgcgactccctctacattgaaaagctcgtcttcctccctctcacccatcgaaaagaccgttttgccctcctcacgatccacg

SEQ ID NO: 45629 - DNA, 429 bp, Glycine max
  unsure (1)..(429): unsure at all n locations
nnngncgcaacatccttcatcctgtaatgactgacttgaaagtcaaacagcttcctttgttcactcttctggtccgcaaactgagcgagcagtcctgcgccgctaccgtttgtgaggctgagataacgggtgtctgtatggtttgatgattcttgaggcacctcgtaatcgacccagagttcgtcgacgctagatgctgtgtacttgcccacaggttgtgagagcttgctatcgcggtaggtctcgccgaagccgcggccaaaccattcgactcgttggaattgcttaggaagctccataacgagaccgatgcgtggaagggtccgaggtaggttctcaccctttggtgtaccgacaacatggacagacagagtattgttggcgctgaaagtgtacgtaagaacgcagtcgacagaccaagagagaact

SEQ ID NO: 45630 - DNA, 312 bp, Glycine max
actaacataactgggggaaaaattctcaaatcacccatttttagttatattttatttacaaattttatgcatcacattatgcctttctatatattaggcaacacattccaagctgaacatgctaaatccctaagaagcatccatgtcaaggggtcacaccattggcaatcccattttgggaaacgatacttggggaggccaataaagggggcttttttaaccagtattggtgaaatctttgccttgcatactccttggagtcaaaggcaattggattgacctgactcgaaataagtccccacaagccccaaa

SEQ ID NO: 45631 - DNA, 248 bp, Glycine max
caacaactaatcagtggggattgtgtactgttatattgggcttctacatctatttgggacttcatgagcttattgtcatcggccttttatgccatatttctattttacgtctttgggctgcatcagtttgttggacgggtatctttggaccaacaatcctcatgcttttggaatatggacttgtaatcgcattattaacttattgccttacatttctcttttttgaccataccatggcgcataatgtg

SEQ ID NO: 45632 - DNA, 488 bp, Glycine max
gcaaccacattttgcttcttactccttcatgttattaaatttccaccaaagaacatgcagtatcctgtggtagatctcctatcaacaattgatcctacatagtcagcatcagtatatactttcatggataaattttctcctttttaaacaacaatctctttcctggagaagacttcaagtactgaatgatcccattcaaccaagaatgtcaagaagaccatggaagggagtgggtcagaatgctgcaataatacagaggtccattcttggacaagaaagcatgtcaagaagaccatattagggagtgggtcaaaatgctgcgataatacagaggttcattcttggacaagaaaggtgcagttagcaacctttgggggttgcaccaagggagaaacaaaagaggatcactttgtttgtgtgttacatcaagcatgagaaacagaacaatacaatgaagtggtgaatgagagcaagatagggagattatc

SEQ ID NO: 45633 - DNA, 449 bp, Glycine max
acagtatatgtcattcattctgcttctccttctgtggtggctgaggacatgtaactcatcacaatggaggtttcttctgatgatggcaccccaacagttgaagactgaaactgttgcttgcaagtatgacatgctatttccataacagtggaacctatcttcttgatggcttgctttctcagctcttcagcccttgaaagttcagcttgtgcttgtttccttatccttttggcattctcaaactcaagttcagctatctcaatttgacgtttggcctctcttctagcctcttctgcataagccttttctgcaatggccaacttgagttcctctcctgcaaactcctgcaaccttgccacttccaacgtggaatagtcactcacattgttattattattattattattcctttcaggtgggctcctatgtgcttctgaacatgctctctc

SEQ ID NO: 45634 - DNA, 402 bp, Glycine max
gatttcagggttgatcttctcttcactgggttccctccgtttcttgagcccccccccccccccccgtttttttcttttctgggccttttccaattctcaatggaggttccagaaatggaaggcaagaccgaaagtcatgtgacatcggcagaagcctttgtggaagggggggttcaagaagcttgtgatgatgcttgcagcatatgccttgaggatttttgcaaaagtgatcctgccactgtcactaattgcaagcatgagttccacctgcagtgcattcttgaatggtgtcagagaagctcccaatgtcctatgtgttggcaacctatcagcttgagggatactacaagtcaagaactgcttgaggcagtagagctggaaaggagcttgagggatacccca

SEQ ID NO: 45635 - DNA, 477 bp, Glycine max
aattcatcacttgttatattttgtccttggatcttgcagctacacatgggggctaggaaatatgggccagcttgggcattcttcactccagtacggggataaagagttactgccaaggagggtggttacccttgatggtattttcataaaggacgtggcatgtggcggtgtacacacatgttctgtaactcagggaggagcactttatgcctggggtggtggtcggtctgggcagctagggcttggcccccaaactggattattctcgtgtgttgctaatgactctcagacatttttccgaaacattccagttttagtagttcctaaaggtgtgcaacttgttgcatgtgggtattctcacacccttatctctatgagtgatggtcgaattcatggatggggttacaataattatggtcaggcagcaaatgagaaatgtacatatgcttggtatccatcaccaattgactggtgtgt

SEQ ID NO: 45636 - DNA, 385 bp, Glycine max
aatgtaagtgaatatttgaatgcctgcaattctgagctatacaagctcagctatttctaggaaaagaaaatccgaggggacactgaatgtaaccaagcatcaatgcaaatttgacctgaagcaactagtaccaaccaaacttctgatatacaatatgcatttcatatgacaaccaataactgggcatggcaacctctttagtccaaacaagatcattataatatagatgatctaaaaggaaagtgaaagtatttaccagctcctgatcaatcaataggtttagaccttcaatgctaacttctgagctgcaagagcttcagcctccagagttggctcccacaatagtgtaggctctgcaagtcatgatgtcacaacatatggatcc

SEQ ID NO: 45637 - DNA, 247 bp, Glycine max
aaattagttcattctctttgcgcagttccctacctctcctttcaagatgcagatcttcgatcaagaccctcaccggaaagaccatcacccttgaggcggaaagctctgacaccatcgacaacgtcaaggccaagattcaggacaaggaaggaattctcacggatcagccacgtcttatcttggccggaaagcaactcgaggacggccgtaccatcgtcgactacaacatgcagaaggagtcaaccct

SEQ ID NO: 45638 - DNA, 379 bp, Glycine max
aagacttggagcagaagaacttgggtttattaattgaatgtcaaaaacacatggaggcatcaaaattttctgatgaagttatctctgagttggagagtgaaaaccttatgcaacagatggagctagagttcttgttagacgaaatcagaaagttcacaatggggattcatcaagttcttgcagctcttcagattgattcaggtggggggcatggcaaagggatcaagccagaggaaatgcctatatcgcatattctcaataatatcgagggcttgaaaggctctcttgtgaaaacccaagaggagaagctgctgctacttgtagagaatgctatcctcctaactgtacttttgcaacaagaatccgagggagaagaact

SEQ ID NO: 45639 - DNA, 472 bp, Glycine max
gtctaaatatggagtcctctaggaggtacaaagtggttgcacagagaaaggccttgtacagatgatgcttgctgtgttaagcgtctgagattatgtggcgccatacttgttgggaagactaatatgcatgaacttggggttggaattagtggtatcaatccacattatgggaggttcttctagtggatctgctactgtggtgtctgcaggattgtgccctgttgcccttggtgttgacgggggagcatgcttgttcaggttctgtgagggtgcctgcatctctttgtggtgtagttggtctaaaaccaacttttggccgtgtacctcattccggagtccttcctctaaactggacagttgggatggttggaatactagccggcactgttgaggatgcattgatcacttatgcagccattagtggagaaatttcatcccatcagccctctaatatgcttaccaagataaatct

SEQ ID NO: 45640 - DNA, 382 bp, Glycine max
ggaagttttatttttcgggtgtgtagagattaaagagaggaaggggagggggctgacacattgttaccttgtaataggggtttactgaaggtcttggctggtgtgaacacaaacttcactgtgacgtcaaaagcagcagatgatggagaattctcagaactctacatcttcaagtggacatcactcttgatccctccaatgaccctactaatcatgaatattgttggggtggttgttggggtctcagatgccatcaacaatggttatgattcatggggacctctctttggtagattgctctttgcattgtgggtgatcctgcatctctaccccttcttgaaggggctgcttggaaaacaagatagaatgccaaccattatat

SEQ ID NO: 45641 - DNA, 462 bp, Glycine max
aaacaaaagaaatcacaatctgtggcttcattatccttgggtgcaccatctcctgcggttcatccatctatgcaaccatcatcatccgcattgaagcatggacctccatcaggaactaagaccaaaaagcaaaaatcattcccttctacaggacttacaagccaaagccaggtcactaatcaggggggttcttcaggtgcctttgcaacaaaaggacctgctgaagcagcttcttatgatccctggattggaaggaaagtttggacaaggtggcctgaagacaaccacttctatgaagctgttataacggattataatgctgctgagggactacatgctttggtttatgatatgaattcagcaaatgaaacatgggagtgggttaatcttaaagagatatctccagaagatattctttgggagggtgaagatcctggaatatcccataaaggatgccagccc

SEQ ID NO: 45642 - DNA, 452 bp, Glycine max
tagatgatgtgatatatgtaattgattgtggaaagcataaagagaatcgctacaatcctcagaagaaattgtctagcatggttgaagattggatttctcgagcaaatgcaacgcaacgtcgtggtagagctggacgttgtaaaacctggaatttgtttttccttgtacactcgtcatagatttgaaaagctcatgcgcccatatcaggttccggagatgcttcggatgccattagttgaattgtgtttgcagattaagttactgtctcttggatatatcaagccatttttgtcagaggcattagaacctcccaaggttgaagcaatggattcggcaatatctttactgtatgaggttggtgctcttgaaggggatgaggagttgacaccacttgggcatcatctggcaaaacttcctgtggatgtgttaattgggaagatgatgctgtatgg

SEQ ID NO: 45643 - DNA, 518 bp, Glycine max
attgattcgttgtctgacacgtaattagtgtttagatatactactgatcatgtggttgctgatattgccttacaggcctatgtgcagcagttagaatcaagtcgtttgaagttgatgcagttggagcaagaacttgaacgtgcaagacagcagggaatgtatataggtggtgggttggattctaatcatctgggttttgctggatcagtaaattcaggaattacaacctttgagatggagtatggacactgggtgaatgagcaaaatagacaaatcacagaactgagaaatgctttaaatgctcatattggtgacgtagagctcaggattttagtagatggtatgatgagccactatgccgaaatgtttcgcatgaaatctgctgctgcaaaagcagatgttttctatgttatgtccggtatgtggaaaacaacagctgaaagatctttcctgtggattggaggctttcacccctcggagcttctaaaggttcttggtcccctgattgaacccctgac

SEQ ID NO: 45644 - DNA, 500 bp, Glycine max
gacagcaacactgatgacattccattaattttagtgtcatattcaagagtagcagctatgaattctttcacattgcctttaaatccaggtcccacgagcatttcttccacatcaccaagttgagatgtgataataccacgtagtgtccaagaaactgggcagagataatggaaccacatccaccatacaggtatatgagattttggaataagaaatccggatacaagattccatagagagtaaaatgcagaagaaataacagctgcaaagtgttgtgtaggtgtaatgccaacagccatcatgccgtaaaaggtgaagtacataaatgtgaggaacatgaacacaagatagaggaaaaactttccaacatccctttcaaaattgaccatgaaatatgtgattacaccaaatactattgtctgaagagcaacatatgggatctccaccagcccctgagctattgcgtatgagattggagagtacattccagcagccttctc

SEQ ID NO: 45645 - DNA, 413 bp, Glycine max
atctcgtgtgtttagtatcataaaaatattggagacctaggcgaattctagcatgcgaaagtgaaacttcttttgcacgtacgaaaataaatattaaccgtttgatactctttaattttcatcgcatgactcaaattttttaacatttttgcttttcttttttctctttttatgcctatttttccttaattacccatttcttctactttccccttctttgttctttccctccagcaccccagatccgtcatcatcctcatcaaggtcgactccccagtcgaccataccatcgtcgccctcttcgaccacctcgaccccgacgactacatcatcgacaacgacaacgagtggtacaagaacatcgagcgccgcatgaaccaacgagggctccctccctctcacgagccaataca

SEQ ID NO: 45646 - DNA, 403 bp, Glycine max
gactcacttatactccactctaacattgatgttattaaaaatacaagaatcatctgttgtcaagaggatcatgaatttacaactgctctatatcaagctcattgagaaaaatataacatgttgaattcaattacttataatgttaaaaataattgaaaaaaattagccttcaaagggcctcaatcaactactgtagtgtacaaaatggcgaggattgcagcccccacagtaatcaaataaaactaaaccaattgaagaagaatctacttctgaacccgttccatcttgactctgatcttttcttcgatcaaggaagtttctgtctcaagatcatacattctgttaagggcgcgcatattctcaagtacttcactcagactactatcatttttcccatcacacc

SEQ ID NO: 45647 - DNA, 473 bp, Glycine max
agaacatgtttcagagttagaattgcaagctactgaatctaaagctgaatatgaaaaaagaatagagggacttaagcttcatcttgcagatgcaagaatgcaagtgaaggaactagaggcattttccgaatccagatttttgaaatggaagaataaagaggatacctatcaaactatcgtaaatttccaagttggagctttccaggaactgagagctgccatgaagtctgtcaaagatgatgtgataaaaacaaaaagaaactacttagaggaattcaagtactttggaatcaagttgaaaggtctagctgaggctgctgaaaattatcatgtagttatagctgaaaataggaaattgtataatgaagttcaagatttgaaaggtaatataagggtatattgtcgaattaagccatttcttccagggcaaagtcaaagccatacaacaattgagtttgttggtgatgatggag

SEQ ID NO: 45648 - DNA, 432 bp, Glycine max
ggctcgagattatttactccaaagaacagcactagatgctttgagagtaatagaggttgaactcaacttcatctatcaagctttctacaccaaggcatcagtcataaccaacaaggtagggtttttctttcgattagggtcctttgcttcactcgtggcggccttggtggtttttgtttatgaccaaaagcgtggctccaatccctttgatgttaaagtcacctacacattactatatggtgctgtggccttagatctcgtgtccgcgttcatgctcattttttctgaccactcatttgcattaatttaccctcacatctctaaaaaaattagtgattctgatggtggcaaagaaacatccaaattagcctctattttaagttgtttcctcaagcttaagagaccgaaatggagagaacagaagcttaagga

SEQ ID NO: 45649 - DNA, 207 bp, Glycine max
ggggccaaacaaaaaaaaaaaccccttttaaccgctaaaagggaatgataaaccaatttttttgatcccaaattaacccgattttaacaagaaaaccttaaatcaaaccaaaaggcctacaagagaaaaaccccccttaactaaacagtggggtcttgaagtcccaaaaaaaaacccccttttttaaaaaattcaccttttggaaaa

SEQ ID NO: 45650 - DNA, 415 bp, Glycine max
gtgagcaggctcccggtcctgtccgacaagctctgcggcaagaccaccgccgccagaatccagctcctgggttgctacatgctgtacgaggttgtagggttcacgcaaatctcggggatgcagattttgtacaagacctgtgggggaaccaacgctgctgggagagggtttgaggagaggagggacactgctttctctgtgatggagaatggggtggtcactggccatggattctatgccaccagctaccagtctttgtatgtgatggggcaatgtgagggagatgttggtgattctgattgtggggagtgtgtcaaaagtgctgtccagagggctcatgttgaatgtggaagctccatttcaggccacgtctatttgcacaagtgttgcattagctatagttattaccctaatg

SEQ ID NO: 45651 - DNA, 404 bp, Glycine max
gtcaaatgtctactaggaatgaacttatacaatatattgtttcctaatcaaaagcacgttaaaggtagagcttgtacatatgaggatcggctaaagcacaataaaagcaccgttgaaggctctaactaatttatattcgcctaattcaaaatgggaggagccactctaagcatcaaactttgaacaaaagatatcatcgaagcaaatccaatgcacattatactgaatccaggaaaatcaaaaggtgccttttcagaaaggaatagagctgttaatggagagaaaaccaagggagaaacaatatgtgcaattgaacatatgcctgaaatgcaaccttgagcctttccctgctcatggggaccagcttctttagatacaatacttcgtatacaagggtgtgagaa

SEQ ID NO: 45652 - DNA, 471 bp, Glycine max
tgccatggcactgcatttcaaaacgtgcattttttctttcaaacctcatcaaattatgacaacaaaggctcagctttctcaaagcttcaatcctgctaaacttgattctcttcacattgccaacaaatggaacattgttcaagaagaaagatctagcgcattattcacaaaaactggagatctcatcagcattaatcactcagacaaactggaggtggtcaagaatgaatttatgaacactgtgggtgaaaattcattaagaggtttgtacatgattgatgccatgcagcgcctaaatattgattaccacttccaagaggaaattgaagaattcctaaggaggcaatatgtgaattctactactattgcgggtggttattatggtgatgatattcatgagattgcacttcgcttcaggctattgagacaacaaggtttctttgtgcccgaagaggtgtttcacaagttcac

SEQ ID NO: 45653 - DNA, 432 bp, Glycine max
aataaataaaatatttattaattcattattcagtactcttagtcttagaacacgaatttacaaaatcttgtagttaattaaacttattttctataaaatttagtatgagaaaatagtgaaccattatggaacttccttcaatcagtgaggtcaatttattttaggccaacctagagattaaagaaaatcatcataaagcaatgacttgacttgctcctctagccctggaagggactgtttgtcgtcataactatacatcaatggtaccatccttgcaagattgagtgaggccttagtgaatgtcgaatggaaatggttaccaaacaagcactcttggttgaggctcttccatgcatcggagatcttactcatcaccctttttcttgctgttctcgtcgtgtagtgtgggtgatccatcatgagacaattcac

SEQ ID NO: 45654 - DNA, 333 bp, Glycine max
aaaagatagagcaaggaactcataaaagtgggaggaatgtggggttgaaagcttatgttgtgtgccaagtgcttgagattgttgtcaaaaaggaaataaaacaagctgaaataaaatctacacaagtcaaaatcaggatgttcttccgaccagaagatttatcaaatgagaaggcatattgctctgatatacgagaggtgtattacagtgatgaaacatatataatctctgtagaatccatagaagggaaatgtcaagtcagaaaaaagaatgatattcccgaatgcagtgctcttggtggaatcttccaaaatgtttttttctgcgagctct

SEQ ID NO: 45655 - DNA, 492 bp, Glycine max
tataaataaaacggtttctctctttgagactactatcagggtcctcggaggattactttcagctcatcttattgccactgattatgctacgggcatgagagttccgttgtatgataatcagttactaaacttagctgaagatcttgccaggaggttgttacctgcatttgatacccctacaggaattccatttggatctgtaaacttgttacatggagttgataaacatgaaagcaagataacttcaacagctggtggtgggaccttgactcttgaatttggagttctaagccgattgacaaatgatcctatttttgaacaagttaccaagaatgcagtgcgtggactttgggcacggcgttcaaagcttaacctggtcggtgctcatattaatgtttttacaggtgaatggacacaaaaggatgctgggataggaactagtattgactctttttatgagtatctattggaggcttatttattatttggaga

SEQ ID NO: 45656 - DNA, 385 bp, Glycine max
ggaagatgtctagtttggttttgttgtccgtgttatttctccttctccaacgtcctctctcatccttctcagccaactccgaaggtgtgttttttaatgttccacttattgattattttgcttgtggtcctgtcctagctaatttctttcttgttttgtaggaaacgctcttcatgctttgagaagcaggctttctgaccccagcaacgtgcttcagagctgggacccaaatctcgttaatgcttgtacttggtttcatgttacctgcgactccaacaatcacgtcattcgcttagacttgggcaattctaagctctccggaactttgggaccagaacttgcccagctaccccaccttcaatacctgtttgtatctgtctctttt

SEQ ID NO: 45657 - DNA, 508 bp, Glycine max
  unsure (1)..(508): unsure at all n locations
ctcggctacttggacttgagtgacaatgccttgagtggtgaaatcccaagtgagctatgttacttgcccaaactcgaggaactccatctcaactccaacgacctcgtggggtccattccagttgcaattgggaacctcacgaagttgcagaagcttatcctctacgacaatcaactcggcggcaaaattcccggcaccatcgggaaccttaagagccttcaagtgataagagcaggtggaaacaagaacctggaaggccttttaccacaagaaattggcaattgttccagtttggtcatgttgggtcttgctgaaactagcctttcaggttctctacctncaactcttggccttttgaagaaccttgaaaccattgccatttacacttccctactctcaggtgaaataccacctgaacttgggtactgcacagggctccaaaacatatatctttacgagaactccctcactggatccataccaagcaagttgggaaaccttaagaacc

SEQ ID NO: 45658 - DNA, 505 bp, Glycine max
cttcaaccaaagccaaagtctcaatttgtttaagcactactgctaccaaaccaaaagggtttcgttccttagggcggttttccgatttctcggaaaccgctctatataccctgcactgcaaccacattcgttatagtgttcctaatttgaaagaaagagagaaagaaaaaattaatgtccttggatttgtagaaattaataaataattttggacgccctctcccctcactcgcgactatgggtgcaaaacggcaacaacccagtgaatgggtgaaaggtaaacttgtagggtgtggatcttttggcaatgtccatttggcaatgaacaaaaccaccggtgggctttttgttgtgaaatcaccacattccagggctgaacgccatgctttggataaagaggtgaaaatcctaaacactttaaattcatcaccatacattgtccaatgtttggggaccgaggaggaggaagaagaccaaggcaagctcaatgtttttatggagtaca

SEQ ID NO: 45659 - DNA, 491 bp, Glycine max
  unsure (1)..(491): unsure at all n locations
ctcttcgtgcagattacatgatctttattgtaaatcatgcttgataatttgttgtttctctttaggtgacaaaatggctctcgcggacataatcccaaattccaccttggccttaaacacgaccctatgggtttgcgagcacacaactaagtttcaacgtaattcaaagggaatattctacaacggcaaccctttaaactacacattatctgtggtctctctgcaggcctccttagtttgtttgtccactacatggttgcaatcctttcttatcccatttggggagaccaccttcattccacaagtgctgggagggttgctgacggtgccatcaatactgggacaaattaaaaatcttgacaagttgctcttcgctccaaaacctttctacgtgtgtgaggcaatctctctttacgggaccttgntgntcctgttcttgatgggagtcaaaatagacatatctgtgctaatgagactgggaaaaaagaatt

SEQ ID NO: 45660 - DNA, 482 bp, Glycine max
ggaggatgggtttagaggagagtttaatgcctttgttgggaacatacctcaccaagtgttgctgctttcgagtctgagggttttgtgggcgccaagggccaaccttggtggacggttgcctagtggctggtcggatttgtgctctctgagggtgctcaatttggcgcagaattatgttgccggtgttgttccagagagtttggggatgtgtaggaatttaagtttcttggacttgagttctaacattttggtggggtatctgccttcattgcagcttcgggttccttgtatgatgtacttcaatatcagcaggaataatatatctggcactcttcaagggtttaggaatgaaagctgtggtgcaagtgcactggatgcttcattcctagagttgaatggttttaatgtctggaggtttcaaaagaatgctctcattggatctggttttgaagagaccaacactgttgttgttagccatgatt

SEQ ID NO: 45661 - DNA, 404 bp, Glycine max
aagaaacaaaattaagaagtcattaaatgagtaaagcacgtaaattttttaaggccatacattggatgcaagaattgctatcaagtggctgaactataatataaaaagaaaaaccctaccttacaatcatgagactactcctacaaacgcaaaagctgctaccgcaggcaacaacatacatagagtaactgaactaaaccataaaccagttaagaaaaagagcaaaaatctatcttaacttgggccgctttgtcatgctactacttagaccggctcctcttgacttaccaaagctttttgcctttcttcttttcctatcttcttcactgtcagactcattccctttctcccgatctgcattgcttgcttccctctccagttcttcccatgtctttcccttctct

SEQ ID NO: 45662 - DNA, 442 bp, Glycine max
acatgcacatcaagcgaaagaaaaacagagaccagctgagcttcattgctaactacaccccaaaagctacaagctggtccccaaaacctctcactcccaaagtgaaaaaaatgaagaaaagtaaaaatctgcaacagaaactgaagaggagtagattccgggggcgtatctgcaagcatcccacagttaaacctctcctcagaaagtgaaaaactcacttatttaccgtcaccaattcaagcttgtttcctcaaatcatttgaatgaataaaagtgccgtgaaacccataaggaactctagaaggaagcttaacggaagcctcaagcttcaaagttttggcattcacaatctgcagctccgatttccattccttctcatcatgcacgaatgcgagaatatagccatcatcttcatcaccgtcaacaccatttggaagaaaca

SEQ ID NO: 45663 - DNA, 351 bp, Glycine max
tagcaatcactaagatcagtggccgaggaggcttgaaatggatcataactggtttgtccataacaacacttcctaacactttgattcttggaatccctctcgtgaaggctatgtataagagtgaagcagttgttctcctggcacagattattttcttgcagagcatgatttggtacaatttgttgttgctcctttatgaacttgatgctgtcaagaccaggcctactgcagctgcatcatcatcacaaggatcaggagaaacagacacaggtcgtgaagtacaatcaaaaggagaagaagacgcagaacctagaataaaaaggaagaggaaggtcttgctcattcttgtca

SEQ ID NO: 45664 - DNA, 453 bp, Glycine max
atagacaaattaattaagtagtattaattagttgagtgatcacatgttttctaattacaatgaatcaataatgcagtaaatttacaactatttataaattgttattttacggcaatgtaatgctgttattctcgatgtccctagctagcatatatttaacatttgctcttcaaattgctaataggaagtagaaggccaattccaccggcaaggcaatgagcattcctaacaagatcgcagtgcttaaaacggctggatggacattatactctttggcaaaaacaaaaggaacaattccttggggtagagctgcctgaacaattgccactttaaacaatgtgtctcttaatccaatcacaaaggaagccacagccatcagggtaggtccaagcacaactttcagtcctattgccaccattgccatccttggcccacatgctatgatgcttgact

SEQ ID NO: 45665 - DNA, 457 bp, Glycine max
  unsure (1)..(457): unsure at all n locations
gtacaattgtggggtcacattctcaaggacgcgctttgcatgctgtgcacattttggtgaaggaagttagatctgtgggagaatgtcgtcgtcggaggcgcagggagcggcgcagaggcgatatttgacagtggggtggtgccgtcgtctctcgtcgagattgcacccattcttcgcgttgctaatgaggttgagaagactcatcctagagttgcttatctctgccggtgttatgcgttcgagaaagctcatagactggatcctacttcaagtggtcgtgatgttcggcaattcaaaactgcccttcttcaacgtttggaaagagaaaacgatccaacattgaaaggaagagtaaagaaaagtgatgctcatgagatgcagagtttttatcagcattactacaaanaatatatccaagctttacaaaatgctgctgataaagctgatcgtgcgcagc

SEQ ID NO: 45666 - DNA, 434 bp, Glycine max
gcatcagaccccacctccatttaccaagcaatgctatgttgaaattggtgatatccttaatgtccagacctccattttctttaggtgatgtcaccgtgtcccacctaatccatgcgatcttattttggtcaagccctgctccccaaagaaaccttcgctgcagtctcaccaatttgtccaccactaatttaggtgccgttagatttgtcaaaatttagctgctcaactggcaggcaaaagaaatcagcatcagcacgcatcggccagccaagctgaaaacaatcagctgaccagaaatattcatttaaatcatcatagttcctccattgtgaatgctttgacctaccctttttgctccgtgcagcttccttaagaaagcctcatcttcacctacataggctggcttgacattctctcctgtcattggactaaca

SEQ ID NO: 45667 - DNA, 488 bp, Glycine max
cccttcctcaatgggcaactgttgctctcaaggcaacgttgccgacggcccggctgacgactctgccgccgccaatgacaagggagaagctaaccaacaaggtagtaataaccatgcaaacgacaacaatgataattccacaaaccctaccactgccccaacgacgacatcaaagccaccacccacggtcaccccacccacttcaaaaccctcgaaaccggctgcaatgggcccggtcctcggccggccgatggaggacgtgagagccacgtatacaataggtaaagagctagggagaggccaatttggtgtcacacatttgtgcacaaacaaagccacggggcaacaatttgcatgcaaaacaattgcaaagaggaagcttgtgaacaaggaggacatagaggacgtgagaagagaggttcaaatcatgcaccatctctcgggtcaacctaacattgtggaacttaagggtgcatatgaggacaaac

SEQ ID NO: 45668 - DNA, 408 bp, Glycine max
gagttgatgacatcacatactggcattagtagaggttttgagaattctctagtaggaggttggagagagtcaattgcatctaatagataaggtccaccataccagttttttaaacgggcatcagaaggggatgccaccaaattttgattttccatagcaccttttctgttcaaagtgtggaggagatcatgaaaattgtgggagaggcaagggaccctcctccagtatctaggcttgtcaaaggttttggctgggagggcaaagaagatgaaggggaagaagacgtggaggaagaggaggatgaagaagacgagtatgacaagagggtcaaagaggttcatgcaagtggagaatttcaaatcagttaagcagtataataattcttgtgtacttggttaaagtattatt

SEQ ID NO: 45669 - DNA, 375 bp, Glycine max
aaggaaaaaaaatccgttaatgaaattgaaactcataatcctccctaataaccatggcagggagaataaagaaaaaacatgcgggacattcttttcatcctaaacaagggtactaccctggttgagagctaccaaaaaagaaaaacataatttaaattcctattaaataccctgacaaaacaagctccacgacttacgagtcctgaaaacctcatattttgcctggattcatgaagactttaacccttgctcccattgatctgggcggcagattggacttgaacttagcacgaactataccactggtaccatgaggcctggggaccttaccccaaatgcagcgataggggcttccgtccttttttaccttggctt

SEQ ID NO: 45670 - DNA, 291 bp, Glycine max
agtctataatttcttttatattttagccacactgatatttattgtttggatccggccctccttataacatagatcactttaaagtaaattaaaccatggatttaaaggaaaaaggggattggcttaagatgaagtgcctctttcttgtaggtaactaggccatatgtttcactcatgtctatgtcttgtccagatgtgtgagttgcaggcagcttccaattgaaccaataaagaaggttggccagaatatactcaacagaagcaagcccaaacgtcattccggggcatgcc

SEQ ID NO: 45671 - DNA, 421 bp, Glycine max
tcgaaaactgtttgactaaaacctttcgtcccgcaacctcgtatcctggaacatgatgatgactggttacgtcaaacaccatcaaattcaatatgcccagtacctgttcgatcaaatgcccttcaaagacacggtttcttggaatatcatgctctctggttttcacagaatcacaaactctgatgggttgtaccgctgtttcttgcaaatgggaagagctggtgtgccccccgatgactataccgtctccacattgctcagagcggttataagcaccgagttagatgttttgatcccccagcttcacgctcgagcgctgcatttagcacttaacttgagtgtgtttgttgggtcttcgttgatcagagcttatgccagtttaagagacgaggaggcttttaagcaagcgtttgatgatata

SEQ ID NO: 45672 - DNA, 362 bp, Glycine max
tgctctttctctctcttaaatctttggactctcagattgcgccttttttttttcttttctcaaacctttggtctttgattccaattccagttggcttctaagaagagtgttagagaagtatttattgatcagggaatggctgggactgtgagtgaggaatctggggcgggaaagtctgtggagaggatttcaactgggcacgcgttgtctatccggggaagcattggcagagtggctgtcttctgcgcaggtggagaatggaatcgcgtccacttctcccccttactgggacactgatgacgaagatgatggaccaaaaccggcggcgttatatggaagatatacatggaagatagaaaagt

SEQ ID NO: 45673 - DNA, 401 bp, Glycine max
gaaaatatactgttgggtaggcctgatgcagaccaagttgagattgaagaagctgccagggttgctaatgctcattccttcatcattaaacttcctgatggctatgaaacacaggtaagaaaaaagagggctgcaactttctggagggcaaaaacagagaatagcaatagcaagggcaatgctgaaaaaccctgcaattcttctcctagacgaggcaacaagtgcattggactcagagtcagaaaagcttgtgcaagaagcccttgaccggttcatgattggccgaacaactcttgtaattgcccatcgtctctccacaattcgcacagctgaccttgtagctgtacttcagctaggaagtgtttctgaaattggaactcatgatgagctcttctcgaaag

SEQ ID NO: 45674 - DNA, 337 bp, Glycine max
ctgaagatagcatcttgattcaagcattctacgactagaaaaacttgcagacttgacattactagtcatttacgtacgacgggggattattatagcatttgaatttgacactaaagtttcaagggaagttaagcagcttgatagatactagtactatatatctaagggtcatattgtaatagggaaatgtctagtttcatcacctcgagagagggagaatgttgactttggagtcttattgccatacttgacactaattctggattctcctaagaacccataaaagctataggaaccgtgcacatttgagactccctttacacgacccgtttgccac

SEQ ID NO: 45675 - DNA, 364 bp, Glycine max
ctcgaccagacttcttctggcgatgttttccatatggaaaggatgtttatgataaatggggagatgtcatttgtcatggtgaccaaaaggtcataaaggaaggatacaagagtttcccaagtgggtcatacttcaagggtcattttctggtctgggttttttatcattgtacttatctggaaaaataaaagcatttgatcgcaaaggtcatgttgcaaaactttgcattgtttttctaccactacttgttgcatcacttgttggcatttctcgagttgatgactactggcaccactggcaagacgtgtttgcgggaggtcttttagggcttacagtggctacattttgctatttgcagtttttt

SEQ ID NO: 45676 - DNA, 310 bp, Glycine max
aggggaactcaaaaaaaggaggaataagcaaatggcatgtacagtgtacacgataaaatacatgaatctgaaaaccaataaaaacgatttaataattaaaaaataaaataagaaaaacacctggcgcaatataacctaggcgcgggggtcaactaaacgtgccgccggcgaaacttgccggcgcggcgacggcgaatatttcggcgagagccgtcatggctcgcacttgcatttccaagggggagatatagtccgtggctttttccaaaaggtttggaaacgaaacctttcggcaaccgggaaccaaccg

SEQ ID NO: 45677 - DNA, 453 bp, Glycine max
tgcacctgctccgacacctttggtcaacacgaccaatgaggattcccagtttccagttgaaaatggcaaaaggcatttgtctgaagaagaaatgaagatcaagacaaggagagagattgcaggcccttggggtgcagcttggtaagatgaatattgctgcatgggcaagcaaagatgagcaggaaaagaacaaatcttctccccgggacatgagtgtgcaagaacaggagagaattgaatttgaaaaacgtgcagctctgtgggaggaagctgagaaatctaaacatactgcaagatttaagcgagaggaaatcaaaattcaagcatgggaaagtcagcaaaaggcaaaattagaagcagaaatgagaagaattgaggccaaagttgagcaaatgagagcccagacacatgcaaaaatggtaaaaaagattgctatggcgaggcaaagatcgg

SEQ ID NO: 45678 - DNA, 500 bp, Glycine max
cgggcggtttgtcccacgcgcagtgctgatggacctggagcccggaaccatggacagcgtgcggactgggccgtacgggcagatattccggcccgacaacttcgtgttcgggcagtccggcgcgggcaacaactgggccaaggggcactacacggagggcgccgagctcatcgactccgtccttgacgtcgtgcgcaaggaggccgagaactgcgactgcctccaggggttccaggtctgccactcgctcggcggaggaaccggctccgggatggggacgcttttgatttccaagatcagagaggagtaccctgacagaatgatgctcaccttctccgtttttccttcccccaaggtctctgatactgtggttgagccttataacgctactctttctgttcatcagttggtggagaatgctgatgagtgtatggtgcttgataatgaggcgctctacgatatctgcttcaggactctcaagttgaccactcctagctttg

SEQ ID NO: 45679 - DNA, 480 bp, Glycine max
gacgaatgcattcgtcaaagtttagctctactgactcatgtgaccttctcatatgtgatgaggctcacagactgaaaaatgatcagacgataacaaaccgggcgtttgcaggggagagctgccaatgcccggtttgttatcgtctgctaacgttgaattttgttgcaggaacttccttgcacaatgacttagaagaattctgtgcaatggttaactttactaatcctggaatattgggtgatattgcacattttcgacgttactatgaggcaccaattatttgtggaagagaacctgctgccactgcggaagagaagaagctaggtgctgaacagtctgctgaattaagtgtcaatgttaaccggttcatattaagaaggactaatgcattgttatcaaatcacttaccacctaagatagttgaagttgtttgctgcaagttgactccactgcagtcagaactatataaacattttatac

SEQ ID NO: 45680 - DNA, 443 bp, Glycine max
gaaagaatgagtgattggcaaaagcgtcttgtctctcagctagggaaaaagatggttgaaatgactggagactatactcctgatttgacggctctcttgtcggccaatatcatcatatctactcctgaaaagtgggatggaataagtcgtaattggcatagccgtagctatgtcacaaaggttggacttatgatattggatgagattcacttattgggggctgatcgtggacccattcttgaggttattgtttctaggatgagatacatatcatcccaaacagaacgtgcagtacggtttgtaggtctttctacagctctggctaatgctggtgatctagctgattggttaggcgttgaggaaattggactcttcaatttcaagccaagtgtgaggcctgtacccctggaagttcatattcagggttatcctggaaaatatta

SEQ ID NO: 45681 - DNA, 359 bp, Glycine max
gagtaagtaacaatgacatgtaacaaagatggcacaataacacagatattcccatagagattattcttctacagattctcatccacactaaacaaacggtcttatctggggaatcggctactagaagaccaaccgaacgatgctaacattggaagagcccaagcgcggagcgcttttgaaaattttgaggactgagatccaattgctgctgggcttctatatgaacctctaaaatctcagggatcctctgtttgagataattagcgactctggcaaggacagtggaacgcttgtgccaaaaccgaccactaaggctaattttcacaaaaggcccatccaagtcagctagttcaaccact

SEQ ID NO: 45682 - DNA, 507 bp, Glycine max
tggtgctaaaaaggagcctttagttacttgggtgcaccattggctagaccattcttaggtccatttgcagccttttcagatggtctagccaatggtgctaaaaaggagcctttagttacttgggtgcataaaaattttcagggaatactcaccaacgagactaggtgcctgcgatgtgaaactgtgacagctagggatgaaacattttttgatttgagccttgatattgaacaaaatagttcaattacaagttgtttgaaaaacttcagttcgacggagacattgaatgccgaagacaaatttttttgtgacaagtgctgcagtttgcaagaagctcagaagagaatgaagataaagaaaccacctcacatcttggtcatccaccttaagcggtttaaatacattgaacaactgggtcgctacaagaagctgtcttaccgggttgtcttccctcttgagctgaaattgagcgatactgctgaaaattcagatattgagtattctcta

SEQ ID NO: 45683 - DNA, 399 bp, Glycine max
tgtcgcccttttttaccttttttgaaaacactattggttccattttttttggtgtataacagattcgatcaacttaacatagtgtaatagtttaatactacgagtcgagcaattaagaaactcagattgagtcgaacacaactattgtggtcaaagcccactgtttccatgtgacaagccatcttagcagtcgcagtagcactagattgaaaagctcgtcctggttagacggtttgccagtggtccatggcacccacgaagcttagcattcacaccatgaggcacaatcctgctctctgacttgtacttgagataatcagcacggctaaacttggtgaaaccccatttccggctaactatgatcttctgacgaccagggaacttacacttagcacgacg

SEQ ID NO: 45684 - DNA, 300 bp, Glycine max
gggaattgctcaaggagatggttgatgatgcagggatacagccggatgtggtgtcttataacatactcattgatgggtgtatactggtggatgacagtgctggggctctttccttctttaatgagatgagagcaagaggaatagctcccaccaagattaggtacactactttgatgaaggctttcgcatactcgggtcagccgaagcttgctcacagagtgtttaacgagatggacagtgaccctcgggtgaaggtggatttgatcgcgtggaacatgttggtggaaggatattgcaggt

SEQ ID NO: 45685 - DNA, 387 bp, Glycine max
gcctatcattaatgtgcaactgtatacataccagatatgccgtggtttaaatgatttgcatcatgtgatcagagtctgtcatcgggacattaaaccccagaatctattggttaatccccagactcatcagttaaaagtatgtgattttgggagtgcaaagatgttggcgcctggcgaacccaacatatcgtacatatgctcgcggtattatagagctccagaacttatatttggtgcaacagaatacacaactgctattgatatttggtctgctggttgtgtgttggctgagcttcttgtaggacatccaatgtttcccggagagagtggggttgatcaattggtagagatcattaagatcttgggaacaccgaccagagaagaaat

SEQ ID NO: 45686 - DNA, 380 bp, Glycine max
ggctcgagggtaagaggatgcgcatgccaacaaagctcacatgctgcagtataagagcattgctgaggcgaatgaagatgcattgaaagagatagaaaaggcgcatgagaagtttaaaacagaggctgacaatggaaagaaagttatggaatctgaacttaactcacttagagagaagatgttagagattgaaaatgaatcttctttgaaatatgaagaagttgcttctgaaactgttggaaaggaagaggctcttacatctgctatggctgaaatcacaaatcttaaagaagaaattttgaccaaatcttctgaaatttcagcaatggaaattcagatctcaggtttaaaagaaaacctggacagggagcatcacaaat

SEQ ID NO: 45687 - DNA, 334 bp, Glycine max
gagagccatgatcacaattactactaccattctccactacacacaaaaattctcacaacgatgtaatcaaaagaatagtacattttcgaaaccacaaatgacactagctagaggattcatcaacagataacaaaacttagggagggcacatatttagaatatggcttcacacttatcctgttgcataatgtatcaatcaaaccctggaatctagggccatgatggtgctaagattcatggggtgcatgtactggtcagagccagtcatcatctgttggactatgattcggttagctttctccgatgggtgaaatggatcccaaaacgcgtatag

SEQ ID NO: 45688 - DNA, 392 bp, Glycine max
gatataaatttaaactcatttgcgtgttggaaacacctcaccaagcatgcaatagtttagtagtaaatgagtgacatattttcactcatccttctcaaactctatctttatgttctgaattgtgatgcttacattctcagatcgtggtaccaatgtgaccaaaacactatcatcattttcagcatccaagtcctctaacaaatctgttattcccagtgtcaagctagttttgatcttcttgtccatgttcatgttcgaatgggaatgacccagagtcgaaaagcttcctgcaaactctgtgctctctggtccaatatcctcgacatcttcatcagtaatatagacatcaaacttcacattatcatccccatcaaactcaatcccatcaatca

SEQ ID NO: 45689 - DNA, 422 bp, Glycine max
gcaacaccaacacctccaccacccatttgcaacgactcaccaaaatcgaattttgcaatcaacccatttcaattcacccttccaatcgttcaacgcacccttcaatttcgcttccgagtgattcctccccccaaattcagaattaaggttcggtctctggtggcgcaaccatgccggagatcggccaggcggcggtggctgcggcggcggatgacaccgccctgttcggaaaatacgagctgggccgcatcctcggctgcggcgccttcgccaaagtccactacgcgcgcaacgtgcaaacggggcagagcgtggccgtgaaaatcatcaacaaaaaaaaactcgccggaactggcctcgccggaaacgtgaagcgcgaaatcacgatcatgagcaagctccaccacccccacatcgtgcgc

SEQ ID NO: 45690 - DNA, 358 bp, Glycine max
gacaaatcttgatatataaaattactggatatacaagtttaaatgatggcatatttcgttccaatacaaacattgatccagtaacttggaggatacaaaacaatgcgctgaattttcaagtatcgacacatgtcatttgttccctatagcttattgcacatagttgacggtgagcctttcttttttattctcctgagtcctgaccacataaagaataccaatcttgaattgatgctcctgtattctaccatgactcattttcaattcctgtttttgttacacaacacttgctttagccattcttttctggccccgagtagctagtagctcagaatcctgtacaatagcctgtgcacaa

SEQ ID NO: 45691 - DNA, 279 bp, Glycine max
aaacaattaataacaaataaatcccaaaagcctagttgatggttgcaatgattcataaaagtttcaatcgggataggttatcataaaatttgccggttgccaagggggggggatcaacaaagacaaattcttccaaccaagcttgggggaaccattttttttgaccagggtttcccctttccaagggaacattcccagaaacaagttcgtttgtgcagccggtttgcccttgagcgaaacgggcccaaacccggcccgtttaaattattccccccacct

SEQ ID NO: 45692 - DNA, 392 bp, Glycine max
gctattacaaaacgaagaaactattattggaattcattcaaattgaagtgcacatgattaataagattcaaccaaactagagaaggccaccacggagcctaaggacaacatagacatagaaattttgttatatcatacacattcaaggaagagaaaatctcaatagcaagattcaactgaaactagaaatcgccaccacggagcctaagaacaaggggaagcgtggattccttctgaatattgtaatcggcgagagtgcgtccgtcttcgagctgcttcccagcgaagataagacgctgctgatccggtggaatcccttccttatcctgaatcttcgccttcacgttatcgatcgtatcagaactctccacctccagagtaatagttttccc

SEQ ID NO: 45693 - DNA, 357 bp, Glycine max
aatcgaataggtactaactatttcgtgctgtgagtgagtgtgaggattgttgaatcgaatcgcgaaactcttacttacacccctctctgtttttctattcacaagggttttgaaagatggcggttgaaaatcccgaggatggattgaagaagctggaatacttgtcgctggtgtcgaaggtgtgcaccgagttggagtcccacaccggcaccggcgacaaggttcttgcggagttcatcactgagttgggtcgatcatcggagaatgttgaggaattcgacgagaaattgaaagagaatggcgcggagatgccggattactttgtgcgaacgctcctcaccatcatccacgccattc

SEQ ID NO: 45694 - DNA, 311 bp, Glycine max
atgctttcatatgctctatgaaataactgatagttttcataaagcatgttaacgtagaaagttacagtaagcattgtaaattaagagattagtccttagcttctggctgaggatatcctaggtcgacctaaaaaaaataactgataattttcgggcatgtgcagatataggaagaactataaacgtgtcagcatacaagctataaagaattgggctcgccaaatcttacaaggtcttgtttatctacattgtcatgatccacctgtgatccatagggacctcaaatgtgataacatatttgtcaatggtca

SEQ ID NO: 45695 - DNA, 409 bp, Glycine max
cagaaagcaagctcatcctagagttttaaaaatggcagcagcctcctccatggctctctcttccccatccttggctggcaaggccgtgaagctgggcccatcagcccccgaagtcgggagggtcagcatgaggaagaccgtcaccaagcaggcctcctccggaagcccatggtacggcccagaccgcgtcaagtacttgggcccattctctggcgagcccccgtcctacctcactggcgagttcccaggtgactacggctgggacactgctgggctttcggccgacccagaaaccttcgccagaaaccgtgagctcgaagtgatccactccaggtgggccatgctcggggccttgggctgcgtcttccccgaactgttgtcccgcaacggggtcaagtttggagaagct

SEQ ID NO: 45696 - DNA, 356 bp, Glycine max
gctatcacaaaacgaagaaactattattggaattcattcaaattgaagtgcacatgattaataagattcaaccaaactagagaaggccaccacggagcctaaggacaacatagacatagaaattttgttatatcatacacattcaaggaagagaaaatctcaatagcaagattcaactgaaactagaaatcgccaccacggagcctaagaacaaggggaagcggggattccttctgaatattgtaatcggcgagagtgcgtccgtcttcgagctgcttcccagcgaagataagacgctgctgatccggaggaatcccttccttatcctgaatcttcgccttcacgttatcgatcgt

SEQ ID NO: 45697 - DNA, 479 bp, Glycine max
gacacgaaatccactgtaatatagatctgactaattgtccatgttgtctgtaatgaataacagaaacacaaaacctagtcattctaaacactgaaatgactaacaatagcataattatcaccaaggcgtacaaacgcatgaccaaattaaatgtcaatacaggaaatgctaatgcaaattatttggcagcctcaaatcaatccccgtggatagtataacgttcccatttcttcgttggatcatatatctcccatcttgaagcaggaaatatatgcttgttcttttcataccaatgcctttctacaaccttcccagcatgagactcatccttctctatagtggcatcagcaattgttcgtacatcctcatgcacatcaaaatgaaaaagcggtccacttttgcctctagctttgttcacaattagctcatagaagctatgttgctgtaatacacatggaaacaggtaaataagttagcag

SEQ ID NO: 45698 - DNA, 500 bp, Glycine max
cctcttaaaaaatgaaaattttagaatattcgctttgccactgaaactttattgtagatgtagtccaaatgaaagatttggaggttttgtttgttccaatagtacatttgtctctaatcccgtacgtttaaaacctctcaaagaaaaaatatcgttgttgctaaatatttttttatcttgttttgtttgtgttggatcgacagtatctgaatgaagctagttggaattggagattgatgaagataatcatgacagtgtgtcatgtgtacgacaaggagcaaaactatgttgccttcgacgaactcgcccctgaagattcacgtccaattacatttttgaaggaaaccatgcctgattatgcttaattaggttcaagctggcttttttctcatatgaaattttttatgtatcaaattacgttcgtatggcattcattttctttttacattttcgatcttgcttagtaatatagttctatttctcatatcatgtattacgag

SEQ ID NO: 45699 - DNA, 416 bp, Glycine max
aattgaaaacagaattgtcctgtattctattatcgcttattttatcaaccaccaagtgaaaccaattttcagtttcacctagtgccactgagctagcttagctgcaggccgaaagaagaacatttggtatatgagcaaatacaatagatagaggaccaactattattggctttcttgagtttacatatagaggctctaaaggaggaatttcaccagctgagtttacacttaacatttttccatttagcaacatagtttggctatgtaaattcctgtctggtgcagttaaatggtactctcttctggctggttcacccactctacggtatggtaacttgttaaattttaaggccacattgacttgaacagtggtgctgttgtccaagttgagcactagtattgtgatccctttggat

SEQ ID NO: 45700 - DNA, 554 bp, Glycine max
gatgcatatggatcttggagcataaccactgctgctgaacgaagcaaattactgaggaaatggtatgatttgctaatggtacataaagaagaacttgcacagcttataaccttggagcaggggaaacctcttaaagagtctgtgggtgagatagtctatggggctggctttattgagtttgcagctgaggaggcaaaacgtatatatggggatatagttcctgcacctttttctgatcggcgattatttgttctaaagcagcctgtaggggttgtaggtgcaattacaccttggaactttccccttgctatgattactcgaaaggttggtccagcccttgcatgtggctgtacagtggtcataaagccctctgaacttacacctctcactgctttagctgcagtggaactctccattcaagctggaataccaccgggtgtcgtgaacgtggtaatgggaaatgctcctgatattggggacgctttacttgcaagtccacaggtaaggaagatcacattcacaggctcgacagcagttgggaagaaattgatggc

SEQ ID NO: 45701 - DNA, 476 bp, Glycine max
atggaggctacttcagcagccactgttccgacaaccttctacatgtccccttctcaatctcacttgtccaacttcggaatgtgttacggtgtcggagaaaatggtaacttccattctccacttacggttatgcctctcaagtctgatgggtcactttgtatcttggaagctctcaaaagatcacaaacgcaagtgatggtgccaacttcgtctccgaaattggaggactttctaggtggtgcaactatgggaactcacgaatatggaagccacgagagaggtttgagcctagacagcatctattataactcccaaaacgcagaggctcaacccaacagagaccttctttcacaacccttcaggcaacaaggtcatatgagtgtccaaacacacccttattactcaggccttgcttgccatggtttatatcaagcaccgttggaggaagaaacaacaaaggaaacgcacgtgtcgga

SEQ ID NO: 45702 - DNA, 454 bp, Glycine max
ctattattctatctatctattgtttcgttccatctcacaaaaagaaaagaaaaatgaaaatgaaaatgaaaatgaaaatttcaagttcctgaaagagagagagagaaagttgaggacttaaatagtttcagttcctgaattccattagatctcttgcattttgtaaacagttttcatcggaaagttcgttacttgatcgtagtttgttccctcggatcgttgctcgaatgttgtttttttagtgacaaaagaatctggtgtatttatgcttctggttattggatgagctgtatgttttaactatggtgttgaagaagagggtagattatggatttaatggctttcgagttcctgttatacctaaagctcctagatctgccagaaggagggttgctttcaacaaagcagttgacgatggtcaagtttgcgctattgaactactggcatctttagc

SEQ ID NO: 45703 - DNA, 320 bp, Glycine max
ctaggatgctgtgatttttggcctctcaagatgagaatgactggccggtgattgatcccttgccatcttatggcagagggagggacacactaagcggaaagaggagctatctaataattggatccatcctcactgatgtactcatatctgaggacaatggcacattagatggacaaggtgatctgtggtggcaaaaattccgcaagggggagctcacagatacccggccttacctgacggaaatcatgtactcagataatgtacaaatatccaatctcactttggttaattatacatcgtggaatgtacatactatatac

SEQ ID NO: 45704 - DNA, 353 bp, Glycine max
cttggacccagatcttcttctcttctccctctataaacaaaacatgggttttccccctctacaatcccaaaacagatcaaccgttctcttctctcagcaatgcctggaagcttaaggaatctgtcactttctcccaaaatcttctccttcaccttgcttctctcattaaactcccttctctttttcccatgttgctactcccttgatgagcaaggccaagctcttatagcatggaaaaacagtttaaacatcacttcagatgtgttagcatcatggaacccttcagcctcaagcccatgcaactggtttggggtgtattgcaactcacaaggagaagtgatagagataagcct

SEQ ID NO: 45705 - DNA, 281 bp, Glycine max
cataaatttccctttaagcacttatgagaaggaacttgaagagatgaagcacatgaccaggctagaatttgtcgccaatttaagaaggaagagcagcggattttcaagaggggcatctgtgtatagaggtgtgacatgacaccatcaacatggaaggtggcaggcccgaataggaagggttgcaggaaacaagacacaccctttaggagagacccacaacatatcaatcccgcatgattatatgactatgatacaccttcagaggggtgaaaaaagaaatg

SEQ ID NO: 45706 - DNA, 528 bp, Glycine max
gcttgggctagtttcagatgctatatcagagaaggtagattctctcagaaaagggaagagtgaagtgattgaaaaaaaccacatactcattcttggttggagtgacaaattgggctcacttttgaagcagttagcaatagcaaataagagtattggtggtggtgttattgcggtgcttgcagaaaaagaaaaggaggaaatggaaatggacatagcaaagttggaatttgatttcatgggaacatccgtaatttgtagaagtggcagtcctcttatactggctgacctaaagaaggtttcagtttctaaggcacgtgcaatcattgtattagcttcagatgaaaatgcagatcagagtgatgcacgtgctttgagagttgttcttagcctaacaggtgtaagggagggcttatggggtcatgttgttgtggagatgagtgaccttgacaacgaacctctggtgaaacttgttggcggagaactcattgaaacagttgttgcacatgatgtaattggacgtttgatgat

SEQ ID NO: 45707 - DNA, 352 bp, Glycine max
gttgggttcttcttgttttcaaccttaattatcaattttatttacttcttattttgggtattgagtgtttgcaaatcataaaactacaagactgatcgcatggtctttgccaacaatacataggttccaagcgagactccatctcctcctaccaattgcactgagactgcttacagtttcagaatttgtcagaaaaagcttgtcccgattgcatttttgttcctgtacgtactcttattgatacggatggcagcaccattggcatgtgttgttgggagtggtttatccatacagagtaataaaattggcaaggacgtcaatggaagatatctcttctcatatcataggctat

SEQ ID NO: 45708 - DNA, 181 bp, Glycine max
caagcatgctggcgccttctggcgaggccctgattatcggggactcaactgggataacaagcttgctggtgctcaggttcttctgaatcacccgaggcagggcctgagtgctgggcatccatatcaacaaactctgaggaccttgcacaatcagacatgcgtaatcatgcgctgctatcta

SEQ ID NO: 45709 - DNA, 474 bp, Glycine max
tccaaatcaaccttaatttctccctttaacccatacaatacaaaatacccgaaagccaaaccatgtctaatgtatcatcatcatcacttccggttttcgccctggatgccaaacccaactcgaacatcactcgacacactgcaacttttcatcctaccatatggggggattatttcctttcctatgatcctagttctgcggtgtatttttcaaattcaaggaccaaactggaaagttcaatgaaaggctagcaaatgatatacaaggaacgttgagcttgtatgaagcagcccaactaagatttcatggagaagagatacttgaagaagcacatgatctcactctcacccaggtaactaagtcaccaaccacccaattaagccatttccttgctgcacaagtgaaacatagcttatggcaatcacttcgcaagggaatgcctagattggagacaagatatgatatgtctttcta

SEQ ID NO: 45710 - DNA, 507 bp, Glycine max
ctaatcttcccgttgcttctcaaatcgattcaattggggcgttttcagggcatcaatggagtgaaacaggagagagagagtccgtgttagatcagaaagaagagacagagacggcgccaccaatggcgggagcagataaagaattggaagagcaacttcttgaagccggtaacaagcttgtagatcctccttcgtcggtggaggacctcctcgcactcctagaacaagttgagagttgcctatcaagggttgaacagtccccgaccgactctatgcaaaatgcactctctccatcattgaaagcattgattgcagacaaacttttaaggcactcagatgatgatgtcaaaattgcagttgcatcttgcatcagtgaaataacaagaatcactgcacctgaagctccttatgatgatgatcaaatgaaggaggtatttcaattaatagtgtcatcatttgaaaatctacatgataagttaagccgatcatattcaaagatgatctcaa

SEQ ID NO: 45711 - DNA, 491 bp, Glycine max
aatgtaaattcaaaacccaaagtattattaattgaagagcggatgctctcatctttaaagttcaacatcttatagactagttaataccaccaatcttaactacttcaaaaatactgacacatgatgcaaagagttggagaatcacagtggattctaaaaacttgagaaagagctcgccacatcaatcacaaagcgatatttcacatcagctctgctaagcctttccatggctgtgttgatctgatccatcttaatcagctcaatatctgcagttatgttgtgctttccgcagaaatcaagcatttcctgagtttctttcagccctccaaagttgctcccccctataagctttcgtcctgcaactaaaggaaagataggaagctcaaggggtttgttaggcaaccctacagtaactagcttcccattcagcttcagcagaccaagcagtggaatcaaggaatgaacagcagaaattgtgtctatgatatagt

SEQ ID NO: 45712 - DNA, 427 bp, Glycine max
ggccctgatggccaccaagcagtggctgctagagtgcaggcggatcgtgcagtgtttgccaactgtcggttcgagggctaccaagacactctatacacccaagcccacagacaattctacaggagctgcatcgttacaggaacaatcgatttcatctttggcgacgcagctgtcgtgttccagaactgcatcatggtagttaggaagccattggaaaaccagcagaacatggtgactgctcaagggagagtcgacaagcaacaagtcactggaattgtgctgcagaaatgcacaatcaaggctgatgattcactggttccagagaaggacaagatcaggagctaccttgggaggccgtggaaggagttctcgagaacaattgtgatggaatcggaaataggtgacttcattcaccccgatggatgga

SEQ ID NO: 45713 - DNA, 422 bp, Glycine max
taaggaaaatgattctgaggactggcttgacatagttgcaacagtagcgtggcaggctgctaactttgtgagaccagataccagcaaaggtggcagtatggatccaggtgattatgtgaaggtcaaatgtgtggcatctggaagcccaagtgagagcacccttgtcaaaggagtagtttgcacaaaaaatattaagcacaagcgcatgacctctcaatacagaaagcctagactactccttttaggtggagctctggaatatcagaaagttccaaatcaattggcttcttttgatacattgttacagcaggaaaatgatcatctgaagatgattatttcgaaaattgaggctcttcgaccaaatgttttgctggtagaaaaaagtgtagcttcatgtgcgcaggaatatttgctggcaaagg

SEQ ID NO: 45714 - DNA, 516 bp, Glycine max
ataggaagaactacacattccaatatctattttctcaaaattcaaagaacaagcagtacctcaggtccctatcattacaacaagatagagcagaaccaaatagaaaaagaaataatcaaacgggaaaggaaagctttggcaacaattccctagccgaattaaggcacggctttattctagtaacagatcactaataaactagagaaagacactgaattattctgttgccattatttttacaccttggtctcctcttcttgctctcccgaaatctcctccaaggatctacccttggcctcaggcaccaagaaagtgaacatgaagcctaaaatgttaatcacacccaacacaagcagtgaattcctcacaccaatacctgcagggtaccctgcatctgctttgctcgggtcctgattctgtgccaaatataaaaacccgaatgcaccaaccatagccccgagctttccagatgctgaagatattccatggcaagtggatctaaatctagctgggaaa

SEQ ID NO: 45715 - DNA, 443 bp, Glycine max
ctgaaaatacagtacatttatttgatcttcttgatttgccttacaacaaggttgaggatttatacctcatttttcttgtaaataactcaataccactaagtctcccgtgttaaaaatgaaagtccttcattcataggctccttttttttcaacagatgcttttattggtgtcaacattggttcagatatatctgacatgcccggtccaacagagattgttgctcttctgaaggctcaaagtatccaacatgtcagactctatgatgctgaccaagccttacttcttgcacttgccaacacaggaattcgtgtaactgtttctgttcccaatgaccagctacttggcattggtcagtccaatgccactgcagcaaactgggttactcgaaatgtcatagctcatgtccctgctaccaacatcactgccatatgtgttggatctg

SEQ ID NO: 45716 - DNA, 438 bp, Glycine max
caggattctgatcctattgtgttggccttcgggatcggagtaatgattaacagggacagtacaggctcaagctaataaggcggatgcttcaagtggcgataccaattcctttcatgatgaccagagtactttacatgttggtcccctgattcagaaaagtactgaagtggagtcagttgcagattatgaaaaacagttatcttatgaatgtgttgaaacatttgttaaaccaaataagaagaagaatggtgctacatatgatcagggatggcagttggattctgttgttctaaatgaacagaaggatcagtccaagaagagagcggatagtcatcactttgaatctaatggaagtttgtgtgggcaacctaatgctaagaagccaaagataataaggcagtcacttgataatactttcgacaacattgctcctatgac

SEQ ID NO: 45717 - DNA, 352 bp, Glycine max
caccaaacataatgcaggtttatagatacaagttatggtgctaacaacaaatgagttgggtagtatgacgtctatatatgtgcaagtacatgtacaaaattcataagaattctgttcataaataaatcaggtaggaggagacacagaagttgatttcaaagcttgagatttgcatatggggcaaacattttttaccaccaaccatgttcttaagcaatctgcatgatattcatgctcacattgaagaactccaatcttctcttggctcttgaattcatcctgacatattatacaagaaaatgtgccctgatcatgacaaacttgctactccatattaatactagtagcaccc

SEQ ID NO: 45718 - DNA, 457 bp, Glycine max
ggaatttggcagaaccaaaggactctatatacttattggataattgccctcatgattggcttttcttgcgttgcaaggctgtggctagccaattacatggtagtttgtcttgggtgtggccccgcatcttacaatgtgagcatcgaaggttcatcacggaggtgctggcacaacagctgcggggctcaaagctgcttgcccaacaaccatagttccttttttcggcgatcaaccattttggggtgagagagtacatgctagaggagttggtcctccacctatcccagttgatgagttttcacttcccaagttggttgatgcaataaaacttatgctggatcccaaggtaaaggaacgtgcaatcgaacttgcaaaggccatggaaaatgaggatggagtgacaggagctgtgaaagcattttttaagcagcttcctcaaaaaaaatcagagtctgat

SEQ ID NO: 45719 - DNA, 465 bp, Glycine max
accatgcacatggttttctctgcataacttcttccgcccctgccaacatgacttgcatgcatgtgtgtgttaactcttcttcacttttacatgcatgcttgaggttttgaggtttcaacattagatgggcttataaagtcatcatatacacactcacatatatatatatatggttaatataaatatttgttctcaagaaggatttagttgattccattgaagattgaatgcactaccaccagcacctttaagtggaaggttaatttctggtgtaaatatatcaacgagctttatctacataaattaatgtcgaccaaggtgaaaggcatccttaaaggacttagatacatatcccaaatattcgaagagaaagaagaagaatttcaaattgggttgccaactgatgtaaagcatgtagcacatattggatcagatgatccatcagcaaatgcaccaagctggatg

SEQ ID NO: 45720 - DNA, 214 bp, Glycine max
ggaaaaaaaaatatcagccccccaaattggtaacaaacaggggtaacattaaggggacaatagggttcaacccaaaccaaacttatttttaaagggtattacagacccattacacataaaatttttttttaaaagggtggggaaaatccaacattgaacattacacaaaaattagctccagcttaaaaccccccccgaagacccaacaccaagg

SEQ ID NO: 45721 - DNA, 480 bp, Glycine max
tgcagattgtactgtaatcacggttgcccacagaataccaactgtgatggattgcactaaggttcttgccattcgtgaaggagaattggtggagtatgatgagccaatgaacttgatgaagagagaaggatcactgtttggacaacttgtcaaggaatattggtctcatttgcagtctgctgaatcacattaaagctagaaatgtttcatttttattgatgtcaatctagtccaaccctgcccatagactaaacggattggaaaagtagactcactttttcaccaattgatttttcaaaatttcttgatatttttattttcttattctttgagtttgttgttatgaattaatatgttgctggatttgtcgtatttatatattctttcttttttaaattagataaataaactcaatcttgtaacggtcgttttaattccctattaattgttattgttgatgacttacaatggcttttgaac

SEQ ID NO: 45722 - DNA, 420 bp, Glycine max
caaacacaacagttcatctgctaatttactcattaaatttgggccatttgacccctaacatcggttaaataatgttacaacttacaaatggatcaaaatgaagcacgtagtgcttggtgattcctctaaagtataatatgaatgcaattgacaggacttgaaactgccatgctatacaaataaccaatttttcaaataaggaggaaatgtcatccttaatattattttcacatatacctgttcaacaaattggccagacatagtgtgaagctttcttcctatgatatatgcttttgggtaacctgaatttccaagcctcttgaatttattggaaaaagggtaaattatcagatgaaatcgggttgacctgttgaagttaagcaacgatgccacattcgactgttggggtccaccaaccta

SEQ ID NO: 45723 - DNA, 426 bp, Glycine max
ctcgagccgattcggctcgaggcacgctcatcacacgaaaagcagatggtgggcctggcttattgtgatagcaggagtttttgttgtacttatattcggctacttgtgctgcatcatctggagaaaatgcaaaatagaagctgacagaaaaaagaagcagaaggaactactattagaaattggagtcagttctgtggcttgcattgtgtatcacaaaacataaagacacagaaaacgtagcaaggtcaactatgaaatgcaaatatttagctttccaatcattgctgctgcaacaggcaacttttcagttgcaaacaagttagggcagggtggttttggaccagtttacaagggagtacttcctgatggacaagaaatagcaataaagagactttctagtagatcggggcaagggttggtggagtt

SEQ ID NO: 45724 - DNA, 449 bp, Glycine max
ctcttgttgattttgctaacaagcggtttgggaacactgagtgtcaatggcctcaaccttgttccaaagcctcttgttgattttgctaacaagcccatgattcttcatcagatagaggctctcaaggccattggcgtcaatgaagtggtgctagctatcaattaccaaccagaggtcatgttgaatttcttgaaagagtttgagacaaagcttggtatcaaaatcacttgttctcaagaaactgaaccgctaggtactgcaggccccttggctcttgcgagggataagctaataagtgactctggagagccattttttgttctcaacagtgatgttatcagtgagtacccacttaaagaaatgattcaattccacaaaacacacggaggagaggctaccataatggtgacaaaggtcgatgagccatcaaaatatggtgtggttgtgat

SEQ ID NO: 45725 - DNA, 462 bp, Glycine max
aagtgaaaatgcatcacttgttgattagtttagtgccctcaactgtggaaaactcatacaccagaacattgcttctccccaaagcattgaaactcctaaattaaggaacatttgttatataccttcctattcccctctcccacaaacactagaattcaagtgcaggatattttcacaatacaagaggggccttgaatgtaaacaagcttaaagggctcatttactcttacaaccactaaaaaggatattaaaaattacagacaacagcattatcttacaagataaagaaacaacaattcaaacaaaccacatacaatcaactatgcattttctgaagtcttgagtgtgttcaggaatcattcagccaccttcataccagagagatagactttactctgaatcacacttcccccaatccaaaatccaggcataaccatcaaaccaactttaggtttttcatca

SEQ ID NO: 45726 - DNA, 442 bp, Glycine max
caattattcaattttaaagggatatcaagtgtgctaatatactggttgatgtaagtgggcaagtcaagcttgcagattttgggttggcaaaggcaacgaaatttaatgatgttaaatcaagcaaaggttctccatactggatggcccctgaggtttctccctgctcttgtatcatttgcttggagtaattcctgcaaaggaatgaaatcatatggctgtctaatttagttttagtctgtagtacatattccaaatgttgctgtaagaacataaagtataaccatccataaattagtttactgcagtatatgcttccattgatttcttgtgatggagtgcagattcagaatcttgaaactttagtttttccacccacttgtgatttatgagagttgttttagtaaactggcaaatgaatttttatacttgtgagctttttatt

SEQ ID NO: 45727 - DNA, 477 bp, Glycine max
ctcccagaaacgaagccctcgaacgctatctcgaccccgatttcaagcgtttcctcctgagaccctcctgttgtcccacatcgtccccaaaagaatcaccaaacccgaattcaaaaccgggtcgacccgacacagaactttagcgtctcaccaccacctcactctccaagccctgaatttgactcactggaatgttgagtcttcccgggttattaacccgaattcggtaacccgacccgacggagtgatccacggcatcgacactctcctcatccctcgctcagtccaagacgaattcaaccgtcgccggaatctgatctccatcgccgcggtaaaacccgtaccatccccggaggtcgacccgcgaacccaccggttaaagaaaccggcgccggcatcgccggcgggggccccgccggcgctcccgatctacgacgcgatggcgccggggccatcgcttgcaccggcgccagcgcc

SEQ ID NO: 45728 - DNA, 478 bp, Glycine max
acaaagaaaacagacaagagactaaaatatcacatccttgatacatgtgctttagatgatgagaccgacacacatcacatacatgtgatgaaaacaagtttttcaacaaaagaccaaaaaaaaaaataaaagagtaacaaaactaagtcttattcatgttctgtacacatcagaaacagacattattaatgaagtactgtaaatgcaggtttatctcccaccaacacgaattaattgtccttctgaagctaataattatacaattgcattgcatcctttgcttttactattgacgatacaaatttgaagttcttgtccagctaggaggcaattttggtgatatccttgctagatctgttgtatttcatgtggctattaacaagttggcctgctgcaattgcagacatgagtgagagttcccctgctaggactgaacctgctactatggttgctagtaacctagaatttgcacctgggg

SEQ ID NO: 45729 - DNA, 371 bp, Glycine max
aaagtggtggagtttgggaacatgcaaaccagggcagtgtctatcttggtccacacagtcatcttctttggtctcattaccatctttcttgttgctattggctaaatgcttggaaactggcgagccagtggccattaagagagttttactggacaaaagatataagaatcgtgcgctacagttaatgcacttgatggatcatccaaatgtgatctctctgaagcatcgtttcttttccactacaagtgcagatgaactttttcttaatttggtgatggaatatgctccacagtctatgtctcgcgtctcaaagttctatagtaatactaatcagagcatgccacttatttatgtaaaactttacatgcacc

SEQ ID NO: 45730 - DNA, 371 bp, Glycine max
aacaaaaatctgttaaaatttattcaaagggaatcaacaaggtacaaaatcgatacacagtaagagtttttttgcaactttacattgcataattcaaacaaaagaaggcgtagttcatatatacagcagcaaaagcatacataagaaaacatagtagtaagcattcatattcatatatgatatatatgataatcatcaacacgacggaacgacgccgtatccagccagagggtccgcatcagtgcgtttcgcgaaccttcctttgattcttggcctcgtttcggtatacgcttttctcgatgcgtaacgaatggtcttctcgaactttcggatcttcctcttctgcctgtacctcaacactgtagccttcc

SEQ ID NO: 45731 - DNA, 426 bp, Glycine max
ctctacctaaacagtttaatgttcaaatcctcaacagcgggcatcaccagaaacgggttctctcttcaaaagcttctggagagccaccattacttatagcagcctgcattcactgtgccacaagagcagctgttaaagaggcaaggaaacagcttctttcatggagcaaccaagatgaagaagattcaacatttcagttgggggtccctgcaaccatgcctgtggtcaaggaactctgtggactggacattggagaaagatacttgaaatggaaaatggggaaggacatactggtgctcacttaaataattgaaaagaggattttaatacacatctctatgaagaagaaacattataattgtttcacaaatattttttataagacagttcttgatactgtaccgagcaatgttattctatacaaac

SEQ ID NO: 45732 - DNA, 373 bp, Glycine max
gccgccttaaagtgtctacagcagtggctcctgccaagaatttgtctagcttggatagcattgatcaccttcttaaacgggttgcctcccccaagaaaagggctactcccaggagttctgtgagaagcaggcagtcaaagaaagtagattcaatcagggagtcaaacaatagcttagctaggttatcaaggtatcctgtgagagttgttctttgtgcttatatgatattgggtcatccagatgctgttttcagtggaatgggtgaatgtgagattactctagccaaatctgcacaagagtttgtccaaatgtttgagctgttggtaaagattatactagaggggccaatacgaagttttgatgaagagtctgt

SEQ ID NO: 45733 - DNA, 476 bp, Glycine max
caacaaagaaagaaaaggaaaatgaaataccaaaacacaaaaagcaccctctccttcctctcctccccctttctttttctctcttcactctcacccttatctcctccattgcagcttctgctttttcttcaaatcaacaaacaaacaaaaccatccccatttcatttcagaagaaacccttttctttcccaagcacaactgtttcttcctacggtggaacattgaccatttgaaatagttgtgcaacagcttccattatttggaaaaaaaaaaaagggtcttttgattctttgaagcgagaagatgcagaggcctccaccagaagattttctgttgaaggagaccaaaccccaccttggagggggaaaagtctctggcgacaagctcactagcacttatgacctagtcgagcaaatgcagtatctctatgtgagggttgtgaaagctaaggacttacctgcaaaggatgtcactgg

SEQ ID NO: 45734 - DNA, 391 bp, Glycine max
aacatgtttagcatcgtcaaggagatcctggcgagcccgggcaaatggcggaccaggtttcgaagcttgcggaagaggcccagaatttccgacaggaatgtctggagctgaaatccaaaactgagaagctggcgggcctcctccgccaggccgccaggaatagcaacgacctctacgagcgtcccacgcgccgcatcatcgacgacaccgaacaagtcctcgacaaggccctcgttctcgtcaccaaatgtcgcgccaacagcctcatcaagaagctcttcaccatcatccccgccacagccttccgcaagacctccatgcagctcgagaattccgtcggtgacgtccaatggctcctccgcgtctctgcctccgccgacgagcgcgacga

SEQ ID NO: 45735 - DNA, 458 bp, Glycine max
  unsure (1)..(458): unsure at all n locations
ccaaaatataatttttatttctcatatgcattggtaaaaaagacacaatgttcacatgtgaatggcatttataaatataattactaatttttcagtaaatgaaagcatctttttactagtagatctcataccttccattttcaacatttctagtaaaaaatcactccatatgtctattgcccctggtaagcaccaatgaacacaatcattatatagtgtcatgttctcatttggccaatacccatatctattggggtgaccatctggtctcaataacatagcttgcgtcgtgtctagtaacatgaacttcaatcctttctttatgccttctttctttgcaattttgaactcctccaattgaagtcatgtgtaattctaaattatggccttctaactttgnttcgttattcctaaatggcttagttctcacgcaatttccacctttattccataaccca

SEQ ID NO: 45736 - DNA, 224 bp, Glycine max
ggggaaaaagccttcgtttttatttaattttaaatggggttcacaaccccttggaaacctagccggttccaacccaaaaggccttcatgggaaatagggccctacaacgggttaaaacccccataataaaaattcataacccatccaacccaaaaaaaaagggggggccccttttttttttttatgggacaaaaggcccggaaactttgcttccgggggttccc

SEQ ID NO: 45737 - DNA, 351 bp, Glycine max
ctccgtcacttgtgaatctattgaatcaacaatcatgtcggacgaagagcaccatgtcgagtccaaggccgacgccggagcctgcaaaacctaccctgagcaagccggtaccatgcgcaagaacggctacagtagtcatcaaaggccgcccctgcaaggttgcggaagcttcgacttccaaaactggaaagcacggtcacgctaagtgtcactttgtgggaatcgacattatcactgccaagacacttgaggatattgtgccctcttctcacaactgtgatgtttctcatgggaatcgtactgagtaccagctcattgatattgctgacgatggatttttgagtctgctta

SEQ ID NO: 45738 - DNA, 445 bp, Glycine max
ttttcttttcaagagaaataaaattattgttgatatttgtgttgtggtgatttatttagtctttagaaactgaggttttcactttttcacatgaagtagtgttgtcatttttcaggttggtgtcgatatcaaggcatgagagatggttagagaaaatgctgtaatgggtggtgccagtgaagagcgtggtgttcgggtcactcgagcaatggctagagctgttttgggtggggtctctgcctcttctagaccgtccttcaagaagcaacacaagaacaacaagggtttcggtagggtagcactagcagatgtcactaacataagcaagaaagggtgtgctacatcaaaatctcaggcaagaggaagttacaagaagactaacacaaagggagcttccaatgtctccattcaagttttgtcaactcaagaagatgttagagcaaaa

SEQ ID NO: 45739 - DNA, 311 bp, Glycine max
aaaagaaataaaatgaatgattatttctcaaaaagtatttagcgaacatacacttatgtgtaaaggtgatattacttactgagcccatatcaatgggtgaattcttgttaactattctgagaagaaaattttgttgaaaggttgcaaattaagatcacttccctttagcatctatgaacatggctcgagtccagtgctcaacatcctcactttgcgatggtgggggaggaaaagtgggatgctcaacaatatcccacccttcaattaggcactcatttttgccgtcagataaatcagcggcataaagaaaa

SEQ ID NO: 45740 - DNA, 381 bp, Glycine max
gcgaacaattctaattcaggtacatccatttgttttggttttctttgcccatgttccgatgattttcaggaacaaaaatctctagtctttggttttcatataccatccaaatatttgtggcaacaatgttcccttgctcaatcagtaagcccccaaaacaaagaaaacattatgttctgttaatgaatagtaatattttacaaagaattaatgtacaacaacccccaaaaaatcatgattttgaaaaaagctggatcctattgacgtagcaagaagacgcaggatcctggaggcaattgcaaaatgcatcctcatccttgggaaatgatattggtagaggatggtcaggaatgacaccaaccttggcaatatctgtatgtg

SEQ ID NO: 45741 - DNA, 305 bp, Glycine max
ggcaaaaatggcaggtggaggattttctgatgctggaacactcaagagggctcatctttaccagtacaagattactggatatttcatcttttcttgcattgttggagctcttggtggcgctctatttggctatgatcttggtgtttcaggtggagttacctacatggatgatttcctcatacaattcttcccaaaggtgtgtgaaaagaagcatgcacatcttgcggagacagattattgtaaatatgatgatcagatattgacactctttacttcatctctatactttgctgcccttgtgtcca

SEQ ID NO: 45742 - DNA, 266 bp, Glycine max
caagagcttgatcccctgcgcgagtgttggcgagaggaacctgctagctgacgtggcgaggattgttgagaaaaacggcacgtcgtttaagcgaaaagacgatttgaggaaggtcgtcgcagaagcactttcctctctcggctacgattcctctatctgcaaatcgaagtgggagaaaactttctcttgtcctgctggtgaggatgaattcatcgatgcgattgtggaaggggaaaggttgattgtcgatgttgattttagatctg

SEQ ID NO: 45743 - DNA, 123 bp, Glycine max
tatggattgcttcagctctatatgctgctgttaacatcggacagcatccatatggaggttcaattctgaataggtcaactattagcaagagactcatgcctgagaaaggggctcctgaatatg

SEQ ID NO: 45744 - DNA, 420 bp, Glycine max
cacgttctctccgggagaggtagagagaaaaattattatatactccaaataactccgtgtgttcatgtagggatctcagtcaaatagaaatataaaaattgattatgaaatgattggggggagtatatgcataatatattactgttataccaaccttgcaaattgacaagaagttcatgtccgttacactgtctccaagtcccaaatcaggcaagttggttccaaactccttcaatatcacctcctttttgtgaacaccaacaagcacaccaggctccttagcgagccccgtaaccctccccgacgccgtcaccaccagctttgtcccgagcaccgtatccgcgccgagaaacgttttcgcgaacggctccaccatcacccgggggctcgccgtgacaatgcaccgcctccccccgaacg

SEQ ID NO: 45745 - DNA, 393 bp, Glycine max
gcatgaatcaactgacaatttgatttgccccttcattatggtttggagtttaagttcatgcaacatttcatgctaattttgcacacaagaaaaaaaagggtatttttttcttcattaattaaatgcatggatagactaaaacatgcacaagcatagattagacttcagcaaaaggatggagtctagccgcagggaaacattgcaagggatgtgccctaggaagggccattcctggtccctcttccatgtcaaccattcccttcccttcttcaccaaccttccattcaaaacactgaatcattccagctagggtgttgggaataatctgcaaagctagtgaagcaccagggcagcttcttctcccagctccaaatgacaaaagttcaaaatgct

SEQ ID NO: 45746 - DNA, 463 bp, Glycine max
ctcagagctgaagaagtgtttcgcttggggcttgaagtctctgcaccaagcgaagcaatgccactgccttctcctccgtctcggtctccaccaagacacctacctcatcaacctcctcctacgctcttccctccacttcgccgccacgcaatacgctaccgtcgttttcgcccaaaccccgcaccccaacatcttcctctacaacaccctcattcgcggcatggtctacaacgacgccttccgcgatgccgtttcggtctatgcctccatgcgccagcacggctttgccccggacaacttcaccttccctttcgtcctcaaagcctgcaccagactcccacattacttccacgtgggtctcagccttcattcccttgtaatcaaaactgggtgtgactgggacgtgttcgttaagaccggccttgtttggttgtactccaaaaacgggtttttaaccgatgcg

SEQ ID NO: 45747 - DNA, 398 bp, Glycine max
ggctcgaggaggaaaagtcatttcagttccatgatgttttcaatttggataatgagaatagggcagaggatatgccaactttaatagatcgaaaggacaatgtctttatcatttccaatcccaagtcaaagtatccagttcttcaattagacttgagattgatatcagatctcgcagttgtcattggctctgcaacctgtggtggcattgcctttgcttgtgctggacaaccggtgatgactggatatctgctagcacgatcaatcattggacctggaggtttgagttttgttagtgcaatggtccaagttgagacagttgctcaatttggtgtcatctttttgctctttgcattgggcttagagttttcaacaacaaagcttttagttgctcgggca

SEQ ID NO: 45748 - DNA, 441 bp, Glycine max
gtgatgatgacactgtgtataagtgacagtatatgattattttgttaatatccgcaagatagatcttcgatattctgccgatctcccatgtatcaacgttgggaaaccaaaaaggccaacttacattcctcttgaggtcgtgccaatgagtttcagaaatgaattgcatggtccacgccaaaatctacgacattggtacaacagctgctacatgagacaaggagcactagccatacacaaggcaatcccaaatttagttaatgtgtaattctggaatatggcttctgaaacaataaagcaaaaattggtttttactggaagtgaagaaggaaaacttgcaccaattggtcaaagctttgccgaggatattggagttcttgagtgctgaaataagccgaacatcattggttggtattgtcaaatatatatgttagtctatgc

SEQ ID NO: 45749 - DNA, 409 bp, Glycine max
  unsure (1)..(409): unsure at all n locations
gcttacaacgcctaccgcagattgtcgtatttggtttcccatgcgctggttgcgttgcccgcattagcatttctctcgctggctttcgcggcagccacgttttgggccgtgggcctggacggtggaatatcgggctttttgttttattttctgataatattcgcttcgttttgggccgggaactcgttcgtgacgtttctttcgggggtggtgcctcacgtgatgctgggttacaccatcgtggttgcgattctggcatacttcttgctcttcagtggcttcttcattaacagggataggattcccagttactggatatggntccactacttgtcgttggtgaagtacccatacgaagcggttctgcagaacgagttcgatgaccccgtcaagtgcttcgtgaggggtg

SEQ ID NO: 45750 - DNA, 485 bp, Glycine max
  unsure (1)..(485): unsure at all n locations
ctccagcatacccttttggccggagatgagtaatagtaattgggtgttggattatgattatctagacaacattcctctcaccacccttgaaccacccaatttctcttggtcttcctcctctcctcctactacactcagtgtggagctagatgactcatttggaatgttggatggtctcaaggaaaacaggtcaagacaacgtttgaggccatctgattctaaagcatgtagagagaaaatgcgaagggatcgacttaatgacaggtttatggaactggggtctatcttggaccctagaaagcctctcaaaatggacaaggctgttatattaagtgatgcagttcgagttgtttctcacttacgagaggaagctcaaaagctgagggagtccactgagaatctacaagagaaaatcaatgcattgaaggatgagaaaaatgagcttcgcgatgagaagcagcgactaanagtagagaaagaaaacc

SEQ ID NO: 45751 - DNA, 335 bp, Glycine max
aggcaggtgaggtgaattgaggttactgcaatgtcttctgcttgcgcgaccttgaaatccaatacccatttaccaaactctgagaagggctctctaggagaaagaataatgaggtggtcttcaaacaacagtagcccttggtaaatgaatcacctcgtctattcgttctacaagccacaagagggtgaaacatggggccggtgttgcatctgctgtcctcacttcaaacaatgccaaagaatcactgaccttgccagtgcctttctttttaagaagaagggctgatccaaagaatgttatttccatcatattgggaggaggacctgggacacatc

SEQ ID NO: 45752 - DNA, 332 bp, Glycine max
acgatgattgtttcttggggaacagcgctggtggaggaggagttgatcagggtcaagagaagcctccaacttctttggccaagacactcacacaatctgatgctaacaatggtggaggcttatctgagcctagttactgtgctgaaaccatgatcccaaggttggattattctgctgagcctcctgttcataccatcatcgctaaggatatgcatggacagcgctggatgttcatgcatatctatagagggacaccaaggaggcatctttcgaccactggatggatcaatatcgtgaaccagacgaggcttgtcgctggcgactctattgtg

SEQ ID NO: 45753 - DNA, 477 bp, Glycine max
ctcaataataataataatatataaatttcatgggaacaattatgtagagttagttaaccagacatattatctatgattatgacatacacaccatgtgctttcatctaatggcaagtggcaacttttaagagtttcctcccccactccatacaatcacaaacccacaatagttcaatttattttatggcaatttttccgtacttcccccttgaacccttctttgacgtcgagcatgctcatcttcaccattgcttgttggaaatccaagaaaaacaaggcttggttcattgcataagcattcacaatgttcctcgtttgtgggctgttgtacaacgtttggtccgatgtaagaaccccgttgtttgagaccaaatcgttgaagtattcgctgtcaaaatcgttcctcgtggagtcaaagggttgctcagcagtgtcacccgcactgcatgtcttggagagtgtctttgcaaattctga

SEQ ID NO: 45754 - DNA, 376 bp, Glycine max
cagatagtacaaacagttatttgacactactgctttgctcactttaaaatacaggatctttaaacattgacaattcaaaaaataaaaaatcatagacaaatgagcataacattgataacctagatttctgccaacatagcggctgagttacaaaggcatattagctatccatctactgaacatggcaaaaccttcctcaggcttgtactctggagctgtatgtcctgaacccttcacagttgcaaatgtcatttgattcgagtaaatccttgtgtatcctgcaacttggtcttctagaagccatggcctccaatcttccacaatggagtagtttagagccctaatccatgcttgggttgacatgaaaggaacaact

SEQ ID NO: 45755 - DNA, 380 bp, Glycine max
aacaagatcaacaacaatagactagttcttgaggttgtggtgttggtgaaatttttgtgtggagatgtcaggtggtggatgcagcatagtgtggttcaggagagatctgagggtggaggataaccctgcactggctgcaggagtgagagcaggtgctgtggtttgtgtcttcatttgggctcctgaggaagagggtcaatactaccctggaagggtctctaggtggtggctcaaacaaagcttggctcaccttgattcctatctgagaaaccttggctcccctctaatcaccaaacgttccactaatagtatttcttctctcttggaggttgttaagtccaccggggctacccaactctttttcaaccatttatatgatc

SEQ ID NO: 45756 - DNA, 472 bp, Glycine max
cacaatgaatgctagtgctcacaaacaaggccttgcaatgacttatactaatgttacaagtttccacactcgttacaaacacattatcaattctaacaatttacaagaaaacaacagacatgcttcatcaaggacaaccaaatcagtgcggtcaaagtgaaaatacattgccttatatacagttgcagccaaggccatacaaatgtagctatgaactattcagaactatgaagaagtggagatctgtgactatcagacctttcagaatatttcactcgcatcagagctggatcattgtatgcattggccaacttgtcataaaattcagacatattatgctcgttttggtctgctctgtccttcttaatcaaacactcagcagaataattcttgaatatagggaagaaccgtttctggcaatactcattgaatagaagtgtgagaattggaagaggaagaatcaatatggatg

SEQ ID NO: 45757 - DNA, 472 bp, Glycine max
ctcacagaaagcttcctagaactgcttccgaatcatcagttaccaaccccatgaagaagcgtggaggatggaaggccataatctttattttagggaatgaaaccttcgagaggttggcagtgtttgggttatttgccaacttcatggtgtatttgacaagagaatttcacttggaccaagtttatgcttctaacattatcagtttatggtttgggatctcaaactttacccctcttcttggtgcctttatttctgatgcctatgttggtcgcttccgaaccatagcttttgcatcctttggtaccctttcgggtttgatcgtggtgagtttaacatcgtggttaccagaattgcaccctccatcttgtactcctcagcaactagcatctcgtcaatgcgtaagagcaagcagttctcaaataggtgtgcttcttatgggactctgcttcttaaccatcggatctgctggggt

SEQ ID NO: 45758 - DNA, 324 bp, Glycine max
gccaattgttcttggtagggccgcctatttgtttcagcaagaattattggatttcatgcaaatttgtttggacacaagacaaaattctttttgctttgggaggacattgaagacatccaaatcattcctcctacattttcatcgatgggcagtccgataattgtcataactctttggccaggaagaggtgtggatgcaaggcatggtgcaaaaactcaagatgaagaaggcagactgaaattccggttccagtcctttgtgtctttcaatgttgcaaacaggactatcatggctctctggaaggccagatccttgagtcccgag

SEQ ID NO: 45759 - DNA, 483 bp, Glycine max
gtttcttctttggtgtgcacactaaagatggtttagccatgggcttgcttctcaataccaagggtgccatggcactgatcatgctaaacattgcttgggatagagcgattttttctgtacctacctatgcggttatggcttcagctgttcttctaatgactgtagtagtatctcctgtcatcaatgcggtctacagaccaagaaaaagattcgagcagaataagctaaagactatacaaaaactaagagtcgatgcggagcttcgaattctagcatgtgtccacaatactcggcaagccacaagcatgatcagcataattgaaacttttaatgccactagacttacccctatacatgtttttgccatgtaccttattgaacttactggacgtgctgctgcccttgttgctgcacatatagagaagcctagtagccaacccggagaacaaaatctcaccaaatcacaggcagagttagaaaaca

SEQ ID NO: 45760 - DNA, 254 bp, Glycine max
gaaaggaggattcgctgagaaattaacttttgaaatcacacgggttacaacgtacaaataatttgaaagagtttgacgatttttgttgggggagggggggttgatatgggcctggcactcacactgcagcttcatttggatgctcttctgtgcatggagctaaccttctaggttatgctaatggcacagcccgaggaatggctccaggtgcaaggattgcagcctacaaagcgtgttgggttggtggttgcttc

SEQ ID NO: 45761 - DNA, 421 bp, Glycine max
gtgtaagctctttcttctcttcttgtgtatcttgtgcaccgccattgttgacgatggcgagttcatgtcgaagctcgcgaaggcgctaaggccgacatcgtcggggtggactgggagcagcttctgcgactggaagggcgtgaagtgcaacgccaaccgcatcaccacaatcaacatcgcttcgcaatcactcggcggaacgcttcctccggatctgaactcactctccagaacaacgcgctctccggcgcattgccttcacttgccaacctctccatgctcgaaagcgtgttccttagcagcaacaacttcacctccgcccccgatggttgcttccagggactcaccagcttacaaaccctcagcatgaccgataggatcaacctcgctccatggacgattcccgtcgagttgaatgata

SEQ ID NO: 45762 - DNA, 282 bp, Glycine max
cagcacaaagcgggttactgtctgatcaagctaccatctctctctctctttcttagtgccttcttgccagaaggtaaaatggcccaagacacttgcctattaacctctggatcagtgaacgaggggcaccctgacaagctctgagaccagatctgcgatgctgcgctcaatgcatgcttggagcaggaccctgacagcaaggttgcctgtgaaacctgcaccaagaccaacatggtgatggctttcggagagatcacaatcaacgccaacgtggactatgag

SEQ ID NO: 45763 - DNA, 338 bp, Glycine max
cggaaatatttttgatttgtatggaatgccattggagctaggaacttcaaattcttcacgtagtttgatttagatcaaggtgtgactctgttattggctaggcttggagttattacatatttggggtgaacttactaactaatttttctcaaagcaaagagtgggcttggactctaatgggtaggcctttggggaagtcgacaaaagggtaggcaaaagcttgatccgtatcagccaattcccaatggtagttgagaatgagatggtgaatgaaaacagccatttcaagcttagctaactctgatcctgcacataatcgtggtcctcctccgaacgga

SEQ ID NO: 45764 - DNA, 469 bp, Glycine max
  unsure (1)..(469): unsure at all n locations
gcagaatctacaaagggataattccttccaccggccagcttgtggccgtgaagcaactcgaccgaaatgggatccaaagcagtaaggaatttctggctgaggttgcggagctaagtctcttgcaccatgaaaatctggtcaatctcattggttattgtgctgatggagatcaacgtcttttggtctacgagttatttgcttcgcgtactctagaaaaccgtctttttgagaaaaaagcggatgagagcccattaaattggtttgaaagaatgaaaatagtagcggctgcttctaaaggactagagtacttgcatgagacttcgaagcccccggttatataccgggacttgaaagcgtcgagcatcttggtggacagtgatctgcttgcaaaactatgtgatgttggcatggccaagctttctggtggagacaagatgaacaatggacctncaagacttatgggtaccta

SEQ ID NO: 45765 - DNA, 431 bp, Glycine max
gaaaaaaaggacggacaaatatctactataacaatcaataacaagtacattagcaagtattcaagccaagtacatcagcgagtatataaaaatccaaaaactcgatccccctccacaagagaaaacatcaaaagtccaaaaaagagctaatgctcctccaacaagtaacaccactggtttcagaaaccgatttattcagacctctcattttttgctcgagcaagacactaaatcgcagctaaacataaacatacggtaataatgtgaagacaagctactttgaagtaacaccttaaagagacttcttggcaacgaatacaagaagatcaatgacacgtgagctgtatccccactcgttgtcgtaccaagaaacaagcttcacaaagttcttattcaatgcaattccagcctttgcatcaaaaatacttgat

SEQ ID NO: 45766 - DNA, 241 bp, Glycine max
agaaaacgttggtgtttcatagtggcagagctcctgatgggaaaaggactaactgggtcatgcatgagtacaggcttgttgaagaggagcttgagagggctgggtctggatcctctcagcctcaggatgcgtatgttttgtgtagagtgtctcacaaaaataacataggacccccaaatgggcaacggtatgcgcccttcattgaagaagagtgggatgacgcatcgggaatggttccagg

SEQ ID NO: 45767 - DNA, 255 bp, Glycine max
agaaccacaaccctttatccatgacttgattcaaataatttagtcaataagcaaaccataatgtacatgaaggagctggaattgtattttaggaaggtatggtattggcatggctaggctttaaaggaagtagccatacaattccaagtaacaaatgcagaaattccagggattgggggcatcggggggggttcctgtgagcacaacccggaaatacctgaagggaaacaaagcgttggggccaattatgggcca

SEQ ID NO: 45768 - DNA, 252 bp, Glycine max
acaaaaactcgctgtccttctccatttctcgtcgcaccttttcctcttctctctctttctctctttctagttcgtgttcttcgtcgcaaatccgaagtaggatctctctcgttctttctctaagtttttcgcgatggcgtctaagcgaatctcgaaggagcttaaggatttgccgaaggatcctgcaacatcttgcagtgccggtcctgatcatgaagatatgtaccattggcaagctgcaactatgggtcc

SEQ ID NO: 45769 - DNA, 273 bp, Glycine max
aaaacaaaagcctttggataatttaaaaataattttaacatagatttcaatacagtttttattattattaactacatattaactattttaacatgcttctgattgaatgggcctataaacccaatgttcacgcaaaaattaccaagagggttagaggctatacatagaaaacctgaccaacatttaatagactctcatgaggaacattggagatcacactattttccctgcatatcttcctcaaaaatgcgtatatttaatcaacagcttttt

SEQ ID NO: 45770 - DNA, 488 bp, Glycine max
gttcgatgaaaagtaggtgataagcaaacaaagtctctggaaaacgcgattcttcttctgttgagagatgaagctcattgcactgagttctacggttcggcgcgctctgctcaatggtcggaaccaaaactgtaaccgcctaggttcggcggcggagacgaggctactctgcgctggcggcgcgaatggagggttcttctactggaagaggacgatggcttcgccggcggaagcgaagtttccggagaaggagaaggccgaggctgagaagagcgtggtggagtccagttattgggggatttcgaggccgaaggtttcgagagaggacgggacggagtggccttggaactgcttcatgccttgggagacttatcgtcaaacgtgtccatagatcttactaagcatcacgtgccaaagaattttctggataaagttgcttacaggacggtgaagctcctcagaattccaacagatttattttttaagag

SEQ ID NO: 45771 - DNA, 408 bp, Glycine max
agaaggtggagtgatggccttcaccaagcagttgaggcaaaggaagggttgccaattcaaaatgaaactgtaacgctggcttctatcagttaccagaatttctttcttcagttccccaaactttgtggtatgactggcactgcagcaacagaaagtacagaatttgagagcatttacaagcttaaagttacaattgtgccaacaaacaaacctatgataagaaaggatgaatctgatgtagtttttagggcaacttcagggaaatggcgtgcagttgtagtagaaatctctaggatgcacaaaaccggtcgcccggtgcttgttggcaccactagtgttgagcagagtgattctttgtcagagcaattgaaagaagctggaattccgcacgaggtacttaatgcaaaa

SEQ ID NO: 45772 - DNA, 524 bp, Glycine max
ctcctctcctacggcgtcagagtcggcattggcatactcctcctcgccttcaagcttgttggaggacaatcctactcctctctcctcgatctcaagctaatatgattcggtggaatggttgaagcttttgtaggtttcagttgttgtcaggtacagaacctaatgagttcacttttgctaccgtgcttacttcatgtataggttcttcgggttttgtcttagggaggcaaatccactctcatatcataaaattaaattacgaagcacatgtttatgttggaagctcactccttgatatgtatgccaaagatggtaaaattcatgaagctcgaggcatatttcaatgcttgcctgaaagagatgtagtttcttgtactgccattatctctggatatgctcaactgggtctggatgaagaggcattggagctatttcgccggttgcaaagagaaggaatgcaatcaaattatgttacttatactagtgttttaactgcactttctgggcttgctgctctagatcat

SEQ ID NO: 45773 - DNA, 352 bp, Glycine max
aacgtctctctcacaacggttttccattcgaaaatctgcgttcagaactccaatcacgaggagcacttgttgctgcaactgcatgcaataatgtcgttatccgattctgaaacgccgtacggcggtggaacggagtacaagcctttccgccatatcagccgcgatcggttattaattgaaatgcttagatcggcaaagtcacctgattcgaaagcttggaaggtgctaataatggataaagtcacggtgaaagttatgtcacattcatgtaaaatggcagatattacagaccaagaaatttccttggtggaagacctattccggagaaggcaaccattaccatctttggatg

SEQ ID NO: 45774 - DNA, 401 bp, Glycine max
ctcgcgaaagcgccaaatcccaacaatacccacacctcactcaccctaatgcccaaattccgttattcaactttccccctcaccacctccttcacacctcactcaccacggtggtgcgttaaaatcactggtcgcaattttcctctttcttaaccgcaccatgtcgaataggaagttcggattcgaagggttcggcataaaccgccaatccacctacagcttcgagcgatcccagccccctcagcgactctacgtacctccctccgcgcgccacggccacgaccactacgaagacaccgacatcgacaacatcgacttcgacgacaacaacaacgacgacgggagcaagaataacaacggtggcggcaacgacgacgacgacgaaatcgaccccttggatg

SEQ ID NO: 45775 - DNA, 420 bp, Glycine max
caaaagcatatggcgtatttatacaattttcttgctttctctctccttgggtacatccttggccattctatcattatgggtatcgtgaggaacagaattaatgggaaaaaggcttattaacaagggctacccactctggacttcaccaggtcgactgcatagcaagtaagccttcctacataatgtcctaccttagcggcgatcatgccttctcttgagaataccctcttagccgacccatgccccgattgcacaaaaaatgctccattcatgtacacatcgataatagatctccactgccaattagcccatacgtgttctggagcgtattccctctttagaatctgtctatcgaattgactgtcaggggcattaaaacggtcaccctcactgataatggcggggtccttgctaccacca

SEQ ID NO: 45776 - DNA, 358 bp, Glycine max
aaaagagcgcgtgttttatttccctcaaggacatattgagcaggtggaggcgtcgacgaatcaggtggcggaccagcacatgccggtttacgatctcccacccaagatcctttgtcgggtcatcaacgtgcagctgaaggccgagcccgacacggatgaggtgtttgctcaggtgactttgcttccggagccaaaccaagatgagaatgccgtggagaaagagccaccaccacctccgccaccacggtttcatgttcattctttctgtaagactctgacggcgtccgatacgagtacccatggtgggttttctgtgctgagacgacatgctgatgaatgtcttcctcctctggatatg

SEQ ID NO: 45777 - DNA, 450 bp, Glycine max
gaggcgaagaagatgggtgtgcagatggagtgaggcttgttcagcttctaatagcatgtgcggaagcggtggcttgtcgtgacaaatcacacgcttccatattactatccgaacttaaagcgaatgctttagtgttcggatcctcattccaaagagttgcttcctgtttcgtccaaggcctgatcgagaggctcaatctgattcagcccatcgggcctgctggccccatgatgccctccatgatgaacatcatggacgtggcctcagacgaaatggaggaagcattcaggttggtttatgaactgtgtccgcacatccagttcggacactatttggctaattccacaatattggaagcctttgagggtgagagttttgtccatgtcgtggacctaggcatgagcctgggtctacgacacggacaccaatggagaggtctgatccagaatc

SEQ ID NO: 45778 - DNA, 407 bp, Glycine max
cttgtaccattggtgtgattcgaattcacagggatactgcaactcggaggacgaaatcagctagcattgggacaactgcagagattcgacaatttgggcgtctgggggatggttctctgaatgtggttacccgtggacaacaacgatttcgcctaagacggtcctggactgatgtggaaggagtgccttatggagagattcaagttattgaggaagatctgccactcagaattccaagggatgcttttggcaaatcagcaccattgagtaatatgccctgtagccaaggtgtctcacataatttgtctccaaagtattcccatgttaacatgcaaaggtcaaaaaatgaggaaaatgattcagaaccaaattcagaagagagttttgagagtgagctctcactgatg

SEQ ID NO: 45779 - DNA, 429 bp, Glycine max
gttcgagacccttattgacatttcagtgatagagatattgtcaaggcatgcttctgatgaggtctaccttggccaaagggataatccaaattggactacggattcaaaggcattggaagctttcaaaatgtttggaaactgactgggatctattgagggacaaatcacacagaggaacaatgatccaagtctgaaaagccgacatgggccagttcagcttccatacacattgctccatcgctcaagtgaggaagggatgagtttcaaaggaatttccaacagtatctccatctaaaatgtgtgtgtggtttgcttatctatcgtgcttctgaataaaatagacaatacttgtctatggttattattggctgtatgtctgtatttggatgctctcgatcggcttgcatgtaataagagtgttttcactgt

SEQ ID NO: 45780 - DNA, 427 bp, Glycine max
cagtttttcttctgactgggagtggcaacgcaatttcatccactctgcaccttatcagtatggtttaatctcccttttttttttgttgaattaaatgaatgcagatcgtggtgaagctcaaaaaggaagcgctgagacatttttccgaaaagtaaagttctggaaagaagatgctgagggagatgctccacctgtttttaatatagacggtgtgaactacttccacgtaaaggttgctggattgctatttgttgctactactagagtcaatgtctccccttctcttgttttggaacttttacaaagaattgcacgtgtcatcaaagattaccttggtgttctcaatgaagattcctttagaaagaacttcgtgctcgtttatgaattactggatgaagtcattgattttggttatgtgcaaacaaca

SEQ ID NO: 45781 - DNA, 481 bp, Glycine max
gagaaaagagccaaagaaaattgcagtactccaggtgcactctgtgttctacctctgtatgccatgcttcctgcagcagctcaacttcgtgtatttgaagaagtcggggatggagagcgccttgttgttgttgccacaaatgttgctgaaacatctttaacaatcccagggataaagtatgtggttgatactgggagagaaaaggtgaagaattatgatccctctaatggcatggagacatatgaagtacaatggataagtaaggcatctgccgcacagcgtgcaggcagatctggaagaactggacctggacactgttaccgtctctattcttctgcagcctttagtaatgaatttcctgagcactctcctgccgaagttgagaaagtacctgttcatggtgttgtccttctcttgaaatccatgcatattaaaaaggttgcaaacttcccatttcctacttctcttaaagattcttctc

SEQ ID NO: 45782 - DNA, 473 bp, Glycine max
gcaagccacaaaaaggtcaagggttgctttgctgcaaggctagacaaccttgatgacgatctcatggaggatgatgtcatcacacatgaagagtttttccctacaaaatcaaactccaccctccaatttgaccatggaagctccaatccctcattggcctcttcctccaagagaaaatccaaagtgcatgaatgctccatttgccataggagcttctcttcgggacaagcattggggggacacaaaaggtgccattggatcacttcaaatgctcctgacacctccacattaacaagatttcaacaattccaagagcacttggatcaaatacccaaatttgatacctcttccgagcctcttgatctcaaattagaccttaaccttcctgcaccctctaatgaccttgcaagaaggaatgtgaacacagaattttacttgcagccttgggttgcatcaaaagatgctaaagatga

SEQ ID NO: 45783 - DNA, 476 bp, Glycine max
aatgaaattaaaatacaagaaattgaattgcctcatgcaaacaaaatatttacaaaatgaaaagaatttaaatcaagacaatcaaaatgctgtcaatttgaatttcctaaaaatctttaaattcctcatccaaacacatagttaaacattttccatgctccagatatacggttttgtgaaacatgaccttcaaccatagttgttattgccataatatctggcttaattccttttcccagcatctcatcatacaacatgcaagtttcttcatacctattcaacctgaagagatgttgtatcaagtctgtatatgtggaaatagtaggcacacaaccagattctttcatgcattgaaacacctcaagcgctctgtcagcatcatttcttcccaaatacccatttatgacaatcccatgaacccttccatcatccatatcccttctcttcataatatcaacaatctctaaagcatatgt

SEQ ID NO: 45784 - DNA, 336 bp, Glycine max
aaaagaaaagggattatttcctatttattttctcaagccaaatgcatttatacatcgttagattatttaatacatgcatacgaaacacgcacattggcttctacacatttttgtaataattttgagatccgaattctcacgtcaaattaaatttctctttttgctatctgtacctttaaaccatccttcataagaagaacaattgaagggcttggggtagcaacatgatccaccactcgaacacgatacttgtgcaaaatagcagctgccaccatcttcatttgaatgaaggatatttctttccctaagcaagtcctaggtcctgcattaaaagca

SEQ ID NO: 45785 - DNA, 305 bp, Glycine max
ccaaactgttatcaaaagaagattttccgacatgcataaacgcagttgatagtttcatatttatagatttctataaatatcatatggtgatgaaggcggttaggccagtcaattgaccgtccacaggacctttaagcatggcccctatagtttccaatgcgaaatgggggccacatttttaacttagggaacccataggaggcccttgataagggatgatgttcatacggaaaaagaggatccacggccaaactgagggccccaaagctcaaaagatcccttaacaaagtgatagtatcctcctt

SEQ ID NO: 45786 - DNA, 344 bp, Glycine max
tctttttttttttttttggaaatcataagattctatataataaagacaacatatataactttatcctataaattacacacaacaatttcgagctttattctataaatgaagaatatgaaaatcgacgggctatgggaacttgggcctaccacgtctggccagaaaactatcggctgtagatgagtctatgctattaaagtcgggcccaatggtgaggttgatcggcttaaggctcagttagtagctaaaggatacactcagatctatggctttgattattgatacttgctatcctgtagctaaaatcaccattgttcgactggatctcgctatggctgccatgc

SEQ ID NO: 45787 - DNA, 429 bp, Glycine max
ctcgagccgaatcggctcgagcgcactcgttctcgtcgtggaataacgacatgaagtcaagcaatgtggtgatgtcgccgacaagtaaggtgaagcaggctctagggctgaagatgttgaagaggtcaccatcaaggagaatggtgtcgggtggcagcggtggaccgtcgtcgccggtcggcggaagtagtccttttcatcagtccgggtcaccgttgaggccacgacggccgatgacttctgcagagatcatgagacagcagatgagagtgactgagcacagcgataaccttctgaggaaaaccatcatgaggaccctcgttggccaagcaggaagaagagcagaaactatcattctccccttagaacttctaaggcatgtaaaaccttcagaattcagcgattccaatgagtaccacatgtggcaaa

SEQ ID NO: 45788 - DNA, 439 bp, Glycine max
attttcctcccttgacaacatggtggtgcaagtgcaacacaatctcctcttagtcataactttcttgatgttgttgtggtcatggtggagccttttgggtgcactaggagaccctcaaacccatttaatcaacaaggggtgtagccaatacaacgcaaccgacttgtccaacttcaaccaaaacctaaacgcaactttggatgaccttagagcacaggttagcaaccaaagcaagcactttgccacggctcaagaagctagaggagcagaccctgtctatgccatgtttcagtgtaggaactacctctccaccgccgactgcgccgcctgcttcgtggttgccaccgcccaaatccgcaattgctcagccggagccaacggtgcccgggtcatctatgatggctgcttccttaggtatgagagcaatggcttctttgac

SEQ ID NO: 45789 - DNA, 526 bp, Glycine max
acagacaaaagcattaatgtgttattttcctcatactcaagattcagcaacatataaagggtttttgggcctaggcctccttagtaacaaaaaacaaaccacaaagggtcaaaggataacaaaatgcagccactaaggcaggcattgggaaagattgcacaaaatctctcttgatatcattttaatcagtaggaaaatctgttacggctagtcctgagggacctacgttcttgctgatggaagcacattttttcctgccccagaagcaacattgatctcaatactgtcaaaaatgtctgatcctgattttgtaccgtccttaattggcaattcatggccctcactgtttccttctttggttttgttcaatttgtctttgctttttccccataccacggtgtaaagtccactcacaatgataatagctccaatcacacttcccaaataaacttgctcagccaaaacaatggatcccaatgcagcagtgataatcatacatagagggctgaaagaagtcacaaacaca

SEQ ID NO: 45790 - DNA, 389 bp, Glycine max
ccgcctctggtctcttctcttctcgcaagcggagccccaatttctccttcacgaaccctaattcactcttcccattcgaaatctcgatcaccttttcgattcaacctttctctcctcgctaatctcttcgttcgcctcgcacatcaaggtgaggggattgaaattgaatcctcagaaggccgcttccggcgggaggggtcggatggctggcaaccattggggtcaccggaagggcagggtctaaacccctgggtatatggcaaagtgccatcggctatgatccttatgcacccaatagggaagacaggaaggattcttctcaaaatctgccaaatgcagagcctgatgctgagaatgcatatgctagcttccaggggcttctacagctt

SEQ ID NO: 45791 - DNA, 509 bp, Glycine max
ataattaccaacacatgtcatccctcatatttcttatataagcaacacacgttaacatcactgttttgttgtgagcaaggtttcagctcccaacaaaaaaacacaaggactaatccgtgaaaataagatctatttaggggcttcactgagtttttgcatgattcctattcacagttttgcacacactttctttggtacacaaaccatcttaaaggccttcaacttctctacttccaatccaaccttcaagctgtagcagaccacccttgcattgatcaccatttcaccatgatttggcaacagcaccaactgacacttgttcaccacttcctctggcaaagaccctgatccacaacgggtaaagaagcaccccacagaagggtgctccaaaatgaactcctgattaggaacacatccaccacacacaacccctcttccttcaactctctccttaaaccctagtggaaaagctgattccacacactcaaaatccttagggggtttaagtg

SEQ ID NO: 45792 - DNA, 485 bp, Glycine max
aatttattttctttctgcttctcatggatctctcctcactctcttcataccgcactgtcggagtaacaccttctgatcctcgaaaatcacttcctcaatggggtcttcatttcctctcctacactcacaggctcaaccagattaagaaaaggtcaagtggggtatatgcatcactatccgagagagagagaggagagtattattcccagagaccgccaactccgctactagacaccgtcaactatcctattcatatgaaaaatctctctaccaatgagctgaaacaactcgcagatgaactgcgttctgatgttattttcagtgtttctagaactgggggccatttgggctcaagtcttggtgtggtggaactcaccgttgcactccactatgtctttaatgcccctcaggacaagatactctgggacgttggtcaccagtcttacccgcataagatactcaccggtaggagggacaagatgcat

SEQ ID NO: 45793 - DNA, 448 bp, Glycine max
aacaatccatgatattattaaatgagagacaattattcatagtttcgacataatttatcaggcaaacctgattcaactaaaagaagattacataatttaacaatggactttccacaaaccgctaagacatgaatcacatgctttcatagataacaattagaagataatcgtggcttaattaaaatctcaagtggagtagctttagtcttgcctaatccaacggtttcagtcatatcaataggttcatttgatggatttaagaatgaaaaagaatgaaaaagactggcaagaatcaaatgaaccatttgaaggctaaaggatattccaggacacactcttctaccaccaccaaatggtaatagctcaaaatgatgtcccctaacatcaatgtctttatgggtggttagaaacctttctggtttgaactctaatggatttgaccaaacac

SEQ ID NO: 45794 - DNA, 432 bp, Glycine max
tcctgctgatatggccaagaagaaaacaagtgtaatttcaaataactggtttcctgtttgggatgaagagtttgatttccctttgactgttccagaactggctttgctccgcatagaagttcgagagaatgataagagtcagaaggatgactttggtggacagacatgtttgcctgtctcagagctaaaatctggattccgatcagtccctctccatgatgaaaagggtgacaaattaaaatctgtgaagcttctgatgtggtttcagtttagatgaattataggatcagccatataataatcttagataatggatatgaggtcattgtaatgataattatatttatctttagctgcttgcaatggtatttctggctttactatgttatattttctgcaccatcaacatcaatataaaacagtattaagaac

SEQ ID NO: 45795 - DNA, 447 bp, Glycine max
ctctgtgtattacccaacaaatgcagcaattcaacaagacactgaacttcaagcatggtggaaggaagttgtggagaagggtcatggtgacttaaaagataagccttggtggcctaaactgcagactgtggaggatctcattcaatcctgctctattatcatatggacagcttcggctctccatgcagctgttaattttgggcaatacccttatggaggttatatcgtgaaccgtccaactctagccagaaggtttatcccagaagaaggaaccaaagaatatgatgagatggtgaaggatcctcaaaaggcatatctgagaacaatcacacccaagttcgagacccttattgacatttcagtgatagagatattgtcaaggcatgcttctgatgaggtctaccttggccaaagggataatccaaattggactacggattcaaaggc

SEQ ID NO: 45796 - DNA, 461 bp, Glycine max
gacagatcggagcagaccctgtctggagtggcaagtggctctgacttcacaagaaagtggggtggaaactcagacatatgctcgatacaaatacccaaccatgagcaaaactcaaggcaattttagacttcgtgtagctgaaggagaatttactgattctcagattattgtgatgctgggtgagaatgggacaggaaagacgacatttattcgaatgctggctggtttattgaaacctgacaccatagaaggtggatctgaggtggagatgcctgaatttaatgtttcatacaagcctcagaagattagcccgaagttccaatcaactgttaggcacttgctacatcaaaaaatacgtgatgcatatactcatccccagtttgtgtcagatgtgatgaagccacttcttattgaacagttaatggaccaagaagttgtgaatctttctggtggagagttgc

SEQ ID NO: 45797 - DNA, 447 bp, Glycine max
ctagaatgcggattgcaataggatccgctaaagggcttgcttatcttcatgaggactgtcatcctcgtatcatccatcgcgatatcaaagctgccaatgtccttattgatgatagcttcgaagcaaaggttgctgattttggattggctaagttgactactgataataatactcatgtatcgactcgtgtcatgggaactttcgggtacctagcccctgaatatgcatcaagtggaaaattgacagagaagtctgacgttttctcatttggggtcatgctattggaactcataactgggaagcgacctgttgatcacacaaatgccatggacgacagcttagtagactgggctcgaccacttctgactcgtggactagaggaggatggcaactttggagagttggttgatgcatttttggagggaaactacgatgctcaagaactgt

SEQ ID NO: 45798 - DNA, 417 bp, Glycine max
ctcattctctactagaaagcttgaacctttgcggacaagttctgagacccagttgccggagggggcgggtcccactgggaatggaggcggagactgaaaaatcacgctctgatgggaagggttggagtttttgtacaatgccatttatgcgaacaactcacactccttgttcttctactacttgcatgtcttacatgcacaatgatcatccgcgaaatcagaatcactttcaatttgttgatagatccagtcatgattcttcaaccacagtttcatctatggccaagtctctgctccctacgaagaggaggctccatcttgatccttccaacaagctctactttgcatatgaacctggtaagcaagttaagagtgcaatcgcaattaaaaacacttgcaagtctcatgtacctttca

SEQ ID NO: 45799 - DNA, 388 bp, Glycine max
atgggaaagcaacttttggagaggttttcaaggttttctttgccttaacaattacagcagttggtgtttcccagagtagtgccttggctccagatactaacaaggccaaagattctgcagcctcaatatttgaaattcttgacagcaaaccagctattgactccagcagtgatgagggcacaacattagacacagtaaaaggtgaaattgaacttcaacaagtcagcttttgttacccaacaaggcctaatattcaaattttcaaagacatgtgtctaaccatgccaactggaaagaccgttgccttggttggagaaagtggcagtggaaaatcaacagtgatcagcctcttagagagattttacaaccctgactctggacgcatact

SEQ ID NO: 45800 - DNA, 474 bp, Glycine max
atgacgttcttctccttggtgatggcccgtggccggaatttgtaaatagtgtagggtgcatcaagatactttcccctcaggaagtgcagcaaatgggcaacaatggccttgagcttcttaactctgtccccattcagaggctctctaacggcgtctgtgacgactacgcaggccgtgaggacccaagaaatttaagcactgggataacaattgtggggtctttaaactactgaatgatgtgacaatcaatactatgaatctcttctctctcttgtattattactcctacttctccactctttgtcaatggtgggatgtactgcctagttgtagtttataggctacttataagccttttgttttttttgtctgttttcctgttttttgctgcctaggaccattcataagataaacaatgtaaaccatatggcatcttgtcaatgtgctatctacaatatattgattacttaatct

SEQ ID NO: 45801 - DNA, 484 bp, Glycine max
cttcaccacctccttcttcttcccttcccccactcttcaaccccacacaaacctccctgcttccaacgcagtaaaaccttactccgagcctccaccgtcgaatccccaaccccaaaacgccgcggcagaaagaaaaaacccgaaacacaaaccccctcaaacaacacccctcccccccaaaacgcagacaacaaaacagaagaagacgagctccacgactacgacgacggcgtggacttcccctactcggaccctcccttaatatgctgcttcggcttggcgcggaaggagttcgtccctgcggtgcgggtgcaggactacccgatgcacccggacatctactccgagtggaagatgctgcagtggaagccccccgagttcgcacgtgcgccgggcggcccgccgtccaacgtggccgtggcgcacgcgcgcctcggggggcgggcggcgttcctggggaaggtcggggacgacgagtttggag

SEQ ID NO: 45802 - DNA, 400 bp, Glycine max
ctttctttctgtaactaaccccaatcatcaactcagtcagcgaatgaatctgtggacggacgagaactcctcggtgatggaggccttcatgccatcctccgatctctcctccatctggccccctcccgctcctccgcagccgcaatccacggcggtcttcaatcaggacaccctccagcaccgcctccaggccttaatcgagggcgcccgagagacctggacctacgccatcttctggcagtcctcttacgactattccggctccactctcctcggttggggcgacggttactacaaaggcgacgacgacaaagccaaggcaaaggccaagtccaaagccacctccgccgccgagcaggaccaccgcaaaaaggttctccgggaacttaactccctcatc

SEQ ID NO: 45803 - DNA, 462 bp, Glycine max
ggagcgtgggcataaagtcgttgacagtcgaaaacaaactctcacttcttccttccttgcttccttctcttctgcgttttcttcttcaacattccaatctaatccaaaacgctgcgttttatttcgtattcaatttaattcaatccctaaattcctcgccggagagagcgaatcttaataaccccaccactttccggcgaaacatggccgtcgccgtcgccggccgccagaagccgagctccgacgcgagcctcttcacgctctgccccttctggagctcgcgcaacgctactcaaaggtccaccaaaacggtgtcgtccgtcgccaggtcgctgctccgtccgcgccggaaactccgcctcgatccttccagttacctctattttccatatgaaccgggaaagcaggtgaggagcgcggttcggttgaaaaacactagcaagtctcacgttgctttcaagt

SEQ ID NO: 45804 - DNA, 287 bp, Glycine max
agagacaaataacaatttgctattacaaaacgaagaaactattattggaattcattcaaattgaagtgcacatgattaataagattcaaccaaactagagaaggccaccacggagcctaaggacaacatagacatagaaattttgttatatcatacacattcaaggaagagaaaatctcaatagcaagattcaactgaaactagaaatcgccaccacggagcctaagaacaaggtgaagcgtggattccttctgaatattgtaatcggcgagagtgcgtccgtcttc

SEQ ID NO: 45805 - DNA, 420 bp, Glycine max
gagaaacatgagcagagattacaatttaatatataaaatatacgttcgtgttaaccagattataaactggactgaacaagaggggagagagagatcatcataatacatctaaaatatagtggtaattattgcttcatattaatctacacatacatataacatatataaatatatgtaaattgttgttacttttgtatcatcaggcagaaatctaggaattggcagacccacctcccttgattgaaagaggagaaccacagagagaggtgttctcagtgagttttggattaagaaacaccacaatcactgttatgtcatcatggatgtgtctcctcatcccttgctcaatcttttggaggtcagaaagtctcatttcacacttcttagctgcttctctaagtgcagctttcacaagtcttc

SEQ ID NO: 45806 - DNA, 452 bp, Glycine max
catcaattacaagcccttcagcagcaactcgaggacctgcttccacaggaggcttcttacgagcttcaactgcagcatcagcttcagccaactgtcttttcagtttttccaaaacaggactttgccgagctggatctataaagacaaccctcaatattctttccactgtcactagttccttttgttcatcaaactgcatgacagaaggccaaagaccaaatttaattatttacttttatcattcacgggtaaccttgaaaatattgcctaaagcatgaatagatgaaacaagctattatcaatataacaagctgacgctaccatgaaaatagcctatctacaaatatctgttaataaatcaatcctatccagaagttgaagttcagtttttggcatatgttaatgttgtagggcctatagctaacccaaacaaactagtatcctacatatgg

SEQ ID NO: 45807 - DNA, 374 bp, Glycine max
cagatgctccacctacctagtttactcccctacggcagagcatgaaaaccaaccacgggcacattggcctgaacccattgtgcgccctcaatccttatccgaaaactgcgaacattcaatccctgaaaggtacatcaagccttatactgatagaccatccataaaaagttgtaattttgatgatgccaatattccaatcatggaccttgggggactatttggtgctgaccaacatgtctcagcctcaattcttaagcaaatcttacatgcttgcaaagaatggggctttttccaagtcactaatcatggtgtcaaccctgatttgatggacaaggtcagggaaacttggcgtgaattctttcacatgcccatgg

SEQ ID NO: 45808 - DNA, 365 bp, Glycine max
tttggccagactcttgtggccaaagccttcagatcgctggttccggaggctttggccagactcttgtggcatgtttctttgtattccgcgatctgaaggagctcatcataaccgcgttcaacgccacggccgaagagatcgcgaaccaaatcaaaaactcgacgctctaccatgaactcgccaccgaccacatgacaaaacaggccacggacatctgcaaggaggtactaggttacgctgtcgacgacattcgccgatccgttcacacgttggaaaagttcgacctaaacaagttgaacgattacgcctatgacctcaaggtctggatcgcgggtactctagctcaccagcagacatgtttggat

SEQ ID NO: 45809 - DNA, 388 bp, Glycine max
gtggatattagagtagaagaagaagaagaagaatcccaaaaagagaaaccaactcaaacttgttttatccatgggttgatcatcccaaaaaagtttgctttgtttgggtaaatgacccttaaccctgtttgtgaataataatagagttaggaggttccgatgacggtcgatttggacaacgcttccaccgcttcaggtgaagcagccagtgtctcttcctccggcaatcagacaaaacccgccgctccaaagaaaaaacgaaacctcccgggcatgccagatccggaggcagaggtgatcgctctgtcgcccaagactctcttagcgacgaaccgtttcgtgtgcgagatatgcaacaaaggattccagagagaccagaatctgcagc

SEQ ID NO: 45810 - DNA, 424 bp, Glycine max
aaaacagattacatatagtttaaaaataaaaaatacagacagcaggttcacacaactaacacataattaaatattagatactttcataacaactaggagataggcgtggtttaataagaatctcaagtggagtggctttagtgttggttgctctaaagacttcagtcatatcaagaggctcagttgatggatttaagatttcaaaggaatgcaaaaaactagcaagtgtcaaacgaactgtttgaaggcctaagtttattccaggacaaatcctcctaccacctccaaatggtaatagctgaaaatgttgacccttcatgtctatatctttatcagtcgtaaggaacctttctggtttaaactctaatggatttgaccaaacgttatgatctgtgtggatcttggaaagatttgtaattagacg

SEQ ID NO: 45811 - DNA, 427 bp, Glycine max
ggaagcaatcacgagcttcattcccaaagaagagtacttggagggctacacaggttctacaactaattcatgcagatatttgttggtgttttcagggtttaaatacgctttaccagcagagtatggtatatggtttgccaacaatgaaaacaccaacaaaactgtgccaggacttcttggtagggaagcaatcacgagcttcattcccaaagaagagtacttggagggctacacaggttctacaactaattcatgcagatatttgtggaccaatcacacctatctccaacagcaaaaagaggtatctgctcacctttattgatgatttcagtagaaaaacttggatttatttcttgacagaaaaatcagaagctcttcctgtctttaagacatttaaaattcttggtgagaaagaagctgactcatt

SEQ ID NO: 45812 - DNA, 397 bp, Glycine max
cgttctaacaattctcattcaagtttcacctttcgccggaaaaagaaaaactcatcgccaacgctgaacctctccgtttctcctcctccgtcgaccgctccgccagctttccccagcggaactccgtccgcgccgtcgcggaggaggcggtggagacacggcggccggcagccagcctctacgatgtgttgcgagtcgagcgagacgcatctccgacggagatcaagtcggcgtaccggagcctcgcgaagctcttacatcccgacgcggcggtgcggcgttcgccagagacagacggaggcggcggttacgtcgacggagacttcattcagctccgaaacgcgtacgagacgctgtcggatccgtcggcgaaggcgatatacgatatgacgctggc

SEQ ID NO: 45813 - DNA, 478 bp, Glycine max
  unsure (1)..(478): unsure at all n locations
ggttgatttgacagcttatgtggagaaacatgagttttgttttgatgctgttcttgacgagaatgttaccaatgatgaagtaaggttgctccttatcaaagattgaatttttatgctgtttcttatttaaattaaattaaccttttttcttcagtagttatgacgccaatatttggcttgtttgttgttgttggtatttatgaaagtgattgcttgcctttgtcttggtcttgactcttgagttgttaatctaaggcatggttgctgctttgcaataacaggtatatcgagttactgtagaaccaattattcctacaatttttgagaaaactaaagctacttgttttgcttatggtcagacaggtaagcaaattattcttccttgttcatatcataattgtaccaaacattatgaataagcactatccaatttactttccaaaccttnttctttattcaatataatattctctatgta

SEQ ID NO: 45814 - DNA, 433 bp, Glycine max
attcggctcgaggaaggctgccaaccttttgatggatgaaaattgtgtacaatgtttcctttatctgttgtttcttaaaagtataatctgatgcaatgcttcttctgctcctccccccctcaatgactaacataatatagcacatgtgtggctaaatacagtgaattctataaactgggcatacagaactgaaagtagtacatttgttccattgcagactgtaaaggtcgctgattttggggttgctagagttaaagctcaatctggcgtcatgactgcagaaactggaacatatcgatggatggctcctgaggttatagaacacaagccgtatgatcacaaggctgatgtatttagttttggaattgttttatgggagttgctcaccggaaagcttccatacgaatatttaaccccactacaggcagctata

SEQ ID NO: 45815 - DNA, 422 bp, Glycine max
  unsure (1)..(422): unsure at all n locations
tggatctcttcaacccaataatcaaactcaccattttcaacaacaccctcagcctcaggggcagagttttggagcttcggctccggctaacggtggcggttcgggtcagccgaagcagagggttagagccaggagaggacaagccacggacccacacagcatcgccgaaaggttacggagggagagaatcgcagagcgaatgaaggccctacaagaactagttcctaatgccaacaagactgacaaggcctccatgctggatgagatcatcgattatgtgaagttcctacagctccaagtcaaggttttaagcatgagcagattgggcggtgcagcagctgtggcaccccttgttgctganggtggcggtgactgcatccaagccaaacgcagcaactcaaacgacagcctcgccatgacgg

SEQ ID NO: 45816 - DNA, 414 bp, Glycine max
acaatcagtcattaaaattaaattcccatggaaatgatcgggtgtttgtgaaaaatgaaaacagaccaataatttcactccgttatcatttcctttaaaattataattaaccacatgttcaataaaacgaagaaaaaaaatacatatttgtgatataataaattggtttctatggtccaaatcaaagttgattgatatattcctatgcgtgactcctaagctatgcaattttgaggtagaccgtttccctgaactcgaacctcctggtttcatggtagaaggtcttgtgcttgttaggccaatacgttatccatatccaaccccttatctcccactccattgtcttccccacagcacctttgtccactttccaacacacactttctccatactcatcaccagcaaagataaccc

SEQ ID NO: 45817 - DNA, 363 bp, Glycine max
gccgccagcgcctatgcctgcagcgaggccaatttccccagccgctggccgccgttctggcggacggaggagctcgccctcctagatatcgatttcttcgccagagtcatcgacgccatgaaagcatcgcagctccaaaggctcttaccgacgtcgctgcgctcatcacctacacggagcgcgccctacgagatctcgtccgtgaccacaccggcaacggaatccggtcctcagatctcggcgattccgattccagatccaaacagcggaagcttctggaagcaatcgtggatcagttcccctcggagaaagccgcgtttccgatccacttcctctgctgcctcctccgatgcgcgatctacc

SEQ ID NO: 45818 - DNA, 342 bp, Glycine max
gctaatgtggcttgtaaaagtgtgagaatgagaggtaaggataggccttcaatggacaaagtgacaacagttttggagagagcacttgcacagttaatggggagcccttgtattgagcagccaattttgcccactgaggtggttttgggaagtaacagattgcacaagaaatcatcttcaaacaggtcagcctcagaaagcactgatgtggaggatcagaggtttgagtttagagcaccatcatggatcactttccccagtgtcacttcttctcaaagaagatcgggctcggaggccgaagtcgaggggaaaaatgcagaaggaaggaatttgagcaatgtt

SEQ ID NO: 45819 - DNA, 420 bp, Glycine max
tgacgaaggagaaagaacttgtcctctctgtgctgaagagatggatttgacagatcagcaattgaagccttgcaaatgcggttatgagatctgtgtctggtgctggcaccacataatggacatggctgagaaggatgacactgaggggcgatgcccagcatgtcgatctccttatgataaggaaaagattgttgggacagctgcaaactgtgacagattggtgaatggagttaatattgagaaaaggatgaagactcagaaaacgaagtctaaatcaactgatgggcgtaagcaactcagcagtgtgcgagtgattcagaggaaccttgtttacatagttgggttgcctctcaatcttgcagatgaagatcttcttcagcgaagagagtattttagtcagtatgggaaggtcttaaaagt

SEQ ID NO: 45820 - DNA, 384 bp, Glycine max
ttttaacagatgatacagcaatgctttggggagttaagttctacaatgattttctcatgcaagctggccctcttggtaatgtacaatcagaactactattcagaaaggataaatcaactttcacttttgacaagggttgggccttccctcggagagtctatttcaatggcgacgtttgtgtgatgccgccacccgattcttatccatggttacctaatgctggttccaagcaagaggtttccctgcttgctttggtgatgtcctctttggtagccttggtattatatgcatatgcttaaagtttctaataatgccacactcatcaaaagtcttcagtgtgacaagttttgactcaattttgggacaccaatttggaatttgaac

SEQ ID NO: 45821 - DNA, 350 bp, Glycine max
gcaccatccaacccatcaaatatgcatgtgaaaggatctagttcagatgtttttcgtgttagtgtctcatgtgcacccagcacatccagtcatggatctgcacctgatgattatgatgctcttggggatgtatacatctggggggaggttatctgtgagaatgttgtgcaagttggtgctgagaaaagtgctagttattctagcccaaggacagatattctgctacccaggccattggagtccaatgtggttttagatgtgcttcaaatagcatgtggtgttaaacatgctgctctattcacaaggcaaggtgaactttttacatggcgcgaagaatctggaggacgcct

SEQ ID NO: 45822 - DNA, 371 bp, Glycine max
tgtaaatgcattgacaaggccttagagattttccattctactcttgagaagaatattgtatcttggacatctataatccttggtcttcgcatcaacaaccggtgttttgaagctttatttttcttcagggagatgattcgtagactgaagccaaactctgttactttagtttgtgtcctttctgcatgtgctagaataggagctttgacatgtggaaaagagatccatgcccatgcattgagaactggagtaagctttgatggttttatgcccaatgcaattttagatatgtatgtaaggtgtggaagaatggaatatgcttggaaacaatttttctcagttgatcatgaagttacctcatggaacatttt

SEQ ID NO: 45823 - DNA, 310 bp, Glycine max
catataaaaatagagggatctccttctcttatccagagaagcatatatagagaaagaaagaaggccctgccctatatagctgaaggcagtgtgcacaaactctgagactgcatattagagtttgagtcttcactctgaagcctaacttgggtttgtgtctctcatagcaagatgatggaaaacggtggcaaacagacatttgaagtctccaatgacacgcttcaacgagtaggttccaagagctttgatgatgatggccgtctcaaaagaactggaactatttggactgcaagtgcccacataataacag

SEQ ID NO: 45824 - DNA, 417 bp, Glycine max
  unsure (1)..(417): unsure at all n locations
aaataaacttattattatgcaagcacacaagtaaagaaataagaaagtcttgcaacataatttagagtcattatcgtttgtgttcataatttatacttacgacatctcacaactttgtttgaaatatatattatataacaaaccataatgatacacanatttacttaactatattttttaacannntnntnnnnnnntnnnnnnntnnnaaaaattaaaaattaaaaaaataataatttaaatantntcctctcatgatgatggagcagattttggactggtaactactagtctagctcctgttcttgcatttctccacggctcttggtgccagtccaatagcttcctttcctttcatgatacgtaaacgcttgcatgattcaacaaacatctcccatggcacatcaccgacaagca

SEQ ID NO: 45825 - DNA, 461 bp, Glycine max
aaaagcagaaaatttacatcttcattactgccataaaagcatatggcggagattcatgtttttccatggacttgttatcatttccttatccatgaacttgttatatatagaatagaaatttatctattgttgttgtttggtcgcagcaatatggctaaaatttcagagaagtgaggacgttttgaaggggtgttgttccagcactttgtcataatgtgttttagagtttgttggcagtcttttgggatttcaggtcgaaggccacatgcagcaatgccaactgctgcttgtacaggtgaaaatgaagaataagctgcttcaccagttaccatctcccaaattaccatcccaaaactataaacgttactcatccatgtctctgtcacattctctggatcccctgcaattatctgttcccagcccaacaaaaaatgagagtaaaaccagtcagcatgggggca

SEQ ID NO: 45826 - DNA, 397 bp, Glycine max
gaaacatcatttgtgagagctcatgcttctttttggacaagatattcaatcttcttctatataggatgcttctttagacaattttataggtctgtgggcaaggctgactacttggctttgcgcaatggatttatcacggtccacctggctcctggaagtaaatttaacttccaaaagtatatcaaaagatccttggaggatgacttcaaggtagttgttggagtcagtcctgtcctctgggcatcatttgttgtttttctgctactaaatgttaatggatggcatgctatgttttgggcatccttaattcctgttgtgataattttggctgttggaacaaaacttcaagccacactggcaaacatggctattgaaatcacagaacgacacgcagttg

SEQ ID NO: 45827 - DNA, 441 bp, Glycine max
gacctggttacagaagacacggtaggaaaacatggtggcccagttgggaattcaagatggttctgtgatttaacaagtgccctcttgaaatactacccgagtgagatacttcgatttaactccctctgttgatggctgaaactcaattgaagtgattcactggactactttatcatcttggtctgaggttgaagctatttaatttctgaatttccgtgagtttcttaatccctgagtatggccgggagccaagatcagttagagatcaagtttcggttgagtgatggtacggatattggccccaaaagttattctgctgctactagtattgtaacactaaaagaaagtgttcttgctcaatggccaaaagataaggagtatggaccaagaactgtaaaagatttgaagttaattagtgctggaaaagtattggagaacaac

SEQ ID NO: 45828 - DNA, 365 bp, Glycine max
ctgtgacttgtaggtgatggaatgggaagcattgctgtaccgagtagtgagcgtgccaggacagattggactgcttctatggagcagttttttatagagcttttgctggatcagttgggtaggggaaataaagtggataatggattcaataaaaatgcgtggacagatatgctagccatctttaatgctaagtttggatgtcaacatggtagaagggttttaaagaatcggttcaagaaacggttgaaacattactgtgatataacaaatcttataaaacaaggctttttgtgggatgaacaacaactaatgcttttggctgatgatgatgtctggaatgcttatgtcaaggcacatctgcacgc

SEQ ID NO: 45829 - DNA, 349 bp, Glycine max
ctaattctcatttcttcatcgttcgattcttctcctcctaaagatgcagatcttcgtgaaaactttgaccggtaagaccatcacccttgaggtggagtcctccgacaccatcgataacgtgaaagctaaaattcaagacaaggaagggatcccacctgaccagcagagacttatctttgcgggtaaacagcttgaggatggtcgaacccttgccgactacaacatccaaaaggaatccactctccacctcgtgcttcgcctcaggggtggcatgcaaatctttgtcaagactttgactggcaagaccatcaccctcgaggtcgaatcctcggacaccattgataatgtc

SEQ ID NO: 45830 - DNA, 252 bp, Glycine max
accagcgacaataaaaaatttataaatcactaaaccacatttttttcatccataaaacacattagacaatcccctggaacaattgtaaatcccaagcgcaacgcgcccttgaaatcataaaattcattaataccataatcccactatgggaggccacattggatccatattatggggaatacatatccaatcaactaccacattggaactggcatcggctattcgcctgggtggtgcttaaatgtttccttg

SEQ ID NO: 45831 - DNA, 496 bp, Glycine max
atatccttttgccaaaccccacaaggaagttcctatcatatttggagagtggtggaatgcagatcctgaggcaatcataacacaagcccttcaaaccggtggaggaccaaatgtatctgatgcctacacaattaatggacttccagggccattgtataactgctctcacaaagatacattcaagttgaaggtgaagccagggaagatttaccttctacgtttgatcaatgcggcactcaacgacgagctatttttcagcattgcaaatcacaccctcacagttgttgaaacagatgcagtttatgtaaaaccttttgcaaccaacaccatccttataaccccaggccaaaccactaatggttattctcaaaaccaattctcactaccccaatgccacattcctcatgactgcgagaccatatgctactggccttggcacttttgacaacacaactgtggctgccatattggaatacaaaaccccatcaaatactca

SEQ ID NO: 45832 - DNA, 474 bp, Glycine max
ctttggcaaaaaagttataccgtaatcccaatttgggaacaactagcagtaaccgtgacgactctgatcagaagaagcctatttctaaaattcagaaagagcggcaaaatggtgctggcttgagtaataaaaaaagataggccatctccattgccagctaaaagacccctagataatagtgattccttgcatgcctctgttaagaagccaaaggtctcagatccagttgcatctatcaaaactaagccagtctcggtgaaacatgagctgaaggtagaggatgatgatgatgatattcctatttcccagagaataaagaaatcagccatgtcaggtgataaatcatctgccacaaagaagttgctgacaaaggttactaaagttaataagtctggttcaaaaccttttaagaaacagataaagaagacagttaaaaaatcggcagtggttcagaatattccaaatctacaaagc

SEQ ID NO: 45833 - DNA, 256 bp, Glycine max
gcaatcgctgtgttgaagggtttgatcaccattgcaggtggctgaataactgtgttgggaaaaggaactacacaaccttctttcttctcatgattttcgtcttgttaatgcttttgattgaaggagggactgcaattgctatatttatcaggtgctttgttgataggaggggaatagaaaaagagcttcagaggaagctttatgtagattttccaagaagagttcttgccaccatatgtgtatttcttctcttatt

SEQ ID NO: 45834 - DNA, 291 bp, Glycine max
gaaagggcgaaaatggtcaaactgagcacgaaaaccacatgagtttcctaaaccagtcacacgacaattcactcaccccttcatttgaacacaacttaacataaaaaaatatccaagacaagagtgtgttgtttgaatttgaacggaaattcaattctctcctctcccatttcatgtctcacaaacaaaaaccgatgcaaaatctcaaaaccccagagagagatgtctgacgcgttctgcagcgactgcaagagacagaccgaggtggtgttcgaccactcggcgggggac

SEQ ID NO: 45835 - DNA, 412 bp, Glycine max
gaacagtgttgagtggaatcctaaatacaatttacttgcatatgctggtgatgacaaaaacaagcatcaggctgatgaaggtgtttttcgcatttttggttttaaaaatgcttagtatatatggtaggggcactgtttttactggtttgagaatgcaaacaaatgggaagactgagagagcctaatggaggttgatttgtaatctgaataaatttgattattatgtgtagaacaaggggcagcattcacggacatgaatagtaagtaaaagggatattttttttttttccattctttttagtaattgtatggataaatgatatcgttcaacagcacattgccctatacaagttgtgacacaagttgtgaccaaattgttatgtatttagacataatagttcttttacttttt

SEQ ID NO: 45836 - DNA, 456 bp, Glycine max
cttgtattgacatcaattttcattgccgtgaaaccttgctttttctctctcggatagaagcaggttccaagcaattgaaaatgggcaatcggaagacagaagaggaaaggattgaaagagtaattcggagtcttttaaaacttcccgaaaatagaagatgcatcaactgcaatcttttgtctatcttgtaaggaagattgcaagaagttcacaagggaaaatcacgtacaacataaagagtaacatgcaaagagaagaatatactagaaaagttaaagggaccacaatatgtgtgtacaactttctcgacttttgtctgcacaaattgcagtggaatacaccgagagtttacacatagagtaaaatctgtgtcaatggctaaattttctccagaagaagtcactgctcttcagcaggtggcaatgagagggcaaagcagatttatttaaagaatgg

SEQ ID NO: 45837 - DNA, 221 bp, Glycine max
gaactgtatttgctccactttatcggttgaagattttgctacaggttcagagtccccacagtattaaatacaatggaacaattcacggtctaaaatatatatggagaactgaaggttttcgtgggctgttcgacgggaatggcactaattgtgctcgaattgttctaaattctgctgtgaagttcttcagctctgatcaggcttacaaaggtatactacat

SEQ ID NO: 45838 - DNA, 386 bp, Glycine max
aattcaaattttcattcaatcgtcaatctcaaaatttgaaagaaagcgttattttggtaaaacctgaaaacagtgcataggagaaaaaaaaacaaaaaatcccaaagaaaatcaagaggcattccctcctaaattgatagcaagcaaatccaacggaaaattgaaacattagaggaagaaaacgaaatcatgctagcatttttgtcaaaagattctatgcgcctttgatcagtttcagtgcatcctcctctttgggaagggcgggaattgctcccttttgggtagttgtaattgctccacatgcatttgcatacttgagtacttctcttaaccttggttcatcttcaagaatggactgatcatcgacaatcttggacaatagagca

SEQ ID NO: 45839 - DNA, 314 bp, Glycine max
gaaaccatggccttattgattccatgattttatttatctatttgatatcataattttatacataaacaaacaaacttattttatgtaccaaaaaaaaaattatgttttttctctggagtgcggaccttattgagcacttggcagactcactagataagccccagatccagcaagacgcctatttgaggcgtctgatacaacccatttacccagtttgtcagggttacttgacgcagacctttgaataaatggtgcataatggctaaaccactccccaacataaacctgttgaggtctcataatctttgtatcag

SEQ ID NO: 45840 - DNA, 469 bp, Glycine max
aactaattctttctactgaaatgattataattaatgaataaatcaatgaaccataggatacaaaatacgtgtaagatgattagtggtaacttacatataaccttaacatttaaaattgctcaaacctcagaatcaacagttacaactcaaaaacatagatgacttactcacagcacactggctggtgttctttctgtaatttctcccaaaggcatagcaccatcctcggactttgataatgggcaattacataatttgattcacatccagcgttgtaaaacctctcatcattttcataatgtacttctttaccatcattcttgaactgttcaatccatatgcccatggcaacatcttctaatttaaagagcttgagttttctttcttggtgggcatggacaataaattttgctatgtctcgtgagataacatagccaggaccatgtgcccatggtgggtatgtatcatg

SEQ ID NO: 45841 - DNA, 272 bp, Glycine max
tttccatcttttaactcacatctccctcctgccacagatagattacatctggatgttgggcacaattggcataatcacttctgccacccatttgttcccacattacagcaggcaagaaatcctcctattgaaggtgggtgcaacccaatcctgtctcgtcctattcctatgagattggactggcccccagtttttcgtggtggcatgaccccatcaccaaactataactatgactatggttgtatatctaggaagcaatgtacctttttaaa

SEQ ID NO: 45842 - DNA, 482 bp, Glycine max
  unsure (1)..(482): unsure at all n locations
cctggagctctgttaatgggtgatgctttcaacatgcgtcatcctttgactggtggaggaatgacagtggcactgtctgatattgttgtgctgcggaatcttctaaagccaatttgtgacctgaatgatgcaacctcattatgcagacatcttgaatccttttacatcttacgcaagcctatggcatccaccataaatactttggcaggtgccctatataaggtcttttcgacttcacccaatgaagctagaaaggaactgcgccaagcatgttttgactacttgagccttggacattttttttcaagtggacccatcgctctactctctggtctaaaccctagcccgctgaatttaattctccatttttttgctgttgcattatatggggttggcccgttgctcttaccatttccttcattgaacgtacttggattggagctaaatagtnttgtgtgcatttggcataatatttcccatca

SEQ ID NO: 45843 - DNA, 438 bp, Glycine max
gcagtggaagaaaaaataacgatgtgacgcttttggggctaacagcgctagatcttgtgatgatggctttgttgttctcagccaatggtgcagcctgtgcagtgggagtgatagcacagaagggcaactcgcacgtgcaatggatgaaagtgtgcaacgtctttgacgcctattgtcgccacgtcactgctgcattggtcctctccctcttcggctccaccgtctttctcttgctcgtgctcctttctgttctcaaactccattacagaacaagaagctagatctcaatatgatacacactataatatatatattggtagtgttaattaattaattaagggtgtgaatcgtatttttggcttagacctagcttgcacttattgttgtgtttgatgaagaacgccaaagcacttaaagatatagatatgccccaagtag

SEQ ID NO: 45844 - DNA, 480 bp, Glycine max
caagagagggaagcagctgctctacttgagtggagagtgagtcttgacaaccaaagccaagcttctttgtcatcatggtccagtggtgtaagtccttgcacgtggaaaggaatcgtttgtgatgaatccaactctgtgaccgctataaatgtggcaaatcttgggctaaaaggtactcttcacagtctcaaattttcatcttttcccaagctgctaactctggatattagtaacaacagttttaatggaatcattcctcagcaaatttctaacttgtctagagtttctcagttgaaaatggatgctaatctttttagtggttcaatccccatttccatgatgaagttggctagcttgtctttgctagacttaacaggcaataaactttctggtaccattccatcaattagaaacttgacaaatttagaacatcttaagctcgcaaacaatagtctctctggtcccatcccaccctacata

SEQ ID NO: 45845 - DNA, 476 bp, Glycine max
aggaaataaacagtattggcagatgatcatacatgtttcacacagaaggatcagtgtttagttttaaatttttgtacaaaagtagttaaatcatgctgttcatcgagttaacaggttcacagtgtcatcccataaaaatttagtaaacaaaaccatttctaaattgcagcaagttcagaatcttcataactcctgactgtccatcatcggcatcgatgtcactcaactctggccatcaaggctccgctgggcaccggccccgccggtgccataggaagcgtcctcggcagcggactgccagacggactgccatgcctgggagggcggctggacataaaccccggtggcgggatcgacggcggggcggccaatcatcatcccggcaggctgtccaatgggcgggtagtagtaaggcaccccactggcggtggcccccacaagagcagcgtcgtccttgatctcgtcgcgggggacaa

SEQ ID NO: 45846 - DNA, 371 bp, Glycine max
gggccaatcagaaatacatatcacacagagaaagaataaagatttaaaagtacatggggatgcgatatgacagtccagggaatcaacaaatggaaataacagcctgttctgaaattgccattgaaccatgacatgttagaagcagaaccctattgggatctcctaaaagaggattgctttaagctgatctcttaaagagcttatattcttccacccaggcataaatactaagacagcacccgggcgttccttccgacatatatggcataaaacagcctcaatgagattaaacccaatgcagtcaggggcccaaaatgctagtgattcacgtgccttggagctatatttctcaaagcttgatttagaaagag

SEQ ID NO: 45847 - DNA, 269 bp, Glycine max
ctcaagcgcagctccatatctttctttgagattgagaaacatgaaactgctgtttctcgttggtccagagctagaactagagctgctaaggttggaaaaggtttattaaaagacgataaagctcaaaaacttgctttacagcactggcttgaagcgattgacccacgccatcgctatggacataatctacacttctattacgataggtggcttcagtgtcagagcagagaacccttcttctactggctagatataggagaaggaaagga

SEQ ID NO: 45848 - DNA, 442 bp, Glycine max
aagaactttgtgaagcttgtttcttggtacgacaacgagtggggatacagctcacgtgtcattgatcttcttgtattcgttgccaagaagtctctttaaggtgttacttcaaagtagcttgtcttcacattattaccgtatgtttatgtttagctgcgatttagtgtcttgctcgagcaaaaaatgagaggtctgaataaatcggtttctgaaaccagtggtgttacttgttggaggagcattagctcttttttggacttttgatgttttctcttgtggagggggatcgagtttttggatttttatatactcgctgatgtacttggcttgaatacttgctaatgtacttgttattgattgttatagtagatatttgtccgtcctttttttcatttgtggttctcgtatatttgatcctgtttgctttgaatcttggattcgt

SEQ ID NO: 45849 - DNA, 425 bp, Glycine max
agaatctgattttgaagaacaaccaattgattggaccaattccttcaactttgtctcagattcctgatttgaagattctagacctggctcaaaataatcttagcggagaaataccaaggcttatatattggaacgaagttttgcaatatctaggcttgagagggaacaatttggttggttcactatcaccagacatgtgccagttaactgggctgtggtattttgatgtgagaaacaatagcctgacaggaagtattccagagaacataggcaattgtactgccttccaggtcttggatttatcctacaaccaactaactggagagataccattcaatattggattcttgcaagtagcaactttgtccttgcaaggcaataaactctctggacatattcaccggtgatcggtctcatgcaagcac

SEQ ID NO: 45850 - DNA, 461 bp, Glycine max
cataaattaagaaatcaaagagactgaaagttgagagagaagtgttcacgtctttgagaaatgggtgcttcggcatcggtcacagaaaaatccatccatgaattcatggtcaaggatgctaagggcagagacgtgaacctcagcacctacaaagggaaggttcttcttgtagttaacgtcgcttcaaaatgtggatttacaaattccaattacacccagttaactgagctttacagcaaatataaagacagaggtatggtttttttaggtttacagagcagttggtgcacttgcatgttattggattccaaatttgtgccttttcagtgaccaaatacttttagttaaactgaaggattaaaagaaattattaaatctgatctcacttgagaatgttttgttggtctgatctcaggtcttgagatactggcatttccatgcaaccagtttctgaaacaaga

SEQ ID NO: 45851 - DNA, 330 bp, Glycine max
caagatcgcaatgggtgctacaggaatgctaaatggaccgtggagattgtggagaattccaatattataaggttgaagagttgttatgggaaatacttaacagcctcaaatatgccattcatattgagaggtacaggaaaaaaagtgttgcaaacattgcctactaggttaaattcttcggtggaatgggaacctattagagaaggggttcaagtgaggctaaggacacgttatggtcaatatttgcgtggtaatggagggttgccaccttggaggaacaccattacccatgatgtcccacatagaacagcaacagctaattggatttat

SEQ ID NO: 45852 - DNA, 430 bp, Glycine max
gtttccttttttccatttcctccctttctcccacaccatctctttccgcattttcccaattaggatgtgtaattgagacagaagaagaagaagaagaagaagaagaagacgaagaagaagaagaaatttgagggggtgtgtgatcgggtcctcaggtgaagatctgaggctgttggtgtctcttttcttttctccgagttccaaagatgagcgcttctaggttcatcaagtgcgtcactgttggggatggtgctgtgggcaaaacctgcttgcttatttcctacaccagcaacactttccccaccgattatgtgccgactgtctttgacaatttcagtgcaaatgtggttgtcaatgggagcattgtgaatctgggtttgtgggatactgctggtaatgctgcgtgattattgtctctgtgatgttggag

SEQ ID NO: 45853 - DNA, 430 bp, Glycine max
caacataaaagctaaatttcattaatatattatatacaagcaaaacatttctataattcatgttccaacaaatagaaaaaatactgcaaaattttgaaataccaaaggaaccaaggattctaagttctatatgtcttatgtacactatgaatatcaaaacttcctaagaaataccacttgtccaaggtgtccattgaaaagcttcagatattgcaaattttctttggccagtctctagaggcaaattgatgcttttgaagtccgttgattcatcccaaggatgatcaccattacggtcacatcatcatggtacttcctcctactcccatccggaacattcatcaactcttccatgctgaagcctgcagaatcagctgctcttgcaactagttgctcaataagaaattttgctggatcaccaaaagggttt

SEQ ID NO: 45854 - DNA, 300 bp, Glycine max
gttagaatacacagaattatgagctgtgaactcttattattcatttaatgttcatatgatcatctgggtctttcttgattatggagtctactaccttctgtcgataatgggaacgaatctcagcactcccaaaactgagaagtcttctgatgatggtgaaaatgagcatcttagatatggtttatcatctatgcaaggctggcgtgcaacaatggaagatgcatatgctgcacatcttgatctggatgcatccacttccttttttggtgtttatgatggtcatggaggtaaaagtggttg

SEQ ID NO: 45855 - DNA, 310 bp, Glycine max
gaacaatgccatgtacctcatattgttgccaatatttttacgggttttctatttggtccatctgttctgggacgttggaatgcttttatcaaaaacgcatttcctttcagtaacatgataccatttgaaaccgtgggagggatggtccttgtttactacgtgttctttgtaggtctagagatagacttgaaaccaataacgggatttcacaagaaggccatggttattgtcatttcctgcacaatcttcaccttaccaatagggtttggcttgtactacatgcttgtcaccgacatgtggcgcaaacctt

SEQ ID NO: 45856 - DNA, 349 bp, Glycine max
caaaccaaaaccataaattttgcattaaatttcgaagaaattaacatgatatccatctcaatgcatattaatgaacatatcatgtgagagccttaaatgacacaaactaacagaaatcttaaatataaaatggtcttaactcaataaattggcacaccatactaattaactaattaagagtactactacttaatctgtatttcatcatggtctaggcttcattcttccttcgttggccatcttgaagagctgggcttgtgcttctgctgccttgttggagttgagtgaggccacaaacctgtccctgacttggttggctgcgtaagggaacttgttgttcaccatggag

SEQ ID NO: 45857 - DNA, 253 bp, Glycine max
aagaccaaatatctggatattataatcaataatccaagtgtggaaaatcataaatacaattatatgttcaatatgtgggagagaaaaacccaaatataatgacatggcatcctgccactccacccctaatattcttcaagcctttcttgtcgctacagcaattgcctcctctatagcttgagcaaaagttgcaatcttgtatgtgaaaaaacctactagcattggtatcaattctaagcgcattgatccaaat

SEQ ID NO: 45858 - DNA, 212 bp, Glycine max
cgaagatggtgtcctttaagcttcttatgcgcctcgccactaacttccttaagtgctgcatgggccaggtcttgcttgatccaaatgaagtcaccgaaatctgcatggccactactggactaaacataaagaagatggctatggatgggtttattatcaagatgccgtctatgattcactctcgctcccgtgctcttctaatgaaggatgcc

SEQ ID NO: 45859 - DNA, 411 bp, Glycine max
agcgtaactcatatcaaactgtgcagagcgtatgagtcagagactgaaggcagaaccttcttccctctgaaatcccatacagtatcactgttcaatctcaataaatatgggaggtgaaaaaactttgttccttcaccctgtaattctacatctcccaataaatttattagagatatttacgtatctactccataaacttcgaacctctgggaaaccaatttcaagccatggctttgcagggccactgaaatgaataacagctgcagcttctaatttctctttgctaatttctgctgattgatggcgataacctaaatcagtcacaagcattgatgaacttataggatgcacttgaccctcaaatgtcatcaaggcaggtggaagcactcctggattccacattgtcatccc

SEQ ID NO: 45860 - DNA, 407 bp, Glycine max
caatccaaaaaataatccagtagttttaagttcagtccaaaaaatagtcatgtgagaactctcagatcaatgtttatgtacccagaaataatgagatgtgaaaatcactaatttattgactacaacaaggatagttaggaagtttaacttaattttacacctttcatccgtacaagacttgattgtttataaagaagactcaatatgatgggtggatgaaagcaatctcattaggcacggaatttgagactcactgattcatagcttggaacatagagaacatctccatatgatgccattgtgagaggagaacaaatgagctttcgcgaaattgaagtgatatccttcgaggttacttcatccactgccttcaagaaatcctccacaggtttccttttaccatatgt

SEQ ID NO: 45861 - DNA, 309 bp, Glycine max
gaaaaatttctccttgtttagtacggcacacaagtgagatcaaagatggaaaatatgccaccaggttatcgtttctaccccacagaagaggagctgatttcgttctatcttcacaacaagctagaaggagaaagggaagacatgaatcgagttattccagtcgttgatatatacgactacaacccatctgaactcccacgtaaaaatcttatatatatatatatatatacatatatatttccctcatctccctctttctcttttcatttttctaattgttttttcctttcaatcaaaatcgagcttgac

SEQ ID NO: 45862 - DNA, 421 bp, Glycine max
agagaattcatgcactaactggtcttattataactacagtagaatctggagaaaggagacacattggaagagactagactaagaaaatggattagtcttagtagactttattttacattaatattggaagagaatagaccaagaaaatgagcactgaccaaactagtcacacacattcacacacaaaacaactaatacacgatcgaacagttcaaattttaaatgatagcttatagtccaagaaatccgaatcctgaacactaagccatagacttcaactgggcaaccagatcagtgatgaatttgttctgaattcctttattcaataaaaactccttccatttcatgtggttttcttttatttgcttccctggctctttatcatcctccaccatgatagtttttactgccttcagtatat

SEQ ID NO: 45863 - DNA, 517 bp, Glycine max
atcagcaggagatatacatgtgtgtgtgtgtgtgaaaaaaaaatggaagaaattattagaaggggactcatgttgaataataaatatccctaataatttagttttttacggtgtttgatgtggtcgcgtgatccatataactaattgcacctagtgggataagtaagactattgttactatcatagtaatatatgctcaattaacatacctgatgtgtaagccagtagtgtctatctctcatctcaattaagaaatcaaatgttggaggtgctttcctctcaagaattgtcttctgagaatttctggctctggcttctgcatctcccagagtaacactttctattccgccaatctaataaagcaaatggaggtgaatcttgaatattactgttgattatattgcacaatgattcatggctccacaaatcaagtaaatctttaaatctttaacatcaaatattaatctactaaatgcttattgaactgaatgggtgatataatttttcaggatacttt

SEQ ID NO: 45864 - DNA, 304 bp, Glycine max
gatcgagataactagagacagtgagatgaacatgaaagcccttgttgtcttcgatgctacaattgagggagcatgggaatgccatgcgtacgatatggtccctgtccgaatgaacactgtctatggggcccgtacttccgaggtgaaatgctcaagacgtaggcttgctgtggaagcacacatcatcttcggcttcgagaccattcctgaacagagcgtcgaagcaccaaaggactgcatccatggcgaacaatatagatcagactccaggacagttaaccaacacgcttactggtatgccaga

SEQ ID NO: 45865 - DNA, 470 bp, Glycine max
  unsure (1)..(470): unsure at all n locations
tatgctttctcaactatccgaaaaaagctacaatatgcagtatatttgttatcttttcaagatcttcaatctctgcatattgtagatcttgaaaagataacaaatatactgggtcacaaattttcaagtcttccaaatgatgatctggttgggatggaatcttgtgttaaagaattagcaaagcttttacgtttggggtccgttaatgacattcaagttgtggggatgagtgggataggtggaataggaaaaacaactcttggtcatggtttttatgtagaaatctctcattaatatgattttggttgtttcattgatgatgtaagcaaaattgatcagaattctagtgtatcaggtttacaaaaacaattaccttgtcaatctcagaatgaanaaagtttagagatttaccatctatttaagggaacatgtttgttattgactaggctatgctagcaagggaattgata

SEQ ID NO: 45866 - DNA, 523 bp, Glycine max
accatccacaggcgctttgatttgaagggttcttcacttggacgaataacaattaagcccgagtcggagattagtgaaacaactatccttaaagatctggatctaaatttcatatttcgactacaaaaatcttggtttcaaggattttgcaggcaaattgatagggactgtgagcttctggaacaagagggaattatggactatagcctgctagttggtattcatttcaaagatatatcagaaaatggtgatcttatttcttcaagatctcatactcttgctggcgattcagagagtgaaggaactccctgtatttctagagtagacatggatcaacttcttctagatcctaccagttgggcgagtatcaaattgggggtgaacatgccagcaagggctgaaaggacggtgaggagaagtggatgtgaattacaacttgtaggagaaccaattggagagttctatgaggtggatctgatttttggtatcatagacatacttcaagactatgacatcagcaaga

SEQ ID NO: 45867 - DNA, 461 bp, Glycine max
aaaaggattgattatgtacactcatcttccatttcctatataataatatacatctcaatttgatacaaaatgtattgagtgcttgtcatctcttcccccatttgggagaaatggaataaatatattctagcacaaaattttcttgctttcagcatttcatcatgtatactatataattactgccctatatatacatagaaataagctaattaagatcaaagttgaaaaaaatggatttgtacccaaagtcacatggacctcaattgtggttccaatagttgaaaaatttcaaggctaccgaggttgagagtagcgagggtatgaatggaatgtaacagccacataattgtgtttggctttcaagagtcttcagaaaatattttaaatatgaagtcacgaaaacgccttgaatattgtctgggatcaacggcagatattgacgttgggtcatattgaatgga

SEQ ID NO: 45868 - DNA, 499 bp, Glycine max
attctgtcaaccagtaattatataacttcaataataaacttgagaatagtacataagtttacatgctcggtggcccacagccaagttggcttaatgtataatactataatttacaaggacacagatgaagagtcattacaagtcttgaaacccttacaactgtaaccaggataattgtataatacattgctttcgacctttcttcacaaattcaatcatcatagtcaaccaaaacaagcattttaagagaacacatggaaattttagtcagcatcatccgcagagaagtcaggctcagggggtttctgtagtttcactaactccctggcagtcttggcaagtcgattgcgatgtacaccacgtagagtgtgcgcagcaaactttgaggctaacaaggcagcaccaaagctgtaggaactgccaccaacattttcatgagttccgtctgactcatcttccttttgacgaagcttcataattttcttttttgaataccgac

SEQ ID NO: 45869 - DNA, 438 bp, Glycine max
aaaaaaaaaaacaaaacatcgcatgacccattcaaatctgatagaaacagaaaatgtaatgccaggaataggcttggagaatccgagtcaaaaagcaaaattttacaaaatttgagttactgtttaaactcgattaatgcagttattgaacctagaaacggcaagaatcattctaattgggcatctgtggtttattattctctcagccatggtgattggactggggtccaatcgcatacttcgccttccttgaaccatagagctatttcacgcttgccattctcagggctgtcactgccatgaacaacattccttcctgtttgaacagcaaggtctcctcttattgtgcctggttcagcttgaagaggatctgtagcccctataagcttgcgtgccgatgccactactccaacaccctcccaagccatacacacaaca

SEQ ID NO: 45870 - DNA, 295 bp, Glycine max
ctggatcgaaaaacttttgcatgagcttgcatattgtcattgaccaaggcctaataatataacaaccggaaatatgataatattcaatcatttgggtattaacaacaacctaggaataccactctgcgaagttatccgccttccgatgcgtgagacctaaggcagggtcctttttcacctgcttgttcttaccaccggattgcttaccgggaggtcttttggattcagttttttttgcttcaaatcccgccatagtgaaggacgagcacctgatcccgttgtaaaaaagtcaaag

SEQ ID NO: 45871 - DNA, 508 bp, Glycine max
atgagagtttcaatccctctgactcatttttctccgtgactgcaaatggtgttaccctcctctccaatttcagcgccacagccacttgtgaggccctctcacaggcctacattgatagagagtactcccttgcgccattgaattcagaagccttgactctcactttcaagccttctgataaatacaatggcactttcgcttttgtcaacggcattcagctcatcccgatgcccgagctgtttgattccggagaatcggtagggtatgctgaccaaaccacggatgtgaagagcttgaatctgcaaaccatgtttaggcttaacgttggtggacagtacatttctccaatccaagactctggccttacaaggatgtggtatgatgacaggccttacctttatggtggaagcactggtgtcaccaaccaagccgagaagaacgtcttaatcgactaccagaccatgccaaagtacattgctccttctgatgtctactccacatcaagatc

SEQ ID NO: 45872 - DNA, 456 bp, Glycine max
aaacttgataaattagatatttgtttgcttataatatttctttgctcgatacaaatcgccgacttattttaggatcttgtcggggaactaattcacaaacaaaacaaaaagcataaagttaactacaaacacaactaacccgagaatctattcaagttatacatcattttaatagttttgaaataaaataacccatgcaaacaaagaagtgctattaagatctagaaattacttccaccagagtgttgaaatcttgtgttgcttgcccttcaggcctacctgcatcttccacagtcttcttcaccctaagagcattgtctctaatcttcttcccttcttcatgcaccagaatcaaattcaagctctttaccaatccatttttggcgaacatcttaccttctatcatcatcccaatcttccaaacatcttctatcactcttgcagccaccccttgat

SEQ ID NO: 45873 - DNA, 245 bp, Glycine max
ggggaaaaatcccaacctttaataattcataggtaaatttattaccttggtaaaagttaccccattcaaagcagtccattttggaaaaatttccggaacccttttgcagaaagttttggaaatcgggtcaaattatttttgggatccccaaaaatcaatcccaatcgggggttataacccttactccattcaaaggagtccagccgggacccgacaaaaaatccctttacttttacgccatccct

SEQ ID NO: 45874 - DNA, 438 bp, Glycine max
actcgttatccctctttctttcctcttccaaactcaacttggaattctccaatttccaaacaaagcttttctatcaacatatcgttctcgtaactctgctcaaccactagtccacttcagcgacgcaagacgaataacattacataatcgaatttacattcgacacttaaaacgccgatccgtacatttctctagctgtgtcgttttgactgatcaatgaatggtattccgagacacgagcgccgatgggcgtccgacagcgttccgggaaaagcgaccgtcagcgccggaacttcgccgggaactgagtccaactccgccgcggaggagtttgtggaggtgactctcgatcttcaagacgatgacaccatcgttctccggagcgtcgagccagcctccgtcattaacatcgacgacagcgtcgcaggcagcggaaac

SEQ ID NO: 45875 - DNA, 438 bp, Glycine max
atggacggtaccaaaagcacagaatcaagtgaattttcaagtcctctgcttcccgcagaagcacaagggtatcgttgcaacaatggtgttgactgtgaaagaaacttggtcggtaccagctattcttattcttaccacccttgttgctgtctctggttcttacgttttcgggtctgctgtgggatattcatctcctgctcagactggaatcatggatgatctaaatcttggtgtggccaagtattcactttttggatcaatactgacaattggagcaatgattggagccattataagtggtagaatagcggattatgcaggtcgacgaactgctatgggcttctctgaagtattctgcatattgggatggcttgtcatagcattctcaaaggttggttggtggctttatattggaagattgttggtgggatatgggat

SEQ ID NO: 45876 - DNA, 435 bp, Glycine max
ccaaaaccatgaaacattttcttctctttctcatcacattctccttcctctgccaaacacacctactcatacttctctctgccacaacaaccctgcccctccaactcgttgctctcctctccataaaatcatccctcctagaccctctcaataacctccatgactgggacccctccccctcccccaccttgtccaactccaatccccaacaccccatatggtgttcctggagagccatcacatgccaccccaaaacatcacaaatcaccaccctagacctctcccacctcaatctctccggcactatctgcccccaaatccgccacctttccaccttaaaccaccttaacctcagtggaaatgacttcaccgggagtttccaatacgccattttcgaactaacagaactgagaacactagacatcagccacaact

SEQ ID NO: 45877 - DNA, 435 bp, Glycine max
aaaatgaaaacccaaagtgcttctctcctctgtctttttctctctcttgctatccttgtggctagtggcactgctgcaagtgcaactccaactccaccatgtttcaacattcaacagaagcctttttccttccacttttctctttggaattggttcttctgcttaccaggcagaaggagcagcaagtgtagatgggagaggaccaagcatatgggacacctacactagacagcatactgaaaagatttgggatcatagcaccggtgacatgggagctgatttttatcatcgatacaagggtgacataaaaatagcgaaagaaattgggctggactctttcagattctctatctcatggtcaagaatattcccaaagggcaagggagcagttaacccccttggggttaaattctacaacaatgtcatcgatgagat

SEQ ID NO: 45878 - DNA, 414 bp, Glycine max
  unsure (1)..(414): unsure at all n locations
aaaacctatagcgaagagcgtgaaggcacctgctggcggccatgacattcaagcgcacgaacggaggtcgaaacaaacacggccgtggccatgtcaaattcatacgatgctccaactgcggcaaatgctgccccaaggacaacggncatcaagaggtttcttgtgaggaacattgctgaacaagctgcagtcagagatgtgcaggaagcctgcgtctatgaacaatacacgcttgcgaaactatatgtgaagatgcagcactgcgcttcctgtgctatccattctcatgatgtgagggttcgatcccgcactgataggaggacgcgtgagcctccacagagagttatcacgcgcatggtaacactttttatagccatctctatatagccaaatggagatgatatagagagtgac

SEQ ID NO: 45879 - DNA, 454 bp, Glycine max
caaaaccctaaaccctcactttttttttgtcttccgacgagaatggccggcggcatcgacatgtccctagacgacattaagaagcgttcagccgccgccggggcttctcgccgccgattcacggttgttcacaacccggccagaacgactccgtacccgattccgcaggtaaggcaacagagcatggttgcattatttccagaaatggttttggaggagacaggcgcggctaagattgaaagtggcaccaagctctatttatctaacttggatcatggagttaccaacgatgatatcaagctgctgctctcggaagagggtgaattgaaaagctacactattcattatgatcagaggggaagatcaaagggaactgcacaagttgtgttcgtgaggcattctgatgctttattagccatcaagaaatacaacaatatgaggcttgatggaaagc

SEQ ID NO: 45880 - DNA, 441 bp, Glycine max
cagagacgtgaaaatcccttggatgatcgtcacaaagcttctgttggttcatctactgatgtaaagccattgttatcttctctagggaaatcttcagtactaacacctaccgatgcttctagtaccaataagttacatagcacagttagcacttcgtcaatgctatcttcatcttctcctggttttgttcgtccttcccgtggaactacttctgctaggtttggatctgccttgaacattgaaactttggttgctgctgctgagaaaagagaaattcctattgaggctccggggtcagaggttcaggacaaaatattatttattattaataatgtttcggctgctaatgttgaagctaaagcaaaagagttcactgaaattttgaaagagcagtactatccttggtttgcacagtatatggttatgaaaagagcaagcatt

SEQ ID NO: 45881 - DNA, 362 bp, Glycine max
  unsure (1)..(362): unsure at all n locations
gccgcngcntgttttgctttccttgcngcngcctcttgggcgggggctcgggcngctgcntccatttctttactcgacttcttcttctttgtngaagcccctttcttggggcgctctttcccctcncccgtnggtgtntcctcctcccccttttcggggcctgtggccnnntcgggccccttgtttgggtcngacctgttgggttggtcttgngattctttcccctccttggaagctttatccttctttttcttcttctgggaagttttggattctgcagggacattttctttcttttctccatctccatcagtctcaacacctgtcttatcctgagcaccttgagactcatctggaccatc

SEQ ID NO: 45882 - DNA, 479 bp, Glycine max
aaagaagatttttttttttaacctaaacaatagttttatgggtacaatacacatacaaacatatgcaaaaatctttgtgtcataagaaaaactaaatgcttgcacgttaatgaaaataaaagttgaattatttgtgtcattagctatgagccgatcaaatctcctgaatgagaatatgtacaccatgtcccggttctacaatcattctatatgccggagaatgcctataactaggagacaaagagaagctaaacttggagatgataagtgctagcacaaccttcaattgaaccattgcaaagttctttcccaagcacaagcgagtacccaatccaaatggcacataagcatgtggaaacctgcaagccttggagacaccctcgctaaacctttctggtttaaactcatttgcatctggtccccaaatttcaggatctctatgcagtgttgggatcagagtccataaacaaacgccttta

SEQ ID NO: 45883 - DNA, 429 bp, Glycine max
ggagtcacagtattcaagatgcggaatcatcagacaaaggggtttcctctgttggacaagtgatagctcttttcctaagatcaaacctcacgatatctgcaacaaataatggaaattctggagttgtttcggatgagcaacatgaaggggaaatagattatgttggggtgctaaatcgagtccttccaaatgacattcggattatgggctggtgtcctgctcctgttgatttccatgcaaggttcagctgtttaagcagggagtataaatatttcttttggaaagaaaacttgaacatcccggccatagaagttgctggaaacaaacttgtaggagaacatgactttagaaacttctgtacaatggatgcagcaaatgtgcacaactataggcggtgcatcacattgtttgagatttcttctacagatg

SEQ ID NO: 45884 - DNA, 353 bp, Glycine max
gagcgagcgagcgagcagtatcaaatgtggatctgggattgggaaggcgagggattgcgctgcgtctcttcctcttctctttcgattcatccctcattcataatcttccaatccaacaacctcagcctcacactcacacatacacacatatgaacgcgtatcgtccctcccatgacttcaaagcgcatcctcaaggagctcaaggactcgcagaaagacccaccaacttcttgctgcgctgttccagtcgctgaggacatgtcccattggcaagcaacgattatgggtcctgctgatagtccttatgctggaggtgtattcctagtcactattcactttcctccggattatcc

SEQ ID NO: 45885 - DNA, 458 bp, Glycine max
ggctgttgcgagctataagctagatcctcctgaggagaatatgaagacgtccgctcggggggatgctgcaggcgttctggcggcatggccatgccatggcgcaggctaccaaaggttccctctgcgaatgaaaactggctatggtgagcgttcttcggaggtaaaatgcgcatgtttaaggcttgctgcggaagcacacaacatccgagcctttaaaaccattcctgaagagggcgtagaaccaacccaggactacattaacggcgaacaatttagatcagactctaaaacagctaaccaacaagctatcttttatgctagtgaacgcgaagtccatcacaacgacatatgtatatgcggcatagataacaccgcactctctaatatcccatactatgaaaaacatggatatggggcggaggaatttaatgaaaccttatatgacgaatgggttaaca

SEQ ID NO: 45886 - DNA, 269 bp, Glycine max
gaatgccatggctcatactaccagaagttccctctccaaatgaacactgggttcggcgggcaatacaacaatgaggtggcatgagccagttggaggctaggcgcggaagcaaacaacgtagtcaagcggctaactggtcctgcaacttgcggagagtacatcactgactacggtccaggagaccaatgtagactagattccaaaacagttaaccaacaagcttatttactatgctaaattcctcaaactcaccaacaaagatgtctttg

SEQ ID NO: 45887 - DNA, 331 bp, Glycine max
ggaaaaaaaagttttccctaaaaccaaaacgtcttttacaagggaaaaaccgccctggtggattaacaagggggtttaaaaggccctaaccaacaggggtgggtggcctcccccgaactacccagccaaaaagactttgggcaaggggcaattaaaccccccccgaaaccctgcttttttccccggggttggggcctccacaagatcttggccccgattcaaaaagtttttcaatttttggggcccattttatgaaaccccgggtccaaaaattggccctaggattcttaatccgctcaataaaagtaatggggggccccccggggggggg

SEQ ID NO: 45888 - DNA, 349 bp, Glycine max
  unsure (1)..(349): unsure at all n locations
tttnttttttttttttttttttttttttttttttttttttttttaatngaaatatttgggtttctggggttcttggaaaaacaaaaacaagggcctggggggggaggataattaaggcttgggtacctacctaggggattattcattggcaaggggatattccttttttagcctttgctgggggccggaataaccgagggaccacttgacgaacttcctgagaccgggggcgaaatcgggggggggattggaaaaaaaatccctgtaggccaagctgacattggcgtgtgggaagggaacctccccgtttgatggcatcttaatgacgggcttcttggccttggggctt

SEQ ID NO: 45889 - DNA, 541 bp, Glycine max
caacttctccatgttatggttgaacctgatacctttcctcatgcttagccaatgcttctccataactgcctttccagcgtcgaacatctgaaggatccatgttatgaaaacccggcaaaaccaacagtccttttttcccattggcacagtcaaggataggttgcaagttcatctaagcaaaatgaggaagaagcatagtttatagagagcacaaatgcacaatgatggtaatcttggactcttgaattgcgttcacaagtgttggtgttatctcctctcctcttttaagcttctcatgatcaatgaaagtgtggattcccctgtcactaagagctttgtagagattaccaaaaaaaccaaggcgggtgtctgagcctctaaagctgaggaacacatcgttggtgaatgcatctgaacttgatcgcaaagccatgagaatacaggtagctttgacgtgctggagacttgcccgcatagcttggtatgaactggtgttctacatttggagctatttcaatctcactttttatatgaaactcac

SEQ ID NO: 45890 - DNA, 345 bp, Glycine max
ggcatatcaaccgcgttaactatatgttgcgttctgtatatgcttgtagcagcagttattgttggcttagtaccatattatgagttgaaccctgataccccaatctcctcagcattttctagctatgggatgcaatgggcagtgtaaggtatataataacaactggagctgttactgctctttttgccagtttgctgggttctgtgcttcctcagccacgcgtctttatggcaatggctagggatggtttattgcctcatttcttctcagacatccataaaggcacacagattcctttgaaaagcactattgcactgggtgtctttgcagctactcttgcattct

SEQ ID NO: 45891 - DNA, 302 bp, Glycine max
attttgaccattatggttgtaatattagtctttatctttattatccagggtcctggtggtgttactgtgaagaagaccggtgcggccttgatcattggcatttatgatgaaccaatgactccaggtcaatgcaacatggtagttgaaaggcttggcgattatctcattgatcagggtctctaatctttgctttatgtcttgttatcgtgcatatttcattggcttctgtacaagtttttgcatcgacctggactggaatgctttgattgcagtgtaataatcttgttgtgagtatgaaaagt

SEQ ID NO: 45892 - DNA, 504 bp, Glycine max
tcctttttttttttttttctcttaaaaattttaacttcatatagattaacttaataacaggcacaatatgatcattggcatttttattctctaatacagtattccatttacattgacaattatcattatgcattttacttagtcaaatttatgctaaaatcccacaacttcttggccaaattcatgtcccttccatgtgagtatacttctgcaagattattatcttcaaaatacttgccgctgattccactcacttgtgggtgcaaggctacataacatgttgttgatgctccttgctgcacattttttgccatatatcccaatatcttctcgagtccaaatagccatgctattttgtgtaaaccatttaataaaccactatgaatgtgaatattggtggaaacagtggctcctggatgaacagaattagcagtaatatctattccatcttccttgagacgtcttgcgagttcattggcatgtaaaatgttagcaagctttgat

SEQ ID NO: 45893 - DNA, 310 bp, Glycine max
gggtgcggtgctgggaatatggcgtttgcgatttagggttccgttagtgttgaaactgaacaatattgatgttaccatggtctacccggagccttggtgtatgccacgactttttacggctggtatagctgaattctatgagggatattacgcaaataagggtgtaaatatcattaaaggaactgttgctgttggattcacttctaattctgatggagaggtaaaagaagtcaaactaaaggatggcagggtcctggaagctgatattgttgttgttggtgttggaggaaggcctcaaacagtcttagtc

SEQ ID NO: 45894 - DNA, 286 bp, Glycine max
ctgtagtaaagcccttttgcccgatactcacaaggccatactctagaaaggggttattagggatcgaaaaacgtaaccaaagttaataatccatttggcccccaaaacaggtgtaacatgtcatgattaaatactacatttctcaatggcacagcttaatgctaaacctggccaaaacttgaggaggagcaaaatcaaagttttcccttgtctctctacttcatcttcttctgccaccttctgttcttgtaatccagcaacatctggggcatcttctgcatcaact

SEQ ID NO: 45895 - DNA, 441 bp, Glycine max
cacaaaaaatcatagcattgaaaaatcttaacaattttaaattaaaatgtgaaggagaattatccaaagctagtctatctagttataactcatctacataaatgttgatgccatacaacatggttgtcccttatcacataaaagccgaagagggaaaaagaacaaaagaaccggaatatccaaattttaggtagaagtaccacaacagaaaaatcttggataacaaataactcaacatctgtgtgaaagaccacacaggtgtatatacaggtgaaacagaccaaatgtcatgcgtctcaacagcacctatctacctgatagtgacaaacttgttggcgccgtgtctggcccaatgagtcttcagatcaatagggttagcaaagttataaccttcagcagcaagtttctctaaaaccttgttaaaagcaccttggctcattt

SEQ ID NO: 45896 - DNA, 283 bp, Glycine max
gaaaataattagatgcatatatttgactttggtgttattttgggatttttgtaattaaataacacaaacactgacgttcatcacacatgtgtagggcctgtttcaacttaaaattaaaggaataacattggcccatgacgcgacaggtgcaccacctagtaatcataattttacatctttacatacaaaaaacaaagactttaaattttaaaaagaagaaaagagataaacagatcatcttaatgaaatgaaaccaaaacccacaaacattggctagattttt

SEQ ID NO: 45897 - DNA, 309 bp, Glycine max
tcgaaacaatgatttgagcggtgagattccccaaacggggtcgttttcgaaccagggccccactgcgttcctcaacaacccgaacctgtgcggatttcctttgcagaagccctgcgcaggttcggcgccgagcgaaccggggctcagccctggttctcgtggggcgcaccggcccacaaagaggctgagccccagttcgattatcttgatctcggtggcggatgccgccggggtggccttgattggacttgcggtggcttatgtttattggaagaggaagggcaagtccaatgtgtgtagttgcacttt

SEQ ID NO: 45898 - DNA, 312 bp, Glycine max
ttcttttttttttttttttttttctttttttttttttgttttataaaaaaaagaactcgtgtttccttattacaaaaaaaagattgaaattcctacaaaatggaaatgaaaattcaggggtctggtgaactcaacttcaaccaacaaaagaagaagcacaacatttttgctgtacctaaacagggtttaaacaaaggtaaccttggcaccagctttttcgagttgcttcttcgcattttcagcttcgttctttgaaatcccttccttgaacttttttgggaaccctttgatcaactccttcgccttctttaa

SEQ ID NO: 45899 - DNA, 409 bp, Glycine max
gcttccaaaaccacattttcaggcttcttagtaattccaaaagcttgttgacgagaatggcttccggtgaaaaccagtttccccgccagaagcaagacacacagcctggcaaagagtatctcatgaatccaccaccccaatacaacagccccgattacaagccatcaaataaacttcatggaaaggtagctgtagtaactgggggtgactctggaattggacgagcagtgtgcaacttgttttcattagagggtgctactgttattttcacctacgttaaggggcaggaggagatagatgcaagggacacgcttgagattataagaaaggctaagactgaagatgccaaagatccaatggctgtagcggttgatcatttgggttatgaagagaattgcaagagagtggt

SEQ ID NO: 45900 - DNA, 338 bp, Glycine max
taggcctaataagaaaacaaataattccaattcatatatgaacatttttgcctccttatttcttgaaaatgtggaattgggattccccgaggaattccgatctcatttcctttggcttcaggataggcctaataagaaaacaaataattccaattcatatatgaacatttttgcctccttatttcttgaaaatgtggaattggaattccccgaggaattccgatctcatttcctttggcttcaggataggcctaataagaaaacaaataattccaattcatatatgaacatttttgcctccttatttcttgaaaatgtggaattggaatttcccgagg

SEQ ID NO: 45901 - DNA, 265 bp, Glycine max
cccagctgtttttttcttctcttgtgtattcagatcccacgggggctttttcttaacaaaggaaatcaactcaacttagtagtacacattggaatttggaggaacattagtcaatttctgagaggacccaaatggaccaaatgcttattcaggctgtttgatcagcaatgcaatctccccttttttcatgttcttcacagtttggtcaagtccatcaattacttgctctttattaattttgaacttaaatggctgttcatcaacg

SEQ ID NO: 45902 - DNA, 398 bp, Glycine max
ctcgagccgctcgagccgcaggttcaaagaagtgcagatgacaaaacagtgttgataacaagctacgaaggcaatcacaaccaccctctgccgccagccgacaccgccatggcaaatactacatcagcagctgcagccatgctgctatcaggttcagcagcaagcaaggaatcgctaacaaactctgcaggatattactcttctacaattccctatgcttcaatggcaaccctatcagcttcagctccattcccaaccatcactctcgacttgacccaaaaccccaacaacgccgccatgcagctgcaccgagtaccaccaggccatggcggcgccacgttccctctgccactgcatgcggcagcatctggtggtccccaccttctagggcacccctt

SEQ ID NO: 45903 - DNA, 253 bp, Glycine max
agctcggcattcttattaaaatgaaattcaaatcatttcttttataaatttaaaaaaaattctttaattaaatattcaatgaaattaaatatttaaattaataaaattagtcctgtcttattccattgcttgaattggtttctttttacagcagctaatgctagtcaccgcacttagtcaatgagctagaatgggttctaaagatatccatagacatatatagatatatttatctatacatatctttagaaaa

SEQ ID NO: 45904 - DNA, 489 bp, Glycine max
ataattaggctaagcttatcatgtataaagtgtatgtaacatttgaaatttattacatgctttattttgtggcaaattaaccatccctcagaaattgcctaagtctgaagtttaattcaaaaaaatagaaaatccgacaacacatgatttttaagaatataaacacaagaatttgatgagtgcagctagctcacaagaatttatccaaatattttccaagaagagaagctatgagccttctataaacgctttcagtaggatgaaaactgtcccaaaacacatactctaaatcgttgggacacaagggagtgaaacggttgcataataacacaacctctattgttcccgtgccacagcaacccttgtctccgactttatagccatattttttgtagtttataatgatgtcaaagagagggttgtaaacatcaatgtaaactatcctgctatcttgaaagttgtgattgagagaatccagctcctttgaca

SEQ ID NO: 45905 - DNA, 504 bp, Glycine max
tctttttttttttttttttttttttaacttttactataatttgtatttatcatagtaacaggatacataaactgtattttttatgggggaataaacacaatcagtctttattactctaataattctaatcgctttggaaaacaacttgagagatcaatagagataatcaaaagaagggattgattgattaatttactttgtctctctccaatttcaactactcttcttagatggaacagtaccgtctgttcctgcaaggatgacatacttgtccttcctagtcaaattggtgcactcaaacccgagagtccctgcaagaaccctctgaatataatttgcgacctcgatcgcagatttccctcccttgcaggtgagttctgcaggcaactggttcaagaaagtgatctcataagttggcatgggattcatgaatacaaaataaggatccaacagcttgtggccgcgaacggatgtcccgtataacacgctttgcttggtgttgat

SEQ ID NO: 45906 - DNA, 465 bp, Glycine max
agattatcctaagtctttgggaatagtgttgcaatggcttcaagtcaggaggaggtgacccttttgggagctactggaagcccatttgtgtgcagggttcatattgccctcaagttgaagggagttcaatacaaatatgtcgaagaaaatttgaggaacaagagtgaactgcttctcaaatccaacccagttcacaagaaggttccagtgtttattcacaatgagaagcccatagcagagtctcttgtgattgttgaatacattgatgagacatggaagaacaaccccatcttgccttctgatccttaccaaagagccttggctcgtttctggtccaaattcattgatgataaggtttttggtgctgcatggaaatccgttttcacagctgatgagaaagagcgtgagaagaatgttgaggaagcaattgaggctctgcagtttcttgagaatgagataaaggac

SEQ ID NO: 45907 - DNA, 460 bp, Glycine max
aggcaactagtgtttagaaattttatatttctactatatccagggaacaagaaattaaaatccattgaagaataattaaaatataaaaaaaatcataaacttcgtactactatcactaaacaaatatctaatcatccaaagcaagctcatccgcagacttatgatgattcaccttggcccacccaaccccgcgcggcacgtgcaacgcctcaaccaccgtggccgacgccatctccatctggcaaaccctaatcgcaccgatcaaccgctccggcaactcatcctccgcctgtgcctccaccacaaaccccatatcgatcgtcaccgtcgtcacgcaccccaacgcgaggtgcagaatcgcgttcgcgatcgcgctgcttccgatatcgacgtcaatttcgaggtaattcgaacctttgtagtaagcgcaattcaacgctttccctaacaagcacgcgct

SEQ ID NO: 45908 - DNA, 433 bp, Glycine max
caactaaccagcggtaacaggggccgttttttagaaaagaaaacacaggtatgtaaatgacataatgcaataaatagaattccgtattacactttaaacaattatttagtcgaataataaataactgagcggtggcgtctagcaagcagaaagcaaaaataagtttagaaaacaattaattagtaaattgcaggcaatagagaagcatctacatctttcaccattattctttataatcaacctcactaccttatattatatacacgttttcaatgtcagcaatctttggccagtcttcgcctccgggttcccggcaacgttgattgagcaacggacaatagtaagtcctcaaagttgaaatggatttgggcagaccctcctctggtaagcattggagcctggggcagttagtaagaaacaatgtcttgagaga

SEQ ID NO: 45909 - DNA, 514 bp, Glycine max
atttgaaattaacaagtagcaaagatgtttggaatcatcggaggaaacaagggtcacaagataaaggggaacttggtgattatgcgaaagaatgtgttggatatcaacagcattaccagtgttaagggtgtcatcggaaccggcattaacatcattggaggagtcgtcgacaccgttactgctttggcgtcccacatctccatccagctcattccatatttgaggaaaataaatgcaactaccacaaagacttacgctacaagaaccatatttttcttgaaaagtgatggaaccttgacgccattggccattgagttaagtaagccgcatcctcagggtgaaggatatggtcctgttagcgaagtctacgtgccttcgagcgagggagttgaagcttacatttggttactggcaaaggcttatgttgttgtgaatgattcgtgctaccatcaactcgtcagccactggctaaacactcatgcggttgttgagccattcgtcatagcaacaaaca

SEQ ID NO: 45910 - DNA, 523 bp, Glycine max
gaattcctcgcatgaagctctaactcattgttttcagttggctttttccttaaggaacatttctctcaatgaaaatgtaaagctgcaaccatcacgccgcagatctctctttacactggcaacatccatgattatcttcgcatccaaggcctacaacatcctctctctaatttctattgctaaaacgacattgacagatagaacagttgatccattcctgcaactggttaatgatagcaagttacaagcggttactgatacagataagcagccaagtaaagtttatggatcaaaagaggatgatgaagatgctttaaagtcactttcagcaataaagttaactgagagccagtctaaagaatcatttgctaccatgatagtgcagagtctgggaaaatcgtctaatgaatcatccatcttaagagaacggctgctgaatgatttctcacctgatgatgcctgtcctttgggagcccagttatctgccgagacaacaggaaatatgtaccagtctggactaaaa

SEQ ID NO: 45911 - DNA, 481 bp, Glycine max
tctcattggattctgtcacaaggtttgctgaagcatggaatgcacgctcagcacccttgcatgttctcatcaataatgctgggattttttctattggagagccacaaaagttttccaaagatggttatgaacagcacttgcaagtgaatcatcttgctcctgccttgctttcgatacttcttttgccatcccttattaggggttctcctagtcgcattgttaatgtgaattccataatgcatcatgttggctttgtagacaccgaagatatgaatgtcacatctggaaaaaggaaattttctagtttggtagggtactcaagcagcaagttagcagagattatgtttagtagtattcttaataaacgactccctgcggaatctggcatcagtgtattgtgtgtatcacctggaattgtccagaccaatgtggcaagagatcttccgaaacttgttcaagctgcgtatcatttgatccctta

SEQ ID NO: 45912 - DNA, 468 bp, Glycine max
ggaaattggaagcaaaacctaaggaatcttggttgaacaaggtgtccatgaaagtgacaaaaggggtgtctgagactgataaaaattcatgtgtgattgatataaaccgtggcagctgtgatggctttagcgagaatttggaaggtgaaatgatttgtaggatttgccatctggcctctgggcaacgattggaagcagcagatgttggcactgcaagtagtgctactactaatacagatttgattcagctcggttgtgcatgtaaagatgagctagggattgtgcatagtcattgtgctgaggcatggttcaagcttaaaggaaacaggttgtgtgaaatatgtggtgagactgcaaaaaatgtttcggatgttacggataatggatttattgaagagtggaatgatactagattcatggacagtgataatacctcatccagaaggtttggtggatgcttgtgcggac

SEQ ID NO: 45913 - DNA, 167 bp, Glycine max
gggaagcctcgtttctctgacttcatcttgtttcctgccaattggggtgctgatattcattcttggcttgtggtgttagctgagaagtacccttggcttgaggagttgaggctcaagagaatgactgttactgatgagagcttggagtttctggctctcaaattccc

SEQ ID NO: 45914 - DNA, 479 bp, Glycine max
gcaaactgatgatgttgtgaagatttttaagcaactcttggatttgggcattgttccagatgtttacttctgctgttgtcttctgaatgttatgactcaaacaccaaaagaagagtttggtaagctaacagactgcattgagaaggctaatacaaggcttggttctgtggtaagatatttggtggaagggcaggagggtgatggagattttagaaaggaagcatcagaacttcttaattcaattgattttaaggtaaaaaagccgttatgcaattgtctaattgatctttgtgtcagcctgaatgcgccgaacagagcacgtgacgttctggaccttggactgatgcttgagatatataaaaatatacaatccagatctgaaacccagtggtctttgcatttgaagaaactctcagttggagctgctataaccgcattacatgtttggataaatgacttgtctaaggcattggaatcat

SEQ ID NO: 45915 - DNA, 573 bp, Glycine max
gtttacacactgacacactccttcatccaactccaacagaacaagaaaacatagtacacaccacacagtgaaaaagagagaaactccatcttctttctttctttctcactcaccacagaacacaaaaaaacatttccaaatttcaggtttgggaaatgcacgaaacacattccatcggcggcggcaggttctacggcggcggcgaccggaggctgaggccgcaccaccagcagcagcagccgccgccgctaaagtgcccacgttgtgactcactcaacaccaagttctgttactacaacaactacaacctttcccagccgcgccatttctgcaagaactgccgccgctactggaccaagggtggcgtcctccgcaacgtccccgtcggtggcggttgccggaaatctaaacgctccaacaaacccaaaacaaccaccaccaccaccaccagcaacactaataacaaccgttcttctttctcggcaaccgcaccggccaccgcaccaacgccaccggcaccagagctggagcatcattctcattctcactccagcagtgaaagctccactttaa

SEQ ID NO: 45916 - DNA, 441 bp, Glycine max
cttttgccaaaaaatacagacctagaccaaaggtctagcaatggcgtcaggacacatggaagctctggttgggtatccgggcaagctcacccttagggtggtcctaacatgtgtcatggcagccactggtggattaatttttggttatgatcatggggtttcaggtggagttacctccatggattctttcttgaaggaattctttccttctgtctatgaacaagagtctaccatgaaagcttcaacagatagttactgcaaattcaacagtcagatattgactttattcatttcatctttgtatctaactgctcttgtggctggtctagtggcatccagcataacacgattgatggggaaggcgtgcaactatgattataggtggcatattctttgtgttaggtgcattactcaatggattagctacaggtttatggatgc

SEQ ID NO: 45917 - DNA, 404 bp, Glycine max
aaataatcgggtcgggtcgagatttggtttataaagaaacggactcagtagcgggttacggcccaattcccagcccgcagtccctacggctgctccattaacaatcaaataatcgggtcgggtcgagatttgaggttcaaacatcgtctgatattccgagaatgtaccactccagtgccgttttgcttcgtgacggtcgcgttctggttgctgggagcaaccctcacatttattacaaatttacgaatgttttgttcccaacggagttacggatggaagcgttttctccttggtatcttgagcctggattctctagcgtgcgtcccacaatagtgattcctgcgtcccaaacaaaactcaagtacggtcagacgttgaggcttcggtttgaggtgatgagcgcg

SEQ ID NO: 45918 - DNA, 427 bp, Glycine max
aatcattacaactagagataaacacctgtttacgggacttaaagttgattatgttcacgaaatgaaggaaatgcacgcaaatgagtcccttgaacttcttagttggcatgcttttagagaagcaaaaccaaaagaagacttcaatgaacttgcaagaaatgtagttgcttattgtggaggactaccactagcacttgaagaccttggtttatatttaactaataggactacaaatgagtggagaagtgcattgtcaaaactagaaacaactcccaatcctcatgttcaagagatattaaaaataagctttgatgggttaaatgatgagaaggaaaaagatatatttcttgatggtatgttgcttctttattggtaaagacatagcctatgttacggagatactaatggttgtggactacattcggac

SEQ ID NO: 45919 - DNA, 464 bp, Glycine max
gaagaaagcagcgattgtgaagtctctgcaaaccattatggatgtcttcctgctgatagtactctttagcagcaacaccaaagcagaaaaagaaacaatgcacgaccatgcaaacaaaaagacctacataattcacatggacgagaccaccatgcactgaaccttcaccgaccacctcaactggttcgacgcctacctcaaatcagcgtacccctccgcggagattctctacacttacaaacacgtggcccatggcttctccgccagactcactcccaaggacgtagacacacttgcaaaacaacccggcatcctctccgtcatccccgaactcaaatacaaactgcacaccacaagaactcccaacttccttggacttgacaaagccaccaccttgtacccgaagctagcctcttcggcttggcgtcgggtacggcgcgtggaatggccacacaagcgcgtgt

SEQ ID NO: 45920 - DNA, 249 bp, Glycine max
ctcgagccgattcggctcgagggcataacctaaacttacccttcttctctctgggtgcgtgcgcattatacgcatccataagcagctatggccactgtaagaactgtgatgacgttctcctcatgagttcatcaaagcttactcttatgacctgaagcgatctgacgagatggagctgtgagagtggactgatattgagaaaactgggcgagttatggagttggctccttatgatcctgactggtacta

SEQ ID NO: 45921 - DNA, 339 bp, Glycine max
gccattctcatcctcctctgtctctctctctccaccattgccatggatccttacaagctccggccatccagcgccttcaattctcccttctggactacaaattctggtgctcctgtttggaacaacaactcctctttaaccgttggagctagaggtccaattctgcttgaggattatcatcttgtggagaagcttgcaaactttgacagggaacgtatcccagaacgtgttgtccatgccaggggagctagtgcaaagggtctctttgaggtcacacatgacatttctcacctgacatgtgcagatttgcttcgagcccctggagttcagacgcctgta

SEQ ID NO: 45922 - DNA, 391 bp, Glycine max
aacgaggaatattaaaaagcagtccctgctcacatatttgcattttgtagcttaagattttaataacatctcaaaaaccaaaatattgaaacatttgcaagcaaaagccaatgcggacacctgatattgtaacaatgatattgggagaactggcgataattcactaacacaaatgatttaaaaataaacatttctaggatgtccctcattgatacataaaaactcatagcaaccaaaaagtactaactgaatgaaattcataacaaaatttgaaaattgcacatgatataatgcctatgatgcacttttcttcagcttagcaagctcttgcctaacaacagctgccctcttgatcttggccaacattatcttgaacctatcaaagtcatta

SEQ ID NO: 45923 - DNA, 292 bp, Glycine max
ttgctaatagctacaatgggtactattggtgaagcggaggacacatatgccaagatcctaggaagatggccagccttttactatggcatggggcacatgctcaatgacataactgctgcttggaggtgcacctatataggattgatcttgacagatattggactatcacctagcagacagaagctgcaacgaaaaggacaaagagcaagttactggtttagattattaactaaacacctctggcgtagcagggcagtgaaaacacaacttcaagaccccatggagagaatgc

SEQ ID NO: 45924 - DNA, 272 bp, Glycine max
aaacttaatcgatcatcactttacttcactaatacatcatggcagacgagacccagaacaagtatgagagctctgaggttgaggtccaggatcgtggtgtttttgactttctcggtaagaaaaaggatgaagaagacaagcctcatcctcaggaggaggtcatcgccaccgagtttcaaaaagtcactgtctcagaccaaggagagaacaagcacagactcttagaaaagcttcaccgatctgacagcagctctagctcttcaagtgaggag

SEQ ID NO: 45925 - DNA, 370 bp, Glycine max
ggcatttcttgtttaaatgggattgaagaagctgaagctcagtgtgctttgttgaattttgaatcattatgcgatgggtgtttcagttcagattcagacatattcctttttggtgcaaggacagtatatagggatatctgccttggtgagtagacaaccttgttttatcattggtgaattttctttgcattaagtatgttttcatacgactaatgatgagttgtttattaatgagttaggagatggtggatatgttgtttgttatgagatgacagatattgaaagaaaacttggatttggaagggactcattgattgctctctccttgcttcttggcagtgactattatcaaggagttcatggtctgggt

SEQ ID NO: 45926 - DNA, 442 bp, Glycine max
aacaatcaataacaagtacattagcaagtattcaagccaagtacatcagcgagtatataaaaatccaaaaactcgatccccctccacaagagaaaacatcaaaagtccaaaaaagagctaatgctcctccaacaagtaacaccactggtttcagaaaccgatttattcagacctctcattttttgctcgagcaagacactaaatcgcagctaaacataaacatacggtaataatgtgaagacaagctactttgaagtaacaccttaaagagacttcttggcaacgaatacaagaagatcaatgacacgtgagctgtatccccactcgttgtcgtaccaagaaacaagcttcacaaagttcttattcaatgcaattccagcctttgcatcaaaaatacttgatctgctatcgccgataaagtcagtggagaccacatcatctt

SEQ ID NO: 45927 - DNA, 443 bp, Glycine max
gccgaaatctccgagctcagatgacgtggacacaatttgcaccagcatctggtcacagatcaaggctaagaccggccggtcatacagcgccttcaactacactggtcctgcaaacgccgagaacgcgctcttcttgttcggcagcgatccaggacttttcagcgcagaattcgatgcagccagtccttcggacttcttctccagtgtcggtcttatcacgccggtcctgtaccggccgtggcttacggagcgtttgactgagagcctaccaaagagcatcaagaagatcgcggtgcttgagcaaatcaagaggaagacaacgaaatggggcccaattctgctcgatctgctcatgtctctcaaggccagctcacagggtgcttcgccactgattgtgggctatcaattgggttacattgagtactcgacagtgacacaagcac

SEQ ID NO: 45928 - DNA, 351 bp, Glycine max
ctcttttgctgcatcagaggagttgtaaattaagagcatggctgcacaagctcttgtatcatcatcttctcttaccttctcagcggaggctgcaagacaaagtcttggaccaagatcactccaatctccatttggcttctccagaaaagcctcctttcttgttaaggcagctgctaccccccctgtcaagcaaggatcagacagacctttgtggtttgcatcaaagcaaagtctttcttacttggatggcagccttccgggtgactatggatttgaccctctgggactttcagaccctgaaggaacaggagggttcattgagccgaaatggctagcatatggtgagataat

SEQ ID NO: 45929 - DNA, 464 bp, Glycine max
ctggaatccacgaaaccacctacaacagcatcatgaagtgcgatgttgatatccgtaaggacttgtacggaaacgttgtgctctctggaggtacaactatgttcccaggaattgctgatcgcatgcaaaaggagctcactgccctcgctccctcaaccatgaagatcaagatcattgctccccctgagcgcaaatactccgtatggatcggtgggtccattttggcctctttgtccaccttccaacagatgtggatctccaaggaggaatatgacgagtctggtccctccatcgtccacagaaaatgcttctaagcgtttccccattctagtgtttcgcacctagcaatattcatgtattttttgaagtgtactttattctgtatgttttaggaattatattcatcttgttagggctgtatatatacaattcaacgatttgaaataaactacctgtcgtgaggc

SEQ ID NO: 45930 - DNA, 172 bp, Glycine max
aattcccgggtagtcgaccgcggtcgccctttttttttgttttttgtaacagaatatttcctatattaaacaaaaccaacaaacacatgaaagatacatcagaaaatttttaaaacctacgcactcctacaaaaagcatgaagtttggtacatccaagtgcctttaatttac

SEQ ID NO: 45931 - DNA, 431 bp, Glycine max
gctctttctcttcgcaacatcttccttttccatccaagcactctgctctgcctccttgtctggcattgcacccttaagaccattttccacaagaccgaagcctcagaacgtccattgacgcacatctggcagccatgtccaccaccgcagcaccggttacgggcaacccttcccaggcgagcagcgatggcctctctggcaaacgacacatccgtccgttcgctggctctagtaggcccatgagcccacctgcctcgcacactctcttccacccgaagacacgatgcttcgtatacggactgcagccccgtgccgttcagggcatgcttgatttcgacttcatctgcaagcgcaagcagccctccgtggccggtatcatttacacattcggcggccagttcgtcagcaaaatgtactggggaacaagcgag

SEQ ID NO: 45932 - DNA, 340 bp, Glycine max
ggacatgttctggtttaacattaaaatactttaataccgcacacagcttggggatgatgctacaggggaccccgcccctttgtctgggtttgtctaccacgctcaaaacgcctttttttggggccaacaagcttccaaaactggatttgccgttccattttttccaaatccgactttacaaggataccttaacacgacccttaggaccacctgcctgcagggggggcaaaaggtaggtgatgtcctcccaaggatgcctgtaaagaccaatcctcagccttttttgggcggggaagggagcaatcaaaccaatggggcgtccgaggacaaaaagtccgtt

SEQ ID NO: 45933 - DNA, 393 bp, Glycine max
atgctatcaaggaggaatcagtgggcaagttgaagggaattcttggttacactgaagatgatgtggtctccactgactttatcggcgatagcagatcaagtatttttgatgcaaaggctggaattgcattgaataagaactttgtgaagcttgtttcttggtacgacaacgagtggggatacagctcacgtgtcattgatcttcttgtattcgttgccaagaagtctctttaaggtgttacttcaaagtagcttgtcttcacattattaccgtatgtttatgtttagctgcgatttagtgtcttgctcgagcaaaaaatgagaggtctgaataaatcggtttctgaaaccagtggtgttacttgttggaggagcattagctcttttttggact

SEQ ID NO: 45934 - DNA, 308 bp, Glycine max
gggggaagtcaaatggtttttggtgttgtacatggcattttttacagggccccaccaaggaacaaaatgtccacatgattttaaaaggttaaaagggtcttgagttttggcaacggaaagaatttgtaaaataacctttaatccattcaggggaacttgggactgggcaaaatgttgttgggcccgggggcagccaaatgatctaggggggtttggtatgggccaacacctgggacaagagcttgaacaaaggaacccaagattggcaacattgccaaccttccatttttcacttccttgggcttaaa

SEQ ID NO: 45935 - DNA, 410 bp, Glycine max
atgccatcttatatgagtgtgttcaaacaataatgagtgttgaagataatggtggcttacgcgtgcttgcaatcaatatcctaggaagattcttgtcgcacaaagacaacaatatcagatatgtgggattgaacatgctgatgaaggctgtaactgttgatgctcaggcagtgcagaggcatcgtgcaacaattctggaatgtctaaaggattctgatgctttaaattcggaaaagagctcttgaacttgtttgtattctggtgaatgaaactaatgtgaaggccttaacaaaagagctagtagaatatctggaagtcagtgatccagatttcagggcagaccttactgccaaaatttgctcaatagtttcaaagttttccccagagaagatctggtacattgatcaaat

SEQ ID NO: 45936 - DNA, 393 bp, Glycine max
aggacagattgacccctcatgcctcatcagggcagccctcaacttcacaattcgagaacttatgtaaaatcgaatgccctccaatagtgtaataattggcttatgtctgtagtccattattacattattgaatgcctcacacatgttatttacttgcaaatcacactttgtgtttaccttaaaagcagaccttgtccaacaagcaggttataacttttgcagatcattccaagcttcttcatcataatttttaatctgcaacatggctttttgccagtcaggggtagttgttgctcgagctgccatccacatcaactctttcatgtgtgctcccgggtacttattcttccaatagccatacaaatgtttgacacacagctgatgttctacgtt

SEQ ID NO: 45937 - DNA, 393 bp, Glycine max
tcgagtgaagagagaaatcgagcggttcgagggtaaggagggctttgagcgttatctcggttacctgcaagagtcgcatcgccactacgaactttccatcatccatgtgctcaagaagaacttttactcatatttgagtatggtgcgaccaactttcttgcaatatctccaaacacttcatccatttgagagcgtgtggggaaggacaagcatgtacttcaagacggagaggctgaggagagtattcacttttgcgagcatgtacatgggcatgagtcctttcgatgcaccaggaacttacagtttgctccaatacacagagttagctgaaggtatctggtatcccatcggtggcttccacaaggtggtggaagcactcgtaaacattggatc

SEQ ID NO: 45938 - DNA, 396 bp, Glycine max
gagttgataaaggggtactaattctatcgctacgctacagtctattaaacgccattacttccgaaacattgggcgaccccatctaatacgctctctgaaatactatccagagcagataagtcatgaccagagccaggatcacctgaacagattgccatactacactggtctgttgcacatccagcgggcttacattacgggcaccctttttctcgtcagggaagaacttcgggatctgggggggcaagccgagatgcttgaggacttgatcggggaccagtttcgcgccagcgagaacgattggtacacctgttcctggatgcgtacttgcgcccacgaagtacaggtccttaatgcttgggtgctgcgtctttggcctgaagctaagcacgttga

SEQ ID NO: 45939 - DNA, 400 bp, Glycine max
agccgagcggccgccctttttttttttttttttagtatcaaattttggttttggttttgcatctataaataccatgtttgctctttcttctaagaacgtttacataaagaattagaagatatagctagacataaaactagaatatgcaacaacatcaacccagtctggaaaaagattcttcaatctctttactggatcaaccaacttttggtctaaaaccgctaggtccactcttaatgcttcagagctgttagcctctaaccagaaggtccaatttccatcgctaggtccactgagacggcatatatatgattgtggaccaccaccataggtttcggttcccggaagcaaattatctgcaaatgaccaacttgataaaggaccagtgatgttgagaacc

SEQ ID NO: 45940 - DNA, 394 bp, Glycine max
cggctcgagctcgagccgcttcaatttcatctttcttcacccgaaaatggaaaaggagcgacccgcatcatggagacccgacccgtttcacgcacggccgacgccgcgcgaccccatggagttcctgtcccggtcatggagcgccttcgccctcgaagtttccaaggcactgtcgtctcaacagcttccaccttcatccaacaacaacgttgtttgttatgttaataattctaatgcgtctataatactcgaagacatagctggtgaagtggaagagtctgctgcaactgtttctggcaaccctttctccttcgcatcctctgaaacctctcagatgatcatggaccgcatcatgtcccacttctttggtcagcaggaggtatcaccacgcacc

SEQ ID NO: 45941 - DNA, 377 bp, Glycine max
tatagactatctttatataataatataaataagaataaaaaaataaaaaaaaaaaaaagaatctatataaatataaaaataatatatataaggtacaaatagtaaatcgaggtacccattttatgataaactttccttccattttagttcctctagtaggcctagtatttccggcaattgcaatggcttctttatttctttatgttcaaaaaaacaagattttttagatacagaaaacaaagtaaaattctggggttttttattccccaattataatactaaattcaaaaaaaggagagtaatgagtataatctttcgctcagacgatgtactgatatattctatggcggaggttcgaagaacaagcaatttatttt

SEQ ID NO: 45942 - DNA, 504 bp, Glycine max
ctcgagccgaatcggctcgagcaagagtggaaaagggagcttagactttcattcaagcctcaactccaggtgggatcgacagaagtgcggtcacacccgcaacggccgaaagtgcgagagccgaacggttgtggatatagaacggggcgttagccacggttctaggttgttagtccttcagtcgttccttcatcgctagaaacaagctaaatggagagattcctaaagatattaaatttccacctcaactggagagactagatatgcaatcaaattccttgaagggtgtgctcactgactatcatttcgctaatatgtctaagttagaccacttggagttatctgacaactctttagtgaccttggcatttagccaaaattgggtcccaccatttcagttgcgcttcataggattgcgatcttgcaagctaggtccagtatttcccaaatggttggagacacataatcaatttcagggtattgacatttcaaatgctggaatag

SEQ ID NO: 45943 - DNA, 420 bp, Glycine max
agctcaactcaaaatcaattgaagtaattcctcaacatgaaaacaaacatgtgaacatttacttgaaataacattagctgatatttcaagatgattcaggacaatccaacatgaagcattaacacacctgaagtagaatcttgccgagacacatcctcatctgccagcctccactgaaagacgcgaccagcctatcagaatcctcaggagcaaaaccaagctcaggcatcaacttactaatcttggcatcaacctcatccaagttcacattctgcgccctcctctgaagcaaatcgaactcatccaagagcctccccatgagctccaaatcattaacggcaccctcgagcgccttctgcaccttctccagcttccctgccaccttcatctcctccttgaatgcgttcatgaactcctccc

SEQ ID NO: 45944 - DNA, 360 bp, Glycine max
tcctgctaatggctttgatcatttggtgcatctatagcaaaatggatgatgacactaaagtccgaaggaaagaggttttgggtagcctctgtgatcaaagggcaagaatgttgcaagaccagtttagtgttagtgttaaccatgtccatgcccttgccatccttggttcaaccttccattactacagatacccttctgccattgaccaggaaacctttgctgagtacactgcccggacagcatttgaacggccgttactgagtggtgtggcctatgcgcaaagagttgttaactctgagagggagagatttgagaaagaacatggatgggttataaaaacaatggaaagaaagtcttcac

SEQ ID NO: 45945 - DNA, 414 bp, Glycine max
gataggaatcataaaatgttattgtcatgcagttgaggaccaaattgatccccaaacaagtttacaaaacttgggttcctatgtacacatgaaacgtagataacacaacaaaaaatgagaaatagttatctaggttgaactaatgacactataacagttacatcatcaagcttgccaccaatgaatcccacatagccaacagcttgggctgcatcagcaaaaggacttctcatggatgttgatcttccaacctcttgtgcccttgtcgccaggaattctgctatttcctgaggtgtcaagctagcttctaatgattatgatataattgatgctatttcttgctcatagagattgtcgaagaggccatttgtggcagttactatcacattaccatcatgtagatccattgtgtat

SEQ ID NO: 45946 - DNA, 413 bp, Glycine max
aaggcagaaagcaagctcatcctagagttttaaaaatggcagcagcctcctccatggctctctcttccccatccttggctggcaaggccgtgaagctgggcccatcagcccccgaagtcgggagggtcagcatgaggaagaccgtcaccaagcaggcctcctccggaagcccatggtacggcccagaccgcgtcaagtacttgggcccattctctggcgagcccccgtcctacctcactggcgagttcccaggtgactacggctgggacactgctgggctttcggccgacccagaaaccttcgccagaaaccgtgagctcgaagtgatccactccaggtgggccatgctcggggccttgggctgcgtcttccccgaactgttgtcccgcaacggggtcaagtttggagaagct

SEQ ID NO: 45947 - DNA, 500 bp, Glycine max
  unsure (1)..(500): unsure at all n locations
gaagaccctgtccccgaggccgaaggctctatcaacgacagcgacgtctctcagctcaagaaggccatcctcaacttgggtgtcgacaacagcaagcttatcaggaccgctttcgccagcgcttccacattccgaggtggcgacaagcgtggtggtgccaacggcgctcgtattcgtctcgagccgcagaagaactgggaggtcaacaacccacgtgagctcagcgaggtgctctccgctctggagaaggtccagaaggacttcaacggctcgaacaagaaggtctctatggccgacttgatcgtccttgctggtgtcgctgctttggagaaggcgtccggcgcatccgtgccattcacacctggtcgcaccgactgctacccaggaacagactgacgccaagtcgttcgagcacctcgagcctttcgccgacggctttcgcaactacggccacggtactgaccgcgtncgcaccgagcacatgctcatcgacagggcgg

SEQ ID NO: 45948 - DNA, 326 bp, Glycine max
ctcgtataatcatgcttcatttcaaacatttactcggaaaaaaacacagaatcctagctacaacccagccagccatcccatactggcaaatctagccaggccaaaaaaaaaacccgaatgacgcttcacgccctaaacccacgcccagtctacaagcgagcgctctggggctgggtagagccctgcgggtcgaaacggtcggggttcatgaccttggtccacacagcgacaaagtccttgacgaacttgacctgggcgtccgagctgccgtacaccttagcggtggcgcggagctcggggtgcgagccgaggactaggtcggggcg

SEQ ID NO: 45949 - DNA, 474 bp, Glycine max
  unsure (1)..(474): unsure at all n locations
tgcaattgaagttaaaagccttagccttccctacaactccaaacacaaagacatcatcatccatggctgcctccgtctccactgtcggagctgtcaacagagctcttttgaacctgaatggttctggagctggagcttcagctcccagttcagccttctttgggaccagcttgaagaaggttattgcctcaagggtccccaacagcaaggtttccggtggaagcttcaagattgttgctgtagaagagaagaaagagattgaagagacccagcagaccgacaaggacagatggaagggtcttgcctatatctcagacgaccaacaagacatcacaagaggaaaggggtttggttgactcccttttccaagctccacaggatgctggaactcactatgcagtcatgagctcctacgagtacctcagcactggacttcgncagtacttggacaacaaaatggatggattctacatt

SEQ ID NO: 45950 - DNA, 480 bp, Glycine max
aagtagttgagaactaagaaggagaagcaaatggcttcctcaatgatctcttccccagctgttaccactgtcaaccgtgccggtgccggcatggttgctccattcactggcctcaagtccatggctggcttccccaccaggaagaccaacaatgacattaccttcattgctagcaacggtggaagagtgcaatgcatgcaggtgtggccaccagttggcaagaagaagtttgagactctttcctacctgccagaccttgatgatgcacaattggcaaaggaagtagaataccttcttaggaagggatggattccttgcttggaattcgagttggagcacggtttcgtgtaccgtgagcacaacaggtcaccaggatactacgatggacgctactggaccatgtggaagctgcctatgtttggttgcactgatgcttctcaggtgttgaaggagcttcaagaggctaagactgcatacccc

SEQ ID NO: 45951 - DNA, 445 bp, Glycine max
aaaatacaattacattgtgcttacatatatatagatatatgaatatgaatattgactggttgtaaaaccgtcaacctggtcaagcggccagatacttaataataataatcatcaggataatcagacctataatcatcataatcatcatcatcatcttcttcttcttcttccaactcttcctcatgatcatctaaccaaatattctcctcggcccaaagagggcaagcacatgttgcttttttgtccttccactctgctccacagttatagcaaaattcgtaaccgcatctgcaagtcatgtgatagcaaccttcagcaagttcaatcatatggttacacttcagacactgttgccataggctccttgatgccagaaacttcagcttcaaatcttctgcaggaggaataggattcatccttttgtaagtattacatgtcataccac

SEQ ID NO: 45952 - DNA, 371 bp, Glycine max
gtgaattctctacggggatatatcatcacatgcattccgccaccaaacttttccagtcattatcgtaactcgtctgatgatgcaaagaaaccgtgaaaaggcctttatagccatgaactccgaagaccgcctaaaagaagaagtctatgctcgaaagaagaaagacaaagaagaagactcaggggagcgatccgcttagtcaacctcctcaacggtggggccgtcgtcgccgccagcgccgggggcagcgcctccgggagcgccaccgggcataccgccgggcatgccaccctcaccaccagctccatagaacttcatcatgatggggttggcaacggcctcaagctccttctgctgagactcgtactcgt

SEQ ID NO: 45953 - DNA, 293 bp, Glycine max
ccgtctggtacaggccgaacgcaaagaggtggtcgttgagcaggctgaggttgtatggcgtgacgtacatgtttgtgtcggtcagtccgataaacatggtgccgttgacgatgccgtcgttggtgttgttgaaaacaacgccaccgggctggatggttgtgccggtgttgttgccagtcacgttgagcggggtgtaggtgacgttgagctggctgatccacgcgacgtacgccggggcggtggtgttgatggcgccgccaatggacgagttgtaggcaccgttggcggaaagg

SEQ ID NO: 45954 - DNA, 448 bp, Glycine max
ctcgagccgctcgagccgctcgagccgcaaagctgctgaaggtcgccttcctgtatttttggatggtggtgttcgccgtggaactgatgtcttcaaggcattagcactaggtgcctctggcatatttgtgagtacttcatgaccttttccaaaagcttagtataattcttggcttttttcatattgggataacattttcagatattagttccctattaattgtttgttgttatacacatatattgtcatttattgcaagagccgaccacgaatttggatcccatgtccatgttatttactaccatgaaaatagattgatggaaagtgatgagatagaatagaatgaagtaaaatacaacatcatggaataaaatttccattttattatttgaatatgttatgatggaatgaacaaaattcttattccctgtcattcctaacaaattta

SEQ ID NO: 45955 - DNA, 359 bp, Glycine max
aaaaaaaaaaggggcccttaaaaaacaacacaatacattagggggcatagtttcacaagcccctttttgaaaactataatgaaaacccgggccatagtggttccaaaaagcttttttacaacacactaacaagctttttaaaacacgccctataaaatcccctaaaagttttggtggggaactttgggaaaaccaacttggggggtcccataaaaaaagacggggggatatcccctcaagaaaacatccccaaaaatccaaagaggacctcggggggggggaatgttaaaagcaaaaaaccccctaggggaaacttttggaaggccttttccagttttaaaaaaaaactgctcaggggg

SEQ ID NO: 45956 - DNA, 470 bp, Glycine max
agcgaagtctctatcaattgtgcttgctgcaactgtgagcatccaaggttcgttgttggatacagttccaggagaaggtcctgaatttcctccagaagccactactgttatgtcgttggcaactgcatggaaggaccctattgaagtagcatcttagaaacattccgatgcaatatctgaacccaacgacacctaaatcgcgttaatgccgttacttatggcagcctaaaaagtagccaaaatgtctgcatctaaacatccaccaccgaacgtagctggccaacatgccttaggctgcatgttgtagactacagagctaacctaggattcgaggtctaggacctccatagcagagaagaaggtaaggataaaactgttttattgcctctataagaattacatatcctcatatatgtagatattccagtgcacattctagatacatattctaacagaatttgacattatat

SEQ ID NO: 45957 - DNA, 273 bp, Glycine max
ataaggtgtgaagagagagcaaagaataatgatggagagggagaagaacaagaggcatttggtgttgatataaggtcgctgatttgctgaaatcaagtggacacgaattcacagctctagacatggctgcatatggcatcaatcaaaagcagaagggcgagcttaattcgatcacagaatattttgagccattgatggaatttctgctgtctttggcagaagaagagcaagtaatccttgtgggtcatagctctggtcgtctatgcatatctg

SEQ ID NO: 45958 - DNA, 400 bp, Glycine max
cttctattcacccttcactcgacacaacacttcctgcttcacttctctcacctgcattctatagcaggttgagaaattaatacaactttgtctttaacttttaactttgacaccaccatggcctgcttagaagtcagcaaagaggtaaagttcaaaggtgacacggaagaactcactcttgatggaagtgttgattggcatggtcgccctgcaattagagccaaatctggcagatgggttgctggaaccatcgttctattgaaccaaggtctggcaaccttagcattctttggagtaggggtgaacctagtgctgttcctgacaagagtgatggggcaagataatgctgaagctgcaaacaatgtgagcaagtggactggcacagtttacatcttctctc

SEQ ID NO: 45959 - DNA, 429 bp, Glycine max
gtttggtgtcttcaccttgttctttaacttgattagcggctcgaggcacaactgtttcttctgatgcttatggcaacttggatatctgtcatcagttagaagtttcagttaatgcagccgctgaaatgatttttgatctgcagaagaaacttgaagctacttattcggaacatgaaataatgtgcacatcatataaagaaatgaattcaaaatgtgatgatctgcttgggaggaatgaattggctgttagtctattgcataagatgtacagtgacctgaggaaacttgtgtttagtaatggtgggactatggatgaagataagatagatttacaaagtgaagtgctgcctgatctgctgaactataatagctatcaacccatcttgaaacatattgggaatatattgaccgagaagctggaacttgagt

SEQ ID NO: 45960 - DNA, 371 bp, Glycine max
aatgtttgaggccggacaagcttgtcccccgttccttgaaaaaattggtgtgggatgcgagtttaaggcttatcctggtctaggccacacgataaacaatgaggagctgctgtatctcgagtcgtggatcaaggcacgcctacaaagttcttcccaataattatttcggcctggaataatataatctaaacataagcttttacttgtggagaccccggatcagtttgttgtttattttcgctttattcataatgtttaacaggaatggaaatgatcttaatgtgtgtttcgtataacgttgcataagtctgaaaattttcacgtcaatttgcgaattcgcgcagaagctatacacgtgcctatttggattc

SEQ ID NO: 45961 - DNA, 334 bp, Glycine max
ctccctccgtcacgcatcttgtctcttccgtcagcccattgtaaagctgccaacacacctgcacactcaacgagcccacttctcccgcaccatccgcaagatggccaccgaatacaagctcaagggcttgaccagcgtcgacctcaagaacggccagaaggctgagtacgaggtcgaaggcatcgagggcggcaaggtcctgctcgtcaaggcccaggatggcctgcacgcaatgtcgcccaactgcacacactacggagctcctatggtcaaaggtgtcgacaccggcgacggacgtatcacttgcccatggcacggcgcctgcttcaagatc

SEQ ID NO: 45962 - DNA, 258 bp, Glycine max
aaaccccctcattgcacatagtaatgccctttatttaagggaataaaattttacctactagttcacaaatgccaaagggcacttattaacccgatatttgggacttttacagttttcaaaaagtcgcgttagcataggggtaggggcgttagaactcaaaatttcatttttaacgccaaaaagaacagcccgttaagctactggaaaagggtcaacttttgtaagaaaaacaatttttttacctttcccaagggctgg

SEQ ID NO: 45963 - DNA, 424 bp, Glycine max
agcgatccgtaagatgcttccacgtgttctggttttgctgctgctgaatgtgctggctaccaacgtgctggccgactatggcccaggagatgcggtggtgatcctcacggagaaaagctttgcgaaagaggtgctgcaaagtcctgactattggctcgtcgagttctacgctccttggtgtaaacactgcaagaatttcgagccggagtacaaggctgcggccaagaagctcaagaaacacgcgcgtttgggcgttgtggatgccacggtgcaccaggaacttgcccgaaagtactttgtccaagacttcccgacgatcaaagagtttggagccgaaaagaaacgtcctcaggactaccgtggtggacgcaccacgagggaaattgtgaagtacgtgaagaactcgcccgatgcaaagaagctc

SEQ ID NO: 45964 - DNA, 429 bp, Glycine max
gcttccaaagtttctgaaaaccataaaatttatttccgtaccccggaaaagcctgagtcagtaatcaggttcttcagagaccacggtttttctgactcccaaataaacaatatggttagaagggtacctaggctgatttcctgcaacccttgcaaaagggtattgcccaagtttgaatttttactctcgaaaggtgtttctagctctgaaattgttgacctaattagtaagtaccctttaatgttgactcgaagcctgaagaattttatagtgccaacctacgaattggtatatagattcttgcaatctgataagaacactgttgcttgtatgtttgctaattcatctgtctttggtagcggctatcttgtggcacacaacgtcagtgtgatgcttaagaatggattgagtgaatcaaacattgcaaga

SEQ ID NO: 45965 - DNA, 440 bp, Glycine max
aagaaagcataagccatattttgagtaaactagtgtgcacactatcccatgcctagtggaagtagggatcctctcgttgttgggggagtaattggggatgtattggatccttttgaatattctattcctatgagggttacctacaataacagagatgtcagcaatggatgtgaattcaaaccctcacaagttgtcaaccaaccaagggtaaatatcggtggtgatgacctcaggaacttctatactttgattgcggttgatcccgatgcacctagcccaagtgaccccaatttgagagaatacctccattggttggtgactgatatcccagcaacaacaggggctagtttcgaactcaagtaagaatatatgtagccatccgaattcttaaagtgcatgcatgatcatgtgcaaaaagatgagaagattcattcagttca

SEQ ID NO: 45966 - DNA, 295 bp, Glycine max
tttcgttctttttttatttttttattcttatttatattattatataaagatagtctataatcactagaatttctatatattcatacttagtctataataattctagtgataatagctaagccaatttatgtcataatataatatacccttttcttattcaaagcatttatggctatgccttatcattgttagtcaacgaacagaaatgatggaatagagatgactcactcagaacgccctttaaaagattacgcggcacgatcgaatcaaatccgcccttatggaataaatattc

SEQ ID NO: 45967 - DNA, 439 bp, Glycine max
ataaaaatcaataaatttattatatatatgctgatttataattaattgatgctgtagaattattctaacacataacatattttctcttaattttggagattgaatttattcataaccatagtttgtcaagagttgttctccagtgaaaaattggacttggttttgtcaatgttcttgcaagaactagttgaatcactccatgatgcttgatcagagtcgattgttgtttcatggggataaaaaacaggctttggaggcatatcaatattttcaacctttccttcaagcatctctacaaccttcttcattgaaggacgatcatttggttttaattgtatacaccaaagggaaactatgaacatctttttcactagaatcttatcctcttccgagaccttttccatgtgaatatccttttcttccataaaatgatcataga

SEQ ID NO: 45968 - DNA, 437 bp, Glycine max
tgcggagattcattcttcaccaaaacttcgcaaagaaacactacacatccatggcaactgctggcgtgcaagaagttcgtgttccccctctaacttccacctctgagccaccttctctctttgacggaaccaccaggtgcttcgtttttttctttcatcccgtttttatttccgatgtatatttatttttaattttaaattttttggattttcttttaggttgtacatcagttatatttgtccctatgcgcagcgtgtttggatcactcggaactataagggactacaagacaagatcaaactggttcctattgacctacaaaacaggcctgcttggtataaggagaaagtctaccctgaaaacaaggtgccatcattggagcacaatggaaaggtcttgggtgaaagtctcgatttggtcaaatacatagatgaca

SEQ ID NO: 45969 - DNA, 518 bp, Glycine max
ggccgcctacgttgctaccctacgtcttggcctgtttcgaggatcagcaagtcggaggagtgggaaccagtcaacgagtgaaaccatgcggaaacaagatgacaatttgggaagtactcgctgctttccgacttaccatccgaaacattgaaatcgcctcttcgacacatatcgatggcggtatcccctgtctatctggtcgaacagccgcttatagaaccgtcatcctcaaagatcccgactttttgcatggtttcaccaacgacctttggctcggcaaatatcacctcaactcgggtgatgacaaattcctcactcgatggatggtctcgcacggctggaatacctatgtgcaagtctgtaaagaggccgagctgctcagtacgatgaagcccaattggcgattcttgaagcaagtgttgcggtggacacgaaatacctggcgatccgatttcaggtcgatcttcaccgaacgttatgtttggacgaaacattcctatgtggcgtacacgatgttg

SEQ ID NO: 45970 - DNA, 450 bp, Glycine max
ctcgcttacgttgccctcgactttgagcaggaaatgcaaaccgctgcctcttcctccgctttggagaagtcttacgagcttcccgacggacaagtcatcaccatcggaaacgagagattcagaggacccgaggccctcttccagccctcattcttgggtatggaggctgctggagtccacgagaccacctacaactccatcatgaagtgcgacgtcgacatcagaaaggacctctacggaaacgtcgtcctctctggaggtaccaccatgttccccggtattgccgacagaatgcaaaaggagctcactgccctcgctccctccaccatgaagatcaagatcatcgctccccccgagagaaagtactccgtctggatcggaggatctatccttgcttccctctccaccttccaacagatgtggatctccaaggaggagtacgacgagtct

SEQ ID NO: 45971 - DNA, 485 bp, Glycine max
gaagaatagttgctcaatatactagtgctggaacttacacttttgtcagtttgggaataaatagaagggtatattcaattttctagctgtgatttctttgcctgaatatgtatgcaaggacaaaacagaagaagcaagtaaaatcaaatatatttgactgctgaattgtctatatgacttatgaactaatcaacaaaatgattggataggtaaactattttctcctcttgaaatcctcatccgaatccacactcttgagtcttcttcgttccacaatccagaagaatgaagtgaaatttattgtattaaacttcaattgttttctgattgagagctgtgtatctccatctctccttctccacaaaatcagcatcaaggaacctggcaacaaaagtccatagtttatatacatcttcaaaattagccaggaagcttaatgcagcagtaaccacagttactcctagctcatctctatctttcttctt

SEQ ID NO: 45972 - DNA, 401 bp, Glycine max
gtttcttacaaggctctactctactgcttcaccttctgctctagaaaattcagtggtgatacatggcttcggctactctctctgtagccaaaccagcccttcaggcaaatgggaaaggcttctctgaattctctggcctccgcagctcatcaggcttccttcccttttctagaaaatcttcagaggatttccattctgtcattgccttccagacctatgcagttggaagcagtggaggatacaagaagggtgagacagaagcaaaactgaaggttgccataaacggatttggaaggattggaaggaacttcttgaggtgctggcacggtcgcaaagactcccctcttgatgtcattgccatcaacgacaccggtggcgtgaaacatgcctctcaccttctc

SEQ ID NO: 45973 - DNA, 472 bp, Glycine max
gagagagagaggtgtgaagttggtgaaggtttttgagaagaaagatggaacgaagtggcggaatggtaactgggtcgcatgaaaggaacgaacttgttagagttagacacggctctgatagtaggtctaaacccttgaagaatttgaatggtcagagttgtcaaatatgtggtgataccattggattaacggctactggagatgtctttgtcgcttgtcatgagtgtggcttcccactttgtcattcttgttacgagtatgagctgaaacatatgagccagtcttgtccccagtgcaagactgcattcacaagtcaccaaggttagcttgtgcataaatgttaaattttttggtctttccctcatcagaatttacgttgaacaagatgaatgtggatatcagagggtgctgaagtggatggagatgatgatgatgaagacgatgctgatgatctagataatgagatcaacta

SEQ ID NO: 45974 - DNA, 507 bp, Glycine max
catcattgtaatgctagcaactttggacttcaggtaaaatgaaattatagccctcaagcttgcacatttacttaccctttaaaaaagtatacaatgctttcttataatagaagtaatttgtatcaacacactgaacttgtgtagggatgtgtcttcacaaaggatgtcaacaaagcaataatgatcagtgatgcaatggaaacgggaacagttcagataaattctgccccagctcgtgggccagatcattttccctttcagggtataaaggacagtggcattggatctcaagggattaccaacagcataaacatgatgaccaaggtcaaaacgactgtgatcaacttacccagcccttcctatactatgggctagtagtgtaatacacacatgcatgggggaacatcattatatagcatgttccataaatcatagtgaacgtacaaccgtgtgagttcagcattgcattgtcttttgcagctgggaatcacagagatgaataacgag

SEQ ID NO: 45975 - DNA, 308 bp, Glycine max
cctcggggaattccaattccacattttcaagatttaaggaggcacaaatgttcctatatgaattggaattatctgttctcttattaggcctatcctgaagccaacggaaatgagatcggaattactcggggaattccaattccacattttcaagaggtaaggaggcaaaaatgttcatatatgaattggcattatcagttcgcttattaggcctatcctgaagtcaaaggaaatgagatcggaattcctcggcgaattccaactccacattttcaagaaatcaggcggcacacctgttcatatatgaa

SEQ ID NO: 45976 - DNA, 475 bp, Glycine max
acaaaacgaagaaactattattggaattcattcaaattgaagtgcacatgattaataagattcaaccaaactagagaaggccaccacggagcctaaggacaacatagacatagaaattttgttatatcatacacattcaaggaagagaaaatctcaatagcaagattcaactgaaactagaaatcgccaccacggagcctaagaacaaggtgaagcgtggattccttctgaatattgtaatcggcgagagtgcgtccgtcttcgagctgcttcccagcgaagataagacgctgctgatccggtggaatcccttccttatcctgaatcttcgccttcacgttatcgatcgtatcagaactctccacctccagagtaatagttttcccggtgagcgtcttcacgaagatctgcatccctccgcggagtcgaagcaccagatgaagcgtcgattctttctgaatattgtaatcggcga

SEQ ID NO: 45977 - DNA, 444 bp, Glycine max
aacagaaaattaaaattataaacactagttacaaggcaaatccaagattacagatcattttattaggaaaaacaaggttttccaaacatatgcaacggataaacgacatacaaccacaagaaacataagttaacagagattttgtccaagcatcatttcagttgggggcaaaatatggagcaaaaccagaaccaaaaccccttctttttcttctttgatggcacaagttttgcatccctcttggtgacaaaatcagccatatactgcacaacttcctgagaacccaacttgaccaattctcttggtggcaaatcaaggggggtctcatcagccctaaaaactctcaactttgacaagaacctgaaagactctggtagagcttttatttgatcatcacttatgtccaactcctcaagcatttcaagatttccaattgatgctggc

SEQ ID NO: 45978 - DNA, 387 bp, Glycine max
aaagtgaacagttgaaaaataagcattatgcctgcttttcgaagcatccaatgatttcagtgtatacaagtctccttttttttttttatgaaaaaggcaaccagcattgtgtcaagtaaggctgcaaatcctgcatacttgattactttcgtattgtaccattacaaagccgccacataggtgctcgtttctattcgcagagcaggtgtgcaccatttaggttgcgccatatcttcttttaaacaagaaatgtctcttcgctggatctttcggcttgctcttgatctgtccttggcctttgttacgcccagtactgtactccatataaaccatcccttttgcgcctgacattgcactcatggatccttgagaacgacgggcactctg

SEQ ID NO: 45979 - DNA, 530 bp, Glycine max
  unsure (1)..(530): unsure at all n locations
gcgactaagatgtggtcgagtttccctctcgtcttgcctttgggtgccgccctagtggcagggcaggatattactacctgtcccgggtactcagctagcaatgttcagcaaaatggtaatggtcttactgccgacctcactcttgttggcgaggcctgcaatgcatacggcaccgatctacccaacttgactctgactgtcgaatatcagtcagccaaccgcctccatgtgattattcaggaccagaaccaaaccgtgtaccaggtgccaaacgagatcttcccgagacctgaatcccctgaaaatagctcatctgaagactctgaccttcaattttcctacacagaatcgccgttcagttttgcagtggcaagatcagatggtgagacgctattcaacacctncggttcgcccttgatcttcgagtcccaatatctgaatctgaggacctcgctaccagatagtcctgctctctatggtttaggagagcacagcgatccatttcgcttgaacagcacgaattacacacg

SEQ ID NO: 45980 - DNA, 400 bp, Glycine max
aatgcgtcatcattgatgcatattattacattattcagaaggtaaagaactaccttttgaatgtaatgtgtcatccggtttcatcgcagggaaaagcaagacttctttgatgttacttgaatctgttaagaacatggccaatcgatcaacacccataccccaaccacccgttggtggtaaaccgtaatctaaagcgtgacaaaagccttcatcgaccatttgtgcttcatcatcacccatttctttatcttttgcttgatgttcaaatcgtttccgttgatcaattggatcgtttaattccgtgtatgcattacacacttcttttgtcgccacaaaacattcaaagcgttcacaaagtccttttgtatctcgatgctttttggctaatggggacatcatt

SEQ ID NO: 45981 - DNA, 297 bp, Glycine max
aacataaaaaaatatatttatttttcatttaaatttcaaatgttggaacatcagactcaaagccatgactggcctggtataataggcgaggccctaaacctttgtaggggtcgctttctcttttctcctttaaataagctatacatttgtcaacctcagattgcacttgtaaatataactcttgagatttctggttgactctcagttcttgttcccttcctttcgtttccaatggttttccaaaataaaagtagaaccggtcaggaactttaggcaaaatcaaaggcaaatgcactt

SEQ ID NO: 45982 - DNA, 424 bp, Glycine max
ctaagaacagttagttaaagaaaaagtattagtatcaaatacaatgattcaatcctaattatacacacatcccatcctatattggtcataagatttctcctaattgattttgccatatatacatgataaactactaaaaatatctaagatattctaacagaaatatatgtccacaagcataaaagataagataaatatgaactcacatttgttctttacaagaaaacagaaatttcttgtaaatgcacatgactattttggttgaaatgaaattctcattttgtagctccttgtaacaccttggctcaagggcttgcacaatctgatcaattatataactttagtgagcatggcaacatccttcaggcatttagaattggaacttttcttaaaataatcactatagtttatattctagctactc

SEQ ID NO: 45983 - DNA, 481 bp, Glycine max
aaaatcataatcctatttatcattaatatatatgcacaaagcagaacaacctttacatgaacggcgtataaaatataattcaaaacattcattctataggaccttatcactcaaatatttaagaccgggtttggcgttgataatgatgtccaagtttcgaacttcttaccctataaccttttgcccttccctctaagtaatatcacaaaagtaatattaaaatattaatgaatcatttattctcattagatctagggacaagctaaacatttccccatttttggtcattcataccaatatggggaatccttgtataataaaattaccttaaggcctaagtaatagctcataaacgtcggatgaattgttcccagttacacgctatgacatttcaaaacttgtacgactacccaagaattcgacccttgtaaacagtgcatagccatgttctgctgtttccttactagagtacactgatcga

SEQ ID NO: 45984 - DNA, 135 bp, Glycine max
tgtgggtctcatcgtatcccttctcttatattgattttagcttttatggcttcaccgaacgccgaaacaatggccggaaaaggagagggtcctgctatcggaatcaatctcggaaccacctactcttgtgtgggc

SEQ ID NO: 45985 - DNA, 363 bp, Glycine max
tcttattcttccagttatatatatggatttgtattggctaattgcttcaatgggtactattgaggaggcatatgacacatataccaagatcctaagaagatggccagtcttttactatggcatggggcacatgctcactgacatatctgctgctcgtaggttcacgtatctatcatcgatcttgacagatattggactttcacctagcagacagatgctccaaagaaaaggataacgaacaagtttctgatgaagattatcaactaaacacctgtggcatagcatggtcgcgcaaacacatctcccacaccccatggtgagaatgcacctgctgtgacgctgacaggacaagtggctgatgga

SEQ ID NO: 45986 - DNA, 521 bp, Glycine max
attggttctaatagaagttgcaactttccactgaatgatcaaactataagtggaaattgatgcaagatcaaacatacgcagggtgacggaagtgctgtagctgtgctagaaagtatgggtagcaaaggatctgttctagtaaatgggacacatgtcaagaagaataccagctgtgtacttaactcgggtgatgaagtggtttttggtgtgcttggaaatcattcttatattttccagcaactaaatactgaggttgcagttaggggtgcagaagttcaaagtggtattgggaaatttctgccgcttgaaaggagaagcggagacccttcagctgtggatggggcctctattttggcttctctttccaacagacaggaccttacaagatggaaatctccatctcagacctccagtaaacctcaccagggcaccgatgtctctagtcgttctgttcatcatgattgtacagaaactgagcttgatggctcagaatcaactccaaatgtgcggagtgataaagc

SEQ ID NO: 45987 - DNA, 399 bp, Glycine max
gtgggtttagaaatgcatacaacatggtgcttcacaaatttggtgagaagctctactcagggctggttgcaaccatgactggacatctcaaagatatagctcaatctgttgaagctgctcaaggaggttcttttctggaagagctgaacaggaaatggaatgatcataataaggcgttacaaatgatcagagacatactgatgtacatggataggacctacattccaagcacccagaagactcctgttcatgaacttgggctgaacctgtggaaagaaaatgtcatctattccagccagatcaggactcgactattgaatacacttctggaattagtacatagtgaacgcactggggaagttattgatagaagcattatgagaaatataacaaaaatgc

SEQ ID NO: 45988 - DNA, 368 bp, Glycine max
aaacttaatcgatcatcacttcacttcactaatacatcatggcagacgagacccagaacaaggatgagagctatgaggttgtggtccacgatcgtggcgtttctgactttctcggtgagaaaaaggatgaagaagacatgcctcatcctcaggaggaggtcatcgacaccgagttttaaaaagtcactgtctcagaccaaggagagaacaagcacagtctcttagaaaagctctaccgatctgacagcagctctagctcttcaagagaggaggaaggagaagatcgacagaaaaggaagaagaagaacaacgaacagaaagggctgaaagagaagatcgaggagaaaatagagggtgatcatcatcat

SEQ ID NO: 45989 - DNA, 389 bp, Glycine max
gtagttgagaactaagaagaaggaaatggcttcctcaatgatctcctccccagctgttaccaccgtcaaccgtgccggtgccggcatggttgctccattcaccggcctcaaatccatggctggcttccccacgaggaagaccaacaatgacattacctccattgctagcaacggtggaagagtacaatgcatgcaggtgtggccaccaattggcaagaagaagttcgagactctttcctacttgccagacctcgatgatgcccaattggcaaaggaagtcgaataccttctaaggaaaggatggattccttgcttggaattcgagttggagcacggtttcgtgtaccgtgagcacaacaggtcacctggatactatgatggacgctact

SEQ ID NO: 45990 - DNA, 455 bp, Glycine max
attcaagggtcaattgttccgactgatgcaacaactagagagtactactccacattttattcgctgcattaaaccgaataatctccaatcacctgaatcatatgagcaagggcttgtattgcagcagctgagatgctgtggggtcctggaagtagttcgaatatcgagatctggctttccaacaagaatgtttcaccaaaagtttgctagaaggatccgcttagtgtttcagttgcaattcttcatcagtttaatattttgcctgagatgtatcaagttggctacacaaaattatttttccgaacagggcagattggtgtgcttgaagatactagaaatcgtaccctccatggcattttacgtgtccaaagttgtttcaggggttaccaagcacgtcattctctcaaggatcttcggggaggaatcactactttgcagtcatttattaggggaga

SEQ ID NO: 45991 - DNA, 287 bp, Glycine max
ctcgagccgaggacccaaagcgtctcttcgaaggaaacgcgctcattcgccgtctggtgcgtgtcggtgtgctcgatgagtcccgcatgaagcttgattacgtcttggccctcaaggtcgaggatttcttggagcgtcgcctgcagacctgtgtctacaagctcggtcttgccaagtccatccaccacgcccgtgtcctgatccgccagcgtcacatccgtgtcggcaagcagatcgtcaacgtcccatccttcatcgtccgtcttgactcgcagaagcacattgac

SEQ ID NO: 45992 - DNA, 496 bp, Glycine max
cctccttaccagcacaagggttatggtcgattccttctagaggtgctatatgatgttgctatatctgaaaatgtttttgacttcacggtagaagagccattagatcacttccaacatgttcgtacttgtgttgactcacttcgcctgcttcagttttacccaattcagaatatagttactaaagctgtttcacttctgaagcaaggaaagttatcaaagaaagcaaattgtcctcgacttttgccacctcccagcgcaattgaggatgttaggaaaagtctgaaaattaacaagcagcagtttctccagtgttgggaggttttgatctacattggccttaatcctgttgacaagaacacggagaactttgttagtattattttgaaccgtgttaagtatgatatcttagggaaagattctgggacgtctgggaagcagcttattgaagtaccaagtgatgttgatcaggagatgtcatttgtcatgttcagatcag

SEQ ID NO: 45993 - DNA, 444 bp, Glycine max
agaaaaagtagttgtcaaagttcaaaggcctggcctaaagaagctttttgacattgacttgcaaaacttaaagctgattgcagaatattttcagagaagtgaaactctaggtggtccaacgagagattgggttggtatatatgaagaatgtgcaacgattttgtatcaagaaatagattatataaatgaaggaagaatgctgataggttccgccgagattttcgaaacataaagtgggtccgagtacctctggtttattgggattatactgcatcaaaggtgttgacattggagtatgcaccaggtatcaaaataaatgaagtggatatgttagcttcacgtggttatgatcgattacgaatctcatctcacactattgaggcatacttgattcagatattgagaacgggtttctttcatgctgatccacatcctggaaatctt

SEQ ID NO: 45994 - DNA, 312 bp, Glycine max
gtcgaatgtttctagttgttttacatgtcatttcttacagctgccacactcatagtgaactaaatattgtcacactattgatcatacgaaatggtacgaaagagtacgttgagtgttatggctacgtaaagaatatgtagaataacatataatacattcagtggaacttgagactggtcaagatgttgttgtgcacggtgtcagtcaaatgatctaggaggttttggtatgggccaacacctgtgacatgagcttgtacacagcagcccaagattgccaacatagccaaccttacattcttaactggcttga

SEQ ID NO: 45995 - DNA, 447 bp, Glycine max
gtctatgcataagttaattcatttaatctagttattttgtttattccgttaacacttatgtatctatgctatttataagtgtaataaataaatgaaatggcatggtggtggtggaattgagttgatttagcatcatttgcattgcagccttccgggtgactatggatttgaccctctgggactttcagaccctgaaggaacaggagggttcattgagccgaaatggctagcatatggtgagataatcaatggtcgttatgcaatgttgggtgcagttggtgcaatagcacctgaaattctaggcaaggctggtctgatccctcaggagacagcactcccatggttcagaacgggtgtgttcccacctgcaggaacctacaactactgggcagactcctacacactgttcgtgtttgagatggcactgatgggatttgcagagcacag

SEQ ID NO: 45996 - DNA, 328 bp, Glycine max
gagcaagttgaagagactgcttctttctgcaaataattttacagggaccataccagaaacatatagcaaactaaagaatctcactgagtttaggatagatggaagcagtttatctggaccaatacccagtttcattgggaactggaccaatcttatcagactggatttgcagggaacaaatatggaaggcccgattcctcccactatatctcagttgaaacttttgacttgaattgagaataactgatttgaatggaggaccaagtatgacattttctgaactgaagaatttgacaaaattgaaacgactggaattgagaaattgctt

SEQ ID NO: 45997 - DNA, 353 bp, Glycine max
atctgaccaactagagaactccaatctgcatttaactcctggtacagaagttgaaattatttggagaaaataaattggccaaaaaggctttcaatgattttaatcagctattctggataggaactaatggcatttggcctccgtatatatccgggatttgactctcctctatctcttctagcaatgttgatttcagctttttgttctccacgaatacgatctttttcttggtattttcatcaatgaaagggtaaatcattttccaaattttcataaacatataaggtgcgtgtacaataagcatcttccccaatctttcagggtagcaatcctgcaaaatggatagagaatta

SEQ ID NO: 45998 - DNA, 404 bp, Glycine max
actagattcatttgagattgttcttgcaggtgctggtggtcacagtaaggaattggatggtgaaagtacccttggattctgatgagttgtatgaaatacaaagtcatgaatctagtttaaagaaaaaactcatccctcacactaaccaattcagggttctagacaaagctgctgttctacctgaaggcaatgaggcaaggagatggaaagtctgcacagtgacacaagtggaggaagtgaagattctgacaaggatgatgcctattcttctaagtacaatcattatgaatacatctttagcccaattacaaaccttctacatccaacaaggtaccttaatgaacacatacattggcaaactgaacatcccagcagctttcattcccataattccattagtattc

SEQ ID NO: 45999 - DNA, 486 bp, Glycine max
  unsure (1)..(486): unsure at all n locations
tgacaattggtttgatgcagtagcagtgtcagctgaggttgcggcggagaaaccaaatccaactatatctctcaaagcatgtgaattattggatgtaaaacctgaggatgctgttcatgttggggatgaccgcagaaatgatatatggggtgccagggatgctggctgtgatgcttggctttggggaagcgatgttcactcctttaaggaggtagcacagaggattggggttcagattctttctaagagatgtatcacaacagcagatacatggaggaggatcaacttaccaacatggagtgtgaaatcctcaaaggattggactgaaaattaagtattccaacaacatacctctttctagaaattcaagacctacgagcctatgttgaccacagcgngttgcagcacacttatctcatcttgttgatatggtgattcacacaagggaaagtcaaaggtagtttttcttgatatggtgattcatga

SEQ ID NO: 46000 - DNA, 493 bp, Glycine max
attgaagtcaaaagccttagccttccctacaactccaaacacaacgacatcatcatccatggctgcctgcgtctccactgtcggagctgtcaacagagctctttggaacctgaatggttctggagctggagcttcagctcccagttcagccttctttgggaccagcttgaagaagggtattgcctcaagggtccccaacagcagggtttccggtggaagcttcaagattgacgctgtagaagagaagagagagattgaagagacccagcagaccgacaaggacagatggaagggtcttgcctatgatatctcagacgaccaacaagacatcacaagaggaaagggctcggttgactcccttttccaagctccacacgatgctggaactcactatgcagtcatgagctcctacgagtacctcagcactggacttcgccagtacttggacaacaaaatggatggattctacattgctccagcttttatggacaag

SEQ ID NO: 46001 - DNA, 406 bp, Glycine max
caacaggggaaagtggaaggagaacgcaaaagggtacccttgttttcattgtctcgattgttttcctattgtcatttatcatcataaaccttcagagccatgagcccagctttgaaaacaatatcacaacggtgccattactacctatagctagaggggtcgctgagggtgtatcagccaagtcaaatccatatctatcacagaaagcttcatataattggacaaatgccatgttatcttggcaaagaacagctttccattttcaacctcaaaggaactggatgaacggtccattgttttacatggggtggtaccatatattttaccaatacaatcctgattcagcagtgtggggcaacataacatggggccacgctgtatccagagacttgattcactggctcta

SEQ ID NO: 46002 - DNA, 452 bp, Glycine max
gatgactagcaacatgcatgtatcggaagatacaattagatgcgtcgactacaagtgcttcactctcccggcttactcttcttccccaatccctcccgtgagctgatacttttggtgtcgatgacgacaggaaaaggagagacgccacgcgacgcttagctgctggtaaagagcatgcggtatatcctcttccaccacggagccagtcgtcgctcggccttgtactgcctcatctcctcgacggtgagccaagactttcggccggtgtccaggtcgatttcggtcgtctttcggggcagagttcgcttccaggcgtaaccgacaacccagaatgcgagcaggatcgggaaggccaggtacgagaggaagaagctctcagcacgggcgttgccgctctcgacgcctccgagggggaagagaccgatgtagaactgagcgatgaggacgatcac

SEQ ID NO: 46003 - DNA, 497 bp, Glycine max
atcaagtgtagtatctgttcttatcagtttaatatctgatatgtgggccattggtccacacgatattaaattacttttttaatggggagagaccaacacagtagcttgctattgggtctctcgcgtgtcgtccatgcgttgcactatagcttgggcctggcacaccctacgtttagtcaaactttttcagttagtttgggttttctaatctcgtatgtggtgggagtgccacggtatgggttgctataggcagaaactgattatggtcaggtttagatctctactttagctaataatagtgagattatttgcttctcttcgtgacgtattttcatatgacaatctccttcagcttgttttatgtattattcattgagattatcagcattattattgcagtcagttataccgttattgatttacttggttagtaaccagttttacagctgcatttatgtaaaaaccgaagttgcattaaattatatttttacgtagtt

SEQ ID NO: 46004 - DNA, 449 bp, Glycine max
gtacacttctggatcaacgggcacgccaaagggtgtgctgatcaagcaccgcaatatcgttgcagccatcgctggtgtcgatgtcattgtcggcaagtacctcggacccggtgacgttctcctcgcctacctccccgctgcccacatcctcgaattcgtcttcgaaaacgcgaccctgttctggggtggcacgctcggctacggcaccatccgcaccctctccgatgcctccgtccgcaactgcgctggtgacattcgcgagctgaagccaactgtccttgttggtgtgccgcaggtgtgggagactgtgaagaagggcatcatgtccaaggtccaggctggcggcgccgtcaagagcaacatgttctggggcgcattcgcagccaagaacttcttgctaggctctggcctgcccggcagcggtatcctcgatgccattgtcttcaaca

SEQ ID NO: 46005 - DNA, 361 bp, Glycine max
gaataggattgcttgtatcccaaggatgcgagtttggatatgttgttttctctttagcaaatacgcttggggtgcttcctcttgagctcaacaagctgctcataattgtggttgtattgtcaatggcattaaccccatttctgaatgaagctggaagaagggctgctagctttattgaagacaaatttgatgctgagaataaacagaatgcttctgagaccgttaacttcaatgttagtgaacctgctgttatccttggatttggacaaatgggccagcttcaggaggagatagtgatgaagtatgatggccttatgtggcatttgatcttgacccctcagtagtaaaggcagctagaaaa

SEQ ID NO: 46006 - DNA, 473 bp, Glycine max
aaaatatgatgcttcataacaaatgttgtagcattagtatacaagtgtataactatgagatcggtgcctttacaagacggactaagctagacgactgtaaaagaatggtctaaagaaactatgaaagatagcattttaaagatctttggcatctggctggcggttaatcatgtgagaaaccacaaacttgagttcatttattgcagcttgaacctgataatcatcttgttccccctgccctgaccatcttagagcatctgcactcaatccattgtattcaaatgcagcaacggtagtcttccgggaagtggcaaggaccttctccaagtctaactgggacaatggtctgggagcagaaaaacttctccctttcttctcttcgtccagcagttctctaattggaaaataggcagctttcttgcagaggtcaaatagatccgaaccagtgtaaccttcacataagtaagctatat

SEQ ID NO: 46007 - DNA, 272 bp, Glycine max
attgggactgggactaataacaatagctctacaccatttggtggtggacagagactatgccctggctatagaactctcaaggctagagctctctattttccttcatcatcttgttacaacttacagatgggttgctgaggaggatgaaattatttactttccaacagtgaagatgaagaggaaactcccaattagtgtaacaaccattaattaacacctgattggattgaagaatcaacaaattcttgtacagtactagtagtatagataga

SEQ ID NO: 46008 - DNA, 277 bp, Glycine max
ctcaatcttgagactttggctgctgcaagaatgtcgactgcatttggtcctgggggacataaccattgtggtgatttaccaaccaataatttagcctttggcacccattcagctgatgcccagctaaagcaagagctggctgctatattaaagaagatcggggagaagcaaacttgcacaattggtctatatgaactatactcgcattaccgaattgtacccaaaggtcgacatatttgctacagttcaaaacgctagtgaggcatttcgcacctac

SEQ ID NO: 46009 - DNA, 404 bp, Glycine max
ggaatccagttctgcttgatggtctgtggcgcctccggcacgggcaggaccacctttgtcaacactttgtgcggcaaacaggtcttgcagccaatggacgccgatgacccgaccaccgcacacattgaggagggtgtcaagatcaagcctgtcactgtggaactggagcttgacgaaggaagcactcgcgtgtcgctgacaattgtcgacacccctggctttggcgatagcatcgacaacgaagctgccttccacgagatagtagacttcttggagaggcagtacgatgacatcctggctgaggagagcagaatcaagcgtaacccaaggttccgcgacaatagaatccacgtgctgctctacttcatccagccaactggtcacggtctccgcgagctcgacat

SEQ ID NO: 46010 - DNA, 460 bp, Glycine max
cttaattaattggattacaaggaacacatagtccacaacaatagcagcgaaacatgccgaaaaggtatataaatataaatactaacacatacaaacggcatttattgagatagctcaacgagttgcatgcatggagttatgggtacacaactaaaattgcaagaaatggataagttctttcaaattgatcgaaaatcacatccttatcgtactctttgcacgtctgcaactctaacaatcattctggggttggcaacaacattaaatatttggcctcatgctcagacgagatgctatcttttggcctagagaacggtcagcctgagaccagtaagatatccagacactgcggatttcatgggtgacccgtgggtcagataaagcatcaggtgcccaagatcggtatctctctccgggctgcttaaagttgttctccttctcaattccacacttttcacgc

SEQ ID NO: 46011 - DNA, 481 bp, Glycine max
ggtacgacactcggcttaccgagaaattattactacgagcgatttggtacacttgccaaagagctaacaggcatcataaatttttagatgagcaaggatcactaatctgaaacaaattcaacttaaaaaattaagtctacaagtttaaagtttggaaaccaaatggtagaatttttagaggacaagtcaatgtcaaactgagaatcaactctgtttccacagcttagccaacttatccaacgaagcacgtgatgttccgccttcagccattgcttccgcagcactcattttcatcttgaaaatcctctgacgaatctctttccctttgtctgattccatgagttccctaactcggtcccccaactcagtcgaactcacgaacccatccttgttctcgttcaccgtcaaagccaccttcatttccttcaccataaccatcctgttcatcttctgctccgcgtagagaggccacgccaccatc

SEQ ID NO: 46012 - DNA, 431 bp, Glycine max
atacttaatcgatcatcacttcactttactaatacatcatggcagacgagacccagaacaagtatgagagctctgaggttgatgtccaggatcgtggtgtttttgactttctcggtaagaaaaaggatgaagaagacaagcctcatcctcaggaggaggtcatcggcactcgagtttcaaacagtcactgtctcagaccaaggagagaacaagcacagcctcttagaaaagcttcaccgatctgacagcagctctagctcttcaagtgaggaggaaggagaagatggagagaaaaggaagaagaagaagaatgaatagaaagggctgaaagagaagatcgaggagaaaatagagggtgatcatcatcatcacatggatgaggacacaagtgtcccttgtgagaaagttgaggttgttgaaacagcacatgc

SEQ ID NO: 46013 - DNA, 492 bp, Glycine max
gtcctttttttttttttttttccttgagataattgtttctcttgaataaaaattgaagccttgttacgaaaatgcatactccttgtagcagcttaacgaaggagacattaagtattcagatactgaatccatccaagtcccttgaattatgaaactcgtgaaaccatagatagcactgaaaggttgatttacacatagcatatatatatataacccgctgttgaagttttttaagcaacactgaaagaacttgctgcgctctccacaaatcttcttgctcccttaaaccacctcttgtctccagcttgagccttgcaaatgaacagtttgtccatcttttacagttgctctaattatgtggtgcttgccaccttcatctccatcagcagttcttgtcaacacagacaagaaatatgtatggcttcccgtcaatcacaggtgttgcagtctctaagatgatagccgtggacactgcatttggatcaaaaccac

SEQ ID NO: 46014 - DNA, 202 bp, Glycine max
aacaagttgtcgagaactaattttgattttcaaatggcttcctcaatgatctcttccgcagctgttaccactgtcaaccgtgccggagccggcatggttgctccattcactggccttaagtctatggctggcttccccaccagatagaccaacaatgacattacctacattgctagcaacggtggaagagtgcaatgcatgc

SEQ ID NO: 46015 - DNA, 412 bp, Glycine max
cactcaactcactttattatattgaataaaagatacaatcattaaatgaaaaataactcttggctacttattcggggttaccatcaatagtaacacttctcaaaatctcacctggaatcactacaactagtgggtataaggcagaataaatttgctctaggagcaatgtatttttcaacgtctcaaagatgcatattgctcaaagttcaccatcccagaagtcttcaatgctcctataggcaccataggtctcgtgaacaaaaaaactggccttaactagcctttcctgcatgagtaaactccatgtgttaactagcatttttgttgatgtagtaaaagatgtataggaaatagtaagaatcaagaaaaagaacaaaaaagaatatcatacgaagtatctaactacttgcct

SEQ ID NO: 46016 - DNA, 355 bp, Glycine max
agtaaaaatgtggtgttggcactagagaactttctccattgccaaatctcaaacgaggaatcacacaacttcaaaacaaacattaacttagcttgaggacgcactcgcggattcacagactaaacttaatgatttattcagtgatataggtacatcagattgatatagtatgtgataagttagtctggggagtttgtaacatcatcccaacgccatattgtcccatcctcacagcaactcaatatagtacttccatcaaaggacgtagcagtctgcctgattggagattttgattgaggatgtgacaaccttgcaacaagtacaggaggacttgactgcaattcccaaacaaaaa

SEQ ID NO: 46017 - DNA, 364 bp, Glycine max
aattcggctcgaggaaatttagtgcccttttcagagtgtcaagagcacagtttccttatctagatttgtctcctctcttttcccaagttgtctctcactttggtgctaaccgtgtaatgtggggcagcgattttccatttgttgttgctgaatgtggttacaaaggagccaaagaagcagtgcatcttattgccagtgagatctctttgcctttatcagatttagagtggatcatggggaggacagctacacaactcttccaaaaccaattgactccagtcaatagttgagagtggggatgctgtttgagttgtataaaaagtttttagctgttatagtggaaattagatgttgaatacttgaa

SEQ ID NO: 46018 - DNA, 416 bp, Glycine max
aaaataacacacacttcacacatcattacgacaattaaataaaataatttttattagttaattattaattaatttatagatattatttgattttttttaatagatcgattactactaacctggatgacggctttaatgttttcatcagtcaagggaaattccgacgattccttttgaaacttgagaagaacatcaactagatcttccactgcttcacactcctcgttgctgctgcttctggttctatttttgtgttcgtcgatgatgtcttgcaataccctatctgtcactttatgcactttttcaagtttccccgaagcccccatcatctgaagcactctactagaagggtagagatcagcaacagaaaaccctcccataagcttcaactgtttatcaatgtttgatatgaacac

SEQ ID NO: 46019 - DNA, 374 bp, Glycine max
gctcctgtcacatttcctaacactgatggcatcaacccaggccagtatttcataatcaacttcaaattcttcaaatatagaataatgtatagcaagccaagtttttgatacaatgtaaccaaagaataaagcttggtttgaatgctaatatttgctctacctatttttctttctttggattttttctcatcagattcttgcacaaatgtaagaattgaagattgctatatagtttctggtgatgactgtgtggctgtaaagagtggatgggatgagtacggcataaaatttgggtggcccaccaaacagctaatgataagaaggctaacatgcatttcaccatacagtgcaaccattgccttgggaagtgagat

SEQ ID NO: 46020 - DNA, 109 bp, Glycine max
gtggcctataatgctcccctatatttccacaacacatagctcatgacacgtctgaccgacactctggatgagagtgagggaccctttgaggtgtcttctgatggcactg

SEQ ID NO: 46021 - DNA, 289 bp, Glycine max
cactcttagagccttgtttactccagtgacttgagtgaccacaagcgcaccgtcttgtcaccgcttgcgctggcaatcacgttggaatgaattggatggcgcactactacatttacaacacttgagtgtccatcaagcttgcccacttgcttaccgctgtcgcgctgccacaaatacactgcaccatcttcacttccagagagaacaagctcgctgtggtcacctccaaaacatggacgaagaatgtatcggtgctcgcgaaacccgcggtacttggctatcacaaaac

SEQ ID NO: 46022 - DNA, 431 bp, Glycine max
tccttaaccaacttactcatattttaatgtcgcacagaaaattcagagcaccccgccgtggttcattggccttttcacccagaaagagagccaacagacttagaggaaagatcagatctttccccaaggatgaccagagccaagctcctcaccttaccgccttactcggatacaaggctggtatgacacacattgtgcgtgagctcgaccgtcttggatccaagctcaacaagaaggagatcgttgagcccgtcaccatcgtcgagacccccgctctcatcgttgtcggagttgtcggttacatcgagactccccggggactccgctctctgtccaccgtgtgggctaacttcctcggagaggagctcagacgtaagttctacaagagatggtaccaatccaagaagaaggccttcaccaagtacaccaag

SEQ ID NO: 46023 - DNA, 409 bp, Glycine max
aataaaaacaggatctttaattatttaacatattaaacggtaaatcacatgtaaattattgatcaaagaaaatgacgagtcacatgtaattcttccttgcacaaagctggtttggtgtggatatttcttcatatatcctcgtagaagaattttttaaaaagatccataagtgctgtcaggaaattcatggaaataagaacaccatctccatcagggcttataataatatgtgccctaacttctcgaaatacttttgctaaaccaaagtgcacaggctttccccaaccaaaatctgcatcatacactggcaagctcatccagcttgtgatgagaatgttatgaggattcccagaatagggttcattaataaggtctccttgtcccgagaaaaaagcccttatgttatcca

SEQ ID NO: 46024 - DNA, 343 bp, Glycine max
gtgtttttagcgaagagattaaattgttaaaggaaaagtatgaaaagaagttgaaagatgctgctgccagacaacttatgcttgctgaggaggctgcactgctggatagggagcttaagatagagagagcgaaagcatcccttgctatcaattcacttcaagataagatggaagagaaactgaagacagaacttgaacaaaaggaaagtgaagcagaattgaagttgaaacaagctccagaattagcaaaggcagagataactgcacacatagcaaatgagaaggcagctcaaattgaaaaaatggctgaagcaaatgttaatataaatgccttgtgcatggc

SEQ ID NO: 46025 - DNA, 487 bp, Glycine max
gaagagggaacaatttaggaaaataacaatgatgttgtgttggtagcgtaaggtggaaaaaagagggtctttccttccctaagctatggctcctgctgggaagctttctgggcttcgtcgagaaggcagtgactggttctgcaatgggggactgccaagtgatataactgtttccgtcgatggtgtcactttccatcttcacaagtttcctcttgtatcaaaatgtggaaaaattgctagagcacatgaagagtccaagaataccaatgagactctgaaaatggtgctggaagaatttcctggtggtcctgacactttcttaattgcagcaaaattctgttatgggtatcgagtggaactgacagccagaaatgtagtatcggtccactgcggtgcagaataccttgaaatgacagatgaatttggagaaggcaacttgttgtcaaaatcagagagttttttccataaaaacacactgcgtaactgg

SEQ ID NO: 46026 - DNA, 170 bp, Glycine max
atcatatccttttttatcgcatagttcgcatcctttaagcgttggtgggggcggggctggtgggagcaacggccttggcacggggaccgaagaacttggtcttctcctcgcgagtctggaagcgaccgtgttcgaacttggaagaggtgtcgatgaacttgagcttgatc

SEQ ID NO: 46027 - DNA, 459 bp, Glycine max
gtgaaactccgctcaacttggaactgtctttctggacacatatatgattctggtccaatagatgttacaagtgattttggcttccgcttcacactacacccctccattgtaaaagtgcctggaccatcaaaacttgtttcttgggtagcaaaatctgttacctctggcttggatgctttgtacctaactagatttgaatcccaagctgctgagcattggcaggctttatattcttctgataattttggagctccatttctcattttatgttctgagaatgatgaccttgtgcgataccaaagtatctatgaatttgctcaacaactacgcaatctcagtggtgatgtcaaccttgtaaatttcagtagctcctctcaccttggtcattacaaacaccatccaattgaatatagagctgctgtgagccatttattagagaaggcttcttcaatatattca

SEQ ID NO: 46028 - DNA, 449 bp, Glycine max
gttgagaactaagaagaaggaattggcttcctcaatgatctcctccccagctgttaccaccgtcaaccgtgccggtgccggcatggttgctccattcaccggcctcaaatccatggctggcttccccacgaggaagaccaacaatgacattacctccattgctagcaacggtggaagagtacaatgcatgcaggtgtggccaccaattggcaagaagaagttcgagactctttcctacttgccagacctcgatgatgcccaattggcaaaggaagtcgaataccttctaaggaaaggatggattccttgcttggaattcgagttggagcacggtttcgtgtaccgtgagcacaacaggtcacctggatactatgatggacgctactggaccatgtggaagctgcctatgtttggctgcactgatgcttctcaggtgttgaaggagcttc

SEQ ID NO: 46029 - DNA, 489 bp, Glycine max
cgaaaaatagctccaggcaacgtttgaaaccggatttgtcaaacccatccgacaaccatggagtaccgcaacaaacttgttctcgctcctatggtccgcgttatatcacttactgcgaggaaatcattgaccacaagatgctaaagtgcgagcgccgaattaacgaactcattggatccactgattttgtggagaaggggacaaacaatgttgtgtttagaacctgtgatgaagaaaaagatagggttgtgtttcaaataggaacatcagatgctgtgagggccctaactactgctcagctagtgtgtaatgatgctgctgcagcagatattaacatgggttgcccgaagtcattttctgtgagtggtggaatgggtgctgctctgttgtccaaaccagagcttattcatgatatcttaacaacattaaagaggaatttgaacacaccagtaacatgtaagattcgacttctaaaatcaccacatgata

SEQ ID NO: 46030 - DNA, 385 bp, Glycine max
gtgataatatatttgttctaattggtgcatttccctctgatgtctaaatggcattagtaattaaaattagaacgaccctaaaccttggtttccaccccctcacagtcacttttgccttcatagcaatcagcccactgttaacttttgcacatttttgtaaggaatatcgaacgggcaacaaacacaaacaagaacaaattcaccgtggctatggctgccaatagccaatagaatttgtccaatcgactactattcaagtccttaccaaaccaacttttcccactcttcttagtgatgtgatcaacaactgttatcagcatactacttaggaaactcgctgcaccaattacactaaggtaaaatgctatgcctaggcttctcattg

SEQ ID NO: 46031 - DNA, 456 bp, Glycine max
cattccaaaaccaaatttattactaaataagaataagattcgaatccatcccaagttactcactaacacgaccacattgtcataagacaaaaaaagatacagaaactacataattacaggagaaatctaataggtcatgttacttgaagttttcccgaatcaattaaaggcgaaaaaaccaaacaaaacagaaaccaacgatttttcagtaaccattctaacaaattccacatggctatgtagcgggatgctttgttcagtcctgaagaaattgctaggatcaaccttggtctttatttgaaccaaccttttgaagttatcatcgaaatattggactccatatgcactcccttcaaagtagccatagaaaccgtggtggttgatgcccaattctaagtccttgtaacatataaaagcttgtcttggattctgagacacaaagggtgtcatgtattt

SEQ ID NO: 46032 - DNA, 470 bp, Glycine max
gtagatttcaaagatacttttgtttatgctgatcacttaaaagaaagttttgtggattatgaggtgtcttttgttaattctgatggctcagaaaatttgaatccaaggcctccttttaagatcaagcttccccgaacactcaaacctaacaatggtactcttactgggcatgcaatgtctacttccggtgcaacaaatgatatcaatgtggttgatgcaaattatcagaaagaagcactagttattgagacatatactcctccagatcctggcccctatcctcaagatcagcccaaacaaaatttagttagattcacacccacacaggttgaagcaatcatctctggcattcagcctggtctaactatggttgtggggccacctggtacaggaaagactgatacagctgtacaaattctaaatgttctttaccataattgtccttctcagagaaccttaataattactca

SEQ ID NO: 46033 - DNA, 430 bp, Glycine max
gatctcttgttcttgtaatatatttataaaaatttttcttattaacatgaattttttctgggtatttgtgataaatttttcgtttattcttttgaattaatgaaagacctatggtttgatacaataaaaaattgtttattgttttttctaaacagggcgaactggttcaataacaaatatttcttttttcataaatttgttatttttctttttccttaagcctagaagaattaaattcttctgattttgaatcatcataatatctagacctagttctcctctttgaatagaggctattgtaatttctcttaaattttttaatctaatcaggagacaatatacatttaaattggaataatttcttaggtcaaagaatatttaacaatgtcaaagtatattgtctcctgattaaattttttaatctaatcag

SEQ ID NO: 46034 - DNA, 434 bp, Glycine max
gttcgggaataaactctttatttggacaatgcttcctgctctttcaaaaccttctttcggaggacctccttgtagcccacaatgtcacccttccacttgttgatacctccgtgctcacagatccaaaatttcatcagctatctgattgatcaatctgaaatcgtggcttaacaacaccactcctccctcaaattcgttgatggcgtcagcgagagcatcaatagtttcaatgtccaaatgattggtgggctcatccagcagcaacagatgaggagtctgccatgctaaccacgcaaacaccactcgtgtcttctgtccatctgaaagcagtcgaatcagagtagtttgggcttttccagtgattccaaacttgccaatgatctgtcgcattctctcgtactcgacttcacctggatagcacttcatcatataat

SEQ ID NO: 46035 - DNA, 425 bp, Glycine max
gtcgcaaggacgccgcaaagatcatcacacagcaagatgaccgtctcctggtcatggttggaccttgctccatccacgaccctgagaccgccattgagtactgccagcgcctcaaggcgctcgccgagaagctccaggacaacatcctcatcatcatgcgcgcctacctcgagaagccccgcacaacagtcggctggaagggtctgatcaacgacccggatattgacgagagctaccagatcaacaagggtcttcgcgtctcgcgcaagctctacattgacctcacatctcaaggcatgcccattgcctccgagatgctcgacacaatctccccccagttccttgcggacctcatctccctcggcgccattggtgcgcgcacaacagagtcccaattgcaccgtgagcttgcttctggtctttcg

SEQ ID NO: 46036 - DNA, 420 bp, Glycine max
gcccagggctatggatccttgggaatgatgacattcgagcttatgacccccgatggtctgactatggagtctgaggccgcacacggcactgtcactagacactacaggcaataccagaaaggccaggagacgtccaccaaccccgtcgcctccatctttgcttggacaagaggtcttgccttccgagccaaacttgacgacacgcccgctttggccgaattcgccaaggatctggaggccgcttgtgtcgaggtcattgacaaggacagcgtgatgacgaaggatctcgctttggccatgaagggaaagaacatgcagagaggggactgggtcaccaccgacgagtacatgaaggcggtcaacaacaaactcatcgagaagatcaaggcgaggacatctgcatagtgttggctcgacata

SEQ ID NO: 46037 - DNA, 426 bp, Glycine max
ctcgtcgtcaccatgccgcaaggggattacatagagcgtcacagaagagactatggctaccgtgtcgatcacttcgagcggaagcgcaagaaagaggcgcgtcaagttcacaaacgctctgcaattgcccagaaggtttaaatcaaaaattttgtttttaattggtttttgtttaacctagttctattgtcttaattctaattattcgatttttgttaatttgaattgaacaggctctgggtattaagggcaaaatgattgccaagaaaaattatgctgaaaaggcacagatgaagaagactttggctatgcatgaagaatcaacttctaggcgcaagactgatgataatgttcaggatggagctgttcctgcttatctccttgatcgtgataacacgaccagagcaaaggttcttagcaacacca

SEQ ID NO: 46038 - DNA, 240 bp, Glycine max
gttaaagggctttgcatgcatgggaacttgaaccagagcttgcagcttttggataggttgacgaagaagggactcgtcccaaatgcattcacgtattcgttccttctcgaagcggcatataaggagaggggggtggatgaggccatggagcttttggatgatataatagccaagggtggggagcctaatttgagtagttacaatgtgttgataaccgggttgtgcaaggaagggagaact

SEQ ID NO: 46039 - DNA, 418 bp, Glycine max
ctcgagccgaatcggctcgagattcttttttctaaattaaacaaggcaaggactaactcccgaactgcaagtaaaaaaaatgatagaatagaatatagatttatctataagctctatgacttgtaatagaacttatgcttgatagaaaggttattatcatatagagttgacgaatgagatgaagttgagttcattaaataaagacgaaaagataaaggtggatcttattgttattggatctgttgctgttgatccaaagacaggtgctcgattgggaaagggagagggatttgcagaacttgaatatggtatgctgaggtacatgggagccatcgatgattcaacacgagttgttacatctgtgcatgactgccaattggtggatgatattccagttgaaaagctgttaatccatgat

SEQ ID NO: 46040 - DNA, 489 bp, Glycine max
aaacaatagtttaggaatgtctacacttggctttaattcaggctttacaccgaaacgtaggaaaacaaggtttacatgtccccctcacgagctagcaaaggctacctagcttagacccgacacaattattgtccatactccgtagagttgtggtaaagaatataatacaggaacaaggtacatgaaatcagcatatagtataaatattctccaaaattgatggggcatttgcccctgcaatttgttatgcgtggctactcaaactcgtttcctttccactaccgatcaatttttggaattctctacacttagcaactcgtatgtcaagtatgctgggaggcattggttttagggagccgtgcaactctactagatggaagaactcttgtttggttaagcttttcttctcaacaagctcattcaccaaagcatccatcagcgttctattttgctccaggatctcttttgcacgttcataacacgagttga

SEQ ID NO: 46041 - DNA, 431 bp, Glycine max
catcaaaattagtagagcattaggagcattgttgatttagtctgtatcacataagagactttacaaaataggtagcaatgcatagaaaggcatatataatttagtaccgtctaaaggtaagattcaagcgaccagggcgtagattagtatgttggagcaagaggttgggggcagtgtttggatgaatagaggcgacgccatggaatatatttctagaggggccaccaaagatcaaaacatcaccggactggagtagcaatttttgaggctggtcgagatccctgtggtcagcgtagaggaagtcagcagagtctccaatggagaaggatatgacgggcaagcctaggcgaagactatctggactttcatccttgtcctgatgaagacccagacggccggtttgggagtaaaagttgacaatgcagatgtca

SEQ ID NO: 46042 - DNA, 183 bp, Glycine max
accagcagcttcaagtttttctttagtgaacaaatcccaggactccttctctttctcaaatgaaactacctaaacttccaaataaacagttggggtaggaggaactaccaacccctcctgctgggactttgatgaaccaaaagcatattcaggcgcgatggtcatcagggcaacctcaccctt

SEQ ID NO: 46043 - DNA, 404 bp, Glycine max
gaatcaaatttgatcttttttataaaagatttacaatacatgtgcgcaaggaagtttacaattacatgcaagattccataaaaaaaaattgataaatgtatgcaatcaatttcatttgtcaatttgaatgcaaatgaagcctctcttcagctgagctcacaccctccatcttcaacattcctagtagaaaatcactccatgtgtgtataggccccggcaagcaccaatgcacacaatcattgtacaatgtcacattttcattaagccagtgcccatatctacttgggtgaccatctggtctcagcaatgatgcttgtgtgatatcaaatagcctatatttcaaacccttctttttggcttccttctccgcaattttgaactcctctaattgaatcatataaaac

SEQ ID NO: 46044 - DNA, 389 bp, Glycine max
ctgaagttacccaaaacttgcctttcaagtgtgttcagtttcttatattggtgtatttaattttggagtgacaagatcttggcttgggaacagtaaaagaaagcagaaagagcgagtttgcatttaagtctctacaggtgaaatctgagatttgcttcatgttttctcaaatctgtcaagaaatatcaatttcattgaacacacacgcattgctggttggaaactgaaccaaagagcaagacccatcattattgaccctgctctttacttatcaaagaaatctgatttagcattgactactcaacgaagaacacttccgacgtcttttaaactgtttactggctcagcttgggttgtactgactcggtcctttgtggagtattgtatat

SEQ ID NO: 46045 - DNA, 519 bp, Glycine max
aacatgcccatcctcgacaagatcaaagaggcattctcctcttcatcctccaaggaggacccgctccgccgactcggccaagagcacctccggaggcctaggcaacgagggtctgcctaatcttaccgccaaagacgacaagacggccgttacgcccagccacactgccgctacagaggacaagctgccagagctgcctgaaaaggctgtctttgaccacgacaaggtcactgtcatcttcgtgctgggtggaccgggagctggcaagggcacacaatgtgagaggatggtcaaagattatggattcgtccatctttctgctggagacctgctacgagccgagcagcaacgaccgggatctacatacggagagatgatccagacgtatatcaaagagggacaaatcgtccccatggaggtgactgtcaagctcctcgagaacgctatgcgagatgccctcaaccagccaccctctttcgaaccctcatctcctctcagcagtggatggcagaatggtcg

SEQ ID NO: 46046 - DNA, 485 bp, Glycine max
ctatgcatgtatgtctgcaatacatgtggaagcggtatgataagagcatgacacgcgcatccgcaaatctctccccctacaggtcatggaatccgctctagcagaccatgaccgacgctcgtctatgtcccgctgccttagaacgaccgcatctagacaacagggccgagctgaggaatcgctccatccgaagtcgcaggcaacgtggcattctcgagaggcttgacgctctcagtctgatgctttggcaaccgctcttccagcgccagagtgaccttggcgtatacctcgtcgacggaaggagacgagtcgacttcgacgactttgccttctttgcggtacatgtcgacgacgggcatggaagtctcgacgaatgttcggaaacgcttaacgatggactccttgttgtcgtccgcccttccggaagtcttgccccgctcgagcaatcgaccgagcatgacttcttctgtggtcgagaagaagag

SEQ ID NO: 46047 - DNA, 491 bp, Glycine max
gaaaggacaatcctccatagaatatttgcacaatcctctgtgggctgaaaccttaacgtggacaactccggagaaactcttgaaacctctcccacgcttcagccaaactctcctgctcctgcactaaattcccaatatccctctgtatttgatcagttttaactacagagaaatatttctcaaggaatttattaacgcagtcctcccaagtcgtgatcttgtgttcaggtaaagcacaaagtcaatcccaggctttcccattcagtgagaatggaaaagcatccaatctcacatactctgtgggcacgctttgcacattgatggtgccagtcaacctcaggtacgtggggtcttcagagtctgcctcatggaactgattgctttctataatctgcaagaagccatgtctcagctcaaaattgacttctgcccccagagttggcaacaatatgttattagctatctccacttgaggagtgagatagtctaac

SEQ ID NO: 46048 - DNA, 485 bp, Glycine max
agaccagaccagaccgggtatcagacacaactcaagcaaaagaaataagaagcagaaaaatggaaaatggcagaggcagattatactgttccattgagcgacattgctgcatcacgttctgactctgaatgataagagacaaacgcatagaccctgcgattccctttcctcaaatcttgcaacacccttacactagctacaataccaaatctaccaaaaagttgtttcaagtcttgaggccccgcactcctggaaagattgccaacatacaacttatgaggaccttcatagtatataactctcttgggtgatgagttcattgtttcaagattccttctcttgggattcatctcagctgaaaatctaacccgcacttcacgcccaccaaaatccttgagtcgtaaaaaaccgaaatttcagataaaacagcagccagaagatatgaacgaaatagaagcagggagtgggagtgactaaccgatgca

SEQ ID NO: 46049 - DNA, 517 bp, Glycine max
gtttggtggggaatcgcccttaacatgatcgcatattttgttgcttctcatgcagcaggggcgtgctggtacttgctggggatacaaagggcagccaagtgtctcaaagtgcagtgtgcgaaaacaagtggttgtggcatgaaaatcctgtcttgtcaaacgcctatatattacggaagcaacagtttgctagttagggataaggcaaggttggcttgggcagagaacagggaagtgagacacacatgcctaaatggtcctgacagctacaactatggagcttatagatggactgttcagcttgtcacaaacgataatcgattggaaaagatacttttccctatcttctggggcctaatgactctcagcacttttggaaacctagagagtacaactgaatggctagaagtagttttcaacatcattgtgctgaccagtggccttcttcttgtcactatgttgattggaaacatcaaggtatttttgcacgcaacaacgtcaaagaagcaagcaatgc

SEQ ID NO: 46050 - DNA, 458 bp, Glycine max
gtctttgccaaaatcgcatcactcgtcgcccccaattcacattccctcccccaccccctttctctccaggatctctcctcgtaccaccgccacctcgaaccacccctccaaggcggaacaacctcgtcctcacgcaacaaatgcctcagactctcactctacctcgccaccttcctgttcctaacttacctactcttcctcctcctctactcctactgggcccacgcttcctccgccaagtactacgttgtcctcgactgcggcagcaccggcacccgcgtctacgtctaccgcgcctacgtgcgcttcaaccgccacaccactctgccaatcgccatcaccttcctgagaaacccctcccacaagaagcctcccaccggccgcgcctacgatcgaatcgaaaccgaacccggtatcgataaattagtaaacaacgtgtctggtttgaacaatgcact

SEQ ID NO: 46051 - DNA, 499 bp, Glycine max
  unsure (1)..(499): unsure at all n locations
gacgatctcgccattatgctggcactaggtatttgaggcgaggtgtaaatgacaagggtagagtagctaatgatgtggagacagaacaaattgtatttgaggatgttcctgaaggtcttccagtccaaatatgctctgttgtccagaatcggggttcaatccctctcttctggtcacaggaaacttcacgtctaaatcttaagccggatattatattgtcaaagaaagatcagaattatgaagccactagacttcactttgaaaatcttgtcaaaagatacgggcatcctgtaataattttgaatttgattaagtcacacgagaggaaacctcgagagtccatacttcgttctgagtttggtaaggctattgatttcattaacaaagatttatcacaggagaacaggttgaggtttcttcattgggatcttaaacattttcagagcaaagcgacaaatgttntgctacttctgggaaaagtggctgcatatgctttgac

SEQ ID NO: 46052 - DNA, 531 bp, Glycine max
ggaaagtttgaatatatttagaaagattgtggatttggtggacatttgtcactctcagggagttgcattgcataacctgtgtccatcttatattaaattgtcgccatcaaaccagatcatgtaccttggtttacctgttcaaaaacagatggtggatagtgttgtaaattctgaagttgttcacttagataattcttttattagaaaaaggctgtcagagcaagtaacatttccctcccttgatatggggtcaaagaaaaaaaaatttaatgagaatgtgagagttactggtggtgacttgtgcctcgaaactgcaagtgataggaaacttcatagtcatacagttggatcacaagattattacaatgaatatgaggaaggtacccaattttctaaatataacattggaagaatgtctagcatccctcgcgtatctaatgcaggtcaaatgccattgacttcatgtgaaaaatttgaaaataaatggtacacaagtcctgagggaggttacacaacatcatcaaatatcta

SEQ ID NO: 46053 - DNA, 506 bp, Glycine max
ctggaatcaatgattcaattcagcatagacaactttgtaatttgcaattggtggatttgctgagcatgtgttatctgctcccttgtacatcatgccagaacatttcattcatgaacactccaattaacttcatgagattgtatgcttgtaaattttattgttgttaatcaatgataagctctatgttctttagtgatgagtaacattttggttctttcagactttgtcctcatgggctacttccagtgttgaagaggtggcttcaacaggacctggcattcgctttttccagctatatgtgtacaaggacaggaatgtggttgctcagcttgtgagaagagctgaaagggctggattcaaagccattgcccttactgttgataccccaatactaggacgcagagaagctgatatcaagaacagattcacattgccgccatttttgacattgaagaactttgaaggattggaccttggaaagatggacaaagctgatgactctggac

SEQ ID NO: 46054 - DNA, 412 bp, Glycine max
cgaattatatctacaatttctcgtttgtgacgaacgagaacgagagctatttcacatactccatgtataactcgtccatcatatcgcggttcgtgatggatgtctcggggcaggtcaagcaattcacgtggttggaaaaatgctcagcagtggaacttgttttggtcgcagccgagacaacagtgtgaggtttatgccttttgtggcgcgtttgggagctgcactgaaaattcaatgccgtattgtaactgtttacctggttttgagccgaaatcaccgtctgattggaatctggttgattactcaggtgggtgtgaaaggaaaaccatgttgcaatgcgagaatttgaatccctctaacggggataaggacgggtttgtagcaattccaaacattgcattacctaaacatg

SEQ ID NO: 46055 - DNA, 482 bp, Glycine max
acaagtagttgagaactaagaaggagaagcaaatggcttcctcaatgatctcttccccagctgttaccactgtcaaccgtgccggtgccggcatggttgctccattcactggccttaagtccatggctggcttccccaccaggaagaccaacaatgacattacctccattgctagcaacggtggaagagtgcaatgcatgcaggtgtggccaccagttggcaagaagaagtatgagactctttcctacctgccagaccttgatgatgcacaattggcaaaggaagtagaataccttcttaggaagggatggattccttgcttggaattcgagttggagcacggtttcgtgtaccgtgagcacaacaggtcaccaggatactacgatggacgctactggaccatgtggaagctgcctatgtttggttgcactgatgcttctcaggtgttgaaggagcttcaagaggctaagactgcatacccc

SEQ ID NO: 46056 - DNA, 532 bp, Glycine max
gccggccatgtttgccgagccgtacgtcgccgacagcaaggacccggcgtactcgccgcccacaccaggcatgaaggtgcagacgaataagaacgccctcgttcccgagatcgtccccactttcgagccttccgacgccgacattcccgacaactatgtcacccagaccgtgttgaagcaaaaatacctcccgcccatcacatggcggaatctgctctccaacatccaatgggtttcgttcttggcgttgacgatcacgcctgctctggccatctacggcctgtgcacggtgccttacaatcagaagacggcgatctgggctgtcatttactactacatcaccggtctcggcatcactgctggctaccatcgtctgtgggcacaccgctcgtacaacgcttcggtgcccctccagtacgcgctttcgctcgccggcgccggcgccgttcagggctcgatcaagtggtggtcccgtggccaccgtgcgcaccaccggtacaccgacaccaagctggacccttactcggcgcac

SEQ ID NO: 46057 - DNA, 475 bp, Glycine max
ctatgacatgattcaatcgatgcaccaaaaagaattagcagagatctcgaggtggtggaaagacttgggacttattgaaagacttggttttggaagagatggaccaagagagtgtttcttatgggcattggggatttttccagaaccctcgtcattcaagttgccgtattgaacttgcaaaagccatctgcgttttacaagttatagatgatgtgttcgacacttacggaacattagatgaacttgttctttttactaaggcaatcaaaaggtgggatcttgatgcgatggagcaactacctgaatatatgaaaatatgttatatggcattgtacaacaccacccatgaaattgcatacaaaattcagaaagaccacagcctaactgtagttgcttgtttgaaaataacatggatagacttaattgaagcttatcttaaagaagccaactggttcaacaacaaacatgtgccaac

SEQ ID NO: 46058 - DNA, 270 bp, Glycine max
agggccgaaagaacactttcattatcgctgaacaatgttttttaacaaaagtttcagccccaattaaaaacaccatcccaacttcccaatcattggaacgtccagcaaaataccttcaaaagctttttaaaatctggggaacccactttggcattaaaaaccaggaccatacaattttttaaagaaaaattatgggcaccatgcctttttaacaatcccctaaacgttggttaggccttagcaaacccaagcttggaaagcttttgggga

SEQ ID NO: 46059 - DNA, 451 bp, Glycine max
ctctctcttgcttgcgaaggaagggtcccacgtacacttgtttatcattcaacagcaagagagagaaagtgctgctgacaaggcaaaattcaacaatgtttttgtgaagaatctatcagaatcaaccaccgatgatgagttgaaaaacacttttggtgaatttggaactattactagtgctgtagtaatgagggatggggatgggaaatcaaagtgttttggatttgtgaattatgagaatgctgatgatgctgctagggctgttgaggctctcaatggcaaaaattttgatgacaaagaatggtgtgttggaaaagctcagaagaaatctgaaagggagaatgaattgaaacaacgatttgagcagagcatgaaagaagctgctgataaatatcaaggcgcaaacttgtatgtaaaaaatttagatgatagcattggtgatgaaaaactt

SEQ ID NO: 46060 - DNA, 380 bp, Glycine max
ctcagaaagcatagcattctatggtggagagaggaaagaagaaacttatattcaacagaagtttaaaaccttggttaggcacatgtatagtgtgctacatgaccattggtggtttggcatgattcaggacttattattgaagtaccttggtgctactgatgctgttattttgattattgaacctttcttttctggtcatctaaggcctgatagttcaactttagggcgtgcagagatgttaagcaatcttagatatcatactagtgtcataatttccttatttcaggctctaggaactctttctatcagtgcaagactgctcaatcgtcttagagggtatgctgatcgcatttatgaattaatggctgtatcaagggagc

SEQ ID NO: 46061 - DNA, 128 bp, Glycine max
cgttgacgttctcatcctattctttgtctctctaccattgccatggaaccctacaagcgcgggacatgcagcgccttcaattctgccttctggactacaaattctggtgctgctatttggaacaacaa

SEQ ID NO: 46062 - DNA, 429 bp, Glycine max
caccaaccttcaaagtccatgaagtctgctccattttgccgccacaagaaaccccaccaacaactcttcccttcaccctcttcgacgtcctatggcttcggatccccccagcggagcgtctcttcttctattccttcccaaacccaacaacaacattatttttcgacaccaccgttctcccaaatctcaaacacttcctctccctcactctccaccacttgccttctctggccggcaccatcacatggcccaatcactcacccctccctctcataacctacactcccggcaacaccatccccttcacaatcgcccaatccaacgcagatttcaacaccctctcttcaaacctctctcaagtcaaccaccaccttcaaaacctaataccccacttaaccatttcccatgaagaagcttccgtgttagcac

SEQ ID NO: 46063 - DNA, 339 bp, Glycine max
agcaaaatggaagtgcatgcttcctgaaaaattgacttgaattgaacagatttctctgcatagcaaagcagaaagttgagattgtaatgctctctagacaatcattttcatgctttaagggtgaaactctacatggatataaacagaacatatacagaggtttttactgcatgctcaagcagaacaacatccatctttcttaacagccgatacgtcatcacgagacccaacatttatcgtctgtccttttggtaatgctgctggatcatcaccaatttcaagggccttcttgcttacaacatgatagatctgtgtcagcacttctgtgaaggcattttc

SEQ ID NO: 46064 - DNA, 445 bp, Glycine max
ggtttgtattagaggacctaacgtgaccaaagggtataaaaacaaccctgatgcgaatgattctgcgtttcaattcgggtggttccacactggtgatatcgggttttttgattcggatgggtatttgcaccttgttggtcgcatcaaggagcttattaaccgtggaggggagaaaatatcaccaatagaggttgatgctgtccttctatctcatccagacattgctcaggcagttgcattcggagtaccagatgacaaatatggcgaacaggtatgtgtttttaattagtgggaaatacatctcttataaaacgggtttagttcttaatagtctagtaaaaactaaaaagtagatttatgataaattgaggttatgatatattttaaactaaatcaagttgatacacttaattgtttattttaaaaaaatcattttagaggaatc

SEQ ID NO: 46065 - DNA, 483 bp, Glycine max
gaggaaaagaggagaggcggggcggagcagagacgaatggcagatcagagcgagcattcgaaaacggcgttgcctccggaggaccaggaccgtcccgttcgggtatacgcggatggcatctacgatctcttccactttggccacgcccgctcccttgagcaagccaagaaatcaaggagtttcttcaaggttccattcacagacacttactttgggattttaggtttccgaatacatacttgcttgttgggtgttgcaacgatcaagtcacccacaaatacaaaggcaaaactgttatgacagaggccgaacgatacgaatccctgcgccactgcaaatgggtggatgaagttattcctgatgccccctgggttatcaatcaagagtttcttgacaagcacaacattgactatgtggctcatgactctcttccttatgctgatgccagtggtgctgccaatgatgtttatgaatttgttaaat

SEQ ID NO: 46066 - DNA, 213 bp, Glycine max
cgttttggctgctgcttatgcccacgagctcccccgatatggaattacacttggattaaccaactacgctgctgcctacgccaccggacttttgttggctagacgagttctcaccaagctcaacctcgctgacaagtacaagggtatctgtcaacgtaactggagaggattacaacgttgaggagatcgatgatgctccccgacctttcctcg

SEQ ID NO: 46067 - DNA, 328 bp, Glycine max
cttgcacattgacaacctttattttttctttattatatcaccttggcttactcttgagcggaagccttgttagctctgggtactctgaccttgacagcgttctttcgttgcttgttgttaagtcgttgagccttcttggaagagtgcttggggggctttcgctcagccttcttgatggagggatcagctcggatagcagcatgagccttcttgtagagagcctcgagtccttcagccttaactccagccttgacgtatcgggagaagaccttggagaacttctcgttgtcttgctcagccaaaagcttcatgtaatcagcaacgtgtc

SEQ ID NO: 46068 - DNA, 511 bp, Glycine max
tgcgtcctttacgagtcaataagaagtacacttctccctacaacgactccagatgctgaacctgtacccacccgccacacacagtgcctggaacggccagccggtctcatacccacccggtacagactcgatcgtgaatgagatctttgaggccaccaagggcacgggcaccaaggagaaggagttgaacaaggcgctgggcggcaagacggccacgcagcgtggcttcattgccaagcgctaccaggagctgcacaaccaaagcctacgcgatctgatggacaacgagacgtcgggccactacgagttcctactcaagctgctggcatcgcccttgcccgaagcagaggctggtatcctacgtaaggccaccaaaggtttgggcacaaaagaggatctcatctaccccgtggtcgtaggccgcactaacgcagagatcaacatcctcaagaagatgtactacgaagcgtacggtgaggatctgggctccgtactggacagcgacctacac

SEQ ID NO: 46069 - DNA, 462 bp, Glycine max
ggagatgtatttgttgtatattattgaagttggggtatacattctagtatatggtttttttttccctctcttggcttgtagttatttctatgttcatggataatgacacttagaaatagtgaccaaaacagaaatcatgatactttgagatgctccaaaattgctgaaatatcacagtcctcatagctcttctctgcataaataatgttggggctatcttgggagaacacatcttctcttttgtaactgtcttcactgcgaagaagcctttcactgccatattcaacagccccctttaaaacaagtgtcttctgtatgccagccactagttcttcataatccgtgtcacctttttctcccacaaatacaaccactttggatagatcaattccccacttgactgacagataccttagtgcttgttttcttgaagcaaataatggtatcacatttaatctcaat

SEQ ID NO: 46070 - DNA, 444 bp, Glycine max
gtatcagaaatctacactctcagtacattatacatagagaactctcaatttcgttggtcttctagccatccttggaggatgtagattttggagcagtggttgttaaccacagcaagctcctttgcactttctgaaacagcgactttgatcgtgtattacacaaagtgaaagcaattgcatccaaataccaatcacctcgccccttaaaacccacaacacagcctccatctatcgaaaaagtgaatagagtcccttcttcaactccatatggtccaaaggttctgtggatgctcttgaatgtcaatgaccgaatcacgggggtgcctccgcgaacaactggacagtagcggccggtcacactgaccaagagctcatctgggaattgcagcttaatctaggatacatgaaaaaaccgaacacttttttatatttgcttggaatttg

SEQ ID NO: 46071 - DNA, 410 bp, Glycine max
ggtataactcatctggtattccaactttatccgtgaatacaaacaactaataacacgcagaataatgataattttcaggacgaacgtaggggtagagttaaatccaaactaacacaaggagctcttgacactacattcgactatttttccattaaaatacacgatagtcaactgcagccatcataatattgcttgcgtgcaaatttgcattccatgaacgaggcctgatatcaatgttcggaaaggcaagaaggcatggctagttgactagttattatggtggctagcagacagatacgaaaaaatgatggaaaccatgatgaccagtacgataatcatggttgagccatatccactttcatccttcacaatgtaagatttccttttactcaagagaccagattctctgc

SEQ ID NO: 46072 - DNA, 449 bp, Glycine max
atcagaattgcccacttcacaaaaacttcaattcagacctcacctgcccgcctttcccgcaacttctttacccgcccacccctcctcgcagcctacaacatgccgcaatccccgcaaatcctcaaaatcgaagacctccccgcgtccgaagcaaaatgggtttcatttcaaaaaatctcctggcaagaccaaacaggccgcgagcgcgtatgggaagccgctgcgcgcaaaacgcggggcacatctggtgttgacgccgtcgctatcaacgctattatccggcacccgtcgcgaccaccgtctactatcatcattctgcagtaccgcccgccagtgaacgcggtatgtgtggagttacctgcaggactagtcgatgagaaagagagtccgggagacgcgagcgtgcgggaacttcacgaggagacgggatataaagggaaattggcatt

SEQ ID NO: 46073 - DNA, 339 bp, Glycine max
ggggctgaataagttcattcgcttgcattactacactatacacgctatcaagactatcttcaactaaacggcgaggtaggaacgttgccctgccgggagacgttatgtctactggaagcgcttttcagcggccttccagttgatgacgttccagatggccttgaagtactcggccttgcggttctggtagtcgaggtagtaggggggctcccaggcgtcaacacccaaaataggacggaattgaccgacgacggggtcctgggtggcatacgtcctgatctggatagctccagggtgcgtgtcctggaccaaccaagcccagatcgtgccctggacacc

SEQ ID NO: 46074 - DNA, 509 bp, Glycine max
caagagagttatatactatgaaggtcctcataagttgtatgttggcaatctttccaggagtgcggggcctcaagacttgaaacaactttttggtagatttggtattgtagctagtgtaagggtgttgcaagatttgaggaaagggaatcgcagggtctatgcgtttgtctcttatcattcagagtcagaacgtgatgcagcaatgtcgctcaatggaacagaattttttggtcgtgtgctagtgattagagagggtgtagagagagaggactgagacctaactggatattcatattttccatagagattgttgcaattttgattgttttgggaggatgctctctgttctggcttttggggggcttataggctcctttgaccaaactaagcttgatgcaagaacattcctgagctagaaaatgtcagcaagcagagttgacctactttgaaaagtccattaaaattgcaatcagcaatgtctctgtatatttgaaatttgaaacatgctt

SEQ ID NO: 46075 - DNA, 492 bp, Glycine max
atttctttcttctgatacccccaattgatttgttgcaaagctcaatatggcttcagtcaagctcaacaccccgcagacgggcgagtatgagcagcccaccggccttttcatcaacaatgagttcgtgaaggctgtcgacggcaagacttttgaggtcatcaacccctccacagaagaggtcatcacctccgtgcaggaggcgaccgagaaggatgtcgacattgctgtcgccgctgcccgcaaggccttcaacggcccatggaggaaagaaactccagagaaccgcggacgtcttctcgtcaagctcgccgaccttttcgagaagaatgctgatctccttgccgctgttgaggctctcgacaacggaaaggcgttcggtatggcccgaagcgtcgatgttcctgccgctgctggttgcctgagatactacggaggttgggccgacaagattgagggcaaggtcgttgataccactcccgacacattcaacta

SEQ ID NO: 46076 - DNA, 155 bp, Glycine max
attgatatgattgagaagatccttaataatgggtatgcctacattgttgatggggatgtgtactttaatgtagaaaaatttccagaatatgggaaactatctagtcgagatctagaagataatcgagctggtgagagggttgcagttgattctag

SEQ ID NO: 46077 - DNA, 495 bp, Glycine max
gcgactggaattgatcgaggattgctgaagcatgataagacgggcaagattgtgctggttcctcagccatcggattcaccgaacgatccgtacaattggccaagatggaagaaggagatgttcacggttgtgatcgcctatggatgcggttgcgttggagccattggtcctcttccgggttcagcattcgtgcctctcgctgagcaattcggcgttccgctgcagcgattcgtactgggttgcaacggctcatgtatcgctgctatcgccgtgggctcactcacctggaattctcttgctgtaaaattcggcaagcggccggtatatatcgtgaccacgcttggtttggccgtgtcatgcttctgggccgccgaagccaaaagctttggatctttggcagcagcgagaacgatccaaggactctgcatggctccatttgaagcgcttatccctgcttctgttgcggatatttggcacgtccatgaacgtgggttt

SEQ ID NO: 46078 - DNA, 258 bp, Glycine max
gaagcaacatgcaaagagcacccagatactgtcggtggtgcaatgatgagtggactacgagaggctgatcgcatgattgacatattgagcagagggaatgattatattgcagacgtggaggcattggcagctgctcggtgacagttagacactgaacgggatgaagttagggatataataaagagacttgatgcattagagctctctaacataatgtacaagaactctttagaaggtgctcacattttaacccgggaa

SEQ ID NO: 46079 - DNA, 315 bp, Glycine max
cgaagaattggcaaatcttaaatgcaagttgatgcctttgaagtcctctgattcatccctagcatgattacaattacggtcacggggtcatggtacttccttttccttccagctggaatattcatcaactgttccatgctcagaccggcaaaaaaagctgctttggctccaagctgttttatgagaaactttggtggatcaccaaaaggatggttcaagatttaagactccacaagctttactgcctcatgattgctggagaaggcaaataaaccatcactcgcctactataacaaattgatcggaatttgagat

SEQ ID NO: 46080 - DNA, 481 bp, Glycine max
ggtattccaactttatccgtgaatacaaacaactaataacacgcagaataatgataattttcaggacgaacgtaggggtagagttaaatccaaactaacacaaggagctcttgacactacattcgactatttttccattaaaatacacgatagtcaactgcagccatcataatattgcttgcgtgcaaatttgcattccatgaacgaggcatgatatcaatgttcggaaaggcaagaaggcatggctagttgactagttattttggtggctagcagacagataagaaaaaatgatggaaaccatgatgaccagtacgataatcatggttgagccatatccactttcatccttcacaatgtaagatttccttttactcaagagaccagattctctgcaagttttctgtatagcttccagcctgctcaatgctttagttgcattgggatcatttttgtcaaccttggactccaacatagaagc

SEQ ID NO: 46081 - DNA, 279 bp, Glycine max
ccgagaacaaaaaaaaaaaaaaaaaaaatccgggattcgctcttctcttggaaaagtgaaaaccagaagtacgaacgaaagagaagagcgatttagaagtgagagaagatggggttgtcgttcacgaagctgttcagcaggttgtttgcgaagaaggatatgaggattctgatggtaggtctcgatgctgctggtaagacaaccatcttgtacaagctcaagcttggagaaatcgtcaccactatcccgaccatcggatttaatgttgagactgtggag

SEQ ID NO: 46082 - DNA, 272 bp, Glycine max
aaaaaccaaacccctgggaaattttttcaatcaaaaatcaaccaacccagatgtaggcaacacagcacgcccccccaaaggggggcaagagtcccaattttggctaaaagttttacctaatttaggcaatcttccaaccccaagttccccaaaagaaaatccttttagcaagcttttggcttttacaacattccctaaaaaagataagcttttttttccaaaaaccgccaaactcgcatgaaatccccagacaggaccaaaatttttcaaag

SEQ ID NO: 46083 - DNA, 472 bp, Glycine max
tcctcctctttttgttagccctactgcacacttgaacaacatggtgacccgccgtcagctctcagtgatagcctccattgtggctgttgccagcgcacaatgtcctgactatctcgactacgcggaagtaccgcatggcccttactcttcgggaagatacaatctttcgtatcaacgccctgaaccagcatgccggacattcaactcttccgttgtggaagacgcgattactcgcgtgaaaggagacatcgcagacccggatctgaggaggttgttcgagaacacataccccaacacccttgacacggccatcagatggaaaggcacagctgagggaagcgacgaggagttgacctttgtcatcacgggcgacatcaacgccatgtggctacgcgattccgcgaaccagatgcagtcttacctccctcttcttgaggcttcgtcttcctcggactccatcgcatcgctatac

SEQ ID NO: 46084 - DNA, 432 bp, Glycine max
ttccgcaacagagagtagaatagatggtctcaaaagtggcatagatgtgctaggcggtgatggtgatactgtgcgcggtggtggtcgcgtcgcgggtggaggaggcggcgaacccgatacgaatggtggcggtggtggaggcggaggtggttcgggtgatagggcagtgccggcgcgcgctgaagtttgctaggttcatgagcaggttcgggaagagttaccgaagcgaggaagagatgagggagaggtacgagatattctcgcaaaacctcaggttcatccgctcccacaacatgaaccgcttgccctacactctctctgttaatcattttgctgattggacttgcgaggagttcagaagacacagactaggcgcttgccaaaattgctctgccactcttaacggcaaccacaagctcactgatgctggtc

SEQ ID NO: 46085 - DNA, 360 bp, Glycine max
ggactggtttggccaatagattactgagtaagggcaacgatattctgtgttgcgattatgctagttttgatggtttgattaccaagcaagttatgagcaagatggcagaaatgataaacagtctttgtggtggtgatgaaaaattgatgcgtgaaaggacacacctgcttggcttgttgttcaagaatggcaatttgtaagaaagatgtttggagagttgaatgtggaatcccttctggatttccgctcacagttatttgtaatagcatttttaatgagatgctcattagatatagctatgaaaaattactgcgccaggctaaagctccaagtatgtttttacaatccttcaaaaatttt

SEQ ID NO: 46086 - DNA, 452 bp, Glycine max
cgatcacgcagaagacgaacttccatgtcgaagacctgaacctgttccctatcgacaatggccacaagaacaaggcgcataagctcaatgctggatatcatgagtgggacttcagcttcaagctgccgtccaacttggatcagagcgttgaggggctccccaccaattgggtcgtctacaacatcaaagcatctgtagatcgcggctacatgagcaaggcgctctctgcctcaacgcacattcgtgtgattcgtaccctgggacgcgatatgctggagtcaatgccgatggagcagatcaacgaagatatttgggcgaataaattggcctataagattactgttccccagaagaactacatcgtgggaacacacatcaaggccgacttcgtgctgataccactaagaaaaggtgtggagatcgcgacgatcaagatggaactcatcgagtcg

SEQ ID NO: 46087 - DNA, 433 bp, Glycine max
ctcggccgagccactgcggctctgtgcatagaagggtgtgtttgcaccgctgcccaccatgctgtggtagccgcctggtgtcatgaagcccgaaggatcgatatcgttgtacaattcatcgagctgatgcagtccataggttggtggagcattctggttgacctcatcttgtaccgcttgctggttgagcatatgttggtcgataagaacactttggtcctctgcagggggcatatttggcgagatgaacaggtgaacgtggttcttgacgagaagttgactggtgtggccttcaggattcttcagattgacgtatagccttaatttatgcgacaagcgaatgttctctgtgtcaacggactggcggcagttcttgagagatttcggcagttcgagcgtcatggcaaagcgatgcgactcgtcgaaaagctcg

SEQ ID NO: 46088 - DNA, 326 bp, Glycine max
gtgcagagcatgtgttccttgtggctcatgactggggagccatcataggttggtacctctgcatgtttcgccctgacaaagtgaaggcctatgtctgtcttagtgctacttttatacgcataaaccctatcgtaagaaccgcatatgggattcgcgctatgtatggagaacactactatatcttcccatttcagaaaccagtggaaatggaggctcatatggctaaagttggcacaaaaaatagggagctgtcggcaccatggactggagtgcaaagccaagtggcagataaatacataacaggtgagttggacatggtgtacacc

SEQ ID NO: 46089 - DNA, 427 bp, Glycine max
tgagttttttttccttggaatagctgaggctttcagctcagttgggcagcttgagtttttctacagttatattcccaaatccatgtctagttttgcaatggctattttcactcttgaactagctgctgctaatacagtggcaagtgtgttggtgagcattgtggacaaggtcactagtgtaggagggaacaagagctggctatcaactaacattaatagtggacatctgaattactattatgcactgctcagtttcttaagtataattaactacctctactttcttgctgtttgttgggcttatggtcctgctccggggccaaatcttgaagcttctgcaggcaaggaagaagagtcatttgattatagggacttacctactttgtagattagtttttagtcaacaacagatagatactataaacac

SEQ ID NO: 46090 - DNA, 361 bp, Glycine max
ggctcgtggcctatactattgcattggtgggtcactcaaaagtggctcccttcaactgctgtcatagagaatgaaggccacctgtgattggagtctcaatgggttcatacgctacttggagttgtctaaagtatttgccccacaggcttgcagggttggcactgatagcaccagtgatcaattacaggtggccttcattccctaagagactgataagggaggactacaggaggaaacttgtccagtggtgtatgtggcttgcaaaccactggcctagactattgcattggtgggtcactcaaaagtggctcccttcaactgctgtcatagagaagaaccctgcatttttcaacaaaagtga

SEQ ID NO: 46091 - DNA, 443 bp, Glycine max
gcaattcacacatattctttttatttgccaaacaaatgtaatttatacaattgacagtttcctttaaaaaatctaataatatacatattagattttgaaatcatggcatattaagattcaaataatggtgctttagatctatatgcaacattttcttgtccaagtaaaagtgccttcaaaatggcctcacacaagcccctatagtatataattaaatggccaccatctggaacttcatgatactgtatccagggcagcttccctgaaacaaatctctggagttcagagggcacaaccttatcttcgtagccatgccaaatgtgaaacgaacctgtattgtgagggaatggattacttagcttcattgggtcaaattcccattttccaaaagccaccctccagtcatggcgaagagtgtcaaaaacagccttttcccttaaact

SEQ ID NO: 46092 - DNA, 484 bp, Glycine max
gtcacccgcgaacaacccacaagatggcaactaaatacccgcttgacgaaaaagtagatagctcagcagatcatattgatgatgttgagactcagcaagagcgtgtcctcagcacgcaagagaatgaagcacatcaggagcatgtattcgatccgaaggagacgaaacgcattctccgaaaggtggactttcgcttgatccctgtactagcagtgttatatctgcttgcgttcctggaccgcagcaatattgcaaatgcacgcgttgcaggaatgaatgcagagctggagttgaccggaccgcagtataacatggcgttgactgttttcttcttcccatacgcaatattcgaagtgccttcaaacgtcgtgctcaaactcatgaaaccaagcgtgtggatctcgatcttgatggtaacttggggcatcgtcatgactttgcaaggcattgtcgagacttatgaacatctcattgtcaccagagt

SEQ ID NO: 46093 - DNA, 353 bp, Glycine max
cgttatggttaaaggtagtttttttcacagcggaaggtactagaataaagaaatattactaggtattatctcaaagctatataaaatacagggaactaatacaataaatgctataacgataggtaatagtatagttcaacagaaagtcattaattgatcataacgtattctagggaatgatgctctcactcagatgaaagtaaatatcataatacatgattttaatcctaagcttaaaccatataataacccttcaactaaaggactgaataagaattctaaactttccggattttctataaaagtatagtcaatttcttgtaaaagataaattaaaggaataacattgaaaa

SEQ ID NO: 46094 - DNA, 411 bp, Glycine max
aataattatcaggaaaattaaaaaaaaataagcacaaaacattttctaacaataaaaaacgtttatgttcaatactttctcaaaagaatcatatatgcatcaaacagttacagccaatgcccgtcgtcgtaaccaccctttattcttctgcttcctttgtttggcacgtccaaaggacgtcctgcaacttacgctccaagaaggatgcgactgatttttctcattttcaggcaatgccacgtacttcttccaatcctcaagcaaaattttgagatcattgactttgttatctaaaccaacacaacaattggcatgcattgttgagaccttgttgaagtcctttgcatgctgacaaaaccctccaaaataactagtgctaaggaacctaatcttcagcttcatgttggaaat

SEQ ID NO: 46095 - DNA, 403 bp, Glycine max
ggaaagcagccacaattgtattggaaatatgttcaattgcacttgtcccaaccttgtacatagcatctaggggtaaaatttgttgcgctgtagacattagtgataatgtcaaaaggtttaatgcaaatgcagttatgaatttcaacaatgatcttaggatgttggagagttttgcggatgagaagttccattgttctggcttggctgaattttactctggagctagttttaagagctgtatgatagaagcacgacaattaatgaatcttctgtcaagtagtcagcctgagaacttcatgaatcctgttataagggagaaaaactactatgcgttggattataagatggtaggctccatttgtgataaattcaaggattctccagatgggatatttggaaagtc

SEQ ID NO: 46096 - DNA, 410 bp, Glycine max
caagtcaaataataaccggaagattaacattttcagtatgtccaaacatcaatacacaatgaaagttatgattcataaaaccaacattgtggatcaaaaggaaaatataaaaccaaaatttgttctaaacttaatctagcaaccaaataaaatacaagttgtgcattttggctcatcatttgctttccagctggtcaaatcgatcccacgacactgacagggacttattttgataacagtcaatatcaatgtgaatacaaggcttttctgccagattacacatttttcctctcttgctataagttagcaatagaaaatagaaaacctgttgatataggtaacagaacatatagctcgaattattcttaacctacttattgataccctgggtctatacaccatccatgtga

SEQ ID NO: 46097 - DNA, 487 bp, Glycine max
tggacatattggtgaaagacatcaatggaaatccatacatggttccaaacacagcttttgatgttggaatgctagatctaacgcacccaaaaactgcaacttggttcaagcagattctacgagaaatggtggacgatggagttagaggatggatggctgattttggtgaaggccttcctgttgatgctgttctatattcaggtgaagatcctatttcagctcataacagatacccagaactatgggccaaaattaacagagagcttgtggaagaatggaaaagtagctccctggacaaggtgaaggaagatgaagacgagggcttggttttcttcatgagggctggttttagagatagccctaagtgggggatgctattttgggaaggagaccaaatggtcagttggcaaacaaatgatggaataaagagttctgttgttggcctactcagcagtggaatttctggctatgcctttaatcacagtga

SEQ ID NO: 46098 - DNA, 487 bp, Glycine max
caataatggcatcttaaagattgcagattttggtctggcaaattttattgacccccatcacaaggttccattgaccagccgtgtagtaactctgtggtatagaccaccagaactcttacttggagcatctaattacggagttgctgtggatttgtggagcactggttgcatactgggggaactgtatcgtagcagacctatattacctggaaaaacagaggttgaacaattgcataggatttttaaactttgtggctcaccatctgaggactattggtgcaagctgcggacgccacattcaacagtattcaggcctcctcaccattataggcgttgtgttgctgaaacatttaaagaatatccatctgctgccacaaggcttatcgaaaccctactttctttagatcccacacttcgaggaacagcagctgcagcccttaagagtgaggtaagtgcttttatgtttacaacaagtggagtacttatg

SEQ ID NO: 46099 - DNA, 310 bp, Glycine max
ggctcgagtgtgaatgtgccttgaccttctatcttcaattctaaacgggggacagggtcagacatggctggctacggctccactgacggagctgacaacagagctcttgtgaacctgaatgggtctggacctggggtttcagatcccagatcatgcttctttgggagcagctagaagaaggttattggttcaagggtccccagcacaaagatttcctctggaagcttcaagattgttgctgtacaagagaagacagagattgaagagacccagcacaccgacaaggacagatggaagggtcttgcctatg

SEQ ID NO: 46100 - DNA, 396 bp, Glycine max
gttcagtactactgaaattcaaggagaaaaccaattatgaacttgtctacaggattgatgagatagttggtgatgcagttgattcagctattcgggatatcaaaagatttgctcattctgtgattctccataagtcctctgtatatccccttaacgacttcttcctgactggctctacaaagattgtgccaaagttcaaatcttctaatatctctgtttacgttgaaacattcagcaatgagtttgtatcttctgcatgggatttcttgtcagattcaaccgtggagatcaacacatttgttcaagatgctgaaattgatggtgtcatcacagacttgccaaaaacagctaatagatacagaacgaacaaatgcttaaatttgggtgagaacacac

SEQ ID NO: 46101 - DNA, 255 bp, Glycine max
agcttattcattagttctcatccattaatttccattggaggccgaaaacagaaaccaaaaattccgggtggtgaaatttcattaaggaaaaacaaaggggaatgtggtttaagtacaacaaacaaaggggggggggtaccgatgctttgcaaatttttcaatgacttaaaaacctgggggcttgtaggcgaaaaaactgatgcactggacttggggaacgttgtcaaatcccatgattcgggtgaagcccttggg

SEQ ID NO: 46102 - DNA, 254 bp, Glycine max
tctgtgttgcgattatgctagttttgatggtttgattaccaagcaagttatgagcaagatggcagaaatgataaacagtctttgtggtggatgatgaaaaattgatgcgtgaaaggacacacctgctgttgacttgttgttcaagaatggcaatttgtacgatagatgtttggagagttgaatgtggaatcccttctggatttccgatcacagttatacgtactagcatttctaatgatatgctcattagatat

SEQ ID NO: 46103 - DNA, 474 bp, Glycine max
gcaagactgatcaagtcgtcatcgtctttggagcgggtccggttgggctgttatgtatggccgttgccaaggctttgggagcgaggagggtcattgcggtggatatccagcaggagaggctggatttcgccaaggggtatgtggcgacggatatctttgtcccggaaccacgaggaaaggacgagacgcccgatgcgtactgctcgagaatgtctgaattgatcttgagctcgctcaacatccccgctcttggccctggcggtattgacttggctatcgaggcgaccggagcaccttcgtgtgtgcaaatgggtatccacgttctcaagccgaccggtacctacgttcaggtcggtatgggatccaacatgaccgtccccgtacctctctttgacgtcataaccaaacaactaaacgtaaccggttcattccgatacggcgctggggactaccccttggccatctctctcgtcg

SEQ ID NO: 46104 - DNA, 416 bp, Glycine max
cgtcctttattttttgttttttgttttttatttttttttttgaatcatgtattatgtgttacagttttgctcgtctatgaataactttgacaggtagaaactgtaaaaccttacctgaccaatattggaaacaagctatgatatctaacataaactatgcatatagagccgaaaaaattctagcagcaaaacatgtttggatgtggtaagttatgctactccagctgtatccatatctggaaccccgtcaactcccttgaaaacaacacgtaattttctcaaacaggaaaacttttggtcgttcttgattgttgtaccattcacatgcacaacatccttgggcaatttacccatgagattaaaaagagattgatccaggtttgatcgagtcatttattgcaatacagggggagctt

SEQ ID NO: 46105 - DNA, 166 bp, Glycine max
ataaataggacaattatcacctactctaaatttccgacgacatgcgatatatgattatagatctcgtggttaacgttaatgctcacataaatgtttaaatcgtaatctataactaaatattacaaactggaattcttatccaaatggactgcaaatcattcctttt

SEQ ID NO: 46106 - DNA, 399 bp, Glycine max
aaacactgaatgcatccatgcactttataacctgaaagatcgtcatcctcctactactactaatagtagtaaaaaaatactgatgaaatatattaattatatttaatatccatgagcatgattgatgaaataacagataagagattatccatctttggtctcttaattagtcggctccatgagaaggtaaatggttctgtgacacgtcaattcgaggctcctgacaagtgacaacaaagtcatccccgggtatgaagtctttaaagcatgctagtctccccagttcctcaacttcctctatgacaaggtccagtttagccactgtttccacaagcaaagacgcaaaggcggcgaaaggaagcgcctcagagaactcaaggctagttattgcaattttac

SEQ ID NO: 46107 - DNA, 449 bp, Glycine max
gaggaaaatatgtattggatttgattagctttttcatgtccacaacttgatttggtacaaaacaattattaattaatttgctcccgaaattttgcaacaaaatcccagtccaaacaaactatgaaaaatcacaggctagggctatcctgattggaaaagaccacagcgggcccattactactgggctgggcctggttgttacttccctcgaaagctttgacaagctctgggtccacattctcctcgggctcccatgtgggctcctccaaatcggcccatttaaccaaaaactccggcgtcccttcatccgctacccttttcgcgagcaccgcctcagcgacggcgtactcgaggccagcctcgtagtctttcaccaaatcctccgtcacaaacttggccttcacccactcgttggcaccaccgtccttccaccgcacaagatactccaa

SEQ ID NO: 46108 - DNA, 354 bp, Glycine max
atatatataatagataatgggttatagaataaatattacttcctcccaagggaatttttgagaagtttcatcatgaagttgaatctgatgtctggtgagggtcttggctgaggccaatttgctccttctggaaccatgatacatttgtaaccttggcctttggataacattggggccacaggattgttcaagtcacagggcaatgcaatggcacgacagccccaacttttggcatgacactctgcctttgctatcaatttcttagctatcccctttctccgaaaattttcccggaccgccacatttgatatgtatgcaattccagtccttctatgtcgacgtggcccctttctt

SEQ ID NO: 46109 - DNA, 445 bp, Glycine max
aggagatgaatacccactttttattgaataataatttgtttaaatagaaatttttataactaaaagaaatcataaaagcaataactaactttctaaacaatagccactaacataacggcgactaagtaacaaaaaaaataaaccgtcctaaagactcgatcaaacagctagcagaaaacaaattaataggcaattgctgatacacacatttaacaactaactaaaatttcgagtatataaaaaattccatttatctagatcgattgcagggctgttaacaccactttctgcattctctatatctacatcaacaaatgctctcgtccatattcacgtactattacaggcacgcttgtaggagggagcatgccataatctgtcacaataaccgagacataatctgaaggagtagcatcatacatcaaattcaaaagcctcaaattat

SEQ ID NO: 46110 - DNA, 502 bp, Glycine max
cagtcggataagggggaagcgagcaatactctcgaatgtcacagataagcattctgctacacataaccaacactgccttctcgtttgagcattatataaactcagtcggtgctcataacttttcctcacacgactctgctcactcatatttatattgaacaaacagagatcccaaatcaatggatattgaagcaggtaaagatattcctgtaagagacccagcgctactcgatgacgacggcagaatcaaaagaaccgggaacgtgttcactgctaccacgcacatagtaacggtggtggtgggtgcaggagtgctggctctggcatgggccatggctcagcttggatggatagctggcatagccgttatgatcctctttgcatgcatttctgtttacacttacaatcttgtagctgattgctacagatttcctgacccagtcagtggcaagagaaactacacttacatgcaggccgttgatgcctaccttggtggaaaaat

SEQ ID NO: 46111 - DNA, 473 bp, Glycine max
cctttgcaaaaccacgtttcgcaaactccactcagatacaccaattcacagtccgatacaaacaccaaacagccaagatgcaccgaacatacagcatgcgctcgtctcgcgcgcccacggcgtcgcagattcagagcccgccccctccgtcgtcctcgacgaagagcggacgtttcttcggaaaggccaatatcggccacaccttccgccacaagtcggcaggcgcattcggccccgacctcgcgaagaagctttcacagcttgtcaagatggagaagaacgtgatgcgcagcatggagctggtttccagggagcgcatggaggtcgctcaacaactctccatttggggcgaggcttgcgacgacgacgtctctgacgtcaccgacaagctcggtgtgctcatctatgagattggtgagctcgaggaccagtatgtcgatcgctacgaccaatatcgcgtcaccatcaagagc

SEQ ID NO: 46112 - DNA, 514 bp, Glycine max
gtcatcttgtcattcaccgttaaagtcgtactgattcctcttcatctttcgttaaggcgagtacttttcgttcttgatctgttggttacgatgtcgtattcaaggagatctaggtattctccttctccttctccttctccatacaagcgatacggtaggtctgtgtccaggtctctctcaatatcaagatccagaagccgttcaaggagtttatcaagagatgcagaaaatccaggaaacaatttgtatgtgacaggattgtctcctaggattaccaagagagaactggagaaacattttgctgctgaaggaaaagtgatagatgtccatctggtagttgatccttggacaagggaatcccgtgggtttggctttgtgacaatggagactcttgaggaggctgaacgatgtgtaaagtatctgaatcgctctgtacttgaagggcgtgtcatcacggtggagaaggctaaaagacgacgtggtcgaaccccaacgccagggaggtatctaggac

SEQ ID NO: 46113 - DNA, 483 bp, Glycine max
gagagagagagcgtttttgtgtttttctctgtcacaacttattattattattgttgtttgggacacaactcagagagttcttgcgaatttgcaatctctctctctctctaacgttggtctttcctttcccctttctgccgacgattttggttgtctcctttggatcagttagggccctttgtgctggtttgtagcttttgctgaataccagcaataatgaagaaggttattggtcaaactgttagggaccttaaaagagaagtaaataagaaagtgctgaaagttcctgggattgaacagaaggttcttgatgctaccagcaatgaaccatggggtcctcatggatcacttcttgccgatattgctcaggcaaccagaaaccctcatgaataccagatgatcatgtcagtaatctggaagcgaattaatgacactggcaagaattggcgacatgtctacaaggctttgacagtactagagtac

SEQ ID NO: 46114 - DNA, 336 bp, Glycine max
gacaggagaacatcaggtgaaaaatttaaataaaaaattattaacataattcagagttaatagaatacggcatgaatttggcttaggggtcaactatcctataaaccatggcaaattagttcgtcatgaatctatcagccttctctattctgattgctctcaaatggaactcgaacaaacaattgtccatgcaaggtcaccacagccgacgtctgctgagtatcaattcttgaaggcaagctgacaaccttcttgaaaggtgtcaccccccatggattgtcagaattctcgggctctccacttatgaccaagcgtccagctgggtctgattgaaca

SEQ ID NO: 46115 - DNA, 375 bp, Glycine max
aattagaatgctgttgcaaataatacttttccaatattttttaaatgataaaaatttcggtaattagtttaaaattttaaaataaaataaaatgaccaaaatttagaagagcgtcgattgtcacagcaatcgttagaatctgattgacatacattttggcttgcaagtaccgactgaatatacatcctcttgattcagtaaagacggtaacagtggaagacaagtaaatgtaaatctactctcatttgtaatctataaatctacgctcatcttcgaaagtgaatatttacaactgaaggctgcaagaacaaagtctgttgaacagagagagcaaggggcaaaattggatgaaaaagaaacgacgagatctttttt

SEQ ID NO: 46116 - DNA, 419 bp, Glycine max
gagtaaaaacaaaagcagcaccaaaaacagcgcatatcattatcaaatgtttttgaacatgaaaacgaaacactttaacataaaaatccatcccacaaaactgtaacaagatgataatttgtatctagctattaagattaatcaacatatcatgcacgatcacaatttcaccgaaataaaaaaagaaattcctcaaaagacacggtaacatttccccattgtactcttcagatacaagcacctaacattttgccagttctttttcaacaaagagacaaggaagttaacactcagttgaacattttggaagatttgcttttcctccatactaacattgcccacagctactcccatgcagagcactttcttaagttgaaatttaaccatggccttagactcattaacctttgactcaagag

SEQ ID NO: 46117 - DNA, 327 bp, Glycine max
tattgccccacttgttaaggtttcaggttttaagacagtattccgccagaatgccgatccaagaaaggtcaagaatatttcaaaggcggagatgtttcgtttctcccaccaggtaccttcacactggcttactggtgtagagggtcacaatgctccgaaaggttgcttggagcttgatcctgctgctactccgatggaacttcttcaggtgttagccgaggatctggagcaagtaattctaatgacaactgaaaaatctgtggaagatgaattgaagcacaaagagaattccagggaggagggtttgatcaagatgtgccagacaac

SEQ ID NO: 46118 - DNA, 360 bp, Glycine max
gcgagcaatgcgttttatcgatctgcatgcgcaacagcgctctggacatctgcaatatgtacacatcatgcagagcatcctcacttctggctgaccttctgcgtgagctcgggtgtcagctcaaacaggtcgccaacgagaccgacgtctgcgacttggaaaattggcgcatcgggatccttgttgatggcagcgatagtcttcgaatctttcatgccggcgagatgttggatagctccgctgactccgacagccaagtaaaggtcgggtgaaacgatcttgccagtctggccaacctgaagggagttgtctgcatagcctgaatcgactgccgcgcgcgacgcaccaatagcagcacct

SEQ ID NO: 46119 - DNA, 405 bp, Glycine max
ggcatgcatcactccattacctaataatggatatggaggaaatgttacagagtggcctttgcggcttcatcaaccaccagacaggcttcatagcatccaattggatgccattatatccagagatgaactcttgagggctgacacaaaatattggtttgaaataatagaaagttatgttcgggctttccgttggcaggactacaacctgagaaatgtaatggacatgagggcaggatttggaggagttgctgctgcgctgcatgatctccagatcgactgttgggttatgaatgttgttcctgtcagtgggtttaataccttgcctgttatatatgacccggggctgataggagttatgcatgattggtgtgaaccatttgatacataccccagaacatatgatct

SEQ ID NO: 46120 - DNA, 448 bp, Glycine max
ataatgctgtagagattgatacaaggcaagttctttaaagtgtttacaagaaaacctgttagtagggattcaacattgtaattaagactaccatttctggcaaatagcagaattttttatgggttagttttggccacatttctggcacaaaatgagatttctggtggagtaccatgttccggttgcatgagccaatatatggtgttctataagttacagacacaattgagcaattcagaaccctttatcagaccttaatatcttccagcttgaatagggaccctctcctacatcatttatggtatttgaccatcccagtgcagttgcaatttcttcaagctcacctataacatgtgtggtgtcacgtatatatacacgtcctcctggtcttagcatccgatccatctcaagcataatggttgagatgttacacttttacctctttttt

SEQ ID NO: 46121 - DNA, 133 bp, Glycine max
aaattcatcagaaaacccattatcaattggggggtggaagggagcaataaaaacttacaaacgacaaatcacatcacaaccaatattttggagaaaaaacagacaacccttgctttctcaaccaacaaacaaa

SEQ ID NO: 46122 - DNA, 431 bp, Glycine max
aataataaattaatttgtatttgttatatcgttttatacatagaggataagtgtaagcaatgaaagaaaaaagcagaatcccccgagaaggtctcaattcttccacttgaagtggggttgtgatagtagaaccctgattggaaccattataataatgcagaattactttacagtccgggaaaaaaaatcaagaactagttgaaatttgaaacccgaggcagagatggcttgtagtatctaggaaagcattcagtaaaatttctaacacgccttgcagcttttcctacaatagccgggaatgtctgaagatccaatcatatactcaggatttttagtgcattctccaagtgaagcccatctctcacagcttacatgattatcagaacaatcacctccagctcccacagtcttatcaaacgagtctacatgaa

SEQ ID NO: 46123 - DNA, 374 bp, Glycine max
ctattttcttacaaggctctactctactgcttcaccttctgctctagaaaattcagtggttatacatggcttcggctactctctctgtagccaaaccagcccttcaggcaaatgggaaaggcttctctgaattctctggcctccgcagctcatcaggctttcttcccttttctagaaaatcttcagaggatttccattctgtcattgccttccagacctatgcagttggaagcagtggaggatacaagaagggtgtgacagaagcaaaactgaaggttgccataaacggatttggaaggattggaaggaacttcttgaggtgctggcacggtcgcaaagactcccctcttgatgtcattgccatcaacgacacc

SEQ ID NO: 46124 - DNA, 108 bp, Glycine max
gttacactgaaggtggtcaattgaccgaggcagttctgcgccttccttacactgttgtatgatttgatgagatggacaaagcccgtcctgttgtgttcaacatgatgc

SEQ ID NO: 46125 - DNA, 467 bp, Glycine max
  unsure (1)..(467): unsure at all n locations
agcacaaaaagcaaaagtcaattgcatcactttacataatgaaacagatttttacagagtactatataatgaaatgttacatgtaaaagtgcccctatctactacacattggcaatcaatcaacttgatacggtatgtctcaaactttggatgatggggcacattcaggaaaacaacaatatggcagatcttccattgtgaaaattactccagcaaaaaaaattcaaattactggggcaaaatctgctgcatatcagccagccggagcacccacagatagaagggttcttcnagnaagttccttttgctcaattataaggacaacagggttactgaccacagattgaagataaactatgagctcacctcttttcttgatggtgatatagaagatgctgttcagtcttgtgttacaatggagcaaaaggaacttctggaagaacttgctgaatctggggcaaaatctg

SEQ ID NO: 46126 - DNA, 313 bp, Glycine max
gatatctgctgcccttggagaggaggatattaccacccggcaaactgatcctgaggtaattgttgaggattattttactgatgaagaaattggggtacatgaactccatcagatgatgtggaaggacaaaatgcgtctcatgcgactgaaagaacaaacgaaatctaaggaaggaattgatgcaacgaatcagaggctactccaagaacaggctcagagaaaaaagatggcgagggctcatgatggaatcttgatgctcatgctgaagatgatggaggtttgtaaggcccacagatttgtctatgggattatt

SEQ ID NO: 46127 - DNA, 309 bp, Glycine max
attccatatgatagttaagttgaaagagacaatacatatacatagcttcaaaatagttcgagacaaatctaatttaaccaaaatggatcacatatactttaatattcgacaatccaccaagatcacatagctaccaaaggatcacttgctttcataacaacttggagataaacgtggtttaataaaaatctcaagtggagtggctttagcgttgactaatccaaagctttcagtcatatcaagaggttcagtagacggatttaatatttcaaaggaatgcaaaaaactagcaagagggaaatgaagcat

SEQ ID NO: 46128 - DNA, 405 bp, Glycine max
ctcgagccgaatcggctcgagggaagccatttgcttctccttcttagttctcttccccagctgttaccactgtcaaccgtgccggtgccggcatggttgctccattcactggcctcaagtccatggctggcttccccaccagaaagaccaacaatgacattacctccattgctagcaacggtggaagagtgcaatgcatgcaggtgtggccaccagttggcaagaagaagtttgagactctttcctacctgccagaccttgatgatgcacaattggcaaaggaagtagaataccttcttaggaagggatggattccttgcttggaattcgagttggagcacggtttcgtgtaccgtgagcacaacaggtcaccaggatactacgatggacgctactggaccatgt

SEQ ID NO: 46129 - DNA, 369 bp, Glycine max
ggacaagaaagatacaaatgataaaattgaagagggtactgccaatggtgaggaagaagagtcttctgagttttccttgttcagaagactatttcgcgtgcaccctgtagaggctaaaagtggtgtgttcaatgaaaacaagtataatggcggtttatttgaaagtagtccaggtacagagaattttttacgtaaattgctcagagaccgtgaccgttcaattgaagattcagagctattgggttcaaaaagacagaaagagaagcattctgtatccccaaagcagcagagtgaaaagtccagcacaaagcctccattaccaattagttagtctcagttccggaaaggggcttatcatgactcattgga

SEQ ID NO: 46130 - DNA, 356 bp, Glycine max
ttagatatagaggatatcctattgatgacttggcagagaaaagcagctttatggaagggtcatatctcataatgtatggaaatttgccttctgaaagtcaattaacagaatgggagtttaccatattctcacccttcccctgtaccacaaggagttttggatatgatacaatcaatgcctcatgatgcacattctatgggtatgcttgtcaatgccatgagtgctttgtctgtttatcatcctgatgcaaatcctgctctcaaaggtcttgatatctacaactcaaagcacgtgagagacaagcaagtagcacgggttattggaaagataacaacaattgctgctgcaattaatct

SEQ ID NO: 46131 - DNA, 392 bp, Glycine max
gcagaaacgacaaaggagtttgtggcaaagctgggactaaagcctggtcagaaagttctggatgttggttgtggtgttgggggaggtgatttctacatggctgagaattttgatgttgaggttattggcattgacctctccataaacatgatttctcttgctattgaacgtgctattggactgaactacgctgttgaatttgattgtgcggattgctatagaaaaacatatcctgagaatacatttgatgtaatatacactcgggacaccatgctgcacgtcaaagtaaggaactatgtttttttttttttttttttttcttgattaaattgttagttttagtagtcgcatgctttatagtattgataggattgtaggtgtatgcctctgaa

SEQ ID NO: 46132 - DNA, 430 bp, Glycine max
gtcggtgatattggaaagggagaagtctttgttcctgagagtgttgtgcagtttggtgcccgagaggcggggcgagatggtgtccaaactttgaaagctgaggatcacaggataaaatatgatggggtacaccatgggtctagctatctggaacaccttaacttcttgtctgcaatcagagcaaaaggagaaaaggctcctagtgtagatctccaagatggattaatatctgttgctatgggagttgcagcacagctctctatagaatatggtcgatttgtttctattcaggaagttatgaatgagtgcaaaatttgagtgttgcaacttggaagtgagagtaatggttgactctgctgctatgtgttctttgacaaagggatgctgtattgttgctatcactgcctcaagaaaaagtgcaaaatgattt

SEQ ID NO: 46133 - DNA, 421 bp, Glycine max
agcaatgatgccaacactgaggcaacaagttggatgatgaatttctgtccaatgcaagcacgtgtaccagatccaaaaggaagaaatgctgcattttcatttggatcatttagtacacatgaactgacttctgtaatagaaaggtcttcagtagaacctgatccttttgtacccgttgacaaaaaatggtaaggattaaaatcacttgcatcactcccccaactagagtcatccttgtgtaccaattcgacaggtacaaccagtacagctccagcaggtatggttaaaccagttgcaaagcacaagtcatgtttcaaagaacacctctgcagcattggaccagtgggcagaaggcgtgcagattcataaattgtagccaataacaaaggcatcctataaacattttcatgctcatattttg

SEQ ID NO: 46134 - DNA, 369 bp, Glycine max
cgagacatctctttgatccttggcctcaccctgttgtgtctttacatctcttgaatttgcaccacattccttcatagactgcgtatagaagttcgccatcatgtcaggtatcaccacgcaccctaggatcccgccggtcgtgatggacaacatcacccagcagattggcaacacgccgctcgtgcgcttgaacaagatcccccagtcgctgggcatcgaggccaccgtctacgtcaaggatgaggccttcaacgccggcggctcagtctaggatcgcattgcgctgcgcatgatcgaggctgctgagagggaggggcgcatcaagcccggcgacacactgatcgagcccacctgtggcaacacgggcat

SEQ ID NO: 46135 - DNA, 169 bp, Glycine max
gattcaaagccgcactgaagaaaaaaagaacgttgaacaacactaggggctcgatttacatggttgggacccccgactcaatgttgaattgggctagaacttcctttccagggataatttctccaatcaaggggaaaacgaaacccaattgagccaatcttcccacaaa

SEQ ID NO: 46136 - DNA, 353 bp, Glycine max
gggaaagaccaagacaattgcattttcatcctaatttatacagaaaaaaagtaagttttagggcccgctattttttttatggggggatcacttggtatgaacctcactttacatggatgggaacatcattttgcctaattcagcttaaacagcaaaaagaggcaactagaaaaaaggggggcagaaacccagaagcttagcaaatccacaggggggggtataacagcctttttacttttgtgaaacaatccaatcagaagcagcattactttgacgggaccaagcttggttttcagttcatccacaggttttatatccagccattttgggcgttccttaagagggaataaacc

SEQ ID NO: 46137 - DNA, 414 bp, Glycine max
acctcttccatgcagatatgccatgagtttgagaggtttagcacttacttacccgatctcaaggttgctgtcttttatggtggagtcaacatcaaagttcacaaggatctgctgaaaaatgagtgccctcatattgttgttggaacaccgggaagaatactagcattgactagggataaggacctttctttaaagaatgttagacatttcatattggatgaatgcgacaagatgctggaatcactgggtatgtttcattgatgaatagtcactactgatttgaattttactttcgattttttatagtatgattttattgctcttatatgctgtctgcagatatgaggaaagatgttcaagacattttcaagatgactccccatgataagcaagttatgatgttctcagcaacac

SEQ ID NO: 46138 - DNA, 261 bp, Glycine max
ggggagaagacattagacctttgaatgaagttgtagtagtcatggaacacccaaattttttattcacacctagcaagaaattcattgggggggggggttaacttcacaacaattttaagcttgggggttttaaaacttgggggggttcacaacttcccaggggaaggcgggggcatccctttcaaagggtccataagcaggtgttttgaggaacctatggccaccccttttaagggccaagttaatggggatcattccagg

SEQ ID NO: 46139 - DNA, 351 bp, Glycine max
gaatgcgcaacatatgaagtctcacaggaggcaggcttctctggtggggagtgtggccatgggtttgttgttttccctcttctgcgtctttggtttgatcattattgccattgagaccaggaagaggaggaagaagaaggaggctgctcttgaagcctatgctgatggtaatttgcattcgggtcctgccaacgtgagctggaagcacaccagtacccgggaagcgcttagcataaaccttgcaacgtttaagaggccgctcaggaggcttacttttgcggaccttcttgacgctaccaatggctttcacaatgatagtctcattggctctggtgggtttggggatgttta

SEQ ID NO: 46140 - DNA, 457 bp, Glycine max
ggtaatttgtcagggaaggatgattatatggagattgatggtcaaggtagcagaagtgaaactagtggttatcattcggatacagatttggaagatgattgcagagaaacttctgaacctccggttccttcacaaagagttgtcaacatgcttcagggttgtagaagtgttgatgagtttgagagactgaacaagatagatgaaggaacatatggtgttgtatttagggcaaaagataagaagactggtgaaattgtggcattaaaaaaggtgaagatggagaaggaaaaagaaggttttccactgacttctctcagggaaataaacattcttctttcctttcaccacccatgcatagttgatgttaaagaagttgtggtagggagtaaccttgatagtattatcatggttatggaatacatggaacatgatcttaaaggactaatggagggaatga

SEQ ID NO: 46141 - DNA, 362 bp, Glycine max
cttcagccagcaacttgcgtctctatccattgatttgcaacttgcaaacaacacgaaacaattgcggtgttttttgagcattccgaggatatattttttctctgtaattaattatcctttaaattcccaatattcctcgctctattctcttctcttcgtactaccataggaaggaaggaaggagagagagttatgggttccccagaaaatcaattgtcgctcgcagaagaggctcttcttcaggatgatgagagcaaacaatacacaggagatggatcggttgactttaaagggaggcctgttcttaagcggaatactggcaactggaaagcttgcccatttatcttaggcaacgagtgctg

SEQ ID NO: 46142 - DNA, 343 bp, Glycine max
cttcatacaatcagtgacaagtgtggtgatccctttattgtggaaaagaaccctcatatccatgaccctgatgatgtcttcccaggacttgttctcaagattacacgctcacaaacaacatagcttgaataattgaaagttaattcctatacatgtatgtatctttcttcaatatagaacaaggaaaaaaaacttccttatgggcatcctctaaagtttttagttttggtttgcttgttgtatgtactacactttgcctagcaagaaaaaaatgttccttatacactctttcggattgtgttgtacatcgatcttctaaatcaatgtgaaattagtatactat

SEQ ID NO: 46143 - DNA, 370 bp, Glycine max
atcttgtcaagaacctgatgataattgctttacctatgtgcttaaatggaaagggaaaagcggtgctcggacaacatgtactgtagtgtcctacagaatggcttaggactctcttaatccatgtgatgaccagtggctaccttacaaggacatggactgtacagtcataccacaagatataaaagctagtctgactttacgggcatctaggactatgttattgagtagtgacaaggcatataggcacctttacgatcgtggcttacgtcagtttgccatgcatcatactattcctatcgacgtggcacgatgggagaggaagagtcgtatagcggatcatggggtagacttgatgggaaaaatggacttg

SEQ ID NO: 46144 - DNA, 521 bp, Glycine max
ctcgagccgctcgagccgattcggctcgagaaagaatatgagtttgaacagtctgctttttgttttttgttacttccccttccctaggtcatgccaagccagtctgtttcaatttccacctggaatttataattgcttattatgtgataataagaaattatttttttctgtctagctgattattcttccctaagttttgttactgattgctctttttccgagcattggcagcttcattcaccaggtgttttggcaattggaagtagtatgaaaggagaaaattcatattcacatcatttggattcagatgtatgtatgaatttaatagtccttcacacaattatttgacataatttgctacagtttatccattgggtttcttcttgtttaagtccatgttctgcacaaataaatttctttggtaattgttctttaaaatattcaggttggcgtttcagttgttgatcgttttacattttacactcttgctttctttgagaggctgaatatgtatgacaatg

SEQ ID NO: 46145 - DNA, 144 bp, Glycine max
gatttgatggtggagaatgtggaagatgaggaccctatcatggctgtgaacttgctaactgctgctagcactggcattgctgcttttcttgaggagcttctaagagcaggtttggattcctgacattggagactccaaagggaa

SEQ ID NO: 46146 - DNA, 400 bp, Glycine max
gtctcggccacgtcattgacaaactgttagtgagctttggcctagagatccttaaggttgtgccgggctacgtgtcgaccgaggtcgacgctcgtctgagttttgacacagcagccacgatcgcacgcgctcatcgcattatcgatctgtacgagaaggctggcatcaagaaagatcgcgtcctcattaagattgccagcacatgggagggcattcaggcttgcaagcacctgcataaggagggcatatcgtgcaacatgacgctacttttcggctttgccacaggccgcgggctgtgccgaggccggtggcactctgatctcgccctttgtgggccgtatcctggactggctcaaggccaaaactggcaagtcaagctacgaatctcacgaggatcctg

SEQ ID NO: 46147 - DNA, 402 bp, Glycine max
cggctccattctgtgactctgtaaattgtagtgtggcggaatagaatcaaaccaaacacggaataaatccatacactcggttgtctctagtgactgcaaacttgtgttgagttgagtcttgagcttatattcccgatagcagttctctcgaattgtttgcttgcgcggggataagaaaacaatatcaggaaatcaaaatgggcgcacagaaaaaaagcggtgctagggtttcagaggaccccgacgaactggttcgggttccgttgcaggccgttctcttggccgatagtttcaccaccaagttcagacctatcacgctcgaacgccccaaagtgctgctgccgctcgtgaatgttccgatgataaattacacgctcacttggctcgaatccgctggcgtcg

SEQ ID NO: 46148 - DNA, 316 bp, Glycine max
ctatctttatataataatataaataagaataaaaaaaataaaaaaaaaaaaagaatctatataaatataaaaataatatatataaggtacaaatagtaaatcgaggtacccattttatgataaactttccttccatttttgttcctctagtaggcctagtatttccggcaattgcaatggcttctttatttctttatgttcaaaaaaacaagattttttagatacagaaaacaaagtaaaattctggggtttttttattccccaattataatactaaattcaaaaaaaggagagtaatgagtataatctttcgctc

SEQ ID NO: 46149 - DNA, 454 bp, Glycine max
gaaccatggacacaatagaacaagaaaacatgcaatttctcgggttcttgggcatctacaaagaatcctacaagctcatattttcatggaggaagatcttcacccagatcaccttcaccctaatcctccctctctccttcatcttcctcatccacatccaagtatccgatctcctcttcgggaaaatcacacacgacgccaaggacttaaccgaaaccctacccggcacaccccaacaccaaaagctccttgacacattctcttccgattgggccactttctttctcttcaaactcctttacttcatttccctactcatcttctccctcctctccacctccgcaattgtttacaccgtcgcttccttctacaccggcaaagaagtaaccttcaagaaggtcctaagcgttgtccctaaggtatggaagaggctcatggtaacatttttgtgcac

SEQ ID NO: 46150 - DNA, 465 bp, Glycine max
ccttggtaagcttcggtattttcttggtatcaaagttgctcaatccaaggatggtgtggtgatctcacagaggaaatatgcccttgacatcctggaagaaacaggcctgttaaattccaagccagtaggcactcctatggatcctagtgtaaaactgtcaccagatcaggtggaaccattctcagaccctggaagatatagaagattggttgggaaactgaactacctcgcagtcactcttcctgatattgcctttgcagtgagcgtggtgagtcagttcctgaactctccctgccaggatcgttggaatgcagtcagttgaatcctgaaataaactaagagtgctcctggaaaaggtctcatttacgaagataagggacattctcaaattattggctattcagatgcagattgagtggagtcacctagtgatagacatcaggatattgtgtattgattggagga

SEQ ID NO: 46151 - DNA, 455 bp, Glycine max
gctctcttggactcagttcagttatttcaaaacattttaatctcaacaccaagacgacaatgatcaagtccaaggagttaaaaatcgaagacaccaaccttgctggaatcggatctgagactgacaagaagcttagagaggaggctgctaagactgaacaagcctacaaagatgctggaaagcaagttggtcttcaaatctggagaattgagcaattccatatcaaaagcgttcctaaggatacttacggtagcttctattctggagactcctacgtcgttttgaacacatacaaaaagaagggaagcgaggctctcgcctgggatgttcatttctggttgggaaaatacactactcaagatgaagctgcaactgctgcttacgcgaccgtcatgcttgacgatctcttgggaggagctcctgttcaacatagagaggttcaagagaatgaatct

SEQ ID NO: 46152 - DNA, 582 bp, Glycine max
  unsure (1)..(582): unsure at all n locations
gaaaaaggtataggtgtatatggtggattatttaatgttacaacatttacacaatctttcaacatatttatattcttaattagtgccgttatactggtattaactgctttttatcctagaaaagtctttataaaagaacaatcatctttttataaattgttaactagcaaattaacatacaataaaaactctatttcaaacaaaacagcagaacagtttcgtataatagaatacgcacttataatagtatttatattatgtggagcggtatttttaatgagtacagcagacttaatttctgtattcttatctatagagttacaaagttatggtttatacatactgtctactttatatagagattcagaatcagcaactgctagtgggttaacttatttcttattaggaggattatcatcttgttttatcttattaggttcagccttattatacgttaactctggtactactaacttagacaatatatatgtgatatgcagtataagtgaaatagaggacttaaatactcttacatactgataccaaccatattatctacacttatctntaataatattatca

SEQ ID NO: 46153 - DNA, 508 bp, Glycine max
cacgaaggaggactcggcgggggagtggcagcttgccaagatggcactggacgcgacggaatttaactatcaacagatataccacttcgtgcacacgcacggagtgtcgatcccgatccaggtcgagatgatgcgtagcatggcgaaggaccacccgatctacgctctactagactaccatttctttggcaactttgatttcgaattcctgagcggaatagtcctttttgcggctaatacaccgtacgacgagtcgatggcgttcggggcgagcggctctattcgctgcctctacgacgagtactcaaaaacgtcgctagctgaagactttcccgctgaaattgcaaataacggtctccagtatctgccaaaccaccgctacgtcaaatatggcgcgatgtactactccatcatcaagaccttcgttactgcgtacgtgaaagcgtactacgtctcagaggataccattaaaaacgattcggagctacagacttgagcagctcgagcg

SEQ ID NO: 46154 - DNA, 468 bp, Glycine max
gctgaagatgaaaactggggtggtaatggtggtggccatcaaagaaatggcgcattggatcatagatcatgggctacagattttgcaatactggcctcccttccttgcaaaactgaggaggagagggtggttagagatagaaaagcatttctgcttcacagtcagtttgttgatacctcaatatttaaggctgttgcggctatacagcatgtcatggaatccaagtcaaatatcaagagtgaattgaattcttctccgggttctgttctgcatgaagatctcacgggagacttatccattatagtcaaacgtgatatccaggatggaaatacaaagtatgattctatactggatgaatctagcatgcatgaaggggatgctcagaagaatttaatcaaagggttgactgcagatgaaagtgtaattgttcatgtaagtaaataacccaccttgcaaggctatattatg

SEQ ID NO: 46155 - DNA, 287 bp, Glycine max
acgggaaaaaaggaaatgcctttttaaaaaattggtgaagcctcacattacaaatttaaacatggaataaaaaggaaagaaacttcttagtttaaaaatctaggccatgttcacgggctgttttaacaagtgcttgaacacggccatggtttgggtatccacctcgatcaaaggcaacctttgggatccccttttccaaacaggattttgcaatgatctcacccatcctttttgttacttaaactggggggccaggggagtatttgaacttattagcaaccgttttt

SEQ ID NO: 46156 - DNA, 426 bp, Glycine max
tcgagttaagccagaactccctttgcccgtaatcccagctgaggcggaacagtccgtccttgaggatttaaggaaccgtgtacagcttagcagtgatgcattgccatcagttagcttttacacatttatcaatactcataatggtttaagctgttcttcaatatcccatgacggatcattgattgctggaggatattctgactcatcactgaaggtttgggatatggcaaagcttggacaacaacagaccagttctctttcgcagggtgagaatgaacaaatatttgggcaaggtggtgggaaaagacagtatacattgtttcaaggtcattcaggccctgtttatgcagcctcttttagtcctgtcggagattttatcctttcatcctcagcagactcgacaattcgattatggagcacaaaact

SEQ ID NO: 46157 - DNA, 278 bp, Glycine max
gtgttctcacgtctttcacttcccatgcctagcaggtcacgtgaaaaaacaccgaatggtcacgtgccctgtgtgcaacgctaactggaaacaactgcagcaaaacgcagacgaaaacaaaggaaacgcagaactcaaaacgacgaggtcgtttaagctccacaactacgacgacgacgagcctctcatgtcgcccacgtcggtctcgcgtttcaatccgattcccgaatctagtgagaacgaagaagaagaagatgaagaacataacgacgaagaaa

SEQ ID NO: 46158 - DNA, 365 bp, Glycine max
ggaccaattgagtcttattatttatattgcaaccaaaccacaagccaagtatctaattttcaccaccacaattctgaaagagatattcacgtttgatcacgcaaacataaattatggaatgggatgtatgaccactttcccaatggctttattagtcttcaagtgtgcaaatgcctccacggtctgagaaaatggatagggacttttagggtccaatattggcttcaccttcccactctctaagtaaggttttagtttctccaacacagtgccatctgaaattcggctgaagaatatagcttcaggatgtccaaatctcactattggcacaactttgccactttgtttaacagccttcaatgcct

SEQ ID NO: 46159 - DNA, 156 bp, Glycine max
atttagaaaagttgaagaatatgttaccactattcatcaaatgttgtgatgatctgattagcaaatgggagggaatgttgtcttcagatggaacgagtgaaacagacatatggcctttctttcagaatttggctagtgatgttatttctcgaacag

SEQ ID NO: 46160 - DNA, 385 bp, Glycine max
gtctacctgacgcccttactttgatctgacaccatgcttttggacagaagtccttacctatgggagctcatgtgagcctgttgaagcagagggtggctcagtggggaaggcttccactggctctgaaggagatgggagcttctttgcgagagcttaactaggagcttaggtgagctgtatggagcaggctgcacgagaggcactggctgggtaaaacctatgaaacgaagcacagagagctaatgtcgatgagtactaactacctggcacagaagatcaaggagtgcttcttggacctgtgttctctgcctgaggatagaaagattcctgtagaagttttaatcaatatgtgggttgaaatctatgacatcgatgaagctgaagc

SEQ ID NO: 46161 - DNA, 470 bp, Glycine max
caagaatctacttgccctcctggtactgttgacctcaccaaagatgatgatggtttggatacagtgggctcttgtgatattgtagaaagaaaacctaccccggcatctattcatagtcagtttgtcaccccaaatttaatctttccttgagtattgacctcttactggtgttaattacgaatgttgccactcaaatagatgacttttggcctggagttagatttgtccgtagtaagtctgataccccaacagttggtaattctgagctacctgttctgcctgatactgtttctcctacattcagtcagtaatctgctggtcatgacaataaccctgttgttaactctgccatgcataatcaatttttgggaccaaacaacttgcagatgcagatgaatcatatgaattcagttaacgagtatggcagatcatcctcagcaccaagacatattcataggactccggtagct

SEQ ID NO: 46162 - DNA, 430 bp, Glycine max
ggtttcaataactccaaaccatgctagttccatcaaactgaaccaactcaccccatcacagatgtttcaaattcaagcccgaatccaggttccacgaggccagtttctgagcccaaagcccattcccatgaagcacgtgcgggcttctccttcttcaaagcccacgaagctgtaccgtggggtgaggcagagacactggggcaagtgggtcgctgagatcagactccccaagaaccgaacacgtctctggctaggtacatttgacaccgcagaggaagcagcgttggcttacgacaacgcagcgtttaagctaagaggagaaaacgcgaggctcaacttgcctcacctgcgtcaccatggagcacgcgcgtacggtgagtgtgggaactacaagcctctcccctctgcggacgatgcgaagcttcaagcc

SEQ ID NO: 46163 - DNA, 107 bp, Glycine max
gaagaattgctcagacacctgttagtgaggcttattcgggtccgtgctataactgccctggctaaaccaatggatggaccacgagaaatttcagcttccgaatctac

SEQ ID NO: 46164 - DNA, 556 bp, Glycine max
aatcattaaattaaatatttattgcgcgcatctcatattcaccttaaataatgcaggtaaaatgtggtgttattgtcggttggtatacatgcccatgtcttatttgtatgggaagaaatttacgggtccaatcacaccgttagttgtaaatttgagagaagaactttttattcaaccttatgatgaaaatagttggaagaaagcacgtcataaatgtgcaaatgaagatctttactatccccatcattggatacaagatctattatgggatagtttgtatgtattcaccgagcctcttctaaattgttggcctttcaacaagttggttagagaaaaggcacttcaagtaacaatgaaacatattcattatgaagacgaaaatagtcggtatattgccatcgggtgtgtggaaaaggttctatgtatgcttgcttgttgggttgaagatccaaatggagatgctttcaagaagcatcttgcaaggatcccagattatttatgggtttctgaagatggaatgaccatgcaaggtattggtactcaatcatgggatgtt

SEQ ID NO: 46165 - DNA, 480 bp, Glycine max
caaggcagaaagcaagctcatcctagagttttaaaaatggcagcagcctcctccatggctctctcttccccatccttggctggcaaggccgtgaagctgggcccatcagcccccgaagtcgggagggtcagcatgaggaagaccgtcaccaagcaggcctcctccggaagcccatggtacggcccagaccgcgtcaagtacttgggcccattctctggcgagcccccgtcctacctcactggcgagttcccaggtgactacggctgggacactgctgggctttcggccgacccagaaaccttcgccagaaaccgtgagctcgaagtgatccactccaggtgggccatgctcggggccttgggctgcgtcttccccgaactgttgtcccgcaacggggtcaagtttggagaagctgtgtggttcaaggccgggtcccagatcttcagcgagggtgggctggactacttgggcaacccaagc

SEQ ID NO: 46166 - DNA, 364 bp, Glycine max
gaaaacaataaatgagaagctctcattcggatttttccattataactgaggtacaagtagctagctagggccattagacaatggttccttatcacaaaaaaaagccctctgctgggaacaagaaacaagggcttatcaattattcatcatcaccacaacatatatatacaacaaacatacactatcatgcatgcatcgacccagtcacattacatttctatcaaagtttccaccacatcttccaccacagaagtcaagagggacttgttattggcatttctaacggagcaattggcacgaatctccccttgtttcccggtgagcacattaagctgacccatcttgagcatagcgaacacaaact

SEQ ID NO: 46167 - DNA, 396 bp, Glycine max
ccctaaatgatgttgtatatggttgaattcattacagtaaaaagatggatacttatgaacgtattccatcaaaattgaactgagctgatgaacagttttttacacagttcaaccaacaggatgttaaacccccgaagctgtcatgacgtgatgaattgttgctttcccttctttgtacaactctcacaaactcggctgcacttaagcttccgtcacgatttgcatcaaacacatgaaagattatgtcaaccacttcatctgtaatgcaaacaccacacacttgtgatgctgcactctgaaaatcagattttgtcaatactccattaacttttccataactgaatatggccagagagaaggatttcaatttcttgcgtaattctgcaaaatcttgaa

SEQ ID NO: 46168 - DNA, 429 bp, Glycine max
gttcatctctgagggtggcctgcgggccatagactccctctggagggagtacagtggcgggaaattcgggtacagcgtgcagaagaagctactggagaaggccaatggggacttcaccaagttcttcatcaaggatgggtggatgaagaagcttgacactgagatggagcaatacaactacaggtccttccccactgagttcatctgggagctcaatgatgacaccccagaggggcatttgcctctcacaaacgctctcagagggacacagttgctcaacaacgttctcaaacacccagcttttgatgtagttgatgacatagaagaataagaccaagatggtgagaacaatgaaaatggaggagcaatctctggcacaggattaaaggataatggttcttcttcaaagaggatcttcaaaacggacta

SEQ ID NO: 46169 - DNA, 498 bp, Glycine max
gtgataattatgtgtatgtgaaacaatttgatgataatagatgtgtcattttatgtatgtatcttgatgacatattgatatttggtggtaatatgcatttcataaattatgtgaagtccttattgtttagaaactttgacatacaagaccttggtcaagtacatgtgattttgggaattaagcttataaagaaaaatgatggcatgacttttacccaatcttattatgttgaaaaactattgaagaagtttaattattttgatgcgaaacatgcttttactccttatgactcatccatgaagttaaagaaaaatttgaataatggaatttcttcacataaatattctcaaagtatcggttctttgatgcatttgacaaatttctctaggtctgtctaatattgcacatgcagttggtagattgtaaagtaattgaagaatttagtgatacaagattgaagttctgattatgatgaaataaaattgacgagtgattatg

SEQ ID NO: 46170 - DNA, 411 bp, Glycine max
gtcgcaaccaatagggaaaccggagcattatgtgcaatgaaggaagtagagttatttcctgatgatccaaaatctgcagagtgtataaagcagttagagcaggaaattaaagttcttagcaatctaaaacattcaaacatcgtacagtattatggcagtgaaatagttgaggaccggttttatatttatctggaatatgttcatcctggttcaattaataaatatgtccgtgaacattgtggtgccataacagaatctgttattcggaatttcactcggcatattccctcagggttggcttatttacatagcaaaaaaaccattcatagggacatcaaaggggctaacttgcttgttgactctgctggagttgttaagctagctgattttgggatggctaagcatcttact

SEQ ID NO: 46171 - DNA, 466 bp, Glycine max
acagaatcaaatttaactcccttttctccttcatcacgtgacctgcaagcatcagcatcaccatcatcatcatctgaatcgttgaggaaagttgccaagttgatggatagctacattgcagaaattgcttctgatgttaatttaaaaccgggaaagatacgcaggcttgcagaggccctccctgagtcatcaagattattgcatgatgggctttacagggcattggacatatatttcaaggctcacccttggctctctgatagagagaaggaagaactatgcaacatcatagactaccagaaactctcaatccatgcttgtgctcatgcttcccaaaatgacaggttacccctcagagttgttcttcaagtgctcttctttgaacaactgcatttgagaacagcattagctggatgtctcaatgcattggatggtgaaattgctccggcagctcctgttcctataa

SEQ ID NO: 46172 - DNA, 464 bp, Glycine max
gctcggaattcggctcgagagaaaaacaagtagttgagaactaagaagaaggaaatggcttcctcaatgatctcctccccagctgttaccaccgtcaaccgtgccggtgccggcatggttgctccattcaccggcctcaaatccatggctggcttccccacgaggaagaccaacaatgacattacctccattgctagcaacggtggaagagtacaatgcatgcaggtgtggccaccaattggcaagaagaagttcgagactctttcctacttgccagacctcgatgatgcccaattggcaaaggaagtcgaataccttctaaggaaaggatggattccttgcttggaattcgagttggaggtcaatttcttgcaaccccttttggtttaattatagtttcttagtcttagtttgtttcaacttattttgaagaaataatcgcttctcttgctggcgtgctaaaa

SEQ ID NO: 46173 - DNA, 387 bp, Glycine max
gagcagctgatgtatacattggtgcaaacccttctgctgacggtggaggagaagatgagggagttgatgatgcagctgctaagggtgatgacattgttgacacattcagacttcaggagcaacccgaatgcgataagaagcagatcgattccttcatgatgaggtatatcaagaatatgactcccaagctcgatgcatagcaacaggagttgattaagaagcacatatagggagcgactgaatacctgctctctaagattaaagatgtccaatgttttgtaggtgagagcatgggcgatgatgctcgcttggtctttgcctactacgaggacggatctgctgatccaacagtcctgtacttagcatatgccttaaaggaggtcaagt

SEQ ID NO: 46174 - DNA, 471 bp, Glycine max
gtcactagggaggggaattgtggattttcacggggagatggttttgttagagaactatactgcactcaactacacaggtctagtgaagataataaagaaatatgataagcgaactggtgcactgcttcgcttgccatttatccaagaggtgctgaaccagcccttcttcaaaattgatgtgcttaacaagcttgtaaaggagtgtgaggtgatactgagtattcttttcaacaatgactggccttcaattagtggggattttgaggaagatgaatatggctccacgactggaaatgaaagcaaagcgacgctgatgcatgttccaaaagaacttgctgaaattgaaaacatggagaacacgttcaccaaactaactttatcagcactgcgtagcttggaagaaattaggggtagaagctcaactgttagcattttctcattgcctcctttgcataactaggctttgcaact

SEQ ID NO: 46175 - DNA, 505 bp, Glycine max
cgcgctggttcgtcaagcagggccggctcgaagaggcgtcccgctcgctccagcgcatccgaggtcagcccgccgactcgtcctacgtccaggaagagctcgcagaaatcgtcgccaaccacgagtacgagatggagctctcgcctcagggcggctacttttcgtcgtgggccgcatgcttttcgggcagcctctggaacccgggaagcaacctccgtcggacgatcctgggcacgtcgttgcagatgatgcagcagtggacgggcgtcaatttcatcttttactttggcacgacgttcttcaaggacctgggcacgatttcaaacccgttcttgatctcgctcattacgacgctcgtcaatgtgtgctcgaccccgctgtcgttctggaccattgagacgcttggccgtcgaccgctcctcatctggggcgctctcggcatgttgatttgcgaatttattactgtcatcattggtaccgcgcgccccaacgacgaggcagtcac

SEQ ID NO: 46176 - DNA, 373 bp, Glycine max
agattttcctctatatctgctccaacccagaggttagttacttcaatgctttcagataaaagatttattcaggagtactttgaaaccaaccggaaaagaatacgacaaatgcatgatgaatttgtgggttgtttaagtaaactaggaatcaagtgtgccaagagcagtgctggtatgtactgttgggttgatatgagtggattaatccgaccttatagtgagaaaggagaaattgaattatgggggaagtttttgagtgttgccaagatcaatataactcctgggtcagcctgtcattgcatagaaccaggatggtttcggatttgttttaccactataacattagaggagatccctatggttattgatcgaa

SEQ ID NO: 46177 - DNA, 429 bp, Glycine max
gaacatcgaccagatctccgcatctgtcgagaaagtcgtccccgtcctccacgccgacgtcgagccgttccgcgtcccgctgcctgcgagcccactgatatcaccgcaacgagagcacccgccgcagctgccaccgccccaaatcacactgcaggaagacagcgacgaggaagctgtcaaagaacaagctgcaaagatgcctcctaagacacagaagcagaaggagcagaaggaggaagaggagcatggcgctgtcttctccgtctccggtcccgtcatcgtggccgagaacatgattggtgttgccatgtacgaactcgtccgtgtcggccacgagaacttggtcggagaggtcattcgtatcgatgccgacaaggccaccatccaagtctacgaggagactgctggtgtgactgtcggcgaccccgt

SEQ ID NO: 46178 - DNA, 476 bp, Glycine max
gcagaaagcaagctcatcctagagttttaaaaatggcagcagcctcctccatggctctctcttccccatccttggctggcaaggccgtgaagctgggcccatcagcccccgaagtcgggagggtcagcatgaggaagaccgtcaccaagcaggccttctccggaagcccatggtacggcccagaccgcgtcaagtacttgggcccattctctggcgagcccccgtcctacctcactggcgagttcccaggtgactacggctgggacactgctgggctttcggccgacccagaaaccttcgccagaaaccgtgagctcgaagtgatccactccaggtgggccatgctcggggccttgggctgcgtcttccccgaactgttgtcccgcaacggggtcaagtttggagaagctgtgtggttcaaggccgggtcccagatcttcagcgagggtgggctggactacttgggcaacccaagc

SEQ ID NO: 46179 - DNA, 461 bp, Glycine max
aagaaattgattatataaatgaaggaaagaatgctgacagattccgccgagattttagaaacataaagtgggttcggatacctctggtatattgggattatactgctttaaaggtgttgaccatggagtatgtaccaggcatcaaaatagaccaggtggatacattaacttcgcgtggttatgatcgattgcgtatctcatcacgtgctacggaggcgtacctgattcagatattgaaaacaggtttctttcatgccgatcctcatcctggaaatcttgctattgatgtggacgaagcaattatttattatgactttggcatgatgggacagatcaaatcttttacccgggagagactgcttgaacttttctatgccatatatgaaaaggattccaaaaaggttatgcaacgccttatagatctcggagccctacaacctactggggacttgtcatcagtg

SEQ ID NO: 46180 - DNA, 420 bp, Glycine max
gaaacgcaaaattatatgctaactaacaagaaaatgatgtcattacaagcctaagcattgatagctgttttgtgttgccatacacatgaaagtatgtattagcataagttgcacgttagtatacatctgagtctgaaccaagcataaacataacagatacaaactaaacaagcaaacaaatactacatcaacactacaatgagtctcatgcaacaaaagaatttgtattggtcacttccatgctgaagcaacaattaagtttttgtcttcccacccaaaatgaagaccccccatttcctcctttatcttgaatttgtcacagtattgcttaataatgagtttcctaattgcttctctcacatttgtgctcattggggatggagtgaagccagccattgacaaccttgccctccattttcc

SEQ ID NO: 46181 - DNA, 446 bp, Glycine max
atataatgaaattttattattatatcatatacaccaagaaaaattctatacgaaagtgaatggaaaaccaaacaacaataagaacaaaaaatattgggcacgaattaataaaatgtgcaaagcatcatacccctacgataaataataatagaaaaacctaaaataagaacgcaaatgtcaacaaagcgaaaacgccggacgagggccccacacaagtgaggcaccgaccaccgtcgctagcgtccctctccggtgctgacgtggcggtggagccattgaaattagggttggaaccatagaggaattgaatcccttcgatgtcgtcccttgccaacaccaccttcttcttccgagaagaaatcgtcggaaacataaccgcttcttctaccgatgagtgacctaaccctagcaagtgcccaatctcgtgcaccgccacggattctaaa

SEQ ID NO: 46182 - DNA, 454 bp, Glycine max
gaaccaactcgatttatatatatatatatatatatatataacaacgtgatatagctttcactttcaaatataaattgaaaaaaaaaaaacactttcatttatctataaagtcttcgtacatatatagcaacataatctttatataaatctctttaaatttaggctttgtgagatccaagctctacctgatgagtttcatcaaggaggtccacatttcccttgtactgatatcttcttgcaacatatataaaaaaaactaggttgagggaagttaacccagctattaggtagtaaaagtagtctagcctcccagcatttatatcatctgttaaccaatccggatggctatgtgttcttgtagaatgatgaactatgttgactattatgctactcacatagctagacacaccaaaagaacacgagaagaaggaattaccaatgcttctcatatgct

SEQ ID NO: 46183 - DNA, 299 bp, Glycine max
ctctctctcaccaaagtcttcctataacgaaaaagataagaagagcagttttccctcaccaaagaagaagaagcaaacaatggccgatcaacttaccgatgaacagatctccgagttcaaggaagccttcagcttgttcgacaaggacggcgatggttgcatcacaaccaaggagcttggaactgttatgcgttcattggggcataacccaactgaggcagagctgcaggacatgatcaatgaagtggatgctgatgggaatggtaccattgacttacctgagttcctaaatctcatgg

SEQ ID NO: 46184 - DNA, 225 bp, Glycine max
gatgggtggtgatggcagcgttactacaagcagcagctactttcatgcaccccacgaagttgagcatgagcaacactttgcagcaaatgtttactaagtccattttcaaggctttgggtttggaacctgttggagctaaaacggtcacatgctccattgatgctgatcttaaggacttggctcacatgtgtgttgatgctaccaatatctctggattcgaccttg

SEQ ID NO: 46185 - DNA, 426 bp, Glycine max
gctgggcccatcagcccccgacgtcgggatggtcagcatgaggaagaccgtcaccaagcaggcctactccggaagcccatggtacggcccagaccgcgtgaagtacttgggcccattctctggacagcccccgtgctacctcactggcgagttcccaggtgactacggctggcacactgacgggctttcgaccgatccagaaaccttgaccagaaaccctgagctcgcagtgatccactccaggtgggccatgctcggggacttgggctgcaggctttcccgaactgctgtaccgcctcggggtcaagtgtggagaagccgcgcggctcacggccgactcccagatcttcagcgagggtgggctggactacttgggcaacccaagccttgtccacgcccatagcatcctcgccatctgggccaccc

SEQ ID NO: 46186 - DNA, 450 bp, Glycine max
acacccaccaccctctccatcacacctgcccgcctccatcacaggcgctcgttccacatcaccggcgcctttcctgccgtctcgcacgcctgtcgcctcgccggccgacagcattccaaactcgcccgtcggacttcggtgactgacatagcaacaacgagcgagacaccgctcatcacacaacaccgcaatcatgtctgcagagccagaccactccgccagcaagggtaaggtcaagctcgataatgacccatcgggcgccgagaagcgcgatgagaatgaggtcgccacagcaatcctcaagaagaagaagaagcccaacagcttgatcgtcacagacgccaccactgatgacaactcgattctcgccctctccaacaacaccatggagacgctacagctgttccgtggtgacacagtgctcgtcaagggcaagaagcgaaaggacac

SEQ ID NO: 46187 - DNA, 450 bp, Glycine max
atcgggcaaatgcttcatttcgccagcggagggcgcgaactattgagacactctatcataacggccagctcctggtgaggcgcatcgcctcattcatgcaacgactgaccgagccatccgcatcatctgtatcataagcatacatcgacgcaaaactagaatccgccgcggccaaccagtttccgtccccatgcctgtataccacaacttggcgtacttaatcgtagagatcctcttcgccagcaccattctgctgagcctcggccgcagcaccctcggcaccaccttcagggaagcggaagaaagcactgccgccagcgctgttcttcatgctctgcgcgaaggcctcgtaccgcctaatctcagtgtctgtgactgagcgacgagccatgctcatggcctcctcgaagtgacgcttcgtgagctctggcactgggtcctcctcatcga

SEQ ID NO: 46188 - DNA, 417 bp, Glycine max
ctcatttccaccatttcaccttttcaatctgtttctctgctttactaatttgtcccagatcagaaccagattgagcttctgcacaaccagaccagagattcaacgcagaaactggaagcagagacaaatgccaagaacatggaattgcaaattggaaggttgcagaagaatgtggaagagagaaatgagcagcttcaggcgtcagcctcctctgctgagaagtatctgaaggagttggatgatcttagaacacagcttgtaacaacaagagcaactgctgatgcaagtgctgcatcagctcaatcagctcagctccaatgtttagaacttgtaaaagaattaaatgagaaaaatggttcactaagagagcatgaggatcgagtcctgaggctaggggagcaactagacaatttacag

SEQ ID NO: 46189 - DNA, 404 bp, Glycine max
gtacgccaaagatttgttgaactcttgcgatgccaacaaggatgggagagtggatttccaggagttcaggaagtatatggacgacaaggaacttgagctttatcgcatttttcaggccattgatgttgcgcataatgggtgcattttggccgatgagctttgggaggcgcttgtgagagcaggaattaagattgatgatgaagaactcgcccgttttgttgagcgtgttgataaggataataatggtgttataacatttgaagaatggagggattttctgctgctttaccctcatgaggcaaccattgagaacatttaccattatttggagcggatatgtgtggttgatataggggaacagactgttattccagcaggtattggtaagcacattcatgcaagca

SEQ ID NO: 46190 - DNA, 420 bp, Glycine max
agacaattgtcacaataatcaattgtatttgtagactttattcttgtcatcaatgtctacattgcaaaaccatttccaatgtatagttgtgccaacggtcagccatgtcaataagattaattaccaagcagtaaatttcttcactccaaatccaaactttttttcatagactcataaaccatgtaggtgatgcttgctgacggtacaactttgagtaagttaggaaatattcctttgtagaaccccctcaaaccttcatgttcaagggttttcctgaatacatcagccattcccttatatgagcgttgagcctgcattcttgttctaaccacctgcagcgggtaaacacatgttgctccaagagttccagatacagctccacatcctaattgtactagaggaccacgctctccatcatga

SEQ ID NO: 46191 - DNA, 438 bp, Glycine max
gaaaaacaagtagttgagaactaagaagaaggaaatggcttcctcaatgatctcctccccagctgttaccaccgtcaaccgtgccggtgccggcatggttgctccattcaccggcctcaaatccatggctggcttccccacgaggaagaccaacaatgacattacctccattgctagcaacggtggaagagtacaatgcatgcaggtgtggccaccaattggcaagaagaagttcgagactctttcctacttgccagacctcgatgatgcccaattggcaaaggaagtcgaataccttctaaggaaaggatggattccttgcttggaattcgagttggagcacggtttcgtgtaccgtgagcacaacaggtcacctggatactatgatggacgctactggaccatgtggaagctgcctatgtttggctgcactgatgc

SEQ ID NO: 46192 - DNA, 467 bp, Glycine max
gagctctagtgttaaccatatatcagtgcaaatcatgccatataatgaatttggacctcctctttctaatgttacaaaactcacatttgaaggaagaactgatgtcagtgatttgggtctccagtacatcttcaaattatgtgtttcattgcgtcacctgaatattaaaggatgcatttctgtcactgatattggcatatcagatctcatatccacgtgtaaaaaacttaattcaattgtggtttgcgatactttatttgggatctattcagttcaagctctttgctcagctatttctggtagtggcaacttcccctctctacattctagagataagcgtttgaaatctgtggtgtctaattttgaaatgctgcatatgggtggctgcaggggtattagtgagtcatctctactagagcttatgtctcaagcacaagttttgaagagtttatgcctgagatggactg

SEQ ID NO: 46193 - DNA, 321 bp, Glycine max
gttacttattttttttttttctccttttacatttttatgtttataattctgtattggtcatgtaaccattaacaaaaattgttctttcaagacttttaaaacattacaattaaagacaggggtaggtttattccactttatcctccgccaacacctactataactgctggcgttgctgctgcctaacatgtatcatattcactacatacatcttagtaggaggggcctttgactaacaactcctccaaggcttcctcggattcaccctcaccggcgtacttcccaagctgggcgagcgagttggacttggcacggaaaagg

SEQ ID NO: 46194 - DNA, 467 bp, Glycine max
  unsure (1)..(467): unsure at all n locations
ttaataatagaacacaagtagttaattcaataacaacgttttcaaaaattcacttctccttcaacgaggaaagcagcgtttcctgtttttgagttgtcgcattttgagacggcttaaaggcatgggagacattgaagaacaaaccatctgacatagatctcatattaacagaagtggatttgccatcaatatctggattctcacttcttactttaatcatggagcatgacatttgcaaaaacattcccgtcataatgatgtcttctcatgattccgttagcatggtactcaaatgcatgttaaaaggtgcagctgattttcttataaaacctgttcgcaggaatgagctaagaaacttgaggcagcatgtatggagaaggcacgccataagcaggcctnctcaaaattttacactaccagagattgaaattggttttgctgcaaaaaaccatgctgcaagcaatgac

SEQ ID NO: 46195 - DNA, 413 bp, Glycine max
caggctactcaagtctaaaccattcggaccccttaggggttttaaccaaggggcccccaaatcccaaaaacgcttagtttttcccccaaaaataactttctcctgggggggaacgcattaaatttttacctaaacctgtaggtccttgagcaaatcctacattacccccaaaacgttggtttttaactaaaaaagtaaatgcttgagcttgaaaagcttttggcccagggggcccgtaaaactcactaggataagcggtttttttaaaccagacaaagcaccaggcattaaacccaaaaccggataaggcccctaaactttaagataagtaagcttttccaaaccatacaagggcacgccgagcccatgcaaaaggtttggttaaaatttgccaaattcccccaagtttacaa

SEQ ID NO: 46196 - DNA, 445 bp, Glycine max
gttgtattatggtatcattcgctgagtcggtcctagggttcgttcatttcgttgcgtttccgtaacttctctgcgtttttcttcattctctgaagctttcaattaagcttgatgacagaaaattccttctgtggaatcaacgggttggcggaatcgttgcaatgcaaaaattgcattgtttacttgtcaatcctacaattccttcaaagtatgattcagatctagatcgtcaactggatcgcatgtttgttgaatatggaaagtggttcattcaagatcagtctctcttcacatggcttctgtctactctttccgaatcggtgctttcgagagtgttgaattgtcaccatgggcatgaaatttgggacaaaagccacactcaatactacgccacacttaaggctaaggtgcggcaactcagatctgaactgaaaaccacaaagaa

SEQ ID NO: 46197 - DNA, 370 bp, Glycine max
aagtgcttgaataattgttcctgcatggcatataccaattcaaatataagtggaacaggtagtggctgtgtcatgtggtttggcgatttattagacatcaaattgtatccagcaccagaaagtgggcagcgtctatatataaggttgcctccttccgaattagattctatcaggcacaaggtgtctaaaataatgtatgcaacctccgttgctgcagctataggagttatacttgctatttattttctctacagaaggaaaatttatgagaaatcaatggccgaatataacaatgaaagttatgtgaatgatctggatctgccattgcttgatttgtcaataatcattgtagccacaaacaaattctcag

SEQ ID NO: 46198 - DNA, 496 bp, Glycine max
ggatattacatgctcgactgctgctacttgcgaaaaagtgatgatcaaagcaagcccggtatctcaaatttttgtagctttctctctaccacttccgcgatgccatcctcaagggccacaccgatcgcttctgcgtcttgaacgccgacgtctgctgttcattccctctggaacaaatgttgcgtctgttcgaggagaaggacggcgaggctgtcattctcggcacccgcgtggccaacgatgctgcgaccaacttcggctgcatcgtcagcgacacccatagcaagcgtgttctgcactacgtggagaagccagagtctcacatctccaatctgatcaactgcggtgtctacctcttcagcaccgaagccttcttccccagcatcaagtccgccatgaagcgccgcgcagaccgtccacgtctgctctactacccctcctcagacaccctcgactcttcatacgttgcccgttccggacaagacaacgacgacga

SEQ ID NO: 46199 - DNA, 498 bp, Glycine max
gaacctgtctagggtttctgtccattggaaattgcaaaatctgcatatgtaaacatgttcccttccactaattatacctcctcaggctcttaccctcgtttcccttcatcttcttcttccacttcaccctatccttcttttactctccttcatcctgaaaattcttcttccagcaacaacacctttcttcatgatccacttgctcttacctacataccctctcattaccatgctccaatcccagaaacactagccaattgggcagttgcagattgtgcaatactgaatcaggatctaggtggtgccctttatggcatcaccaagaaaccaatgaagaaagcaactaagaaagacaggcacagcaagattcatacttctcagggtttgagggacagaagggttaggctttccattgagatcgcacgcaagttctttgatcttcaagatatgttagggtttgacaaagccagcaacacccttgactggctcttcacaaag

SEQ ID NO: 46200 - DNA, 408 bp, Glycine max
ggcagaaagcaagctcatcctagagttttaaaaatggcagcagcctcctccatggctctctcttccccatccttggctggcaaggccgtgaagctgggcccatcagcccccgaagtcgggagggtcagcatgaggaagaccgtcaccaagcaggcctcctccggaagcccatggtacggcccagaccgcgtcaagtacttgggcccattctctggcgagcccccgtcctacctcactggcgagttcccaggtgactacggctgggacactgctgggctttcggccgacccagaaaccttcgccagaaaccgtgagctcgaagtgatccactccaggtgggccatgctcggggccttgggctgcgtcttccccgaactgttgtcccgcaacggggtcaagtttggagaa

SEQ ID NO: 46201 - DNA, 421 bp, Glycine max
ggatgcttttgttgaaaagcatggagtcaaattggggcttatgtctggctttgtcaaagctgctgtcaatgcactccaacatcagccgattgtcaatgcagtcattgatggtgatgatattatatacagagattatatagatatcagcatagctgttggtactccaaaggtttttatcagccacctttatcttttctcttttactttgtttatgtagagaaatcaatcaatcattatactatacttttgatgaaacttagccatttgcgattgacttatgtcaactattgtcatggctatggagctaatttacaagttatctagtatatagtgtctaatttagcaattttttacatggctatgaaaattatcaacatgcatgttgtatttgaacaaatattgaccctcaattgccattcca

SEQ ID NO: 46202 - DNA, 509 bp, Glycine max
  unsure (1)..(509): unsure at all n locations
cagctttgtctcatcattcagagaagcagtctacaaggttaaatgcagaagtgagtcttcagatggacattcgggttctgcttttcaaggaaatgaagcccaaacagataattttatcgaaatgtaccttagaccaccttcagctagtgaagaagcaaggataaatgattggatcaaagtgcggcagtctggaattagatattatttatcacttggtgaccagaggattgttgacaagaatttcatcatcaggcctaaagctgaatttgaggttggtcgaatgacattgggtggattattggctcttgggtacattgttgttgttagttacaagcgtgcctncacaactgtcaataatggcaaggtttcaatgtcttttgaaactattgatgttcttggtgagacgttcatggtgatgagaggaactaatagaaagactgtcagaacagaagcattaaggatgggtattaatggaccttggattactaaatcatatctggaaatgattc

SEQ ID NO: 46203 - DNA, 168 bp, Glycine max
gggaaaaagcaagtaacattaagttgggttgggatccccaagaaaattcacattttttgaaggacattggaataacatattcttcaccaaacacaaatttaaaaacttttaaaagtccacaagtcatccttttttttcatgcccacttgccggggacaaaattggggg

SEQ ID NO: 46204 - DNA, 423 bp, Glycine max
gggaagccaaagcgaaaccctaaccctaacggagagatggcggagcacttggcatcgatattcgggacggagaaggacagggtgaactgtccgttctacttcaagatcggcgcgtgcaggcacggcgaccggtgctcccggcttcacacgaagcccacaattagcccaacgttggttctgtcgaacatgtaccagaggcccgacatgaacatgaacatcatcaccaaccccgatcagccccagccccaatctctcgaccccgataaggtccaggatcacttcgacgacttctacgaagatctctttgaggagcttagcaagtacggccccattcagagcttgaatatttgcgacaacctcgccgatcatatggtctttctctccgcttccttcacgcaattttaattcttcttaaatttaatt

SEQ ID NO: 46205 - DNA, 436 bp, Glycine max
  unsure (1)..(436): unsure at all n locations
ccaagagcttgctgttttctagctgttgttgcattgctcagccatggatttgaaagctgaggctaacgcgggagatactgagttccaagcagtgaagattccgagacaaggaggatatagagccacatatttcatctttgcaatgatgttgctggataacattggctttgtggccaacatggtaagcttggttttatatttcatgaacgtcatgcattttgactactctggttctgcaaccaccacaacaaactggttgggtactactttcttgctgacgatcgttggagggttcatctccgatacttatatgaatcgcctcaacacttgcatcctctttggcataatccagttgttgggatactccctacttgtgattcaatcccancgacaaacacttcagcctgatccatgtttaaaatcaacatgtgtgcat

SEQ ID NO: 46206 - DNA, 377 bp, Glycine max
gcattacatcacgtggctctcacagtaatcttcaagcagagcgatccgacacgatgggctcagcagcgaaatatgagcttccattcaagctgaacaatccggacctcctacacaatgaatcgttcgtccacggtaaatgggtgaagtcgaagtccggcaaaactttcgaagttgcagatcccggaactggcaagacatggatagattgtccaacaaacgacgcttcagacgttgacgaagcagtcaaaagctcgcatgaatgctttctggaatacaagaagatcagtccgagacagcgtgcgcagatgctgtacaagtgggacgctttgatcaaagagaacagggaagacatcgccaccattcttgtgtacgagact

SEQ ID NO: 46207 - DNA, 507 bp, Glycine max
gtttttccacaatttgttggcttcttccacaacacatgtgcatatatacctatataagtttttgaaactctatcttcaaagttgcgtaatctggagctccttgacataagtttcaactatttgactaatgacatcctgccaaccctcgggggatttacatctttgaaagagctgtatttggttggaattcatttggactcagatcttcatttccaagagaacgatggatttacgtggccaaccggtttacaagcccttgatctggtgggaaacagattaaataacaagtttcttccatcattaaatgggttagaaagtctcaaacatctttatttaggcttcaatcagttagaaggatcgctgaatataggcggattatcaggtttgactagcttggagattcttgatctaagttataataatattagtgattttgtggtccatcaaggcttaaaaagtctacgcagattggatgctctttatttagatgggaatatgatagatgga

SEQ ID NO: 46208 - DNA, 501 bp, Glycine max
gattgttctttgtgaactatttttcccatgggtttagtgtttttcataaaaaactgactgataattacgtacaagggcagattaaaatcatcatcaatgaaaaaaggtatatcttggtttttcatgttcatgctcttgggtacagcttttgtgggttaaccttatcatggatacacttggggcgcttgcactggctactgaaccaccaacagaccgcctaatgcacagatcaccagttggccgaagagaacctcttataacaaatatcatgtggagaaacttgatcgtacaggctgcctatcaaatcgcagttctcctcgtccttaacttttgtggtgaaagtattctaccaaaacaaaataccagagctgatgcctttcaagtgaagaatactttaatattcaacgcgttcgtcctgtgccaaatattcaatgaattcaatgctcggaaacccgatgaaatgaatgttttccgtggagtgaccaagaacaaacttttcgt

SEQ ID NO: 46209 - DNA, 412 bp, Glycine max
attacccctaccagcagcagtcaaaaggaatattgatcagataccctaccacaatgtcttccagcaagggtcaattcgagcagggctaccagcccccagtccagcagcaaagtagcattcccgggaaagagtccgagctagaccctcagcctgagtacgaccatctgcccactccagatggaggcaaggagctctacaaggctgctggcaagcttaagggcaagaaagccatcatcacaggtggtgattctgggattggccgcgcatccgcaattctctacgctatggagggtgccgatagctttatcgcatacttacctgaagaggaagaagatgctcagcatacaaagaagctggttgaagcgaatggagccaagtgctatacctttgccacagacctgacggatcgcgc

SEQ ID NO: 46210 - DNA, 417 bp, Glycine max
  unsure (1)..(417): unsure at all n locations
cattattgaatgtcctattcatctatataatcgtgaaatcgtaaatgcacctggcactctagatagaacaactactcgcaacagtgacttcaaggtctgagtgagcaggggcacaacatgaagtaaagacgtttaaccatttacgacggttccaccgttggggtgtaaagtctggccactgatagagctgctgtctggggcagcgagaaagacagcgacagtcgcaatctcacttggctgcgaagggcggccgatgggagcggtgaattgttcaatggccttcttagtcattgtcgcagggatgagcggagtccagacaggacccggcgncgatggcgttgacgcgaatgcccttggagaatactnggttgtgcagagcgcgagtgaaggagatgatagctcccttagttgatgtgt

SEQ ID NO: 46211 - DNA, 495 bp, Glycine max
  unsure (1)..(495): unsure at all n locations
tttaattgtaacgggctatggagccactattagaccctctcaaagatagagctatcaaatcagtcaaggcacccccacatcggcctcttagtcggcaattgatgttcccagaccgtcttaagaataaaccagattggaaagttataagagatcatcttcagaaggaaggacgtatcgacaaggaggaccttataaaacttatcaacgatgctaacaagcttttcaagagtgagggaaacttgatctacgtcgaagatcccctaacagtagtcggagacatccatggacagttctatgatgccataaagattgtagaaattggtggagatccagcaaattcgaaatacttgttcctaggtgactntgtggatagaggttctttttcgattgaagtgcttgtcctgctatactccctcaagataaacttccctaaaacaataaatatgcttcgaggcaaccacgaatgtangcagatgacgacattcttcaacttca

SEQ ID NO: 46212 - DNA, 466 bp, Glycine max
aagatattgaggagatacttcaaataaatgatagaagggttttaggaaaggatagccaagatgcccctcaacaacatgcttcttaacttactcattctatgcttttgccagagatatcactcttagatattcattgcatgatattgattaggtcccctataacatctcggatccgtgccaagatgctctatgccactactaaagacaggtttagacgtgagctagatggtgtccattatgaaatccaggctactgaccccacagaaatggatcttgaagtgctgagagaccgtgcacattgaaatgtttaagcacttaaattcattttcatatcagaatctactaggttctacctttaatgaattacctcttcatgctttgtcatctgcagagcccatcttgccacagatatataactcgtatccaataatatgaatctgaaggctgatgggtttaaagcttttgg

SEQ ID NO: 46213 - DNA, 451 bp, Glycine max
caatttcagaaccaacaatcagaaattggtagagaatctcttggttgagaaaggaagactcagagattctctaccaatttcagaaccaacaatcagaaattgatcgagtccttgctcatcatactgagaaagtgagaatggagttggaggaacaaagaatgaggcaatcaaggatgttggtgagcgcaatccaagaggcaatggtgaataagctgaaggaaaaagacgaagagattcagcgtatggagaagctgaattgggcccttcaagaaagagtcaaaagcatgtgcatggagaaccaaatttggagggaattggcacaaacgaacgaagccacagccaactacctaagaagcaatttggaacaagtcttggcacatgtcggcgaggaacgcgccaccgcggccgaggtggccgatgatgctcaatctagctgtggcagcaatgatgc

SEQ ID NO: 46214 - DNA, 436 bp, Glycine max
aaacatctaaactgttctgtacttgcatgatgaggaagaactacaaaccagagaaacattagcataaatgcataatattcaaattctgaaaaccctaaatacaacagatgaatgaaaaacatacatctgtcacaaaagcttttaaagcaacacttgcttgtcagtacagcatctttcataacatcattacataagggacagcggagctcgggtggtagttccccaacagaacgtgttgatggcatcccttctatttctttctcaaaagcagcctcatttggcttcaagacagctactgaaccattaggtaaagcataggaaccttgtggatttaccatcagcatggatcttggaataccagtaggttgcttgacttttctcatgtcataattcgggtcaccatttgtaggacagtgctgaataaaatgtccaggca

SEQ ID NO: 46215 - DNA, 467 bp, Glycine max
cagatgcaaccaaaccagattgcccaatcatgtatgccagcagtggcttttttactatgacaggctattcttcaaaggagattattggaaggaactgtcgatttcttcaggggcctgagaccgacaagaatgaagtggccaaaattcgggatgcaactagaaatggaagaagttattgtggcagacttttaaactacaagaaagatggaactccattctggaatcttctcactatcacccccatcaaagatgaccatggcaatactatcaaattcattggaatgcaggttgaagtgagcaagtatacagaaggcgtgaatgaaaaggcattacgaccaaatggattacctaagtcattaattcgatatgatgctcgtcaaaaggagaaagctatgggttctatcactgaggttgtccaaaccgttaaagacccaaaatcaattattaatgataggaatggtgatact

SEQ ID NO: 46216 - DNA, 391 bp, Glycine max
acgtggaatgaggcttataataccctatattgcttttcttcacatacgctggcagataaagtttcggaactgcagtgccctctaaacacagtcatcaaaacaccaacactataattattaaaagacattttttactcagactgcccaaacacagaaaatcctacatttagattggtgaaccctccatctaacacaagattgtgaccactaacacaccattgactaagaaatgtttcaatcttgatgaagaccgaaatggtgagatttattccaacctaaaaggtgttcatcttgtgccaaacgatgtggccgaagctgctctatatttggcaggtgatgagtcaaagtatgttagtggtcacaatcttgtgttagattggtgaaccctcca

SEQ ID NO: 46217 - DNA, 423 bp, Glycine max
ctagccttcttcaagtgttcttcctctttaatctgtctatagaatacttacccttttgtcaagactgacctctcgatccttctcaaaagaagaaaattaaaatggcaactgaaaagcttagaggatgtgcatagtattgtgcaagctctaaaccctacttggccatgatctctatacaattcggctatgctggcatgaacattatcactaaggtttccctcaaccaaggcatgagccactatgtccttgtggtctatcgccacgcttttgccaccgctgacatcgctccttttgcctttattattgaaaggttcatagaataaacataaaccttagtgtcagcagcttgccattacactctctctttgttttgttactataaagcttagcaaattaatgcttactcattgcttcaattttcca

SEQ ID NO: 46218 - DNA, 349 bp, Glycine max
taacaccaccgaaacacctcacggcctggtgcctatatcgacaacacccacattatgtggcggccaacagcagcagaggcgatcgcgtcactgctcacattaccctcagctctcgccgagatcagcctaagctcccagaagtctttcgctcgcactgagaacctgtgtgcgtccgacccctacctgtccatctacggagacaggcccgacgatggccctccttgtttcaactgtaaccttgacgacttcacgtgtgttcagcttgccaactgtaccaaaagcagcggcaagtgctcctgtcctactggatttggtggagaggactgcagtcagccactctgtggatctc

SEQ ID NO: 46219 - DNA, 471 bp, Glycine max
cagaaaaacttcatatatattctctcacatctattccaagaaacctacatttacacatgaacatcctacatcactcttcaacacccacaagtcaatagcttcccctcatctcaaacaacacaattatcttccccactcatctcctctccacaagcaagaaatgcaacgccgcaaatccaagcacgaaaaacgcacccgacacaactcccaaccccgcaacatcacgccacagcgccaacacatcaaaaccgaaactgctcaggatcgcactgccgggcacttcgatgttgaggccgtacttcttgtcgacgagagacaggtagcgcacttcattgacgatcaggccttcgaagccgaagtggaagatggagagcgattgcaaccacagcagacccttagggatggtctcgtggttgagcaggaagccgccaaagagcagggagaagagcatgacgagcacgccgagcaagt

SEQ ID NO: 46220 - DNA, 493 bp, Glycine max
gtaggctatactaaggtgaaaaaggagagatggcagctgcaacatctagtgctgtgttaaacgggtttggatctcacttcttgtgtggaggaaagaggagccatgcccttcttgctgctagcattggagggaaagttggtgcttctgttagtcctaaaagagttattgtggcagttgctgctgcaccaaagaagtcatggatccccgctgtaaaaggtggtgggagtttcatagacccagaatggcttgatggctcgtaagttcaaccatctatctattcaatttatctcttgtttctcctttctttcttatattctttgttggaaattcaagtatgagtaattagtctcactcacattagtcaggaaatggctcaatgatagtgtattttaaactgtaacttgtttcttatatataggaccagaagtagtatgtcttaaggttttggataaagaaatagagtttgattttcttgataatcatagtcattaca

SEQ ID NO: 46221 - DNA, 427 bp, Glycine max
agaactcttgccacacctgtcgtcatggatctgtgcgtcagggagatggttgctcgcgccgccaagtacatctttgccggccacctccgaagcacagagaccttccatatctccaactccatcgcgcatttcctcaactgcttcatcggctcctctgcgaacggtggcgccgctgccatccaggcaccgcaacctctgcgacccaagctcaagaagaacggcaagtccaaggtgaaggagcccgttccttctgccgctcctttcactctcacgaggacagctctctggaacgagatcgtcgcgctggtcaaggagaaatttgcgtatgatttggcatttgattatgaggtttcacgtcccaccgttttccttcgctccttctgcttgaaggtcggcattcaagtcgccgcgcgagactacgatttca

SEQ ID NO: 46222 - DNA, 449 bp, Glycine max
atctgttaggaaaaattcccaccttcattgaatacacaattctctaagtatgaacattataattcaaaaccaataatgttaaagataaaaaataatcttcgaaaaaaatatccagccttttgttcaatatgattgtctgggtccaggaaaagctcatgtaatatgatttctgtaggtaacatcccctcctccaaggacataaacacagagggatttgcttggatgaatgacaacctcatcctatgcaataatacaacagggattgttcaccgaaaattttcaacctcaaaagcacaagctgttccatcaaccgaggccgagacaaggtaattgcgattagaagacacagaaagagactgaatggcatcagagtgccccttcaatgtttttacgcattcaccagaccggctgtcccacaatctcaccttaccatccacacaaccagaagc

SEQ ID NO: 46223 - DNA, 351 bp, Glycine max
ataaaggattgacttatctttggagaagaaattgaatgacgcaacaaatccagttttttacttcgcaaaagttagcaacgcatataaatccctcactgtcaattctaggcattgctttcatcttatttgatggatgttcaaagctcatgagaccatgctcactatgaaacatacccccctgataagaattagtaatttcaatggtggtttacatatcagttggaacccagtctggccattagaatcaaatgttacaaaagttgtcatagatcataaatccaagactgtcttgaagttccttgaggacctgatcagcagggtatggaccccagtcgtgaagagtttgatatg

SEQ ID NO: 46224 - DNA, 500 bp, Glycine max
  unsure (1)..(500): unsure at all n locations
gctgaagcttcagtagatgctgttaactttgttttgaaagaactcgtaaggaaatcaatagctgaaacaaaggaactgaagcgcttcccaacatttcaagccgaactagctgcagcagcaaatgaggctttagaaaggttccgtgaagagagtaagaagacaactgttcggcttgtagacatggaatcttcatatctcactgtggatttcttccggagacttcctcaagaagtggagaaatctggaactcctgctgccacaaatattgaccgatatgcagaggggcatttcaggagaattgcatcaaatgtgtcatcctatatagggttggtggcagacacgcttagaaacacaattccaaaggctgttgtctattgtcaggtcagacaagcaaaacagtcattgctaaaccatttctacacccaaatagggaagaaagagggtaaacagctatcgcanatgttagatgaagaccctgcattgatggagaggagacaaca

SEQ ID NO: 46225 - DNA, 415 bp, Glycine max
cattcaaatgatatcacaatgaatttaactttgcataaggggcaaatataacatttacacacagtatagagccaactgaataacaagcacatacatatgctttaacaattgaattccttagtctgctttaaggatagcaaatatgcggccatgaaacacgcaataccctccactatatcttcttgttctgagtcaaaacgttcactttcccaagaattactttcttctcaacaccagcaccccgatgataatccatggccaacgtctccacaatccttttcccttcatcgtaacaactcctctcaccaattggattcacatttccccagtaagtctctttctgaggatgctccaacggatcaccgtaaacctaactagtactagtaagcagaaacctagccccaattcttttcgc

SEQ ID NO: 46226 - DNA, 356 bp, Glycine max
cctatgggtgctcactccttgctcttaaccctttttctctacaccaacagtggtctcactggctggtctctccacagaactgtatagagagagatggcagctgcaacatctggtgctgtgttaaatgggttgggatcttgcttcttgagtggaggaaacaggagccaaacccttctggccactgctattggaggcaaaggtggtgctgctgctgttactgttagtcctagaagactcattgcggcagctgctgctgcaccaaagaaggcatggctccctggtgtcagaggtggtggcaacctcgtcgacccagaatggcttgatggatcgctaccaggtgactatggctttgaccc

SEQ ID NO: 46227 - DNA, 488 bp, Glycine max
tgatgttcctgttgggagataccgcagtttgatttatggacagaacttaagtgatgtggtgattacaggtgataatggaattattgatgggcagggttctgtttggtgggacctaatcagtactcattccttaaattatagccgaccacatattatagaacttgttggttctgataatatcataatctcaaatttgacatttttaaactctcctgcttggagcatccatcccgtatattgcaggtacaagtggttcatgtttgtgtcactgacttcttaaatggaactgttctgttttataagtatcttctttacacaatgtatgcagtaacattcaaatccagaagataacagttcaggcaccaaccaagttcccttacacaagcggtatagttccagattcttctgagcatgtttgcattgacaactgcaatattagcactggtcatgatgcaattgtgctgaagagtggttgggatgaatatgga

SEQ ID NO: 46228 - DNA, 414 bp, Glycine max
gctacagtgtcgctttaccaaaacgccaaaatacagtgagattggttttaaagcaactccggcgtgaccacaacgccacttgttccagccatgcctcctgaacagacccaacaacctctgttatcggaggagcaagaagagacagcctacgattcctcggagaaggtggtggtggtcggaatcgacgaccacgacggcgacgtggaggcgccgccgttctcatggcggaagctgtggctcttcactgggcccgggtttctcatgagcatcgcgtttttggatcccgggaatctcgagggggatcttcagtccggtgccattgctgggtactcgctcttgtggctcctcatgtgggccacggctatgggccttatcatccagcttctctcggctcggctcggcgtggctacggga

SEQ ID NO: 46229 - DNA, 124 bp, Glycine max
aataagcacgcattcattaatttccattgaagtccgaaaacagaaaccaaaaatacaggatgaggaaatctgtataaagctaaaacaaatgggaatgtcgtttaagtccaacaaacaaagtggg

SEQ ID NO: 46230 - DNA, 410 bp, Glycine max
ccataattccattcaaagcagaagcataatcagttcctcataaatatccacagttttcgcaaaaaaaattaatataatgtacagcagtaaatatatatatatatatatatatatatatatatatatatatatcaaattagttagcagcctccccggcattattgtcatttccatcctccaagttcttctgttgaagttcatgttttagtctttgatcctccaagtttttctgttgaagctcatgttttagtctttgatcctccaagttcttctgtttaatctcatgttttagtctctgtatctgccgatccttctcttctaatttttcttgtaacataagaaccatttcattggatctttccacatcatttggcagtccttccatgtgcttgtgcaacccttcaaattga

SEQ ID NO: 46231 - DNA, 272 bp, Glycine max
  unsure (1)..(272): unsure at all n locations
agggggcaccaaancaccaaatctacctcgtacaaataacttatgagctttctgagggggtaaagtttgaccttgctagagtagaagccccaaaggaagctacccttgtttaatataaccagtgcttagagacaatatctaaactggaggagagaataaaagaagttgaggataatgcattaaggattcatgagcatgctgatatagcagaaaaagaaatgaaggctttgaaattacaagtcactaaacttaatgaagaaaaggaagatgcc

SEQ ID NO: 46232 - DNA, 415 bp, Glycine max
caagaagattctagtagtggagaaactaaaaggccattaaaaaatttagacaatgaaattgctcagataacaaagttgaagtcaacaccccatcaacaattagtccaagttggaactggaaggccagaattgccagtttctcctgtgaagatgctggcaggtcgagagtctaattactcggacggggaaggttttcttcagccgatcgttgtcatcttttgagcagatatttgcctgtaaatggtccctggcttattgaccaaatgtctagtagggcttatgtctcccagttttcagctgatggctctctttttattgctgggttccagggaagtcacataagaatatacaacgtggacagaggttggaaagttcagacgaacattctagctaaaaatttgagatggacaatcac

SEQ ID NO: 46233 - DNA, 473 bp, Glycine max
ggaaatgatggcaattgggtttatgtttgttgttggctccttcacttcctgctatgggacaacaggtttttctttgtgacctaaaaaccttttcaaaaggctttcctgatggctaatgaaacaaaagacttccacatatttaaactgtgaaattcaggtgctttctctcggtcagcagttaacaacaatgcaggcgcaaaaacagctgtgtcaaatgtagagatgtctgagacagtcatggtgacactcctttttctcatgccattgtttcaatacacgcctaatgtcgtgctgggcgcaatcatagtcacagcagtaattggcctcatcgatctccccgctgcttgtaacatttggaagatcgacaaattcgattatgctgcgatgatgactgctttcttaagtgttcttttcatctctgaccaaggacgccttgctcttgctgttggattatcaactttgaagatactctt

SEQ ID NO: 46234 - DNA, 298 bp, Glycine max
aaaaagaagccagctgggatcttttgtcattgctaaaattaaaaggcaggggttttttacaaattttttacaatttgaaaaaaattcagtttggggggagctacactacattgcaggggcatttaggctattaaaacaacaactggggagggcgttgaaggagggccccttttttcaacagggatttaaacaaactcggacaggagagcccggaatttatttccaaactttgtgttcttctccaatggaacttccacaattttgtcaattgcctcacgggtgctccttatttggccca

SEQ ID NO: 46235 - DNA, 394 bp, Glycine max
  unsure (1)..(394): unsure at all n locations
cccatccaacaaaaatcataaaagttaaaattcaataaaaaagcatcaaataagttttaaacagataaatggatgaaagcaactacacatttagtccacttcctcaatcttggggccagcaccacttcctcggctgccccagcaccagcaccacccatgtcaggaccagcaccaccttggtacatcttggcaatgataggattgcagatgctttccaattccttcattttgtcctcaaattcatctgcttctgcgagctggttgctgtctagccactggatagcttgctcaattgcgtcctcaatcttcttcttgtcagtaggatcaagtttctcaccaattttgtcatccttcacagngttcctcatgttgtatgcatagttttccaaagcat

SEQ ID NO: 46236 - DNA, 438 bp, Glycine max
caccgctcccaggaagtgaccaattatgcttcacaggaggacgaacagcttgtctttccttattgaatacttttgattgatccatagcattggctgatctttcaatagaatttccactcgaaccaacagaaagcttaggaacgagaaaactagccattgcaccaaatgcacttggagtggctacagaacctttctcattgtctgcaccagtttgtccaaaaactgcttcaatatggtaaacagtctttgatatgttatcaatatcccccacaatgtacaaggtagcatttgcagggaaataccaacgctcatgaaacttccttattttatctgcatcccacttctttatctgttcttctaagccaatgggaaaccttgtgctgagcttattttcagaatgcagatgctgtaacaactgggcatcaactcgatactcta

SEQ ID NO: 46237 - DNA, 209 bp, Glycine max
agggcccaaagagcactttcattctccctggacaatggtttttaaccaaattttaatcccacaagagataccgcagcccatctttctaaatgtttcaacgtacgggaaaaatcattgaaaaggtttctaaaatttggggaacccgcattggttttaaaaaccatggccattccattttttagagaaatattatgggggccaagcctttt

SEQ ID NO: 46238 - DNA, 175 bp, Glycine max
gggtaaataatgtagaactgaacatgggtttctctttctctctctctgtctgcttcttcactttctctcgattcaatcgaaaaaaatcatggccagaaaattcttcgtcggcggcaactgggaatgcaatgggaccactgaggaggtgaacaaaaaagggactactttaaatgaa

SEQ ID NO: 46239 - DNA, 498 bp, Glycine max
gaagcaataatttgaaatatgttattggaaatatcagaaactgaattctttgatcgaattgtatccatgccaacaacatgaaatgaaaatagaaatatgttgtacattgaaataaactaaagtggtaatgcatattgttgtgctgcgtatgttaatcatcttccatcaccgaagtcaattaattcaatatctctcaagctgtcatatccagtattttgttggccactactatcaccattttcatgagtgctatatgccccatgaagcaagtactgagtctcctcaaaattttggcctgcattggtccttggttgtttctccattagtcgtattccttccaactccattgccacttccttcataccaggcctttcctcccctctaagtctcaagcacttggccgcaagaatagcaacttccatgatctcctgtttattttcttcatcataaataccaatttgaagaacatcaaacaagcgatcctctttcaagcaacat

SEQ ID NO: 46240 - DNA, 438 bp, Glycine max
  unsure (1)..(438): unsure at all n locations
tatgaatttgnagcaacggtaccttttttattatttgcataatgaaggccaattaggcgatgtgtgttggaaaacacgtctaaggatcgcaacagaggcagctggagctctgtcatatctacactcagaggcctccatacccatcatccatagagatgtcaagactgctaacatcctcttggatgatgcttgcactgccaaagtttctgattttggtgcttcaagattgattccacttgatcaaactgaattagccacaatagtgcaaggaaccatcgggtatttagacccagagtacatgcaaacaagccaattgactgaaaaaagtgatgtttatagctttggggtggtgcttgtggaactgctaacaggggagaaacctttctcttttgacaagccagaagataaacgaagtcttacagttcactttctatgttg

SEQ ID NO: 46241 - DNA, 502 bp, Glycine max
  unsure (1)..(502): unsure at all n locations
tcgcgatctagaactagctcatattcagtgtattcatttcatcaatcactttgtctttctcatcataaccaccaaaacgccaaccatgaatccagatcgtttcagatacatgcaagccctaatgtttatgatgttgcaggttgtttgtgctgaagaggaaataatgtgcattgagagggagagggaagcactcctccaattcaaagctgcccttgtggatgactatggcatgctatcatcttggaccactgctgattgctgccagtgggaagggattcgctgcaccaacctcaccggccatgttctaatgctcgaccttcacggtcagcttaattattattcatatggaattgcctcgcgacgttatatcagaggagagatccacaagtcgttgatggagttgcaacaattaaactatttaaacctcggttcgaattattttcaaggcagaggaatcncagagtttctttggttctcttagcaacctgagacaccttgatct

SEQ ID NO: 46242 - DNA, 338 bp, Glycine max
gctaaatcatagtacggaggagtgacaaatacttacagaatccaaagctttttttttctggggcttcttcttcttggtaacgccatgtctgcgacccaccaagagcagccactggtagagaactcggtcatagaataagacgagctcgaagaaacagcttatgattcggcagacaagatagtggtggttggagcctacgagtacgatgacgatgagaattgggggagagcgccccaaatctcgcggaagaagctatggctgtacaccggcccgggctttctgaggagcatagagttcctggaccatggaaacatagagggggaccttcaggcgggtgc

SEQ ID NO: 46243 - DNA, 474 bp, Glycine max
agtcaaatatctatatttattattcatggtgtagcaatacactttttagatgagtgagggcactgtcatgtggagagaattcctgtgtacttactggatcaagtaaagaagtttgtctcacttcaaggaagtgacaaagatatgaatacaacatcaagttttcgacaagagattatgaaatgagagactgaggaagaactttatatgggttgagtatgtgattggggtccagcaaattcttgattgaagccatcacttgtacagtttcatgtgatttgctgtagaaaatttcgttggctttcattagtcccaggccatgctccgcgctaatgctacctcggtgcttagatgtccattcatatacataaggttcaatatgtgacaaaatcttgtcatcgtaatgagaagtagaaatgtttaaatgcaaattaccatcttcaaggtgaccatatcctattacattagctgtgttac

SEQ ID NO: 46244 - DNA, 528 bp, Glycine max
gtggatttgagttcatgccttcttcatcacccacctattacgccaacctccacaaccgggccgctgatgtgttgaccgttgaccagattaccccagtgtgaggagcttgggattcttgttgacagagatgatcagggcactctgcttcagattttcaccaagcctgttggggacaggttcttcattttctgcttcttttttttttgtttttttaatccctgctaaacaactttattataactctcacattctattagcctagccttgatgacttttaatttacgttaaactgtgctttttattctcctactttgttagttttttttttttatataaaattttaatttttcaattataactttcaataattaacaaatgatgtacagtatagtgttatgtcagaatggatgtacttgatgtagcagttcatcagagtgtttccctctacaaattgtacttttgtccctttcctgacataaagtttacgactttgaaaaaattgatagataaaagtgcaatttatttatc

SEQ ID NO: 46245 - DNA, 431 bp, Glycine max
gtgtatgtaaccatgtattaaagatcgaattacaaagggatttaacctcctccgcttccgtaagtctttccgaaaaccatcatctgaagttgatcgtatccagccaagactccagcttcagcgatagctcgaagaacgttggcacctgctcccttgaagagtgacttgtatccctccttggcaatgatctcctggaagcagtggtaagagctcttgtacttgacagcctcttcagaagtcatcatcatacgtcgtcgaatggtgtcgagaggataagaagcaagaccagctccgatagtgatggaccatccaagcaagaaagaagcatggaagttgtttgccaaatttccagtgaggagaacaggcttgagtgagtcataaagtccaaagtaaagtcctcgatagacgatgataccaacgcaagagatgtt

SEQ ID NO: 46246 - DNA, 477 bp, Glycine max
aaatctctaatatatgttttctcgaatattagaagcactaccatttaagataacaagttttagaactctcttctcattgtgaatcaaataagaaaataactattttttcctctcctaacaagtccctcttctcctcaagcaaacaaacagaatgtttatttaaaatctatctccttccctcattaaatttctttccccctccttggaaccaaacaaaacctgctaagtggtatagaaactgagaagagatattacaggaaatatagaagggatgtttaaaatttagaggatggagagttaggaggaaaataaggtgtaaaatgaaaagagcatccactggtatgtttcagtcagataaacccgcctttgactttagatgcgccttgaattccatgatgtcaccctcccatctggtcacagattgattagcacatacccatatctcatgagccacttgatttatgagcctaaaatcat

SEQ ID NO: 46247 - DNA, 385 bp, Glycine max
tgaagataaaagccttagcctttccttcatctccaaacacaaagacatcatcatccggggctgctttcgtctccactgtcggagctgccaccagagctcttttgaacctgaatggttctggagctggagcttcagctcccagttcagccttctttgggaccagcttgaagaaggttattgcctcaagggtccccaacagcaaggtttccggcggaagcttcaagattgttgctgtagaagagaagaaagagattgaagagacccatcagaccgacaaggacagatggaagggtcttgcctatgatatctcagacgaccaacatgacatcacaagaggaaagggtttggttgacttcctttttcaagctccacaggatgttggaac

SEQ ID NO: 46248 - DNA, 401 bp, Glycine max
gactatggtttatttatttaatttatataatccaattacggggataattgcaaattattaaggggtgcacttgggcaacaccctgagaatatagaataacttaattttaaataatttatataatccagttacaaggatttataatacagcagtactgaatttaatcacttcaaaattaagttatgctatattctcaaggtgtctaggtaagactttccatcaagtttacgagcaaataggttcttcaaaaactcctttaattcgattcttttgaaccgtgctggtgttttttcagtgatcaagcttattgcaggacctatcaccccatcatgttttgatgtgtggaatgttgcaattgaaatcctttcttttgcagagttcaccattgcacgatgctcaac

SEQ ID NO: 46249 - DNA, 301 bp, Glycine max
ggttgaaaatacaaagcattggcgggcaaactaattgcaaaaccagacgtcattacaatttacatatcattttgtaagacattttggaagccttcaaaagtctctgccactcaactagaagggagaagttctttttctccaaatcatcaacacatttctgcaagatgaaaatttgaacatgagcatgtttagctctgtccagttcctcctcatattcctttttcttacaatttgcatcttcttgtagaatatgaatttgtaattccttttcagccaattcattttcattcaatttcaaaac

SEQ ID NO: 46250 - DNA, 308 bp, Glycine max
  unsure (1)..(308): unsure at all n locations
gctcttctttggctaaggtatcatncttgtctcatcccactaaggagaacaatctcgcggacttcttcatcgatctcggtatgggtggcccctctgccgctgtatcgaagactgccgctgctcccatcgagcgagtcaagcttctcattcagaatcaggatgagatgatcaagtctggtcgattgactaccccttacaagggtatcaccgagtgtttctctcgagtcattgctgaggagggattcaactcgttgtggagaggaaatcttgccaacgtttttcgatacttccccactcaagctctcaac

SEQ ID NO: 46251 - DNA, 202 bp, Glycine max
aagaaaacgattatgaacttgaacctttatttgttcaccggggttggggttaaaaactgcccaaaggagacttgatcttaaaaaatgagaaagggaaaacaaaactcacatttaaagggggctcttttcttcactggtgggggctcttttcaaaaatagctattaactttagcgaacaatgcctttaattttgtcttccact

SEQ ID NO: 46252 - DNA, 459 bp, Glycine max
aattcacaatgtcagtagttatttatcaagaatactattatgatcatttcccttttccttcatgggaaagtaataagcattttactgtcagtaatctgcttttaatttagaatttacaaaaaagaaaatacaagcaataattaatcgggatatacatttgaaaatatcatgtacatgcacctcattcattcatcagcaaggatccgtccgttaaaattttccatcatagaaaactgcatattctctgatggtttccaatgacgttttctttggttaataaaccaattgttaatttgcttctggtccagccctgttgacttagccagttcaatcttatcagcttccgtagggtaaggccatttgtagtgaacattccaccattgaagcaatgcttgtcttgcttcctttggaagcttacccttctttttcttctttgaaaactcgagtttcaaagtaccg

SEQ ID NO: 46253 - DNA, 357 bp, Glycine max
aaggattttgatatttggaacctaacttcactagcttaattgtttcttggttttaggaaatatgtggaggttctcaatagttctaaagctgattctgctattagcccaggatgtacaaagtctgaaattcctcagaaggtgttggaatctttgtttaatattcccaaaagcactgaacatgacaaagataccatgaattggagaaatgtagtaaagaaaatccagtctttgggacctgggttcaatgtttctccgcatgtcgcagaatctcaacaacatacgtgtggtacaaaatgacaattttttaaatacttttacttgtataggcttgccttaaacagccttaaacagtatttg

SEQ ID NO: 46254 - DNA, 471 bp, Glycine max
cttaattttctcacataatgaatatttgttacagatactaaactagaaaaggttttgagttggtctgatcgtcacaaaatcataggaggaattgctcgaggaattttatatttacatgaacattctagacttaaagttatacatcgtgatcttaaacctagcaatgtattgttggacgaaaatatgaatccaaaaatttcagattttggtcttgctagaattgttgaaatagatcaacaggaaggaagtacaaatagaattattggaacatagtaagttttcaatactcattcctatgattttcatcccttgtaagatatatttaagcttatttgtcactttttcggttttcccataattttgcagtggctatatgtctccagagtatgctatgtttggacaattttcagacaaatcagatgtttatagctttggagttatgattctcgagattattagtggaaaaaagaa

SEQ ID NO: 46255 - DNA, 385 bp, Glycine max
agcgaaagacgcaccgagaggactgtacgggcgagaagtcggtcaaggccaggtttccgatcaaggaggagctcgtcaatgactacctcagcggcaagatcacaatggacgcgacgttcaatgagctccgaaagaagggcaagaagagcgacaaagagatagatagcatgatcaggcttgcaaaggaggtccaggcgagcattctcaaccagaagctggagccggttgtgcgcactttctacaatcggacggctttccagcttccaggcgatgctcgtgtccgaatttcattcgacaccaacctgacgctggttagggaggacaattgggataacggcaagcggtccggcagcaactggcggcggatggacattgggattgactg

SEQ ID NO: 46256 - DNA, 354 bp, Glycine max
cacgacaccaccagcctcttccttttccgtcgcacttactctcattcatgaccatggccgacgacgcgcagcatgagcacaccttcgagagcgccgacgccggtgcctcgcagaccttccccatgcagtgctctgccctgaggaagaacggcttcgtcgtcatcaagaaccgtccctgcaagatcgtcgaaatgaccacctcgaagaccggcaagcacggtcacgccaaggtccacttggtcgccattgacatcttcacctccaagaagctcgaagaactgtgcccctccacccacaacatgaacgtccccaacgtccgccgccaggagtaccagctcctcgacgtgaccgacg

SEQ ID NO: 46257 - DNA, 168 bp, Glycine max
atttctcaatctctgtgtttgcggttgaggattccgaacgagtgaccttgttcgtggctcgcaacgatgaacttatcatgggaaaagacaacgttcacatcaacattgtcgacattgcacatgtcgactctgccaagacaactaccactggtcacttgatctacaagc

SEQ ID NO: 46258 - DNA, 456 bp, Glycine max
cggctcgagggagtttccgaacaattactggcactccgttaagcagttggccgaaacatacccttccgtcattccttgcttcggtctccatccttggtttgttaaggaacggagtcccaattggtttcaaacgttgaaggaatattttgattccacaccctctgctgcagttggagagattggtgtggacaaaggatcacacggaaagaagattgatttttctgagcagattgaagtattgaggcagcagcttgaacttgcaaaagagttaaacaaaccagcatctgttcattgtgttcgtgcttttggtgatcttcttgagctaatgaagtttttggggccttttcctgccggtgtcattcttcattcttacctaggttctgcagagatggttcatgaattttccaagcttggtgcttatttttccttctcaggatttcttatgtcactaaaagc

SEQ ID NO: 46259 - DNA, 285 bp, Glycine max
caggactgcaaattgaaattacaagctataatgtcattccacaaatgtggggggaatgtgggagattccgttttgattcctctccctaaatgggtacttgaaattggagaatcggaccctgatatcttttacaccaaccgcaaaggtattaggaacaaggaatgtttatccctcggcgtggacaaccaacctttgtttcatggacgaactgccattgagttgtacaccgactacatgcaaagcttcagagataatatggaagattttcttgaatccgagctcatg

SEQ ID NO: 46260 - DNA, 309 bp, Glycine max
acacgggaaaaagggacccgttcaggttcctttccattttagcttcagttcacaaaaaatcaatttggttacaaaatatatttatgccttaatacaaaacaaaagggtggaatttcatgtttaaaaatacatgacaaccggggggcgggtttaaggggtttaagcccaccatggggcattacctgttttgaaatttgtttcaacccaaggaacaaacaccaccttcccattatttatatcacaatgggctaatgccaaaaacaagggagcagggcctctcacaactttttcttgggcattggactgaaa

SEQ ID NO: 46261 - DNA, 467 bp, Glycine max
gtcaaacattttgcaccttttattcacaaacttattaagcataaaattcatcatcgcatatccaacattgatacatcaccagaaatagatgctaatatatatgtgtacatcactgcctgaagaaatttgtcaatgatttaccgtccaactctttcgtgaagaaccttgtcataaattcatggaacgtgaagttcctataaagagctggtttctctgttgatgttagctctggtaatggtccaaaatgtttctccctatcacttgggttgaggaaaacggcaatagagactcgtggctcgttagaataattggctaacacccgatgatgagcactcttgtatgtttcattagaaattatctgatacacaaaatgatgaatatgaaagatcttagatttaaattatattaaaatcaaaaactaaatgtaacaattcctataaaaccttgtagagaagttcaaatttaac

SEQ ID NO: 46262 - DNA, 399 bp, Glycine max
agtcgaagaataagattatgagcaactgcgcacaggatatagttcatagagaatagagatcaaaggggtcgataacagagagaatatacagattctttttttgtgacatgaaaaatccttaggctagtagtaactgcgatagcatgacaagtatcaaaattacaattaagttggattcattcgacttccacgatctcatccaaagcatagttgtttgttgatacattggcatagttgactttgttgaatcgaaccacaacagggtagcgagtgttggggtcctgcacaacaataaaacaggaactgagtttgcataatgcatgggatggtagaaaattgagagggtatgcattaaagtgagtttaggggcactaacctgatcaacagcaaccactgaac

SEQ ID NO: 46263 - DNA, 465 bp, Glycine max
aacaacaaatgtattattctttattcaactcatggtgatatttggatcattgacttgaaagggtgggcttgtacacataagtcgaattggacactcataggaaatattgaaggagacttgcatcaaacaaaatcttaagagtgtcacttaacaaagagctagctcacgtattgcttctcaagaaggcttccgcagaaagccaaatcaaatctctcctcaggaggatcaccaatgcagtcaaagactgcatctgcatttaagaaatcttcatctgctgtatagccgctctttgttactatacacgtcattccagctgctttagcagctgctaggcctatggcactgtcctccaccacaacacatcttgaaggttcaacacccagagtgctggctgctaataggtagatagctggatcaggctttttacggggaaccacgtctccggcaaatatcttgattttttct

SEQ ID NO: 46264 - DNA, 269 bp, Glycine max
ctccctttcccattcccatttttttatctcctttccctctcctctccgctggtgggggtccccccaaactttctccctccgccgcttcgccgccgcctctctcgcttgccctccaccgccgccgacggccctcgacgccatggcccagaaaatcggaaagtccacgcgccgccccggtgcctcctacaaggcccgcgtctatgccgatgtcaacggcagtcgccccaaggaatattgggactactagtccctcaacgtccagtgggggg

SEQ ID NO: 46265 - DNA, 463 bp, Glycine max
gttggtttctttgacagccccaaaattaggtgcaaagaagtttggtggtcctcaccactttctaggaggtagatttgtcccacctgctattgcagaaaaatataagcttatacttccaccatatcttggaacttccatgtgtgttcgaattggaaagcctccacgtattgatatctcagctctaagagagaactatatctctccagaatttcttgaagagcaggtggaggctgacccttttaatcagtttcataaatggtttaatgatgcattggctgctggtttgaaggaaccaaatgctatgtccttgtcaactgtagggaaggacggaaaaccctcatcaagaatggtattgctaaaaggcttggataaggaaggatttgtgtggtacacaaactatgaaagtcgaaaggcacgcgaattatctgaaaatccacgtgcatcacttcttttttactgggat

SEQ ID NO: 46266 - DNA, 367 bp, Glycine max
gcttaattgtcaagttggaattttttcatactccatggaatggactggttgggggaatagattactgagttagggcaacgatattctgtgttgcgattatgctagttttgatgggttgattaccaagcaagttatgagcaagatggcagaaatgataaacagtctttgtggtggtgatgaaaaattgatgcgtgaaaggacacacctgctgttggcttgttgttcaagaatggcaatttgtaagaaagatgtttggagagttgaatgtggaatcccttctggatttccgctcacagctatttgtaatagcatttttaatgagatgctcattagatatagctattaaatattactgcgccaggctaaa

SEQ ID NO: 46267 - DNA, 233 bp, Glycine max
tgaagttgaagtcttgcccttctctcttttactcctaacacaagacatcatcatggatggctgcctccggctccactgtcggagctgtccacagagctctttcgaacctgaatgggtctggacctggggtttcagctcccacttcatccttctttgggagcagcttgaagaaggttattgactcaagggtccccaacacaaagatttcctctggaagcttcaagattgttgct

SEQ ID NO: 46268 - DNA, 386 bp, Glycine max
ctcgagccgctcgagccgcttgagtcgttcgaggaggccacgaacacgggaaacgccgaggatatcgatcgatttaataagcgtctggtgcgtgccacgcctcaacacaatgaagactgcaaggaattgctgaaactcatgggagtcccacacattacggctgcgtgcgaggctgaagcttcttgtgctgcgttggccaagggtggacgagtctatgctgcaagcaccgaggatatggacgcactgacgtctggtgtacctgttttgaatcgacgcttgacagtgtcaccggcgaaaaaggttccaattcttgagattcgattggaacgcgcacttcaagagctggatctgactaatgaacagatcgtggacttgtgcattttatg

SEQ ID NO: 46269 - DNA, 396 bp, Glycine max
ctggtcacctacaatatcatgattgccttgcaagctaaagcaaggaattatgagatggcattgaaactatatcatgacatgcagaatgcgggatttcaacctgacaaagttacttacagcatagtaatggaggcacttggccattgtggttatctcgaggaagctgaatcagtttttgttgagatgcaacagaaaaactgggtgccagatgaacctgtttatggtcttttagtagacttgtggggaaaggctggtaacgttgagaaggcttcggaatggtatcaggctatgctgaatgcaggtttacttccaaatgtacctacttgcaattcccttctcagtgcattcctcaggttgcatcgattgccagatgcttataatcttgtccaaagcatg

SEQ ID NO: 46270 - DNA, 396 bp, Glycine max
gcgactcgatcgccgtgggagcgttcggtgctgccaaccacaacgttctcgtctggtgctccgccggaaactcaggacctggtccttccaccgctgttaacatagcaccgtggattttaaccgtcggagcttccaccgtcgacagagagtttccggcagacgtaattctcggagacggaagagtcttcggtggcgtgtctttgtattacggtgaaagcttacctgattttaagcttccattagtttatgctaaggattgtggaagcaggtactgttacatagggtctctagaatcttccaaagtgcaaggaaaaattgttgtttgtgatagaggagggaatgccagagttgaaaaaggtagtgcagtaaaacttgctggtgggttgggaatgatta

SEQ ID NO: 46271 - DNA, 542 bp, Glycine max
  unsure (1)..(542): unsure at all n locations
gaaaaattgatgcgtgaaaggacattccttctgttggcttgttgttcaagaatggcgatgggtaagaaagatgtttggagagttgaatgtggaatcccttctggatttccgctcacagttatttgtaatagcatttttaatgagatgctcattagatatagctatgaaaaattactgcgccaggctaaagctccaagtatgtttttacaatccttcaaaaattttgtttctttgtgtgtgtatggtgatgataacttaattagtgttcatgaatatgtcaagccttactttagtggttctaaattgaaaagctttctagctggtcataatatcaccattactgatggtattgacaaaactagtgcaactttgcaatttagaaagttagcagattgtgattttctcaagagaaactttaagcagatgtctaatgttttgtgggtggctcctgaggataaggcgagtttatggtcacaacttcattatgtttcgtgtaataatctggaaatgcaagaagcttatctngtcaatctcgtaaatgt

SEQ ID NO: 46272 - DNA, 468 bp, Glycine max
  unsure (1)..(468): unsure at all n locations
tgactagacaaatagcttcaccagttgaagtggactctggctacggagagcctattgagatgttgtcatgcccctctgatggcagtgactgtggcggagcatacatcattcgtcttccatgcggacctcgtgataggtacataccaaaagaatcactttggcctcacttgcctgaatttgtggatggtgctctaggtcacattgttaacatggcaagagttttaggggagcaagtgaatagtgggaagccaacatggccttatgttatccatggtcactatgctgatgctggggaggtagcagcacacttatctggggccttgaatgtgcctatggtgctcacagggcactcgttaggtcggaacaagtttgagcagttgttgaagcaagggaggctctctagggaggccataaatgcaacctacaagatcatgaggaggattgaggctgangagttgggtgtggatg

SEQ ID NO: 46273 - DNA, 194 bp, Glycine max
ggggaagaatgaaacctttttgaaatgatgattatcaacccacaaaaaggaaattttccatatgaggatgatgaccatgatcttaattaaaaaaggggtttaaatgcaacgcccatccttggaaggggaacaaaaacaaaattttgtgcccttggaacaaggagggcgggtttttttttcatgctaactttggg

SEQ ID NO: 46274 - DNA, 439 bp, Glycine max
caacggcgagggcaacgtcgtaggttgggctgcctcgtccaacgaccccaacgccggtgtcgggggccacggctcatgctgcgccgagatggatatctgggaggccaactccatcagtacggcagtgactcctcacgcctgcagcacaatcgagcaatcgcgctgcgacggtgatacatgtggtggaacatactccgcagaccgctatgctggcgtctgcgaccccgacggctgcgacttcaacagctaccgcatgggtgtcaaggacttctacggcaaaggcaagacagtcgatacctccaagaaattcaccgtggtcactcaattcatcggcactggcgacgccatgcagatcaagcgcttctacgtccaaggcggcaagaccatcgcgcagcccaactctgctatcgctggcgtcgagggtaacaccatcaccacc

SEQ ID NO: 46275 - DNA, 273 bp, Glycine max
ggacttcacatttagattcaacgagtggggattgcgggctccaccacctactgttcaaactatgtacaccatcttcaatctatgtacaatatccattgggttgggcgagatattctagccaaaagtagagttgagaacaccaaacttaatgttcgagtacacaacagtcgcatcaggactcttgctctccacatcagccggaacacccgacgtgacctcgcactctccacgaccgctaccaagatcagtctcagggttcttgtcggtagggta

SEQ ID NO: 46276 - DNA, 368 bp, Glycine max
catatataaatatcagttaaaaatgagtagaaaaaaggatatctatatccacaccaattaaaaaaaactctggaaagtagaacagatataattcatacaaaataaattgcttaaccatttacaagtggttcactgatttcaagcaattcatttctgagaccggtgaaaacaacagaatctgtttccagaggcttgaacttaattagagcagaaggtactaggtcttcttcctctattgttttagcattttcccctgctttcggaaaatgggggatcacgcgccgttggataagtacaggatgcattagctcaaattccaaacctggttcttttaatgctgagctgacaaactcatagagagcaatagt

SEQ ID NO: 46277 - DNA, 348 bp, Glycine max
ctctcctcctcatgctcccttatcaccctgtccatcatgccatcaaacctctccaaaatacccacaagcctcttctttatcccatgcaaatccaaccccttacacaaccacacaaaatccgccaagttgaacttccccgccagctcagcagtgtccgccaccatcttcctcacgtgctccacgtcaccatcgctctcgcaacatgttcgactcaaaaccatcctcgatattacactgttggtcaaagtcatcaactccccactaacatccacggcctcatgcgcctcccctttcgccctcaacacgcgcagaaacctcaaagtttcttgctccctcaagtgccggaac

SEQ ID NO: 46278 - DNA, 320 bp, Glycine max
ggttgacgagcccgctatccgagtgtgttttcccctccgaaaggccgactgggacggggacctttagtgggccgttgcctctttcaggctttctaccgccgtcgccgagttcaagacccagatccactcccacttttgctactctgacttcaacgacatcttcgcccacatcaaggccctcgacaccgacgtcatttcgatcgaggcctccaaggccgacatgaagttgatccagaccttcaagaacgagggatacaactctggtatcggacccggtctttacgacattcactctccccgagttccctccgaggaggaga

SEQ ID NO: 46279 - DNA, 423 bp, Glycine max
aaagaaggctgtactccatagaatcttatgatgtaaaggatatatgtaggctggggatttactatttttatattttttttttcgtattagaagaattccgagcagaattgtttgttctttttcattcttggccattcattagctgattgaggatagaagcttgagggtgccagagagagtttcttggatcagattccaagtcataagtcagtttcgcaaatgacccgtttgaagccagaattccaagcaacacgcaagccatgcaggatcgccaataattctgctgtcatattggtagtgataccgccacaactactaaaacccgtaagccatttaccattagagtcccgtagaatcccaccaatgccagacattctcggatttccctaggagctaccatcaacattaaccttaacaaaatct

SEQ ID NO: 46280 - DNA, 375 bp, Glycine max
agagctaaaaaaaactagtattccagtaagaacgacatcagatgaaaattgttatgtacattaaacagtaacaacaattaaaaaaaaaaaaagccaaccttacacctttgtattgtagtgagcaaagatgttaaaaagaaagaataagttggtgataaaagaactagtttctttaaataaaaatagttgtcgaagaatcgccgtcacatttgtcgcatacgaacatgcatctccctaggcacggtcattacagaaaacagttctcattgtcctggcccatgtcctcctggggcttgttgctgttgctgttgtagttggagaagaaggttggcagcaaattgtaacgttgactggtatctctggttcttatcagcc

SEQ ID NO: 46281 - DNA, 428 bp, Glycine max
ggccaagaacaaaatatttacttccaaactgaatattaaatggatttctgttgaatattttttacttgagatgtatactattaaaacttgaaaaaaaatatacactttatagctttctgatttctagtgaacagaatttacaagctcaaacaatttgatgctcattggaacaacttttacatacttctcgtaaccattttggtcaacttttggggacctagaagtgctcttccatatgcagcaggtagtgatagcagcttcttaactttacctacataagctcttttagtgaagttattgtagtcattggcttcaatagaatctaagatttgcctatacaacaacaaagatgcccatactggccacctgcttgcagagttgagctctgaaactcccttctctgcctcatcaaaaaacatccttgctct

SEQ ID NO: 46282 - DNA, 420 bp, Glycine max
ttttattactactactactactattattattattcaactcattaaaatggaatgggggacttatttttcccattcttactggagaactcgtgaagcaagcaggaaaaaattccagtagaggaagtgtttgagtcgctgaaatgttcaagagcaggtttaacatcagacgaaggagccagccggcttcaagtttttggaccaaacaaattggaagagaaaaaggagagcaaacttttgaagtttctgggtttcatgtggaaccccttatcatgggtcatggaagctgctgctataatggccattgctttggctaatggtggaggaaggcctccggattggcaagattttgttggtatcattgctctattgttcattaactccacaatcagtttcatagaagaaaacaatgctggtaatgct

SEQ ID NO: 46283 - DNA, 318 bp, Glycine max
atgggtctggacctggtttttcttttcccagttcatccttctctgcaagcagcggaagaacgttattggctccctgggtccccaacacaaatatttcctctggaagcttcaagattgttgctgtagaagagaagaaagagattgaagagacccatcctaccgacatggacagatggaagggtcttgcctatgatatctcagacgaccaacaggacatcacaagaggaaagggtttggatgacttcctttttcaagctccacaggatgctggaactcactatgctgaaatgagctcctaccactaccttagcactggac

SEQ ID NO: 46284 - DNA, 221 bp, Glycine max
atccgattggaaggcctttatcattatttgtgggactagagagtacagatgtgacggtggcacacttttctccaggaaggacagcttcataacgcatagagctttttgtgacgctttggctgaagaaagtgcgagggtaacaacagttccagcagctttaagcaacttgagaaacgatcatcatcatcatttgaccaatgctcaagcttcgaggatccctc

SEQ ID NO: 46285 - DNA, 317 bp, Glycine max
cgagatcttccagctgctgccgcatgacacgcaggtcaacctgctctcggccacgatggcgaccgacgtgctcgaggtgacgaataagttcatgcgcgaccccgtgcgcatcctcgttaagcgcgacgagctcacgctcgagggcatcaagcagttctacattgccgtcgacaaggaggagtggaagctcgacacgctctgcgacctgtacgagacggtcaccatcacgcaggccgttatctttctgcaacacgcgccgcaaggtcgactggcttaccgacaagctgcacgcgcgcgagttcaccgtgtcggccatg

SEQ ID NO: 46286 - DNA, 495 bp, Glycine max
gtgttgaccacgttctatcatgtcttttgcagcgctctcaatcccatatgcagctgggctaggcgcatgcgcttttctctactttgttgtatatccggtcatcgaatattttcgcgatgttaacggtcttcgacgctatccgaacatgcacccgctctcgggtatctcttcgataccgttcatggtgcttgcacacggcggggcacggtccacatacttagagaagttacatcgaaagcatccagtcatccgtgttggccccaacttcctgtcatacggcgaccttcgagctgtaaaggatatctatggccataacacgccctgcaccaaggacggatcgtacgtgattactgcgggctctcattaccatcttgccgatgtgatagacaagcacgatcatgcccgaaagaggaaattgatgagctccgcgtatgctatcaagaacctggagggctgggaacacaaagtagccgacaagacgcagaagctactgaa

SEQ ID NO: 46287 - DNA, 372 bp, Glycine max
ccacgtctatcaatttgagctatgtgcgcagatctatgaagcacccaaacacctctgttatgcaacaaaaagccttctccttactcctgctgggccgattttcgctttcgccgccagatcttcactggcatctgacccagaatccagttcatcgtctccaaccgttgcagctcccagtttggactgctcagcgcaaagtcatagcgtcgcaacacgctcgcgagcaccacagtttgctcaagatatgagatgttgcgaccaatgcagcctcttgcgcctgccgagaaagccagaaagcagggttgcaacgccttgcccttttcacccagccagcgcttaggaatgaacttatcgggttgtggaaacatggac

SEQ ID NO: 46288 - DNA, 224 bp, Glycine max
attttaatcacgcgcacattatctcaacacaacaattcactaagctaaagggacgggatcatggcttcctcgtgtgcttcctctgccattgcagctggtgccatctccacaccaagttcccagaagaatggatcactcttgggaagcacaaaagcttcttttcttagtgggaggaaactgaaggtgaacaactttacaccagttggagcacgatccagcactac

SEQ ID NO: 46289 - DNA, 430 bp, Glycine max
atccccccagaccagcaacgtcttatcttttccggaaagcaacttgaggacgggggcacgctcgccgactacaacatccagaaggaatcaacccttcacctcgtcctccgtctccgtggtggcatgcagatcttcgttaagaccctcaccggcaagactataaccctagaagtcgagagctccgacaccatcgacaacgtcaaggctaagatccaggacaaggagggtatccccccagaccagcagaggctgatcttcgccggcaagcagctcgaggacggacgtacccttgctgactacaacatccagaaggagtcaactctccacttggtgttgcgtcttcgtggtggtatgcagatcttcgtcaagacccttacgggtaagactattaccctcgaggtggagagctccgacaccattgacaatgtga

SEQ ID NO: 46290 - DNA, 512 bp, Glycine max
ggacaagatcaccattctcttttccagcagtcaaatagtataaacatctctgaacttcaagaagcatatagagacgttggacgagatcttttaaggcttcttaattttggggaaatgaatgctattggtttgagaaagatcttgaagaagtttgataaacggttcggctataaattcacagactattatgtcaagacacgtgcaaatcatccttattcccaattaaggcaggttttcaggcatgtgggcattggggctgttgttggagtcttatctcatggtctggctgaccttcaggatttacaacaatctctaggaagctacatttgtatatatgaccagccttcttatactcatcaggatcctattcttgattccatcaaagaagctgtagccagattgtcaaactcaacaaactttcttcagtttttgggaagacatgcttttatcatgaaagaggagctgccatttccaagtgaagatcatattgttgatgaaagatatcatttcat

SEQ ID NO: 46291 - DNA, 501 bp, Glycine max
aacaagtgactgtcccaactttgctagctgtttgttacaaaaatatctaacaccatggtttttttttctcatacgtaagaatcgaagacacaggcatgacatgagaggatttataacaattcacgctatctatattgaattgatctctggtacacaccatggttaacattattcaccaaattcaattcacatgcccctagccaacatttcatggaaccttctatcagactcttgcttctccaacttgaacttctcgtggcaattcgctatgaacatttcagccaacatatcaatctcgttcatctcatttccacaagcctttttatcatcatcatcatcttgaaccttctcttcaagccactgtaggtatcccgcaagctgagaatcatcatcatggcaatcctcatacaaatattgttcatcatgatgatggatcatgtcaccagcttttggcaacccttcaaagacacgagcgggaacagggataacatgagaagattt

SEQ ID NO: 46292 - DNA, 462 bp, Glycine max
aaaaaagaataattcattatgatataaaaccagagaatgttcttcttgacatcaacttggaaccaaaggtagcagactttggcatggcaaagctttgcagcagggaaaacaatgtttcagtcaatacacactttaaaggaacaaggggatatgctgcaccggaaatgtggaagccttatccggtgactgagaagtgcgatgtttatagttttggtattcttctctttgaaatagtagggaggagaaggcattttgatgatgcctacagtgaatcacaagaatggtttccaaaatggacatggaatatgtttgagaataatgaattatttgtaatgctttcacattgtggaattgaaaacaaggacagggagatagctgagagaatgtcaaaggtggctctgtggtgtgttcagtattcaccagatgatagacctctcatgagtaatgtggtgaagatgttag

SEQ ID NO: 46293 - DNA, 434 bp, Glycine max
aattgagggcttggaggagcagattgttaatcatgaaggtgacattgagcctactatttctgtgcttaatgggttggtggctatgactagatattgcaggtttttgctctttggctttgaggaggatgagcttggttttgagagtggaagtcagaagaagcctaagaggaggttgattactcaggaaattgctgaaacgtttttgactgttcctaaggacttttgctgtccaatttcgttggatttgatgagagaccctgtgattatttccactggtcaaacctatgatcggagttcaatttcgaggtggatggaagaagggcatactacttgccccaaaacaggtcaaatgcttgctcacactcgtcttgttccaaaccgggctctgaggaatttgattgtgaagtggtgcactgcacatggagttcctcttg

SEQ ID NO: 46294 - DNA, 383 bp, Glycine max
aaagtaattattgataagtttatccaaatataagcatagcgtgggcttttgaagtaaataatcatatgcacttatagagatatacccccatttggcagagtgtataattgttgtttgtcctcaaaatacgacagtattctttttttcatatggcaacactcgaagctcacaataagacctgatagcgcttgtgaggcattgtttctcaaggttctctgatttctgcacatagctctgcaagttatctctatgggaaactctttcaaccatttgttcaataataggtccagcatcaagtccctcagtcacaaagtgacttgttgcaccaattaatttcacacctgcatcaacggcctgtttagatggattgctaccgctaaatg

SEQ ID NO: 46295 - DNA, 510 bp, Glycine max
gtccatgtacgagcagtggctagtaaagcacggcaaggtgtacaacgcgctcggagagaaggagaagaggttccagatcttcaaggacaacctgcgattcatcgacgaccacaactcccaagaggaccgaactcccaagaggaccgaacctacaagctcggactgaaccggttcgcggatctcaccaacgaggagtacagggccaagtacttgggaaccaagatcgatcccaaccggaggctcggcaagaccccgagcaaccgatacgcgccacgtgtcggcgacaaactacctgaatcggttgattggaggaaggaaggtgctgttcctccagtcaaagaccaaggaggctgtgggagctgttgggcattctcagcaatcggtgcagtggaaggaataaataagatagtgacaggtgaactgatttcgttatcagaacaagaattggtggattgtgatacaggatataacgaaggatgcaatggaggacttatggactatgcatttgag

SEQ ID NO: 46296 - DNA, 399 bp, Glycine max
agcatatattagaggttttatttatcacaaaatgtcactaatgtagtaatttctatcaacaaaatagaagaatgactgcataaaccataaaagcaaggttcaatatccaacagaaaattgaaaattcggaattaaagcttagagaataacaatatatttatataattttactcgtgagtaacaacaaccacttgtttaccaacattgcgaccggtatagaggccaaccaaggctgcagggcccttctcaaggccctcagcaatgtcttccacatacacaaccttcccttctctgatatgaggcaggacaaactccaagaattttggatataaatgatagaaatcagttgcaataaaaccttccattttaacccgcttaaatatgagatttgccaaattt

SEQ ID NO: 46297 - DNA, 368 bp, Glycine max
gggcgtcagaaaaagaccgtggggccggttcgctgccgaaatcagagaccctttgaagaaagccagggtttggctcggaacctttgacaccgccgaggaggcggtgcgtgcctacgacacggtggcgagaacccttcggggaccaaaggcgaagaccaatttccctctttctccgccgttctaccatcccgatccattttccgatcaccggcactttgccaacaccggcgaagatttccacgatcaccggcgaccaacatccagtggcatgagcagcaccgtatagtccttcagcggcccccgtgctgccgtgccggcgacagcgccggtggccaccggtcggagatatccccggacgccacccgtta

SEQ ID NO: 46298 - DNA, 470 bp, Glycine max
gtgggccgtatcctaagggagtacggggaagaaagtaattggcgaactctgcaaaagaaaattgtcaatgcccgattacatggtggattgcattcgactagtgacttgctcgatcttattcggcgcgtggctcctccaatgagaggtggacggcaaggttggataaagacggcaacccgggtgtttcaagctctgagaatcgctgctaatgatgaactgaagacacttgaggattctctctattattgttatgattgccttgcacctgggggtaggcttgctgtcatatcttttcatagtctagaggacagaattgtgaaacagacatttcttaacataatcaaagggagcaaagatgtggaagaaagggagagcctcaacagtgatttgaggaagactagtgatgaaatcaaagaaaaagacgcatggataaagcacgtaatatatggatcaaatggaacaattctcac

SEQ ID NO: 46299 - DNA, 392 bp, Glycine max
gagaaaagggttttgtgcctagtactagtacttttgtgatcattgtttgtagtctcgcaatggagcgaaggttggaggatgcgatcgagcttttgtttgatatgttggggcagtctaggtcccctgatcatctcacttacaagactgtcttggaagggctgtgtcgcgagggaagggtcgatgaagcgtttgagctgcttgatgaatgcaagaagagggatgtttccatgggtgagaagacgtacaagagtttgttgaatgacttgtatgttatatgccgcgagtagatgctgttgagctaaactgctaatgcatttgcttgaagatgcaccatacgtttcttttgtatgagtggaactctgttattctcctgctttgcagagcctgatatt

SEQ ID NO: 46300 - DNA, 380 bp, Glycine max
aattcggctcgagctcatatcggaaggatgtcttacgttgctcacaacgttaatcagccacatatctgctacatatcgtgtgcattttggaattgtgccactaaaattctattcatctatggctgcctcatcttatgctatgcaatcaatccttgcagaccctatgatccgcatttccagcgggtctagggagaaccattttggtgttcctgcttatcacatgagaaggaatgttggcctgagagttaggtccatggctgaggaagagcaaccaagtcagcctgcgaccccagttacaccaccaccagcagaacccaaaccacagccagtctctactccttcaccaaaggtgagcaccaagttttctgatgtgttggcgt

SEQ ID NO: 46301 - DNA, 432 bp, Glycine max
aatggatcacagtgccgatgctcaacgcacggacttgatgaccatcacccgcttcgtgctgaaccaacaatccaaccaccctgagtctcgtggcgatttctcaatcttgctcagtcacattgttctcggttgcaagttcctctgctctgctgttaacaaggcgggtcttgctaagcttattggacttgcaggagagacaaatgttcaggcaagtggttgataaataaatcttagtaacctgcatcatgcatacaaattccagcatggtaactttctaaataatgtatgatgatttgatcctccttgattagtttttcttatttcggtgttcatttttattcaatttgtttcttaactggaataaagggcgaagagcaaaagaaactggatgtcctttccaatgatgtctttatcaaggctttggtcagcagt

SEQ ID NO: 46302 - DNA, 446 bp, Glycine max
  unsure (1)..(446): unsure at all n locations
cttgcaaactagttctgtttttggaacatatcgcattacattacattagattggtggcaaagcaatggcatcgtcactacaagcagcagctactttcatgcaacccaccaagtttttgcagctaaagtctactcaggccatatctaaggcttttggtttggaacctgctggagttaataaggtcacatgctcccttcaggctgatcttaaggactaggctcacaagtgtgttgatgctaccaaaattgcaggctttgcccttgccacctctgctctcgttgtttctgatttgttctatgaaggatcttctggttcgtaagtggtaaccgtcaatctgattaaggatgccaatgacatatgttgtattagaattatcaaatgatactaatatcattaatcaaatnttgtcttataacatcccactaacaaaaactagcaactaatat

SEQ ID NO: 46303 - DNA, 391 bp, Glycine max
gtgcataggcacattgagacactccaagtctcggccacgatcccgaatttagctctccccacctagtcatccttcttcctcaacaccgcaaatatggatcaagcaaagttggcgcgcatgcaagcgtcagtgcgcattggcggcaagggtactccccgcaggaaggtcaagaaggtccacagggccgctggtaccgacgacaagaagctccagaccgcgttgaagaagctcaacgtccagcccatccaggccattgaggaggtcaacatgttcaagagcgacggaaacgtcatccacttctcggcacctaaggtccacgcctcagtacctgccaacaccttcgccatctacggacacggtgaggacaaggagctaacagagctcgtccccg

SEQ ID NO: 46304 - DNA, 446 bp, Glycine max
ccaccatctcgcatacctcccccccatcgaatcccgggacaagcacgccgtatccccagtcttgtctccccgacccgccaccatggcgcccagcaaggacaccatgttccgctcggcggacatgtccttgacccagctgtacattgccaacgagattggccgtgaggtcgtttctggccttggagagcttggtgtcatggacttcagagatcttaatgccgacacgaccgccttccaacgtacttttacacaggagattcgccgcctcgataatgtggaacgacagctccgttactttcgcgcccagatggagaaatcggacattgcgatgcgctccatctacgacttcaacaaccccttcactgcgccatccgcttccgagatcgacgaactcgccgacaagagccagagcttggaacagagaatctcttcgttgaacgagagct

SEQ ID NO: 46305 - DNA, 437 bp, Glycine max
caccgttgatctctctttcaacaacttaaccggcgaagttcctgactccgctgtattcacgaatcagaattcgaagtctttctctggcaacgttaatctgtgtggagaaatgacaaagaacccatgtcctattccttcttcgccgtcgtcggaaccgaaagcttccgctcctatttctcctcctgcaatcgccgcaatcccgaagaatttagacgattctccgctggcgccgacggggcataaacagagtggtctcaaacaaggaacgatcataggaatcgtggtgggagacgtcgtcggcgtcggaatcttggccgtgctgcttgtctacgtgtaccggttgaagaaaaagaaagaggaggagggttcaaagacgaacaacgaagcggctataacaaggagcagaagcgagagttcttcgtcgacaacctcggagt

SEQ ID NO: 46306 - DNA, 381 bp, Glycine max
cgcaaccagcaatccaagagtgccgtgtatggtcttgaccaattctcagatttgagtgatgaggagttcagaaccaccatcctcatgaagaacaccttgcccattgacaacagcgcccccgtcccctttgttggctcaccctctgccccagctacctttgactggagatcctctggtgcggtcacagctgtaaaagatcaagagcaatgcggaagttgctgggccttctccgcaactgaagccatcgagtctgcttggatccttgccaagaaggcaactaacaactcagttgacctcgctcctcaacagatcgtcgattgtgacagacaagacggtggatgcaatggtggatggcccagcagcgccatggagtacgttcac

SEQ ID NO: 46307 - DNA, 421 bp, Glycine max
agccgtaatcgaattctattatattttaaattacacaaataaatcgttacgtaacatcacgtgtaaaagatacatttaaaatttaattataaaaatattataactttaatataattataaaaatactaaattatctttataatgtgggccaagttgctttggcagtaagagcgcaggtatcacctcccatagcaaggtagatgtatccaccatatccccaaccatttccccatgagtttctcacaatccagtaaggagtagacgcggccgagttgtatccaacaagttgaacacaatggtctaattggcaggaagtgcagcattctctagaggtcaaaactccaccttggtatccattccagctggaagcatcaacacagatggagagaggtcccaaagcgagcaagccagcttgaagaga

SEQ ID NO: 46308 - DNA, 403 bp, Glycine max
ataactcgtagtcacaatggcaaacgacgctctccaggtcaacttggacaacaactcccagttgggtatcacccaacatggctctgactggctctgggcagtcttcgccgtcatgctcttcaccgacttgattgtcattggatggcacttcaccgtccctcgaggacaacgattgttccaccagctcggtgcgattatcttgaccactgccgctatcgcctacttctcgatggcctccggtctcggttacactcccattgccactgagttcgcttacttgggctaccccgttggcactctccgacagatctgggtgagtgcgcttgaaatcgacagtgaacatctttgctgatggcggtagtacgtccgatacatcgactgggtgatcactacccctgctctt

SEQ ID NO: 46309 - DNA, 416 bp, Glycine max
tttttttttttttttttttttttttttttttttttttttttttttttttttttttttttttttttttttaaaaaacaggaagggaaattttcccctttccacaaccaagtccatttcatttaaggggggaaattaacatgactagaacattatgcccaagttaagattgaatgggaaaaacaggaacatgctttcaagggttggggtctgccttaccaaaaacctgttcattactagaatcattttcattttcacttagcttttaataactggagttcttttttgggggagctcctatgtcttcaggtttagcatacttttaacaggactttttaaccctttgttcaaaagggggtcgatcaccccttattaaagctgcagcttttccgttcaaggggtctgatggattgggatac

SEQ ID NO: 46310 - DNA, 455 bp, Glycine max
gttgaatataacatttacaggaagtgctgggcagtcatttgcatgctttctgactcctggaatgaacattcgccttgttgaagaggccattaaggtgggaggagccaaccacagccatgccactcaagaccttcatgattcaattgctgctggtaactatcctgagtggaaactgttcgttcagacaatagatcctgagcatgaagacaaatttgactttgaccctcttgatgttactaagacttggcctgaggacattatacccttgcagcctgttggtcgcttggtcctgaataaaaacatagataatttctttgctgagaatgaacaacttgcattttgccctgccattgtggttcctggtgtatactactcagatgataagatgcttcagaccaggatattctcttatgctgattcacaaaggcacagacttggaccaaactatctgcaac

SEQ ID NO: 46311 - DNA, 381 bp, Glycine max
  unsure (1)..(381): unsure at all n locations
cccatggcttcgatacggacgacggccagctcttatggtcgcctggtgtgtcgcgcgtgccgacggcctgcggtcgtacagtcatacgcgaagccagcagcatggcgggctctgtctaccgaagggcagcaaaagctgctctctgccaacctggaacaggccgatccctcagtgtttgacattatccgcaaggagtagagacgacagaagcacttcatcaatctcatcccctcggagaacttcacgagccaggctgtgttggatgcgctggggagtgtgatgcanaacaaatactcagagggatatcccggggcacgatactacggcggcaatgagtttatcgatgaagcagagatcctctgccagaatcgagcattggag

SEQ ID NO: 46312 - DNA, 442 bp, Glycine max
ctagttctaagatcgcgagcggccgcccttttttttttttttttaatattcaatttgcttgatatagatagatatagtaaacaagtataattatacatgatatgtttcaacaattgtgatacaaggttttgaatctatcactttttgtaatttacaaggtttgaatctaccacttgtaatgtcttgaaccctataaatatcaacagtaacacactcttgatggttcgtacttaattgcacatgaaatatatagtagtaacaaagtatagcaattatgcattggggtaagaagccaacattgctatgccacacaagccttctttagcagtaacatctctttgcatcctaatgtatcctttatcaccccactttactctccatgaattcttaaccaaccaatacttagttacatcatgacttactgcataccccacagcagtga

SEQ ID NO: 46313 - DNA, 466 bp, Glycine max
gctaaagctccaagtatgatcttacaatccttcaaaaattctgtttctttgtgtgtgtatggtgaggataacttaattagtgatcatgaatatgtcacgccttactttactggctctaaattgcacagctttctagctggtcataatatcaccattactgatggcattgacaacactagcgcaactttgctatttacaaagttggcatattgtgatcttctcaagagaaactttaagcagatgtctaatgttatgcgggtggctcctgcggataacgcgagtctatggccacaacttcattatgtcccgtgtcataatctggacatgcaagaagcttatcttgactatctcgtaaatgtgttacgagaattgtatttgcacagtccagaggaagctcgccaattgagaaggaaagctctctctcgtattgcatggctgcaaaaagctgatgtgcctaccatagcac

SEQ ID NO: 46314 - DNA, 485 bp, Glycine max
gccgccggtgctgagctcttcgccgccggtggtcggcgcggcattcgcatcaatggctgggtgatcgagactcggaggcactccatactcaactcttccacactccaagagtcaaactctcttcctactcactgctaagctttctcaggaactagttctcaaacacaaacccaattattttttttatcagcttcaccgttcatttcactgtaaactgcatcaatgttcttcaactttaaggaatctgcagtcaaaacaattaaactctcctttaaatatcattttttgcacatccagagatacagttatgtgaatgtgtatatgaagtggaaaaaggattcatactatgactcaattgagcacatccactactccgttcagctcaagcctatcattgccctcaaaaactgcattgtccgggatcccaatggctgcattcctatctctgcagtgtcaaagaggggattagagttagatgttcccat

SEQ ID NO: 46315 - DNA, 508 bp, Glycine max
aaaataaagaatgtcacacaacaaaatcaatcaacttcaactatgaggcatatcggaattacacaatttcaagggcaataaagagaccatatctacaacatggtagcaggacaaaagtaatcaagttagaaaaggcttgaaaacatgttatgactcgccaaaaaataaatatgatgttatacctcaaggctacgatatcactagatgtgctggtgctaccattttcaacttatgcttattatcagctacttgtttctttctctgttggtaaaaatttcatgtttaccttaagtggtctggtataaattttcacgcaacctgttccaaagagcaacttgccatctcatgtcccttttcatctatatcatttgaatcgatatccaattttgcattactattagaaaatcgattattcaccctcctgttccttaaaatcacttctgatttcttcatcaacttgatgtatttcttcctgaccctcaacagaggatgcttctcaatagcagat

SEQ ID NO: 46316 - DNA, 449 bp, Glycine max
gtcgcccctcgcccgaatccacacgtcacgatggtcgctgtagatagtgcaaccctgggttttccccgcatgggtcccaatcgcgagcttaaatttgctcttgcaagattttggcgcaaccagattagcgaagatgagcttttccaggtggcacatgccgtggaagaagccaattggcgcaaacaaatcgacgcgggagtgagtcgtgtgggagtgggtctcttttcgctctacgaccacgtgctggactggacttattacctgggcctcgcccctgagcggtttgccaaggtacccatgggtctgtcgcaatatttcgcgatggctcgtggcgtcgaaggcatccccgcccttgacatgaccaagtggtttgactggaactaccactatgaagtacccgagcttagtgccaagtccacgcctaaggctaatttcagctcatatttgag

SEQ ID NO: 46317 - DNA, 492 bp, Glycine max
aacaacacggaaaaccacacctttattattcagattatccaaggtggcgagacatcctgctactaaggtctcggcaccttggccatgcctctacgacatgtcaagtgagcgaagctactgtagcaacttggcgcaaaattcgtcgataaaatctagtgagcttcccgtcttctcacggaaaatggcgaccatcaagcttacaacgtagcacggacttcgagggtagcatccaccatgttgcggagagcagcaatggtctcaggccacttgcgcgtcttaagaccgcagtccgggttgaccacgacttgctcggcaggcaggaggtttaagaaactcttgagcttcttgacaatctcctccttgggcggcaccacaggcgagtgaatatcgtacgtgccggggccaaggtcgcgcttgtagccgatagacttgaactcacgaatagtctcgtcatccgaacgagcgttctcgatcgagttcacgtcggcatcg

SEQ ID NO: 46318 - DNA, 389 bp, Glycine max
ctcgactatactacggagatggaaacgttgaggccatgttcgccacgcttgatcctttacacgatatgctggagcgcggtccggaaactctgcgagaaatagctttccaacagtcctttggcagagatctgcaagacgcccgcgagtcatgtcgacgcttccagcagtatggcgaactgaacgacctgaatcaagcttgggatctgtactatcagatattcaagcggatagcgcggatattaccgttcttcttcatcctcgagctgcagcaagtttcgccgaagctgcttgctgcaagagacctagaactggctgtcccaggcacctatcactctggcaagcccatcatccgaatcagcaagtttgcagagtctctagacgtgctcaca

SEQ ID NO: 46319 - DNA, 452 bp, Glycine max
ggctcgaggctagttttgatggtttgattaccaagcaagttatgagcaagatggcagaaatgataaacagtctttgtggtggtgatgaaaaattgatgcgtgaaaggacacacctgctgttggcttgttgttcaagaatggcaatttgtaagaaagatgtttggagatttgaatgtggaatcccttctggatttccgctcacagttatttgtaatagcatttttaatgcgatgctcattagatatagctatgaaaaattactgcgccaggctaaagctccaagtatgtttttacaatccttcaaaaattttgtttctttgtgtgtgtatggcgatgataacttaattagtgttcatgaatatgtcaagccttactttagtggttctaaattgaaaagccttctagctggtcataatatcaccattactgatggtattgacaaaactagtgca

SEQ ID NO: 46320 - DNA, 442 bp, Glycine max
gtcggttccctcccaggcacttgccgcttttatgttgcctcaggcaaacatttccagcttgagactaagattcatgtcaatggaaagaagagtacatctggcaacaagattacaggcattcagttttctcagaaaaaccatcagagagttatgattacatctgaagattcccgagttagaatattggaaggcactgaatttgttcagacatataaaggccttccaagatccggaagtcagatgtctggttcatttacctctggtggagaacatatagtttcagttggaggggactcgcgtgtgtatatttggaacttcaatgacttgggaaacgcttcttccaaacagacaaaatccaaatattcctgtgagcacttcggctctgaaggggttactggtgcattaccttggtcttgcatgagtgcagaagaacaaagtggct

SEQ ID NO: 46321 - DNA, 508 bp, Glycine max
ctcgagccgaatcggctcgagctcaaatgcgaaatggacaagcaggaatacacggtggccgaaatagatggctggacaaggcacatactctgacctttgagacgaacggtcgagccgtcctggctggagaacacagcccgatcgatgcgcttatacctaccatggtcatggattatgcttcacaggtccctgttgatcgatctgtatatgacgaagaggaaggttcgggatggtctagagtcgattttgtagtcgacgaggcgttgaagagggagattgtcgattgcgaggggaggaacaaggcgatcatcgaggacagcgatgcgaaagagctatggtttggagagtacggcgcggagtggatcaagaagaacgccaaagtcgcgcccgacgcgtatattcagcaagtcttacagctggcctggtaccgagatcaagggtatgcgaccgcaacatacgaaaccgcatctacgagattgatgcagcacggacgtacagatgtgattcg

SEQ ID NO: 46322 - DNA, 441 bp, Glycine max
cctagagttgatttttgcatccatcacagcacataatggcaaaccagttccccgaatctttagctcccagcgaggaggacgttcaacgcctcttggctacacaggcccacatcggtaccacccgtttggaggccgctatggagagatacgtctacaagcgtagctctgatggcgttcacttgatcaacgtacgcaagacctgggagaagctccagcttgccgccagagttatcgtcaccatcgaaaaccctgccgacatctgtgtcatctcttccagaccccagggacagagagccgtcctcaagttcgccagatacaccggtgctcacgctatcgccggacgttacactcccggttcatgtcatcaaccgtgtccaggatagattcctcgagccccggtttctcgtgctcaccgaccccagatcagaccaccagcccatc

SEQ ID NO: 46323 - DNA, 380 bp, Glycine max
agagagttgattttatctttttgatccgatttaagcgactcaggttcccgaagacaacaatttactgttgggcagtggcctcagcggcctcccagttggcaccagcggaaggggctccctcagcagcccattctccctcgtgagcgggggtgttccagtcctcagcgttgtaagttccgtagatgggctcagactcggtggcctcaccggcggcggtgatctcggcagccttctcttgctcggcttgctcctcggggttgcggaagaggaaaaggtcaaccatgacgtcccagggggagccacgggtgatggtgttgcggaggtagttaacctcacgtgcaagcaaccaccacatcagaccgatagcctgaggagacttg

SEQ ID NO: 46324 - DNA, 431 bp, Glycine max
gtaggctcaatcacgctgctgagtacttcacctcagtatggaacttctctaaacttgtatctgagtgtgcaccatgctctggcatggacacaccaagtgtgttgttgtgttgtgtcttgtttgtatttcctattcgtgttcttttacattcttgcagacctaattttatcattttgactatcccaatggaataaacaaactccttgaattctcttcggtgattttacaggaaggatggtatgatgaccgacctcgatcctttcttatctatgcaccttctagaacagcagtggtttatgccctagcagatgaagctgaacctgccctagcagatgcaactgaaccagagccagttgatcttgatgacaagcttctgggatgaatgttacgagtgcacaaaggcatggatgcagtaaacccctagtcaaact

SEQ ID NO: 46325 - DNA, 425 bp, Glycine max
aatacaattactgttattcaatatcatgtcaagtagtccaacaaactttagcccaaaaggaatatgggaagataacacttgaaaactaaagaggaacaaaaaaaccctctcaatattcactatttgaatcactcttcttatggtaatatctacacaagagtgcatacaatagcaagctcactgtacttaaccatgctagaagccaatagtaactgtccaagtgtgcttcaaccatatcatcacagaaccagcttggtattccctttgaacttgtgtacacttcaactagtgtaatcaacagtgcactcacaaagcttccaaccccaaaaacacttgtatacaaggcaatccccattgtcctcatattcctgggaacttcaccatagaagaactcttgcatgccaacaactgtgaaaatgtctgag

SEQ ID NO: 46326 - DNA, 334 bp, Glycine max
atttgttatgaaattgttttggcatattatgggcacgtaccatatgtgtatgtatatacacggggcaggtatttttgcacgcaacaacgtcaaagaagcaagcaatgcaattgaagatgaggaatattgaatggtggatgagaaaacgacgcttgccgctagggtttaggcagcgcgtgcgtaactatgagaggcagcgttgggctgccatgcgtggggttgatgaattcgagatgactaaaaatctccctgagggattaagaagagacatcaagtaccatctttgtctagacttggtgagacaggtgcctatatttcaacacatggacgatct

SEQ ID NO: 46327 - DNA, 373 bp, Glycine max
aataatgcatgcattttttctttattttctaccaataagatcaatcaaaacaataaaattcgacacctgtgtgccacatccatatatatcatgttctcaaaagtcaaaatcatcctgattaggctttggggaggttaacaaagctgtgtagaggcgaagcttgtcctctccgatggaagaagaccgtgacaaaggtctcctgggccttataaaggacaatgaagtcaaagtcaacctatgcttgtacctcctccatgccaattgaatggccacagcagcccaagttctccaccctggtgagtaataccttgcacttctcttcaccttttccttaacaaatgtgtacctgaaatgttgtgtcacatacttcacg

SEQ ID NO: 46328 - DNA, 309 bp, Glycine max
aattagttctaaaaatttttaagcatcctgaaaaaacttggggatcatttccccttgaagtagtttcacctttttaaagcccccggaaatttctccacgagctttaattttcggggggggctttaagggcttcaagggggtaaagcacttgagactttttaatagcttttaggccccccaagaaaggagaccttgttttgacaaaattttttggattccaagcaaaattggaaaaaagggcttctttaagtagttctgggcaataattaagttcattttcccatcctcctagggtttgaagagccccct

SEQ ID NO: 46329 - DNA, 201 bp, Glycine max
gtagctttactggctgttctttttggcgttaagaatgaaattctgagttctaacgccactaaccctatgctgacgcgacttcttgagaactgtaagagtctcaaatatctggttgatgagtgtccttttgcatttgtgaactagtatgtaatattatattcacttaaataaagcgcattactatgtgcaatgagtgtgttt

SEQ ID NO: 46330 - DNA, 335 bp, Glycine max
aacagagcaaatgcaaatctttgtgaagaccctcaccggaaagaccatcaccttggaggtcgaatccagcgacaccatcgagaatgtgaagcagaagatccaagataaggagggaatcccacccgaccagcagcgattgatcttcgctggaaagcaacttgaggatggccgaaccctctctgactacaacattcagaaggaatccaccctccacctcgtccttcgactccgaggaggaatgcagatttttgtgaagaccctcactggcaagacgattaccctggaagtcgaatccagcgacaccatcgagaacgtcaagcagaagattcaggaca

SEQ ID NO: 46331 - DNA, 431 bp, Glycine max
gtgtgtacattatttactgtcctcctctcaatcgaagaacgagatggagggtggattccttctgaatgttgtagtcagagagggttcggccatcctcaagctgctttccggcaaagatgagtcgctgctgatcaggtgggattccctccttgtcctgaatcttctgcttcacattctcgatggtgtccgatgactcgacctccaaggtgatggtctttccagtgagggtcttgacgaagatctgcattcctcctctcaatcgcagaaccaaatggagagtagattccttctggatgttgtagtccgacagagttcgtccatcctccaactgcttgccagcgaagatcaatcgctgctgatcgggtgggatcccttccttgtcctggatcttctgtttgacgttctcgatggtatcgctggactcaacttcg

SEQ ID NO: 46332 - DNA, 391 bp, Glycine max
tgcgggtactgacacaacacacacggccttggagtggacaatgtcagagctgttaaagcacccaatggttatgcataaattgcaagacgaggtgagaagtgtggttggtaacaggactcatgtaactgaggatgatttgggccaaatgaactacttgaaagctgtgatcaaagaaagtcttcgtcttcatcctccacttccattaatagtccctaggaaatgcatggaagatatcaaagtgaagggctatgacattgcagctggcactcaggtattagtgaatgcttgggtaattgcaagagacccttcatcttggaaccaacctctagagtttaaaccagaaaggttcctcagcagttcagtagacttcaaaggacatgattttgagctt

SEQ ID NO: 46333 - DNA, 305 bp, Glycine max
ggtaattaatcagacaaattaagctgtctggacacatcaagcttgcaaaatgttttgtacaatcgttcaaatgaatgttcacaaatagcatccatattaacaagggtggtagccaagtccctagcattatttagacaccccccaaaaccaatcccttcaatcaaaaaagtgtaagtagtttcatttggccgacaccctttggccaccattgcagccaacacctcaatggcatcactaactctactcactttgcacaacccaagaagaacaatgttgtaactaacaacacttggcttacactcact

SEQ ID NO: 46334 - DNA, 490 bp, Glycine max
ggcggccgccctttttttttttttttgatgagcataatttgcaatttacttcagttataattgtctcattgtaaaaggcaggaaccgttggttctggcaataatttctctccattcaacattggaaccactgatgacatatctggtctgtgttctggtcttctttgtacacataataagcccacttgtatgcatcgtatgacttcaaatggtctacattgttcttctaacactttatccaataggtctagtgccctctcttctacccataatctccatgcatgtccaagaagattatggcagtgttctgggtctgaaaattccctgtttttcttcccactaacaatctctagtattattacaccaaaactaaatacatctgatttcaccgagaaattcccacgtacagcatactcaggaggcatgtaaccgtaagttccaaccaccctattggtctttgcttcaaattgatcttccaaaaatgatcgagc

SEQ ID NO: 46335 - DNA, 430 bp, Glycine max
ttctctacccaatgatgtcttctttctcctcgggtcaactttttgtctgttcactgtgtcaaaaggaaaaaaaaagcaccgatagggtctctcaaatatggaacgatattggggagaccgaagtggagaaagatcgaatgctgatggaattggagagggaatgcttagaagtatacaggagaaaggttgatgaggctgttaacaccaaagcacgctttcatcaaacagttgccgccaaggaagcagagcttgcaacactaatggctgcgcttggcgaacacgatattcattcaccgattaagacggagaagcgatcagtatccctgaagcagaaacttgcatccatcacaccttgggttgaagaattgaagaagaaaaaagatgaaaggttgaagcaatttgaagatgtaaaggctcaaatagaaaagat

SEQ ID NO: 46336 - DNA, 402 bp, Glycine max
cagaaaaacaagtagttgagaactaagaagaaggaaatggcttcctcaatgatctcctccccagctgttaccaccgtcaaccgtgccggtgccggcatggttgctccattcaccggcctcaaatccatggctggcttccccacgaggaagaccaacaatgacattacctccattgctagcaacggtggaagagtacaatgcatgcaggtgtggccaccaattggcaagaagaagttcgagactctttcctacttgccagacctcgatgatgcccaattggcaaaggaagtcgaataccttctaaggaaaggatggattccttgcttggaattcgagttggagcacggtttcgtgtaccgtgagcacaacaggtcacctggatactatgatggacgctactgg

SEQ ID NO: 46337 - DNA, 445 bp, Glycine max
gtgcgtgtacggagttctgctgcagagtccgcgggtcagaacattgatccacttcttgataataattctgagtccatgaaatttgaggtcaaggatttttcttttcttcctaaaatgatttctgagagacatgaggagtatctgtatcttaagctggttcaggacatcattgctgaaggtacaactaagggtgataggacagggactggtaccttgtcaaaatttggttgccagatgaggttcaatctgcgtggaaactttcctcttctaacaactaagaaagtattttggcgaggggttgttgaagagcttctttggtttatcagtggctcaacaaatgccaagtgttggtttgacagagcgggaggagggtgacttgggacctgtttatgggtttcaatggaagcactttggtgccagatatactgacatgcatcatgactac

SEQ ID NO: 46338 - DNA, 534 bp, Glycine max
ttttcaattcatttccattttgagattataatttagattctatctgtttgttttgttgcaaattccttccttcgaagttgagtataaaattctattttatttattcctcttttcataataggtatttcatacacgggattagttaaaatttcatgtaattcagtataaagaacagaaattccagtattgctaaattgattcatgtgatttgatgaagaatggcagcaaatcggtggaatatttttcgataaaattcacggggaaattgaaaatgcttggggatggaaatgaaggaatgtctacactacctggattgaatcagatacaatttgaagggttttgtaggttcattgatcggggcttaccagaagggctttttaagtttccaaaaattgaggatacagatcaagaaattgaatttcaattatttgtagaaacatatcaattattagaacccttgataaacgaaaaagatgctgtatatgaatcgcttacatattctgctgaattatatgtatctgcgggattaatttg

SEQ ID NO: 46339 - DNA, 535 bp, Glycine max
gagatacaatgcactaagtttcattttcgttcaagtccgggaactatcatggctgcagtggcatccattcagtgtttcttctagccctttggatggaaagaatcaccttgctattctcattaaggttcttggcaaatggacagaaaagttgagacacaggattactgatgttgatgcacaaaaagattcatctgtcataacaacttcagttgaggggccatatgggcatgaagtaccataccacttaatgtaagtggttacaagcccttttttttttctatgttgcacacataatacatgatagaaaccttggtttagtccttatatgcatatactttcagaccaaagaagattttgagtcaacttatgctatagttcttcaactaatgaaatgattggtcattttgttctcttaggtacgaaaatcttatattagtggctggtggtattggactttcacccttccttgctatattgagtgacattctccaccgtgttagggaggggaaaccctgtcaatcgagaaatattttac

SEQ ID NO: 46340 - DNA, 423 bp, Glycine max
attggaatggatccttcaaaatggatattggacatataaagcccctgcaaccttgagaatttttctacataacttggaagctttcccaccaaatgattattgcttacattcaatacaacgactgatgagttaaaaatgttgcttgggagtctaccagtaaatctattatggctcaatatcaaggtctgcaaaccattagggatattcaaaataggtccctcaagcatattggttgaaagtttcaagaattggagtgggtgtccatctgctaatatgttctcaggtatttttccagacaattggttctcggaaagatccaatgaattcaatcagctcatttggcctaactcactaggaattgatccttggatgctgatcccagacaagtttagatattgcaaatttggataaattgaactgata

SEQ ID NO: 46341 - DNA, 483 bp, Glycine max
tcggatgttcccttgatataatttctccgtatcatttgtacttgaaccctagattggtggtgaagcaatatcagttttggcgtctggttactaatttcttgtactttcgtaaaatgggtaaaatttctgccgttcaccatttagtgaattgttattcatcagatacgggtatttcaatttcagttttaatgtagaaaaagtctcgatttttttttatgctcacatgtttggggcattcttttgctgatgccacctgtgaggaactcattttatttttagtttaggtagatcatgtactaaagtcccccgctcttgggtagttacacttacatatgtatgtgataatgaatattgatcgttggtaaatggggagtgtggacatttttaagcatcatgaatttaatccttacatgatgaaaatcagtaaatcacattacgagagcaatttcattaataaattgtaactgttttcagagggagcac

SEQ ID NO: 46342 - DNA, 466 bp, Glycine max
gcgaagttgttgcaggttcattatgataagttttggttgattggtgctgcggctacttacgagagttacttgaaattcgtggggaagtttccttctatagagaaagactgggatttgcagcttctgcctattacctctgttaagcctccttctgaatcctatcaccgtcccaggtccagcttaatggattcatttgtaccgtttggtggctttttttcgtcacagtctgatttgaaagctccactgaatagctcgttttattgtgttccccactgtcaccagtgtggggaaaggtgtgaacatgaagtccttgctgcttccaaggaaaggttttgtgcttcttcagctgctgatccgcatcaatctagcttgcctccttggttgcagattgcagaatttggctcaacaaaagggttgaatgttaagaccaaagataatggtgttttgctcgatagtagtgaatctg

SEQ ID NO: 46343 - DNA, 381 bp, Glycine max
cttcgtccaggagttcaagcgcaagaacaagaaggacttgaccaccaacgctcgtgctctccgtcgtctccgcaccgcctgtgagcgtgctaagcgcactctctcgtcggctgctcagaccaccatcgagatcgactcgctcttcgagggtatcgacttctacacttcgatcacccgtgcccgtttcgaggagctctgcggtgacctcttctcgcacaccatcgagcccgtcgagaaggtcctccgcgactccaagatcgacaagggatccgtccacgagatcgtcctcgtcggtggttccacccgtatccccaaggttcagaagctcctcaccgacttcttcaacggccgtgagctcaacaggtcgatcaaccccgatga

SEQ ID NO: 46344 - DNA, 371 bp, Glycine max
gcggaaacaatgcaaagggtcacatcagattgaacggaacgcgaagatacgagtacatgcgggtggtgagggggaatcaatgcgagaaacgaagtgccacctgcggaaagggggtgtgctttttctgaagagtaagatgaagctggagagcgagaccattagtcgagctcctcgacggtggggccgtcgtcgccaccgggagcagcaccaggagcggcaccaggagcaccgacgggcatgccaccgggagcaccgccagctgccgagtagatcttggtcatgatggggttgacctgctcctcgatctccttctgcttgtccttgagctcgtcggtcgatgcggtggtgttgctgtccaaccactcgatacc

SEQ ID NO: 46345 - DNA, 329 bp, Glycine max
taagaaaacaaataattccaattcatatatgaacatttttgcctacttatttcttgaaaatgtggaattggaattccccgaggaattccgatctcatttcctttggcttcaggataggcctaataagaaaacaaataattccaattcatatatgaacatttgtgcctacttatttcttgaaaatgcggaattggaattccccgaggaattccgatctcatttcctttggcttcaggataggcctaataagaaaacaaataattccaattcatatatgaacatttttgcctccttatttcttgaaaatgtggaattggaattccccgagg

SEQ ID NO: 46346 - DNA, 412 bp, Glycine max
agtatgtaaacatatatcataagctcttagggctgtttcattcgaatattttcttccaatcttccatggagaaaagtagttttgacatcaagttgttcaagttccaaatcttggtttgccactattgcaagcaaaaccctgatggatgtatgtctgatcacaggtgaaaagatttcgttgaaatctattccttctttctggctgaatcccttagcaactaacctagccttggatcttatctcttccttttctgaaagactaggtttcctcttgaatatccacttgcagcctaccacatgtcttcctttaggggggtcaacaagttttcaggtttgattcttatatagagattccatttcctctttcatagctaaaaccaattttcagcttcaggatgattgatagctttttt

SEQ ID NO: 46347 - DNA, 377 bp, Glycine max
gcctgtttcttggtacgacaacgagtggggatacagctcacgtgtcattgatcttcttgtattcgttgccaagaagtctctttaaggtgttacttcaaagtagcttgtcttcacattattaccgtatgtttatgtttagctgcgatttagtgtcttgctcgagcaaaaaatgagaggtctgaataaatcggtttctgaaaccagtggtgttacttgctggaggagcattagctcttttttggacttttgatgttttctcttgtggagggggatcgagtttttggatttttatatactcgctgatgtacttggcttgaatacttgctaatgtacttgttattgattgttatagtagatatttgtccgtcctttttttc

SEQ ID NO: 46348 - DNA, 382 bp, Glycine max
gaaaaaaaggacggacaaatatctactataacaatcaataacaagtacattagcaagtattcaagccaagtacatcagcgagtatataaaaatccaaaaactcgatccccctccacaagagaaaacatcaaaagtccaaaaaagagctaatgctcctccaacaagtaacaccactggtttcagaaaccgatttattcagacctctcattttttgctcgagcaagacactaaatcgcagctaaacataaacatacggtaataatgtgaagacaagctactttgaagtaacaccttaaagagacttcttggcaacgaatacaagaagatcaatgacacgtgagctgtatccccactcgttgccgtaccaagaaacaagcttcac

SEQ ID NO: 46349 - DNA, 360 bp, Glycine max
ctcgagccgaatcagctcgagcaacaacaatacaagttctcgctctatgggcgttattacttcacactaaggccactgataaatatgatggcacgcctgctctagttaaaactgactctgaactagttaagactacccctgccggtgaatatcttactgctgccctgaatgactttgatccagatcaatatgaggggcatgctgccatatctgatggtgcaaacaagcttttgatgctggttctggctgctgtcattaaagctggtgcttctagagaacatgagatactcgctgaaattaaggattctgatttctcttttattagaaagatggaaccaaaacgagtaatggacaccatgc

SEQ ID NO: 46350 - DNA, 392 bp, Glycine max
agggcctcgtgtcatccttggaagtggttaaccgaaaccgggtccgcgtgcacctgcacagcccgatctcgccctctggatcacaatacccctccccctcgtcgtccggcggacctatcacctcgccccttccctcgtctagcagccccgcaccataccacttcacgatcggctcggtcgacagctttgaaacgcagcttacggctgcgcaggaggagctgggcatcccgtctcaggagcgcatacccgtccaatacaaggaggagggcagcggatggtcagtgctcatctcgcttgcgccgacgttgttgctgggagggttccttttctggagcatgaggcggtcgccgatgggccgtgggggtggatcgggccgaatctttggcgtgggc

SEQ ID NO: 46351 - DNA, 498 bp, Glycine max
ttgaaccgcccgcttacctttgccgagaagatcctctactcccacttggacgacccccacggtcaagagattgagcgcggctccagctacctcaagctccgtcccgaccgtgtagcctgccaggatgccactgcccagatggctattcttcagttcatgtcagctggtctgccctccgttgccactcctaccaccgtccactgcgaccatcttatcgaggcccaggttggtggtgagaaggatttggcgcgcgccaacgagatcaacaaggaggtttacaacttcttgtccacctcttgcgcaaagtacaacatcggtttctggaagcccggctctggtatcattcatcagatcgtgcttgagaactacgctttccctggtgctctcctcatcggtactgactcgcacactcccaacgctggtggtctcggtatggccgccattggtgttggtggtgccgacgctgtcgatgtcatggctggtcttccctgggaactg

SEQ ID NO: 46352 - DNA, 462 bp, Glycine max
cactgtaaacgtatttagaaaatattacaagtgtatgtatcttggggtagatgggtgttacaagtgggcttttctgtcttggccatactatacacttccaataatgttaacttcaatggatataaacaaatatactttcatgccagagatagaaatgttctacacttctatccaaaaaattggaggggaaaaagcatgtagaggcctaggggacagttaaaataaaggcctctgattccaagttcgttaagcaagctctctaataaaaaaagaattaaataaccagcttcaaatgcaatgttgaatgatgtcctgagctttgttgtattatccgcaattaggtagactctcagtcacgcttaatgcctagcattttcaatgctagctcccatgctacaatcgttgcagcattagcaggaaatgctcgacttacagtagcacccaaacctgtatagcacccct

SEQ ID NO: 46353 - DNA, 359 bp, Glycine max
aaaatggaagaggattatacttattaattaaacatattttttgttcttgggattgatttaatacaattcatgttacattgttggaaagagaatgttaagctttgcaagaagcaaatatattattacattttgacaagcatctaagaattatattattaggacatggtttgtaagtagagaaaaattctggatcctgctcaagtgcttcagtgtagctctccaaaattgcgactatctcatcaaaatgtggtcttttatctggattgcttgaccaacatctgttgatgaggtgactaaaagcctttggacagtcacatggcaacgggggcctttcattcttgtgagtcacagcatatgct

SEQ ID NO: 46354 - DNA, 317 bp, Glycine max
aaatggactagggtcatcaggaacaggaaattctgatcaaaatgagaagctgactaagaaaaggaaggatcaagatgaagatgaagatgaggatcaggagaatgatcttgacaatgaggacccatcagcccagaagaagcctcgggttgtttggtctgtggacctgcaccgcaagtttgttgctgctgttaatcagctaggcattgacaaggctgtacctaaaaaaattcttgatttgatgaatgttgaaaagcttacaagggagaatgtggcaagccatcttcagaagtataggctttatctgaaaagaattagct

SEQ ID NO: 46355 - DNA, 365 bp, Glycine max
aatcgccatagttgtgcctaccgttctcgttgttgttgctttgctcattttcattagcatatattttaggaggaggaaattagcaaggaaaaatcttctcgctgatgaagacgatgatgaaattgcattggctgaatcattgcaattcaacttggacacagtacaagttgcaacaaataacttctctgactctaataaactcggagaatgtgggtttggagcatgctaccaggctctctaatggacaagtgattgctgtcaaaaggttgtcaagcgatcctggccaaggtggcgtggaatttaagaatgaagtccttttactggccaagcttcagcaccgaaatttacctaggctacttggtttt

SEQ ID NO: 46356 - DNA, 360 bp, Glycine max
aaaggcattaacagggactggaacccccgattttgggaaaatttggcaacaggggaaaaagccattaggaaaaggttaaaaaataaaacccgaagtaaatcaggaagggttatagtatttgggggggccaaagggcatttttggaaccaccccttaatgggggttccccccaaaaaaaatctttactttgggggctgccttgggcaaaccaaatttcacatatcccagggctatgttctttggggggcaaggaccgaatcccccacgggggaattccccaaggggggggcccccttaatctggaaactcactggggcttttgggagggggccccaaaaaaaagaaacccacccccccgat

SEQ ID NO: 46357 - DNA, 382 bp, Glycine max
ctcgaggtcgacggatagcttgatatcgaattatttatatgtgaattgagcacacaatggggatttaaaaaaacgaccgagaaggttatgaaatatcattccagatcaaagagtgctaattttctcataaaggaaggcgagaaagtaaagaaacttgcagagcagtatgttgaagctgcccaacagaacagaaaaaattgattcatatggtatcatttcatactcgacaagttttctttagtcattgcccgttacccgcctttgttctattatggtgctatacttgcttattaagaaacttgccatattgggcagctgtggatatattagatttagtctcacctcgtcatttatatgtgaattgagcacacaatggggattt

SEQ ID NO: 46358 - DNA, 272 bp, Glycine max
aattagttctcatccattaatttccattgaagcccgaaaacagaacccaaaaatccggggggaggaaatctcataaggcaaaaccaaaggggaatgtagtttaagtccaacaaacaaagggggggggctacaaaggctttgcaaatttttcaaggacttaaaacccggggggcttgtaggcaataaagctgatgccctggacttggggaacgttgccaaatccaaggatccggatgaagccatgggggtatgcagtcttagccttttgaagc

SEQ ID NO: 46359 - DNA, 347 bp, Glycine max
gtggaagaggctcatgttgacctttctatgtgcctttgctgctttcttcgcttacaatatcatgactgcgctagttatgttcttgtccatagtcacaattgggttaagtagtggtgggcttgcggttttggtttccaatcacggttttgtacttcattgggtatgtgtacctcaccgtggtgtggcaactagccagcgttgtcactgtgttggaggactcgtggggggttcgagccatggcgaagagcaaggagttgataagggggaagatgggtttgtccatattcatctttttcacccttgtggcttcttttgagcccattagggttttgttcaaggtgatggtg

SEQ ID NO: 46360 - DNA, 297 bp, Glycine max
aatccactcacttgctacgatgtccccttctgccaacactaacggaacttctgccaccaatggctcgtcgaagcctcgtcctactttcgctgtcaaggctggactcgctcaaatgctcaagggagggggaatcatggatgttgtcaacgttgaacaagccaagatcgctgaagctgctggagcttgcgctgtcatggccctgcaacgtatcccctctgatatccgaaaggacggaggtgtcgctcgtatgagtgatccccacatgatcaaggagatcatggaagccgtttccattcc

SEQ ID NO: 46361 - DNA, 310 bp, Glycine max
gaaatggaatttcattgcccaaagagtttaatatattattcataaggaccccatttcatttagaatagaagtacacacatgatacacgatgagggggcacgcaaagggcacacgccttatggaaatctatggatctgtatttcagcgcatatatgatttatcattgaatggcatctgcttgaagcgacttggataaccctgtagtcagctccaccattacaagtgaaggtgcttgctggatcatccttggggtaactattagcatcggggcacctttgcttgaagaatctggaataatcagggggcccac

SEQ ID NO: 46362 - DNA, 436 bp, Glycine max
gctgtaataccatatatagccatcaatttcattcatggttttgtgaaatgcataaaaaataaattccatacactatacttgtcatgaaaaagacatgtacccattttcattacattacccaggaaagatagttacataagaagaagaaaaaaatttagtaaacttttaaaaatttaaccattaaaaacatcaagcgctacatataaattgcgactcttaggcgtcaacactttacatcctccttgctacttgattgttgcatgatgtcttgtataagcaaagtcatgtcaagatgggaagacccccctttttcaaccgctttctttgccatctcacagagtttggttgccctttctcttctctctttgctttcttcttcatcattgtccatcaccatgcatattgccctctcaatgttcttcttcttcaccaacac

SEQ ID NO: 46363 - DNA, 396 bp, Glycine max
ctggaccactttcagatctgcaactctagcggtctctggtgagggctttctggcacgtgatatagcttttgagaacaaggcagggccagagaagcatcaagcagtggccttgagagtgaatgcagactttactgctttctacaggtgtgctatgtatggttaccaagacactctctatgtccactcctttagacaattctatagggagtgtgaaatttttggaaccatagattacatatttgggaatgcagcagtggttttacaagcatccaacattatcacaaggatgccaatgcttggtcaattcactgtcatcactgcacagaccagagattcccctgatgaggacactggcatttcaatccaaaactgttcaattctagccaccacagattt

SEQ ID NO: 46364 - DNA, 355 bp, Glycine max
aataaaaatatttttattaaagaaattagaatgtagacacactgaagtgtcggtgacaagagacaatagcaggggaaggaaaaatggaaagaaacaggtctgttgcatattaaaaaactgttcagaaggggataagatcataaacatatgaagaacagtcagtcccatacataactgcatgagccaattgagtagaaaccctaatgacttgcatgttcttcctcacaaaattttgcgtgctcctttggacccatatgggaatctaattcagatggatcgcttggctttactttgatcatccatccatctttggatgggcttgagttgaccaggccaggcgtttctgtgagctttt

SEQ ID NO: 46365 - DNA, 431 bp, Glycine max
gcagcaaatctcaagctgtcaacgccaaatacgttgtcgcacctattctattctttgttgggttgctgatcttgatttgcatctatttaagagtaaggaagccaacaaagcattttgagagtgaaaccatggttgatgacgaaattaaactagtcgtgtcatcacagtttgactttgacaccataagagtcgctacgaacaacttctctgatgcaaacaagcttggacaaggtggatttggacctgtttacaaggggacactcttcaataaacaagaagtagcaatcaaaaggttatctagcaactcttgccaaggaaatattgaattcaagaatgaagtgatactaatgtccaggcttcagcaccgaaatttagttaggctccttggtttttgttatgaaagcgaagaacggctccttgtctatgagttt

SEQ ID NO: 46366 - DNA, 381 bp, Glycine max
ggtaaaacaattggactctacttctcagcggaatggtgcgtcccatgcgccaagttcactcccaagctgatttccgtttaccgctatggaatccaagcttatccattcagtaaggacaggttggagcagctgcaaaaggaagacaaagtgaagcgtgataaccagactctcactaatttactagcaaaccaccatagagactacgttttgagtcacactcacacgggactcaaaaaggtacctgtagcttccctagtgggtaaaacaattggactctacttctcagcggaatggtgcgtcccatgcgccaagttcactcccaagctgatttccgtttacgagaagataaagcacgagctagccgaaaagggagaggaggac

SEQ ID NO: 46367 - DNA, 466 bp, Glycine max
caacaaacatctgtttatttgttttatttttgctacaagatatacagaaaaatcttaccaagggaagccatagttcagaggctttactcatgtaggaattttaaggtcaaactattcttcaaagaacaagggttagaaggtccaagaccacttagataatgccatagctttatgaaattcatattttcatctgcttcatccataatgaccatttaactgcttctaaaaatttatcatttcgtcgcagtgcagtgataagattagtgtagcttttcttgtcaggttctattccattttttctcatttccttgatcaaacctacagcttctgcaaccattcctgcaatcccatacgccttgatcaatgtgttatagctgcacaaatcaggtctgagtccacattctttcaattctgtaagcacattagcaacttcattaatccatccttgttctccatagatattgat

SEQ ID NO: 46368 - DNA, 458 bp, Glycine max
aaatcttaatgagaaatttatattcatgaattaaaatgatgaagtaccaaaatatactaatgtgttttttggttcaggagagcctaccataggaagaagcccattacactgcagggaagcaacacatagatagtttgctgcagagaagaaaaggaaaagcatataagaaaaattacattgagcacaggttgttctgtcctttacagttatactctggtgtaaaatgactccatgcagcttcacctcccagtgaataaataaatggagatagaatcctattgtctttgtaccacacctctcattgtcactattcacaagctagttttgtgtcaaaactagtcaagcaaatggcaaaagcctgaaatgcagataggggatatctatagtccatagtaaatatatccttgccaaccttgccaaactgaagaataatcttgtcatgatcagactgcgctggc

SEQ ID NO: 46369 - DNA, 408 bp, Glycine max
aaagaaagaaattttcactaccataacactgcattagcagaccgagtgccgtgcgcaattggcagggttcacacttcacgtcggcttttacacaattgtccccattttcaaggggcagggttatcgcacaatcaaatgaatcaccgtttaccggtctggtctaataattaataagcttgaaaactgtcgaaatgcccctgtaaaaaaagggatcttttcctagctctcagaaaatcattctcacattttacaactttaaaagcatatgggaacaatgaccttggaattttcaatcgggtatggcttgactgcttaatgaggtttcttatgacatatggaagtatgcctccgtggttgaagtaagcaagttcgacctcaatgtcaaagcgtgctgtgcaagtgaaagat

SEQ ID NO: 46370 - DNA, 260 bp, Glycine max
ggcagaaattgctgttaagagtttgacggtgcataatttctatgttggagagggttcagacttcacgggtgtcctcacaaaaatgctgacagttaatggcactttacgcatgagcatctacaaccctgctacattttttggcatccatgtgcactccacacccatcaatctagttttctcagaaatcactgttgctactggcgagctgaagaaacactatcagccaagaaaaagtcaccgcattgtatcagtgaacctag

SEQ ID NO: 46371 - DNA, 316 bp, Glycine max
caaccaaatgtaaaagggaaatcgccttgagagaatttaaagaagcattccatgccccggattgctcaccgaaaaaattgatcgggacccgacacaaccagtggggctaaacggggcccttttatagcccgtcctggttggtggggacctcctcgccttgcttccttcgggccatcctttccttatttttttttcggacctcggcggccctggccttctgggccttctcgaccttgacgattttgttccccatggggtcaaactggccctcctcggcctcctttcgctggtaaattcgggccccggaaccctgacc

SEQ ID NO: 46372 - DNA, 351 bp, Glycine max
gctttgcttgatttgtcgaacttcatatttgttacgcagactccgcatttttcactttacagtcattcttagtgtcagctaagaccctattttattctaattttcttgtaatcatgggcgttgacgttgaaaccatatcacccggagacggtcatacctaccccaaaacaggacaaactgtcatcgtacattataccggaactttaatcaatgggaaaaaatttgattcatcgagagatcgaggccaacccttcaaattcaaaattggcaaaggagaggtcattaaaggatgggatcaaggtgtagccaagttaagtgtgggtgaaagagcaaaactgacttgcactcccg

SEQ ID NO: 46373 - DNA, 365 bp, Glycine max
cacaagtctcggcacaccttcaggcgaccgatcaccccttacagatcaacacgacgttcttgctactcagtgcagagcgatccggctcccagttcctagtcctcaacagcagatctttcacttcttcatctttcaatctagcagctcgacgctcaaagaccatgcctcctaaaaaagccgccgctcccgagaagaaggctctcctcggaaggccttcgaacaacttgtacgtcggtatcgttggaatgcccaacgttggtaaatcctccttattcaatactctcactcgatgtgatctcggaaaggttgccaacttcccttacgctactatcgaacctgaggagactcgtgtacccgttcccgac

SEQ ID NO: 46374 - DNA, 392 bp, Glycine max
gggagcgaaagatgtatatattcaagacgtagggtgagaggagaatgctatgtatcgagaaatggcgttcacaagccaaaggaaaatacaaaacatctccgagaggtatttttggggggttgtatgcggaaaggattctccgattaggcgttgtgcttccagtgagcgatatctccatcgaccatctcgtaaggctttcctttttgttgaagtttaccagcagccttgacagcagtttccgaaccgtattccttgaggtcatcaaagttcatgatatcaccacagatgaagtgcttttcgaaatcagtgtggatgacaccagcagcttgaggagctttagttccttcccgaatcgtccaggctcgtacttcttgaggaccgcaagtgaagta

SEQ ID NO: 46375 - DNA, 390 bp, Glycine max
gcagtttcctatagatctagagcagtatgatagaagagaacagctgaagaagagtggccttggaaaggtcattatgtttctatcgaagtctgatgaagaaatcaatgtgaataggaaactagccaaggagctggttgataagtggagccggcctatatttaataagagtacccggtttgaagacatgagaaatgtggaggatgatagggttccttataggagaccatcagttaaaaagtactcttatacctatcgatcttcaattgcttggcttctgctgcatttgttccaacatgttaaatttatacaatttggttgacgtcttacaggccggcaaataaagctgcaggaatggaatctaagacagtgatcttgatttagaactttcac

SEQ ID NO: 46376 - DNA, 382 bp, Glycine max
gggaaaaaagccagttaaatatatacacaattaaattatgggctaaaatgcatgtacaagtaaagtgaaacatacacactattttccaaaaatctgtaggcaattccttcatttcaaaaggggatcatagaacacatatctgggatctggaacaattagaggcagcttttttatgtacagaaacagcatcttacaattttctttgaaaattgtcccaacatcaacaatgtcactggtgtcagggtaaatccaaaggtccccaaagttggttctttttaggctatcccggcaaaaggggcaagactgagacctttgacacctgaatcaacaagcaccattgtcacatctagagaacaacaaactagggatcactttctgattt

SEQ ID NO: 46377 - DNA, 424 bp, Glycine max
gtgtacaaagacatgggagaagaccagcctgctcaattgccgactccagatgttcctcctcatcacatgaaggcgctcgaagagctgaaaggaattttgaagggagagattccctcttcgttcagcgatacaaggttgctgaattttttgagggccaaaaaattcaacgtcgagcaaacgacggaaatgttgagggcggattttaaatggcgtaaaagcgagaaagtggaagagatatttgagtttgcaaaaacagagcatggaaggctagcgactgagtattggccgaaccgaatgcatggattcgacaagtatggaatcccagtggtctacgataagactggatcgtgtgatacgaggtctctcctccaagttctcagcaaagacgaacttttgaaaacgcacatctactttcaagagcgtc

SEQ ID NO: 46378 - DNA, 330 bp, Glycine max
ctaggatgtgccatcgtttttttccataataaaatatcgttggtgtaacttaaagaggaacctaagaatgtattcaggggtgaaagggttgttcaacataagccaaaaggtgataggaacggtgggattgatgcgtaagaatgtgctagacatcaacagcataacgagtgtgataggtcttattggcaccggcatcaacataattgggtcaacagttgatggtcttacttccttcttgggtcgttctgtgtgtcttcagttgaatagagctaccaaggctgatggaaatggatatggggtagttggaaagaagacctatttggaaggtat

SEQ ID NO: 46379 - DNA, 463 bp, Glycine max
agcaaaacgtaatcatttggattacagtccatggttcaaacttcagagttccagagacaggaacctgaatctacttgcaaaaaataattaaatgaaaactgaataagctcagccaatgttttacaagaatgaatattataatttatggcaataaactggttttgtgctattttggagctagctttttctggcaatgtcttttcctttttcagaccaacgatgcatgtgcaatataggagcagaaaaaaattattgaaagaatgatgatactagaacgttctatcacttaaataccaaattatggcaggttttgtcacaagggtaaggacagccaatagcctggacactaactcggccaaaataccagttcccaaccgactccgcgatccccctatttccaatacgaggggaatcatgagcaaaccatgtatcctgtctttctgattggcaatgggcgaaacat

SEQ ID NO: 46380 - DNA, 360 bp, Glycine max
  unsure (1)..(360): unsure at all n locations
gacgcaaaatggtgacccctctcgtaaaacacaagatcgtgaaaaaacgcaccaagaaattcgtgcgtcactattccgatcgtttggttcgtctcaaccaaaaggtgtcatggcgacgacctcacggtatcgactcacgtgtccgtcgtcgattcaagggtaacatgttgatgcccaagattggttatggtacaaacaagaaatttaaacatgtcctccccaacggtttgctcaaattctccatcaacaatgttcgcgaattggacttgttattaatgcacaatcgtaaatatgctgctgaaattgcacacaatgtctccatccgcaaccgcaaggctattngtgaacgtgctgcacaac

SEQ ID NO: 46381 - DNA, 509 bp, Glycine max
tttaattgcaattttggtgtttctactagttctgttgcttctgtgtgctcgtaagaggggtaattcaaatcagagaggaaatggtgtgggtcctgctcctgttggcagtagtcctccaaatcccggtgtaccaatcgactttccaaatgtcggagattcatttacctatcatcagttgctccaggcaacaggagatttcaatgatgcaaatcttatcaagcatggccacactggggatttcttcaatggtgttctggaaagtgggattcctattgttatcaaaaggatcgacacgcgctcagctaaaaaggaggcttacctgtcggaattggacttcttcaataaggtttctcatcaaagatttgttcctttgttaggtcattgctttgaaaatgagaatgagaagttcctggtttataaacgcacgccaaatggggacttgtctaattgcttgtactacaaaaacacatcctgagatggtacttcgcaatcattggattggataacta

SEQ ID NO: 46382 - DNA, 374 bp, Glycine max
gtggtttcgcgtattgaccgtcggccgtgccttgtagtcgagcgccgggagctcctcgtcgcggctcgacgccaattccacgaggagcttgagcgggccgccgggggcgaggacggcgaccagatcgtagagcgcgagggcgacgaggagcgtccaggtggtccactcggggagcttggtgaaccacgcggcgacgatgatgccgaggcagacggtgtagcactggcggaggaggatcgggaggccgccggaggcgaagacggagaggactccgacgacggagaagttgaagaggaggaggaaggaggtgacggcgtcgagggggagggagaagcgctggaggaaggagaggaggatggatccgcccatggcgg

SEQ ID NO: 46383 - DNA, 382 bp, Glycine max
cagggcaaatagcttatgttattttattctaaatgaaataccgaatacaaatgggaatgaaattaaaatgtgcatactggcataagatctaaacatcctaacaagtatacgagtcacctgatttgcttcttttaaactcaactaaagagttttggatgttatgaacattatatagaaagccaaatggacattaaaaatttaaaattaagggcgtacgtgcacttagatagttacttaatttgtttaggttgttccgttgaggaaaggataatccgtgtagcctataacaggatcttgagtgtaaaatgtgttcctgttatactttgtgagaggggcatgaagcttgagccttaaaaccaagtttggattggtgatgaaaaga

SEQ ID NO: 46384 - DNA, 400 bp, Glycine max
ggtcattggaatagacgactttttcatggtgctgctggattgctagggttggggagagggccattgtcatttgctactcaactgcaatctctctatggacattccttttcctattgccttgcggataggaacagcgattctagtgttagtagcaagtggacatttggtgaggacaaggagctactcagccaccccaatctgaatttcacttcttttgttggtggcaaagagaaccctgctgatacattttactatgtcctgataaagtgcatcatggatggtggtgaggtgctgaagattccagaagagacttggcacttgtcatcacatggcggagggggaacaatcattgattctggcaccactctgacttactttgctgaacctgcttatgagatta

SEQ ID NO: 46385 - DNA, 445 bp, Glycine max
tacttaaacttaccaattgagcacaaacaatgttttgcttattgcgcaatatttcccaaagatgaaagcatagggaagcaatatttaattgaactttggatggctaatgggttcatttcatctaatgaaagattagatgttgaagatgtcggtgatcaagtttggaatgaattatatcaaagatcttttttttcaggatattgagacagatgaatttggcaaagttacaagtttcaagatgcatgaccttgttcacgatctagcacagtctattgcagaagatgtttgttgcattgcagaagacaatcgagtaactactttgcctgaaagaatacaccatctcttagatcataggtccatgtggaatgtatatggggaatccaaaaattcagtgttgctgcatccagtcaaatctttgagaacctatatattgccagatcactat

SEQ ID NO: 46386 - DNA, 509 bp, Glycine max
cggctcgaggtggatgtaagatctctttccgatattgatgatctcactaccacttttttaaagttgaacaaggctgttagtggaccaagaagtccaggagttattggtgaacggggatcaagagaaaattcctctgcttctgaatggtcacaaagggatgacattccctactggtttgatcagcatgcttacgaccctgaagggcaaggctttcaggatggaaaaagatggtcatcacatccccattcttctctaactcagctacatgactcaaggcccttgtacagaacatcttcatatcctgagcagcaacgacagctgcaacaccaacttcaacattgctctagtgaacctgtttcaaactggtttgatcagcattttaatgatagtgaaactactgaggatggaaagagatggtcatcacagccacattcctccattgcccacttacaagaatcaaagcccttgtatagaacatcatcatatcctgacaagcgacaggagcttac

SEQ ID NO: 46387 - DNA, 341 bp, Glycine max
actaaccatagcacatcgaactcgccatgtcccacaggaagttcgaagctccccgccacgggtctctggcattcttgccgcgaaagcgcgctgcccgtcaccggggtaaggtgaagagcttccctaaggatgaccccaagaagcccgtccacctgacggccgccatgggctacaaggccggtatgaccacaatcgtccgcgaccttgaccgtcctggtgcgaagttgcacaagaaggagattgtcgaggcctgcacagtcatcgagactcctcctatgatcgctgtcggtcttgtcggctacatcgagaccccccgcggtctacgatcgctcaccaccgtc

SEQ ID NO: 46388 - DNA, 200 bp, Glycine max
ttatatttttttttttttttttttttaaaaagaactcgcccataagagaacattgttattgtgagtataataacaagcgagacaacaataaaatttgttacgctagaacttgacgaacaaggacataaacatcttgtttgggaacacactgccaataacaataaccgactgaccctgtgcttgccctgcattctgggctg

SEQ ID NO: 46389 - DNA, 440 bp, Glycine max
gaaacccaaaaggtaaaagaaattagacaaccaaccatcaacattatgttacatgtaatactcaagccaaaacaggaacctgaaaataaaatataaaatggctttctctgatgctaaacaaccagcaaaatattttcaggttcagaaaatggatgaagctcccttctctaggagatccaattcttaaaatccaggttgttgagtgaaatagcttttcttcaaatcagcaacaactacttgtggatgcatcagactggggtggcctctccttaaaaatgttctttttaacaccctttgagccctcggctatgaggctaggtgtatccaaaatcttcaaaacaagctcttcgaagcattgctgaacgttaactcgagttttagcactgcattcaataaataggcaaccatattccctggcaaagtctattccctctttcttt

SEQ ID NO: 46390 - DNA, 326 bp, Glycine max
gttccttttgaaggttagaagtgctacaatacaaacaatggcagctactcaggaagatgtgaagcttttgggtattgtgggaagcccatttgtgtgcagggtccagattgcccttaagttgaagggagttgaatacaaacttttggaggagaatttgagcatcaagagtgatttgattctcaaatacaaccctgttcacaatgaaggttccagtgtttgttcacaatgagcagaccatagcacagtctcttgtgattgttgaatacattgatgagacatggaagaacaaccccatcttaccttactgatccttaccaaagagcctt

SEQ ID NO: 46391 - DNA, 351 bp, Glycine max
agctgctacaccgcaacaaaatccttcaggtaatggtatcaaagccattggagtcattgctggaggagttgctgtgggtgctgcactgttgtttgcatccccagtaattgcacttgtttattggaatagaaggaagccactggatgattactttgatgtcgcagctgaggaggatcctgaagttagccttggtcagcttaaaaagttttcactgcctgaactgcgaattgcaacaaataactttagtaacaaaaacattcttggtaaaggtggatttggcaaggtttataaaggacgttcaaccactggtgatgatgtagcagttaacagacttaaccctgaaagcattcg

SEQ ID NO: 46392 - DNA, 457 bp, Glycine max
ctcactccaaccccttccccatcaaccgtcatggctttctctgcattaaaagaagaagatcttaagcttatgttggctgcccgtgttcatatcggcaccaaaaacattgatcctcaacaacatcgttatgtatggcgtcgtcgtcaagatggtgtatacatcatcaacttgggtaaaacctgggaaaaacttcaattagctgcacgtgttattgttgctattgaaaatcctgaagatgttacagtcatctctgcacgtcaatatggtcaacgttcagtattcaaatttgctcaacatactggtgcacaatatattggtggacgttatactccaggtaccttcaccaatcaaatccaaaagaaatttttggaaccacgtttgttggttgtcactgatcctattactgatcatcaacccgtaaaagaatcatcttatgtgaacatccccgttattgcat

SEQ ID NO: 46393 - DNA, 275 bp, Glycine max
accaaagtctattttcttctgtttttttccttttccttttgttcatccataaaattttgatgataagtgggagagagtcagtacaagtggcagtctattctactctacgcgtatatgtatgtttgtagctatacatatacgtagtataatacaaactctaacgactaactaattagcgattaactttactatatgcaaggaaaggcgcttgaacaaccgcgtcttttcccattcactcgagcgagtcgactcagcgactcactaccaacactgat

SEQ ID NO: 46394 - DNA, 519 bp, Glycine max
cagctctcacttcactgcttcaccattcatcgtccatagccaaaaactcaacgcagaaaccctaaatccccaaaatgcgagtctttgcctctcgaacctccaatctcttcaagctcaatgtcgagcactttctactaatccacaaccctaatttcaactccgtcagagaattctcgcaatccaccgcaatccccaaaagcaacttagggttcgcgaccatggctatgacaactacatggaagtcgagaagaaaacgcgcaaggtcctaaaattccagaacctcatcctctcggaaccttcccaatcgctcccaatctcgcgccttgagacgcttgcgcggcgcttcggcttcacgcgccacgagtccggcgcgttcgtcctcaagttcccgcacgtgttcgaaatcttcgagcaccctgtgcagcgcatccttttctgccgcctcacccgcaaggccatcctccagatcgagcaggagcgtcgtgcactagccgcggagctcccacgcgctgtcacgcg

SEQ ID NO: 46395 - DNA, 116 bp, Glycine max
gcacaaaaaattctggttgttattacaagagcatgatctaccagcaaggttggaaatattaataacaatagagcccacttgttccagcacacatacagcatccataccataaagga

SEQ ID NO: 46396 - DNA, 448 bp, Glycine max
ctgcttcatgccactcagagaattatgttcctccatgtatacccttttgtggtgattgattagagaaacataattctctgagtggcatgaagcagagaagctatggccacatcttagcaaaccggcaagtcacaaaaaggcaatggactctctctcattaaagggtccttatggctatgtatgtattgattctattgtagttcttcttctttgtttcggtagaatgtattaataaacaaagatgttcttcctttgagaagctacataccaacttgtgttgtccataacactcaatttgcagatgactagaatcaggctttctcttcagtttctgcaaatgagtaggtaggtaattatgaccttatatcatatcccatgtgtgttagtgtgtatgcttgctatgttgtgaccttatatgcaataaaagaattatggtagtgttttagtt

SEQ ID NO: 46397 - DNA, 543 bp, Glycine max
tgagaatcgagcagcaacgttaacagtgagtgtggtatgttccacgccctctcccaatgcctgtcctccagcacagcctccctgtcccaggcgcggcaagcccacgccctcattctccgactgaacctcttctccgacacccaactcaccaccagcctcctctccttctacgccaacgctctctccctctccaccccccaactctccctcaccctctcctcccacctcccccaccccaccctcttctccttctcctccctcatccacgccttcgcccgctcccaccacttcccccacgtcctcaccaccttctcccacctccaccctctccgactcatgcccgacgccttgctcctcccctccgccatcaagtcctgcgcctccctccgcgccctcgaccctggccaacagctccacgccttcgccgccgcatccggcttgctcactgattccattgtggcatcctccttgacccacatgtacctcaaatgcgaccgcattttggatgcccggaaactgtttgatagaatgcctgatagggat

SEQ ID NO: 46398 - DNA, 365 bp, Glycine max
ctcgagccgaatcggctcgagcggctcgagcaagtttactgttgatacctctatgctccatgaaaaacctatggcagaggaagaggatgataataccaagatggcacagatggtgtgctctttaacaaaccgagaagagtgtttggcttgtggaagtcgaaagcattccaaggtgcattttcccggattgattttgggcctaaaaacccttaataagtgcaaacctcaaaaatttggtctaggccttaatgatataaggttgaactcatacatgataatcttaagcattctaaattatctttagagctttggatagaacttatggggataatttcattcgtacctgtttatgtattgaatgttaa

SEQ ID NO: 46399 - DNA, 395 bp, Glycine max
gttagtaaaaagtgtaaatttggttttaaaattttgttatgcctcgatagacgccacatcatgatcagtgataataatgtgttgattgaaatgaatattgtactagctgcggtttcatgggaggcagggaagccacttgtgattgaagaagtagaggtggcaccaccacaagctggtgaagtgcgtttgaagatcctctacacctctctttgccacactgatgtttacttctgggaagccaagggccaaactccattgtttcctcgtatatttggtcatgaagctggagggattgtggagagcgtacgtgaggggtgtgactcatctcaaaccaggggaccatgccctcccagtgtttaccggggagtgtggagaatgccctcattgcaagtcag

SEQ ID NO: 46400 - DNA, 437 bp, Glycine max
aactagtaccaaatatgtgtatttactgatctgaaaaaccattggtgaccaaaagtgcaaggtttacgcaacaggatacattaatgcattgatacaacacgacacaatgttcttctaagaaaattctatactaatttttattttaaaatgaaagcatctgaaacactaaagcctctggtgctacaattgctgaaagaatacaatgaatttaatcacaaatcagcaaaaacatggtatgttttggagtctacagaaatgagccgtatggctgaaattgttgctgccagagacataatggcaaagaaaccaatattgaaccggtgccagagcttttgtgagctgtttaatttgtccttctttgccttaaggtacatgtggtttgcaagaataaacgtaaggggaaatgtgctgatcgcccctgtgaggctcatgaaatc

SEQ ID NO: 46401 - DNA, 303 bp, Glycine max
gtcaaatacaaatttcaatttgctattacaaaacgaagaaactatgattggaattcattcaaattgaagtgcacatgattaataagattcaaccaaactagagaaggccaccacggagcctaaaggacaacatatacatagaaattttgttatatcatacacattcaaggaagagaaaatctcaatagcaagattcaactgaaactagaaatcgccaccacggagcctaagaacaaggtgaagcgtggattccttctgaatattgaaatcggggagagtgcgtccgtcttcgagctgcttccc

SEQ ID NO: 46402 - DNA, 315 bp, Glycine max
taccgattctgtcactgtctcttatctgcagctctacatggagactctccaggacttgctgaatccagcaaatgacattattcctatagcggaagacccaagaagcggggacgtatctatgcccggggcaactcttgtggaaatcacagaccaacatagttctttggagttgttaagagtaggtgaagctaatcgaatcgctgctaacacaaaattgaatactgaatcttgtcgcagtcatgccatgctaatggttcatattaagagatctgtcttggaaaatgaagatatgcctagtcaaaatggtgatgcctc

SEQ ID NO: 46403 - DNA, 266 bp, Glycine max
gtccagcatgcatcttgcttctgggattgtgaccctcggagacatggggtataagaaactgtccagatattgctatgatagcaactggttcattacaatctagtaaattctgtgtctaacggcattggatctattgatggccattcaactgacgcagatcacactggaatggttattgctaaagatctcgactcaacaaatgttactgtgctactctggacccactagagtcctatttcagcgttgtgcttctatcctagtggcac

SEQ ID NO: 46404 - DNA, 486 bp, Glycine max
ggaatagaaaaaccattatttggatgtgatcctcatatacacggacggaagagtaaaaaacatggaagatgtaccttgttagttcgcagttctaacaaaggatcaaattcagaatctgatggctttgttccatatatgggcaagcggacagttcttgcctggttaattgactctggaacagtagagttaagccaaaaggttcagtaccgcagacggaagaaagtcatgctggaggggtggatcacaagagacggcattcactgtggctgctgtagtaagatcctcacagtttcaaagtttgagcttcatgccggtagcaaattgcctcagccatatcaaaatatatatttggaatctggagtttctcttctacagtgccagatagatgcatggaatagacaagagcatgctgaaaaaattggtttccattcagtggatattgatggaaatgatcctaatgatgatacttgtggtatatgtggagat

SEQ ID NO: 46405 - DNA, 503 bp, Glycine max
ggcttgtatcagagtacaacagggtacggtgagtagcagtaacgacactaaggaaagcccgtggatattgtgcagtgtcgcgcaagttgagcaagcaaagatattgctatcagttattcccatatttgctagcaccattgttttcaacacaatattagcacaactgcaaacattctcggtccaacaagggagttccatggacactcacctcaccaaatcgtttcatgtccctcctgcgtcgcttcaatccattccttacattttgctcattgttgtggtccctctctatgatagtttctttgtcccttttgctagaaaaatcaccggccatgagtccggaatttcacctttgcagcgaataggctttgggctctttctagctacattttctatgatttcagctgcccttgtggagaaaaagagaagggatgcagctgtgaacctcaacgaaactatatccattttttggattaccccacaattcttaatttttggcttgtctg

SEQ ID NO: 46406 - DNA, 262 bp, Glycine max
gacctctgtccttaaagcttggtggcaatcacattccaagtggccttaccccacagaggaggataaggcacggttggtgcaggaaacgggtttgcagctaaagcagatcaataattggtttatcaatcaaaggaagaggaactggcatagcaacccctcaacttctactgccttgaagagcaagcgcaaaaggtcatagtggtgctgatcatcacatgtaaatggaggaaaactcaagaaccaatccctgactctgtactct

SEQ ID NO: 46407 - DNA, 517 bp, Glycine max
gaaaatggggtctctaatgttctctcttactctcactcttgtattggcattagtgtctctgagcttgccatctcaaacctcagctgacaagtacgagtattcatctcctccaccaccggagaagccttacaactaccactctccaccaccaccaccacccaagaagccatacaaatacccttctgctccaccacctgtttataagtacaagtccccaccaccaccgtacaaatattgatgtgctccaccaccacctaaaaagccctacaagtacccatcacccccacctccagtttacaaatacaaatcaccaccaccaccggtttacaagtacaagtgcccaccaccaccaccacctaagaagccctacaaatacccatctcctccaccaccggtttacaagtacaagtcacctcctcctccttacaagtacccttctgcaccaccaccaccatacaagtacccatctactccaccacccccagcttattactacagatcacctgcaccaccacct

SEQ ID NO: 46408 - DNA, 427 bp, Glycine max
agcacttgcatttggtgacttgttgaggaaactgtggtcttcagggcgaactgctattgcgccccgtgcattcaagagcaaattggcccgatttgctccacaattcagtggctataaccagcatgattctcaggaattgcttgcttttttattggatggattgcatgaagatttgaatcgtgtcaaacaaaagccttacattgaaatgaaggactcggatggtaggccagatgaggaagttgcatctgagtgctggaaaaatcatatggctcgaaatgattcattgattgttgatgtatgccacggtcaatacaagtcaacattggtttgtccagtatgtggcaaaatttcaatcactttcgatccattcatgtacttatcattaccactgccttccactgtcactcgcacaatgacagtaactgtc

SEQ ID NO: 46409 - DNA, 479 bp, Glycine max
cagaaagttgcatgtacagcccaggctaccgaattgcaccagagatgatcaaacccaagccaaccgttttgattggatcatctggagcagggaagacatttactaaggaggtggttgaaaccatggcatccttgaatgagaaaccacttattcttgctctctccaacccaacttcacaatctgagtgcacagctgaagaagcttatacatggagcaagggtaaagcaatctttgctagtggaagcccatttgatcctgttgaatatgaaggaaaactttttgttcctggacaggctaacaatgcttacatatttcctggttttggcttgggtttgatcatctctggtgcaattcgtgtgcgtgatgagatgctcttggcagcctctgaagctttggctgcacaagtatcacaggaaaactatgataagggactgatttaccctccattctcaaacatcagaaagatatcagcccacatt

SEQ ID NO: 46410 - DNA, 309 bp, Glycine max
cattgattcaggtgtgttcgtggggcagaaatagggtgaaggctgtggaggctggagctgtgccggttctggtggagcttcttctcgaatgcaacgagagaaaaccgatagaaatggtgctggttttgttggagattttatgtcagagtgctgacgggagggcggggctgttggcccacgcggcgggggtggtgatcgtggcgaagaagattctgagggtttcaacgatggcgaacgatagggcggcgaagattctgctttcggtgtgcagattttcccccacgccgggcttggtgcaggagatggtgc

SEQ ID NO: 46411 - DNA, 469 bp, Glycine max
agacggtccagtgatcaatagctggtttcctttgtttcgtttgtttctctttactttttttgttgtcttccttttgatcccttttctctctttttctccttcttccacaccctcttctcctcatcatctcatcatcacatcatgtattctaaaggcaaaggttcactagctgaacgtaaacgtgcagcgaaaaaagaagaagtcaaagaagatggatctacagaaaagaaaacaacatctgcatttttgcgtattcaaaaagatttggctgatcttgaattacctgataatgttgaattaaaaaaggaggatgattataatttctcatttgttcttaatatcaatgaaggttattggaaaggtggtatatttgaatttaaatttgcatttccacaaacatatccatttgcaggtcccaaagtgacatgtatggataaagtctatcatcccaacattgatctggaaggag

SEQ ID NO: 46412 - DNA, 285 bp, Glycine max
caaaaataccctcataggaaaagtacgcgtgcgtatctccacgctgcatacagggagagtgtataaaaacacttacccgttgttggtgctgagtccggtttcggggctgaagaaaatgggggagattgagatagcaataaggttgcgtcggacgactcaacggctagatttcctccacgtgtactcgcagccgatgctgccgttgatgcaccatgtcaagccgatgggggtggtgcaataagaggcgctgcggaacaccaccgtgaggatggtggcgggacacct

SEQ ID NO: 46413 - DNA, 478 bp, Glycine max
aatcttgttaacaatatattgtcaaatttgatcatacaattggggatccgtctaaacatgaaaataggttttttagagccatacaatcaaatatactacaaattgaatgataacgtgtatacactattataaaagagccaaggcaggccaaatttaatttattgccttccccttcaagctaacttccgagtaaccttttttaagttgccactaaaaagttttcatattctgcttatatcacggccaaacacaagagtagtagcccagttgatagctacatagaatctgttcctccagctgatgactcgagttagatatgccgagcgccaaataaaccaactgacaaaacctgccagggataaccctttgccctccttgttctgtctgaggtccactagagccttgtaactccctatagatgccatgcttcccatgtgcttgtaaacaaactgatccccaaagtctacatcttttgcac

SEQ ID NO: 46414 - DNA, 347 bp, Glycine max
aggataatagtatatttatttttatttctaaatatttattgggaaatagtaaaagcatccatacattattctatttaaaatataaaataaaacatatataatatactatttttataaatactacatttttcttcaagcgccattggacagatatgtttctagacgcctaagatataataaagttgactctgatgtcttcgtaggtttgaccctttcttctatctcggattcatggacataagaaattttcacgttgaccaaagtcttatcctctcctatagcagataactgaaaagttgtcttgaactatgacaatccttgactcagataacctgcttcaatcactt

SEQ ID NO: 46415 - DNA, 465 bp, Glycine max
tcgcgatctacaaccaaactaggcatttttgaataccaatataatataagctttgttaaagagttcaattaagtttcttctttgccctttctaaagctagctagacattattccatctctcttagcaactcgtcaattaaactcaatggaagcaacgaaaggatttgtatctccaacttcatgcaaatgtgatgatggacacctagttaccgtgcttagtattgatggtggcggcattcggggaatcattccaggaattatacttggtttcctcgaatcagaacttcagaagcttgatggtgaacatgtaagatcggcagattactttgatgtgattgcgggaacaagtactggaggattagtgactgcattgctcactgctccagatgaaaataaccgacccttgtatgcagccaaggatattaaggatttctaccttgatcatacccctaaaatctttccaca

SEQ ID NO: 46416 - DNA, 405 bp, Glycine max
tggcaatgctacacattcaatttttgatagatataatgattcatatcttaggagaattggaaccaatgttctgtcttatgtcaatatggtctgtgcaagtctgcgtcattcaattcccaagtcaattgtctattgtcaagtgagggaagccaaacgaggcctacttgatcagtttttcaccgagctaggcaaaattgagcccaagcgtctgtcctcatttctgaatgaggatcctgcaatcatggaaagacgaagtgccctatcaaagagacttgagttataccggagtgcacaagctgagatcgatgcagttgcatggtctaagtagatatgatatagatgtgtatgctacatcgcgttattgttaatattgatcaagaaatctctctctctctctctctccta

SEQ ID NO: 46417 - DNA, 463 bp, Glycine max
attgaattctccagagagaagaagaaacttaatcgatcatcacttcacttcactaatacatcatggcagacgagacccagaacaagtatgagagctctgaggttgaggtccaggatcgtggtgtttttgactttctcggtaagaaaaaggatgaagaagacaagcctcatcctcaggaggaggtcatcgccaccgagtttcaaaaagtcactgtctcagaccaaggagagaacaagcacagcctcttagaaaagcttcaccgatctgacagcagctctagctcttcaagtgaggaggaaggagaagatgcagagaaaaggaagaagaagaagaaggaaaagaaagggctgaaagagaagatcgaggagaaaatagagggtgatcatcatcatcacaaggatgaggacacaagtgtccctgttgagaaagttgaggttgttgaaacagcacatgctgaggaaaa

SEQ ID NO: 46418 - DNA, 395 bp, Glycine max
aaataattatagctttactgtcagtaatgctgctgttgagggccaagaaaagtctaattctcttgaaagagggatgatttcagatgacacatacattgtttttgaaacatcacgtgatagtggaattaagattgtctatcaacgagagggtgccactagcaacattttcaagcagaaagaatttaaccttcagtcactgggtattggtggcctgagtgcacaatttgcagatatattatgaagagcttttgtctctcgtgttttcccaccccatgtgacatctaagaatcaagcatgtgaagggcatgcttctttatgggcctcctggaactggaaagacacttatggcacgccaaattggaaaaattttgaatgggaaggaacccaagattgta

SEQ ID NO: 46419 - DNA, 510 bp, Glycine max
aaacatactagttggcaaatgagtcatgcagatacagattttgcatggaaaaagattgctgaacctgtgatgagatcttatatggaggctacagacggctcctctgtagagaccaaagagagtgccttggtatggcattaccgtgatgccgatcctgatttcggatcttggcaagccatggagctgctggatcaccttgaaaatgtacttgcaaatgagcctgtagttgtaaaaaagggacaacacattattgaagtcaagcctcagggcattactaaagggtcagttgcacaggaagttctttcttccctaaccaagaagggtaaatcgccagattttgtactgtgcattggtgatgatagatctgatgaggacatgtttgagagcatattagccaaaccttatagtactacctcatcctcagcaccacaaatctttgcatgcactgttggacaaaaaccgagcaaagctaggtactacctagatgacactgtcgatgtgatggcatta

SEQ ID NO: 46420 - DNA, 404 bp, Glycine max
gcttcttgcatgcccttcagcagcttgggggtgcagatactgccacaccaaagcaaattagagagataatgaatgttgatggcctcacaaatgatgaagtcaaaagccatttgcagaaataccgtttgcacactagaaggccaagtcccatggttcacaacagttccaatccacaagcagcaccttttgtccttgtaggaaacatttttgtccaatcaccagaatatgcagctgtagctacctcaacagcatcaagagaagtggccacagttgcagcacctgctggaatttatgcaccagtggccacacaccctatacctgtttcacacccaccagctgattcaattaagaatccacagtttaagaaggtacagctgtttgagcattcaatttcagatgaaagg

SEQ ID NO: 46421 - DNA, 453 bp, Glycine max
gcaattactcaaccatatattatatttgagataagaaaaatacagagtaaagtgttacataaaatttaagtgggatatgatacttgattaattgagtctgatattgagacaaacacaaagatgataaattattcatatgcaaattaattttgtgcactgcaaactactgctcaatgggaatctcatctcatttggaagtcaaagattcaacttgagcttttccacttggtccttttgtcctaatgtaaagtctatactcatcaaatgtcattggcgggtatagagctggcctatccttagtcacaagctccttggctggttggatcggtatatcgctcctggggttatagaaaaaggccaatgaaacacgatctttgtgtgaggttacgatcaccctgggctctatacttttgtaagttgcattgctcagcacctgaatttggtcacccatgt

SEQ ID NO: 46422 - DNA, 314 bp, Glycine max
agaagggaaagtactacttaaaagagttttcgaaatatttgacacacactattttaattaaacagtccctttaacacagttaacaaagacaacaaaacaactctgaagccatggagatagaaacatgaagcttttcggggcattcccctatatgttctagaattcagaaggatggatccacaaagtattacacactatatattgcatacagcaaatatgcaattcgatccaacatctataccatcttgggggctaaaagtaggtaccttctggaggttggacaagcttccggttatgaggagcggccattttct

SEQ ID NO: 46423 - DNA, 494 bp, Glycine max
gcacagttaagctagcttccattcggtttgatcgttctctctgaacaaccccagccatgggaggaggaaatggacagaaggccaagatggctcgtgagagaaacatggagaaaaataaacctgccaaagttagaggccaacaagaaggccatgaacatccagtgcaaggtgtgcatgcagacattcatatgtaccacatcggaaggaacgctctgcatgctttgagaagcaggatttctgatcccaacaatgtgttgcagagttgggacccaacactggttaatccctgtacttggttccatgttacttgtgactccaacaatcatgtgattcgcttagacttgggcaactctaacgtttctggaactctgggcccggaacttggccagctacagcatctgcagtacttggagctctacaggaatgagttaacagggaagattcctaaagaacttggtaacttgaaatcacttattagcatggatttgtatgat

SEQ ID NO: 46424 - DNA, 496 bp, Glycine max
aatggataaaaatagttgaggatggtcttcgtgaactttttattgaatatagcatgcaaatgttccttacaacaacaaatggcgatgaaggggatgacattatgataaaaaaaacatttctagaagggtgaattgactggtcactctttgttgacggggatgaattttctgattatgaattctacatatctgattttacgggtaacccacaatgcaagtcagaattggatgagtacttggacgagcctctgctgaccagagtggaagaatttgatattctgagctggcggagagtaaatggattgaagtacccgacattgtctagaatcgcatctgatatcttgattttaccagttaccactctggctgcagattccattattgacatgcaaattagaaaaatggatagctaccggagttctttaagctccctgacccttgaggcccttatttgtgccatagattggttccagtctgaatgactagaattttcaaa

SEQ ID NO: 46425 - DNA, 438 bp, Glycine max
cccccacccgtagtttctaccaccttcagtcacggcgtaatacactaaccaacccaccatgtcgctgcctgcttgtcccgccgaacaactggcccaacttctcggcccaaacaccacagacgcctccgccgccgcctcccttatctgcggccagttcgccgccgtggacagcaagttcgtcgacacggccttcgccgtcgacaacacctacctcctcttttccgcctacctcgttttttctatgcagccatcgtatgcggttttgttgcttctatagtattaatagcttgcaacaaattagcagagaaggttaagttcgacgatcctctggaggcgacgcagttgcacggtgggtgtggcacgtggggggtgatattcacggcgttgttcgcaaaaaaggagtatgtgaaggaggtttacgggttggggagggcgcac

SEQ ID NO: 46426 - DNA, 450 bp, Glycine max
gagtgatatctacttgttcttgggaaataatgtgatgggtgagccgttttggggaagagcaaaagggccgtattgaatcccattctttgcacccacaacagaccacctgcaccagaaaaaaatagaagcagcacacgctagtttagaaaccccctaatttggaataatatgtctctattcaaagcctatggctaaaaaagggttgttgaaattactcgtgattaagtttaccaacctgtactttgtggtcagatgatgtaggaggaccaaaatctccaacttggctaattcgttccctggacacatgtggatcccactgccaaatggcataaaagtgttgggttttggagcagcctcaaatcttgagggatcaaatttttctggctccttgaagttgtctggactgtggtgtatgttcctaaatagaggtagcactttccacccttttgg

SEQ ID NO: 46427 - DNA, 283 bp, Glycine max
cggctcgagaagaaagaaagaaaaccctatcttaccttttcaactttcaagatgcaaatctttgttaagacactcactggtaagacaatcacccttgaggtggagagttcagataccatagataatgtaaagtccaagattcaggacaaggaagggatcccaccagaccagcaacgtctcatttttgctggcaagcagcttgaggatggacgtacacttgctgattacaacattcaaaaggagtgcactctacacttggtgctccgtctccgtggtggaatgc

SEQ ID NO: 46428 - DNA, 406 bp, Glycine max
ctcgagccgcttttactgatgttgctatgtgggtgttttgccctttcaatggaccctccactctgaaaattggaattacaagtagggcttttagtaaggttggagagcatgttggtgactgggagcattttacacttcgtatatgcaactttactggagaattgtggagtatatatttctcacagcacagtggtggaaaatgggtggatgcctatgaattggagtatattgatggcaataaagctgttgtctactcatccaaaaatggacatgcaagctacccccaccctggaacatatctccaagggtcttcaaaacttgggattggcattaggaatgatgctactcgtagtcatttgtatgtggattctagcattcaatacgagcttgttgcagccgagtatct

SEQ ID NO: 46429 - DNA, 270 bp, Glycine max
cagacactttatgaggatgaaaacaagaacagaatgatggagactaaggaactttttgagtgggtcctaaggcaaccatgttttgagaaaacatccttcatgttatttttaaacaagtttgacatatttgaaaagaaggtcctgaatgtaagaaccatccagatgagtacactttgtcataggtggagtgtattatcatttcagtttaataccttgcattgtgcaggttccgctcaatgtatgtgagtggttcaaagattaccagccagt

SEQ ID NO: 46430 - DNA, 412 bp, Glycine max
atgaaatgatccagtacttagaaggtgaagggagtaagtgagaacttctgagaaacgccgccaatggcgcattgctcacttttcctctctctcagacgaaatagcggtttggcttgtctcctgaaccgaacaagattcgtgtcttcgggtgctgtgagcagtgatttggtggaagagagtgtggaaggtgttgatgatgacctaaggagcagaatcttcaggcttaggctccccaagcgaagcgccaccaacgttcttcagaaatgggtcctccaagggaatcctgttacgctctctcagcttcgggatatatccaaagagcttcgaagatctcaacgttacaaacacgctttggagatatctgagtggatggttagccatgaggaatacgagttatcagactctgattatg

SEQ ID NO: 46431 - DNA, 535 bp, Glycine max
ctgcattgcaccacaataataacaatattaatagtgctgtagtcatggcaaccaaagctaaaggcaaggagctgccaaatagcaccggtaagatggtgcagattataggcgagattgttaatatgctcatcaccgcccacaaagagggcaagtcgatcaatctgtctaaaattaaaatcgatgctgcgcgtgagaatggcttaccacgccaaccaaaaacgatcgatattattgcagctattccagaacaatataaaagcgctatattgccaaaaatcaaagctaaacctgtgcgaaccgcatccggtatcgcagtggttgcagtcatgtccaagccacatcgctgtcctcacattgcactcactggcaatgtgtgcatttattgcccaggaggtcccgacagtgatttcgaatacagcacgcagtcctacactggctacgagcccacatccatgcgcgccattcgagcgcgttacaatccctatttgcagacacgcaatcgtgtggatcaactgaagcgattgggtcactctac

SEQ ID NO: 46432 - DNA, 473 bp, Glycine max
cccatgtcaagaagttaatggtagcaaagcagcaatgttgttcattggcctctatctggtggctctgggggttggaggaatcaaagggtcactgccagcacatggtggtgagcaatttgatgaaaccaccccatctgggaggaagcagagatcaaccttcttcaactacttcgtcttctgcctatcatgcggtgcccttattgcagttacttttgtggtgtggattgaagacaacaaagggtggcaatggggttttgcaatatctactattagcatatttgtgtctatcccagtattcttggccggttcaccaacctacaagaacaagatcccttcaggaagcccacttacaaccattttaaaggttcttattgctgctttactgaatagctgcacctacaaaaacactagcagtgcagttgtgaatatgacttcaagcccttctaatccacactcaggtagaacagaatcac

SEQ ID NO: 46433 - DNA, 440 bp, Glycine max
cggctcgagcggctcgagaaacaaacaagcatgactcgagcctactctttcctcgtctctttggtgttcatcactatgaccccttcaacaccgcaggtggaagccttctcctaccacatcaactgcggtgcttccaccgactccaccgactccttcaacaccacctggctctccgaccgcttcttctccgccggctcctccgctctcgtctccgagcctctccatttccctctcccctccgagaaaaccctccgcttcttccctccctcctcctccggcaagagaaattgctacaccttcccttctctcccttccccctcccgctacctcctccgcacattcaccgtctacgacaactacgacgccaagtcccgccctccctccttcgacgtctctctctcctccaccgtcctcttcagctggcgctccccctgccggag

SEQ ID NO: 46434 - DNA, 279 bp, Glycine max
gggacgacaaaagtcataaacattttatttgggaacaaaatgcaaaaaacaataactgactgaccctgtttttatcctgcattgcatccaggacaaaactaaaaacagggaaaacgggtttttattaaaaaaaaaattgaagaccttaacgaccccgacgttcaacaagaagaagaagaaccccccagccggcaacaaaaacaaagggaatgatgacttgggcgagactttttgaattgaagcccattctttaataaaaccactgctcccccaaatttt

SEQ ID NO: 46435 - DNA, 368 bp, Glycine max
gggttggtgaagctgccaagatgttaggtgagatgatccagataggcttagttcctgatgctgtttgttacaatgaaattattaaaggtctctgcgatgttggtcttttggatcgagcacgatctctccaacttgagatttctgagcatcaagggtttcataatgtttgcacacataccattatcatctgtgacctgtgtaagagaggaatggctgagaaggcacaggaaatatttaataagatggagaagcttggatgttttccttccatagtgaccttcaatgctcttatggatggactgtgcaaggctggtaaacttgaggaggcacaccttttattgtacaagatggagattgggagaagtcct

SEQ ID NO: 46436 - DNA, 203 bp, Glycine max
gcttgatcaaatacaaccggtataaaggtcttccattgaatgatgctagagcggttggcttacgcgttttgactgcaagacactacttacattctgagcgagggcctggccccactgacctaaatactgaagacactcctttattatcaaccatcgatcctggcgacaaccctgtaagggcgggactgtgccccatcattgaa

SEQ ID NO: 46437 - DNA, 361 bp, Glycine max
gttagataatcagtttcaggtgcaatcagaggatgatactcatggaatatttggcacatctgtgaagtacgaccaagacactaacagacttactgataagacacaacgacgtctagcacaaaatcgagaggctgctcgcaagagtcgattgaggaaaaaggcatacgtgcagcagttagaatcatgtcgtgtgaagctcttgcagttagagcaagaggtagatcatgcaaaacaacagggattgtatattggcaacggattgggttctaataatttgggttttgctggctctgtaaattcaagaataacccttttcaagatggagtatggaaactgggtggaggaacaaaatagacaaatt

SEQ ID NO: 46438 - DNA, 440 bp, Glycine max
ggaaaaatgcaaatagccaactgaggattcttgcctgcttccatggtgcaagaaatattccatcgatgataaatttgattgaggcttcaagaggaatacagaagcgtgatgcactttgtgtgtatgcaatgcaccttaaagaattctctgagaggtcctcatcaatgttaatggtacacaaggcaagaagaaatgggttgccattctggaacaaaggccatcatgcagattctaaccatgttattgtggcatttgaggcttacaggcaactaagccaagtgtctattcggccaatgattgcaatctcatctatgaacaacatacatgaagacatttgtgcaaccgctgagaggaagggagccgcagtcattattcttccatttcataagcatcaaagattggatggttcactaaatatcaccagaaatgattttcgatgg

SEQ ID NO: 46439 - DNA, 500 bp, Glycine max
gaaaacgttctccttcgagaagccaaagcaggaattttgaaaccagcttttacaataatagctgatcatgagatgaaatgccttttgttattgattcgtggcacacatagtatcaaggatactctaacagctgttacaggaaatgtggtaccatttcatcacactgttgttaatcaggggggtgtcagtgatttggttttaggttatgcacattgtggaatggttgctgctgctcgatggattgcaaagctcgcaactccttgtctccttgaagcacttggtcactaccctgactataatgttaagattgtagggcactctttgggtggaggaactgcagcaattctaacttatgtgttgagagagagaaaggaactgtccgtcgctacatgtgttacatttgctccagctgctcgtatgacatgggagttggcagagtcaggcgatagttttattacttctattataaatggagctgatttggtacctacattctcagc

SEQ ID NO: 46440 - DNA, 395 bp, Glycine max
attgaattctccagagagaagaagaaacttaatcgatcatcacttcacttcactaatacatcatggcagacgagacccagaacaagtatgagagctctgaggttgaggtccaggatcgtggtgtttttgactttctcggtgagaaaaaggatgaagaagacaagcctcatcctcaggaggaggtcatcgtcaccgagtttcaaaaagtcactgtctcagaccaaggagagaacaagcacagcctcttagaaaagcttcaccgatctgacagcagctctagctcttcatgtgaggaggaaggagaagatggagagaaaaggaagacgaagatgaaggaaaagatagggctgaaagagaagatcgaggagaaaatagagggtgatcatcatcatcac

SEQ ID NO: 46441 - DNA, 472 bp, Glycine max
ctcgagccgaatcggctcgagcattcctagcagcactggagctgccaaggctgttgggaaagtcctccctgctttgaatggaaaattgactggtatggcattccgtgttcccaccgtggatgtctctgttgttgacctcacagcgaggctggagaaagaagcttcctacgatgaaattaaaaatgctatcaaggaggaatcagagggcaagttgaagggaattcttggttacactgaagatgatgtggtctccactgactttatcggcgatagcagatcaagtatttttgatgcaaaggctggaattgcattgaataagaactctgtgaagcttgtttcttggtacgacaacgagtggggatacagctcacgtgtcattgatcttcttgtattcgttgccaagaagtctctttaaggtgttacttcaaagtagcttgacttcacattattaccgtatgtttatgtttagctg

SEQ ID NO: 46442 - DNA, 452 bp, Glycine max
ctcttctgtgaattaaggtctaatgccttgattacacaagtgtgctaacctaaaatcttacgcaccttttggttatgggcatatttatttgcaactattgaggttgagcattactttacgtggacacactattaggaatccctctacatgtaacgccgggtcgagaggtaggtgcaagtaactcgtaaggtaaaacccctgcgccacaacggttcctgagtgatggatcgaggttccttctctcaatctccttctctatccgtctgatctctgcggagaagctacagaatgcctcagtgatgtctgcgtcacctgaccaaatggatgagtgtcggcgctctcccaaatactcctcgtcagatgagtgggtagagagtatgtcaactatagacatatattttgtagcctgtaacacgctgggcaacgcatttaggaaatacttttggggatct

SEQ ID NO: 46443 - DNA, 299 bp, Glycine max
aaaaaggaaagaaatattgttattaaggggagtaaaatgatgggatactccaacccattacattgcaagagaagatgtaggccttgcaacagctttggtgatgagggagtgtttcatttccatggagagctttaagcactcagacaagtccacaccagaatcattacaaggcgtccatttgaacttttgaaggaacacagcaagccaagggtcaacaggggccaagcccatggttttttcaggggacacttttctaccagcgccaaaaggggccaacctaaaatcagaccccatgattg

SEQ ID NO: 46444 - DNA, 453 bp, Glycine max
gcttaatcatgaatcgacgtcgtttaccggagaggacactctcggcatcccccaaaccattttcatttttgaaaaggagttatcctttttgatcgattttccagaaagcgttccgattgtgctgctattccgtgtccgactcggctgagtttggccgatccaaacaagcgagtcagttgttggaggaaagcccctcacccaagaggaaccagttccacccgtatgctccagattggaaaaatggttacactctagaaggttaaaccccttctgtggtccctctagcacactatcgaagatactagatactccatccgcacgtttcgaagctattcatgatattgatttcagtgcttctgacttgaaaacattggaacgaactgaccgaagcaatttgcttcttcataccatcaaaactgaagagaagaaaacctctatcgagaatggcagtca

SEQ ID NO: 46445 - DNA, 358 bp, Glycine max
gtacaacaaaagtgaacgaacgaaccagagattccctctgctggtaccatctccaacagccccccaccaaacatttccatttccgaccaacttcgattcaatcaacagctcaaagcttcatacttcaccggcatggatcggttaaaccccgcctgagaaagcaagttccccaccaccgtaagatcacggcagaaaacaccctgaaacaccgccggattcaccgtagaagaagacaccatagacctattttgagacatttgagtactattactctcaacgaccttattcaactcagcagcagcttcattggctttctctttctgtgcttcaagagcttgcaaagcagccttctttctct

SEQ ID NO: 46446 - DNA, 503 bp, Glycine max
cataactccatttttctctccctctcttctctttcttaatttacctattctctcacgtctcaaatattttctcctccatctctcgccagcttcaagatatcactcattgagcaaagtaggtcaaaaaatttgctcaacaaggtaaaacatttattagttagctagcagtatggggagagcaccttgttgtgacaagaatggcctcaagaaaggaccatggacaaccgaggaggaccagaaactcattgattacattcagaaacatggatatggcaattggaggacactcccaaagaatgctgggttgcaaaggtgtggaaagagttgccgtctccgttggacaaactatctacgaccagatataaagcgaggtcggttttcatttgaagaggaagagacaataattcaactacatagcattcttggcaacaaatggtctgccattgcatctcgcttaccaggaaggactgacaatgaaataaagaattattggaacactcaca

SEQ ID NO: 46447 - DNA, 427 bp, Glycine max
acagggactcggagggttggttattggtctaattacactggattatcaattgtgcctcctgaagcactttattcaaaaccacctaatcgatccagtgcaagccaaaagctactccctgtgctttggccaggagaaacaacccataggccccgtggttgggtttttccaaacaatggaaggatgttaaaaattggagtgccaaaaagggttagatatcgagaatttgcctctcaagtacaaggcactgacatgttcaagggattttgcattgatgtatatctttctgctgtgaactggttgccctatgctgtcccctataaatacggttcttatggggatggtgacagcaatcctagtgacactgagcttgtccgtcatatcacagctggtaggttcgatgctgcagtaggtgacattacagttacta

SEQ ID NO: 46448 - DNA, 530 bp, Glycine max
ccccccttttacttcgaagtcccattccttccacaaatctcactgctgcttcttctcaaaagcacttcttcaacccaatcatctcaacccttcgcttcccaccatttccaatacttgcaaattcccccacttccaccacccacccaggtttcctttcctttcattttcaattgtctctcttatatattcattttccaaacgtgcccttcttcaattgcagtcacccaaacactcaatcctcaatggaccccaaacaatgccgcctgccgaaaccctaattttccctccaaacaacccatgaccaatggcggagcaagagccgcgcccgacgacttcggccgcgccgccgtccgcctcgcggtggcgcagctctgcgacgccgcggggttccaaggcgccaccgactacgcgcttgatgccttcaccgacgtcgacgtccgctaccttctcgaccaaggtcgaaccgccgagtcccacgctaaccacgccggccggtcgcagtgcaccgtcttcgacgcaattcgcggcat

SEQ ID NO: 46449 - DNA, 467 bp, Glycine max
gaacttgaagactaggaggaaataaatatattgagcataggccatttacatctagccctctactaattaacagttaacagaaaacagttagagtgttccttggcagttatcaatgccagtgtatggctctcaaaattgcatattttgatacaattgccagaggagagttggtaagtacatagatcaagataatgaattagcctcgtgaactggcatatcccgtggaattccttcagagcagccaatgccatggtagatgaaagcattcgtagaaaacaaatattgaccaacatatccacatcaattttacagtctgaaaactgaaaagctcatccatgtgcacctttaaaatgtaatggccgtagcttcagtcaagtttgcctttcctattcatcaagtcatggtagtatagcagtacacacatatgttgaccaaggatactgaatatgaaccaaaaaatcatattt

SEQ ID NO: 46450 - DNA, 463 bp, Glycine max
aacctagtgatttatgtacacgtcgtgaatatgctcgctggttggtttctgctagcagtgctctttcaaggagcacagtttcaaaagtgtatcctgccatgtacatagacaatgctactgagcttgcatttgatgatgtcactcccgaggaccctgatttttcttccattcaaggcttggcagaagctggacttattgaaagcaggctttcaagacgtgatatacagttgtttggtgatggagatgatagcccatttcacttctcccctgaaagtcctttatcacgtcaagatcttgtcagctggaaaatggccctgcagaaaagacagcttccggaagctgacagaaaggtgctgtaccaactttctggttttatagacactgataagatacatcctaatgcatgccctgccttagtagctgatctgtctgctggggagcaaggaataatagctcttgcatt

SEQ ID NO: 46451 - DNA, 412 bp, Glycine max
gttgataggggttgtggcatgcttggctggtgcagcaacctttgccttggataaaggcccttctttgaaatttctaagccattttcatcttttggattaccatataagcattcaacatcaaggtcatgctcaatccggtgcatggataaagggttgcttcctcatgctcctctccaacacgttcttcgggctatggcttgtactacagactgtaattataaaagggtacccttcaaagctgctcttcacagctattcagtgattgttaagttcaattcagtcttttgtcattgccttggcctgagaaagggacattgaacaatggaagttgggatggaatgtcaggctcctcgccgtactatattgaggaattatggtcaccggtgtctcatattacttacaaacatgggtc

SEQ ID NO: 46452 - DNA, 520 bp, Glycine max
ttctggtgtaacaaacaagagtgcgccttccctaaaaaagttgggccagaccttggtggggttgaatcttcaaaactgcaattcaattggctgcaacacagttgagttcctagtggagaacttgtggagatgtgatattctggcttaatatcttaaccatccaattgcaatatcagggaaggagatataatttaagtgacaaaaccgaatctggaaattcaggatagatagtaaatgtatcttgtgcaatgaactcacaggtggcgacattccacatactttttggacagatgtacctacctatctagggtggattgggtgggagtttgttgacatagttgttttccagggaactatgatagatcctttctttagcccttttttttcaagcatttttcatacagaaatgcttgttacaacaacccttttggccttgctacttgaggccacttcctttatgctatggttccgtgagaaaacctttactatgtcttggttgatggttgcctctagatagata

SEQ ID NO: 46453 - DNA, 126 bp, Glycine max
tgggttcaactgtagaaattatggacagaatctcgtgaaagggagtgaaaatcctcataggtattacaagtgcactcatgctaattgctcagtgaacaagacagtggagaagactttggaaggaca

SEQ ID NO: 46454 - DNA, 490 bp, Glycine max
agaactatatacttccaagtttgaggaccaaagcaagtatgttcttctgcctctctcacatgaaaataaccatgggaaactgaaattcagaatgctatataatgtatattaaaaaaataaaatcgaggaccaaagcattcattacaaatgctgctacaacaaggtgaagtttctcacagaagtatatgcttccgttagatggtcagatttccctaaaacaacccttctcgcaattcatccaaggaagttttatcaatgctctccccactcttgatgaggcaaattttcctcatgtaagttgtaacatgtcataacaccgaaagtaaaaatgagaattcatccgagggagtttcatgacttttatcaatgctctccccactcttgatgaggtgaactctcccgtcgcggcgaacacatatctctggaatgcttttaacttcaccgttgatgctatcattataaactctaatctcaatgtcaccctcaacat

SEQ ID NO: 46455 - DNA, 549 bp, Glycine max
ttttgcttgatgacacaatcacacttaaaggtgagaaaaacgccgctaccaacatccactctttaaaaggcttgggaattgttgataagatcaagaacatacttgaatcagagtgccctggaattgtttcttgcgctgatattctcactattgcagccagagatgctgttattctggtaggtggaccttactgggatgttcctgtgggaaggaaggattctgtcactgcaaattttgatcttgccaacaccaatcttgccactccagatgagagccttctgtctatcattgccaagtttctttaccaaggactatctgtcacggatatggtagcccttgcaggtatattaatgaataaaactttgaaggtttaaatatgtttttaattttcacaaatatgacaaattttgattttagtcctttaaaaaatcttttgtcaattttagtcctcataaatttatttattttaaatagtatctatcatcatttaatgatgataagacatgcatttagatatgtcacattaacaatcattctaagatctgatat

SEQ ID NO: 46456 - DNA, 414 bp, Glycine max
tgaggaacgaaacgctgcctttgatctttttcctcttcctatgttcccacctccactccgtcctctcatggaagaaagaggagttccgaacctgccaccaagccccattctgcaagcgcgcccaatcccgcgccccgggctcctcctccctcatcgccaccgagatcaccatctccgacggcgacctcaccgccaaactcaccccataacacgattctcaatccgaagaaaccaaacccttgatcctcaccctctccgtccaccaactcggcatcctccgcctcaagatcgacgaggacccctccctctcccctcccaagaaacgcttcgaggtccccgacgtcgtcgtttcggagttcccctccaccaagctctggctcccccgagtttcctccgaaaaaaacggcgcctact

SEQ ID NO: 46457 - DNA, 519 bp, Glycine max
ggcgaacgagcaaaggagttgagtatctagttgaagcatcagctgcagaagctgaagctatcagtgccacactggctgctgctaaggcacggcaagtgaacggtgaagttgaattgcctgaccgagaccgtggggctgaggcaacacctagcgggaaacaaatatcttccttgattaagcctgattctgctgggtcaaatagcattcctcctggtggagtgaggctgcatcacagagctgtggttgttgctgcagagactggcggagcattaggtggcatggttagacagctttcaattgaccagtttgagaatgaaggcaggcgggtcagttatgggactcctgaaagtacaacagctgctagaaaattattagaccggcagatgtctatcaatagtgtcccaaaaaaggttgtagctcaccttttaaagcctcgtggctggaaaccaccagttcgtcgacagtttttcttggactgcaatgaaattgcagatctttgtgatagtgcagaacgcatat

SEQ ID NO: 46458 - DNA, 488 bp, Glycine max
gaaaagtgcagagatctttggtggagttggagaacattcataataatggccaaggagaaaatttatttttgccttctgctgatggacaaaaccatgataacaaggtgttgaagagccaactatttgcggaaaaatttactgaaagtgtccaatatactttcttggattacttggcggggggatttgaattgaatttcatggtggctgttgactttacagcttcaaatggaaatccacgccttccagattctttgcattatattgatccttcaggacgaccaaatgcataccagagggcaattgtcgaggttggggaagtgttacagttgtatgattcagacaaacgatttcctacttggggatttggagcacgaccaattgatggtcctgtttgccattgtttcaacttgaacggaagttgtcattactgtgaagtggaagggatccaaggaattctgatggcttacacaagtgccctgcttaatgta

SEQ ID NO: 46459 - DNA, 487 bp, Glycine max
atatatatgatagtaatatatatgattttcagtatacttatttatacacagaatctccatatccttccctccaaagaaataacaatgatggaaacatcatcatggtaacggcgcctatcaccctgtggaatttcgagcaactcgtgaaagtccaaaccagctttctttgcagcacgaaacaacacttcttcaaccaaatgctgagccgggtctccctcgggttgcaatgtgatgaaaagctcgacttcagccactgcctcttcgtttgacaagtactgatagagcccatcagagcatagaatcaaaaatttgtcctttgggcctaatctgtggtgttttagatatggtaggcagcttatgtaaggagagtttcctacgtagtctattctaaacatctccagaagtgcgttgttccactttggctgtttgagaaatccggcaccaaatgctcgagtaactttgagagaacccttcacacggtcattta

SEQ ID NO: 46460 - DNA, 402 bp, Glycine max
gcggctagggttttagcgcagcttcttctagatttaaggaagatgggtaaggaaaaggttcacatcagtattgtggttattggccatgttgactctgggaagtccactaccactggccacctgatctacaagcttggaggcattgacaagcgtgttattgagagatttgagaaggaagctgctgagatgaacaagaggtctttcaagtatgcctgggtgcttgataagcttaaggctgagcgtgaaagaggaatcacaattgatattgccttgtggaagtttgaaaccaccaagtactattgcacagtcattgatgcccctggacacagggatttcatcaagaacatgatcactgggacatcccaagctgactgtgctgttcttatcattgattccactact

SEQ ID NO: 46461 - DNA, 422 bp, Glycine max
aatgggaatgaaaagccatgattctctccataagcgaggtgaaaagcaacaagacgaacaagtttatttacaaaaactacgacacactacacaaaattagagtgaaccccaagtaaccaaatgaaactatttaaagcagtagcaatgtagctgtcgtacattgaattcaaaagacagaaaccagtccaggaacacccagccccatcactagaccgaagccaatggctgagtgaaaccagtcctggctgagtgaaagctgcaccagtatgcaatatagcttccacggcagggactttggcaagaacacaattggatctctagcctctcaaccaagtgttcctgtaagatgaattgtctcgcagagaggcatcatggggcttgtactccataacatagctgtgaggaagctttaagtgacgttt

SEQ ID NO: 46462 - DNA, 318 bp, Glycine max
ggagaacgtttcaggggaagttgaattcaaccatgtggactttgtgtacccatcaaggccagacagtgttattctgaatgatttctgcctaaagattccagcagggaaaacagtggctttggttggagggagtggctctggaaaatccactgtgatatcacttttgcagaggttttatgacccaattgagggagagatatttcttgatggtgtggccattcacaagttgcaactcaagtggttgaggtctcaaatgggtttggtcagccaagagcctgcactgtttgcaactagcattaaagagaatatactttttgg

SEQ ID NO: 46463 - DNA, 322 bp, Glycine max
ggctcttaacaactttcattatcaaacccaacacttaccttttatatgaagtaaaaaaggaaatcaacaacttctcacttaatttggtcattacataattgctagtttagatttgaaacatcaacttgctatagctgaaacacataaatttggggggtcttagtgtatggaaacagacaaaacatacaaaaaacacaaaaatgaagtctatgtgttcacaaatctgcagttcttcctaacttcccctgtgaagaagctttctgagtttgtgatatttcccattttcaccattgactccgagaattgtcggaaaaaagcaaga

SEQ ID NO: 46464 - DNA, 408 bp, Glycine max
gctgggttacacatttatttatgggaacaattcaaagttcttcggaggactttgaattatttggaacattacaacaaataaaaagtcaccttacccttcccttcccgaacacccaaacaactcccgaattattcgcaaacagatttattaacaacaatgaatctaactaccctttgcaaatccccccgcactaaaattgcaacttgtgttgttgtttacctccaaaacatgcactgtttgcgactttacatgatcaaccaaagccttaacttaaagcacagaacaatcggtacgaattttcccatttcttgcagtcttaactccaacgcgacccaatttggtcatagcagccacaaagttggagttgaaaacgttggtactggaagcaaaggaattaacggtgttcct

SEQ ID NO: 46465 - DNA, 488 bp, Glycine max
tacatcctagtcataaacagcattacccttttggaagatctttctggggtgctctatacttttcagcgtggttaaaaaagtagacttttttttacctcaagattctggttctggttccatttgagtttgattacgtgataaggaagcttgtggttcttgtgattgaggcaaagaacttgccaccgacggatcctaatgggttgagtgatccgtacgtgaggctacaattggggaagcacaggttcaggaccaaagtgatcaagaagtgtttgaatccaaagtgggatgaggagtttagctttagggtggatgatcttaatgaagagttggttatatctgttatggatgaagataagttcttcaatgatgactttgtgggtcagcttaaagtgccaatttcaattgtttttgaggaggagatcaagtcccttggcactgcttggtattctttgcaacccaaaagcaagaagtccaagaacaaggaatct

SEQ ID NO: 46466 - DNA, 433 bp, Glycine max
ctagaagcgtcaaacactatacaattgctactttacagtctacattttttcacaagatgaatatatatgtacaaattcaataccatcactggggagataacagagttaatcggagaagaattcttgcacttcagctaattggtccgtgttcattagaagagggagtgaatcaattttagttccattggcattgagcttattatctactacatcataccactcctgctgctcttcaaactcggtaatattgttgtgattttgggggtaggaaatttccccaccaccagagttttgacatatgcaagctgatgggttctcggtaaactcaccactaccgggtctcaactcattcggttctcccataaagcctacctggaaagttcgtactcgagaggcaaattcctcccacgtcctattatttctgttcatgaat

SEQ ID NO: 46467 - DNA, 452 bp, Glycine max
gacggaaaatttctttaaaatacttgcagactaacttagcagaaacaaactaaggctagttttacgccctaaaccctaatcaaaactactttcgtcccaaagccagaaattaccaaggttaacattggtttcaacaataaaagacacaacaatacaactgtgtcttcaaatctgaagtatccccaattttcgcatgcacatacagggaacagaagcagaagtgatgagtaatcattaataaaatttcaaaccctaagaatctgaagcttggtggagaaagcaatagcgacccaatcaggctgcgaagacgaccactgaagctgctcaatctccgcacccgcagtgtacgcaagaatcgggtcaagcccgcccttcacgggttgacccatggaagaaaggtcccaaatcagcgcctgcgaatccccggcggtgcatatatggcacgagctatg

SEQ ID NO: 46468 - DNA, 461 bp, Glycine max
aaaaggctgaggaactttatcaaaggataaaggattcaaacctttcctttgatgccgttacttacaacgaaatgatgactctttacatgtcagtggggcagtttgaaaaggtcccatcggttgttgaagaactgaaacaacaaaaggtttcccctgatatctttacttacaatctatggataagttcctgtgccgccattcttaatattgatgaagttaggaggattcttgatgaaatgagtcatggtgctggttctaatgaaagttggataagatatttgaacctggccaatatatatattagtgtaggtcatcttgataacgcaagttccaacacacttgttgagactgagaaaaggatcacccaaaggcaatggataacttatgacttcttaatcattctatacggtgggttgggaagtaaggataaacttgatcagatatggaattccttaagaatg

SEQ ID NO: 46469 - DNA, 329 bp, Glycine max
ctcctcctctattttggatctgttcatgttcacaggatatggtgtttgctcattacggcaacggtggaagttgcttaggaaactaagcaacttgcacatgcttggaggaaaagctgttgatgattgggcccaagttcgaaatgaagagatagggtacatgcttcgtgcaatgcatgattgtagcaagagaggtgaggccatggtggtggcggtgatgttgacatactccatgaccaatatgatcggttgagtgatactgagccgttgtttgttcgtgacgaagggttcggagtcgaacgagttcaaggacatggtggttgagctcatga

SEQ ID NO: 46470 - DNA, 307 bp, Glycine max
aagttaaaataacatttattttgagtttttttttctaatacaattctccgtaactattgcgaaacggaaggagtaaatctcaataatggttcacgaatacgtcgaattccacgatagcgtgtactttggtgaaatcaacagagtaaaatctggcttgagcgtagccacgtgcaaaacgaaaagccccagtgccgccaacaatagccatttccctaacaggttcactcatgatcatgttccttcgcaacacgctgatggtgctgacgacgaaatctccatcggtgaatgccatcgtcatcaccatcat

SEQ ID NO: 46471 - DNA, 451 bp, Glycine max
catacaaaaataattagtatatatcctttcaagaagaaaggggaaacaaaaaacaaagagttaaaaaaaatacacaagaaaaaaaaggtgttaaaaaaaatcaaacattaacaagtagtgattggagtgcttaatatacagttgcattaaatatttattgtggtgaaagatacctctgatctgatacgaagaatgggtcccctcatgtgttcttacaggcatagatcaacaaggagaattcaactctatctttatctttctgtgcaatcttctcctctaaccacaatctgctatccaagccactcctggtcctgaacatgaacacagcatacccagaagcaggattgaaaaaccagttatgaacatcccaaagcaaatccacaagcaacccatcgacgaaaatcgtgtggtttcccctgaaattccactgcagcctcttcacacgaatcac

SEQ ID NO: 46472 - DNA, 384 bp, Glycine max
gagttatgtgtgtgggttttccactggtagctctcgtagtggtgagcatgtgttatggattggcagatgcagaggtgaaaacaccaaatttgcggtggcattattataaggtgacgaatagatgtcacgacgcagaggagtatgtccggcaccaagtgaacctgttttggaagaatgacagaagcattacagcaaagcttctccgcttggtttatgctgactgttttgtcactggatgtgatgcatcaattctgcttgacgaaggagcaaatccagagaaaaaagcagcacaaaaccgggggcttggaggatttgcggtcattgacaagataaaagctgttctggaatcacgatgccctggaactgtgtcttgtgctgatatac

SEQ ID NO: 46473 - DNA, 184 bp, Glycine max
tttttttttgtttttcaaaaagaaaagagggtgggtattgaagaccctctattaacagtttattgatcatcgaccttacaattgcagtttaagaatacagactttttctggactcttgtaataaaccaataaccttacaaactctataaacttttttcaccttgaacccattttttggttagtg

SEQ ID NO: 46474 - DNA, 443 bp, Glycine max
cagaaattctcaaaggcctgagccaaacccaggcctaagagggggtttggaaatagttttcaaccagcaatagacgcgcctcagttagaacctcactagctgcgtcattgccccaagcgcaaagataagtcaagctaactgatgtgtacttttatataggacaacttctaagtctattgaagcatacgctccggatgtgggactaaagtttgtgtttttatttgccatttaccttgtccttcttgtgtgatcataatcaaaatcattattgaaacaaacagcagtttctggattccaacaatgtgatcctaccaaaatctgaaacttcaaagtgctctctttctttttagagagcatcgtcgagatcatgctggaaatatttggttgccacatcttccttctggacactttatcaaaaagcttatactacctcagtcattcca

SEQ ID NO: 46475 - DNA, 343 bp, Glycine max
gtcataataatattttaatgtaaaagcaaagaatgagtgaatttaaaaatataatcacaagcatttgttacttagatatgtaaaaatactcagtactaataatggagaagaacgaatgcaaaaaaaagttgcataaccaaaataatgtttgaagtttactagtcttacaacagtaatcaaattgtggaagaccttacaataacaaatacaacttgtcattgtagtatttgactaccataatcagcattgaacttgtcatatttgtgggcatggagatgagcagatggccttgtgtttctcaaagctgtctctatatcttcagatctgattggcccaacttttg

SEQ ID NO: 46476 - DNA, 547 bp, Glycine max
atcgataagcttcttgcaaggtgttatcagtagattagttgatcacacctttacaggatgccgtattatatacagagactttataggctgtgcaaggcttccttttcaccaaatggacctgtctcagaagaagccgttgcaaaagtttgtgagaagttagaaaaaatcaagccgtcagatgtaggtcttgaacaggaggcacaagtggttcgtaattggtctggtcaaatgcctgaatgcaacgggaaccatcaacagccaccaccgatcaaatacctgcatttgtatgaagatgacagcttctctataggaattttttgtatgcccccttcatctattattcctctccataatcatcctggaatgacagtcttaagcaagctcttatatggttcagtgtatgttaaatcttatgattggattgatttccctggcccaactgatccatctgaagctagagctgcaaaacttgtcaaagataccgagatgacagcaccaactgcaacaacagttctttatcctacccttggagggaacatacatactt

SEQ ID NO: 46477 - DNA, 363 bp, Glycine max
gaattggagaagggtcatatttctttcattatcattacaagcttagcaaaacatgagcaacatatttaaaggctctcattcgagcaaccagtttaacaaatcaaacatacccaaaaatgagggacgagtggacttgtgacttgctgagtccttcatcccttaaatcgaattcctttggtcagggtggagtgggtgtatgaatgcagaattcatttgccaaaccttaactgacgcagtcacagaggcctcggtggcattattaaataaaaacaatctagcagctccatagattgccttggttggataaactcgagatgttacacacgttcttccaccttgagcaaaacttttcactatagaatg

SEQ ID NO: 46478 - DNA, 318 bp, Glycine max
gggaaaaaaaaattgttttacgtaccaaacaaagacaaatgggggatgattcatgtgcctgtttgtaaccttaattacttgattaaggccccgtcccccctttttggaatggtgattatgaatacctaaaaagccactgcgatggcaagacacttctattggatatgatgattatcttaattaaaaaaggggtttaaatgcaacgccgatccttgcaaggggaacacaaacgaaactttgtgcccttggaactgggagggcagctttttttttcatgctaactttgggattatcacctttcaatatttggccttgggg

SEQ ID NO: 46479 - DNA, 440 bp, Glycine max
cattaatataatccatttctccattaacgtaaatctagaagatcagccagtgtaaataaagatagtattataatgtacattaactagcacttcaaaaaaaagggtataaatgacataaaacaggtacaacaaaggcaaccaaccaaaagcttgactccatggttggttctgaacgaactagaacccatccttacaaaatggaagcacctataatgtatataattcctgtatctgtaagtagaaattgtacccaaaagggatccctatttcatgaattccaaaactttctgtgtaatatcttcaaggaaagaaacaaaacccatcacactggtaagaccacttccatcaacatcctgctcttcgatcagaaagttctcaaaaattgaggcatcatcatgccctcctcgaataaaaatgagcttgggagtgatgcatctctc

SEQ ID NO: 46480 - DNA, 451 bp, Glycine max
gcggccgccctttttttttttttttgatgataaaatagatgaagcttggttacttctaacttcaaagaagaaacacatgaagcttcattaattaataatgataaaatataaatcaagtaagtctcaaagcttccaacaaaataatacaaacaaaattctcaaatcctgcccgtattttaaatctaccttaggcatgctggtaatggcgcagcttatacaataacactttgcctgacgcgtttccgacagccatgaatccaccaccaggactaaaatcaatacagcggggataatgcaggttcgtgtttgacggtggccagttggagaacacagaatacgatgggatatgtattaattttaagctgctcttcttcatgcctgaacagatcgctaatatttgagagtcatgattaaatctcataaaatccacttttgtagtcaaattctctat

SEQ ID NO: 46481 - DNA, 390 bp, Glycine max
agaataaatttcactactagtttccattatatctcatcttcgttataccaatccaaaaaaaatggaccataatatcgttacatttcattctcttccaccagttcaaacatgtagaacaaaaatgagactcactcactcactgaacctgatatgtatgagacaacaacagttatgttatcaagtttgccaccataataacagaatccagctttttcagcagcagtagaaaatggtgtccgactactcttggacagtgctcgctgacgagccaaagctgctatcttctgagcagttacttggggctctagtccagccctaattgcatgttcaacaactccagtgatcttactgttgtacaaattgtcaaataaaccatctgttccagaaatg

SEQ ID NO: 46482 - DNA, 400 bp, Glycine max
gaagaggagaagccaaactcgctatgggtttttccttagttccttgaattgccatttcaaatgtagttacatagacacaaggcaattttcttaatgcaacaaagagtaatccaaggaaaagaaaaagaaagattagatctcagcaggcacacgtttgtacaaatgtgaggggagcctaggagaagccaaagcttgtattggagtcctcatgtatgtgactaaccctggattctctcccatgtcaatttcctcaggcttcattccttcaggtggggtccaacaaaaatggtgcaagaggtggcccaacatggatgttaccaagttgataccaagttgggcacccgggcatacccggcgacccgccccgaatggaagtagcctaaagtcatggcccttcatg

SEQ ID NO: 46483 - DNA, 464 bp, Glycine max
gggaactagtcatattggaatcatatgcatgaatttctactcctcatttgaagaagtagaaatacagtgggatggagatgccttcaaaaagatgaaaaatctcaagacacttattatcagaagtggtcatttctccaaaggtcccaaacattttcctaagagtttaagagtattggaatggtggagatatccttcacattattttccatatgattttcaaatggagaagcttgctatattcaacttacccgactgtgggtttacttcacgtgagttggctgccatgttaaaaaagaagtttgtgaatctgacaagtctaaattttgactcatgtcaacatttaacactgatacctgatgtatcttgtgtcccacatttgcaaaaattgtcatttaaagattgtgataatttatatgccattcacccgtcagtaggcttcttggaaaaactgagaatcttggacg

SEQ ID NO: 46484 - DNA, 413 bp, Glycine max
agaaaacaaaaatgatatattgtatcttattctcaacaataagcaaacaaaatttaataagtccactcatcatgatcgaggtcctttttcacattccgttactaatttactggattaaggtgaggtcggtgacctaagacttaagagggactacaatagtgctttgttatgtacaaaccaaatgcctaataaagaataaaattattgtattggctttttgacaactccttccacaattccctttgttgtaccctattcgataaaaaagccaaattctttttaagttctaatgacaggacccttgtaaatccctctacggatcacaaagtcatctggaggttgaaattcttccaaccaggacacatcagaaactgtaactccattcaactgaagattacctggaagatctttac

SEQ ID NO: 46485 - DNA, 467 bp, Glycine max
gttcattacacttgatagtaacatatttgctctgtataccttgtgaacagtaaagtttagcataaagtcaataaggattccagagctttatattgaggttcctgaaacttcaactgttggttcactaaagaggactatcgtggaggcagtgatggctatacttggaggtggtgcacatgttggtgttcttcttcaggggaaaaaagttagagatgacaatagaacacttgtgcagactggtatatcttgcaatgaaaatttggataccctgagtttcatgttggagcccacttcactacaagcttctccaactgtttgtgttggtgatccttcttctcaatgtgaaacatcccagcctaccaggtgagccaaattttacgacgatttctttttatcaccacagctgatttatgaagggaaatggccaaggttaatttatggggtagaaataatgattcagttctatt

SEQ ID NO: 46486 - DNA, 304 bp, Glycine max
gaaacatcaagagatttttttagcttcttttatcgcatcaacaagtttgagttggagtcgaatttggtggctgcggatgtgaacaccataaatggcacatatgacaacatcaacaagtttcacagcattcactacgctcttatggtcgttgaatgaacctgaagcacgcctagctcgttgctccttttatgacaatagaatacgctggaaacatcaagagattgttgccctcggagtttggtactgatccggcaagaatggtgcatgcattggaacctgtgaagagtgacatttgacgacaaaa

SEQ ID NO: 46487 - DNA, 494 bp, Glycine max
agccacccttcttgtaggggcttgcttacaagtgttgcttagggagcttccaaattctctatataatccaaaggtggcaaaaatattctgtagttttgaggcaaaggaaaggttggccaatgtggggtgtgcttctttcttattgtactacttcctgagtcaggtggcaatggaggaaagcatggtatctaaaaccacaatgatgttgctggagagaatgggggagtgtgctgcagaaagatggcagaaggcactagcattccaccaattggggtgtgtgcttcttgaaaggaatgaatacaaagaagctcaacattgttttgaggcagcagttgaggagggtcatgtttattctttggctggtgtggccagaactaagtacaagcagggtcaaccatattcagcctataagttaattagttctctcatatttgagtataaaccagcagggtggatgtatcaagagcgtgcactgtataacatgggaaaggaaa

SEQ ID NO: 46488 - DNA, 472 bp, Glycine max
gggcagaccctagcaattttgaggacatttttgatgtgaagcatttcattgattctttaagagatgaagttcggatagtgaaaagagtgcccaaaaagttcagtagcaaacatggattctctaccttggagatgcctcctgttagctggtcaaatgaaaaatattacttggagcagattttacccctttttgaaaaacataaagtgtaacaccttaacaaaactgatacccgtctagcaaacaatggtcttccacttgatttacagaaactcaggtgtcgtgtcaattaccaggcacttaaattcactcctcaaattgagaatttggggcacaaattgattcagatgcttcatgagaagggatcttttgtggcattgcatctgagatatgagatggacatgttggctttctcaggttgtacttgcggttgcactgataaagaagctgaagagctcaagcagctgagatatgc

SEQ ID NO: 46489 - DNA, 363 bp, Glycine max
agacgagaagcttttgaattacatcaccaaacatggccatggatgttggagctccgttccaaaactagctggtcttcagaggtgtggcaagagctgcagattaaggtggataaattatctcaggcctgatttgaagagaggagcattctcacagcaagaagagaattccattgttgaacttcatgcagtccttggcaacaggtggtcacagattgcagctcagttaccaggaagaactgataatgagataaagaatctatggaattcctgtctgaagaagaagcttatgcaaagaggcattgacccaaacacacaccaacccctttctgagattgagaatgacaaggacaagcctctcacagc

SEQ ID NO: 46490 - DNA, 471 bp, Glycine max
ctagaccctgttaataatattgttcagcaaacaaactacatgggtcaatgaggccactgtcaattgcccatttggatttactgattgtcatcgcttacataaaatgtcatgcttttaatagctattattctcatcaatcagatgtacgattattgcgtaactcttcatttctgtagagtgatccaatgatggttctttatgcaagaggaaaaaatgcagcactcacagaacttggccggacagaagtaattctgaattcattaaatcctacatggattactaaacacactctcatatataattctgaggttgttcaggttttagtgtaagtttaaatattgatgtttttacttctaacaaggcagagcattttgttgtttcaccatgaattattttggaaaatttctttcttaacaggtttcgtgtgtctgatgttgatactcagtttcacaacatacatgtaaagatgct

SEQ ID NO: 46491 - DNA, 525 bp, Glycine max
ctagaataataggaggactttatatttataaattattctaccttattatctgacataactttgtgaaaatctttaatatcccacaacctgctccacttccatggcttcctaggtgatttttctctaacaatatactttcccaaatcgcacaacaagtcatgcattccaatttcctcatccatggttataagtgatttatcaacgagaacttgtaggtcatattcgggattaaatccacgaaaatctagaacttccttcacatattccacatcatcatcgttgaagaaacatgcaatatctagaaatatttccttgtgtgtatcctctaattgatcaaaacttattcgcaacacattcataatacttttacttttattttctcttaacgaaaccaatgcactcctccaatgagagaaatctttatcaaacaaatatgagcctattacttcaattgctaagggatgaccttgacaatgtgatagtacatcagaagtcaacttttcaaaatcactcataatataatta

SEQ ID NO: 46492 - DNA, 397 bp, Glycine max
ttcgcactctcatgagaaggtgaggagctactacgagtcttgggtgagaaccccaaggctttttgcgataggtcgcctcgctaatagtaactcattggccactagcggttctccaaggttcaacgtttacggcaatgattttgggtggggaaagcccctgaccgtaagaagtggcggcgcaaataaaagtagcggaaaaattactctgtttggtggcgctgaagaaggttctatggacattgaagtgtgccttccttatgtgattctcgaggcaattggaaatgactctgagctcatggatgccatttccaactagcatggtttggtttatctatagttgatttcagattcatgatattatagtattgagtaacgaataattatgtatgtcttaggc

SEQ ID NO: 46493 - DNA, 429 bp, Glycine max
ggggaatcagaccagcccccttacaattatggtgccaactctgatgttgctgaagaaactgagccagaggaagatgatgactccaagttggaatctaacaaagatttggatcttggccctcaattcactctcaaggaacagcttgagaaagacaaagtaagattttcttttccttttatttttcaaatgtttcttcacaccctttggttttgcagctgccttttttttatgaaagcctttttcttttgcattcaaaggatgatgaaagtttgagaaaatggaaggagcaacttctgggaagtgttgacatgtctgtcgttggaagtgaatgcaaagaccctgaagtgaagatattgagcctcattattacaagcccagataagcctgacctcaccctgccaattccatttactactgatcctaagaaga

SEQ ID NO: 46494 - DNA, 458 bp, Glycine max
caacatagcaagggagacttttttattgtgcaattgtgtattacaataaatcttctcactcaattctacatcttattaccacccgaggatgatttccattcaaacctaataatcactccccaacccttcccacatcacttggaaaaacaaccaaatcatatgatatctcatatatcaagacaccatagacataacatagaataaataatgagaccaagagtaaattatactgaaaagtagacataaatgcacctagatggtcattattaacgagatccttagttattaactcgtgcacaatgtttccttatctccccttcagttccaagcttgacattaattcgtcccattttctcgatagacttggcaaattcctcaaagaatccttgagttgattgaagttgtctatcgataatagaccttgtgataggactagtaagaaattcagcatctgactg

SEQ ID NO: 46495 - DNA, 376 bp, Glycine max
ctcaaatcagtgtgagttagcttgtgattgattgattgattgcaaggtttacaaggtcacaaggatggtgtcaaaatcctattcaaacctattggagttggcctctggagaggctccgtcatttgggtacatgaacaggagaattccaaggattatgactgtggctgggttgatatctgatgttgatgatgacccagtggagagtgtgtgctctgatccgtcgtcgtcaaccgcgcaccgagaccggataatcatggtggctaatcagcttcccataagggctcagaggagaccaaatgggaataataggagttgttggtcttttgagtgggatgagaatgcacttcttcagctgaaagatgggttaggggatgat

SEQ ID NO: 46496 - DNA, 493 bp, Glycine max
aaagtgattaccatgaaggtcttgatcgctctttgtttattagcagtcgttactcagatcagttgctggtccgaggatctagttcaaaccgaaggcggccttgtgcgaggtgtcgttcaagatgtttatcgttcatttaagggaattcctttcatggctccacccgttggtgaattgcgttgggcagctcctcaacctaaagctccttggtctcctgccgtattagatgcttctcaatactccgctggatgtcctcaaaattgcgttttacctaatatgacttgccctgtattcattagcgaagattgcatgtatttgaacgtttttacacctcgtgtttcgcaaatgacttcgaaagtacccgtgatggtatttttccctggaggtcacttcgatcaaggtgccgctggtactgatctctacaacggaggatacatggtgaacagaagcaatgtcattctcgtcacgacaaactacagattgggtgttcttg

SEQ ID NO: 46497 - DNA, 482 bp, Glycine max
ctaacatctacggtctgttttcatggcaaacacaacacacatagctattattgcaagtcctggtttcggccacttggtccccataattgagttcagcaagcaacttgtgaagcatcaccaaaattttcatgtcacttgcatcattccctcacttgattcacccccagaatcatccaaagcttaccttaaagcccttcattcattcatagacttcatctttcttcctccaattaacaaagaacaattaccccaaggagtatacgttggacagcaaattcaactcactgtttctctttctctgccatcaatacatgaggccctgaaatccttgtcctccaaagtccctttaactgcgttggtcgcagatcttcttgcattccaagcattggaatttgcaaggagttcggtgccctctcctatttttacttccctttatcagctatgatattgttactgttgctacacatgccaaaacttgatga

SEQ ID NO: 46498 - DNA, 454 bp, Glycine max
  unsure (1)..(454): unsure at all n locations
aattaatactcgcgagatttttcattgattgcttgatcttttaaatacaaatacacttaaaatcaatggataatagnnatccatcggtcaacttctcattcatttaagagaaataaaacaaaaactataatttataatataaaaatctaatcccattcaatatagtcttttaaccgctttagtttaaagacatgtttagatctacttgggccatcctaaaagtaacagtttgtcccttaactgctattgtactatagtacttagtacgaaaaggaccaagatcttaattggtcttccaacaattggtcctgatttcgccactagagccagtaagtgggctaatgtttcccattttaaccattgcattggcaaagtcagtgttgaagcttgaagggtcgctggcataaccatttacttgagagtctgtggatcctccattgaaaagcacttgatc

SEQ ID NO: 46499 - DNA, 364 bp, Glycine max
ctaaaatatcttcaaaacttgagcttgaactctaaccatcttactggaccaatcccaagtgagattggtgattgtgtcaatctcaagacccttgatatctttgataacaaccttagtgggggtcttcctgtggaactaggaaagctgacaaatctggaggttataagagcaggagggaacagtggcattgtggggaagattccagatgaacttggagattgcaggaatttgtcagtgttaggtcttgctgacactaaaatttctggttcattgcctgcttcactgggtaagttaagcatgcttcagaccttgtctatttatagtactatgctctctggtgagattcctcctgaaataggaaact

SEQ ID NO: 46500 - DNA, 369 bp, Glycine max
gaaaaaataaagccttgattgtacttattgggcaaatatttatatgtacatatatatttagcagttgagctttattaattgtttcccattagatatatgaagggttaacatagttttgaaaataatcaagaagccaatcagttccatcaatgtgcgaaatattcgtgtaggagtttgcttcgtaatccctgagttgcttggcataagggactctggatgtataatttgctccaggtccaagacaacggtactccccaaagaagacactctggtctctagagggatctctccaatcattccatccattaggagctacgacatcagacatgtatgttcttgagaataccacagaggcataggctccccatg

SEQ ID NO: 46501 - DNA, 468 bp, Glycine max
atttatattgtcatgaatgaatgagactacctactttacgtgagtcagtttgccatcaatttaactagtttgagtttacattgtaattaatgttgagagagttcatcgcagtatgtctatttgtgatttccattgcaaaggaggaagccaccaagttggggacggtcattgggattgatcttggaacaacctattcatgtgttggtgtttacaagaacggccatgttgaaatcatagccaatgatcaaggtaaccgtatcaccccatcgtgggttgctttcaccgacagtgagagactaattggagaggctgccaagaatctggcagctgtcaatccagaaaggaccatctttgatgtcaagagacttattggaagaaagtttgaagataaggaagttcaaagagatatgaagcttgttccttataagattgttaacaaggatggaaaaccttacatacaggtgaaaa

SEQ ID NO: 46502 - DNA, 452 bp, Glycine max
gtcgaaaaaatggtatacaatatacggtaattgcttttacacgcacccgcaatgatttatctcataaatttagtaaaccgctatatctacctcgaatataaatacgtataaagtagacggacgttccagtcaaattttttcgtagaataaaatgtatgcctcacagcgaagaacttcatcaagggaaacttcacgcacatatgcatcacttgcctgataccatgtggaaccctcattctctttatcacccttcccacagttcctctggccccctctcacatacgcaacatagtgaccccctctcatagttccggagtgctccactaagccaaccaagtggtatgcatacttctcttcatttatgcacctgggatcaatatagggtctaatatccattgtttctctgaaattgacatggccatttaatttacttaagcgcccacgggcatctt

SEQ ID NO: 46503 - DNA, 410 bp, Glycine max
ggaagttctatatatgaatcaattagccaagtgataacttgcatcatatctaacatcaatatcaaaatctttggccaagggagcttaattaaggatcatggaattcctaacacaatctcagctaccaattgtagacttcaccaacgaaaatctgaaaccgggtaccgatgcatgggtttcagcttctcaagtagtgcgtagtgcacttgaggatcatggtggtttcttggcactctatgataaggtcagtttggagacatacgactctgtttattctgaaatgatgaatttttttgacctctcaataaaaacaaaacggaggaaaaccactgagaagcctatattcagctattccgggcagctacctgggattcctttatatgaatctgttggtatcatgaacccactca

SEQ ID NO: 46504 - DNA, 438 bp, Glycine max
aaaagatataattgacttaaaacattacttattttacataattgtgtgtcttcgatctatatttttcatgatttcggcatttgagactcttggaagaattttcttattacaagacataaaatcaactttgtgaaatcaccataagattgaacaaaagtgactcaccatcaatgcatcgccacccattaccaaatatagcgagggtgaagcacccacctcaaaccatttcccatccttcaatttgacccctaagccttctaccttctgattcaatatagttatgaaagctgtgtcagaatgaggagccactcccaaattgctctcacccacttggggtattctgtatttgtaggctcggagcacatactcggttgattcgagtaaagtgtcaaatttctttgtctcgattccatagttctcaaacaccattctcttcac

SEQ ID NO: 46505 - DNA, 453 bp, Glycine max
agtgtggtctctctcactccaactccaaccacagagacaacaaattcaacaacgttgtttccatgacaatggaatctgcgcttacagcttctaactggaaccgttctttgattcggattcgccacactaagccacgcttcggtgcaattcgccccacagcaatacggtgctccatcaactcgtatcgcttgtccaacctcactccctctgagcttcagagcctcaagagccgaccccgcatcgatttctcttccattttcggtgttgttaatcctattgtcgatgatgttcacaaaagaggggatgctgcggttaaagagttcgtctcttctttcaaatcttcttattttcatctatgaatatgatcttgttattgtttcattcactcttgttgtgtgtggtttcttaactttttctttttttggtaaccatgtcagtatggagtatcactga

SEQ ID NO: 46506 - DNA, 456 bp, Glycine max
tcgagatcataattgttctagtgaataactaaagaaaatagattaaattaaagaaaatataaaatagatagctgtgagatagaagagaacaaaactcaatagaaacatctctaataagttcaaaaattctgttttatgttggcaggtctctttgtatgtgttgtctggaaagaggaggactcaatgattattcgttcaccggaaccagaagtgaaaattttggtagatagagatcccataaaaacttctttcgaggaatgggcaaaaccaggtcatttctcaagaacaatagctaagggacctgatactactacttggatctggaacctacatgctgacgctcatgattttgatagccatactaatgatttagaggagatttcccgaaaagtttttagtgcccatttcggccaactctctatcatctttctttggctgagtggcatgtattttcat

SEQ ID NO: 46507 - DNA, 449 bp, Glycine max
ggcaaacaaacatggatgcatcttctatgcacatagcaatgtttccatggtttgccatgggacacctaactccatatcttcacctctcaaacaaattagcaaagaggggacacagaatctccttcttcatccccaaaagaacgcaacacaagttagagcaattcaacctgttcccacatctcatcaccttttaccctatcaatgttcctcatgttgaaggccttccccatggcgcagaaaccacttctgatgtctctttctctttaggtccactcattatgacagccatggatcgcactgagaaagacatagagcttcttctcattgagttaaagccacaaattgttttctttgacttcacatattggctaccaaacttgactcgccgcttgggaatcaaatcttttcaatacatgattgttagcccagcaacagtagcttacaatgca

SEQ ID NO: 46508 - DNA, 529 bp, Glycine max
gctttggactatgtgtatgagtttcacttgaacaagggtggccaaaagggtcgcgagattcctgatggtgattttccatttgttgggaagatgcatgtatcaacgagtttcaccctttgcccgaacaattgtagaataagggagacggagtttacactattccataacatggaaatttctgacaaagaaatgtccacatcagagcattctcacaggaagagcaaggggctgtcgatggtgtcgaaagtttttaaaactagcccatcatcaaaacgcagaacactctcaaggtttggtggatcaagtgccataaaggagagttgtccgtgggagccatatgctcttggcgggaccaatttattagatactgatgttcctccaaattttgaaatggctaccattgttgtgaaaaaccatcttccttgtaaaaaaccagagaaagtaggagggtggggtttaaaatttcttaacaaatctggtgaaaatcaaatcacgttgccatctgaaagtagtaatcaaaataatggcg

SEQ ID NO: 46509 - DNA, 419 bp, Glycine max
atcaaaattaaactctctaagtaatcaacatcagtattcagtgttgtcccgtggatacaaatttgatgttcgaccaataacataaaacagtggcattggaaatatatgaagtaacattttcattctagtcttgtcttggcatgttagtatcatcttctccacgtccatgtaagttcttgcagatttcagcaagttcaaacaactttgaaaccagcagttgtcacatctttgcttctgacatactgctcactcaagtcttgtttattgctgtggattgtgtcgttgagaaaactagaaaaccattgaacagaacgtttgggaatccgttcgagagtgtgtctatccacataataaagtccatatctcacgccatagccgcttgtccattcaaagttgtccatcaatgaccatatcatata

SEQ ID NO: 46510 - DNA, 432 bp, Glycine max
gaggggtaagaacactagtttatgaacatatcagaactccaatcgcgaccacatgatttatacatggacatctggagcattatatggtaagatcaaggtggtagccacttcacaataattctccatatacatagacttcagaactccatattgtctaatttgaagatatgtaatggaataattcatagtattacttttcgttagtgcataatgtaccaaaatttacagagaagaataaattggtacacctggtaaggtgcctccataatcgacaataaaattgttgcccgtgacgtactcagaagaatcatgaataagataacgagctagagatgttaatgctggatctgaagtacctaatcttctcaaaggcattattttcctgaccacatcattcagccaatctttttgtaataaattttcagttatttc

SEQ ID NO: 46511 - DNA, 389 bp, Glycine max
ggctatgccaaggttcgcaatcttgacgaatctcatcaacaacatctcaatgcagcgcgagtttctctgggggttcttggagttatttcccaggttaccctgaaattagagcctctcttcaagcgatctcttacatatttgaccaaagatgattctgatttaggtgatgaattggttacttttggaagaaagcatgagtttgctgatgtaacatggtacccaagtcagcagaaggccgtgtatagaattgatgatcgtgtctccattaataaatctggaaatggtttatatgatttctttccatttcgccccacactctcggccgcactaactgttgtcagagctacagaggagcttcaagaagcaacccgcgatgctaacgggaagtg

SEQ ID NO: 46512 - DNA, 431 bp, Glycine max
caagcgtttaccctttctgccaagctatggctatcagtggcttgacctcgacgaactcgaacatgaacgtaaggaagcttctcgccgtcaccggaggtctcatcggcgatgcttttactcttcttcgacgatcctttaacctggattccacaaaatcgtgtattagttcacgttttgagcattcaattctacggtgaacagaaaccctaattctccaatttgctgcaatcagggaaagtaagtaacgttactgttagcttcttctctcgctcctttctcttggcggtcctctgattgttgttctccaccgcgggatccgaaatgcaacccagcctcgagctcgagcacgggttcgaatcggtctcctgtggctcgttcttcactctatccaaattcgaaacggaaccggtcccggccggaaccaggcacgc

SEQ ID NO: 46513 - DNA, 365 bp, Glycine max
aaccgttaacttgagtataaatatcaggaatttcagaaaggttcagaaaaaaatataaactccaccctccaaaaacaaaccaagtcatgtagccaaaataattgtgatcactatccatgttcagaggatgtctggttttggttttgaggtgaatgtatagaattttgagcgacattaattgtctctccttttgtttatgtcagtttccctgccatccaactttgcaacatctgaagtgcagcttttggttgatccatagggaccaagtgtccagcctcatgtaccttgaggaaagaaagaggtccatagctattaagagaccctgcttttgaaccatcaaccacaaatttcactgtaggagattt

SEQ ID NO: 46514 - DNA, 502 bp, Glycine max
ttggaggacaaaacaaagtagtgtacaattacttggtgctatggcatactgtgctcctcaacagttgtctcagtgtctccctaagattgttcccaaattgactgaggttttgactgatacacatcctaaagtccagtcagctgggcaaatggcccttcaacaggttgggagtgtgataaagaatccagaaatatctgctcttgtccctactctacttaagggacttagtgatcctaatgagcatacaaaatactcccttgatattcttcttcaaacaacctttgttaattcaattgatgccccttcacttgcattattggtaccgatagtacatagaggtttgagggaaaggagtgctgacactaaaaagagggcagcacaaatagttggaaacatgtgttccttggttacagagccaaaggatatgattccatatataggattgttgcttcctgaagtaaaaaaggttcttgtggatcctatccctgaagttcggtcagtt

SEQ ID NO: 46515 - DNA, 542 bp, Glycine max
attccattccatattcacaattgcacacacaaactcactctgttttgtgttctaacaatggctcctgtgccgagcagaaccgtggccacggcctctctcgcctcgctccttccttcttcccccttcgcgagggcttctcttctcagaagcgcttttctgccgccgcaaatagggcgcgacaggaagtgcttctcccccgccgcagggctgcggtggacgcagcggcgccaggggaggagggacgggctcgccgtgcggtgcgaggccgccgtggcggagaaggacgaggccaccggtgagaagtttgagtaccaggccgaggtgagtcgattgttggatttgattgttcacagtctgtatagccacaaggaagttttccttcgtgaacttgtcagtaatgctagtgatgctttggacaagttgagattcttaagtgtgactgagccttctttgcttggagatgctggagatctagagatacatatcaagtctgatccagacaatggaactattactataacagatactggtattggaatgac

SEQ ID NO: 46516 - DNA, 494 bp, Glycine max
ctcgagccgtgctggtcttctgtgacaagaaatctgaaggtcagctaaattctgttgttttcacttttcaatgtcactggatcaactttatggtcatcatctattattgcatatacttgttggctttttaatgttatctatctggactttcaattggcatttgttatgtcttggctaaagttactgttgtgtaaagatttaaagttatacattccttgtgcttccagccttgtactgccacatgtatatttgtttaatcaaacagcaaccattttctgtgtgaataaatggttacgtagcaaagtttaaaaatctgttctgaatattctttttgtaaatatatgttgctccttactgttttgggtgtggaagtgcagggtcaactggttcctgatcataagacatttccatctggaatcaaagctctagcagattatgtacatggaaagggactcaagcttggcatatattctgatgctggggtttttacatgt

SEQ ID NO: 46517 - DNA, 474 bp, Glycine max
ggaagaactaggaattccttttgttgttgttggcgttgatgttgtccttgcccctctcctcttctttgatgggttccgaggtctccaaacaggttgtgagacgaaaggctatccacacagagggaaaaactctgtctgatcttataaactctggggaagattaccctggctcagattatcatccctcagacagaaaaaaatggatgtctgagctcaaccctgagaaagctgtgataaaacaaattgtttggcctggaacccatgattctgcaaccaacaagattgtcatcccatgcatcactcggccttttgctcaatgccaatccttgtccatctaccagcagcttgtgttggggacaagggtgattgacattcgggtgcaggaggatcgtaaagtgtgccacggagtcctcgttacatacagcatcgacgttgtcatcaaagatctcaagaagttcttatcagaaactcagt

SEQ ID NO: 46518 - DNA, 412 bp, Glycine max
acgaaggagaacatggtttcctttagtattgatagacatggtgaacaagtttggaattccatgcaagaaaatgaagcagctaatgaagaagagagtagtaaaatcggggggtaatagagttaattagaagatgcggagggaagatgaacgggatagttattgatggagtcatcccaggggttgccacgccagtcctttaagaatggcatgtccctaacggccttccagacggcgctgttacacttgaaacccgacccgaaggcgatctgccagacccgatcccccttggagacccgacccttggcctccgtgtaggccagctcgtaccagagggagctgctggaagtgttaccgaatctgtgcagggtcatcctggagggctccatgtgccactcgctcagctcaagattct

SEQ ID NO: 46519 - DNA, 504 bp, Glycine max
  unsure (1)..(504): unsure at all n locations
ggggctccaagacaccagcgggagcgtgaaggaccaaatgattgataacttaaaggacttgtctgaactcgtgagcaattgtcttgcgatattctcggcgagtggaagtggcgatttctcgggggtgccgatccagaacaagagacgattaatggaaaacaaagaagaagaggaggagaatgttaatcgcgatatctcgggaaaatttccgggttggttgaataagcgagataggagattattgagtttaccagtgtcggcaattcaggcagatataaccgtttctaagactggtaacggaacagtgaagaccattgccgaggcgattaagaaagcgccagagcatagtactcgccggttcataatttacgtgagggcaggaaggtaattaaataaatactgtgcgaatattaaatagataaaatatgcctgctntctgtctctgagaaaagtgtacgctnttcgagataacgaactntgcatttttttttaattattttctta

SEQ ID NO: 46520 - DNA, 478 bp, Glycine max
gtctgaacctccttttttatttctcccccgtagatctctctcgcttttctctttagagggtccaacttgcttccagatctcgcaccgatttggatcactcttttgactcttcttcttccaattcaaagatgttgttgtcaaagttgctaatgtagagttgtattacaaggctgttcatttctatttacaagagcatccggatcttatcaatgatgttttgaatgtccttgcacttcgtgttgatcatgcacgtgttgttgacatcatgcgaaaggctggtcatctccgtcttgtcaagccatacatggttgcagttcagagtaacaatgtgtctgctgttaatgaagcccttaatgaaatatatgttgaggaggaagactatgatagattgcgcgagtcgattgatttgcacgataacttcgaccaaataggcctagcacagaagatttgaaagcatgagcttcttgagatgagacgt

SEQ ID NO: 46521 - DNA, 449 bp, Glycine max
ccagatgctgatggtccatctttttttttacaagcacttcagcgacaggaggagagagggtggcttcctgtaccgcgagtccctccatgtggcctaaatgaaaactcaaggaagcagttgcagcacaagcgtgattccacaaaccaaatattaaaggctgcaatggccattaacagcatcactttagctgaaatggacatccctgagtcctatttggaatctcttccaaagaatgctagagtaagcttgggggatgttatttatcgttatatcacatcggatcatttctctcctgagtgcttgctagcttgccttgatttatcttctgagcatcaagctatagagattgcgaaccgagccgaggcttccatgtatatttggcgtaaaaggacaaactccaagcctgccagtatcagtgccaggtctagttcaagaacatcatgggaaat

SEQ ID NO: 46522 - DNA, 486 bp, Glycine max
ctcgagccgaaattgtcatcattgtcctcttctgcatcaatagaatctctaatcaaggtcccacagtcacctatactcccgttcttcaaacctgttgattatgtggaagttttagctcaaatccatgaagaacttgagtcatgtcctcctcaggaaaagtcaaatctgtgtttgttacaataccaggtctttaagggcctgggggatgtcaaactaatgcgtagaagcctccggtcagcttggcagagagcaaacactgttcatgagaaaattatatttggggcatggctgaagtatgagaagcaagaagaattagttgctcagttgctcacagcttgtggtaaatgtgaaaaggaatttggacccatagatgtagaatctcagattcctttcgatgagaatgtgagatcccaggatagagcttcgatgaatgggaacaatgcttcagaatatgttatctttaacactggagatgagaagatagtc

SEQ ID NO: 46523 - DNA, 480 bp, Glycine max
  unsure (1)..(480): unsure at all n locations
ccaaaactaaaactaaaggagttagaaacatcaagagagtcactgacaaccaacctggcatgccaagtcctaacttcattctttgttaatttctttcccttccatccactcctctctatcttcttactatctcaccttaccaaaacaaattgtttactttcattcacgtccaaaacttgaacatgaaaccctacacgtcatcaccatcatcctccaagtccaaaaagaagccaacaacaacacaacaagatcatgaaacagcatggggaggaaggtaccttggagtgaggaggaggccatggggaaggtatgcggccgaaattcgcgacccttccactaaggaaagacattggttgggcacgtttgataccgcagaagaggccgccctagcatatgataaggcggcccgctccatgcggngctcacgtgctcgaaccaacttcatctatccggatactcctccgggttcttctgtcacct

SEQ ID NO: 46524 - DNA, 243 bp, Glycine max
ttcgactcttactcctttctccgcatagctgcgtattccgaatcgaaaggtgacggttgtaagtaacaatggtggacaaggccaagggtctgaaggaggaggttgtcactctagagtacaccattaacctccacatacgcttgcatggctgcacatttaacaagaacgctactaaagcaattaaggagataaggatgtctgctcacactgcgatggtgacgaatgatgtaagagtggatgtga

SEQ ID NO: 46525 - DNA, 446 bp, Glycine max
gatagaaaaatcaagataagctgacccatcatcatgacatgacttgagccacaaccaaaaccaatagttgtcccagcagcaattttaatcttaatcttctagaagctttcattacatggaaatgaaaaaagagagaataagcaatagtagtatttgttttcttttcagctcctactactttgatagctacgcctgtgacactgaaaaggattgagaaaacaggcttcttatttttatttatttatatctataagatatgagatagagagagttgtgattactattactattgagacatccaatacttgctcatctcaaagccattcctgccatagtgatagtcttcaattgtgttctcaatctcagactgcgtgttcatcacaaaagggccatgctgaacaactggctcattaagtggttggcctccaatcagaacaaatctcaaa

SEQ ID NO: 46526 - DNA, 416 bp, Glycine max
gaacacaatgaatattttgaataatggagtatctgaattccccaccgaatcactccatgacttggcaagcaataaaataaatgacacctaactaacactattgtagccatggcacgaaattgaagtcaattttggccaccttggttcttggctttggtagggaccttgaataataatgtaaatacgacaaaataatcttccaatatgtgctatgacccgtatttgcagagatcctcaaatcccatgtattcatgattatcgatcttgtgtaccatatttacaatgccaacttcacctaatgagactgcactgacaaatattgtagaggctagaataaagatgataagagatgctctcccaaataagatgattagttttctcacaatgtgctgtccaacgaaggcagcaatagtagc

SEQ ID NO: 46527 - DNA, 335 bp, Glycine max
ggggaaacaaaaaagggggcccaaattttatttccaaacattcatgaattatgactgctttaaaacaaaataaaattttaccgaatataccatgttaaaaataattttttgccccttataacaaacttaaaaaaaaaaaaaacccagttgttttgctacaaaaaaactgatccatattttacttttaaaaaagacaacttaattgaagggccgggcaaaatctttgccttaaaaaacactttttttttcccaccccgttggttggacagagtcaattcccaagggaggaaccgggatttgttgtggtggtggaacaactttaccccaattttctt

SEQ ID NO: 46528 - DNA, 479 bp, Glycine max
cacaaatcaatttcatgatcataacaaacatgcttgcaatgaagtaacaaatatcataaatcctgtaaacaatgaaggtaagtattctcaactttgtgacaagtctgggcgttatgaccgacttttgaaattgagtcaagatgatttggagacggtgataagaagggtgtctcgtgactcttgcttggatcctcagaaaaagtcatacataatacagaacctactaatgagtcgttggattattaggcagcagatctcttctacagaagccaatataaaaaatgatgaactggaatttcctgggaaacatccatcttacagggaccctctcaaactaatctacggttgtaaacactacaagaggaactgtaagctttttgctccttgttgcaaccaacttcatacctgcatacattgccataatgaggaatcagatcattcagttgacagaaaatctattacaaagatgatgtgtatga

SEQ ID NO: 46529 - DNA, 360 bp, Glycine max
aatcctggatccttggtggagaaccattctgcttgcagaacaaatagggctggtcagagagtattgccaaatggccaggtttggaaacctgatctggaacttctatcttgggccttcgaaattctgactgaagcatatgcatgtttcaaggaacatgatacgccacctgggaagccatatgtagctcgagcatgagcgcctgcattacctgtcatttgggctacccttgtccaatcacgaccgcagtcatagttgtcacaggagcaatatggtgatgaggacagtcttgatgatgaccttggtgaatcattacagtctgatgatgacaatgaccatgatgactcgccgtcatttaaacct

SEQ ID NO: 46530 - DNA, 464 bp, Glycine max
ctcgagccgaatcggctcgagcgggcatgcagttgtgcttccaattatttcatgtattattgatggtacgctggactatgataagactagtcctccatttgcttctttcatttctttagtctgcccaaaaaatgagaatgaatattcagaacaatgggctatggcatgtggtgaaattttgcgtattttaactcattacaatcgccccatatacaaaatggaaaggcaatattgtgaaccagaagtaagcagtggcaaaagtcatgcaacgactaatgattctgtagatggggagtctggccataattctttgatgcagcaggagaagaaacctataagacccttgtccccttggattactgatatattacgagctgcacctttaggcattagaagtgactattttcggtggtgcagtggtgttatgggtaaatatgctgcaggagaactcaagccacctacta

SEQ ID NO: 46531 - DNA, 494 bp, Glycine max
ctttgtttttctctcagatagctgtatacctttatacaacttcagctatacatatgactacatcatgtcaacatcaacaagttttgtcgacagctttgctgacacgaaagaaggccgttacaatccaaaaatggatcctgttattcctgtctataattggaggaaaggatctgaatgggctgttctgaccagaaagcatgccacggttgtaatgaaggatgaaactgcctttccaatgtttcaaagatactgcaagaaaaagccactaccagaattttggagggctcattacattcctgctgacacatctaaggtgcataactgtataccagatgaacactatgtacagacattactggctcaaaaaggccttgaagaagaaatcacacgaagatcgttgacacatacttgctgagatatttccgactacagggaacatgagctccggagatggcatccagtgacttacaagtactcagatgctacacctatgc

SEQ ID NO: 46532 - DNA, 518 bp, Glycine max
gctcaaaaagtttgagactgagggaaagccacctgttaatactcttgtttgtggtgactctggaaatgatgccgagctgttcagcattccgggagtttatggagtcatggtaagcaatgcccaagaggaactgttgcagtggcatgcagaaaatgcaaaagataaccccaagattcttcatgcctcagagcgttgcgcatctgggataatacaagccataggtcattttaagttaggcctaaacctgtcccctagagatgtttcagacattggacaaaacgttgaaaatggatctccaggccttgaaatggttaactttagtttgttactcgaatcatggaggcgtgcagaagttgagaaaacggagctgtttatttctggtttaaaggcaaccactctcccatctggtttctttatccatccttctggtgctgaccataatattaaggagtatgtaaatattcttagaaaggtgcatggtgacaaacagggaaaacagttcaggatttgggtggatg

SEQ ID NO: 46533 - DNA, 464 bp, Glycine max
gtgatggagatggatcagctaaggagagtggcagagtgcagaactctagggttagagtagcttccataacttgcatacaggatctttgtcaagctgattctaaatctttatctatgcaatggtccttgcttttgccaactagtgatgtactacaaccaaggatgcatgatgcaactttaatgacatgcttgctatttgatccttgtttgaagccacgcatggcatctgcatccacgctagtggccatgttggatggtctctcttccattttcctgcaagtagctgaatataaggaatctaataaatttggatcttttatggcactttcaagctcccttgggaagattttaatggaactccatagaggtcttctttacctaatagagcatgaagctcacagtaaattgctgactttgttattcaagattctcagacttttgatactatctacaccatattcaaga

SEQ ID NO: 46534 - DNA, 490 bp, Glycine max
  unsure (1)..(490): unsure at all n locations
aaacaattcagtggtttgtgttactacgtagaatgggttcgtcgccgaattcaaagcccaagatcattagaggctccgcaggctatgtgttggaggatgttccacatatggccgattacatccctgatattccaacatattctaatcctttgcaaaacaatcctgcttactcagttgtcaagcagtatttcgtgcacgtcgatgacagtgttccgcagaagataattgctaataaagatagtccaagaggggtacattttcggcgtgcaggacctcgtcaaagggtgtatttcgaatcagatgatgttcaggctgcaattgtgacatgtggtggtctatgccctggcctcaacaccgtcattagggaactagtatgtgcactatatcacatgtatggcgtcaagaaaatcttgggaatcaatggaggatacaagggtttttatgctcacaatacaatcactctaactcctaanagcgtgaatgacataca

SEQ ID NO: 46535 - DNA, 462 bp, Glycine max
ccaaaaagacccttttggcctagtctctttcttataataaggtaaccaaaataaacccaaatcacaggtcaattaccgaataatccagattgagggggaaaacaaataagagtacaggggtcctggagaatgtaacaatacgtaggtctgagaaggaagaaaaagtgaaaataattatatctcacatacacggagcagctttatttctatctcaaacaaaaatagaacaagcttcagttactccttcaatgaatttgacatgaagagacaactttagcatctgacaaaattattgtcaacaataatctttcctgatgtaaaaaatgaaatgaaactggaaggcagctagttgacaacatcaagaaccagcttgcgagactttagaacggaccacctaagccgacggtaataggcagcttgaagtaatgccagtgatagaacaaatattcatttgaatcccat

SEQ ID NO: 46536 - DNA, 430 bp, Glycine max
gggaaggctcttctctaccatagtgatgattttgttaattggaaactgcatcccaatcctttgtatgcatcagacaatactggaatgtttgagtgtccagatttctttccagtgcacataagtggctcaaagagtggggttgatacatcaatccaaaactccagtgtcaagcatgtcttgaaaataagttatcaaaacaaacaactagaatactattttcttggtgaatattttcctgatcaggaaaagtttattcctgatgctgattgggcaagaactggtttggacttgatattggaccatggaatgttttatgcttccaagtcattttttgacaatgccaagaaaagaaggatattgtggggatggtcaaaggagtgtgacaccacacaagatgattatgagaaaggatgggctggtctacagagta

SEQ ID NO: 46537 - DNA, 533 bp, Glycine max
gcttaagaagaaaaggtgactgttctgtttattggtggagggggacgtgaacacgctctttgccatgccttgcaacgatcaccatcctgtgagactgtactttgtgccccgggcaatgcagggattgctagctcaggaaatgctacttgcatctctgaccttgaagtttatgatggagcagcagtaatctccttttgccggaaaatgggggtgggacttgttgttgtgggacctgaggctccacttgttgcaggtcttacaaatgagttagttaaggctggaatcccaacttttggtccatctgcagaggctgctgctttggaaggttctaaaaatttcatgaagcatttgtgtgacaagtatgatattccaactgccaaggtatgtcttcttattctgaatctcaccaaccagatcaacatttatcccttattctgttgtaatgatatttgcgaatattttcatgtattgcatcttataagtagcttctctgtgaattttgtaacatactattatactcattagtaatgagt

SEQ ID NO: 46538 - DNA, 232 bp, Glycine max
taatgatccttcattaaatgaattttcatatggaagaaatccaagattcactgcggaagaagttgaacaacttgacaaaaataagccgtggtctagggctcttgatggttctagttaccttcccggaatggtgggacttaataatatcaaggagactgactttgtgaatgtaacaattcattccctaatgagagttacccccttgagaaattttttttttatccctgaaaat

SEQ ID NO: 46539 - DNA, 531 bp, Glycine max
cttcttgttcataagatttgtgcctaccatgctttagagccataagatttgcgatctcatattaactaaggagaaacatattaagctgcttcattatcataatgtttcaagtctccctaagtccatgagcctctaacattttcattcaaacacttatttctcaacatcttatctatattcacattccagatcaagattcggatgatcttcatggacgaatttctttgataaagtagttccctattgatcaagatagggtaagtttatagtaattctaagtactcagctactcaagcaatgatggttgataaacaacggtacccgacaatagaacaaaagcttgctggccagcttcacttgagatccaactccaacctttccccacatgttggaacttgttacgaacgtctgaaaagaccagctctgtttcagcaacgattttcactaaaaaatcattcaaatgcagggttgctgtgccctctcgtgcctgcatggaaagccactagccatctgcattctgtagcttcagct

SEQ ID NO: 46540 - DNA, 410 bp, Glycine max
aaaaaactctgctctgtcatttcactccaactctctctctctctgcaatatgaaacactcagatggcaactcctccacacagccacttctcacggccagggccgacgaaccccatcaaatccaccctcacccagcagaaacaaccgcagtttttagcgccggcacccctgacatagctccgatcaccggcgccggcgacttctatagggaattcatggtggagtcaaagaagctctggtacctcgccggccccgccatcttctccttcgtctcaaaggactccctcggcgccttcactcaaatctttgccggccacgtcggcaccattgacctcgccgccgtctccgttgaaaactccctcatcgccggcttctcctacggcataatgctagggatgggaagcgcgttgg

SEQ ID NO: 46541 - DNA, 424 bp, Glycine max
ctcgagccgaatcggctcgagcggagaaccaagactatggcattcatggggagcgtgttagaactgcatgctggggctacctctgtcaaagtggtggcatggaattgaaagaggtgcttcctaaactttcatctcaaacattacatgcattactgacttctaatgatctgtggatacccaatgaagagaaacggtttgaattggctttgcatacattcctggcaaaaagtgctaattgcaaggttgaacatcatgcgcatggaatttctggtactgagtctgcaaccagtgtccatgctgattctggtagctccaaaggaaaaagtgtgactgatagctgcactagtaagaggttggaaactggcatggggaaaatgagtcttaaaactgatctagaggaccctagcacacctagtcttctagt

SEQ ID NO: 46542 - DNA, 419 bp, Glycine max
agcagaaaattaaaattttgtagatgctgtcggattaagcgcagcgacccaagaaatgtaagtttaatggtcaacaaattgtataatttgtatggttgttacacggcactaggccgttcttctgttccctacatacacgtcggggtaattacacgaatgctagtcatgaagagagtaagttacagttgtacaaggttataatcacacgtccataaataaaattagacgaggtattcagaccatgtccgcgatgatatcattatgtccattgtcactccaaccagatccagctcgaaatttacatacagggcatgtcccttgttggcgcagccagggatcgatgcaatttgcgtgaaactgatgcaagcaaggtaagcttcgcagtacgtcaccaacattaacttgctccaagcatacac

SEQ ID NO: 46543 - DNA, 322 bp, Glycine max
aaaaagctcatgctgaggctgaaattgatcttctcaagggtaacattgaatcatgcgaaagagaaatcaattcactcaaatatgagcttcatgttatttccaaagagcttgagattcgcaatgaagaaaagaatatgagtatgaggtctgcagaagctgctaacaagcagcacatggagggtgttaaaaaaattgctaaattagaggcagaatgccaaagattacgtggtctagtgcggaaaaagttgcctggtcctgctgcacttgcacaaatgaagctagaagttgaaagtcttggtcgagaatatggagaaacacgatt

SEQ ID NO: 46544 - DNA, 356 bp, Glycine max
gcaacaactttctgatttttaattgctcatgctgtaatacggagtgtggtctccgagatatatacaacattatacgttacacatgaataaattcatacaatacttgcattatatatattttgagaacgagatataaaattggaacaaaaaccacaactggaagggcctgtggtgcggtaagtaaaacagccacgattttctattgtcacaaggacctaattggccaccactaaaccttctttaagtcttgcagtgaatacctttcggataattttgccggagggtggtttaggaatacagtacgggaaaaaaactctacctattttcttgtaaaataccacctgttgtgaaatgta

SEQ ID NO: 46545 - DNA, 320 bp, Glycine max
ttttgtgctttttttggtggtggtgttggagttgagtggtactagtatggctcatgtggacgagaccattgaaggaaggtcttgccgaggccattgacgatggcaagattggaccaagggatgaccccaagattcgcttccaagatcttgtcataagagtttggttgggacaaggatctcgccaagaaaatctggtgctttggccctgagacccttggacccaacatggtggttgatatgtgtaagggagtccagtatttgaatgaaatcaaggattctgtggttgctggattccagtgggcatcaaaagaaggtgcttt

SEQ ID NO: 46546 - DNA, 459 bp, Glycine max
gctactagtcggggccgccctttttttttttttaaaaagtaatttttttttacacagttaataactcattacagggcgaaatacaaacatttttgcaacaagaaagaagttaacagcacagcatataagagagagagagagagagagagaggctagtatgccagataggcagtgagctgcaacagagtctggacaccgtcagtgttatgttgctgaccgccgataacaggaaaagtcttaataatggcaaagccttctgcgttgagaaactttccggtgcctccaacgatggcaatttgagactccgaaacctgcgttagatgaacgccaaagaaactaagactgtccacgtaaccattcttttcaaacttagcggtgaaagccataagctgacttgctccatcgacagcgctggcaatgtaaaatccctgcgccttccctaccaaacccgaacccaac

SEQ ID NO: 46547 - DNA, 210 bp, Glycine max
caagatatgaagaagcagcttcagtttgagaaacataagaagcaaatggtcgatgaagaatctaagaagaaggagcgtcacattgtgacgtggactcaagaggaagatgacatactgagggagcagattggtgtacatggaactgaaaattgggcaattattgcttctaaattcaaggacaaaacaacaagacagtgcagaagaagatgg

SEQ ID NO: 46548 - DNA, 393 bp, Glycine max
ctaaagttaaaaagcactgtggttaaccactgtctggaaagaggattagtagaaaatacatgttttctttcgctgtagaaattacatgctggcaactttcgctattgcttttttcccattgtcattatgtatatttacatcagtgttctgactaagtcactattttctaagtctgggaccataacaatctccgtgttttcattttcttgtctcactttggcacccacgtgatcctttggaagcacattacagtcgatgatgtgccatactggtctctcctcttgaaacaatgggtgcttgcatagtgatggacattgcactgtaagtgcatacttgcaagtggaaatctctgtgattgaactaatcattggtctaggttcggagcatacaaac

SEQ ID NO: 46549 - DNA, 328 bp, Glycine max
actaaaactgtcggtttctgcatatgtcaattttttttccgggtcagttcagtgtgtttgtttgtttcacaaataaacttcttaatttcaacaatacaggattggaaaaatttattccacgtctattatgaaattataaaataattaattgtagataatatggctttgtgcaatctcaatgcgttcaaggttgtccaagaagtgaaggcatgtagaaagcatggctttgtgcaatctcaatgcgttcacggggatcattcagattttcatccctaagagcttggagaatagcttctgatgactgttccctggatattaatattttata

SEQ ID NO: 46550 - DNA, 282 bp, Glycine max
gtgacttccatgccatgtgttgttattcccgttaaagagttgattcagatttgcagggaggaaggggtagatcaggtttttgtcgacgctgcacattccattgggtgcactgatgttgatatgaaggagattggtgctgatttttaatcctagaaatttgcacaagtggttcttttgtccaccttcaattgcgtttttgtacactcgtaggaaccttaagggtactgatcctggttctgatttgcatcaccctgtggtgtctcatgagtatggaaatggttt

SEQ ID NO: 46551 - DNA, 121 bp, Glycine max
tttcattgcaggactgggtttttcctcttttcacacagcttcaaaatcctctgtggagcttcactcacaagaagaggaagtagtgattgctttgggaagtaatgtaggtgacaggctgcat

SEQ ID NO: 46552 - DNA, 487 bp, Glycine max
ggcttcctgcaggatggcactcctccttggcttgctgctgctagtagtagcttcgcccgcgatcgctgatgacgactccggtatctactaccagctggctcttatgtggccaggagcatactgcgagcagaccagcgctgggtgctgcaagccgaccaccggcgtctcgccggcgcgcgacttctacataacgggcttcaccgtccttaacgcgaccaccgacgctgcagtgacgggatgcagcaacaaagttccttacgaccctaacctgattaccggcatccaaggcctgaatcagtactggagcaacatcaggtgccccagcaacaacgggcagagcagctggaagaacgcctggaagaaggccggcgcctgctccggcctcagcgagaaagactacttcgagactgccctctccttccgtagccggatcaacccactcgttcgcctcaaagccaaaggtatcgagccggacttcgggctctac

SEQ ID NO: 46553 - DNA, 320 bp, Glycine max
aacctgtactaccaaactgcgaataactcaaccaatttttttccaaatccagttctgtaaactgtagactaacgacaaaacgacttgggaataactcgataaaatttcgttacttttgaccacgatttgatatgacgaaactgaacaaaccataacgattctgctccttctctttctctatctttttctcctttataaaacgaaaagtggctaactaaatctctaatttcgagtttccttcttttctaggcacaggctaaggtttccaattaacccaaccaattaaagcggatgatttaaaaacaaaacctaaccgattt

SEQ ID NO: 46554 - DNA, 360 bp, Glycine max
tcaacatatgtacaaatatgtaacaatatacatacacagatacatgcatacttaggcagttagaccagagaattttcacaatgcatgcaactaataggagggatttcaaagttagagagatagggacaggttgactaacatgttttgcaaattattgaagacaagactatttggccgtccttgatccttgagattctgagaatttcaaaagattcgccagtttgatcaattcatttttattattattattattattattattattttttttttttaatattttttttgcgtttgatatcgttgtaaatagttaattagttatggtgcatgaatatgattttcggaattgaataatgtgtt

SEQ ID NO: 46555 - DNA, 528 bp, Glycine max
acttgctagttcttagcttttacaactttcttagcttgagaactatctcacacttctatctccccaagcattctcttttgtttctttttgaacaagtctgtctcttgacttactcttctcactatgcaccttcgtgagtgtaaccccaagcattctcttctgtttctttttgaacaagtctatctcttgacttactcttctcactatgcaccttcgtgagcgtctccccaagctttctcttccgtttctttttggacaagtctatctcttgacttactcttctcactatgcaccttcgtggtgggcgttttggacaagtctgtctcttcacttattattctcactatgcacctttgcgagcgttgcgggttttcaaaacacttggcgaggtccggaatcttaccaagtaataacatttaacctcgagagacgagctcgtgtaaagttgggaattcgttaaggagctgttgctttgttagtgtagaaacacttgtgtagaattggggattgttttttttggagtgattt

SEQ ID NO: 46556 - DNA, 394 bp, Glycine max
agtgtaattgactaattgatatcatcatataatattatttatttagattgaaacttgtcaattgtgattaatgcgaagattacattctgcatcattgagcgttcaataattagtctctggttgattgaataatacttaaaagaaatatcacattattacgatcgttgtacaatgagaggatccttgcaaaaagagtagaggtacaacggtacaaggaatcaaacgattcaaaccactaatgacatcattacaaacagactacatttatcataccaaaaaaacaaacaaactacattttcgtaatttattctggagactgctctctctgttctttgatgttcttgaacatcttagaactcttgtcaaaaatctttgctcttctgttataatcttt

SEQ ID NO: 46557 - DNA, 320 bp, Glycine max
gcctttacaagccaccatgtgaatgcttgggaaccagagtaagagggggtagggagggctatcgcggtgcatggtggcgctggtgtcgaccctaatctcccactcgagcgccaagaagaagcgaaacaacttctcacgcgctgtctcaatcttggaatctctgctctaaattctaatcttcccgccatagatgtcgtcgaacttgtggtgagggaattggaaacggatccgctgttcaattcgggccgtggatctgccctgacagaaaaaggaacggaggagatggaggctagcatcatggatggtccaaaacgacgatg

SEQ ID NO: 46558 - DNA, 415 bp, Glycine max
cggacgcgtgggctgcaggagcgctagcatggcaagttcgcgctgctttgagaacccgccggtgctggagccggccagcggaggaggcgaggtggttgacgacttcggcgggcagaaggcctacgtcagcggctccgccgggtccaaggccgccgtcgtcctcatctccgacgccttcgggttcgaagcgccaaacctgaggaagatagccgacaaagttgcttcgctcggttacttcgttgtggtgcccgatttcctgcatggggatccatatgaccccagcaataatgcccatagcaatcctggaacgtggatacagtcgcacaatccgcaaacggcattcgaagaggcaaaaccggtaattgcggctataaaggagaaggggtgtgtcgagcatcggagctgcaggttactg

SEQ ID NO: 46559 - DNA, 375 bp, Glycine max
cccacgcgtccgcggacgcgtgggcggacgcgtgggcgcgccggatggggagtgatggcaagccacaggagtggcgagacagaggacaccttcattgctgacctctcagttggcctgtctacgggccaaatcaagacgggagctccttgccggtctgagcgcctggccaaatacaaccagctgctcaggatcgaggaggagctcggtgatgccgcggtctacgccggagcaaagttcagggcaccagtggagccctactaagaaaggaagaggatgaggatgttttcttgtggagctatactagctcgctgctgccttttgttacaatgtttgtacggtcgcaataaatgtatggtcgtgtttgctcgagagcta

SEQ ID NO: 46560 - DNA, 365 bp, Glycine max
cccacgcgtccggactagttctaggcccgagcgaagaagaaaggagggtgctctgccggcggcggagcggagatgtccgagaggaggcgcggcgccggcgccggcaccggcacccgcaaggatgaggtggtgacccgcgagtacaccatcaacctccacaagcgcctccacggatgcaccttcaagaagaaggcaccgaatgccatcaaggagatcaggaagttcgcccagaagaccatgggtaccaccgatgtccggatcgatgtgaagctcaacaagcacgtctggagcagcggtatccggagtgtgccgaggcgagtccgtgtcaggattgcccgcaagaggaacgacgaggaagacgccaa

SEQ ID NO: 46561 - DNA, 352 bp, Glycine max
gactagttctagcaaggacaagcgtgccctgaagcttgctaagagaaagcttggaactcacaagagggcaaagaagaagagagaggagatggcgggcgtcctcaggaagatgaggtcggctggtacgcacactgacaaaaagaaatagagagcatttcaagttcatggagctggctgccagagattatgttccagtgtctgattttccatacatgtagaacctaatagacatgtcaaagtattatgtatcgaaccagctcatgggattttgctccttccaatgcatccagggtttatgtatcgaaccaatttatgggatcttgctcttattctaatgcatccatggtttgtg

SEQ ID NO: 46562 - DNA, 501 bp, Glycine max
accaaccagccgggagagggagcgcacgcactgcgagaatggccacggccggcggaggggccgggcatctgaagctgctgggcgcgtggccgagccccttcgtgaaccgcgtacgcatggcgctgcacctcaaggggctggagtacgagaacgtggaggaggacctcaccaacaagagcgacctgctcctcgcctccaaccccgtccacaagctcgttcccgtcctcctccacggcgacaagcccatctccgagtcactcgtcatcgtggagtacctcgacgacgccttccccggcgctggccaggccgtcctccccgccgacccctatgaacgcgccgtcgctcgcttctgggccaaatacgtcgacggcaagttgcacggcatgatggtgaaggcgctcatggaggcaacagaggaggagagggcgacggcgacagtggacgcgctggccgctatggacacgctggagggcgcgttcgccgagtgctccggcgggaaaa

SEQ ID NO: 46563 - DNA, 258 bp, Glycine max
gggttcgcggtgttcctggtccaccttgccaccatccttattactggcactggcatcaacccagctaggagccttggcgctgccatcatctacaacagggatcacgcctggaacgaccattggatcttctgggtcggccccttcattggtgctgccctggctgccatctaccaccacgtgatcatcagagccatcccgatgacgagcaggtcttaagctgccgcgtccgttccgagacatgccagctctaagaacggg

SEQ ID NO: 46564 - DNA, 439 bp, Glycine max
cccacgcgtccgcggacgcgtgggtggggctccagactacgctgaagctatcaaaggaataaagaccagccaaagacctctagctgtagccgcataaggagctggacgtgtaatcatttactctgtgcaagtttaccagtgatgcgatctgtatagatgtgtgtcttgtccagccatacgtataccggagatgaaaggagacggaggcagtgaagaaatatccttttttttcttctcgtttttcacgaggatgccgtgcactgctcccagaatgctgtgtccaatttacaaacgcacaggtggcacatgaactagcagagtagctttctcttgaaaggaaactgtatttggggtcgatgaaccctctggtgttattcttcagactggtaaacgatgtaacatgtttgataatcaataaagtgcgtcgtatggctttcct

SEQ ID NO: 46565 - DNA, 445 bp, Glycine max
cggacgcgtgggtttgacaatctatacaacaatgagataagtggtgttatcgttgaagcgctcagggttggacttgaacctcaagttgcggcacaaaaaattgctgccctggctcgacaaagagccacagacaaaaataggcagtcaccatttgcatcggccgcccaagaagctgggtaccggtactacggtgggaagctcgacgacataacggatggggtgtcctatgtgaaaagcgcttgattcgagcctttctttttattagatgtaatggcaaaatcttaatcccgaatttaatggcacatgtgttctcaaggggtgaaatcccctgagatactagaagcacttctggtgggtttagccctggattacgttagcaaaccattacaccattttacttgtttgccactgtgagtaatcttctttttatatataattctctaaa

SEQ ID NO: 46566 - DNA, 494 bp, Glycine max
cccacgcgtccgcccacgcgtccggccgccgcacgagtgcggctacccgggcagcgtcttcaacccgctcaacttcgcgcccacgctcgaggccaaggagaaggagctcgccaacgggaggctggcgatgctggcgttcctgggcttcctgatccagcacaacgtcaccggcaaggggcccttcgacaacctgctgcagcacctgtctgacccatggcacaacaccatcatccagaccttctccggttgagtcgaggtcgaggagggatacgatccatcgctggtgagctgatatggactggaaggcaaacattgaaaccttaagttcctttctggatcagtttgtgtgtgttgttaatctatctggagggtacagattcgtgccgtgttgcaatgcatgcatggtctgaagggagcgagggctgaggagtgactggtatgtacattagctgaaggggatattaagggtagagatcgtttgatcagtatcatct

SEQ ID NO: 46567 - DNA, 471 bp, Glycine max
ttcttttgcaattgcatttctttgagtgccagcgagtaaacgagttggtatgacaagagattcttcatcatagatgagatggcagcccggcaccggcacaaatagacctgatggagcttggaaagatatatctatggattgagggccggactaaatcggaagggctctctgttctatttatattagtagtggtagacagacaaataggcccatttttgacctcttaaacatccttacattgctgcttcagttgctaccactttcctaaacaatattgggaagttgcatggagtgccagccactattgtatctgacagggacagggtgttcactagctccttttggaggggcaagctattggacactaagttgcagttgagctctgcctatcaccctcagactgaggggcagactgaaagagtgaatgaatcagtgtcttgagatgtatctcaggtgctcagtaagttctac

SEQ ID NO: 46568 - DNA, 393 bp, Glycine max
gcgccactgtccagtgcgcgcgtcaagcttgcttagctagccgccatggcctccctcgccgccgtctccgtgaagcccgtggccatcaagggtctcgccggcagctccatctccggaaggaagctcgccgtccccaggccgacggcccgctccatccgcaggccccgcgcagccgccgtggtggccaagtacggcgacaagagcgtctactttgacctcgacgacatcggcaacaccaccggacagtgggacctctacgggtctgacgcgccctcgccctacaacccgctacagagcaagttcttcgagacgttcgcggctccgttcaccaagagaggtctgctgctcaagttcctgctgctgggcggcggctcacttctggcctacgtcagc

SEQ ID NO: 46569 - DNA, 395 bp, Glycine max
cccggagagcctgcggtggaacgtgcaggcggagctggtgcactgccggtgggcgatgctcggcgcggcgggcatcttcatcccggagtttctgaccaagatcggcgtcctcaacacacccttctggtacaccgccggcgagcagcagtacttcaccgacaccaccaccctcttcatcatcgagctcatcctcatcggctgggccgagggccgccgctgggctgacatcatcaagcccggaagcgtcaacaccgaccccatcttccccagcaacaagctcaccggcaccgacgtcgggtaccctggtggcctctggtttgacccgctcggctggggcagcggctcgccggagaagatcaaggagctgcgcaccaaggagatcaagaacggacgcc

SEQ ID NO: 46570 - DNA, 430 bp, Glycine max
cgtccgggagcagctggagggctgctacctcctggctggtatcaagtacgagggcctgacggtgaagcagctgcagggaatccgcgacgcgctcccagagacctgcagactgctggtggcgaagaacactctggtggggaaagccatcgagggcaccccctgggaagcgctcaagccgtgcatgaagggtatgaatgcctggctcttcgtccacaccgaggaggtaccagccgcgctcaagccctaccgcgccttccagaaagaggagcgcgtcgaggagaccaacgacttcgtcggggccgtctttgagggcaagttttacgggcccggagacttcaaggcgctcgagactatgcccagccgcgccgaggtgtacgccacgctgctcggcgcgctgcagggacccgctacgtcgctcgtcgccacgctg

SEQ ID NO: 46571 - DNA, 483 bp, Glycine max
gcaacgacgacgacgacggcgctcaggactcaggtgctttcggttcaggcggaggagggcatggagcgcggcgactgccagttcacggtggtgccgccgcggcagtacgacgaggcccagttcatgcaccagctgatggtggccggcgaccagcaggaccccgcgggcgcggggcggggagctgccgccgccggcggggagaggaagcggcggttcacggaggagcaggtgcggtcgctggagacgacgttccacgcgcggcgcgccaagctggagccccgggagaaggcggagctggcgcgggagcttggcctgcagccgcgccaggtggccatctggttccagaataagcgtgcgcggtggcgctccaagcagctggagcatgactacgccgcgctccgggctcagttcgacgcgatgcacgcccgcgtcgagtcgctcaggcaggagaagatcgcgctcgccgcgcaggtagacgagctg

SEQ ID NO: 46572 - DNA, 492 bp, Glycine max
cccacgcgtccggtcccagaggagtccatgggatcagttgttgagcttttagggaaaaggcgtggacaaatggttgacatggaagctaacgggacggagggaacaacattgctgaaatacaagattcctaccagaggccttatcggacttcggaatgcaattcttacagcttctcgtggcagagctatattgaatacaatctttgacagctatggcccatgggctggagatcttagctcacgtgatcagggatccttggttgcttttgaagatggaagcactacttcttatgcacttcttaatgcacaagaaagaggtatgttgtttgtccaaccagggcaggatgtttacaaaggtcaaattgttggtatccatcagagacctggtgatttagcaattaatgtgtgcaagaaaaaggctgctacaaatgttcgttccaacaaagaaactacagtggttcttgatgaacctttaagctacagtttggatgac

SEQ ID NO: 46573 - DNA, 464 bp, Glycine max
ggcttggagcccagatggcctgacattcgccactggtaaccaagacaaaacttgtcggatttgggatgccaggaatctcaccgagtctgtccatgtcttgagaggcaacgttggagcaataagatctattcgttttacatccgacgggcacttcttgtcgatggcagaagcagcagactttgtccacatctttgacatcaaaagtgactacaataagagacaggaattggatttctttggcgaggtatccggtatgtccttcagccccgacacggacacactttatgttggaatctcggacaggacatatggcagcctgcttcagtttggccgcctctacaactattcatacctcgactcactactatgaaggtcaaagaaaatatgtgttttccctcggcttataatcaacccagattaggcatcccaaatgaaatttaatttagcctggtattcctcgtaaa

SEQ ID NO: 46574 - DNA, 298 bp, Glycine max
ggatctggatttggccaagttcctggaacatggcacgtaagatgcacgatcctgccgcaggaagacaaaatccccgcggtgatcacccgcttcaaggctttccatgaggcgttcatggctgagtaccgcgactgaactgttacagtggctgagtaccatcgtgtagaccgaaacaaaataaagctccactctctctctctctgtctctgtgcgtgtgtgtgaactgatctctgaatggaagaacaatgtactctgttggcgcctttaatggcaattgaggaaaattttgatcaaattt

SEQ ID NO: 46575 - DNA, 485 bp, Glycine max
cacatcttttcccaagtttctaccaaagcttgagcaaagatgagagccaagtggagaaagaagagagtcagaagactcaagcgaaagcgccggaagactcgagcccgatccaagtaaacaattgatcgcttcatctcagtaaagctctcgacaaatgtcaacttttctcaatcaacatctgaaccaagacaacaatcattcaatcgtgttttctacaagcggagaggtcatcgcaagaaggtcaacgaagctgcagattgctgcatgatgggatggctatgagaatatggccctagatatgtcaaggcatatcaaggaggagtgaaactggtctatcatatgcgaaatgctatgaagctttacgactgttcgtacttgaccgcagatctatcaagtcaaaaggaaaactttgcgctatcagtgaggatctatcacgcacgagaaggatttcgacagcgatcaaattgatgtgagactgccacaat

SEQ ID NO: 46576 - DNA, 491 bp, Glycine max
cggacgcgtgggggaaacaccgccgccgccgcgccttccattccagtactcgcggaggaaaggaacaccagccagcgccatggtcacgtcgacgaccgccgccgccgtgctgtccccgccgtccgtggccgggcttcgcctggcgccgtctccccgggcgcgcgtggcgttccgcgcggcgccggcgcggcggtccgtggcggcgcgcgcggagctgagcccgtcgctggtgatcagcctgagcacgggcgtgtcgctcttcctgggccgcttcgtcttcttcaacttccagcgggagaacgtggcgaagcaggtgcccgagcagaacggcaagacgcacttcgacgccggcgacgagcgcgccaaggagttctcgggcctgctcaagtccaacgaccccgtgggcttcaacctcgtcgacgtcctcgcctggggctcgctcggccacatcgtcgcctactacatcctcgccacctccagcaacggatacg

SEQ ID NO: 46577 - DNA, 225 bp, Glycine max
atcgactgatagatttaaaacctggcgagaaaggctaggactgtccaacagggcaacgcctggattctggtactgcccatggtttggagtatttacatgagcattgccatgccaagaatatacatcgagatctacaggctgcacatatcctactagatgatgaatctgaagctgatctacgagattttggtctagccaagctggatgatgcacggatgactcatg

SEQ ID NO: 46578 - DNA, 551 bp, Glycine max
ggcctgcctctcgtcgtcgtcgtcgtcgtggtggtgcttgcggcagctccggagtccaggcagcacgctagtcggggggcgcgggggaggagatatggatcggtcgtatctccccgtggcggcggcggccgtcgccctggtcctcgtgtgctgctccggcctctgccgcggcgagcggctcggggcgagggagtgcgaggacctggggttcaccggcctcgccctctgctccgactgcaacgcgctctccgagttcgtcaaggaccaagagctggtggaggattgccgtaaatgttgcaccgaggattcagatgattctatcagcaagctcacattttctggtgcaattattgaggtgtgcatgaggaaactggtattttatccagaagttgttggcttcctcgaagaagataaagacgacttcccatatgtggaaacccgttattcctatggttcgccaccaaagctcataatgcttgacacaagggtgaacagaaggagaccataaggattgataactggaagcgagagcacattcggcagtttctcag

SEQ ID NO: 46579 - DNA, 455 bp, Glycine max
cgttttggtcatgacacacttgttgatgccatgcttaaggatgggctttgggatgtatacaatgattgtgccatgggaatgtgtgccgagctttgtgctgacaatcatgccctcacaagagaagaccaggatgcatttgctatccaaagcaacgagcgtggaattgctgctcgtgacagtggtgcttttgcatgggagattattccggttcaagttcctgttggtagaggaaaacccccaacattaattgagagagatgaaagcctggataagtttgacccagtaaaactaaagaaacttcgcccaagtttcaaggagaatggtggtacagttacagctggaaatgcttctagtataagtgatggagctgctgcattagttttagtgagtgggcagaaggctcaagagcttggccttcaagtccttgcaaggatcaaaggttacgctgatgcagc

SEQ ID NO: 46580 - DNA, 308 bp, Glycine max
cggacgcgtgggcacggcgacaagaaggacgagccgtggtggcccgtgctggacacccgcgacagcctggtggagacgctgaccaccatcatgtgggtcacctccggccaccactcggccgtcaacttcgggcagtaccacttcgccggctacttccccaaccggccgaccaccatccggaagaacatgccggtggaggagggcgggccgggcgaggagatggagaagttcctcaagcagccggagacgacgctgctggacatgctgcccacgcagatgcaggccatcaaggtcatgacgacgctgga

SEQ ID NO: 46581 - DNA, 503 bp, Glycine max
cttgatgactgcgctgcagctcgtgatgaagaagtcaagtgctcatgatggacttgtgaagggtcttcgcgaggctgccaaggccattgagaagcacgctgctcagctttgcgttcttgcagaggactgtgaccagccggattatgtcaagctggtgaaggcgctctgtgctgaacacaatgttcaccttgtcactgttcctgctgctaagactcttggcgagtgggctgggctttgcaagattgactccgagggcaaggcaaggaaggttgtaggctgctcctgtgtcgttgtcaaggactacggtgaagaatctgagggccttaacatagtgcaggagtatgtcaagtcgcactagatgtaacacgtttcagtaatactctacatttggatctgggcttaatattatgcttgcgtcttgcgcttgctaggagattaggacaatttactacaagagcccatgaggatatgagcaatttggaattctaaatgttttggttatg

SEQ ID NO: 46582 - DNA, 457 bp, Glycine max
caacgaagtgcgagcgacccacgtccacacgacacgaaccaccaccaccaaccagcagccgcaccacgcacccagcgcaaagcgatggcgtcgctcaccatgatggcgtccttcgccgccgtggcggtggccgcgccctcgcgccgcggcaccttcgccgtggtcaggtccgccaaggtcgaccgctgccaggagcccgccacgctagcagcaaccgaggccaggcccgccgccgacggacgccgcgccgtcatgctcgcggctgctgcggcggccgtggcagccatcggcggcgccggcgccgccatggcgggccccaagaacgggacccccgaggcgaagaagaagtacgcggccatctgcgtcaccatgcccaccgccaaggtctgccacaactgagcacgcccgcgttgcatgcacctgcagggccggcgggtggtatataatcaatgtacgt

SEQ ID NO: 46583 - DNA, 504 bp, Glycine max
gtggcgccgtgcacggcccagaactcgccgcaggactacgtggacccgcacaacgcggcgcgcgccgacgtgggcgtcgggccggtgtcctgggacgacaccgtcgccgcgtacgcgcagagctacgcggcgcagcgccagggcgactgccagctgatccactccggcgggccctacggcgagaacctcttctggggctccgccggcgccgactggtcggcgtccgacgccgtgggctcctgggtgtccgagaagcagtactacgaccacgacaccaacagctgcgcggaggggcaggtgtgcggccactacacgcaggtggtgtggcgcgactccaccgccatcggctgtgcccgcgtcgtctgcgacaacaacgccggcgtcttcatcatctgcagctacaacccgccgggcaacgtcgtcggcgagagcccctactagactgtcatgcatactacaattatatatatatacgcttaatattaacttcagcatgcatgcata

SEQ ID NO: 46584 - DNA, 349 bp, Glycine max
gaacgacagcccgacgttgaagaaccggaaggggccggtggagatgccgtacatgctgctgtaccccaacacgtcggatgtcaccggcgagaagggcgaggggctcactgccatgggcattcccaacagcatctccatatgagcctcctcactgcctgagcggatggtttgtagatgttctgttacgctgtgtgtaatgtgtcgtttattcgttggttttgtcagtctcagggtagggaatggagatgttgattggatccatgatctgtagggttgagagaggagtcacgtctggagaatgttgtcaatgtgtgtttctttcttgttaagaataaaagttcgtcagctc

SEQ ID NO: 46585 - DNA, 396 bp, Glycine max
cgctactgagctcctccttcgccatgcccgccgccgcccgtagggcctcctccccttcctccgcctcattgagcttcgccacgtcgcagctcgccggcctctccctctccgccggcgttgcaactccaaccgccgtcgccctcctccccaagaggcagcagctccagcccattgtcgcgcggcgtgtgtgcccgttcacggacaagaagacgaaccgggcgaacaaggtgtcgttttccaaccacaagacgaagaagcagcagttcgtgaacctgcagtacaagaagctgtggtgggaggccggcaagcgcttcgtcaagctgcgcctttccaccaaggccctcaagaccatcgagaagcacggcctcgacgccgtcgcgcgcaaggccggcatcg

SEQ ID NO: 46586 - DNA, 240 bp, Glycine max
agctgcagctcaggtgcttgtctgaggctgcctcctcgttggcaaccggattgcctgctgctggtggatgtggtgatcaacagtattattacagagccatgctatgtgaacattactagtagcagtgctcataaaagctacaatcccatctccctttttttttccagtcatgtaaaacttccaaactgctccatggttcaaaactctgttcttcaatacatcatcaattatcgattatat

SEQ ID NO: 46587 - DNA, 308 bp, Glycine max
agggtgggaacggacaagacactgagtcaccttccaaggacaccaggactgagagggtggaatcttatgctgcaaagccaagcacgaagaaatggttttgttgtgtgacagccagccctacgcaatcctgaggaagacaactgcatgcgctttggaaatactgtccctttaattttctatacatactatccataagacaatgtaggggtacccaggcctctccgggctccaggatgggctatctcgtaaaactcttgcgtgcgtgtatgtatggtgtgagagaattcgcaaagtggacttctggttgt

SEQ ID NO: 46588 - DNA, 333 bp, Glycine max
cgaattcgtacgctttgctgatgaggcaaaatcaaacagagtcatggcgagcctcaaggcatctggattacttcatgccgcagggatagcaacttccctgacaaacacgagccaacaatgggatttcccgaatggatgggccccactgcagcatcttatagctgaggggctgctgcattctggatcagaggccaaaaaactagctgaggacattgctacgaggtgggtgagaacgaactacgccgcttacaaagcaacgggtgcgatgcatgagaagtacgatgttgaggcttggggagaatctggaggcggtggagaatacaagccccagac

SEQ ID NO: 46589 - DNA, 525 bp, Glycine max
caccagattgctgcacttgctgttgctctacagcaaactatgtcgcctggcttcaaggcctatgcaaagcaagtgaaggccaatgctgttgcaattggaaactatctcatgagcaagggctacaagatggtgactgatggaactgagaaccaccttgttctctgggatctccgcccccttggcttgactggaaacaaggtcgaaaagctatgtgatctttgccacatcacattgaacaagaatgctgtcttcggtgacagcagtgcattgtctccgggtggtgtccgcattggcgcgccagcaatgacctcgaggggtctactggagaaggatttcgagcagattggggagttcctccaccaggcagtgaccatctgcctgaacatccagaaggagtacggcaagctcctcaaggacttcaacaagggcctggtgaacaacaaggacatcgagaacctcaaggtccaggtggagaagtttgccgactccttcgacatgcctgggttcacgcttgagagcatgaaa

SEQ ID NO: 46590 - DNA, 546 bp, Glycine max
  unsure (1)..(546): unsure at all n locations
cccacgcgtccgcgcaatggccttttctaagctcagcatgcttgcacagcaaaggggtgatgcttatgcaaatgcagatgtaagggtttctctggaagagattgcatgtaaacaaggtcatgatgatgtctctaagctgacacctactgatattgcaattgagtcacttcataagatcgagagcttcgtcatcgagcacactgctgatagttcagctagcgacgcgcaagctgagtcgcagatccagaggatacagaccttgtagaaccttaatccctttgtttgccacatagagcatcgttgagttatttgtaaaggaatggaagaagggagctaataatccgaagtgtgccgttggctgaaacatcgcctgtcttcactcctggctctgcttctgttcgcttctcatcgtggtttgataccttggtggacatctatgctgacacctcatctcaccaaacatacttgcataccgtcgtcgcccgctcgaacgaagaaacanagtgccgtttggttcatatatttgtaatgtgatgggtaactgat

SEQ ID NO: 46591 - DNA, 528 bp, Glycine max
cctagctctatagctcgagtattgcttgctctccacaagaaacaaagcagagcaccaacaatggccgccgcctgctcgtcctcggtcctcctgctgctcctggccgccgccgccgacttggctggcatgagcgccaacgccgccaccttcaccatcaccaacaactgcgggttcaccgtgtggcccgcggccaccccggtgggcgggggcacgcagctgaacccgggcgggacgtggaccgtcaacgtgccggccggcaccagctccggccgcgtgtggggccgcaccggctgctccttcaacggcaacagcgggagctgccagacgggcgactgcggcggcgcgctggcctgcacgctgtcggggcagccgtcgctgacgctggccgagttcaccatcggcggcagccaggacttctacgacatctcggtcatcgacggctacaacctcgccatggacttctcctgcagcaccggcgtgcggctggtgtgcacggaccctggatgccccgacgcgtaccaccacccc

SEQ ID NO: 46592 - DNA, 344 bp, Glycine max
ggtttcttgcaaaaaagtcctagctaaagcgcttcctggtgctccaaatgagattttactggttctcgatggaacgactggcttgaacatgttacagcaagcaagggagttcaatgatgttgtaggagtcactggattcatcctgacaaagctcgatggcactgcgcgcggtggctgtgtggttagcgttgtggatgagcttggcatcccggtgaagttcattggggttggtgaagggatggaagacctgcaaccttttgacgccgaggcatttgttgaagccatcttcccatgattttgggttttggagagataattcatgcttctactgtaaagctttggac

SEQ ID NO: 46593 - DNA, 485 bp, Glycine max
acaccatcgacaacgtgaaggccaagatacaggacaaggagggcatcccgccggaccagcagcggctcatcttcgccggcaagcagctcgaggacggccgcaccctcgccgactacaacatccagaaggagtccaccctccacctggtgctccgcctccgaggtggcgccaagaagcgcaagaagaagacgtacaccaagcccaagaagatcaagcacaagcacaagaaggtgaagctcgcagtgctgcagttctacaaggtggacgacgccaccggcaaggtgacccgcctccgcaaggagtgccccaacaccgagtgcggtgcgggtgtcttcatggccaaccacttcgaccgccactactgcggcaagtgcggcctcacctacgtctacaatcagaaggcgtaatcccatgcgccgctttgcttcacccgcctacctatcaagcattcacctgttggttactcgatttgaatatcatttaga

SEQ ID NO: 46594 - DNA, 532 bp, Glycine max
  unsure (1)..(532): unsure at all n locations
cggacgcgtgggcttcaacacaggtgtcatggtgcttgacctcgagcggtggcggcgagcgggctacacgcagcgcatcgagcgctggatggagatacagaagtcgccgccggggcgcatctacgagctggggtcgctgccgcccttcctgctagtgttcgcggggcacgtggcgccgatcgagcaccggtggaaccagcatggcctcggcggcgacaatgtcctgggcagctgccgcgacctacacccgggacccgtcagcctgctgcattggtccgggtccggcaagccatgggcgcgtctgggcgcggggcggccgtgcccgctcgatgcgctctgggcacccttcgacctgtacggccccgccggcgccggcgccggcggcgaggagtcccggtaaccataacacccgaaaaaaaagagagaaagattcttttccttctttggcccaccccgtacaaattctgagcttctttctaaatttcactccataaattactctacattaccatntaaagagtgatttacataa

SEQ ID NO: 46595 - DNA, 512 bp, Glycine max
gctcagttagcaggatcgttgcaagaaaaacaccagagagcaggtgtcctgcaatttcattagcagaagttcctagcaaacaagcaagaaatgatcatgaggcagcagagaagcttaagtttgtcatttatcaaaggcccaaagcattccaaaatggaagcactgatttgggaaacaagaatggtgcaccaaaaactgttgaagagagaatagaggaatataataaagcacgagcacgcatcttcaatggttctgtttctgcagattctgatgctgcaagtgttttgggaactctttgcactggcagagatgagtcagtaaatgttgaaccttctgttgatgaaatcaaagtcagcacgatgaacaaccgttccagagttgctgttttcaaggatactcaaaaggatcgcagtgacccagattatgatcgaaactacaaaggtatgttaggagcccagttcctgacttcaacttgagcccaggtgccttcaactttgtgcctcagtttatgc

SEQ ID NO: 46596 - DNA, 503 bp, Glycine max
gagatgaaaaataagaatcagaattagaccgtagacaacggcaaaacaaacagttgacacgacactggaccaacaaggcaaaatcacaatgtaaagagataactttgactttcagcagaaaattcttgaattccaattgttactatacaccattttgcctaataagcccacaaaaccaacaacttgtaaaacacttttaacttttaaccgatatcgtacacacgtgctgttggttgtgcatgccaatgcaagaaataattaccttggcatctaatgattgctttgatctcactatgttgtgtaatagtgtaagtcttatgtcatgcaaatagtaccctttttttactaactaaagagctctgggaaagaccacattatgaacttgacaaaaatgtcacactccaagaattcaatgtgagcagcacgtccaataagtgtgttgaagctcctcctgccgtaggaggaggtttcgaagttaatgtcgcagcgcatgacgacacgat

SEQ ID NO: 46597 - DNA, 459 bp, Glycine max
gttcttaagtatgccatgacccttgatggaaaaattgctgctaccactggccatgcatcatggataagctgcaagcagtctagaaatctagtttttgagttaagaggccgaagcgatgctgttattgtgggaggaaatacagttcgaagggacaatccaagactaactgccagacatggaggggggcatatgccaatgcgcattgtaatgacccagactcttgatcttccagaggaagcaaacctgtgggatatgtctgaggtttctaccatagttgtaacacaaaggggtgcaaggaggagtttccagaagctgcttgcatcaaaaggagttgaggttgtggagtttgacatattgaatccccgagaagtaatggagtatttccatgattgtggatatctttcaattttatgggaatgcggaggaacattggctgcatctgctatttcatctggagta

SEQ ID NO: 46598 - DNA, 406 bp, Glycine max
gcaaagggtgtgatgagattagttttgagaagaaaccagcaatcggcgattaggagtgagagagatatggagggaattgaaggaaatagcagcagatacagtctgaaaccctcgcgaatttgcaacgaagatgttctgatctgcgtcgacgtcgatcctcagtgcctcgtcgaaatgaaaggtgccaccggtcccaatggcagacccctcacccgtttggactccatcaaacaagccatcgttctcttcgtcaatgccaaactcaccatcaaccccgaacaccgttttgccttcgccactctctccaacaccctcgtctcttgggtttctttctttctagttctgttctccttcaattaattttggtttagggcttttctttcttatttcctaacaatatctaatt

SEQ ID NO: 46599 - DNA, 472 bp, Glycine max
gaacaatcaccatgatgattatcgttcttggatttaaccaatcttaaacatggaaacaaattaaagaggaatccttacacagttgggattttgtgttgagacatacagtggaataaatgtacaacaatggcacaaatcctttgcaactatgtttgcaatgaatgatgatgatatttttgtattctaaatcaatgcaaacttgggtctcctttccttctcttctggcatcagattcatctactctcttacaagaaacaaattgttgagtctatcttgaatgtcaaacattccatactcaatgtgctcataagcttggttaccaagaaaatcctgcaacctcccaatgaagtttccatatgctggcaacaagatcttttctatggattctatcattattctccttagctccttagtgaagacaaaccacgcagactgaacgttgcatatatcatcgaagtgtccgttgaaggaa

SEQ ID NO: 46600 - DNA, 431 bp, Glycine max
ataagttaaagacattcgacctgaaaccttttattttttgggtcgaagaaattagacctgatatctagatcacttgccaaaatttggcaatgtttaacaacgagacgagtgaaagcttacctactaaaatgtacttaaacaaagctagctccaatattcctgcatcccattacagggaaatcttgtatagagccgtgcaggtgaggaaaactttacgaagaatagcatttttggaattgttgttctccattggaatgcatataaaacaatcattgtgtccaccaatactctccactttttccaccagatttatgcataagtcttacatctgtaatggctatatcttttgaagcagccttacacatatcatacacggttaagcctgcaatagagactgctgtcattgcttccatctcaaccccggttttacc

SEQ ID NO: 46601 - DNA, 318 bp, Glycine max
cacttgtcttgattttctacaaattatctaagcaattatccatttctaaaattgctgaagaatgaagataattaatatgacaaacaaacgtgaacacaaatttatgagtcaaaccaataaagcttagcactcctcgtggtgctgaaatcttgaaagcccaactttatagcctagggccttgatatcttgttgcacttgtgctctgaactcattgtaagtaaagggcttgtacttgtagctctcaattgcaacgtcttcacccgggaaaacaaagtagcatattgaaatcctctctttgtgtttgtttatactcactct

SEQ ID NO: 46602 - DNA, 532 bp, Glycine max
ttccattttcctcccaacttttcctaactccaccacccacattgcaattctcttctgaacctttacattttccatgtggggatgagtaagttgcttccttttttgttctggacttgtggggtttttgctcatctttcattgaaatgctaagggatgatcatttggccattcattcagagtatttctgtgtctgctagcactacaatacactacatatgtttcggagattaggatggttcgtgggtctgaatcaaaccaatttgtcaaccaaaaggttgctcaatgcagaccaaactgcctctgctaggccaaatcaccaacttcctatgctcgatgctgttcatgaagttgctgtttacattcataggtttcacaatcttgacctttttgaacaaggatggtacagaatcaagattactttgagatgggaggacggtgatgactcccatcccggggttcctgcacgggttgttcagtatgaagcttctgaagtgggtgctgacaatttatgtggagtttggatgattgatga

SEQ ID NO: 46603 - DNA, 448 bp, Glycine max
cattaatcccgctctctactgcttctgcgttttgagattcgaaaaatggaggaggaaagttccaattgcatcgacaacgagagggatctcatccgcaacatctgcatcctagcgcacgtcgaccacggcaagaccaccctcgccgaccacctcatcgccgccgcgggcggcggcgtcgtccacccaaagctcgccggccgcgtccgcttcatggactacctggacgaggagcagcgccgcgccatcacgatgaagagctcctccatcctcctccgctatgccggccgctacgcggtgaacctcatcgactcccccggccacatcgacttctgcagcgaggtctccaccgccgcccgactcagcgacggcgccctccttctcgtcgacgccgtcgaaggcgtccacatccagacccacgccgtcctccgccagtgctggatcgagcgcc

SEQ ID NO: 46604 - DNA, 325 bp, Glycine max
cactgtccattgttctgcaaattacaaaactcctgcttcctatgagttaatgtctgcttgtaatcgttccaagcttttccccttggtttctggcaccgcaacaattataaacaatatagccagtgcattaattgctgcataaaggatgaaggtaccataggagctccagctcatgaagaagtagaaagtataggaacataaccatgcaccaaaccagttcactaatgtggccacacttcctgccagccctttaatattgacaggaaatatcttagacatcacaacccatggaatagctcccattcctattgaaaatgatcctatg

SEQ ID NO: 46605 - DNA, 512 bp, Glycine max
cgagggctcgaaggaggtgcttgttgcgttgtggggcacgccctaagcggaagcggttaatcactctgaaccgaaccgaaactaaaccctattcatttcggaatcgcagaacattcgaaccagagaaacaagagaagagaacgatgactatatggaactacgtcgtcacggctcacaagcccaccaacgtcacccactcctgcgtcggcaatttcaccagtcctcaagacctcaatctcatcatcgcgaaatgcacgcgcatcgagattcacctgctttctccccaaggcttgcagcctatgttggatgtgccgatatatggaagaattgcaacacttgaactcttccgccctcatggtgaagcgcaggattatctttttattgcaactgaaagatacaaattctgtgttcttcaatgggattccgagactggtgagcttgttacacgggcaatgggggatgtttctgaccggataggacgttccacagataatggtcagattggcattatt

SEQ ID NO: 46606 - DNA, 450 bp, Glycine max
ggaatggaaaggaagaggtgggggtagtaatgatggatttcttacgttgttaggtgcacgggaaatgtcaactatgggtaaagggccttttgagttagggttaacgtgaaaaaggatggtagccattaccgctgcatatggggcaaggttacgaggcctcacggcaacagtggtgttgtccgtgcaaaattcaagtcaaaccttccacccagatcgatgggagctcgagtaacagtattcatgtatccaagtaatatatgagattcacgtgataagacgctcagaattcgcagcttaatagtacgcacaaggatttttgtttcagctttgataattgaggtgtctgtcaactatttgagaattgtccttactgtttacacgttcatttgaacgaatgtttttctgcgttattatagctattgtctatgcagattatatattcattactat

SEQ ID NO: 46607 - DNA, 517 bp, Glycine max
  unsure (1)..(517): unsure at all n locations
gtgacttgcagcaattcccaatggcttccgtttccaagctctcaacgccaaatccagttgcttccttatcagaagcgcttcgcccccgagattctcgcttcctcaccttcaaaccttcttccatcgcttttaatcacaaaactaacctatccgcttccctccgatccattcactcgctccctcttaaaacctcctttatgagaaagaagggcagagtccatggtatgataatctctgcagacctgttacagacctgcttcctcttatagcaagtggtgtcagaggcgtcactagcaaccctgcgatctttcagaaagctatctcatcatcgaatgcttacaatgatcagttcagggaacttgtgcaaacagggaaagacattgaaagtgcatattgggaacttgtagtgaaggatatccaagatgcttgcagactatttgaaccaatctatgatcaaacagatggtggtgatgggaatgtttctggtgaagtatctnctaggctcgctgatgacact

SEQ ID NO: 46608 - DNA, 412 bp, Glycine max
ctgcaaacccaactgggctaagagggagacattattgcaactatatattatagattacactgcaagacaaattaaaatacaaaataatccgaggacctttacttatgacagagtgctgggacatttggaacattattacaactatatattattttttggtttgtgaaggggagaatgagcctttattgatgatagtgctggtccttctcctatataccacatttcataagaagttgttatgggtaaatctcaatgagagaccttaaacccaacactggagttatcttgtagtcactgaaaccagtagagaaaatcagtttggcccattctttctcagttctctcttttccaggatacagcaccatcacaaccatatcaatgaagagctgtgtttcaattgattcatcatctc

SEQ ID NO: 46609 - DNA, 361 bp, Glycine max
aagttccgccgcaagctccaaactccacagctccagcaactcctctccgtcgtctgccgcagccaccacgtcagcatcatcaagctcctcggcgcctccgtctccggcgaccacatctacctcgtctacgacttcgtcaacaacggcgccaccctctccgactgcctccgcaacaaaaacaacgtgcacttcaccgtcctctccacgtggatgtcgcgaatgcaggtcgccacagatctcgctcacggcctcgattacattcacaacaagaccggtttgaacatcaatttcgtccataaccatatcaagagcagcagcatcatcgtcaccgagccttccttcaacgctagggtttgccact

SEQ ID NO: 46610 - DNA, 435 bp, Glycine max
ctgggatgtcaaattagtcctttaaagaatttgggtgacagcaaaacagtcttcgggtcaagtttgtatgtgacaatagcttgaaccattttgatgacacatatttgaaagaccaatttgatgtcaagtgtatctttagaggaccctaatggaagcttagtctaaattttaatatttacattctatgtacaatgtcaatgagactgcacttccgagttggcagaagactctgtggaccctccacagacattgccgcgacacagaggacatacaccatgtatttctttaagccatttatcgacacatgacatgtgatactcgtggaagcaaggaagcactcgtatttggtccccttcttcataatccgccagacatatgtagcattgttcagcatcattgcctacatcagccccatcaacctttttgtgagatttc

SEQ ID NO: 46611 - DNA, 336 bp, Glycine max
gcaatttttaacaacacttgatgtgaatggttgctatcatcttcaggaaattagaggggttccaccaaacttaatagatttctcggcaatcgaatgtatatccttgtcttcctcgagtacaagcatgtttttaaatcaggaattgcatgaggctggacaaactagattttgctttccaggagcaactattccagagtggttcaatcaccaaagtaggggaacttcaagttctttctggtttcgtaatgaattccctgacaatgttctttgtcttcttgtagcacgtgtggaactgttatatgtagatgatgatgaaattcccgtgcccatgcccat

SEQ ID NO: 46612 - DNA, 361 bp, Glycine max
ccttctggttacattgaccagattcacatagatatggattttggcccacacttagtgctagggaaccttccttagatttttcaactagtgttgagggaattgaaccggagaggttattcttctccaagttcaggatcttcaagtgttgtaattgagacagaaaatcgggaacttcatcctttaagctattatttgataaatccaaattctccagcatggtgagatttaaaattgaagggtctatctttcctgacaatccactcgaagataaattcaaagttgtgattcttggggagtcatttccgggataagtacaattcagaccatcccacaagtagtctataggggcgcatggatcacc

SEQ ID NO: 46613 - DNA, 240 bp, Glycine max
gtgattagaaatgggaatgtcgaggagtttccttgttggttttataggaggtctagttcttgcagttctgattcaagctcaagaccaatcaggattcatcagcatagattgcggagctccttgcggggggagctatactgagttgaccaggacaggcataaattatatttcagatgcaaatttcattgatactggtgtgagtaggaaaatagtatctgaactcaaaagtgtctatcaaca

SEQ ID NO: 46614 - DNA, 437 bp, Glycine max
tgttccttctccttgtgatcttcttcaaccttcagagtgagaaaacacattcagaaaccacgtttctctcttcttcttcttcttcttctttttcttcttcttcttcttcttctttttcttctctcgaggtcattattaagtattcaccatggaggcaccatctcccaccaaacccaacgacccaacaaaaccttccaacacttccaccacccttagtctggaggccggcccggcccaagcgagcccactccgaaaaatgtttgccgtggcgtccatcgccgccggcatacagttcgggtgggctctccagctctctcttctaaccccctacgttcagcttttaggagtgccccacgcggcggcctccttcatctggctctgcgggcccatctccgggctcgtggtacagcccattgtgggctactacagcgaccact

SEQ ID NO: 46615 - DNA, 185 bp, Glycine max
gacaaaactgtgaaagctttaattaactatgggatttaaaaactaggtgcaatgtcacctgaattgaaaagacggcgcactaaaattgttcctacagtgaatgacaaacaacttggtcaatgttaacaaaggaaactgaacaaaagttttacttaatttagtcaaacagactgaaacccatggca

SEQ ID NO: 46616 - DNA, 350 bp, Glycine max
tctttttttttttttttttttttttttttttttttttttgggcccaaatcataaatgtttgtaagatcttaactgtcaatcaaggttacaatgagctggtagtttcactacaccagcccagaaagaattaaaactattataacagtaaacaaatagggattttgagctagagaaggaagggaattttgtctcccaaaagagtgttggagtagtttccagtgaaaacttgggatgccacatattgatttgcagcctcggtgtaatgagtcccgtcccaatttacatacacactgctgtcattgcaaccttttgctgttattggggtcccattcaagatctttgttagccca

SEQ ID NO: 46617 - DNA, 436 bp, Glycine max
gcaaaacaagacaggttattgaccaagttattcgacgcgatatatttacatctattataatacactcatcaatccacagcacaagaacttgggtgtggataagctatttatcacagctcaatcgaaaaaattcaagagggaaaacttaagtgatgcaatgtaccatagagctagggactaaggggcataagaaaggtcatctaggactagcactgcctcctcaattgtagagttttggatgctttaactagtgagatttttgtgttttaacttcacttgttgcttggacaaaacctcagcaatgagctgacggccaaataagtgagaattcttgaggattaaattccttgttgatgaatcaaccgcgtaaccttgtcctgccatccattgtagtaagtgtagaagcaaatccttcttttcaggctgatctaaatag

SEQ ID NO: 46618 - DNA, 466 bp, Glycine max
gaaggatggaaatcagtcttgccctcagtgcaagacccggtacaagaggcacaaaggaagtcctgcaattcttggagaccaggaagaggatgggggtgctgatgagggtgctagtgacttaaattacaattcagaaaatcagaatgaaaaacagaagattgagcgcatgttgggctggcaaatggcacatgggcgagcagaggaggctgttgctccaaattatgataaggaagtttctcacaatcacattcctctgctctctggtggacaagaggtttctggagaattatctgcagcctcacctgagaggctgtcaatggcatctccaggtggccgagggaagcgtgtccataatcttcaatattcctctgaccttaatcaatcaccaaatatttagggttggggatcctggattgggtaatgtggcatggaaagaaagagttgatggctggaaaatgaagcaaga

SEQ ID NO: 46619 - DNA, 505 bp, Glycine max
gaaagaatacataaaaattgttattctatttctagtccagtcttactatcagagtattgtatacaatgaagggattttataatagcaaacaaggtatactacttatgtaccttgttccaaatcagtgagggtagtgtaaacaaataaaatgaattaaaggcaaaaatagtgacgggggaaagacatgatgtaggggtaaccactaaacaagcattgacccaatcgcttatacattagatcatagcaaggcacttcacttgaaattgccaagatagaaaggagatggagagggtattgtgcagagaaaatgagtgttctctgcttatgacttagttgtgaggatcattcacgtagcttacaattctgaagatagggatgattaaatttgacatatttggtccagtaagaccgatactttgtcatggctatctctaaccacggcttcatattaccattgtagtgtacgactgctgcattatcaatctccgagcgatctacacttgga

SEQ ID NO: 46620 - DNA, 402 bp, Glycine max
gaggcacaactgacatacattaaacttcccttataggagtgccatacaaatagttataactagaagagtttattatggtagagattttctacatatactcagcaccttatatatctgtaggaagggaaagtcaataatttttagtggtttcttacaaacaaagtgatatttatagttcatggaagattttcttgctcaacatctttcacataccgacgccaaaaccagtgtttgccccatatggtgtacattgactccaaaggaattcctttagtctctggcacgaagaatataacaaagattgtcatcactataatccaacccgcgtagaacacgaaagaggcaaacttaaagtggcatagcatagacaagaatgtctgggataatataaatatgattatg

SEQ ID NO: 46621 - DNA, 475 bp, Glycine max
  unsure (1)..(475): unsure at all n locations
attggtattgactttttgtcaaaaacaatgtaccttgaagatagaactgttcgcttgcagctttggtaggatgaattcctcttcaaatcatatatacaagctcagtctttttatatttgtttgtttatttttcaacaattatattagagtgcacattgctggtacgcctagtaggcattgtttatttttacaatttctgagcttagtatatgttaacttcacagggatactgcagggcaagaaagatttagaagtctcattccaagctacataagagattcttctgttgcagttatagtatatgatgttgctagtgagttttatatgttcttttatataccactttcattatctaattaacaggattttttatgggatcttttcctattttctcatgacataactnttccaaattatttgaccatgtaactcaaaaagggttttgtagcgcatgaatatgttctttaatacttat

SEQ ID NO: 46622 - DNA, 336 bp, Glycine max
acaggctggatgttatactttatatcatagccactaaatacagagccaggtaatgagaggtttttgaaacaaattctaataagcaatctaataaaacatcatttcgcaaccgaaaaaggccaaaagtgaattccagaattttaaaagaaaaaaaaaaatccggggttaattgaaaaactgaaaattaaaaataaaatccaccagcatcatcaaagccaggattattgcccgcattatattcagcagcataagataccatgtttgcgatcaacattccacccaagggaccaccaagcaatcctgctcccaatcccattccaaatttgtttttttttg

SEQ ID NO: 46623 - DNA, 470 bp, Glycine max
ccctaaaaatttgagatatctccataacatgaaacaataaagaatacacaactattcaccagatgaagatttcaaatccattgttacacgaacaaccatattattaaaccatacattgaatggtcatttaaacatacatgtattcaccacctcgaattgcattttcagcacctttcctctcttcttcagcttccttttcacgctccttccagctctcataggcatgatcatcagtttgcagctcatgccgacagatgggacaagaattgtgctcatccagccatggctttagacatggtgggtggaatgtgtgcttgcatggcaactcttgcattttgtcatttaaaaccaagttctccctgcaaatagcacactctgcatctttccccaaattagccaggatttcctctgtgagagtaatgaccggaagatttgccacaacctctttactggcaggaggtgcttttggg

SEQ ID NO: 46624 - DNA, 417 bp, Glycine max
ctcgagccgattcggctttaggcttttttcgcaggtggtgtcaacggaagcaagagcaatgtacaatgttggccttgctggtttgacatattggtcaccaaacattaacatattcagagatccaagatggggaagaggtcttgaaacgccaggggaagaccctgtgctcactagcaaatatgcagcaggctatgtcaaaggtcttcaacaaactgatggtggagaccctaacaagctcaaggttgcagcttgttgcaaacactatacagcctatgatgtggataattggaaaggaattcaacgttacaccttcaatgccgtggtgactaagcaagatatggaggacacattgcaaccaccattcaagagctgtgtgattgatggcaatgttgccagtgtcatgtgttcctacaacaa

SEQ ID NO: 46625 - DNA, 393 bp, Glycine max
gattgacatttatgtgcatgagtaatgccaaaaatatcattcaagaaggagaatgatgagagtacaaacaatatacaaaagaatgatgaaaaaggaaattagaaaaatacatggcaactggtcatctgatcttattccactctgagcatcttctcctttctttactctatgaaagccttgatttctcctccctttggcatatatacttctctttatatgtttctccttcctcattgtgcatatacttagtaattttctcaacacttgggtaggtcagttggaggtggtaataaagattcatttggtcctttaccgttgtccacaacaaaagccatcttcagtccccatgttgtatgaatttccaagtggcaatgcataaaccagacacctgga

SEQ ID NO: 46626 - DNA, 467 bp, Glycine max
aactgtagcaacgccttgaggagcttcaacatttacctgcaaactggtgaagtgctggaagagagtcataaaattgagattgatctagatgagattctaaaactagagaaaattatttgggcccatcgtctgagagccacttggctaaaacatggggatagaaatataagttttttcaccaaaaagcctcacatagacagaaactaaactccacagacaaaatcacgaatgaagaaggaatgctgatcaaagatgaggaagacatataagttgttattttagagttttttgaagacttattcatgacgtctattcctcaagatactgacttagttgcacaactggttggagggaggataataaatgatttaagaaatgtgttgaatggtgatttcacaaaggaagaggcgtttgaagctctgaaccaaatgcatcctttgaaggcccctagtctagatgggacccct

SEQ ID NO: 46627 - DNA, 315 bp, Glycine max
  unsure (1)..(315): unsure at all n locations
tcaagttgaagtttttagttcgaagacttttactctcttcactgttgttgtgttgcgcttcttctgggaaggttctggggttcaacggattccccccccccccgnacaccgacacctacgccaccgtccctatccctgacgacatgaagtcctccatccgcccggacatcgtaaacttcgtacactccaacatctccaagaacagccgacaaccctatgcagtcagccgccgcgccggccaccagacttccgccgagtcctggggaaccggacgtgccgcctaccgtatcccccgtgttcccggcggcggaaccc

SEQ ID NO: 46628 - DNA, 442 bp, Glycine max
gtcttgaaagactttgataatttgtgagttcccgcctcactcataaatgtatcaaacagcaccgaataaagaacatgaagtttacaatgtgtacgtttttttttgaaagggagaagaaaaaaggttcatgaatatgaccatgctaaataatctgacacaaataataaacacaacatttgaaaatcatatcttaacattgaatgataattttgagaggtttttgatcacagagaagctactagcttttctggcctaacttcttgactattgtggccatgtaccttccttgatactcagcaagggccagttctgtttcactagcctgccttgatccatcgccagcaaaaactccagcaccatatggagatccacctctgaccgagtccatttcgaacattccagcaccgaaggtataaccaataggaacatagagcataccatg

SEQ ID NO: 46629 - DNA, 309 bp, Glycine max
  unsure (1)..(309): unsure at all n locations
tgttgttgtaactcgttcttcttctttagttgttctgtttttgtngtcgtattttctctcacctggaaatgtggtgctgctgaggcaactgtggttgccgaagctcctgcaagtgcggtaacggctgcctaggctgcaagatagacccacacttgagctacactgagtcaaccaccaccgagaccttgaacatgggagtggcacctgttaaggctcaatttcacggtgcatgaaatgggtgtgcccgctgagaactatggctgcaaatgtggaccaaactgctcctgcaacccctgcacttgcaagtga

SEQ ID NO: 46630 - DNA, 348 bp, Glycine max
cgaacaaacacaaacatttatgcattcaaactcaatcaattgaatcatggcatcgaacagtgcaagtccaacccttacctcctctccgatccttcactctacttcttccgcgactatctcgaaagtctcggtgcgaaactccctgaatctgcttattacgaatcgactggcgtggagagcgatgaggacatagaagatgttacggaggagcatgacaaggtagaagaagaagaagaagatgatgaaataattgaatccgatgttgagctcgagggtgaaacctgtcagtctgatgatgatcctccacagaagatgggagacccctctgtcgaggtcactgaagagaat

SEQ ID NO: 46631 - DNA, 568 bp, Glycine max
attagcccgaaattcaagaacaccgtgaggcatttgctacaccagaaaattcgggattcctatatgcaccctcagtttgtgtctgatgtaatgaagccactgcaaattgaacaactcatggaccaggaggttgttaatttatctggtggagagctccaaagagttgctatatgcctctgccttggaaagcctgcagatatctatctgattgatgaaccaagtgcttatcttgattcggagcagcgtattgtggcctcaaaggttatcaagagattcattcttcacgctaagaaaactgcatttattgttgagcatgatttcatcatggcaacatacttggctgacaaggtcattgtttatgaggggcgaccttctattgactgttctgccaatgcaccacagtctttagtatccgggatgaataaattcttatcgcatcttgacattacttttagaagagacccgaccaactataggccacgtataaacaagttggactctacaaaggacagggaacagaagtcggccgggtcctactactacctcgatgactaatgaggaagcacag

SEQ ID NO: 46632 - DNA, 414 bp, Glycine max
ccttgatccatctagtagtgggtgtcgtatactgcctcatcagctggagtgtcggtctccccaagcgagcgcctatcaatggcacgctcctgaagcttctctttccagtcgccctgtgccatggtattggtcacatcactagcaatgtgtccttcgctgctgttgcagtctcatttgcccacactatcaaagctctggagcccttcttcagcgcagctgctactcagtttatccttggacagcaagttcccttctctctgtggctttctcttgcccctgttgtcatcggtgtttcaatggcatcccttactgagctctcattcaactggactggcttcatcaatgccatgatatcaaacatctcattcacctacaggagcatttattccaagaaagccatgactgacatggata

SEQ ID NO: 46633 - DNA, 476 bp, Glycine max
cgcatttgtaacgacaaagaagcagaaggtgtagtaatactgagtggtcaaattaaggatcgggattcaggaatttccattctgagacacacagaagaacagaaagaaactccttttaatttttcaatttcaagtcaagatcgatctgacatcatagaaaatgaccatggatgtcgttcagctgcagaggaagctgcgcgaacaccaagccgctatgtttcaacagggttttttggatgatcagttcagccagcttcagaaactgcaagatgagagcactccagattttgtgattgaggttatcactatgttctttgatgattctgagaatctcctaaaaaacatggcacgttgtctagaacaagtgccagctgatttcaaacaaatagatgctcatgctcatcagtacaagggaagcagtgccagtattggtgctgctagagttaataatgtgtgcgccaccttcagagcttttt

SEQ ID NO: 46634 - DNA, 470 bp, Glycine max
gtttttgtgttgttcggtggtagtttttcagctaattgtgttaatatttaattttataatttaattttaaaattacgtaattttcaaaggacaacacacgaacaatcgaaaaacgcacaaaggtggagcctaaacctgtccatcccctcttaatcctatttattgcctctgcagacccaaaattcgggaacggtaaagaacgatgcctccattgacttcgtggctggtgctgcccattctcgtgttgttggcggctccggcaacaacccctccagcacgtgcctcaccggtctcgtcgtccttcgacggtcaacgggagtttgactatttcaagttagcgttgcaatggcccggcacttactgcaaacgcacccgcagttgctgtcccaccaatggttgctgcagaggctccaattctccagcagtattcaccatacatggactctggcctgactataatgatggaagct

SEQ ID NO: 46635 - DNA, 355 bp, Glycine max
acccaaactggatattgattgcttttctggaatatatatcgttaatacaacaaaaatagactcgctctatctaacaattgtttttggatctcctttacagaatattacaatgtaacgtacaagtaaaattggttaaaaaaattaacaaaaagcccccccctgtgcaagagcaaaagtgattgaaagccagaaaagaaacggggaaattgaaagggggctaaattcaaaaaaccccaattgcttgctcagctagctaaatggctaggagagttgttgaacatggggtgccacataaatgctcgggaaagcaccatcttaagctcccggggagtccagttttcttttggaaggggtt

SEQ ID NO: 46636 - DNA, 456 bp, Glycine max
ctcgagccgctcttttccaccgcctcctcgcccccgatcctcctcgccatctccgccgtcctcgtcctcttcgccgtagtctacctccgcgtgtcctggaccctcgcccccgtcgtcgcagtcgtcgagtccacttggggcctccaatctctttgccgaagcgccgccctcacaaaaggaatgagacccctcgccgcctcctgcttcctcttcttcgcctccatgcaggccctcctcctctggaccgcctccgtcgacggctgggcctggaaagactgggccttcgtcgtccagatcgtcctcacttctactctcctcatgctcctcatgctctacaacgccgccgccgacaccgtcctctacatgtactgcaaggccgtccacggcgagctcgcgcttgagatcgccgaggagtttgcgtggcagtacgtttgcttgccatttgatgatggcaag

SEQ ID NO: 46637 - DNA, 445 bp, Glycine max
gaaaataacatattaacttatatatattaaatttactctaaaataacccggccacatacattttatttattacattatatagtagttatttgtagttctattgcataggggtgattgaaacattgatcaaagtcataaggattcaataactgatgtgaaatgatcttccatgttctgaaactagttcgtgttgtaccatgatttcttctgaagctcatcaattattttctgatccacttgaaaagctttggtgagaacctcaggagaaataggtggattggctttaaacaaagcatttgcaatagtgatagttcctgcattttgactgccaagagcagcaatggcaacagcattgccatatcccacattgagttggaaatgaatgagaccaattgggaacacaaacacatcacccttgttcaacactttggtaaagagacgattt

SEQ ID NO: 46638 - DNA, 371 bp, Glycine max
ggggcttcacatgaaaccatatataaagaaacttaataagatgacataaaattctagagcaaaaaaattaaaacaacgttcaagattatcatatctagcgtccaaaatgaccagcaaaactgaaatgtagttcaattcgttatacacctcaaaccaaaacttgaaacactaactagatactacttaatacttaacaggagcaaggatttcaatttgggaaccaagcttctcctctgcaaccttctcagctttcaccctcaatttggcaagctgcttcttcctctcataacacaattgtgctctctccttccttttcttctcaagttccctgatggtatcatagtagttccatccaacctcagatgacaatt

SEQ ID NO: 46639 - DNA, 374 bp, Glycine max
ggctcatgcatatcccacgatcataggagattcgggtttagctataaaagtctgcatctatgtaaattttaccagttatgaacatgacataatacaaatttttcttatgatataataaacttttattaaagccaggatcttggctataagcttcacattctagacaagggcaagtccattgcgtctgctacaaagtctgcatcttttgtggggaaacacaagggaggggtaattctgaagacatttccatagtaaccacccttaccaataagtactcctagttctttcatttggtccattacatgcaatgtttcattttttgctggagttttaagttcacgatcagtgacaagttcaactcctagcattaggcc

SEQ ID NO: 46640 - DNA, 458 bp, Glycine max
acttagaaattatatttattttaaaaaagctttgaacaagatgatcatgaaagtacaacagcagtgattaaaatttaaacacaagtacacaactatcacaacgattgccatatgccgcaaacagaatttccacctattcctccaagttctattctaacttaagcagaacctaattcctagtcattaaacaaagacaatacagataacaagaagttaaaaaatagcctccaagaaactatacatgcacacatggaaaagtgaagcatatgaacttgcaaggtgtagcccttcttgtacatacataactaaaattgctctacattattgaacatgcattagggttgtcatcactgaagagggaggtgagcttctcatccggtgcgttagggttggggagtgcttgttcagtgtttttcacataccctgatggtgccttcttgtcatatgcctgaactaca

SEQ ID NO: 46641 - DNA, 389 bp, Glycine max
gggggagggtgccatttgcatttttatcaaccatgtcaaaaaatgttttgagcctagtatcaaagctttggtcaaaaaatatgaccccagaaattcctttatttggatctttggtaatggaacccccctgaatacctttctgcctagcaagagtttcaaaaagcttttttgcataagcctcaaactttttgttcaaccctaagcattgggcaaagagagcccgaggaaaatagccctcaggggtagcagtaagcttgtgaaagcgctttttcaccttaacccattctgggccaccattggttttgctgataaacttgagccccgggagagcatgacccactgcagactttgtcctttcaaagggtttgggcgctggttttgaaaatgat

SEQ ID NO: 46642 - DNA, 307 bp, Glycine max
agagagggctttacacgctcttaaatgggactgcgacgagtcgactcgccctgggcgcggtgagtccgaacacgtcactcgtgtccaactcgctgggtttcattccatctggtaactcccatgtgaagcagtgaagcaagtgtgccatggccagttccagcgtgtaaagacccagttgcattccggggcaggatctccgacccgacccgaatggaatgaactcaaagttactccctttgaaatccggcacgtgcgggttcagaaaccgcgaaggcttgaacgcttccgcgtcctcccacgcgctctt

SEQ ID NO: 46643 - DNA, 548 bp, Glycine max
ctgtcgccccctttctctctctaaatccctttctctctctacctgactcaaattcgaaattgggaaagaagtggggcgagggcattttggtcatacttgctatgctaaggggaagaagggtgaactcaaagaccagcctgttgcaattaaaatcatttccaaggccaagatgaccactgcaatagcaattgaagatgttcgcagagaggtgaagatattaaaagctctatctggccataaacatctcgtcaaatttcatgatgcttttgaggatgccaacaatgtgtacatagttatggaattgtgtgaaggtggggagcttcttgacagaattttgtcaaggggaggaaagtattctgaggaggatgccaaggttatagttttgcagatcctaagcgtagttgcattttgtcatcttcaaggtgttgtgcaccgtgacttgaaacctgagaatttcctctacacttcgagaagtgaagatgctgacatgaagttgattgattttggtctttctgacttcatccgaccagatgagcgattgaatgaca

SEQ ID NO: 46644 - DNA, 318 bp, Glycine max
aaggcaggaactggataaataacattccaccttcatacaacaaacttgctttacaactgggtagtcaatgatacaccaaccaaaacccaaacatcagggcacgaatgcaactaaaatcactggtgagaaccatcaaattttacactatcaagccatgaaacaactatttcaataaaggggctctgcctaggatcttggtttagggatttacacccaatggcaagcacctccaataactgtttctcatgatccttgtgccaaattactggatcaaaaatttcctgctccttattctcaaatttcatttgatacacccaa

SEQ ID NO: 46645 - DNA, 473 bp, Glycine max
caaaggagggcttcctagataggcaaagcaatgaggccaccaagtccttccatccactttctgctccaaattcttctagtctgtctattgcacagacccagctttgcagtgaaaaagtcatatgtggtgtacttgggagcccactcacacggcccagaattatcctcagttgacttcaatcaagtgacacagtcccaccatgactttctgggatctttcttaggaagttctaatacagccaaagactccatcttttactcgtacacaaggcacatcaatggttttgctgcaactttggacgaagaagtagctgttgagatagctaagcaccccaaagtgttgtcagtgttcgagaaccgtgggagaaagctacacaccactcgatcatgggatttcatggagctagagcataatggggtgatccaatccagctcaatctggaagaaagctagatttggtgagggtgtcatcat

SEQ ID NO: 46646 - DNA, 344 bp, Glycine max
gttttgccagccacatccttaggttcctcagcaagtaaaacaattagaagctatatttttcactcagcaaaagcaccaacagcttcaatttccttcctagggacaacatatggagacactgcaccagttatggcagcattttcttctagaggaccaagttctgtgggccctgatgtgatcaagccagatgtaactgcacctggtgtgaacatcttggctgcttggcctcccacaactagtccaagcatgctcaagagtgacaaaagaagtgtactatttaacatagtctcaggtacctcaatgtcttgtcctcatgttagtggcatagctgcactcattaaatc

SEQ ID NO: 46647 - DNA, 419 bp, Glycine max
gtaacttatatttgtatcagacaaattacaatttacattcttcatcagtgctttatgtaatagaaaattttcagttttatgcacgtctcttgcctcctttactggcagttttgtagtccacagggtagacgagcatctaaatggaagatagatgcaaatgatatgcaaaagcagaaaataaaacttatgatctttttttacatgattatgctattgctgttgaccctttgctaggacaaagcagtacgcgacttcgatattctccaagagcccatattggaaagatatttctgtatgcagagtaactgatagtacaatgcttgttgaagactcccgtgatttcctgttggggaaactccccgttttccatttgtgaattgatcaaaaccttggctgcacgatgtaatggggttggatct

SEQ ID NO: 46648 - DNA, 461 bp, Glycine max
  unsure (1)..(461): unsure at all n locations
caaggacacaaccacctttagtatatcccctcccatgtccaccaccacttcttccttcctgtcatccatcaccgccgacggcagcgtctctgacggcaagatcggccccgccatcctcgccgccggcaagcctcctctctcctcatcccaccgganaaggtgtcacgacgccactctctccgccggaaaagcctcttcctccgctcactgccattgctccaagagaaggaaatctcgtgtgaaacgaatgatacgtgtgccggcgataagttcgaagattgccgatatcccagcggacgagtactcgtggagaaagtatggtcaaaaaccaatcaagggatcaccttacccacgagggtattataagtgcagtagcgtgagagggtgtccggcgaggaagcacgtggagcgagcccaggatgaccccaacatgctcatcgttacctacgagggagagcacc

SEQ ID NO: 46649 - DNA, 374 bp, Glycine max
aaactcttcaaatttccttcccttttctgtgccttattttctcttcactggtcaaaagatttctgggatttttgctaatttggtgcaaatctgattcccctttgacaaaccctcctcatctcttggcttattgacaactactataatttcaagttgctttttttttcccccttttttctagctgcttttttgggccttcaaatcttgcttggagaaggctcaattttggtggaaacctctcacacaagaaagcatagtttcttttgggttcattctacttggtgtttagagatggtgagaggaaagactcagctgaggcgcatagagaacgccacaagcaggcaagtcaccttttcaaagcggcgtaatgggtt

SEQ ID NO: 46650 - DNA, 399 bp, Glycine max
cacttaatatacttccttcccaccttagtcagatttacaactgttttccaaactgagtcaaacttaggattgaaaaaaacacctaagctctaagatgctggaaaagatggatgatggagaaatctcaaatgctttccctcaccagaacccttcaactgctgcatctaacaatcagcctcctactttgaagaggaagagaaacctccctggaaatccagatcccgaagctgaagtcatagtcctatcaccgaagactctaatggccacaaacagattcgtgtgtgaaatctgtctcaagggtttccaaagggaccaaaaccttcaactccatcgcagagggcacaaccttccttggaagctgaagcaaagaacaaccaaagaagtaaggaagcgagttta

SEQ ID NO: 46651 - DNA, 448 bp, Glycine max
gatctgaaaataaatcacatattctttcatatatcttcatatatatggacataatagaaaaacagaaaaaaaaaagaaaaagaaaaagagagcagcaaacaagaggtcatccctaaacaatacatcaatcttaattcgaatcccctattttctttttcttaagactatttcaaacaacaaagtgaaagtcttatgacaattcttttcttttgtcagcaatcttcactaattgatcataattatattctcaatagaaaaatactaagttcaggtcccccattaccatcaggattcaacatgtaaaacgcctccgagtcacggctccccacgactcgctcaaacctcgccctcatgtacatcaactcaccctccgacccaccgccggcggcggcggaggccgcctttccgtcctccaggagagggatgaccccggcaccgacggacacgc

SEQ ID NO: 46652 - DNA, 337 bp, Glycine max
gggaaatctgattgcaagaaatggttcaggaagctattcatcatcttggtcgaagttggtggctgacttgtatcctttctcgatcagaacatggacatgcacctactgcaatatggagcagcctccacgagcaaaacattgtcatgattgtgacaagtgtgttcttcagtttgatcatcattgtgtttggcttggtaactgcattggccagggtaatcactgtaaattttggtggtacctttttgaagagacagcattgtgcctttggactggtgtcttgtatatttcatacctgaaggctcacattacaaggggttggtggcaggatgcgatcatg

SEQ ID NO: 46653 - DNA, 328 bp, Glycine max
gcaactttgtggcaagtggctatccaccctcatttcagtcactgcttcatgctatcttatattttcaaggatatgggggaaacacgttttctcaaaaattgtaccttcttgatggcgattcttactttgctttctagctttctcttgaaccatgtcatggctagtgtttacactgttggtgaccaagaagaatggagtagccaaacaaattatgcttcatgggcagagagatacaattttagccaaggcgatgttcttgttttcaagtacgtgaaagggcaacataatgtttatgaagtgacagaagacacgttccgatcgtgtgatg

SEQ ID NO: 46654 - DNA, 247 bp, Glycine max
gacccgaataatgatacatacattcaattcaattggggaccaggtgagagcgagagcatgcccaaaatgataattaaatttacttaaaagaaaactttaggatcattaaccatccaaccaaagatcaacggccaccgattcaacaggaaagaaaacacaaaggagggaaaaccttacacagaaaaagattccggagaaattcaataatacacatttttttttttttattatttcatttttccccttt

SEQ ID NO: 46655 - DNA, 502 bp, Glycine max
  unsure (1)..(502): unsure at all n locations
cgcttctctcaccatccccatttcgcgttggtgcaaagcatccttcgtttcaatttctctctctcagcgctttctgcaatcgaacctttcatctccaaagggatccacaggccgaaggagaaatggggctgacattcacaacgcttttcagacggctcttcgcgaagaaggaaatgcgaattctgatgggtggcctagctgctaggaggttctactattctagtaacctctgccaaccaacaaaacaagcctgaaaataaaatagagatgctgcctccttgctggcgatcgttcgggaagaaacagtaatgctactgacatgggaaagaagggagttggttttctgcaatcaaagagttttcacacaccactccaaagggaaggattcagataataacaaaggcacanaagagaagaagaaaagtctaggaaaactaaagcatggagaggccaattcattcatccccctcttcagagagccaagtagcattgagaaaatctt

SEQ ID NO: 46656 - DNA, 283 bp, Glycine max
tttgttttttttttttttttttttttttttttgccagcatacagacgataattatatatcaattccacaaattgataacaaacagcagttacattaatgggacaatacagttcaacacaaaccaaacttatttttaaaggcgattacaaacccattacacatcacattttttgttaaaatgtttgggaaaatgccacattgaacatcacacaaaaatcagctgcatgattaaaaccccccactaagactcaacaccaagtgcaaagttgactccttttggatg

SEQ ID NO: 46657 - DNA, 378 bp, Glycine max
gaaaaaaaggacggacaaatatctactataacaatcaataacaagtacattagcaagtattcaagccaagtacatcagcgagtatataaaaatccaaaaactcgatccccctgcacaagagaaaacatcagaagtccaaaaaagagctaatgctcctccaacaagtaacaccactggtttcagaaaccgagttattcagacctttcattttttgctcgagcaagacactaaatcgcagctaaacataaacatacggtaataatgtgaagacaagctactttgaagtaacaccttaaagagacttcttggcaacgaatacaagaagatcaatgacacgtgagctgtatccccactcgttggcgtaccaagaaacaagct

SEQ ID NO: 46658 - DNA, 410 bp, Glycine max
aatacaataaatcaatctaaatattttcttattaagtgcaacaatatgctgttatcttacaatatataattgagtgaaaaatacaaatatacccaaatcaaacaacttttaaacatcaaataatgcaaaacataagagtaaatccacccttctagttcatgtgatccttaattaagaacttccttctagaaatggatagtcagtataacccacaactggatcaggagtgtagaaggtctccctattgtacttgttgagtggtgcatcaacctcaaacctcttaggcaaatctggattagccaaaaacaaacgaccataagcaacaagatttgccttcttctcagccacagccttgttcccttcttttctatcataacccccagcaacaatgaaagtgccattaaaggcct

SEQ ID NO: 46659 - DNA, 340 bp, Glycine max
cagacagataatgaatgaatcggactgatagaaaagaaattgttggtgatgggtcttggtttgaagatgaagagcctgaggcaccatcccatggccttgaagatacatgagcaagcggggagcaaaagaaagtacactttcattcaggcacatagggcctggctttccaagtttttgatgctgtggatccttctcatggctctaattggctgtttcatctttagtaaaatggatgctgacactaaagtcagaaggaaagaggtgctgggtagcctctgcgatcaaagggctaaaatgctgcaagatcaatttagtgttagtgtcaaccatgttcatgccc

SEQ ID NO: 46660 - DNA, 380 bp, Glycine max
aatggaaaaaaagagagatactttcgaatatatttgtattgccaaattaagtttgagctacatttaacttttagccatcaaatttctaagtatggctctagagagaaatatttagccacatatgtaatggtagaatgtcacaagcctcagtaatatcatttggggggggaagatgatacataaatactacttgagcaaagatagagccattctttaatctttagcaatttgacttatctgaagagagccatttttttgctgccaataaatcaggaagaacaactgcaccagatttccttcattccacagcatttggggtcttaaacctatccaacaatagggcatgcatccctatgctcttagctggctcatagtctttg

SEQ ID NO: 46661 - DNA, 320 bp, Glycine max
gcagaacatgttttttgttccagctgaaaacagagcaaacttttggtatgcaatggattatggcatgtttcgcttctgcatagctgacactgaacatgattggagggaaggatctgaacaatacaaattcattgagcattgtcttgcaacagtagacaggcagaaacaaccctggttgatttttgctgctcaccgagtgcttggatattcctctgattcttggtatggtgtggaaggttcatttgaagagccaatgggaagagaaagctctgcaaagactttggcagaaatataagtagatattgcattttatggccatg

SEQ ID NO: 46662 - DNA, 437 bp, Glycine max
cagactgtatttgtttactttcattaggtttaaataattatagtagctcagaacatgccctccacgatgaagcttcacttcccctttcccttatccaagagaacacatattgaataattatggtacaaggtgttcctagtacaagaaaactagattagaaagtaaaaacatgtccaccctggccacaattcaagcatagagcacttgacaagtacaaggtgagaattcgcggaaagcagacggcgcctccacaacctcccacgtcacactaacctcaaaatcacctttccctgggattctatcactcttcatctttccaattgcaacgtttaaattgtacgatgccacgtagattctgttgtccaaacccgtcgccaaaaacggactctttataacgtccctcggaaagctccctcctttcacgtagcgccacgtgt

SEQ ID NO: 46663 - DNA, 372 bp, Glycine max
attttagcttgtgtttgagctccccaatcatttccacacttgtacattttctccttgttgcttctttgttttgtcctgtttgttcctcagatattggcaatattggcaacaccccagttgccaatcagactttcaagccgcaagaagaggctcacaagatgaacatcataagaactcgtcttcaacagatcaacaagcccgccgttaagacaattcagagtcctgatggtgatgtaatagactgtgtggtgtctcatcagcaaccagcttttgatcatccaatgttgaagggacacaaaccactggatcctccagaaaggcctaaaggccataaccaaatggacatgagtgagaattttcagttatggacca

SEQ ID NO: 46664 - DNA, 461 bp, Glycine max
ctcgagccgaatcggctcgagcttgctttcttcttctttgacccttcttagtctttctttattttttttcttcttcttctactactactactaccaccttacttggtaactttcaattaaagtactacctctgaaagagggtctcaggtttttgtaacgatgctggccattgggggacatggcactagtatccgcacaagctctacttgcactgctttgctcagagaacttgagcaaatatggaacgatattggggagaccgaagtggagaaagatcgaatgctgatggaattggagagggaatgcttagaagtatacaggagaaaggttgatgaggctgttaacaccaaagcacgctttcataaacagttgccgccaaggaagcagagcttgcaacactaatggctgcgcttggcgaacacgatattcattcaccgattaagacggagaagcgatcagta

SEQ ID NO: 46665 - DNA, 420 bp, Glycine max
  unsure (1)..(420): unsure at all n locations
gagactccaaaattggctggactattaccagcttaagtttgagagacatcctgaccggaggccaactgtcaagactggaattttagggctttggggtgggaaagttgatgctatcgagcactacaaacattcaattaaggaacttgataagatgatgacattggaacgccagaaaattataaaagatcccaaatctattttgccagttgcttttctttcattcaaatcccgatggggagcatcagtttgtgcgcaaacccaacaaagcaagaatcctacactctggctgactgattgggccccagagccacgtgatgtatattggcggaacttggccataccatttgtttctttaaacattcgaaagcttataatatcattgtcntgtgtttgccttggtatttttctacatgattccca

SEQ ID NO: 46666 - DNA, 450 bp, Glycine max
tgggatcagtgagttttgtgattcattttgtgccacttatgtgagatacgtgaagtgcagaatggagaatgcgagaataagccagtggttgatccttctggtgtgtgcgctgctgttgctgatatcagaagcttcttatgtgccaatcactattgttcagaacgcggtagcaaaaggagctgtttgtttggatgggagtccaccagcttatcattttgataggggatttggatcagggattaacaattggttggttgcatttgagggaggaggatggtgcaacaatgtcactacttgccttgctcgcaagaccaatcgtttaggttcatctaagcaaatggccaagctaattgccttttcaggaattttgaataacagggaaatgtttaatccagatttctacaactggaacagaatcaaggttaggtattgtgacggttcatcatttac

SEQ ID NO: 46667 - DNA, 411 bp, Glycine max
agaaagaatataatagtactaatttttattaagattaaatgatagtactaaacaatgatggaggtgcgcccggcacacaattaagtttagtgcagtggcggcatttccttgtaattttggtggcctaataataaaattggagatcatattttcttattcaatcccatgctaaccaataactaataagtgtgtgtggtttttataaaaatgatagaaataaatgtgtgctagattttgatgaaatgaatatttctatactcctggatggtcgtcttgtggatcgaaaacacggttgtgacaagtggggttgcaagggtaagggcaatctatctgatggaaaggccttctttcataaaaccaatctgctacagcctttgcaattgatgtctttttcagctctggagagtcact

SEQ ID NO: 46668 - DNA, 458 bp, Glycine max
gggatgagaagatttggaaatatcttgattaagtgatatacaaaaagctattttctaggtgcatttccataggctacaatttctttttaaaaaaaaacagcacccaaaagaacttcaccacaccattttggtcccccacacgtcacttttgaccatgtcctacaacaatagatacttcaagtaagaagttttttatgccttcagctaaggaaaaaaaggatcacaatgctaagagctctcaaagacttttaaaaatctgctacactgatctcaacgtgcttctgcagatgcaatctcaatctctgcccaccaaagtggagaaagttttggaaccgcagattcaggtgatatttttgttatctctctcaggctctcactcacatctttcattgatggtctcttctgtggatcagggtggacacaagatgtaatcaatgatgcaacttgttccagctgat

SEQ ID NO: 46669 - DNA, 480 bp, Glycine max
  unsure (1)..(480): unsure at all n locations
gtaaaatccaacggattttcctatgctatagttgtagtaggagagcatccgtatgctgaaatgcatggtgataacatgaacttgacaatcccagaccatggtcctgagaccataacaaatgtctgtggagcaataaaatgtgtggttatcattatttctggccgtcctgtcgttattgaaccatatgttggttcaatagatgcactagttgctgcatggcttccaggtagtgaaggccaaggtgttgctgatgttttatttggtgactatggtttcacaggaaagcttccaaggacatggttcaaaactgttgatcaactcccaatgaatgttgaagatcctcactatgatcctctcttccatttgggtttggtctttctaccaaaccaactaagggcttttatctgagtagntatcatcttcatctctctctctctctctctctatatatatatatatatttaatgtacaaatgaaaac

SEQ ID NO: 46670 - DNA, 390 bp, Glycine max
aggatatatatacttctctgtggctgctctttctcacctaacatttgtggttggccaaatattgcaaaactcatggatggccgctagtgttgacaatcctcaagtcagcactttgcaattgattcttgtttacttgctgattggagttatttcaacactattcttgttgatgagaagtctttttgtagttgctttgggccttcaatcatcaaagtctttgttttcacagttactgaactccctttttcgtgcccccatgtcattttatgactccactcctttaggaaggatacttagtagggtctcctcagatctcagcattgtggaccttgatgtcccatttggctttgtttttgctgtgggagccactatgaattgctatgctaatct

SEQ ID NO: 46671 - DNA, 401 bp, Glycine max
attcattctcatctttctctcttctctctccacccaaaccctaactcccgaccctgttcccctctcgtatccgtcatgaaaggaggaaagtccaagaccgaatctaagagagccgatcccaaacttgctgtgaataagaagggagccgccaccaaggctaggaaacccgccggcaaggggaaggcagcgaaagaccctaacaagccaaagaggcctgcaagtgctttcttcgttttcatggaggagttcaggaaggtattcaacaaagaacatcctgaaaacaaagcagtgtctgctgtgggcaaagctgctggagcaaaatggaagaccatgtctgatgctgaaaaagcaccttatgtggcaaagtctgagaaaaggaaagtggagtacgagaagaacat

SEQ ID NO: 46672 - DNA, 391 bp, Glycine max
atattcaactctgtttttatttaaattataaataaaattacatttcaaatcatcattcatatgaatttacattatttaataaattttattgttaaactcaataagcacacactcactctttaccatgcatacccacccgaaagagtgcattcccatgttcgattcacaacctgaagcggttcaaggaagattttccatcaagggcctttgcatagtagtatgccacgaaatcttttatggtagtgtctctgtacattggcggattttcttctgaaattagttccttaattggaccatataacttctgtaaaccttcaactgggtcatccgaatgtccaaagaaggtcccaaagaagcttgctacagaaattcttgggcatgtcttctttga

SEQ ID NO: 46673 - DNA, 418 bp, Glycine max
  unsure (1)..(418): unsure at all n locations
cctgaagaagcaagagagcttgacaaggaggttagacagattgtaaaggagaaagaagaatctgttcgcaatcaagactttgagaaggtaatatgctttaatctataagatttagttcataaaattttatggacaccaaaccaaaccatgagacaatgttatattcaagtttaaaaaagagtgtagtggtttgtttgttgttcaattaaaacaattatatctgcaaattattttggctattagcgggctgatgatgattcatgagtttatgagtttctgtgtaggccggagagctaagagantaaagaaatggatcttaaggcgcagatatctgcacttatagaaaaaggcaaggagatgagtaaggcanaaagtgaggcaggagatgaaggtcccatggtcactgaagttgacatac

SEQ ID NO: 46674 - DNA, 358 bp, Glycine max
acatcccacccaaacccagctgggttcattatgttatggggggctgaaaccaccaccattcagttaaaagcttgactgatgtccattgacaactaaaaacaaactatgggtatgtttttttaaccaattgaaggacgaagaaaaaaaaagaaggtccgcctcaactaactaagacattttttagtgaatctggggcaccactactaccgttgagcacaatcactttaccctcagaatcagaatcaactttacctgagtcaccctccttaatgtttttagcaagcatttttttagccatgctatcctccaaaagttgcattatggctttttttagaggcctaaccccataactaggatt

SEQ ID NO: 46675 - DNA, 156 bp, Glycine max
gaacacaaattgaatttgctgcgtttattactaataattatcggaaacacaacacctgggtacaactcacaaatgccactatgaatcaaaaagcaagcatacacgaccatattaatctatgaacaaatgagttaaagagatcactaaaaaaggact

SEQ ID NO: 46676 - DNA, 432 bp, Glycine max
aagcctcccagtggaaagtttcctatcatcaaaatctgtgttcttatattcattattatcttgtatgcagagagtttcaagttcctttcttccggttccattttcaatttcaaaccatgtcctacaaatagtaccaagcctaaatccaacgataacaagatacaagaggtggttcctaatgattcactatggtttcatgatggattcgtttatgaccctgaggagtgcgattttacaaatggaaaatgggtgtttaacagttcaataaagcctttgtattcagacacaacttgtccatacataagtagaccttattcttgtgtcaacaatgggagggtagattctgactaccgttattgggaatggcagccagaagattgcaccttgcccaagtttaatccaaagctagctcttaaaaagcttcaaggaaag

SEQ ID NO: 46677 - DNA, 469 bp, Glycine max
gataatatgggcttagtctgcagcataagtcgtcgttttcgtgaagctgatgctgaagaaaatgctcaggatgcagaaattgaaagaagaatcgagttagaaacaaaggctgaaaagcatattcagaaacttttactactaggtgctggagagtctgggaagtctacaatatttaagcagataaaacttttgtttcaaactggctttgatgaggctgagctaaaaagctacataccagtcgttcatgctaatgtgtatcagacaataaaagtatgcaatacttgaaagggtactgcatgatgggtcgaaagagttggcgcagaatgactttgattcttcaaagtatgtaatatctaatgaaaaccaggacattggtgaaaagctctcataaattggaggcaggctggattacccgcgtcttaccaaagagcttgcacaggaaatagagactctgtgggaggatgctgca

SEQ ID NO: 46678 - DNA, 464 bp, Glycine max
gcatatattgacgattgatctggttagttatagattgcattgataactaggaaatattttccacataacaaactttggagaacaagattggtagaattgtgaattgtgtgtggtatcatcatcttgctaagaatgatctctacattcgatatgacaatcattcatgcaaatcaacgttggagtaggtttgcattgattattgcaatctgcctggcctcaaatcacaatcatgctgatttttgctgaatctttagtatctcaatacaatgtagccagctgcttctcatattcttaatcaaggcagctgctacctaagaggtgtatccactttaagacacactaatcatcggtgccgaagtatcgatcaccaaattcccccaatccagggataacacgatactcttcatttatttcaatgtcaatctcagatgtgacaatcttcaatgatggaaaccttttgcaca

SEQ ID NO: 46679 - DNA, 432 bp, Glycine max
actacatcattggatcatttatatgaacattaacattaacatatatcatatatacatatcacatagattcaaccattgccgtccgaaaaaccctattgatctatacacatccatgcatatcaattccaaacacgggcttgaatctaagtccatgacacccgaatttgaaacaaaaaaaccggaagacacaacccattttaactttaaaaaaagaagaagaaagaaaaagaaatagagaagaaataatgatatcgttaaacacttaacagttaacagtgttgtgcagtgttttcacagtttttggttctgttctcagcaatctgagccagcgactgcaagttacaacgtacgatcgtgtcgacgaacacgcatgtttcctccttagtgttaccctgtggtgcgtcaacgacgtatgactcgatgacaagtgtc

SEQ ID NO: 46680 - DNA, 444 bp, Glycine max
  unsure (1)..(444): unsure at all n locations
ctggatctctctctctctctgtctctgcaatggagtttcgcgtttccgtcatttggagccttctcctcattgtctctttattctctcctgaaatcaagggtgaggcttctggttccgtcttcttcgtcgatagctccagtaatcaattccttcgcgctagatcatccaacgatgagcaaccttcaatgttgcttcaagaagttggtgctgctgtgtcagtcttgcttggttttgcacctccttccaccttttctgctgccagctcatccaagttgaatgaggttctaattcctaacccattcaagaggccccgtgctgtgtttttgctggaagtaaatggaatcaatggtctctggccttgtattaaatagaataatcaatttctatattatgttctctgtnttcgaaaaagataacagtaatggattatgaatgcagctcttg

SEQ ID NO: 46681 - DNA, 412 bp, Glycine max
gtataataattgaaacaataatttataataaaataacagtataaaacagtgcatcacattaaactcaaattagaatgtatgggtatatataatatactttcacttatatttgttacaacattgtcaaaaatatttgattccaagtatctggaactccaggcaaacaccaatgaatgcaatctgcatttcttggattggccttttcctcctcagtcaatagctttcccccggtttcagtgtaaacagaggaatgtgcatcaatcctatactctgagatttgtgttatgttgataaatgtcactggaactttcattttcttcaccactttttccaccacgctcatcatgcccttattagagccacttccccaatgattctttttccctattggctttgtctcgttgaaacattt

SEQ ID NO: 46682 - DNA, 274 bp, Glycine max
agcagcactaaggggaatttgcgttttgaaacataacacatcaatggcctgcctgatttgtgtggtaactgactctttcaaggccgaatggtggggccttctaggaaccaaacaaaacaaatcaaaggggatgtgagaacaaaacttgagcactaacttttagggctgcaaccatattcatgctatcctgatagtaataaaaaaaaggaaaatacaaggaataaatgtcctaaacaaacttaaccagtgttctgcatgccagtagcaataccct

SEQ ID NO: 46683 - DNA, 464 bp, Glycine max
cacacttctctctctctctctcactgattccttctccacacacacctcatgatcaaaactctgtcgctttccttcaacctcattgtaagatttatgatttctttatgaatctggtgagacatagagaaaggttctccttttgtttccatttcaatgcaagcttgagacattcattcataggggactgagaagagatgggatgttcacattcaaggttggatgatgaagaggcagttcggccttgtaaagacagaaagaagttcatcagacaagctgttgaacaaagaactcaatttgccacgggacacatagcatacatagaatctcttaaaagggtttcagctgcacttcgcaattacattgaaggcgatgagcctcgcgagttctcattagacacagtcatcaccccacctttcacgcctgtgaagaggaaaactggctcaggattcattcccatatcagca

SEQ ID NO: 46684 - DNA, 363 bp, Glycine max
gtttaggcggggcggcgagggtgctagacgtgaacctattccgggcggcgaccgcggaggatggcgacgacggcacgtcgttgtcgtcgtcgccaaacagcgcggtgtcaccgtttcagatggatttctgcaccaggaactgtaatgcagagttcggaggcagaaacaagagagagcagcaagaggctgagggtagagcgagtgatgacgatgaaaatggctccacgaggaagaaactcaggctctctaaggaacaatcagcttttcttgaagaaagtttcaaagaacacaccactctcaatcccaagcaaaaacttgctttggcaaaacagttaaatcttcgtcctcgtcaagtggaggttt

SEQ ID NO: 46685 - DNA, 418 bp, Glycine max
cacacacagcattggcaactgctatgaataagattggagggaaatcgaacacaggtgagggaggtgagcagccatctcgtatggagcctctttctgatggctcaaagaacccgaaaaggagtgctattaagcaggttgctagtgggagatttggagttacaagttactatcttacaaatgctgatgaattgcagataaagatggcccagggagcaaaacctggtgagggtggcgaacttcccggccacaaggttgtaggagacattgctgtcacaaggaattcaacccctggtgtaggacttatcagcccacctcctcatcatgatatttactccattgaagatcttgcccaactaattcatgatctaaagaatgccaaccctgctgctcgagttagtgtgaagttggtatctgaagc

SEQ ID NO: 46686 - DNA, 274 bp, Glycine max
cattcatccatatcccactccattacagcacagcacttctggattggacaaaactacccctatgagtatcagtgtccgatcatggcacgcattcatattatttctcaatccttcatcctttccatttcgcaccaacctccatggcttctctggcgttgctccgcagaaccacgctctcccactcgcacgtgcgtacacgagccttctctgaggggaagagcagcaacagacaccgcatcgagaagattctagtagccaaccgcggtgaaatcgc

SEQ ID NO: 46687 - DNA, 331 bp, Glycine max
ggcccaacaaacatttgcccactaataataaacaaattactattttttacggtaaatggccccatactacaaagggtaataatttcccaatccctgaacaatgttttttaacaaaaggatcgcccccaaataaaaacaacccaactccaattattatcaccccgtccagcaaaatacattcaaaagctttttaaaaatttgaggaacccacaggggccctttaaaaaccctgcccattaaatttatgaaaaaaattttatgggcaccgggcctttccaacaatcccaaaaacgttgtttaggttttagcaaacccaactctaaaaagcttt

SEQ ID NO: 46688 - DNA, 367 bp, Glycine max
gaagatgggatggagtcgtggtcgctcaatcaaggattcacattctgaggcactgtatgatgctagaagacaggcccgtagagctttcttagcattttcttctgatgatccaaaattgaagattactgggtctgagcccattgagggtgatgttgaaatttttcctgaggagcctgtgaatggcgatgctcagttttctaagagcacaccggtttacgtactcaacccaaagcaagacctgcatggattaggttttgatccttataagcatgctcctgagtttagagagaaaaaaagatcacgcttagccagcaaggggggaggacctggctatagcaaaaacttctccaccagagacagtcttttt

SEQ ID NO: 46689 - DNA, 464 bp, Glycine max
gttaaggcttgtcattcattaatcaagccaggggacaattggaacaataacagccatttaatggcaagagatgaaatgaaaaggaagaaataaaaggcccattgaagcaacaactttctttctttctttcattgagactattcattagttatttggattgtatcaggtgtgggaagatcctttatttgcatttgtttgtacatccagtggcgattctccagcgtgacttggccgccaagagagcgaataacagacccaccactgcatgctcccactttgcagcactcttcaagagacagacctttgatcactccatacaaaaatccacttgcaaaaagatcccctgcccctgttgcatcaattgccttggcttcgcctatggccgggacccgtgcaatctcgtttccatgtttagcaatgcatccattaggacccagggttactacggcccattggcagtattt

SEQ ID NO: 46690 - DNA, 362 bp, Glycine max
  unsure (1)..(362): unsure at all n locations
gcaaaatcctgtatgagtgagacataaccattctttggattgaagtaccctgcagggacaccaatggcattggtgatagtgaacaaggttttgagtaggataaagaagccagtgcatttcctagatgtgactacactctcacagtacaggaaagatgcacatccagaaggctacagtggggttatgccaactgattgcagccattggtgtcttccaggactgccagatacatggaatgtgcttctgcatgcggctctatttgactgaaggaaaggaagcagctagctnnntgacctcgcaaactttgtttattagaggaaaaccaattgttttctaatgtaggaaatatttaatttggcatt

SEQ ID NO: 46691 - DNA, 113 bp, Glycine max
ttgtgaaagatgctgcggtgtacatagcggttcggttcttgattgggttggcgatggcgacgtttgtgtcgtgccaatactggatgagcacgatgttcaacagtttgattata

SEQ ID NO: 46692 - DNA, 333 bp, Glycine max
atacaaagtagattgctagctatcaaaggaaaagctaactagcatctgtgctttgggtggaggcagagaaaattcaaggaggtggatcatggccatgatgtggataagaatcatacttctagtagcggtttgcatgctttctctttcagtggaagccatggttcgccactacaagttcaacgtggtggtaaagaatgtcacaagattgtgttcaacaaagcccatcgtaaccgtaaatgggaagtttcctggccccacaatatatgctagggaagatgacactgttttggtgaaggtggttaaccatgtttaatacaatgttagcatccactg

SEQ ID NO: 46693 - DNA, 355 bp, Glycine max
cagggaagaagcatcggaaatgggtggttacttcatcttgaatggtcttgagagagttatccgactgttaattttgccaaaacggaatcatccaatgagtatggtgcggaattcatttaatgaccgacgggaaggatatacagataaagcaattgtaataaggtgtgtaagagctgaccaatcctcattatcagtaagattgtattaccttcgtaatgggagcgcaagacttggtttctggttaagaggaagggagtacttgcttcctgtgggcattattttgaaggccctcattgacacaactgaccgtgaaatttatgtaaatttgacaagctgctataatgagaagtatgaa

SEQ ID NO: 46694 - DNA, 360 bp, Glycine max
gttattccaaggaaaaaccaaatgatgctgatgtttttcgtttgcttggagaagtggagtacgaactccaagattatgaagggagtgttgccgcatataaaagctcagcaagggtgtccaaagatatccaattagaagttctccgcggcctttccaattcattacttgctgccaaaaagcaagaggaggctgttcaattacttttggcctatcgcgagcatctgagttcagaaaacttgagcaaaaattctgatggcaacccaacagactcacaaaagctggatccagtccaagttgaattacttctagggaaagcctactcatattggggccatgtcagtgatgctgtaactggttatg

SEQ ID NO: 46695 - DNA, 328 bp, Glycine max
ggcattctgtgttctcttttattctaaactcgaaacactcttagacaaagaggcggaggaaaatgccgattgctctaattgccattgggaatacttcagaggtcaaccaatctgatgcacttaaggctgcactagctgagttcatgacaatgctcatctttgattctgccggggaaggctctgggatggcttataataagctgccaaacaatggttcagcaacaccagcatggttagtggcaggatcactgtcacatgccttagcgctttttgttgcggtctctgtcggagccaacatttctggcagtcatgtaaaccctgctgtcac

SEQ ID NO: 46696 - DNA, 253 bp, Glycine max
aggggcaaggggcatgataataataataagtctaacattaaaggtgcatgaaaagagaaatacatgatgcataagggggttcatgttactgggatgctccggtacaaagaaggctattctccaagcagtgaagggagtagccccagcttttttgataagctcatacaccaaaggcattatgagctgggtgggtccaccacccatgttcccccaccccgcagcagttccattcgcaagccctataatcttactg

SEQ ID NO: 46697 - DNA, 389 bp, Glycine max
agaatggctcccaagggtttaacctttctggctgtgttaatatgcgtttcagcactgtcactgagtccttctgttgcgggggaagggcaaaataatggccttgttatgaacttctacaaggaatcatgccctcaggctgaagacatcatcacagaacaagtcaagcttctctacaagcgccacaagaacactgctttctcctggctcaggaacatcttccatgactgtgctgttcagagttgtgatgcttcactgttgctggactccacaagaaggagcttgtctgagaaggaaacagatagaagctttgggttgagaaatttcaggtacattgagaccatcaaagaagctttggaaagagaatgccctggagttgtttcatgtgctga

SEQ ID NO: 46698 - DNA, 379 bp, Glycine max
ctaaaatgaattttttttataaaaacaaaaatatataggaatattatggggcaggcatgatatttacaagctaggtaatagtaatttcatcagtagagtttgtacataactctttggaagatgcttttctgagtaaaatttctctttccacatagaatgctggttttcgaggcaagggaactactacactttcatttgttaacattgaaattatttgagacattgggggtcgatcatttgcatatttttctacgcatatgagaccaatgtgaatgcatcttgtcacttcattgagatcaaacaaatcattaagcgatggatccattaattgtagaggcacaccttgaatccataactcccatgcatgtcctatcaaatt

SEQ ID NO: 46699 - DNA, 414 bp, Glycine max
ctaccgtaaccaaatgaagggtgtggtgtccttctttgaagcagtggcgggtaatggggcaaccggtgtttactcggctctggctttgaaagccatgtcaagacattttaggtgtttgaaggatggaattatggatgaaattgaagccacaagaaaaggcatgggagagaaagaccacgtagtggcagtacccggcacaacaaggggcgaaacaccaaggcttagaatcgttgaccaatcgctgagacaacaaagggcctttcagcaaattagcatcatggaaacccatccttggagaccccaacgtggccttcccgaacgttccgtttctgttcttcgagcttggctttttgagcactttctccatccgtacccaagcgatgttgataaacatatcctagcccgccaagccgg

SEQ ID NO: 46700 - DNA, 452 bp, Glycine max
cttcttctcttgcggctagggttttagcgcagcttcttctagatttaaggaagatgggtgaggaaaaggttcacatcagtattgtggttattggccatgttgactctgggaagtccactaccactggccacctgatctacaagcttggaggcattgacaagcgtgttattgagagatttgagaaggaagctgctgagatgaacaagaggtctttcaagtatgcctgggtgcttgataagcttaaggctgagcgtgaaagaggaatcacaattgatattgccttgtggaagtttgaaaccaccaagtactattgcacagtcattgatgcccctggacacagggatttcatcaagaacatgatcactgggacatcccaagctgactgtgctgttcttatcattgattccactactggtggttttgaagctggaatttcaaaggatggacagact

SEQ ID NO: 46701 - DNA, 447 bp, Glycine max
gcatatgaaaagatttctcaaaatcctcactccccaattattcctttcttcaattagtgagttttattgcactaattgacctttaatttatccacacaacactgtttatattttcttttgtcttgctccaaaatttcaagaaaacagtagcataaagttgaaaaattaaggtacacaagaagatgggagaaagcagtggctcacaatgttccaagacaagtccttctaacattgatgaagatgacgagggtgaaagtgaggccaatgaagatcaaagtaagcaaaacaacaacggaggaagctcaagtaacagcacagtggaagagaatgagaagaagataaggccttatgttagatccaagatgccaaggcttcggtggacacctgatcttcatcttcgctttattcatgcggctcaacgacttggaggacaagagagagcaacac

SEQ ID NO: 46702 - DNA, 465 bp, Glycine max
aaaatcatgattcattcatctagctagttcatgtaggggacagtcatacagaaagagacaagaaacatacataactaagtcagataaatgtaagaatttggttatataaaaaagcatagttttctgacaagtacctcaagatctcactgagaatttgtctcattcatatagtcagatctagagtactggccattattttcccttgttcatcacatcgatcttgttgtgcttccttgatcaacctgctgctaggattagaggatgaggataattgagagcacaatgagagtgataggtttgtgctatcaacttcatggttatttaatgttccttcttcagcatcattaatctttgagtttagttttagtgacagatccaaatcaagggttggatgatctgaagccttccttttcagtgtcttcaattctggttgatttgttgttgggtttataggcatgagatttt

SEQ ID NO: 46703 - DNA, 434 bp, Glycine max
  unsure (1)..(434): unsure at all n locations
gcacactagagagtagagaccgtacagtcctagtcagagagacacacaacactacaccaaaccaacgcacgcttgtacagtgaagtgaagctgtggaaatttccttcgaggaaacaagacaacctcgccgatctcacggaacattctagtagcaaccaacgagaatcttcacttcaaacaaccaaacactaaatcgtttgcatggacttgtacggtcggggtcaggccagaaatggatccaacccggtgaaccagcctgaatggcgctcgccgggcaccgacactggcctcgaagaatcgatgtggcatttaacgctgggtggtggtgaatcttacccggagcgacccggtgtgcccaattgtgtgtattacatgcganaccgtgtgtgcggatatggtagcaggtgtcgttataatcaccctcgcgatcgtgc

SEQ ID NO: 46704 - DNA, 341 bp, Glycine max
gcatacttaacaacagcacatagcgggttactgtctgttcaagctaccatctgggtctctctggggttagcgccttcttgccagaagttaaaatggcccacgaaactttcctattcacatctgaatcagtgaacgaggggcaccctgacaagctctgtgaccagatctccgatgctgtgctcgatgcatgcttggagcaggaccctgacagcaaggttgcctgtgaaacctgcaccaaaaccaacatggtgatggttttcggagagatcacaaccaatgccaacgtggactatgagaagattgtgcgtgacacatgcaagaacattggttgtgtctctgat

SEQ ID NO: 46705 - DNA, 410 bp, Glycine max
acagcacaaagcgggttactgtctgttcaagctaccatctctctctctctttcttagtgcctccttgggagaagttaaaatggcccaagaaactttcctattcacatctgaatcagtgaacgaggggcaccctgacaagctctgtgaccagatctccgatgctgtgctcgatgcatgcttggagcaggaccctgacagcaaggttgcctgtgaaacctgcaccaagaccaacatggtgatggttttcggagagatcacaaccaaggccaacgcggactatgagaagattgtgcgtgacacatgcaggaacattggttttgtctctgatgatgttggtcttgatgctgacaactgcaaggtcctcgtcaacattgagcaacagagtcctgatattgctcaaggtgtgcacg

SEQ ID NO: 46706 - DNA, 420 bp, Glycine max
ctccctctcccacgcgccaccgccagaaagaggattttccatttctgccctccgattgcatgccgctcatccatggatcagtcttctggcctgaatctggaagatctgaaatgggaccattccttcgtcagagaattgcccggcgatccccgccgcgactcctttccccgtgaggttctgcatgcttgttacacccaagtctctccttctgttcaagtacacaatccccaacttgtagccttctcccaaccagttgccgacctacttgatctcgaccataaagagttgccttatgctcagtgctatggcgggcatcaatttggtatgtgggctgggcagctgggtgatggcagggcaatgactctaggggagatactgaattctaactctgaaaggtgggaacttcaacttaaaggagct

SEQ ID NO: 46707 - DNA, 469 bp, Glycine max
gttgaaactgccggaaaacacagcgtcgccggagcgaagatcggaaaacgcaaccggaccacataattagggtttctcgaagaatgccactctgcaggcaccacattcggagcgcgcacgctctggcggatccggagctgcgccgcaccgccgatagcgacgactccgaagtgctcctagaagccgtcgcaatgtccggactcgtcggctttctccgccagctcggcgacctcgctcagtcagttcgcattctctctctctctaacttctctctctaaaaccgcttccgtcgtcgttgcgggggttacgcaattcgagctgcgctcgtggtttgcttgatcgcgattagtttaacagtgtgttgctgggtttgatgaaataaaaaaatttctcgtttaatgcagtgtttaaagtttaattcttgttcagtttaaagttcatggagtttgttaatggagcgtgagttgat

SEQ ID NO: 46708 - DNA, 319 bp, Glycine max
ggtaaaacaaaattttcttccttaagaacaatggattacaaagcagtgttaaacaaaaaaagaaagggtaaatctacatattttcaagaagtctttggcttcgggaaaacttttttctccatgaaattgatgaaacgcttaccatatgtttttggttccaccactgatataatcatagggtcatattgcagtgatttgcaggcatgcttaagtttcttttttacagtgtattcttgcgatatattaattatgcccatgtatagcgaccacaacattaacctcaaaaaggtctacttatgattccttcaccttatccccc

SEQ ID NO: 46709 - DNA, 364 bp, Glycine max
caccaacgtatatatctattaaaagaggtgaatttgaaaatggaagaaaagaacaaacagatttggaaaaagagaattttaatacaaatccaacatgattcagaatacaataaactatagctagctgggggcacttgatacgaataatgggcctatagcttctttattagggaccttcattcacataatttcccagggtatataaaactcttcctaattcatttatattgagctaaccacaccctcctttgattcggatgccacaatacctatatcaagttcagcagatttcttgttaacaaagttacattgttttctgatttctcctttcttcccagttagcacaccaatgtttcccatttta

SEQ ID NO: 46710 - DNA, 441 bp, Glycine max
gtgatcaatatgttcagtatggccttgaaatgttcatttactttcaaataagtttcctttgtttgtggatgtattttgtttcatgtaataatgggttcaacatggtgtctcaactcccagatgaaaaaactgatgctttattgtagttatcagcaagtaaattttttgccatgagttttagggaaattaatggttgagtatactgaggaaatatgcttttatgttcccgatctctaaggtttccttgctacacttctctataacaccactaacattttttttgtctctttaatttacaaaaaggcccaagctggagcagatgttgtcagtcctagtgatatgatggatggtcgggtaggagcactgcgtgcagctctggatgctgaaggctatcagcatgtttctataatgtcctatacagcaaagtatgcaagttctttt

SEQ ID NO: 46711 - DNA, 488 bp, Glycine max
gaatgaatgaaattatttctatgccatcgtttcaattattttgttcaatgggaacaagagaaatacaaactcaaatggacgaagtatgttctgttcagttagaacataacagaaaagaaaaaaagggtggaaaaataacagaacaataaatactcttaagagaaaaaaaaaaacatcagaggattatgaaaatcctctgaacaatatatgtgcaacccaagttgctcacatgtgggcccccaattatgaaaagtcatatgtatgatatcatggtgttgttagtggctgtacgtacatggcctgctacaatggtttctccagaagaaaacgtggtggttcacattttgcagtatagctaaatttagatgagcagtacttcctatgtaccccagttagtttcccattcccagccttctgatgaaaatcagccattaatgttgagcactctaatagccgatcttctgagtaattggagtgccattcacatg

SEQ ID NO: 46712 - DNA, 458 bp, Glycine max
gtgtcttcacttttgactataggaaatagtgggaaaagtacagattgaaaaggataacacctattaccttggtatatctagaatacaacctaatttctcaacattttagttcagataagcatggggaaaaactttctgactacaaaatcgtgttttaagatatcctcagaagaatgactattttgtaatagttcctacaggactagtaatctctgttcttttttcatcaccatcaacaattcaagactttataatatttgaacttagctagtaatctctatgacactctattcaagatctagactcttcttcatactttcataaaccatataagtaatgcttgcagctggcacaactttgaggagattaggaatgagtcccttgtagaaacctctaaaaccttcatccttaagagttttccagaaaacatcagacattcccttgtaagcactagtact

SEQ ID NO: 46713 - DNA, 512 bp, Glycine max
gaagatacaaagtgacgggactgttaaagttgatctagaaaaagatgcacctcttgcatcagaattgttgaagttccaatcttttgaagagtcaacaatgagtggaactattatttctgaatcaaaaaaatcagctccctggttacaaattgtcatacttgtggttggaactagaggcgatgtacaacctttcctggccattgcaaaaaaacttcaggagtatggacattgtgttaggctggcaactcatgctgattttgacacatttgtaaagtctgctggtgtcaatttctatccgttgggtggcgatcctcgagctttggcagaatatatggcgaggaataaaggtataatcccatctggtccaactgaaatatctatccaaagaaagcagctgaaggctattattgattctcttcttccagcatgcatatcacctgatttggaaactggtgttccgtttagagctcaggctattatttccaatcctactgcatgtggacatacacacg

SEQ ID NO: 46714 - DNA, 371 bp, Glycine max
caacatggagcagaagagggcacgtagttgcgatggtttattaatcagcttcattgggcttcttttggaattcgctttcgttgctgcggaggacccttatagattcttcgactggaccattacctacggtgacatttatcccctcggagttaaacaacagggtattcttatcaatggccaattcccaggccctgaaatctattccgttaccaatgacaatttgatcattaacgtacacaataacttgaccgagccgtttcttctatcatggaatggtgttcaacaaaggagaaattcttaccaagatggagtttatggaaccacatgtcccatcccttctgggaagaacttcacctacacactccaagtca

SEQ ID NO: 46715 - DNA, 243 bp, Glycine max
ggcagttgtatggtgatcatcatgatgtgaagaagaaattagagaagccgggattgactgtcgtggatcatatcggccctggaagggttccaaaggctatagaaggagagcaagttgcggcaggatggccggcatggctttcttctgttgctggtgaagctattaagggatggataccacgtagtgcaaatacttttgagaggttacataaaattgggcaaggaacttacagtactgtatata

SEQ ID NO: 46716 - DNA, 385 bp, Glycine max
atcgtttgcagcgtgttatcccttatgtgattgtgatgctttctgattcagcagcaattgtgcgttgtgctgctttggagactttgtgtgacattcttcccttagtgcgggattttcctcccagtgatgcaaaaatatttcctgagtatattcttccaatgctttcaatgcttcctgatgatccagaggaaagtgtgaggatatgctatgccagcaatatagctaagctggcactgactgcttatggattcctgatacactcaatatgcttgagtgaggcaggtgtccttgatgaattgagttcaccacagaagccattgacatcatccactcatagttctggaagattgaagaggataaatggtgatgcccaacttctgcagct

SEQ ID NO: 46717 - DNA, 234 bp, Glycine max
gctaaatggaggaagaaagaaggagaaaagatagaagtgggggatgtactatgtgaaattgaaactgacaaagctacactagaatttgaaagtcttgaagagggatttttggctaagatattggtacctgaaggttcaaaggacgtgcctgttggacaaccaattgcaataacagttgaggatgaaaatgacatccaaaatgttcctgcttccgtggggggtgagactggggtt

SEQ ID NO: 46718 - DNA, 411 bp, Glycine max
atcacgcgcccccactttaaacgatttatttggatcatatatttgcaattggctcggggtttttgcaacccctacattcttgtgtacgtcaagggctaaggtgcaggtgtacgtgaaagctccattcgtgggcaattgatgtattctagtacttgattttcgtctgccttagggctgcttttcctcgtttaagtaagtttattaatcatgactgacatcatgtccgcacctgttgacccacccatgaaacttggtcatgaaattgaatattccgaggatgaaaggaagaaaaagcttggatcgttcaagaaggtggcaatcagcgcctcatctaagtacaagcattcctttgctaagagggggaggaatcacagcagggttatgtctctttctatcgaggatgatcttgat

SEQ ID NO: 46719 - DNA, 351 bp, Glycine max
ttttggtctgtgatttgttgctttggtgagagagtggatatggacgaacggtacgagactttgaaggagcttggttcaaggaacttcggagtggcaaggttggccaaagacaaggagacaggagaacttgttgccatcaaatacatagaaaggggaaaaaagattgatgcgaatgttcaaagggagatagttaaccaccgatctttaaggcatccaaatattatcaggctcaaagagctctcaaaaagcaaaactgtgcagttcatcggatgttattgttgattcataaagaaatccaggtgtaactcaatggcttctgcaatgagttattaccgttggcattaatatgtc

SEQ ID NO: 46720 - DNA, 319 bp, Glycine max
atgaatttgatgtccaaaacaaggtttcactcagctggttactcagccttggccatactttaggctttgcaagagtacgaggaattggccttgtgcatactgagctagtgtctggaatccctgctattttctcccactttgtgaccaacctaccagcattccaccaagtcctggtcttcctatgcatcaagcatgttccagttccacatgttagacctgaggaaaggttcctagttggtcgcgtcggtccaagagaattcagagtctataggtgcatagtgaggtatggataccatgatgtccacaaagatgatgatga

SEQ ID NO: 46721 - DNA, 403 bp, Glycine max
gtttctttactgatgcctatgatctcttctgcatttccctagtcaccaagctactagggaggctatattacacagaaccaggtgcaccaaagccgggaactcttcctccaagagttcaagcttctgtgactggtgttgcactgtgtggcacattagctggccaactattctttggttggcttggtgacaaaatggggagaaaaaaagtctatggactaactcttattctcatggtagtcagctcccttgcctcaggactctcctttgggtcaactgcagagggtgtcatggccacactttgcttcttcaggttctggctaggctttgggattggtggggactaccctctttctgccacaattatgtctgaatatgcaaacaagaagacacgtggcgcattcat

SEQ ID NO: 46722 - DNA, 395 bp, Glycine max
  unsure (1)..(395): unsure at all n locations
gaagagttggaggatttgatgaggtaaggatgaatgtattcttgttggtcaccatgttttaggacaaagttttggaagaaagagtttgtggggagtggacttgagagaaggtttgaggagaagaatttggagggatcaggaagaacagtggattgtgtttgagggaagatgtaagatgtattggattggatgttaaccattgttgctgaaggtggtttaattcgagtttgattatggtgaacaatggttgaatggttatgctatgccatgtggtgtctggctgcatatgagtgatcccatatggtatggttgtagtatgtgtgttggaataagnngggatccattgtaattcttattttcaacttcgttggtagatcatgctcttgcaataagaa

SEQ ID NO: 46723 - DNA, 384 bp, Glycine max
gacgggggacgagattcttccttggttattgaatcaacagtcgtcaccggttcccagattaacaaagacagaattcatctcatctgctatgaaacgccttggtgagcttgaagaaaaggttgacatgctacagtcaaaaccaaatgtgatgccatatgagaaagaggagctgctgaatgcttctgtttatcgtgtggacgcattggaagcggaactgatcgctacaaagaaggctttgtatgaagctttgattagacaagaagaacttctggcatacattgatagtcaggaaagaagcaaattcgagaaaaagaagttttgctgttgaagagataactgtacagaacggagctgttcggcaaaatgatggagatatatattact

SEQ ID NO: 46724 - DNA, 359 bp, Glycine max
gaataaaataaacagtactataaataaaatacactggtgagattttccacagaatgtgtacatttttgtatcaacaatcatgactcaaggaacaaagacttgtacaagcactgccaaaaaaacttaaaccagattcaaatattggcagcaccaaaacttggtttgcacaaaacaagggtctatatttacagcatgctatctgtgagagcaggcaacctgcggaagaaattgatcggtgctcctggcgtcttaccccgaagcatagggtgcctcattaggtaaaatccagatagaataaacaacatctgtggtggtgtcacatacaaaactattgcagtcacaaggcaaaacaccatgaa

SEQ ID NO: 46725 - DNA, 316 bp, Glycine max
attcaacataatcttaatcttatacatgggtataaacgttaacatgtaaatttaaatgtaatattatttgaacattgaaaaattaaattaaataaataccatttaacatttattttatgttggtactatgactagttttagtagtgtccattttctactaacttctttcctgtaagtccacaagatagtgcttctcttgggattttcccaactttgtgaacaccctccgtaaaaatcacacccattcccatgtgcaaatgaggctcaatgtgacaatggaaggcccaaactcctgggttgtcagccttaaacctta

SEQ ID NO: 46726 - DNA, 394 bp, Glycine max
cttgcggctagggttaagcttcatttcttctagatttaaggaagatgggtgaggaaaaggttcacatcagtattgtggtcattggccatgtcgactctgggaaatccactaccactggtcacctgatttacaagcttggaggcattgacaagcgtgttattgagaggtttgagaaggaagctgctgagatgaacaagaggtctttcaagtatgcctgggtgctggacaaacttaaggctgagcgtgaaagaggaatcaccattgatattgctttgtggaagtttgaaacaacaaagtattattgcacagttattgatgcgcctggacatagggatttcattaagaatatgattactgggacattccaagctgactgtgctgttcttatcattga

SEQ ID NO: 46727 - DNA, 410 bp, Glycine max
  unsure (1)..(410): unsure at all n locations
ccgggtgcgacgacgctcacttagtcggcggcgcgccctttttttttttgttttaatggtaatgtactattgcgtgactcatttaaatacggacacacagagtaacggttctctcagatggcgaaaacactaggtcgggtacataactgtaanaatgacaagtacaancttacacacttagcagtccaatcatgagaaacccaaactatacaagatatactgtcagttctgagaagatctgaaaaagaaattcgaagtgagaagccattaattgtcttcttaagttctaatattgctagagacgcaacttccggaccgaacaaaagtctgcatactggtggcacagagaatgtctacttgtgggtctcagttcagcgcaaactttaatggctccgtgcactgggtctgac

SEQ ID NO: 46728 - DNA, 430 bp, Glycine max
cagtcataaatcattcacttcatttcaaaattaaaatcaaattcaaaaaatgatgcatcaagatttaagcagtcataataatatgaaaaggcagatcatttaggcagtcataataataaatatgcgaccccaaaaaaaaacagtattatactaaaataaaattccaaaattcagaaacaaatggaaaacaatcctaagcttcagatttctggtaaacataggtcaatccgcacttgccacagtagtggcggtcgaagtggttggccatgaaggtcccggcgccacattcggcattggggcactccttgcggagcctctggagcttgccggagtcgtcgaccttgtagaactggaggagggcgagcttgaccttcttgtgcttgtgcttgatcttcttgggcttggagtaggtcttcttcttgcgcttctt

SEQ ID NO: 46729 - DNA, 444 bp, Glycine max
ataagcaaaataatgttcctacatcaagccagtgcttccaaatggatttttattatgagggtgagaaacaggattcacaggaaatgccccgtatcctgcatccccaaagggatttgctgggttcatcagcatatgctgctgcagtggctgatatggttggtaatgaaggaatggatttatatgctgttgagcaattgctgccatttgtacggttgacgtgggagggatgctacttgataaagcaaaaggatcttgcacttcaaatggatttggggctggcactacatatactggttgctgcgcagatctatatgctccttcatcatataagctgctaagggtgagagaattcaacccacccgccaactgtctctcattgactgaagaaatattggtacttggagtggagaccagggcaatctcccattcagttggatcaaaatc

SEQ ID NO: 46730 - DNA, 483 bp, Glycine max
ctcttcttctcttgcggctagggttttttcgcatttttcttctagatttaaggaagatgggtaaggaaaaggttcacatcagtattgtggtcattggccatgtcgactctgggaaatccactaccactggtcacctgatttacaagcttggaggcattgacaagcgtgttattgagaggtttgagaaggaagctgctgagatgaacaagaggtctttcaagtatgcctgggtgctggacaaacttaaggctgagcgtgaaagaggaatcaccattgatattgctttgtggaagtttgaaacaacaaagtattattgcacagttattgatgcgcctggacatagggatttcattaagaatatgattactgggacatcccaagctgactgtgctgttcttatcattgattcgaccactggtggttttgaagctggtatttccaaagatggacagactcgtgaacatgctctgctttcattcaccc

SEQ ID NO: 46731 - DNA, 301 bp, Glycine max
ctgaatcgttaattgtgctatctttcttttctcatggggcagcaatcgttgattaacaggttggtggcgcgcggtaacatgatcctggcgcaccacactgatttcaggggaaactttactgaggtgggtttacacttcctgcagatgcttccagactgcgacaacaaattcacctacatacgccgatggacacaccttcaactaccttagctataatggattcacttactgcgatgaggcagtaaagtattgtggtcgccaacttgaaatggcctatcttgaacgcatcatggaggatttt

SEQ ID NO: 46732 - DNA, 373 bp, Glycine max
agaaaatatttttttttgtagtgttgtgatgtcaatcaaataaacagatttataatgtttatattatacaactatatttattaaattacaaaaaaggggtcgagttgtaacaattctaggtgaccaataagacaattattaaaatgatggcaatcacgatggcaagtactattaactttatcttcatgttttgataccacatctttctccttatctggtctccccgctccctgaaaacccccgcctgattgcgaaggtcctcagtttgacccactaaaacgtcaatcttcacttgacgatcaagaacctgatcaatgtttgccctcataacttgttggacttctgaaacctgagctttcacttttgcaagttt

SEQ ID NO: 46733 - DNA, 212 bp, Glycine max
gggttggggggcaatttaggcattgcatatgggtgggggcttatgcccaaacaaaaaaacaaatgtgttcccgtttgacaattggcctgtaaagaacctaacatgcaaaattttttcattcctacctacaaagttttcagcaagggggagggtgagagcaaaaccctcccccccaaaattcaaaattcttaaattttaaaaaaatggaaaca

SEQ ID NO: 46734 - DNA, 459 bp, Glycine max
gttgttgttttatttcattccattcgattcgattcgattcgatgtagcacagtctacctttcaattctgtggcgtctcattgattggtattatgaatctcgaatttgcaggttcaaatataccaattcgtgtatgaggaaaccgagattgatgacctttgataaaaatgctttcgattttcccctgtttctgcactgggatttagttgtttaggagttgaagtccggtaagggtttcagaaaggttgacccagatcgatgggaatttgcaaatgaaggatttttaagaggtgaaaaacaacttttaaaaagtatcagtaggcggaaatctgctcatgtaaatggtagtcaacaaccatctcaagtgcataaatcagctgttagagcatgtgttgaagtggggaaatttgggtttgaggaagaggtggaaagactgaaaagggataagaatgttcttatg

SEQ ID NO: 46735 - DNA, 449 bp, Glycine max
caatccttaaaaaactattttataaaacatatatttctttcatttgacaaaaactcaacaatcattgcgcaagggagcctagatatttctccgtgggaggagccaaaaatctattgcttagaagataaatgcatcacttcactaataaagatttaacagcgtttaaaatgacagaaataatcatatttgagctgttgaactgccaaatactgcgaacattttaacaaacgagcatcagagattggaaaccgaaacagcattcataaactccctgtctgattcaagagcgctcattatatgtggtaaaaggcccacttccaaatcgatgcttccccctccttcacgacctgggtatgatgtcacttttccatcaaatttgttcgcatattcacttcttgccgccactggttttcccattccaaactcattcccatacatgttgaacctgg

SEQ ID NO: 46736 - DNA, 444 bp, Glycine max
aacaaataaatatttaatcatttgcattaaacaattaatacgtaacttaagttcatacaccaataggaatatacaccataaataacactttcaaggcactcaacaagaaattcacaaagacgcatgtcccaacttatataattcatgtcaatctttatttatttcgctttcttgtctgagtgttccttttccattttttcaaagaggcttccatcataaacagctcgaatagtctctttgtgcagtaaaccatccttgtctttgccaagaacatataggatcttccactccgtgtagctagcaagccatccagcgtaatccttaggaactctatttgccacaagcatccccatcaattcatcagatgttaaagaatttgggtgtgttcgagcatgcttgctgaaaatttcttcaaattttgaaagaacaaaccttccttcacta

SEQ ID NO: 46737 - DNA, 379 bp, Glycine max
aaaataagaagtggtatcaattatttaaacctcaaatcaaacaagtggacgaaggcaaagaaaagaaagaaattaacatacatggattataaaatagagcacgaggcacattagtttatatttcatcatcccagagatcagtgacttggggcttggtgggtccgctgatcaaacggctctgatatatttcatctattttgtgatgatcttcttctgtcaatgcccagtcaaagatctgcagattctggttcatcctctccttatcgtagctctttggcacaaatgtcacaccttgttcgtacaaccatctcagactcacctgggctatggatttcccatgagcctctgcaatctttttcagcacatcattctccatcac

SEQ ID NO: 46738 - DNA, 425 bp, Glycine max
aaaaagtaaaaaatttatttgagaagttggggatgcatacaatattaatatatcctaatgcacaccaattctacaactggccttgtaaacatacaaacaaatactattatgtttaacatgtataaccaccacatgcacactgaaattataagtattagatgttgacccaactttaccaaataaaaatactattaataattaaactccaattttagtggcgagtggacgagccttgcacatggcttccaatggaattaaccttgacaaggtaatccaattattctcggtcatatcaagcttttcctcacttactcgtttccagtcaaaacattgaatcaataatcccaaagtaaagctgacactttgcatagccatgggttctcctgggcaagcccttcttcccattccaaatgctaccaactttt

SEQ ID NO: 46739 - DNA, 522 bp, Glycine max
aaatcatcaaccttctacctagtgatgatactgattccaatggagaagccaacccacatagtgattgttccaagtcctggcttcagccatttactttcactcattgaattttccaaaaggctaatccaccactccaatggcttgcaagtcacatgcatgattcccacacttgactcaccctctgaaccctccaaagccatacttcaaactctcccttcaaccattcactccatttttcttccctcaatccacttcaacaaagagacacagactccaatagcagtccaagttcaactcgcagtgactcactctcttcccattatccgtgaggctttgaaaaccataagtttaagctcaaggctagttgccatgtttgctgatatgttcgcaagtgatgctcttatttgtgctaaggaactcaacttgttgtcatttgtttactttccatcatcggccatgacactctctttctgtttttatctaccgaagttggatcaaacatttccttctgaattcaaagac

SEQ ID NO: 46740 - DNA, 319 bp, Glycine max
ctcgtaagcaaatactgagcatttgggataaggctgatttgatcaaggtcagtgatgcggggcttgagttcctcacaggaagtgacaagattgatgatgaatctgctttgtcattgtggcaccccaatttgaagttgctccttgtcactcttggggaacatggtttcagatactacaccaagagtttcaaaggatcggtagatgctttccatgtcaatacagatgatacaactggcgccggcgattcctttgttggtgctttattggccaagattgacgatgatcagtccatgcttgaagatgaaccaaggttaagaga

SEQ ID NO: 46741 - DNA, 366 bp, Glycine max
cctacctaaattttcccaatggcttccatttgaaaatttcttcctcaccaaacccaagtgagggcagttttgatacctttccctgcacaaggccatctcaaccagcttattcatatcttacgcctaatcttatcacacaacataccagtccattatgtttgcactgtcacacacattcgtcaagtcacactacacgactcacaacttcatctccaacattcatttgcatgcactttgaagctctttcctttgtttcccctcctcccaaccctaacaatgaagaaacctattttccagctcatctactttcttcctttgaggtctctttgcatcttctggagcctgagaggaaacttcttcattccc

SEQ ID NO: 46742 - DNA, 132 bp, Glycine max
ttctgagagtgtttggctgaaagcagcatttatgttttttttcgggcaaaagggtcaaaagataaacgggggtatggtggttatgcagaagaatgtgctggatctcaacaggatcaccagtgttggagggat

SEQ ID NO: 46743 - DNA, 287 bp, Glycine max
ttcttgttcatttgggaattgaacaatatttatgatgggtttacgaaggtgtaatagatggtccttatggtgaatttttcatcgcacaggacaaatctcttcaaaaggagagtctcactcaagattatgaagctaagtattggcaacaacggtacagcctcaaagatggaatctctagtttccttgcaaatattgcaggagcaattttgacaacaggaaaatatctaaatgtcatgagagaatgtgggcatactggtcgggcccctccatcagaaaattcaaaacta

SEQ ID NO: 46744 - DNA, 468 bp, Glycine max
ggtcaattacaaacagttgttacttgaacatctcttttaattctttttagagagttcaaaattgaggcagattcatcgtacgaatggtgcagcctacattgcttaaacaatgttaagcagctgtcaaaaaaagaagaagcaatgttaagtaatacaagtgcatttaatcttatattttttgtctcttatttggtgtgcatttagaccaaacatgaaccagaccattcctattgactgtatagacctcattgcgctcttcatcacagaagagagcatctcctggaaagccgtcgctcgcttttattttggcaagacacttgccagttaaaatgttgctgacattaatggaacctgctgcataaaagaaacataaaccatcagtaatgtaccttgaaagatagacactccttatcaaaagattgatatgtgatcacagacacattttaaactactatttatttcatatca

SEQ ID NO: 46745 - DNA, 453 bp, Glycine max
ctctctcctctttcggaggataggaacaggcacaggaccagtgcaccaaatatagggagagagtgaaggaggcagcaggttggtggggttttggtttatttgggtggttctgaattctgatccaatttcacatataaaaatggctggttctcttcaaaaccaacgacaacaacttcttggaattatcaaagaagaagaacaagagaaattgcagaaacagaaagaagagactgaggggaacaacaacaataataacaataacaagagtgacatggctcctacggcagggaattcgatccacaggtcgggttcgaggccgcaacttgatgtgagcaaagctgagattcaagggaatgtggaggagaagtatcccaccattttgttgcctaatcaatctgatgatttgtctcatcttgctcttgacattggaggatctctgataagttggtgtac

SEQ ID NO: 46746 - DNA, 360 bp, Glycine max
ctttctcttccaatctttaattatattagatttgattttccttaatccttcgcctgctttttcattccggatttttctgcatcagtctatttgtagggtgtattcccttgattttgtgtgggtttgagtgagggtgcgtgtgaatgaaaaggaaatttgctggaggtgatgcatttgcatagatgaagacagaaaaagtttggcgtttaggcggcatgggtgatatgcagatactgcctgggtctcgccaccgtcctcccatgaagaagccgaagtggattattggcttggtgttgtttgtctgtgtctttctaatctgtgcttatatctacccaccgcagagcagttcgacctgttatg

SEQ ID NO: 46747 - DNA, 342 bp, Glycine max
gcctctcacagctgtcattttggagattgccctccttgttcaatgcccatagcaaaagaatgtattggtggacatgtagttcttaggaacataccttgtggttcgaaggatattaaatgcaataaactctgtgggaagaccagacagtgtggtttacatgcatgtggcagaacatgtcacctccccccttgtgataatctgtcagctgtgccaggtatccgagcctcttgtgggcaaacatgtggtgctcctaggagagactgccggcatacatgtacagctccttgtcacccttcaactccatgtccagatacaagatgcaaattccctgtcacaattact

SEQ ID NO: 46748 - DNA, 390 bp, Glycine max
gcgttcgtgcttcctgcggcggagtttcttttcagcatacaactcacgccttgaatacggtacggttgttgttgctatatgcccgaccagggagctgacgattcacacccacgccgcagcgaatgagctttttgatgaatcactctgagacgcttgatgtgtcgatcgaccgttccgctaactctgccaaccaacaccgaatcccttaaggtttctttcgcggcaaaggagcttgacgtggcggaatggaaaggggaccttctcgccgttggcgtaacggagaaggacgtcgcgagaaacgtggaatcgagattcgagaacgcgattctgagcgcgttggactccaagctgggcgggttgttgggccacgtctcgtccgaagaggacttc

SEQ ID NO: 46749 - DNA, 323 bp, Glycine max
aatcaatgaaatctcctagatggccgaacttatttacaagatgtgaattgaattaaattgaaaatttgatacattttgtaatggcaagcatgcttttgcattaaacgtagggctaactaaggacagtgaagcctcctccctttatcatttgcctgaactccttgtaattaaccatgccatttccatcaacgtcgactttcatgatcatcttcttgcactcggaaaggggcctcccttgtttgaggccgagggaggccagcactgtccctagttcctcgacggggatgaaaccggcgcggttctggtcaaagacgttaaaggcc

SEQ ID NO: 46750 - DNA, 214 bp, Glycine max
tcggcggcccgcccttttttttttttttttttttttttttcatttaaaaatccattataaattgggagggggaggggatcaataaaaaattacaaaggacaaatcatttcacaaccaattttatggagaataaacagccaacccttgcatttccaaccaacaaacaattgaaggaaacggggctaaggaccaaagcttatttgccctttcttat

SEQ ID NO: 46751 - DNA, 399 bp, Glycine max
acttcaaactcttgtttattttgtcttatgttgggttaggttcccacatccactgtgtgggacctctaaagcacattccatttcgagaaacataacaaccatcacctaaattatctaatataacttggaagacgcccgagcttatgcttattccatgtcttgcaaagcctatttcatattgctaagaatttatcactctgcagtttttcctaatctccccatcagtcccagtcttaatatttatattccccatcttgatcatagaattggcaaagtccccaaagaagagtccactatcgttgctataactttgaactaaaggtttagtggttgaattagcttcatcactagaaaatagaatctggtcagaactgagaagcccctttccactgagcaagt

SEQ ID NO: 46752 - DNA, 365 bp, Glycine max
aaaggggaagggggaagttttctaccaattccacatggttcaaaaaacaattaagatctcccccctccccaaaaaacattgtttggtgggggcccttttacgggaaatgggcctttatatagcttttttattgggaaccttcaatcacatgatttcctaggggatataaaactcttcctaattcattcatattgggctaacccaacccttttttgattcgggtgccccacttcctttatcaagttccccaaattttttgttaacaaaataaccttggtttctgatttccccttttttcccagggagcacaccaatttttcccattttaatcatgggagccgaaaagcttttaaagaaagcttttt

SEQ ID NO: 46753 - DNA, 366 bp, Glycine max
acaccatcaatctcttgctttatgtgtattcaaatgagattaagcaacaaggtacatagttttggaatagcttacaaggcaaaccaggcttattttaaaacagattacatattgtttaaaaataaaaaatacagacagcaggttcacacaactaacacataattaaatattagatactttcataacaactaggagatagacgtggtttaataagaatctcaagtggagtggctttagtgttggttgctctaaagacttcagtcatatcaagaggctcagttgatggatttaagatttcaaaggaatgcaaaaaactagcaagtgtcaaacgaactgtttgaaggcctaagtttattccaggacaaa

SEQ ID NO: 46754 - DNA, 516 bp, Glycine max
  unsure (1)..(516): unsure at all n locations
aaataaaaaactaaacataaattaactcagctgtgggtagcacaagaaattctgcttcttattacaagatctaccagcaaagttggaaattataagaataacaatggaacccacttattccatcgcacatacaacaaccataccatacgggatcactcatatgtagacagacaccacatggcatagcataactaataaaaaaacatggcatagcataaataaccaaacccaaaaaataaatgatacaagattcatccatgaacaagacaagattcttagctatttacaaatgcacaatgcttcctgatctctccttctgtccctgtctttacattaattcttcccattttctccatggaggttgcaaactcagcaaagaaattttcaactgacccttcaagcaattcaatgatttgagcctttgtaactgagttngtcaacaatgcagcatctgacttanatagaccccttctcttaatcacatgactatagtagctaagatcaaatgtcttgcga

SEQ ID NO: 46755 - DNA, 513 bp, Glycine max
  unsure (1)..(513): unsure at all n locations
gcaggcaccgctgactatgcaagagtgcttgtcattggaatggatacatgcttaccggtggatggaatcaccgagagacaaaaccacgtagtgataactgatagaatgtgggctaggcctttatcttcaacaaatcaacccagctttttggattccaagggtgacaatgaagagaagaaggaagaagaagcagcattgaatcagttaccggatggacattgttccaaagacacttctttggctaacaaagaaatcaacagcatttatcccacaacttgctagttgttattattgtcattattacgtgatatatccttttatcatgcgttatacgtagtacataggagctgtcttttttgcccttgtatgtcaataatatggctgtggaacactcagccttacacaatgatgttagtcaatatgttgtgctatgatttgtaagctttccaatgagactggtttatctggaaatgaactntattagtttgaatcaattaattaattatccatgag

SEQ ID NO: 46756 - DNA, 335 bp, Glycine max
gactaaaattcatgtttacattcttatacatgcgaatcagggatgtggcgagtttacaattgagcctgatttcttgtccaccgttggtgatgctgctcatcttgatcatggacttgacgaaggccctttcaaattccttttgcgaatcaacaaagttggaaaccaaagctttagtggtgggatgagtgagcagagcttgatcagaggagaataagctcttttcttggaggagtagcttgttataagcattgtcaaacaaggtggaactagaatccaatgagcttcctgcatttttaacctttgtgtgagaggggcatattgccttggaggcttct

SEQ ID NO: 46757 - DNA, 414 bp, Glycine max
cgattctcgtaacaaaccctacccttttgagtcttccaagttttcaccatcgtaatgggttccgaaggatccagcgtcgtggttcctaggaatttcagattattggaagagcttgagagaggtgagaagggaattggggatggaactgttagctatggaatggatgatgctgatgacatatacatgcaatcttggactgggactatcatcggtccccctagtttgaaattgttttgcagcagggattatccagacaatcctccatctgttagatttcaaacaaggattaacatgacatgtgtcaatcaagaaactggagtggttgagccacatttgtttcctatgcttgctaattggaaacgtgagcgtacaatggaagacattttgattcaattgaagagagaaatgatgtct

SEQ ID NO: 46758 - DNA, 316 bp, Glycine max
  unsure (1)..(316): unsure at all n locations
ctctcccagaccccgcacgcgaaccgggtccagtggaacacctccagttcggcctgcgactcctggttcggcgtccaatgcgactcgaaccgctccttcgtgacttccctccacctccccgccgccggcctcgtgggccccatccctcccaacaccatctcccgcctcacgcgcctccgcgtnctcagcctccgctccaacgcgctcgtgggccccatccccttcgacttcgccaacctcacctccctccgcaacctctacctccagaacaaccacctctcgggcgagttccccacaaccctaactcgcctgactc

SEQ ID NO: 46759 - DNA, 410 bp, Glycine max
gacggaatgaaatgatattatcaactatttaaaagagagccaaaattggagaaaaatgcacattaattagtttttaagcatactaatcaaagacaatgctccccgaaggttcttggccttaataccaatatactccttcacagtcaaggaacgaaaacgaggcaaggaatcaagaaccaaaggagaaaccacatgatccacagggggaccatagaaataagccactgagtatctttcccttgcactattcaccatgacacgatgcaatgcacatctaaaccttgagttggacaagatgtgaagaatgtcaccagtgtgaacaacaaggctgctagggtgagggtgcacagggacccaccctgcccctttcttgaagatttggaggccattggtttggctttggtggagga

SEQ ID NO: 46760 - DNA, 341 bp, Glycine max
gaagtataggattaggaagttttaacataaacgatcagatacaacagaaacacagcataatcactggaacctaattctaattatattgggccacaacacaaataccattttatttatttacaatttccatttttctcttcaattcaaagggctataacaatttttcccccttttgcttgcaaggtctttgtgtcaaataacatcagtgtgtgactctcagataaggcttatgaagcctcaacttgctttggattggattggattccgcaaaccatattagctgggacagctatgtcaatcattttaggatatgacaggttaagatttcccatgatgttctt

SEQ ID NO: 46761 - DNA, 363 bp, Glycine max
ctctaaagctgcgaaggattgtggttgtcgtgaattcgtgacactaaccaggctctttgagcaagattcaggttttcttgtccaggacactgtcatattctctgctgaagttcttatattgaaagagacatcaacaatgcaggatattactgagaacgattccaagttaagcagcagtggctcccaggttgatggtaatgggaaaagaagttcattttcatggaaagtggagaatttcctttcttttaaggaaataatggagacttgaaaaattttcagaaaattctttcaggctggtggatgttaacttcggattggagtattcgagtcgtttgacaccatatgtattcatctagagagtga

SEQ ID NO: 46762 - DNA, 391 bp, Glycine max
aaagcgttcaaaactcgaatttcgaagtcaaaacaccaaatacctatgtcctcaaaatagtattccagaaaatgaagcaaaaataagatgataaccgcagaaattagcggtaacggcggagagacagggtgttgtttctctttcaggttgccctgcgagatggacgtgctttgtggtacagatgtcctctgccacgtaaacccctgttgcttttcccagcagaggtgagcccacgcagctttctgtgcttgtgcactggattggcgagccaattgattctgggatcatttctaatagcagcatgagccacatccaccagaatcacctgaaagtatttataagtggagtcctcattcacccagtaagaattgaggaccctaagtccacccag

SEQ ID NO: 46763 - DNA, 447 bp, Glycine max
gctccagagacgttcgatctctttgatgatatcatcttaatatcggagggtcagatggtttatcagggcccacgtgaccacatcgttgagttctttgaatcttgtggctttagatgtcctgaaagaaagggaaccgctgattttttacaggaggttactttaaggaaagatcaagaacattattgggcaaatagaagcttaccataccggtatattacagtgagcgagtttgcaaatagattcaagcaatttcatgttggaatgcagcttgagaatgagctttctgtgccatatgataaatcaaggggacatagagcagctcttgttttcaagaaatatacagtgcccacaatgggacttcttaaagcatgctgggacaaggaatggctactaataaagaggaatgcttttgtctatgtatttaagacaggtcagatagtcattatt

SEQ ID NO: 46764 - DNA, 439 bp, Glycine max
atcacaacagttacatcgataatgatatcctttattgtgcattaatttatcttgttgagttcaagagcttatggtgttgaacctgcgaatcacttggcatcgtaaaggctttttcatttcgagcgagagctttaggcattctgaaagatccacgggttgcactggaatccatatgaaatggtgaagaagttgtgcaagccatagatgaactgtggctaagcctaatgtttttcctgggcacaccctacgtcctgcaccaaatggtgcaagtcttatgtccgaccccatgatcgacacatcttctttcatgaatctttcgggcttaaaggcccacgggtcctcccaaatggatgagtcatgtgatatagcccacatgttaaccattgcagttgtgccagctggcacgatgaccttgtccacgtggacatcatggattgcg

SEQ ID NO: 46765 - DNA, 492 bp, Glycine max
gaagagggtgatgattgaatttaagggtgaatttgaagaatcagtggtgaccctttgattttgtggctgttggtagctgttattttcatctctttggttattgggatgggtaagaatgatggcaagaaacaacagcaccttcttcttggaggtgttgctgctggtggtagtggtggcagaaccaacatcaatggctttattccctcctttcacactctctctggttacctgaaaattgtttcatcgggtgcttccactgttgctcggtctgctgctgcctcttttgcgtcatcaattttggataaggatgatgatgctgaccgtgatcgggttatttgggctgggtttgacacattagagggcggccatggagaagtcatgcggcaagtacttcttctaggctattggtctggtttccaggtttgggatgttgatgattcaaataatgtccgtgacctagtttccagacaggatggtcctgtttcttttatg

SEQ ID NO: 46766 - DNA, 379 bp, Glycine max
ctcgagccgaatcggctcgagaaacatgaaagcccggttccactccaaaataacatcacttccatgatcaaatgacggctaagtcatcgtgtatggctactgattcgaatttagaaattgtttgtgacatgtatccgaacgtctgctgatgttgtctatctgcgtcaacatggccatcaagttcaggacggcctatgtgtcaccgaattcaagggtttttgctatgggcgagctcgctatggatcctaagctgattgcaaggcggtatttgagatcagagttcttcctagatcttgtcgctacactgcctcttccccagactgtgattcggtttattatgccagcacttagaagctcccatgctgatcataccaacaat

SEQ ID NO: 46767 - DNA, 526 bp, Glycine max
aaatttcaacatgaacaaatggttcataaaacgcatttgacacgaagctaatcgcatcgcgcctcacctccactgctgcatctcagaatcgggacgccgtcttcctcactacatcgtccctattagcacactaggtgatgaacattctgaagccgaagccaaatccgcagcaactattgagggattggcagcgcaggcttcgccaagagtgtcgcaacattgagcgccaaattcgcgagagaagaaaaaaatgtgcagaaggctattagagaagctgcaaagaggaatgacatgggctctgcaaaggcacttgccaaggaacttgtgagatctaggcaaactgtgaaccgcctttatgaaaacaaagcacaaatgaattcaatatcaatgcaccttggagagagtgttgcaattgctcgtactgtgggacatctatcaaagagtgctgaggttatgaagcttgtcaataatctcatgaaggctcctgaaatggcggtgacaatgcaagagttcagcaaagaaatga

SEQ ID NO: 46768 - DNA, 492 bp, Glycine max
  unsure (1)..(492): unsure at all n locations
cagacacggaactcacaggaaaaataccagacttcatagggaattggtctaagcttcaaaccttgagatttcagggcaattcttttaatggctcaataccatcatcattttcaaatttgagttctttaacagaattgagaatcagtggtttatctaatgggagttcctcattggaatttttaaggaatatgaaatctttgactatcttagaactgaggaataacaatatttctggttcgatttcatccaccattggagagttacacaatttgaatcagttgaatttaagcttcaataacatcacaggacaaaatttgggatcaattttcaatttgagttcgctcacttacttgtttcttggaaataataaattcaacggcacccttccgatgcagaaaagttcatctcttgtaaatatagacttgtcatacaatgatctatcgggtagtctcccctcttgggtaaacgaaccanatttacaactgaatttag

SEQ ID NO: 46769 - DNA, 327 bp, Glycine max
aaacaaaaacccaggggggcaaatccatttgggaatatccccggggaaaaaagaggaatcttccaataaaggggcttttgaagaaaacccgaattccaataggccgtaccctaattttaatggcaaaggacccgaaaccctaaacttaagctttttcccctttgattttgcgagcgagttgaatgcccttgggcataagggaaactcgcttaacgggaatagcgcaaaggttagggtcctcaaagagcccaacgagaaaagcctccggggtttcctgaaaagccaaaacggggtttttttgaaagcggaaatcggttttgaaatcct

SEQ ID NO: 46770 - DNA, 423 bp, Glycine max
gtgccgtagttggtcatcgttgttgttgtcgtcgcggaaggaaagaagggttgagttcagagggctcggtattctagttggaaaaggagggctgcatggaaatgtttttaggatcaagccaccaatgtgtttcaccaaagatgatgcagattttgttgtggatgccttggactatgctatatctaagttgtgagattctgcctggaatcaagatatgattatatatcctgctagctacaagtggatcatcaatccaattttctataaggaaacaaatcctgctagctgcacttttgtacgtgtgttcattgctgttgtgtatttcacatactaccaataacactgcaatgctcccattgcaaagtgaaaatcctgtaaacaattgacaatataaattgaatgtgaataagtggattggtgtgt

SEQ ID NO: 46771 - DNA, 493 bp, Glycine max
gttaaacacacactcagctcagagacaagtaataataccatcactcatcgggaaatgggagatccagcggagagcttcggatcggaaggtttggattccgccgccgccgttaagaccgacgacctttgtatggaaatcgatccgccatatcaggaaaacgtcgccaccgccgaggactggcggaaagctctcaacagagtcgtccctgccgtcgtcgtcctccgcaccactgccactcgctccttcgacaccgagtccgccgccgccagctacgccaccggcttcatcgtcgacaagcgccgcggcatcattctcaccaatcgccacgtcgtcaagccaggtccggtggttgcagaagcgatgtttctgaaccgcgaagaggttccggttcatccgatttacagagatccggtacatgattttgggttctttcgttatgatcctggtgctatacaatttctgaactatgaggagataccacttgctcctgaag

SEQ ID NO: 46772 - DNA, 507 bp, Glycine max
cacaggtgttggaggtaggaattattgttcattctatcatcattggaatttctttgggagcttcagagagtcctaaaacaataagaccactgatggctgcattgatttttcatcaattttttgaaggcatgggacttggaagttgtataactcaggcaaatttcaagaagttatctattacattaatggggttagtctttgctttaacaactccaatgggaattggaattggcatagggatcactaaagtttacgatgaaaacagtccaactgcccttattgtggaaggaatcttcaatgcagcatcagctgggatattgatttacatggcacttgtagatcttcttgctgcagattttatgaatccaagaatgcaaaaaagtggcagcctccgattaggagccaatctctctcttctacttggagctggttgtatgtctcttctggctaaatgggcttaagatagaatgagagtttttagtggaggagagtacggtgaactttttt

SEQ ID NO: 46773 - DNA, 380 bp, Glycine max
gttaaaatgtgcattgggatgcgcaacggtaacctgatcataaaaatcgccaatatcaggacattatcatttttgtaatcatacatctaatacaattcatgaatcaatctataaactagaacttaatgtatgaaaactaagaccacaaaaaattatgcatattgtatcttcaggagcctcgagccatgtatgaacttcctcaaacttcccctttaaacttggcttcatacaactctggttgcatgaagacagctgaaattaacctgcgtgcaaaccatctcatgtgcattgcacgttgagcaccacttgccgcttccactgtatcaaaccgcaaatacacaaaacctgaactttttttgtcaacaaaaatatgcttcacc

SEQ ID NO: 46774 - DNA, 351 bp, Glycine max
ctactaccggacgttttagacttcttcaaggatgttgctaacctagagccagcagcaaaggtgctggacttctcaaaggctcttcaggtcattatgttgataggcattggactgacactgacttaaataatttgatccagacgcaattgaagtttttggctgaggagatgcaagctataaacaaaggattagaaaaagtggtacactgaactatcaacctatgaaaatgatgggcctatatcaaaaactgtctgcaaggtatagcgtcatgccttaaacactattgacttatcttttcttaaattgcccttgatcattttcattgcttcaagattcatatatatatatata

SEQ ID NO: 46775 - DNA, 392 bp, Glycine max
ggaggaggagggagcagaggagaagcggagctctggctttacacagcgaacaaggttttaagcgcacgtgacctgcacggggcccgctcatttgcgatccgggctcgagactccgacccgagatacgagcccactgagctccttttagcggtgattgataccctcatggccggcgaggcccggatcaacgaccaactggactggtacgctattttgcaagtcctccgttacactcagaacatcgactacatcgccgcccagtaccgccgcctcgccacccaactcgaccctcaccacaaccccttcgccttcgccgctcatgccttcacgctcgtccacgacgcgtggaccgtactctccaacccaactaaaaagactttctacgacaacca

SEQ ID NO: 46776 - DNA, 478 bp, Glycine max
aagaaagagagttcttcgtaggctcggatacgctacaagtgacaatgtagtggaattaaaagggagggttgcttgtgaaattagtagtgcagatgaactgaccctaacagagctcatgttcaatggtggtttaaaggacataaaggtggaggaaatggtttctctcctttcttgttttgtctggcaagaaaaaattcatgatgctgccaaacctcgggaagaacttgattttctttttatgcaattacaagacacggctcggagagttgcccaacttcagctggagtgcaaggtaatgaccaaatgccaattcattgcatatctggcatctaactgcacatattgtgttccaagttttatttgttaaaatctaggtcaattagtgtatcatctgaaaattataaagtgttatacaagttagttccattttgaggatggataattagataaacctcttgttatcactctgatcacctgc

SEQ ID NO: 46777 - DNA, 438 bp, Glycine max
ctcgagccgaatcggctcgagctgattgttcggaatgcattgaggtgaaggtctctcctgcgcatgaccaaaggattccgttgatgagatcaagaagaggaggacggcggcggcgcggcgacacgtgggtggtgtcggtgttcgtgataatccagatcggggttttcatcgccaccatgctcgtcaacgattgctggaacaattctcacggcgattgcgttcttcaagccctcggaaggttctcgttccagcctctccccgagaatcctctcttaggtccttctcagtccaagttggatgaaatgggagctcttcgacgtagccttttgacagagcatcatcaaacatggcgtcttttcacatttccatttttgcatgctggggtcttccacctgctgctcaatctctccagtgtcatctatgtcggagttagcctag

SEQ ID NO: 46778 - DNA, 476 bp, Glycine max
acaatgatgagggtgagaatagttttatggaggagtttgaagagagagtgaagggaagcaaaaaggggtatttgatatggggttgggcgccacagttgttgatattggagaaccgtgcaattggggggatggtgagtcactgtggttggaacacggtggttgagagcatgaatgtagggttaccaatggtgacatggcctttgtttgcggagcatttcttcaatgagaagcttgtggttgatgtgttgaagattggggtgccagtggggaccaaagagtggaggaattggaatgagtttgggagtgaggtggtgacaagagaggagattgaaaaggctattggtgtggtcatggatggtggagaagaaggtgaaggaatgagacagagagccaaggctcttagtaatgcggcaaaaaaggctataaagcttggtgggtcttctcataacaatatgatggaactgattcgggagctc

SEQ ID NO: 46779 - DNA, 469 bp, Glycine max
gaacttgaaaagttgttttgtattattgtatgtattagaatattgttccttgtgaacaacaacactccatggccctgcctcggcaaaaaatgtaattttttttaaaaaaaatccctcaaatataaatatacatggtattacaattggaatgtctgaaaaatggaaataatagaacaagaccttgagcccaagcgatgaatagaaactccaaaaaccattggtactaaattaatatagtaccaaatttagctggttcccagctcaacaaagaatcaagtttcatctcaagatcctacagaacattaatgactctctctatattctgagattgatcatcacccaaagccaaattaaatatctgcatgtagtcatcaacaaaatgaacatcaagaccttctttcacattaggtgctagctcatcaaaatctctcctgttagctgaagggaatataatagtcttaacttcact

SEQ ID NO: 46780 - DNA, 141 bp, Glycine max
gcagtaaaggttttagcatttcattggaaaaggaaatacaccggaggctgttctcatcaattaaaccccccacacactgttagaaaaggattgtcaataatatacgccatttccagacaccacacaaataaaaacatacca

SEQ ID NO: 46781 - DNA, 453 bp, Glycine max
  unsure (1)..(453): unsure at all n locations
caagacctttgagcgtgtggagggagtgcttcatgttgtccctggcactggcatgtgggagtgtgttgactttttccctgtatctagcaagggtgaaaatggccttgatacttcaatcaatggggagaatgtgaagcatgtggtaaaggttagcttggatgatgatagacatgattactatgcactcgggacttacgatgagaagaatgttaagttcacacctgatgacttcaacaacgatgttggtattggactcagatatgactatggtatattttatgcatccaagacattttatgacanagtaaggggaggagagtgtgggggttgaatgggnagaagtctgatagcgaatacgctgacgtggccaaaggttgggcatcagttcagggtattccaagaacagtggcacttgataagaaaactggtagcaacttaattcaatggcctgtg

SEQ ID NO: 46782 - DNA, 263 bp, Glycine max
gcttattgtgatggtgcatattaccaatttgggttcccttctcttgattttgggggtcataactcttggctcttctttcccttccaccgctggtacctctacttctatgagaaaatcttgggaagcttgatcaaagatcttgaccctaattttgcccttcccttttggaactgggatttccccaatggcatgccaatgccagccatgtacactgatcccaagtcaccactttatgactccctcagaaacgcaaatcataaacc

SEQ ID NO: 46783 - DNA, 326 bp, Glycine max
gttacaacactccttaacttatcaatcaatgataacaacaaagctgttattgcaaattctggcgcaattgaacctttgattcatgtccttcagacagggagtccagaagccaaggagaattcagctgtcactcttttcagcctatcagttactgaggaaaacaagatcaggataggcaggtctggtgcaattcgaccactggtcgatttattagggaacggaacgcctagagggaagaaagatgctgccactgctttgtttaacttgtcattatttcatgaaaacaaggatctaattgtgcaagccggtgctgtgaaaaaccttgt

SEQ ID NO: 46784 - DNA, 481 bp, Glycine max
ctctctctctctcatccttatatttccaacggaaccttctagaaccaccataacatcattctccgttccctcgcgtttcaacaccgataacccgcaaaaatacccattgatctgcgcctcctcttccatggctccaccgccgccggtggaacacaacggcgactccgccgctaccgcctccgcctccgcctccgcggagtctcagagatcaattcccacgccctttctcaccaaaacctatcaactcgtcgacgaccaatccatcgacgacgttatttcctggaacgacgacgggtcaacgtttatcgtctggaaccctaccgttttcgccagagacttgcttcctaaatttttcaaacacaataatttctctagcttcgttcgccaactcaacacttacgtaattatttcaattcaactctttggtttggtttttttttttttttttgcttaggtttcgatgattttgaattttatttct

SEQ ID NO: 46785 - DNA, 488 bp, Glycine max
gtggttgcctctagcttataggatgcaaataattggttgctatgcccaaactgaactgggtcatgggtccaatgttcaagggctagaaacaactgcaacgtttgatcccaaaacagacgaatttgttatccatagccccacattgacttccagcaaagtgagtgaaatgggttatcactcctgtgagcctttactggtcttttactatttttaaccgtttaagattctacatcttacaatgttaccaagtgctttaacaagtaacatttagggaaaagagttgtacctttcttatgcattcactgcttctacttgttataaaataattttggatttacatcatgcttctgacattgatttaaacagtggtggcctggtggattgggtaaaatatccacccatgctgttgcttatgcccgtctaattattggtggtgaagaccatggagtgcatggtttcatcgtccagctgcggagctaggatgatca

SEQ ID NO: 46786 - DNA, 292 bp, Glycine max
gaacgcagggttaactctaatatgaacatttcacatgcccttgcaaagatgactggtgcttcggctgatatcatcctaacatcctcgtcagccttcataatcttcttgatccttgccaggggaagactgtggttcttggaatcacactgaagagaacaaaaggcgaacacttcaaaaaaatgatattgctgctgcaatcacaaggactgacatctttgatttcttggttgacattgtgcctcgtgaggacttgaaagatgaagtgcttgcatcaatcccaagaggaacaatg

SEQ ID NO: 46787 - DNA, 476 bp, Glycine max
acctcacctccagaactccggcgacttcaatgttcagcggcgaggaaagagaaactgcggccttccgtgctctcgcggatcgctgccggagcctcgaggagaagcagaccaagctcagggaggagttcgatgagctgttgcagaagaataacctcacagtcagggacgataacgatcacgttagcggtaacggtaacaataacgaggtcattgctgattcaacaaccgacggttttctttccggtttcatcttctccggaaatccctacgcaaccgtgttgaaatgcatgggccacgccgttcacgttcttagagttccctcctccgagatcgtatactggaatcactcagcagaaactctgtatggatggaaggactacgaaatcattggccaaagagtagctaaagtcctaattgctgaagaaaattatgcatctcttcaaaaaattctggaagggttggtcacaggcgtacca

SEQ ID NO: 46788 - DNA, 384 bp, Glycine max
cagaatgccccaccactccttttctttttgcattccgccgggtaagcagtgtcccattcctcttccatcttgttctttaattccgattcaacaaaccaatccccccctatccattacccaatggcgttgttcattactgttgttgttgttttgttcctgctgcagctgagttcgagtgtccgagtgaactcggagccgactcaggacaagcaagccctcctctctttcctctcccaaaccccacactcgaaccgtctccaatggaacgcttcggaatccgcgtgcgactgggtgggcgtgaaatgcgacgcgtcacgctccttcgtctactcgctccgtttacccgccgtcgatttagtgggtcgggtcccacccggtacactc

SEQ ID NO: 46789 - DNA, 519 bp, Glycine max
gtcggtgtctgcctgcagttttcaacttatcagagtctataagattcattcatcacatagaccgcaaaaccttcgctcgcgttcacaacacaaaccctagaagccaacgtttttcagggtgagtctctccttcgcgtgctaatccatatagtcgcttgttaatttctcaggtttgggcttcggatcccaactttatgtggctccatggatttaatttatcttgtattttatttatgattcattccagattctcaatacctgtatctcgttttacttttgtagtccattttttattcagcgcttttgtaataaaaattgttaattttcagttataatttctctgtggtaggaagggtgttagagcacgatggttcagtataattttaagaagatcactgtggtgccaaatgggaaggatgtcgttgacatcatgctctctcgcacccagcgtgagacaccaaccgttgtgcacaaaggatatgctattttacggctttgccaattctacatgcgcaaagt

SEQ ID NO: 46790 - DNA, 481 bp, Glycine max
  unsure (1)..(481): unsure at all n locations
gaaagaaggaaaatattgaatctctttctattctcatgaactgtggagtcgtgttgggtttctattgttggggttgggagttcttaactgcccttcttctcttctcttctcatcaaccttattgatcattctcttcatcctcctcttcttcttcaaaaaccaatttctttttatatatatacaaataaggaagacatcaaagaaaaaaatagcaaaatatttttttaaaaatatggaaggaacaagtgaaaaggggttgtgggaatgtggaaggaagtgcactccaccaccgtttttgttgaagacttatatgctcgtggacgatccggccacggacgacgtcgtttcatggaattccgaagggacggcgttcgtggtgtggcagccagcggagtttgctcgtgatctcctcccaacactcttcanacacagcaacttctctagctttgtgcgccagctcaatacttatggctttcgtaaa

SEQ ID NO: 46791 - DNA, 469 bp, Glycine max
gctcaaaccatgatttagagctccctaacagaaagagagagaaaacaaagtgctgatttgtagtatcaagcatatcaagaaattaagcttgtgcaagatcatggctggttggggccactctctatttccttagccaattctcttgtcagcttgtcagcacgatcatcatgtccaccagcaaatgtatagacccgaaatgccaattggaaagccctccaaagcaacttagcatattcttttctttttccatcactaatgtttgatcctgaacctctggcagcagcatcattgcgcctttccttagtgctagctccatgcaattggaggaaacatccaccattgcttctttgatttttataaggatgtggaagtcgaattcgatgttgtggcctttgaatttcttggattcttcatctttggttcgctccaaaccatctaattctgtttttatcttattgaaataacgttc

SEQ ID NO: 46792 - DNA, 424 bp, Glycine max
gtaatgttattatttgttctgaaaattggagaattacacaaaacgaaggtagcaacggggttgtggttatactaagtgatatcatactagctcaagatgttggcgtgcatattatacgtatttcatgcctcatcataatctctaaaatgcaacttctacgtcatactcatagtcaagcaggaaaagatgccacgaattcaaagccttggttcagaagagcagcagtcacccatagcttcaaatttggcaggttaatttctggttcagttccttttacattcaatgtaaatgtaagtagaaaactgtcatcaactgtagccaagtttgagttctgaacattaaaacctgcaagagactcaagagccctgtacagtgaagcagccaacccttgtactttattgcacattatttttgcatagtaccc

SEQ ID NO: 46793 - DNA, 419 bp, Glycine max
cagaaattaacccatatatttatatgaaaaaaaatttagtatatttcatgctaaaacttatttcttataggttaaagcaatatgattcaagaattgaatgtggtgcaatctgtccgaatctctccatcattcccagtcttgaccccaacccttgcaagcttcctgatggctgcgacaaaggcatcgttaaaatccgcaacgttgttggcgaacctaacaacagttggttgtgacgtggcatcctcgaacagaacctggtctgaggttagcaaccctttccccgacagcaggttttggtaatacaagttgtcgaaggccgcaggggattgtgggtccagggcaaccgctacagtggcgtcggggttcctagggcaccccgccattaggtcctgggcgtaactggggtccagagtggggtc

SEQ ID NO: 46794 - DNA, 301 bp, Glycine max
ctaaaagatcttttatactgggtccgatttcaaagttcgtactatacatatgacccgcattgaggaaaagaattgcgatagctaaacgatgatgtgccatatcggttagccataaactttgcgtttgtggatggaatcccccaagaagggttagaatggcagttccggatccttgggaggtaccaaataaatgactactcgagtcggggttttgagcataaagattccactgaccctgaaaaagtgggcctaacccttggggatgcggtaatacatttaagaaattattccatctgaacat

SEQ ID NO: 46795 - DNA, 403 bp, Glycine max
ctcctctcctccatcacctctagtttttgtataacccccgtcactctgctcccttaattaattagccaccatgctctccgccctcactccttccgaccccttctctcccttctcccccttctccgccggcttcacgccgtgggatgacaacgacgattcccacgccctcttctcccccaaaccggtctctgcttctagctccgcctctgactataaatccgaaccgaacccaaccgaacacgtatgcgcctcgtcctcggtgatgatggacgagcggaaacggcgccgcatgatatcgaaccgggaatcggcccgcaggtccaggatgcggaaacagagacacctggagaatcttcggaaccagttgaacaagtgcagggtcgaaaaccgggaactcggtaac

SEQ ID NO: 46796 - DNA, 525 bp, Glycine max
ctttcctttgacgcttctgacactgcttcttttctttctctccgtgtcctaatggctctccccgactcttcttcctgccgcaactccctgatcccctccttcatctactcctcttcctccaaaacgctccctctacaccacatgctcaactccgcctccgccgccgccccctcccagccgccggaaaacctccacgccggatcgcgcggcctcatgattccctctcccagcgagtcacgcaagatcgagatgtactcccctgccttctacgccgcctgcaccgccggtggaatcctcagctgtggcctcactcacatggccgtcactcctcttgacctagtcaagtgtaatatgcagattgatcctgctaagtacaagagcatctcttctgggtttggagttttgcttaaggagcagggattcaggggccttttccgtggctgggtgcctaccttgcttggttacagtgcccagggtgcttgcaaatttggcttctatgagttcttaagaagtactattctgata

SEQ ID NO: 46797 - DNA, 201 bp, Glycine max
tttcttttttttttttttttttttttttttttttttttttttttttattttttaaaggggccaacaccctgcaattacatttcgtgaaaccctacacagttaaaagggaccttttttaatggattgggcaaaacctaaacccggttttaaaatcgttgaatttttttaacaacaaaaagccttcaaacttaaattattaaa

SEQ ID NO: 46798 - DNA, 195 bp, Glycine max
agctccaacaaacggtccaacccagtaaattcattgttcgtcccaggctttgtcgatgttgaagatcacagctggtccgaaacttcttgcagggttaatgccggttccagtgacagggattgttctcaagtgaaccatgaagacggcaaacccaatgggaagtggtgctaacagaggaacgctagggactctcat

SEQ ID NO: 46799 - DNA, 513 bp, Glycine max
gttcgtgcctagggcggtgctcatggttctggagccagggaccatggacagcgtcagatctggtccctacggtcagattttccggccagataacttcgtctttggacagtccggcgccggaaacaactgggccaaaggtcactacaccgaaggcgctgagttgattgactccgttctcgacgttgtcaggaaggaggcagaaaactgtgactgccttcaagggtttcaggtttgccactctctcggtggtggaactggttctggaatgggaacactgttgatctcaaagatcagggaagaataccctgaccgaatgatgctcacattctctgtgttcccatcccctaaggtttctgacactgttgttgagccttacaatgcaaccctatcagtgcaccagctcgttgagaatgcagatgaatgcatggttttggataacgaagctctctatgacatctgcttccgcacgcttaagctcaccactccaagctttggggatctgaaccatctaat

SEQ ID NO: 46800 - DNA, 437 bp, Glycine max
gccagctatctgctatcgcaaggctagtatcaggtagtgcttgtcgcagcttatttgggggatttgttaagtggataatgggaaaagacgataatggcagtgatagtcttgcagttcaacttgctgatgaaaagcactgggatgatcttgttattgttattgccgtggttagctcacggcagaaggaaacaagtagcacctctggaatgtgtgagagtgttgaaacaagtttgcttttacaacacagggcaaaggaaattgtgccaaagcggatactgcaaatggaagaagccattaaaaatcgtgattttgcatctttttcgcaattgacctgtgctgatagcaaccagtttcatgcagtctgcctggatacatccccccctatattttacatgaatgatacatcccacagaataatcagcattgctgaaaagtgg

SEQ ID NO: 46801 - DNA, 383 bp, Glycine max
  unsure (1)..(383): unsure at all n locations
ctcgagaacttctaagtcccttgacacactttctcaaagaaattcnaccaccaccaagtggacaacacttcccatcataggccacctccaccctgtgggctcagtcataccaaaatcattccaagccctagctcgcctctatggccctctcattcagctccgtttaggtgcctcaacatgcgtagttggctccaacgaccaagttgccaaagaagtgatgaaaaccaacgacctcaatttctgttaccgaccccactttggatcctccgagtacttcttgtacaaaggctctgattttatcaccgccccatatggcccttattggcgcttcatcaagaagctttgcatgacgcaacttctatccagctcgcagctagggcgct

SEQ ID NO: 46802 - DNA, 298 bp, Glycine max
aaaccaaaaacactttgggattatcccttggaaattgcattgagctgaaagttaaaaaggattaaaacgagttatagggtaacaaagaagaggctttgccaatcctgtaaagaaggatgaggctttttccatacaaagcttctctccggctttgattttccattgaaaacattggataagcgatgcaagcgtgacttgtttgagcgttaatgcaagggaagatccagggcacccccttctgccaaacccaaacggaagatagctgaaatcagcggggttgatcccattcaaaaacctt

SEQ ID NO: 46803 - DNA, 388 bp, Glycine max
gtaagagtgagcaacttccaacaccatagttaaatggcttccaaggctgcacttctcttgtgtttcaatgttctcttcttcaccgtggttagctccacatatgtgccatgcaacccaccccccaaaactccactcccctccacgtcgtcacgctctccgagatggctgccatcgtctccctcatcgcctccttcttctacctcatggccttcttcggcattaccttcatcctccacccattccttaattaccgctcttcccccgaggacgacctcgacctccacattcccaaacctgtccccactccctcatgccctgctgccctcccccaccacgacgaggacatcatccttgccgtcgtgtctggctccatcccctcctactccct

SEQ ID NO: 46804 - DNA, 482 bp, Glycine max
tcggcggccgcccttttttttttttttttgtatgtaagctttatatatttaaattaaactaaaaacacgcgggatggcatcttaatcttaaatcagaagtgggggacaagtacgtacggcaacatgaaaatatccaaaaatgatggtgaagtaacgatcacatttatgattaagaaaagagaatgaaggttcagaaaataaaaaagaaaacaaggtagatagggtgaattaaagagagaaaaaattaatcctgcttcctcaactccttgtaaaacctctttataaaatcttcggcggccttatcgaccaggtggtcgttgtcttgatcggcgtctcgcagagggaacggcgagtccgtaaccctaagctgcctcaccatagggctccgtccaaaccctggcagcgcaggggacgctttaaccttaacggcgtcgttgttgttgttgttgagcatctccatcactgccttcattgcgttcacc

SEQ ID NO: 46805 - DNA, 508 bp, Glycine max
  unsure (1)..(508): unsure at all n locations
ccacacaggggaaaatgagggagatccttttcgtgcagggagggcaatgcgggaaccagatcggttccaagttctgggaagtggtgtgcgacgagcacggcatagatccgacggggaagtacgtcggaaactcagatctgcaactcgagcgcgtgaacgtctactacaatgaagcctcgtgcgggcgcttcgtgccacgcgcggtgctgatggacctggagcccggaaccatggacagcgtgcggaccgggccgtacgggcagatcttccgccccgacaacttcgtgttcgggcagtcaggcgccggcaacaactgggctaaggggcactacaccgagggcgccgagctcatcgactccgntctcgacgtcgtgcgtaaggaggccgagaactgcgactgcctcaggggttccaggtctgccactcgctcggcggcggaacgggctccgggatggggacgcttcttatttccagatcgagaggagtatcctgacaggatgatgcttac

SEQ ID NO: 46806 - DNA, 438 bp, Glycine max
agcagacttaacaacagcacaaagcgtttttactgtctgttcaagctaccatctctctctctctttcttagtgcctccttgccagaagttaaaatggcccaagaaactttcctattcacatctgaatcagtgaacgaggggcaccctgacaagctctgtgaccagatctccgatgctgtgctcgatgcatgcttggagcaggaccctgacagcaaggttgcctgtgaaacctgcaccaagaccaacatggtgatggttttcggagagatcacaaccaaggccaacgtggactatgagaagattgtgcgtgacacatgcaggaacattggttttgtctctgatgatgttggtcttgatgctgacaactgcaaggtcctcgtcaacattgagcaacagagtcctgatattgctcaaggtgtgcacggccacctcacaaag

SEQ ID NO: 46807 - DNA, 372 bp, Glycine max
gccgcccttttttttttttttttttgcgttaatttcatattctcattaatagaaaaataattgtagaacttttactatttcaaacactcgagtctccaaaaacaggataagatctacacccctgaagcaaataatcttttccttttcttaaaaggaagaaaaaagaaaatactgaaaacagagtgcacctaaaatgaaactaaacccaaaatttatctgtggtgatgatgatactaaacagggcgccactttaaaataaagattcaaccatttcaagtttctcgccttggcctccgacgcgcatcattagaagcttcctctttctgtttctgcttctctttgatttattcattctctccactaccttggtta

SEQ ID NO: 46808 - DNA, 331 bp, Glycine max
acaatattcaacacaagttgcaacagagtactaaaaacagatatttatagaggtaaaacaaggtgactgactagaggcatttggcctcgatctcctctagtgtaagccccttggtttctggtataacaaagtatatgaatacaagagatgccacggctattacacaaaatgtgtaaaacaaaattccagctcccaataatgccttcagtggggaaaaagcaaatgtcaccagggcatttgcaccaaaattgacgagtacagctatacttagtcctcgacctcttaggcgcaaggggaaaatctctgctatcattaaccaaccaattggacc

SEQ ID NO: 46809 - DNA, 528 bp, Glycine max
tagtcgcggccgcccttttttttttttttgcatttttacttttaatatatcctttaaacacatggggatagtcaaaggaagaggagaagtttattcaaacccaattataatttgattttctagccttgcttaaattgctgtagtattccttttactttgacactactacaggattataagcagcagaggccatcaaaagagcttgttgccaaagacctgccggctgccaagtaaatgtgtgtgcctatcatcaataggtagaacaaccaacctgccggcacaaacatagatatctgtgtggatgacccaattgctactcctaaggaaatgtcaagtttatctttcatggcaaacattatagcactggcatgttcagttgcattccccactagtggaagcaatatgacactaataaatgctactggaatttcccatgccatagatgctccctcgttcacagagacgtaaagatttctttgactttttaactgaaaaaataggtatgcaacataagccacaagcataatg

SEQ ID NO: 46810 - DNA, 320 bp, Glycine max
aaagaaaaaacttccttaaaagggaaggccatgttttgaattttgcacccaaagcttcggaaaacaaagggaatttttttccctttggaattccaagttccttgcagggcatacttaagggaaaacggggaagttgttgaatggggatggattgcccacagccttttttagccaaaccaaaggcttaatttaaccccaaacccgtgtccagaaaaaaacccatttttaaagaaacccgaaattaaaaaaacttaccatttgggaagaggggccccattccactccccaggggtttccaaaaggggatcaaggatcttcct

SEQ ID NO: 46811 - DNA, 322 bp, Glycine max
ctcgagccgttgaaaatggcggcaaccactgccccaaaacctgcgttcaccgccctcccttcttcatcatcatcatcttcccagaagccctttctgcgtctcgccctccaatttccctccctgccaaacagttgctatcactcccaacgcccttctctcaaaatctccagcgccctctgcgatgcaaccgcgaaaaccaccaccgccgccgccgccgaagattttgtctcccgattcggcctggaggagccccgcaagggcgccgacatcctcgtggaggcgctggagcggcagggcgtgaccgacgtgttcgcctaccccg

SEQ ID NO: 46812 - DNA, 507 bp, Glycine max
gctatgtcagggattttgacaattcataatctgttattgtttaccatacaaagtaggtcaatgagatcttccctagctagttatttcctctctgtaagttaaagaacaaaatcctacaatgaagtaaattaatcaaatatgtattctctatttacattttctattccactcactagagggatacatacccaaatacaacaaaaaaccatatttgaaaaccaaattcattgctgaactaagaatttggcgatcaaactcacccaagagtgacagcggctggaaatatgaatgctacacagacagcagctgttgctccagtaaactggaaaatatcccaaatgctgggtataaaatttgctcccaggaagataacaccaataagtgaaatagtaattgatgcaaatctgaagttatcttgacgcaaaggcctatatgatgaaaatacgagaccatctaggttgacccgcactgcatagaagacaactggaaatacaagcacaagatgcg

SEQ ID NO: 46813 - DNA, 395 bp, Glycine max
atacctcaatctaatatgtcggatgttatttgcgccaatgatattgttaacgcataacacaaactatgcaagtcacatccatctaaaaaaagtggaaaaatgaagcgaagaatggggacaaaaccaaagagtattttattatacactagatacactctgcaacgcttgtcactcttatggtgccagaaacttcttaattctctggctttccactcaggcaccaactatgtcagggatttcgatgttgaatttgattctaaggttacccttctttgtaggatctttggaaattggcatgccttccccggtgatcacttcttcataatctggattagtcacattctttacgacgatgttcagacccctgccatctagagttgtaagttgaatggtgt

SEQ ID NO: 46814 - DNA, 191 bp, Glycine max
atcgtgaagtatcaggccttccttagaagcagagtacctactagttgccctcaaaaaccttaagctgaccaacactttactcgtgaatagcatcacccatgtagggaaccttgaaccccatcttcttaagactctcaaggaaaggggaatcctcaacaggtatcaagctttcaccagtaatgtatgagatg

SEQ ID NO: 46815 - DNA, 432 bp, Glycine max
aggaattctaaaagaccatttttatcaaattgaaattttaccaagcacatacatcacatttttatgaacccaaaacttacattagtatcctaaacttgacaatagaataaaaaggccttgaattgctatctacagcaagtttttattgatttctgctacaaatccaacttcacaaactgtcacaaacaatttgatgtcttccccttaggccgtgacatcacctctccagcataataatgtacactctcattgtctctctcagattccaaatttcatcagaaactttagcacattggaaggtctttgggtggtggaagcgaggactcatggggaccgttcccgttgtctactatgaatgccatcttaagtccccatgtggtgtgtacttctaagtggcaatgcaggaaccaaacacctgggttatttgctctg

SEQ ID NO: 46816 - DNA, 450 bp, Glycine max
caatatcaaaagaaagattgattttatttagtaaacattaaatttaactactacattcaatcaatcacatacacacaaacactaagaatacaatctccatggaattagaggaaatgtatttcatatattttgaaaacaagaccctatgtttatttcttgctaaatgaacaagggctgtagcatagctcaaccctagtcactcctaaaaatgtggaataaggccttatcatacatattacactagaaagaattattaattaatgaatatgttgccgaaaattaacaatctttaaatggatgcactatatggaactccctttccagtgattccaggtcctgaaaatggtttcattagctcataaggcactaacccagctccacatctatttttcaaattatagttaccattccttgagtctataataccttcaatttccttcaatctcttat

SEQ ID NO: 46817 - DNA, 489 bp, Glycine max
  unsure (1)..(489): unsure at all n locations
gtggtctcatggattctcctcctctatatcctacttagtcaacagctgaggagcagggcatatccatggcagaaccaccaaagggggatgaggaggacggcggagctgctttcgttctccaatccaaaggtgaatggtggcatgcggggtttcacttaacgaccgcaattgttggacccacgatactaaccctgccatacgcgttcaggggattggggtggggacttggatttatgtgcttgacggtgatggggatcgtcaccttctactcttacttcctcatgtccaaagtgctcgatcactgcgaaaaatccggtcgccggcatattcgtttccgggaactagccgctgacgtcttagggtccggttggatgttctattttgtaatctttattcaaacggcaatcaacactggcgttggcgtatgggcaatcttgcttgcggnggaatgccttcagatcatgtactccaatatctcacctcatggac

SEQ ID NO: 46818 - DNA, 395 bp, Glycine max
ctagttctaggatcgtgcgaccacctacgaaaggcgctgttgtgcagagaccccgaacccgtgctctgaccgccgtgcatgatgccatgctgtaggatgtggtgtgtcctgcgcagatagtgggcacacggggcacatatataatagagggctcacaaatattgagagtgttcttgtgccccaaggagcgcaccaccactgtgtacacgctggagacactttctggggagtatatagagcgcactgtgaaagatgtggtatatgagtgtccactctcagaagcctgagatgctgctcggggtacagtggtatatagtgtttgggagatatttctgtgagaaatacacatagtgtgaaacactatccacaatattgacacctggagtattatatga

SEQ ID NO: 46819 - DNA, 459 bp, Glycine max
agtattatataaggtgtatgcacatacatagatatcgctttccatctttacaattggaagaaggactgatgaaaacaaagcaaatcaggcccaaaaagctgcttcaagtaaaagctaggtaggtgctaaccaagccacagcaataaggggcataacacataacactgctcgatgttattgcttagcctttggttctgataatagtgattgtgcctcttccctgtgtgtgaattctagtaagggccaccactgctttccctgaaagccctggaccctctgcggacacgcatggccgacatgcaaagtctccaactggatgcctcactggtcttgtgggaggcattaggatcctctcatttatgtcattcaatgtcacatcaccttctcttcctcctggcttcaccattgcaaatggatacaccactcttgttaccaccttcttgttcctcatatcatcat

SEQ ID NO: 46820 - DNA, 284 bp, Glycine max
gtcttcataaacgcctttcttctccgtttccgtttcctcgttcgaattcgctttttgatctgcgaaaatgagagagtgcatctcgatccacattggtcaggctggtatccaggtcggaactgcttgctgggagctctactgcctcgagcacggtatcgggcccgaggggcaaatgccaagtgacaagacagggggcgggggagatgatgctttcaatactttcttcagcgagactggtgctggaaagcacgtgccacgtgcagtgtttgtagatcttgagccca

SEQ ID NO: 46821 - DNA, 331 bp, Glycine max
aaaaggaaaaattggggggatcgggtcatagaaaaaaaaagggaaaaagagaaccaaataattttaaaatggccccaaatgggaattaaattaaaggaaccaaagggacaaaaacagggaaggggggaatttcccggggaccaggaacccaaatcagggggggggaccggccaaaatattaggggcccaaagggcattaagcggacagggctgtttgggggccaatcgagtccaggggttgccactaccggaccaagggaaaaaactcacaggcccagcgggcaggtcccgggaactccccttgacggtatcgccccccaacccagggggg

SEQ ID NO: 46822 - DNA, 486 bp, Glycine max
ctaaatctagaatcagagcggacgccctttaccttttcaaatctctcaaaactttccaacttggacctctctcacaacaagctctcagggagtctcagaatactgggtactcttgacaatctattttctcttaatgtctcttacaacagttattctggttctcttcctgacacaaaattcttcagggatcttcctcctgctgcatatgttggcaaccctgacctgtgtattaccaagtgtccagtaagtggacattaccgtggcatcaagtcaataagaaacattatcatatacactttccttggtgttattttcacttcaggatttgttacatttggagtaatgttagctctcaaaatccaaggggggactaactttgacagtgaaatgcaatgggcttttactccatttcaaaaactcaacttcttcatcaatgacattatccataagttatcagattcaaacattgtgggaaagggttgctcg

SEQ ID NO: 46823 - DNA, 453 bp, Glycine max
attataggcacagcgtactaatgaatcaattccaatctcaatttacatggttatttatgtaccaagattttgtggcagttcatgtcatgccttattatgtcaaaacatcctatacaacttcattaacaacagggtatggatctcccaagatcattttcataactgattttttgactgacatatcataggtaatgttcataaaaatgtcttgtccataccctcttcttagttgaagagcctggtgtatcaccactcccagcaaattcccatttcacaacatctccatcccaagaagagctaacaagtgtagtgtggaaggggtgccagctacaatctcttacaggtgatttatggtgcttcagcgttgcgacttgagctccacttacctgtagtgagttatcaaagttaccatcaaaagagaaccaacttgaactttttattgatttttttttc

SEQ ID NO: 46824 - DNA, 447 bp, Glycine max
gaaggggagacctggaaatggaaaggaataacctcggaaaggactattcccatgctatgtttcattgagcaagtaagaatacttgagtaatgagaattgagaacctcctaccaactaggctaatcttttgggttaggctctttccatgcaatttttacttttctagtttctacatactatataatttcacttgcatatccatcaaacttgaatcttccttgtgcttttgctcaactaaatgtgcatttgtagagatattgtggctgaatattcaaaacaagtaaaagcgttaggtaccacgatctttgagctactgtcagaggctcttggccttgatccttcttaccttgaagaaatggactgcactaaagcactttatgttatgggtcagtactatccaaaatgccctgaaccagaattaactatgggaatttcaaagcacactga

SEQ ID NO: 46825 - DNA, 355 bp, Glycine max
cttctcttgcggctagggttttagcgcagcttcttctagatttaaggaagatgggtaaggaaaaggttcacatcagtattgtggttattggccatgttgactctgggaagtccactaccactggccacctgatctacaagcttggaagcattgacaagcgtgttattgagagatttgagaaggaagctgctgagatgaacaagaggtctttcaagtatgcctgggtgcttgataagcttaaggctgagcgtgaaagaggaatcacaattgatattgccttgtggaagtttgaaaccaccaagtactattgcacagtcattgatgcccctggacacagggatttcatcaagaacat

SEQ ID NO: 46826 - DNA, 531 bp, Glycine max
aaattatggtagtcttccctacttaaattcccattctctctctctcttcctcatctcatctcatctcatctcgaacaccataaaagctctcgttgaacaacagacactttctagttcttgaagcaacaactccatcaatcccaagttagaaaccaaagcaacatgccaacataaagtaaataaccaagactcgctctgtcatcattgcgcttgaatccaaccaaaacaaaaccactcgtggcttccattatcggaagattctcattctcctccttataagaccttatctacacagcttgctagaatagatatggaaattgaatcggtcaagtgtgagtgctgtggcctcaaagaggattgcacccaagaatatatccgcgatgtgaaggctaagtttgacagcaaatggttatgtggtttgtgctcagaagcagtgagagatgaagttaacagagcgaaaaggccttttgctatggaggaagctgtgaaggctcacatgtcattctgtgggaagatcaaatcgaatcccgc

SEQ ID NO: 46827 - DNA, 513 bp, Glycine max
caagttttcttccttcccttcagcatagccaatgttgttcactatgtttacaagcctattcgaaagcattcggactacgaacctattcgcctccaacgcttagtggaagattatattggtgttattgccaataagtatccttattggaatagaagtgaaggggcagaccatttcttactatcatgtcacgattggggtccgaaagtttcatatggcaaccctaaactcttcaagaacttcatcagggtactttgtaatgctaacacctcagaaggattcctacctaacaaagatgtgtcgatacctgaagtgtatttgcccaaaggaaagctaggtccacctaatttggggcaacgcccaaatgaccgctccatactagcgttttttgctggtagagaacacggtgatattcgaaaaatcctattgaatcattggaaaggcaaagataacgacatccaagttcatgaatatcttccatagggcaaaaactacacccaattaatgggacaaagc

SEQ ID NO: 46828 - DNA, 358 bp, Glycine max
ttttttttttttttttttttttttttttttttttttttttttttttttttttttttttttttttttttttttaatggaagacctacccagccttaaaaccataaaactttggtttatgaaccaaaaaagggacaatccttacagggtacaacataaataacagctccttaagggttcctaaaaaaaacaaaacccggggtttaggatccccattttattttttcacagcttttttaaaaatccggggaaaaacactccttgggacaaacaggtttaatttcccccaaaaacattagtctcactttcactcacatttatttttttaggaaaagaccccccaaataaaaagctttactcc

SEQ ID NO: 46829 - DNA, 436 bp, Glycine max
atgagaatgaccaatgtgcaactcttgcaccttccacttccttaggcaaaagggtcttcaactcttcctcaaatgttgcaatcttttgcctaaggaagtggaaggtgcaagagttgcatatgagaatgaccaatgtgcaatttccaaacaagatcaaggaatgcaggtcttaccccttgtacaagtttgtgagagaggagttggggacagcattgctaactggtgaaagggttatctcaccgggtgaagagtgtgacaaagtgttcactgctttgtgccaagggaagatcattgatccacttttggaatgccttggggagtggaatggggcacctcttccaatatgttagtttttcttattttctgttttcttgaagagtggtttcttttctgtacacgtgtttgtgttgatattaaagcatttggtttgtctata

SEQ ID NO: 46830 - DNA, 404 bp, Glycine max
gtgattcttctgcggccggtggcaacaatggattcaaccagagaacatctgatatgcaacaaaatctacatttgcaagacgtggctcatgatattggcaatgagttcttggataaccccttctttaacagcgatcttgatgacaacatgggtttcagctggaaggcatgactagcacaacttggccatgtaattggcatatcttgttgaagtgtttatcttattatctttgtacaggacactttaaatttatgggtttttttatttattttcctccttggttttccctgtcattttcttgatggaatttgtttggactcggactcgagtaggtgtttagagattttatttgagtgtttttgtcctgcaagtgtaacctattggacaattaaatgaacaattagc

SEQ ID NO: 46831 - DNA, 461 bp, Glycine max
tgcagaagaaggcttgcacctgtcagaggctctgatcaagagagaaagaaaggagtcccatggactgaagatgaacacagacgttttctgatgggacttttaaagtatggcaaaggagactggagaaatatctctcgcaattttgtggtcactaagactccgacacaagttgctagccatgcacaaaagtactacataaggcaaaaggtttctggagggaaagataataggagaccaagcattcatgatataaccactgttaatcttacagaaacttctgcatcagataagaacaagcctcagttatttaatgcgtctcctgtgcttgcaccacagcagaagctgaatagcatatcaaaggtacagctgggctggactagtagccactacaatgatggatcattcatggttctcaacccatatagtgatgccttgtttgtgtcatcttcacctgatgtcac

SEQ ID NO: 46832 - DNA, 469 bp, Glycine max
ggaaactttttcgattttcgctttctgggtcggttccataatctgtgtcagcaaactctttcacgagtttttcactctcttgttgttaagtgatttctattgacaccatgcatctaactagttttttttcttgcccccttttgggatttattcaatttgcttaattttagaggtgtgaattgttatttgaaagtcacaagcaatggtgaaggacactgcatattatgacatattaggtgtcaattttgatgcatctgctgcagagatcaagaaggcttattatgtcaaggctagaattgttcaccccgataaaaatcctggggatcctaaggccgcagaaaattttcagaaacttggtgaggcttaccaggttttaagtgatcctgggaagcgtgcagcatatgatgagcatggaaaggagggagtaccacaagattccatgatggaccctacaactgtatttggaatg

SEQ ID NO: 46833 - DNA, 400 bp, Glycine max
gaagttatttataggactgctgaggctgtgaagaagcctttgacattgggggaaagattcttggttgagccatttcagaggagtggtgtttgtggggagagtgcgtataagggattgactgtgagggaagttgttaggaagcgtaggagtgctgttgatatggatggagttactgaaattgagagagatgccttttatcagattctgttgcattgtcttccttcaggttgccagggtggagggaggcaagggagggagctggcattgccattccgagcacttccatgggatgctgaggttcatgctgctttgtttgtgcatagagtggtggggttgccccaaggattgtattttctagtcaggaatgaagatcattctgataaattgaagaaagctatgc

SEQ ID NO: 46834 - DNA, 447 bp, Glycine max
aacataaatggtttggtttcatttaatctcccatcaaagaatgttgattgcataacatagttgtatatttgtgagtttaaaattcttacacatgcaaagtggagtataacaagagattggttatgcagttctatgacagcacattttgagggaataaaaaacaaaatagtcccaaatgaaaagataggaatatatatttagcattaatgagtattatactttgcacaagccatatcatttttagtataaagtatattcaacgaatgggatcatctagatcagttccaaaccaacagagaaattctgacactggtccactagtgaaatattataaaaaaaaaatctaacatgaaataggtaaccaaatgaaatggatcggagtcactagtggttaggaagagcagcacccacctttctgtgcaactggctgtcccctgatctgcactg

SEQ ID NO: 46835 - DNA, 424 bp, Glycine max
atgacatccaaggtgttatcaccttgcgcatgtacacccccgagtcagaaatcaaaagaaattttagttctaggtggaacaaactgagccaaaagaaggatcctgaagagggtccttttgcattgaacacctttggcctttacgcctatgacacggtttggttgcttgcttctgcactagatgcattttttaagagtggtggaactttgtcattttcaaatgattcaagcttaaacatgttaaaaggggacacccttaaacttgatactatgggggtatttgttgatggagtcatgttgcttgaaaagattttaaaagtgaacataactggtttaacaggccaaatgatgtttagtcctgatggaaacttggtgcatccatcatatgaagtcattaatgtgataggcactggaattcggaggat

SEQ ID NO: 46836 - DNA, 519 bp, Glycine max
ggggatgaaaatcttcctcgtccatggagtcgacattcgaagaagaaagacgataaagtgactgccccagatgtggagaaacctgctagagctaataagggacaaggagagaattcaaagggcagtgttggtgattatgttgatgacccgcagcttcaggattttcttcaggtcatgcagcctcgggttaagtctaaaatgtgggcgaatgatacatcaattgcaactaatgttgacaacaggcaggcaatgccaaataaggataacgacggggcatcggttgcaagtgatcagagtggctcattagaagatggttttctggaggattctgaacccaagaacaagtcacatgagcctgaacgcgataaagtcatttctgatatggattatttcaagagtagggtgacgacagagtggtctgattctgaaagtagtgatggtgaagatgatgatgatgacaatgattcctcatgcattgacagtgatagagatgatcatagtaatgctggtaaagatgaa

SEQ ID NO: 46837 - DNA, 335 bp, Glycine max
ggtacatagaatccattttaaattttaatggccctttccacaatttcttcaataacttcatattcatacctacaaaagcgcaatgctttttttttggttactacatacataaaaaaaattgtaattggcccacaacaaaatacagagtttgggttgtacccggtttcaaaggtccatcctttcaagtttgcggcttcaaacaaagctgatctccatttctggaccttctcaaagtccttacccaacatattttcatgttcagtcatggcttcaccataactatttctttgacgccttatatccctgggctccactttgtaaaatatgggccaaac

SEQ ID NO: 46838 - DNA, 441 bp, Glycine max
ctttatttgactcttcggtaattaatttattggttttgcagtatgtaccttacgttggggacagcaagagggccatggatgagtactcttctgagatattcatgggcggaaagaacacaattgtgttgcacaacacttgtgaggattcactgttagctgctcctattatcttggacttggtccttcttgctgagcttagcactcgaatcgagtttaaagctgaaaatgaggtttgccatatgttgcttaaccattcattccaacctctatttcttatctttagttttttaaagactcaaatgagtttatggctttaacagggaaagttccactcattccacccagttgcgaccatcctcagttacctgaccaaggcccctctggtaagtataatgtatctgattcataattgttcagtgaattttttcatcccccctttga

SEQ ID NO: 46839 - DNA, 204 bp, Glycine max
ctttttctttaggcctttccgttttaagtacttgtttcattgtctctcgaagcaagagggatgttcatcgagagtttcaaggttgagagtcctaacgtgaagtacacagagactgagattcagtccgtgtgcaactatgaaaccactgaacttgttcacgagaacaagaatggcacttatcaatgggttgtcaagcccaaaact

SEQ ID NO: 46840 - DNA, 460 bp, Glycine max
aaataaaagatcaaaggttgaatttgatccttaaatttatatcaagtgacatgtttttcaaaatttatttccatatataattacagttcaatagaaaatgtaaagataaattcatttaaaaaaatgacaacccgacattaaatcttgctatatgtatattttgatgttgccctatgcaagactatgtgatcttttaaatggaaaataatggatcatcatcatctaaaggttgctaaaagctttggaatcaaataatttgagacaatgcggtttgtcttctccgtaggatgaaaggcatcccaaaacacgtacttttcggcgtctgtgcatgtaagtggattcttgtcactgcacaagtagctcatttcaaatgttcctgtcgaacaacacgccttctctacaacctcaaatccatatgtggaaggttttgtaatgatatcactgaagatggaatatgcat

SEQ ID NO: 46841 - DNA, 461 bp, Glycine max
gacagttttaccatcagttttttccaaaaaatttggttccctttgtgcattggattgcaggccaggctccatttcaaaaattatgggagatgagttagaggaaggggaaattgcagtatctggtgattctcacatggatcatcaacagtcaggtagttggatccatgatcgtgatgagggcgaagatgaacaagttttgcagcaacccaagattaagcgcaaacgtagtcttcgtgttcgtccccgccatgccatggaaaggctcgaggacaagtctggcaacgagattatttctcttcaacgtggagaatcatctcttttggcagattataaatatcaaattcaaacaaggattgatccagaatcaaaatcatttggagactcgaatgccagcaagcgtgataagaatgaatcatcattaacatcattaaaaaataagcaaaagttatcttcaaggaaag

SEQ ID NO: 46842 - DNA, 448 bp, Glycine max
gtcgagtgtagctgatattgaatttaacactgtggatggttttcaaggtagagaggtggatataatactactttctactgtaagagcagctcattcaggcattactgcttctgaaataaactcaaactctattggatttgttgctgatgtaagacgaatgaatgttgccttgacaagggccaggttatcactttggattttgggtaactctagaactttacagactaaccagaactgggctgctcttgtgaaggatgctaaagaaagaaacttgatcatgaaggctaagatgccataccattcaatgttcaaaacagataaaaataagtcttatgctgaaaattctgataatcatgcaagacgattgaagcacaagaaggttaaggatactggtcagagtgtaacaaaaattttggttcacggcaaggatattgttgagaggaaaacg

SEQ ID NO: 46843 - DNA, 346 bp, Glycine max
gtatgccatttttgcacttgaaaaacatttcaataggccacttcaaatggcacaacatgcccaactcaagtatctccttttcactgataatctaaatatagaacaagtgaaaccgccaatatataaatttcagggcccattttatctaaagagccacaataacaaggtaccctttaaaacaaaggagggccaatgtcatgacattcaggtgcaagcttaacagaaatcccccgtggcttatagttcaatccatacttaccttgagaatcctttccttcacttcatttggcgtgacaacatagacatgtgctgcccagccactcaaacaatcacgatctacaaatga

SEQ ID NO: 46844 - DNA, 430 bp, Glycine max
acattgtatataaatgattgcaccgcacaagaaaatgattaaaaatagcaagtgaaacaaaaatcgcacattaattttcccctcctgtttctatcgggtgccacattttggcaatctctcatttctttttcaacactcttcctctgcaccttcgaattcgtataataaataaatgaattaaacaaagaaccatttcgaataaattaccaaaattcctatattctaaattcagaaaagcgtaaatcaaaattttcctcagcgacagcacttggagcacagtattaggaaaacaacgagaaagacaatggaagaaagcgctatggccacaccaagaaccaccttgttgggcccatgatgatgctccttcatgtgacggacactgccaccaccaccaccaccatcaccatcatcataatcataatctccatta

SEQ ID NO: 46845 - DNA, 473 bp, Glycine max
gacaaaatggactcagaaccttacagcagaaggttcctcctgtgaggaaaaataggagaggaccaaggtctcgcagctcgcagtaccggggtgtcaccttctaccgcaggactggtagatgggagtcacatatttgggattgtgggaagcaggtttatttgggtggatttgacactgctcaagctgctgcaagagcatatgatagggctgctataaagtttcgtggagtagatgctgatataaactttagtttgagtgattatgaggaggatttgaagcagatgagaaatttgagtaaggaagagtttgtgctcttacttcgtcgacaaataaatggaatctctaggagaagttcaacatacagaggtgcattagcccttcgcaaagatgctcaaggagaaccacgaatgggaccatttgttggcatgacatgttatcctaagccatccatcaattgtgatgatggaaaagcg

SEQ ID NO: 46846 - DNA, 324 bp, Glycine max
atttacacttgattgtgttgttttgtttcaatggcagaaatgtgacatgtcggaagggtcgaatttcgtcaacgggaaaccgatcattccggttctcaacgaacggactctgccgaagttcatggaatccgcgagggaggcgaagaccgtcagcagaaacagtaaccggttgaaattgttctctggcagggccaatcccactctctctcaggaaatggctcggtacatgggcctggaacttggaaagatttccatcaagcgatttgttgatggggaaatatatgtccagttacaagagagtgttagaggttgcaatgtttacct

SEQ ID NO: 46847 - DNA, 383 bp, Glycine max
acccaccatctaatttctgattcacaggcctatcctttgagataggagcacacgtgggacaaaatgctattctctatttgtcatcactttaatcacgcactatcagtacaacaactcactcactaagctaaacaatttcatcaagcctgccatggcttcctcgtgtgcttcctctgccattgcagctgttgccatctccacaccaagttcccagaagaatggatcactcttgggaagcacaaaagcttcttttcttagtgggaggaaactgaaggtgaacagttttacagcaccagttggagcacgatccagcactacagtgtgtgcagttgctgagcctgataggcctctgtggttcccaggcagcacccctcctccatggc

SEQ ID NO: 46848 - DNA, 496 bp, Glycine max
ttcttattgaaatacaggattctttgaagtcgcctccaccagaaaacgtaaccatgaagagggcctcaacaatatcagtcattgtcacaacatttttctacctctgctgtgggtgttttggatatgcagcctttggtaatgatacaccaggaaaccttttaacagggtttgcactctataaaaaacattggcttgtagactttgccaatgcttgtatagtaattcacctagttggtgcatatcaggtgtatagccagccactttttgccaatgttgagaattggcttcgtttcaagttcccggacagtgaatttgtgaatcgcacatactccttgaaactccctttgctgccagctttcccgctaaattttcttaggctgactttcagaactgcatatgttgcatcaacaactgggattgcaatgatatttccctacttcaatcagattttgggagttttggctggcataatctactatccattatctatatattt

SEQ ID NO: 46849 - DNA, 357 bp, Glycine max
cgccgattgtcttcttccattttccaagtccttcaacgacgtcaggaccacacgcgcgcgtgacgtcgtcgccgtcgccgtcgaggagattcaatccgaacaacatcaacctcctaagaagaaaaaactgagccgctgcaagacggcacctgcgatggtcaccatgcgagaccttaaacctaagacaccccaactccccaaacctcaatcaagttccataattcgacaaggcatgtggttactcgccgtgtacctctccataggagtagtcatatactccttcaacagggaccgtttttccggcatcgaaacacaccctgtggtcgacgcactctacttttgtatagtcaccatgtg

SEQ ID NO: 46850 - DNA, 448 bp, Glycine max
aataatctaaaaacgatttatttttcaagtatgaaaaacatatttaagcctaataataataataataagcagtcgattcattgtatgctgcttgagagaacataaatttaagggccggggaggcccatcaaaattttaagaagcttttacatttgatacgattttctgtatatttcttgtattgaagcaatgtaaactctatttccattaacacgatttgacaaccagaagggctatgctgcgcacaacagtaattatattcgggagtccacttttgaagattatttacgtcaagctagtgtccacaggatagctccctagcactcgcaagaatgtagcaaactcctttagatgcctcagggcattctgtgcactctgctcagccattgatgcttcaaaatcaacatagaaaagataatcaaagtacttggaattgttgctatcatct

SEQ ID NO: 46851 - DNA, 402 bp, Glycine max
ggtcaaacatggtaaacataaaattcccatatagtttcatcgaccattcacacaagccttttgctacgctgaactaaatgtgtttttaccttactatctataaattataagtttcgaatgagaacaactgttcacccgaaagaaaggaaaatgttaatggaacacttcacataaaccatcgcaaaaaaatatttacggttcgacacaacagttgggaacatgcatttacctatacgcacacacaacttcaaacccattggaccagagacctaaatcataacagcaaatgacagacattttcatttccgaatgaatgccacggtagcaacacgggagcctacggatccaccaaacatgaatgttggatatgtgcggacatgacttacatactgaaatgggggc

SEQ ID NO: 46852 - DNA, 375 bp, Glycine max
ggtgatatttgcggaaatgtttgtgatcgtgagcttcctcttcaaaactccggcgaggaagctggtgatcgtcacattggatcggctcaagcgcggtcgcggccccgttgtcgtcaagaccgtcgccgccacgctgctggtggtgctcgcttcctccctctacagcatcgcaaaaatccggcatcggaacctcgatgctcccgtcgctaaccccaccgaccaagtcctcgtgtacaagcacatgctcgaagcttctcttatggatagattgcaccattacataagagagcttcggttactgaggaaggccatggaggctgctaagaaacagagtcgaagttttgagggtggcaaaagtgtcagtgcagcggagca

SEQ ID NO: 46853 - DNA, 437 bp, Glycine max
gcatgttgagcgttggacaactgcagattgttgggcacggggatatgattgttggtctgcagttgatgatattggatctctatctgttatctaccagatgcttgaatctgatgcagcaaaaggtattctatacttcagacagtcattgcttctcctaaggttgaactgtcctgaggctgctatgcggagtttacagttagctcggcaacatgcatcaagtgagcatgaacgtcttgtatatgaggggtggatcttatatgatacaggtcattatgaggaagggctctggaaagctgaagagtctatcaatatcaaaagatcttttgaggcctttttcctgaaagcctatgcattggctgactctagtatagatccatcatgttcaccaactgttatttcacttctggaagatgccttgaagtgtccttcagataatc

SEQ ID NO: 46854 - DNA, 358 bp, Glycine max
ggcaagcaatggcagagcttttttattcatgcaatgatcattattttgggtcctaaagaggataggctaggcagcttatcactggtcttcacacattggttgatgtgttttgctcagattgtggagaggaacttgtttggaaatatattaaagcttatgaggaaacacaaaagtacaaagaaggaaaatgcgtactagacaagttcaagataatcaagagcaatggatagtaaatgtattttaccatgttagatccaagccatatgatctcaattgctcataggttggttgtgagtttcttgcaaagatcaggggggaaaagaaattgaatttgttcaaatttcaaaacattatttta

SEQ ID NO: 46855 - DNA, 474 bp, Glycine max
atgcaacaagagtattgcttaatcatccagtaactgaaattcaatgtcgcggagacatttgtacacaaactttcattccacaaacacatcacttgattcacttccaggcgtagtactgcttgagcagctcctgtttatttaattattcatagtttcacatacaaacatcagagcaggaagtggcggcaattcaatgcaaaatcaaagaatgcttgcatgcatggtcacaatcacaaggaaacagaagaacagttgacaatagaagagcctttgggaacagaaagaaccttcccaaaccaaccaagttgaccccacaattccccatccgaattcttcttcaccccaatctccgcgcaccaaatctccatctccttcccattgcattggcactcccaaaccacgcacagtttcccacccaaatcagccatggtggccccacacaaaaacctcggcaaagcattctccaaccccttc

SEQ ID NO: 46856 - DNA, 503 bp, Glycine max
  unsure (1)..(503): unsure at all n locations
aggcattgggcttggatgtgctctaagccttacaactttcactcgggctttagaatattggtatggtggaaagcttgttttcgatggctatattacttcaaaacaattatttcaaacatgcttaatattggcaaatacaggtagggtcatagcagatgctagtagccttactagtgacgttgcaaaaggggcagatgccattggcctagttttctcaatcttaaacagaaacacaaaaatagattctgatgaaatgactgcatacatgccccaaaagttaataggccatatagaatttcaagatgtctattttgcatacccatcaagacccaatgtgatgattttccaagaattctcaatcaaaattgatgcaggtatatccacagcagtggtaggacaaagtgggtctggcaaatcaactataatgggcttaatagagaggttttatgacccacttaangggatagtaatgatagatggaagagacataaggtcatatcacc

SEQ ID NO: 46857 - DNA, 331 bp, Glycine max
caaccactcttaatttctctcttccttgctcatttactcacctctccaacctttcactttcagctttatttgaatccctctctctcctttccaaatggccagcgttgaggttgcacatcaaacaccaacaacagttccagaaaatgaaacaaccgaggtaatcaagacccaggaaacaaccccggaaccagtaccagccactgaggctcctgcaacagaacaagcagcagctgaggttcctgctcaagaagaacaacaagcaactgaggttcctgccccagaatcaaccaccgaagcaccaaaggaagaaaccaccgaagcaccaacaaca

SEQ ID NO: 46858 - DNA, 418 bp, Glycine max
acatgaaattcctcctttattcctttgggagatgatcacgattactatgtcatgattgtattacacttgacctataagttgaatttaatgtgaaataaaatcctaacagctatcctatagaaatttgatcttggttacaagacttgtttattaagaattagaagatatagctagacataaaactagaatatgcaacaacatcaacccaatctggaaaaagattcttcaatctctttattggatcaaccaacttttggtctaaaattgctaggtccactcgtaatgcttcagagttgttagcctctaaccagaaggtccaattcccatcgctaggtccactaagacgacatatatatgattgtggaccatcaccataggtttcagttcctggaagcaaattatctgcaaatgaccaact

SEQ ID NO: 46859 - DNA, 400 bp, Glycine max
acaaggaaggtgagacatgatttcattgtacagatatcttatgatgatgctgtggtcttgattaatcagactgaccaacatagagtactgcgaaaaacaaatggaaaggatctagaatcttaaacttctctaaaaatcaacatgatattcctaaatcaaacaagcagaaatcaagatcaacagtaggcatcaagatatttatattggtgcttcctattatactgaagtaagcttgcataagtccggtcccaaattccaatatacatacactcatcatcagggctcatagaaaccccagaaatttccccaaagaaatcaatctcttgacgttttctgtagtctgctttcgtgctataaacatgcacaaaatctgcaggctcagcaaccaccatatattgac

SEQ ID NO: 46860 - DNA, 418 bp, Glycine max
aaacaaccggtgacatgcaaaaccacagaccccactgttgccccaacagaaaatgatgataccaggaacaagaaggtggtaacaagagtggtgtatccatttgcaatggtgaagccaggaagaagagaaggtgatgtaacattgaatgacataaatgagaggatcctaatgcctcccacatggccagtgaggcatgctgtaggagactttgcatgtcggccatgcgtgtccgcagagggtccaggcctttcatggaaagcagtggtggcccttactagaattcacacacagggaggaagaggcaccatcactattatcagaaccaaaggctaagcaatgttaacattgagacagagctatgttggtatggcttggctagcacctaactagcttttacttgaagcagctttttgggcct

SEQ ID NO: 46861 - DNA, 387 bp, Glycine max
gggttttagcgcagcttcttctagatttaaggaagatgggtaaggaaaaggttcacatcagtattgtggttattggccatgttgactctgggaagtccactaccactggccacctgatctacaagcttggaggcattgacaagcgtgttattgagagatttgagaaggaagctgctgagatgaacaagaggtctttcaagtatgcctgggtgcttgataagctcaaggctgagcgtgaaagaggaatcacaattgatattgccttgtggaagtttgaaaccaccaagtactattgcacagtcattgatgcccctggacacagggatttcatcaagaacatgatcactgggacatcccaagctgactgtgctgttcttatcattgatt

SEQ ID NO: 46862 - DNA, 230 bp, Glycine max
gttctcctcgtaggcggcgcggaggcggccgatgagggcgtcgaggctgccccaggcttggcggagcgggcagggacatggggcaggtgggttggggagaccgaagaacgggcaagggtggttatgaaccttagtcttcccgaactggtcgaggtagtggaggaattccagcacgtgcgcaccgctgcacaaggtcaaggagagtggtggacggtggttcctcaggtact

SEQ ID NO: 46863 - DNA, 387 bp, Glycine max
atggaatcaaagattcattttcatttaaaatatcaaaagcacataaaccaacaaccacatcacctaatttacaaaaaatctaattatttttttaaaaaaacacctctcattcattcactcactccagtacttctcatcaccctctttctccttcccctcatcactctccgacccatccccgcccatcttgaaccgcgtcacattctccaccgctgcgctccggaacagccccacgtctacggcgccactcaccatgtgatacccacgcgacctcaaatcccttgccccatcatacaccgtggcgaaacctgcgagataagccccaatctcaacgttgtcgtttcggctcttcaacaccttgttctcagcattcttcaaaaccttcct

SEQ ID NO: 46864 - DNA, 293 bp, Glycine max
aaacactcataacacaaagcacatagcaaagctcatcctagagttaaaaaatggcagcaggtccttccatggctctctcatccccatccttggctggcaaggccgagaagctgggcccatcagccccagaagtgggaagggtgagcatgaggaagaccgtcaccaagcaggtctcctcatgaagcccatggtacagcccataccgagtcaagtacttgggcccattctctggcgagcccccgctctacctaaccggtgagctaccaggcgactacagctgggacactgctggg

SEQ ID NO: 46865 - DNA, 422 bp, Glycine max
gttatgacaatcatgagagattaagaccaccatatgattaccaagagagatggaatgttcctccttgttctggtcctcggtatcatgacagaggtgtgcctgctccttatggttgtcattctagtgaatcagttagtttttcaggtcatggatggagatttcctcccccgtcaatgaattacagggactccttgcattttagaccacactttgaagatgcaattccagtagcaaaccgaggcccaaacttttggcagccaagatgacagaaattactattaaatgaaggttggcatacttctgagttctgtctatccgtaagcctctttggttatccttcaccaattagtatcattgttacttataattcactcattgaatgttagatacaacccactttttgtcgtgggccctgcctttgt

SEQ ID NO: 46866 - DNA, 405 bp, Glycine max
agcctgtacctttcttccctctccctttcataggtcccttgccagtgtacctcccctgtcattggccacaaccacatttcccttggatggtcaccatcatctgcagcctcggccagatcttcgtccatacttttcaacaatgaaaaattgaagtattttgaccacataaaacctttccgttgttcaatagggtgctgctcttccatagaaccagtgttaggatttatatataccatctttcgtgcactatgataagcccatacattgatgagaagttccaacacgcgacagtagcagtgcttcttctcaatctctgaagagcctaacaagcacaggctgtatttagtggagtctctgtgcttaacatcaatggaatcaacaaacattcgaaagaacattatgaac

SEQ ID NO: 46867 - DNA, 382 bp, Glycine max
ctgaagagagaatggagaaaggtgttagtgtatgggatgatatatatcgtaatgctggaaaatctgagaaactgaagtttgaagtcaatgagagggatgaaggggagcttgagagaacaggacaatctctgagcatttatgagatatacaatggtgcatgagtgtggccatttttacaccatggttctctctatcgtgggttaagcctttctagaagagcgcagagacaaacttctgatgatgtggatgcagatggtcgcttgcctcttttgaatgacacatattatcgggacattctctgtgaaatgggaggaatgtttgcaattgcaaatagggaggatagcattcacaggaggccttggattgggtttcaatcatggcg

SEQ ID NO: 46868 - DNA, 330 bp, Glycine max
caaaaggattcattgaaccgtgatgagtcctatatgctaaggggataatccaacatccacatcagcttatttacaaagaatctaattatttttttaaaaaaacacctctcattcatttactcactgcagtacttcttatcaccctctttctactccccctaatcactcttcggcccatccacgtccatcttgaaccgcgtcacattctccaccgctgcgctccggaacagccccacgtctacggcgccactcaccatgtgatacccacgcgacctcaaatccctcgccccatcatacaccgtggcgaaacctgcgagataagccccaatc

SEQ ID NO: 46869 - DNA, 397 bp, Glycine max
cctatctggagagaaacaaaggactcaaagaagctatgatttcactggtgttgtatcttggtttgctgcaaaatgtgatctcattcttctcctatttgatcctcataaactagacatcagtgatgagtttaaacgtgtaatcgcatgtctacgtggtaacgatgacaagatacgagtggttttgaacaaggcagaccaagttaatactcaacaacttatgagagtttatggagcattgatgtggtcactgggtaaagttctaaatactcctgaagttacacgtgtatacataggctcatttaatgataagcctatggatgaatgcttcgtcagtccattaggacaggatctctttgagaaggaacagaataatctgcttgctgatttgatggatatt

SEQ ID NO: 46870 - DNA, 211 bp, Glycine max
tggaaatttggtgacaaaaaatgatactttcggcatgcatcacgagagatgtatggcagatcacgagctttggctaaagatagatcaataaacagatctatactccgaacctatgcccacgaagatgggagtgctggatcctggtatatcgggcttgatgggaagcatgtcgatgaggccaagcattgttgctcatcttggacgacaggag

SEQ ID NO: 46871 - DNA, 277 bp, Glycine max
cacaccggaattataaattttcatttgtaaggggaggaaagtggaataggagtgtttaacttttggggtgaagtgtaaactacaaccaactacacatgaagcaagattttcgtacaagttttgtatgcacacttcgcaaaaaaaaagatgctttcacctttatgtgcaagcctaaaaatcaatatactatcacatgaatgtcataaagtgactacacaaccagagaacctgaaaaacaaaccttttatttttaattacaatggacccggggtacaat

SEQ ID NO: 46872 - DNA, 419 bp, Glycine max
tcagctcagtatttggagatctgtacatatactgagctgatattagttgtcaggagaacaagggcttccttcattcacaaagattcttagcttcttcatgctatttcctgtctaaacttattggacgacctattctgtcctctctctggcctgaaaagttgaaattcttccaaacccaggtagctaaaagaagaaagggtttgttgaactacatgctttttctaagactgactccgaccctgcccaacacatttattaattttgcttctccaattgtggatgtgccttatcatattttcttcttggcaactgttattgggctgatacctgctgcctatgtcacagtcaaggctgggttggctcttggagagttacaatccgtgggtgatctctatgatatcaacttaattgctactttg

SEQ ID NO: 46873 - DNA, 503 bp, Glycine max
  unsure (1)..(503): unsure at all n locations
ctcacgactgagtctgcaatgaagaagattgaagacaacaacactttggttttcattgttgacttgcgggccgacaagaagaagatcaaggatgcagtcaagaagatgtatgatattcaggccaagaaagtaaacaccttgatcaggtgagcctttataaagtgatgcttatagaatttgtttgttgattcattattgctattttctaatgacaatggtatgcttgcagtgaatttgatattgcagttttccttccaaacatttattatactgagacatacatgttttgtgctttttggtttgtggcatgctggtgtgacaaagggttcatgttgtgcacagggcaacattgaaatgggacatgcattgaattgaatgtattttattgaaagtgtataatataatcctaagtaggtataacaaggcaaatgaaacaacaaatttatgaaaaacttgcattcaaacttacaacagatgccatttcttctgaattntaatttttc

SEQ ID NO: 46874 - DNA, 434 bp, Glycine max
gatgctataataaaaacataaataagatgacttcaaaatcaattttaaccaaaatcaatattgtcaaccctcatccaaacatgcactaacccaaccaactaactagctatacacactattatgcataaccttgtttaaaacctacccaccaaaaaaggagaaaaaccctcgtttgggttgttcttccaccaccacggcctgcatgctatcctgctccacgagcctccaagcggcttgttcgaacgccaagccagccagagtgggaggcttgttgagcacaagagggtagcctctattggtgcttctaataacctcagtgtcctcaggaatagccccaagcaagggcaaccctaacatttcttgcacgttcaacaccgacagcatgtcttctgcttttatcatatcggttcgaacccggttgacgatcattttga

SEQ ID NO: 46875 - DNA, 480 bp, Glycine max
ctttatgctgcgaaggaaaaacagagatcatttaaggtctttgttgctgaaggggcccctagatatcagggacatctccttgcaaaagaattggctgctagaggcttacagaccacagtaattactgattcagctgtttttgcaatgatttctcgagtgaacatggttatagttggagctcatgctgtcatggctaatggtggagttattgcaccagtggggttaaatatggctgcacttgcagctcaaaggcatgctgttccatttgttgtacttgctgggagtcacaagttgtgccctttgtatccacacaatcctgaagtcctactgaatgagctgagatccccatctgagctacttgactttggggaattctcagattgcatggattctgcaagtggtgccggttctcttcatgttgttaatccaacatttgattacgtgccaccaaaacttgttagtctctttattactgacaca

SEQ ID NO: 46876 - DNA, 126 bp, Glycine max
gatgatgatcgatatctagctgaatttaaggcatgcaatgacactaatgaagctgctgatcactctatcagagcatatgaatctgctgcccttgcagtacatgctgatacacctcccacacatccc

SEQ ID NO: 46877 - DNA, 421 bp, Glycine max
cataccccttcctctctttgcctccccttcttcctcaacactttcctagtgccagttaagacaaacaataccaaagcatatttcaattgaagttacacaaattactagcatatcatatcatatatttggtgtgttgtcttaggacatatatatgggtaacgcagactatgcatacccttcgggtatgaacgtggagtgcgtgcaccgagtggccattcctccccctcaacccttcttcaagtccctaaagtactctatgaaagagacttttttcccagatgacccgtttaggaagttcaagaaccagccagcctctaagaggttcctgcttgggcttcagtacttcttccccatctttgagtgggcacccaaatacaccctgcacttgcttaaatcagacctcatctctggcatcaccatt

SEQ ID NO: 46878 - DNA, 489 bp, Glycine max
ctcgagccgattcggctcgagagatgtcacagaagttgcagctctttatcattctgaaaaaagtcacaagacagtagagtacagtgactacagtttttctgatgccaatggtgacaaaggtcattcttctaatgaaaaaatccacgaaaagaatgatactcattccacatcaagatcatcagtttcagaaaaggatcagctatcaactggaggctcatatcattgggaagattggcatactgatttacttgcctgttgttctgaaccttgtctttgtataaagacatgcttctatccttgtgggacattgtcaaagattgctactgttgcaaataacaggccaatatcttctgcagaaacatgtaatgaattgatggcatattcattaattttatcttgctgttgctatacttgctgcataaggaggaagcttcggaagatgttgaacatcagggggggctttattgatgattttctttctcatttgat

SEQ ID NO: 46879 - DNA, 335 bp, Glycine max
ggcattgaaagcaacttaatggatcttaaactcgagatgcataattctgaatgcattattctttgcaagagtgtcccaacagacattattcaaaacactcatttcattcaagtaaataaattatgtacgggcaaaacgaacaaaaatacgcctctggatggggctcctgcaagaaggacagtcttgcattccttggttctcatggagctcattgcatgttgtgcaaactacctgatgagcacatgggaggaatacaacagacatcttcgcagaaaggcacatgacacattctctttcccgttttacaccccctatcaaagagcagtcatttaaat

SEQ ID NO: 46880 - DNA, 423 bp, Glycine max
tattttcatcatagttggtttgtgtggtttcttctatatattgggtttgtggcaacgaagcggttttggaaagggagacagcatagctgttgagattactaaacatacagattgcagtgttctctctgatctaaactatgagacccaccatgatgatgattctggaacacctaacagttctgacacacaagtcagggagttcaagccgtgtgatgatcgctacattgattacacgccttgtcatgatcaagcgcgagcaatgacatttccccgagaaaatatggcttatagagaaaggcattgtcctcctgatgatgaaaaattgtattgtctcatacctgccctcagaggatattcaacaccattttcatggcccaagagtcgtgattatgtaccttatgcaaatgcgccttacaagagctt

SEQ ID NO: 46881 - DNA, 450 bp, Glycine max
gaaaaaagagagtaaatgaaagggcaacaaggctttattagtgattctatatggcatacaatatcttgcggtcattgtttagtagctcagaatctgacataactgatactgaaaaagaccttgacctgcttcccattgaagatttccgaatgctccttaagtttgaggcctcaatgcgatgcctaatgacccagtaactcatggtgcccaaagttgtggccattatagttgtccctatgatagtgactccaattgcaagccacttctgatccttccccaccactacaaatgacagtgccaagaaggccacagaaataagcacacaagccaaccacattagcttgttaatgatggccatcatctgcttctttgctttgctttctatgatcacaaccgaggtttgcaccaccaccacggccagagaaatgaagagggcgatggaatcaaaga

SEQ ID NO: 46882 - DNA, 410 bp, Glycine max
aaaagattccacaccttctagagcttggtatcaatgcagtagagttgctgcctgtctttgagtttgatgagttagaattccagaggcgtccaaatcccagagatcacatgattaatacatggggttattcgacaataaatttctttgctcctatgagtcgctatgctagtgctggtggaggatcagttaatgcttcccgagagttcaagcaaatggttaaatccttacattctgctggtatagaggttattttggatgttgtctacaatcatactaatgaggctgatgatgcctttccttacactacttcatttcgtggcatagataataaggcttattacatgctggacaataatgggcaattgctgaacttctctggctgtggaaatacattgaattgtaatcatcct

SEQ ID NO: 46883 - DNA, 439 bp, Glycine max
tgtgaataagcacaggaaacatgagaatcactaaacttattatggaacagaaaagatgttcttttgtgactatatacagagatttcaagccatacctgctcatggtcttagtccaggttggcttaagcatcttatatctgatcactaaagcctccttcaatcacgggatgagcccttgtgtatgtaacttatcggcagatagtagctgtggttgtgatgctcccttttgcatactttctagagagaaaagctagaccacacttgacattttctctttttgtacaaatttttgtgctttctttgctagggtaagtgcaaataaatatgcatgtttccacaccatacgagaactcaagtatgaaaacttgatttgtctaattttaaaaaattcatgagtagtttgactcttaatattcactttgcaagcctgaaatacaca

SEQ ID NO: 46884 - DNA, 253 bp, Glycine max
tcgagcttcacactgcataccttatgtcttccgaattcgaaattaatttgcaagatggctcatgaaaaggctcaaatcaacattcgtggtggtctggtcactgtggacccatgaggaggcaaccaccattaactagctgactaagcctgttgtggagaaagaagcttcagggcatgccatatgagggcatgcacgtacggactcggacgggaaccagatacttatgttaacaaaataatctggaaccctaatg

SEQ ID NO: 46885 - DNA, 429 bp, Glycine max
gaataaaagggaaatggggtatccattacagtgttgcaatataagcatttacacatgattcagacaaaatcattgatgggaattatattcagttattccctattcagcatccgatgggcactcatgaatcacagcacacacattcatgagtctggcttggttttatcaaacaattccctaacaatcttcatacctgatgtacgttgtggtgtgtgtaggaaaacttggcttcaaaatttcacagaaaacaattgtatctcgcctacgtactatttcaccaaacagctatcatgacaagcattgtgaaaatgaatgctgggaagtttaataagttcacaggggcagaattagggaggatcgggtagctatcaggaggtggcagcatgcattcctgaccattaaagtagaccttgcgaggaaatgcccatc

SEQ ID NO: 46886 - DNA, 516 bp, Glycine max
gttttattgtgtggatttggatcctacccttttgcttaaactctattaacttgtcataaatggtttgaaatttgaatgaataatacatattttgatgctcactgccatatactgcatattgatcaggaattgtgatgggggctgaacagcaacacatggattcgcacacgacaatggtaattgctgttgctgttgccagcacttcacttggtgcagtcattctgtgtgtgttgtgcatctggatttactacaccaaatacccttcaaaatccaaagggaaaaacgttcaaagatcagatgctgagaaagggctagcttcatcaccatttttgagtaaattcagctctataaagctggttggtaagaaagggtgtgttccaataattgactataagcaaatagaaaaagccaccggtaatttcaaggaaattaacatcttgggcaagggaggttttggatgcgtttacaaagctcatttggatgataatttggatgttgcggttaaaaaattgcact

SEQ ID NO: 46887 - DNA, 425 bp, Glycine max
ggggatacgagaatacaaactacaatcttcccttcaccctctcagatctaactcatccacccattcgatttgttttttcctgttttgtacggaatttcgatcgaccaagatgagcgtggttggtttcgatttcggtaacgagagttgcgttgttgccgttgcgaggcacatagggattgacgttgtgctcaatgatgagtccaagcgtgaaacgcccgccattgtgtgcttcggtgacaagcaacgcttcattggcactgccggtgctgcctccactatgatgaaccctatgaattcaatctcacagattaagagactcattggtaggaaattcgctgatcccgaattgcagcgggatcttaagtattgacgtttctcgtcactgaggggagtgatgggtacccgttgattcatgcgcgatacat

SEQ ID NO: 46888 - DNA, 483 bp, Glycine max
gggagatcttcacggcctcaaagtgtgtagaggagcccctcttctcacacacttttttgctgaccatctcttcctattttgcagggctaatgttaattaagttgatatccttcacagtattctcggtgcttttgagaaagcctcaggtctttccatcatcttccaaaaatctgaatttttttagcagaaacacaccacccagcatcaagcaacaaatctctggacaactgcaagttacagattgtctgggaacagggaaataccttgggatgccctctatgaatggtaggaagaaaaaatccatcttctcctatctgagggataaaatttggaggaagatccaacagtggttaacacctttcaaaggttggtagagaagtgctcatcaaatcagtatctcaagctattcttgcttactgcatgagtgtttttctcctcccttctacccttcaagatgagatccaaaagatgatgaactcattc

SEQ ID NO: 46889 - DNA, 458 bp, Glycine max
ggaattaagtgcttccactctagtactttaccctgcatcacagccaccacaagagcctaaaaatgagaacaatgggggcatagtttttgactcaaaaaatttgcagcaaatgcaaggggaaatgcccaaagagttcctttggccttctagggacttggttgacaccacccaagaggagctaaaggaaccccttgtggacctagcaatctttaagaatggtgacgagaaagctatttccaatgcagcagagcttgtgagaaaagcatgcttgaagcatgggtttttccaagtgataaaccatggtgtggacccagatctcattgatgctgcatatcatgaaattgactccatttttaagctcccattgagcaaaaagatgggtgctaagagaaaacctggtggtgtctcagggtactctggtgctcatgcagatcgttattcgtccaagttgccatgga

SEQ ID NO: 46890 - DNA, 431 bp, Glycine max
aacagaaaatggaacttgattcaaatacgaccgtacatgatatcactatgtggtttgtaagtgcaggatgagctgtactcaaactccgtacagggtatttcaaaagaaaaggaaaatgaataatgattagccaaagggagtagtagtagtggtgacattaggcagccaggcacaggcaaaagcaataataataagcagccaaagggtaaataaagtaaactagaagttggaagggttggaattagagcattgctgccactcaatgaagctttggagggtagcaacatcagccctatagtgcttctgtgtgaattcaaacaaattggaccatgtgaaatcagggtacttcctttcctcatttctgcataacaaattgtctgggggcctcactattttgtcttctcttggacacacaaaataaacaagggacc

SEQ ID NO: 46891 - DNA, 539 bp, Glycine max
cgagggatgagctagtggacgagagcgaggaatcttaacctgctatccaaatactagtttggctatggccaaagagttgatggaggccaaggacattaagcaattaccagtggttaaacgtggtgtagatcaaagtagagaaatgaagaggagaattgttggtcttcttcattatgatgcattatgatacacaacactaaatctgggtttctcttttccacgtataaaatgccttttagctatgtcctttggatcttttataatacaatgaatacttttttccactgcaaactagattttgtttaattagttgagcacatgggaatgatgctcatttcttgtctgtctagactgactatattttgaacaaaagctggtttttaaaatttctacttacccaactttttcctgatagtctttgatacgttcgaagaacttaaggaatcaggcagataagaaatcgatcttttaaaggtttatagccttttcttctctgccactatttgttgaacaacattattataaaaatagagcacaat

SEQ ID NO: 46892 - DNA, 419 bp, Glycine max
gttcagggttgggacgacatgctacgccttggaataaatacagccataagtgttcgtgtctccaatacgcttggcatgtcgcatccaagagcagccatatactctttctgtgtgacaatgttccagtctctcctccttggtattcttttcatgaccgtaattttctttagtaaagatgagtttgccaaaatctttaccgacagtgaggatatgatactagctgctgctgatttagcataccttcttggtgtaacaattgttctcaatagtgcttcacaggtgatgtcaggtgtggccattggaagtggatggcaagttatggttggttatataaacctagcatgttattacattgttggactccctattggaattttccttggtttcaagctgcatttaggggtcaagggtctctgggg

SEQ ID NO: 46893 - DNA, 406 bp, Glycine max
aaccgtgtcaaatgacattgtgtgatccatgtagccgacctcacctagtgggataaggctttgttgttcttgtttttgttattgctgtttactgtctaatgcctatggagttgcgagtctctctgacttttattgttccccttgtttatcatctccagtcataccaaatggccaacagagttcaaattcctaccaacaattcagccctcattgctatgattgcagatgaggatactgtagttggatttctgttggctggagtgggaaatgttgacatacgtaggaagacaaattacctcattgtggattcaaaaacaactgtcaaacaaattgaggatgcattcaaagaatttacaacaagggaaggatgttgcaattgtgctgattagccaatatgttgcaaata

SEQ ID NO: 46894 - DNA, 469 bp, Glycine max
ttggattggtaaggagtacttcatgagtgggccacgcggaaatgacattcagagaacaaacgttcctcacattcgattggaattccgtgatacgatttggagagaggagatgcaacaagtttatttgggcaaagccatcattcctgaagtagtagacaaataagatgccagtggcattcgtttcatacacaatgaggttgtaaacatattctattaccatatttcctgttcttcattttttgaaatgtttggtgcaggttcttctttgtttacgtattggaattatgcaattcctcacttgctcccgaagttaactgaatctgctcacttgctgtaggtagaaagtatatttcctcaaacccatgcagcatcagagatgtactaaggctgaagacattacaacactggtctgatgatatgaaccagatacatactatagagaatcagcaagatcgctgagcttgagtat

SEQ ID NO: 46895 - DNA, 351 bp, Glycine max
ctctgcctgaccgattgctagaatggaataccgatgctcagtcatctatattaccatactcttgtgtcttgctcttgcaggagagagccatgtacatgcatcggtacctgaggaagattattgggaagctggctggacgaacactcccattcccactgcactgcgagagcttctaaagcctgtccctgcaggcgttgaaatcgctgaacgccctaagcaaagtgatgatacacagtacccaaaaacattcttctataaagaagaccttcattcaggcaaaacaatgaaagtacaattcaccatagcgttcctatgcacaaccttatggtggatatacatggataacggata

SEQ ID NO: 46896 - DNA, 497 bp, Glycine max
  unsure (1)..(497): unsure at all n locations
caaagaaccaagaaaccaagcaaatcattgttctctctgtcctgtgttttgtgatttcccccttcaagccaccaccaatggccaacaacgagatgcaagttgagaggggtttggacttggaaaggtacatggggcgttggtatgagatagcctctttcccttcaaggaaccagcccaaggatggcgtgaacaccagagccacatacactcttaggaatgatggcactgtgcaagtgctcaacgagacttggagtaatggcaagagagggcacatagagggaactgcttttaagtctaaccgcacaagtgatgaggccaagttcaaggtcaagttttatgtccctccctttttgcctatcattcctgtaacaggggactactgggttttgttcattgatggtgattaccagtacgctttgattggccaaccaagcaggaattgcctttgggtaagtaagcctatttgccttttacttntcatgttttggtcttgtctc

SEQ ID NO: 46897 - DNA, 389 bp, Glycine max
caatcttcagtgtttttttttttctctctcctccttataaaccaatcaaccttagcttcagccacatccaaaattcagagtgtggttggttgtgttgtgaaattgcaatggaggtgttgaaagttcaggtttttgtgatgtccattgtggctcttgctttggcttatgtggcaccttccatcaatgctcaggtccttcctcctgcccctgcacccacaagtgatgggatagcagtggaccaaggaattgcctatgtgctaatgctgttggctctggtccttacttacatcatccattaacccattcatctattcactatgtttttcttctctgttgtatttatttcttcaactctattctttcaatgaaattcttttttattatgtgta

SEQ ID NO: 46898 - DNA, 507 bp, Glycine max
aatcccggaaacaatttgaagaggaaagaaagtggtggtggaaaatcagctttggatgaaatgatgagaatgggtttaaatgccattgcatgagtgaagggcaccagcgtcaaatgcagatttttggacaaaacccacaccggatagttgagggctattccgaagagtttgagagtacttttctggagcacatgaagcgcagtcaccgattcagccgtgtggcagccactgtagtttataacgaatacataaatgacagacaccacattcatatgaactctactcagtgggccacgcttactgagtttgttaagtacttgggtcgaactggcaaatgtaaggttgaggaaacacccaagggatggttcattacatacatagacagagattccgaaacccttttcaaggagaggatgaagaataagagaatcaaggcagatatggtagatgaagaaaagcaagagaaggagatcaggagacagattgaaaaggctgagcaaatgatgc

SEQ ID NO: 46899 - DNA, 255 bp, Glycine max
ccgattgctagaatggcatttcgatgctcaatcgtcacttgaaccatactctgctctcttgctcttgcaggagagagccatggccatgcatcgctacctgaggaagattatggtgaagctgattggccaaacactgccattcgcactgcactgcgagagcttataaagcctctccgtgctggtgttgaaagcgatgaacgccctatgcatatagatgatacacagtacccaaacacattcttctataaagaagac

SEQ ID NO: 46900 - DNA, 464 bp, Glycine max
aactctgaaaacatataatttttttatataggtaaaaatgtctacaaggttactaagcaataaacaagtaagaccacattcctatagatttcaatctgcaagaattttctctttatttttctttcttgttgctaatgaaatctttgacaatggtgatcatgatcactaagtaattatcctattcaattagtagctggtgacgaatggcttgtaaactttaagatcatcaattaccccagcaatggaacctgctgcagctaatagagtaactaccaagcatgcagcactaagcatttgtaggcatatccatcttgggccccactttggtatcttagcttgagttatatacatctccactggtaaataaacagcgaggggccaaaatccaatggctccaataagccctacaatgtcattgaagaatggtcggagcatggctatcacagttgacaaaatcacaaaaa

SEQ ID NO: 46901 - DNA, 493 bp, Glycine max
aaaaagagaagcataaacttttagctatttcacagtgtaatcacttggaaaaatttactatgtggttccttacagatccgaaccaagttggtggcacctggtggagaagctttgggcggtgtaattggtgctttcagatacatgattcgaactgaaggattcttttctctttacaagggtttagtgccatcaattataagtatggcaccttctggggcagttttttatggtgtatatgatatactgaagtcagcttatctgcattcaccagaaggaatgaagagaatccagaatatgcataaacagggtcaggaactgagtgcctttgaccaacttgagttgggaccggtaaggacattgttgaatggggctattgctggtgcttgtgcagaagctgctacatacccatttgaagtggtgagaaggcaacttcaattgcaagtccaggctacaaaattaagttcttttgcaacatttgccaaaatagttgaac

SEQ ID NO: 46902 - DNA, 246 bp, Glycine max
attacatctcgttcttctcgtccatccgtaaccatgtctcaaactgttgtcctcaaagttggtatgtcatgtgaacgatgtgacggagcagagcagagagttttaggaaactcggatggtgtggaatcatatgacattgatttgaatgaacataatgtggtcctgaagggcaatgtccagactgacacagggcttgcgaccgactccaaaactgggaagaagactaccttttgggaaggtgacaca

SEQ ID NO: 46903 - DNA, 434 bp, Glycine max
gcaacctcttctagtgcagctctcgccaatcgttttgcaattcctattctgggacttctggagatgatttcaacagccgcttcatcagttaaatgctcccaaagtccgtctgatgcaaagatcaaaaacagatcatctgccttcaatttacgcgccaatatcgatggttcagctgtcattacaggtctcctcaagtatagtggacatacaaattgttggaacagaggattagtgtcaaattctggcttctttaggtaaacatctcctattgatcttgagacctgaataatgcccttgattcgccaaactccacgagtgcaaaccacaatgtgtggatcatcagggtgaagagcttcaacctcctttctaacattctccactccaacattatgatcagtggacaaacgctctgccaccacagcaccagcaccaca

SEQ ID NO: 46904 - DNA, 209 bp, Glycine max
cccacctctccatttaagatgcatattttctacaagaccctcaccggcaggaccatcacccttgaggtggaaagctatgacaccatcgacaacctctaagccaacatccatgacaaggaaggaatccccccggaccagctacgtcttgttttcaccggaatgcaacttgaggacggccgtacccttgctgactacaacattcataacga

SEQ ID NO: 46905 - DNA, 245 bp, Glycine max
ggaagctatagaatatttactagcttaaaacacgacatttagcgattctttcttaataccagcagcttaaagtttctattaagcgatcagatcccaggactccttctctttctcaaatgacactacctgaactcaaaaatactcggatgagtaaggaggaactacagccaccccctgttgggactctgatgtaccgaacgcttaatcaggtgcaatggtcaacaacgcgaccttaccgttcttca

SEQ ID NO: 46906 - DNA, 423 bp, Glycine max
agacaacttgaggtaccaagccatgaacattgtagctgcgaggctaggccgagctgaaccgcctttgaggaaggaggtggtggagtacatgttggatgttgattcccatatgtggagcatgagaagaagcaaggctaatttcttccgaatcatgtcccttttctctggtatgatcacaatgggaaagtggttcagtgatgtttgcctttggaagaaccatgttacatcagtcctggttcacattcttttcctcatactgatatggtacccggaattgatcctgccaaccgtgtttctctatatgttcttgattggtctgtggaactataggttccggcctagacacctcgctcacatggatactaaactctcgtgggcagaagccgttcaccccgacgaactcgatgaagagtttgacacgtt

SEQ ID NO: 46907 - DNA, 298 bp, Glycine max
aataatcaattctgataatatgggccctaaaggataatttcattggtcccctttccaaatgactaccaccggggggaagtacccaggatttttaaaaaggaaatgattataaacaaaaaagtctgtacctttgtataacaaactaaacctttgaaaaaaccagatcacaataaactatctggtttagctgggaccctcttgaaaaaattacttggtactgaaggcattttactcctaaactttggatgccccaaaaagtttaaacctttcaccagagccccccctttgaatggggttg

SEQ ID NO: 46908 - DNA, 388 bp, Glycine max
ctcgagccgaatcggctcgagtgaagcctttgctctcatgcctgatgacttgaagtgtgttgcttcccaatttagacgtcttataaacagcaaacaacttcaacacactttcaggttctattccttgcaatggaagacatggggtgcatgtttcatacaagcagcttggcgcagatacaaaaaaaagaaggctgagaggttgttacgtgaagcagaagaaaggatacaagctttggaaaatgaggaagggtcctcacctagctttgctgctacaatatatgcatcaaggtttgcatcaagtggattgcgccacttgcgaagtggtaaacgcaccagagtgccacagccacagagatccctgatgcctcagaagccagatgatttcact

SEQ ID NO: 46909 - DNA, 409 bp, Glycine max
gattgaagataagtgatgctgttgttttgatcgattgagagcaaggcgggagagagaatttggaggagaatggtgaaaattttgagcaatcatgggaaacttgatgaagagatggtaggggttgttatgaaattttaagaggagaatcagaaggttgctgctttggcaaaggtggggaagcctgcaactaaggtcaaggctttgtcatttggggagagggctaagctgtcaaaaaatccaatcggaaagaggttgtttgagataatggctgaaaaggagagtaatctgtgtttggctgctgatgttggaactgcagctgaattgcttgaaattgctgggaaggttggacctgagatatgcttgctgaagactcatgtggatatttttccggattttacacctgattttg

SEQ ID NO: 46910 - DNA, 573 bp, Glycine max
gtttcttcttgctaggttaccccaaatctttatggaaatctagttgcaaatactgcagcaggcattgctggaggcactggagtcatgccaggaggtacggttgttagttactactgtattgtaacttcagtgttctcatctgattatttgcccttttaaatacctccttgcttgtttctaccatgttatcaattttttgactaatgttctgaacttgaaaaaactaggctgtgtttaattgtgtacacatgtctagatcattattctgcatctaagaagcattttcactcattgaaaaactttgcaaattaaggcatcgtattgcattagacatttagactcttcgatcatataggacttgtattaacctgggcacacacttttatacaataatatgggaagtactagagatgacagctttcattgactcattaagaaggtaatggagttgttgatggcagtgacaacagaagtagctgtagtgatatgatatcagtgaaatgaagatgttagtggccgtgatgggaataagtgattattgagaaaaaatattctctgtactcaaattactta

SEQ ID NO: 46911 - DNA, 480 bp, Glycine max
gttgggactcctggacgagttatagatcacctaaaacacactaaaggattttctcttagtagattaaaatacttggtcttagatgaggcagataggttgttgaatgaggactttgaagaatcacttaatgagattttacaaatgattcctcgtgagcggaggacatttctgttttctgctacaatgactaagaaggtccagaagctgcaaagggtttgtttaaggaatcccgtgaagattgaagcatcatctaagtattccactgttgacacattgaagcagcagtatcgctttttgcctgctaaacacaaggattgctaccttgtatacattctcactgaaatggctggaagtacatcaatggtgttcactcgcacttgtgatgcaactcggcttctagctttgatccttaggaatcttggtctaaaggccatccccattaatggtcatatgagccagtcaaagagacttggagccttg

SEQ ID NO: 46912 - DNA, 468 bp, Glycine max
attgcaaaacaaatgctcttgttttatttatatttgattatttgactttggcattcctcctggcaaaattgtccatgcaaggagctattccgcaaaacaacaatttccgtacaggacacaattccactaatagtgggagggcacaatgccaaacatcgatcattgcattttacgtaagacagtgtaatgcacaactttgtggacctatatatgcaatggtgcagtacattatagataaggcccgtgaaggtgaaatcatgggtcagggaatttagaagatagacatgcatctacggcttcagcaacagtaaggaaaacccactgccttccgattttatccacaaaatgtgccactttgagcttgtgaatcactagccaccttgggttcaccatagccaattgtacgccacgcgagagcaacctcttgtgcagttccttcagtattagaatcccagaagtatcaacatt

SEQ ID NO: 46913 - DNA, 262 bp, Glycine max
gcctcaccctgcttatgatcaggttaaacctgcactgcctgctcttgcccggctaatgcattcaaacgaggaagaactattgactgatgcatgcagggcactggcatatctttctgatggcacacacgataccattcaagctgcgcttgaagccggtgtatgtccccgactggatgagctgctgctgcacccatccccttccgtgctcatgcctgctgtcagaactcgcggaaatattgtcactggagatgatttgcacact

SEQ ID NO: 46914 - DNA, 397 bp, Glycine max
aattccttttgaatccacagcaccgtggttgtaggtttgttttgcctatgctctttatgcttagtgcttactctgttggcattggcaaacatatattcatctgtttctcaagacaccttcagcaccatcaacatcaatatcgcttactctttcattcctccatttccatgaataacctacgccaaactgaaactcacgtgcattacaaccacactcatccctccaaatacgcaagatggaccgctagagagagcttcgaatttatgtatgcaaggccttggcaacgagtaaatgatttttacttgaacattgtccgtgccaacttgtctctgccacttctcttcggagcccagacacttgttgttgatcacaatgatactggaattgcagcactttc

SEQ ID NO: 46915 - DNA, 388 bp, Glycine max
ctcgagccgccgagctttatagagatgcaaagagggaagaacttgatgctgccatttttaatcttagggagattgacagtaagcacagttaattttgtcaatcagttttacttaaacacatagcagactcttcaatgaggaaaatacttcttgtttctttttttcttcttgcagactatgatgaatatgagaggtcaatgctgatttcacaaatgagctttgagaaaacatttggtttgtccactgttttcattgaatctacactgatggagaatggaggacttcctgaatcttctgatccctcgatgctgatcaaagaggccattcatgttattagctgtggttatgaagagaagactgcatggggaaaagagattggttggatcta

SEQ ID NO: 46916 - DNA, 523 bp, Glycine max
gaataacaaaagttccataattcataaacctttgacatgatgaaggggcaatagcttatgggtattatggcctcatgcttatgctaatgccaataaagttaaaagtatgttcatataataggtaaacagtgagaaattaatttatgctttatagtaaatagaattgggtagtttaaatgttctcttggccattggaagtccatcaaaagtgctccattgatctcccacaataccccatatgcgataaccttcatcgaccaattgttgcctcaccttggaatggtattttttcacgtccatcaattcatcatcaaaacccctcaatgtaagcctattccatccatggtatccaacactcacaaggttgtctacggtgggagatcttaggttttcctttcttgaagaaatcagaaagattttgaaccctttgttcttgatttcatggaagagctcgagtgtgtgatcaagagccggtgccttgcttttctccatccattcttctaaagatgttgcgttcagcttt

SEQ ID NO: 46917 - DNA, 424 bp, Glycine max
gtcatggaaaattcaagtgaagattcatcaaaatctcatggaaaaacccgtcagacggctaattccaaaactcctcacaaaacaggtgatatgctagcaaatggacacaagcaactagtccaatcaccgccagagtgggttagaggaaatggccttgatgaggtggttgatttggctgacatgctgcaactgcggtcacgagattggtttttggtgtttgttgagagattcttggaccctgatggggacactagcttgtcaaataatggtcaaatagcaggtatgctcactcaactgaaaagtgtgaatgattggcttgatgagataggatcaagcaagaatgagggagaaccttgccagataccagcagagacaattgacaggctgaggaagaagatatatgaatatcttcttacacacgttg

SEQ ID NO: 46918 - DNA, 434 bp, Glycine max
atctgtttataagtcgctccaccaacaaatcacatctggagaaaaatggtaccctctgaattttgtcatcgggtgttcattcttgattttccttttaattgcccgatttgttggcagaagaaacaaaaaacttttctggttgcctgctattgctcctcttctatcagttatattatcaactttaattgtgtatttatcaaaagctgataagaatggggttaacataataaagcatgtcaaaggaggcttgaatccaagttcagttcaacagttacaattccatggtccacaagttggtcaagcagcaaaaattggattgatctctgccgttattgctcttactgaagcaatagcagttggtcgatcttttgcttctattaaaggataccatcttgatggcaacaaggaaatgctagcaatgggatgtatgaaca

SEQ ID NO: 46919 - DNA, 505 bp, Glycine max
ctcatactgggggcccaaagctggctataatacatatcacatgcttctctcaatgactacatttattggtgctgcattttgttttggggccttcttattcagaagcatgtatggcttccttgctcttttctctattggtgaacttcttgtttttgccactcaggtagtttccttctattcaattaatatctctttatgtttaattgctatattgaagtactatcctttttacatgcttatcatctatgaatattttagcaactctgatattgtcaagttaaattcttgattaatgattatgtttctaagtaaaatcacttctatgtttgggaaattagatgaaaatttgctctctgagaactaagtcatcctagggttggtttgtcttttgaattttatgcttgtttcaggggacaatgctttttgttcttttttttccgtatctattagcatgcagagtatatccctgattctttatatcaatttgtcttaataattttatcat

SEQ ID NO: 46920 - DNA, 494 bp, Glycine max
gcgagagagacttgtcaatattttttattagatgtaacaatatacaaaaagaaaaagcttgtcttaaaatattagaaccacataggcataaataggaaggggattattatagaccatcaccatgtctatccgtgacaatcacattattacagggtgaggtcaggtaagggtgcatccaaatccactctcaaatagtatatatatattattaatttagggtagagagaaaaaaaaacaatgttcaagttgaaggagattgagaagcaagaaaattgttgaagtggcagcgtggcgctatggaatggagcagcaaccttgcagtgtgatcctgtttgatgaccgccccttccttcttcaccaacaccgccgcaacaatctcttcataatccccaccgccgccggcgatgaaggcgacgatggcggcctgaagcggtcccaagctggggttataagcagcggactcaatgtaagagcctttaaaaacattccccttg

SEQ ID NO: 46921 - DNA, 232 bp, Glycine max
ggaccctagcatgtatattgactattgtccaaagcatcagtcttcagcttgagggggagatgaatattaatcatgttcagcagctactgttggtgctggtggttttgtcttgcatgaacaccatgagaaaaaggaagttaagaaagaagatgaggaagctcatggaaagaagcaccaccatctgtttggctgaacatgataaatattcatatataattaatattcaagctcc

SEQ ID NO: 46922 - DNA, 444 bp, Glycine max
ttcattcattcaggctaaatggggaggatcaaacctcaggctctgctacagcaaagcaaaaggaagaaggggccttctcgcataagtgccaccattggtacattctatgcattgattcttgtcatgcttgtgtttatcctgtttgttacatacagacattggtccaacaggacaagacttcaaccagagagctatatatcagtctctgaggatgaaaatacatctgtggaatccaaaaaatctgatctacctggatatgctgttgtaattacctctaaaggttctattatagtagaactttacaaggaaagtgctcctgaagttgttgatgaattcatagatttatgtcaaaaagggcacttcaaggggatgctttttcaccaagtaattaaacactatataattcaggcaggtcataacaaagggcctggagctactgaagat

SEQ ID NO: 46923 - DNA, 451 bp, Glycine max
cacagatatcgcgaagacgctggacccttcaaaagtgaaagagaagagggtgagttatcacctaatggagactttgaagaggatgagtttgcagtttatggacatgctggtttggaggcagttcataaaggaaaaaatggtaccatttgtcgacaataccaaaatagacatggggaagaagttcgtggtgaagcaggaggagaaaatgatgctgatgatgaagttgaagaaagtccccatagatcaatggaggacagtgaaaatgcttctgaaaatggtgatgtttctggtacggagtctgctgatggtgaggagtgttctcgagaacatgaggaggatggagatcatgaacatgataacaaggctgagagtgaaggtgaagcagaaggaatggctgatgccaatgatgttgaaggagatggtgcctcattgccatattcagagtgctttc

SEQ ID NO: 46924 - DNA, 360 bp, Glycine max
aaaaatcaatatgaatttaattgcagtaaaattacacattacaaaaataaatacaaatctcatctgcatactttgtctagtcattccataagaaatgtgtcagaactaaaagcatttcgtatcacatagccatgcatctctttcccataatggagtactgttaaatttgcagaagcagagagagcataagataggctcacagaatcaaacttggctcctctcattcccatttgactaaaaagatcaatggccatttctggtttcccattctgtgagaagcttgaaatcattgagttccaacaaacactatctctttcgaacattcttctgacaaattcataagcaagatccagtcttcca

SEQ ID NO: 46925 - DNA, 437 bp, Glycine max
agcaacaaaaactcacaaggcagaactgatcattcacaaatcaaaatgtttcagagtagcatgggatccgctcttgttatctgtacatattgactcacattttacagctagcgacaatcgatggttttttctacaaacttccttggttcccaaaggcacttcgggagaagttactgcttgcaaatgacatggagtcttctttcatgaggcgcttttgcttaatcctcaatatacccagcgaaacctcacctatggaggggcgtttcctaggtgatttgtgtaaacatttgtgtgcaattttagcaagctgcctcacttcttcaagattgcattttcccacaagttgtttgtcaagaattccatctacaccatcataatccattgcagcaaggtggatatattccatcaaattttgatgtgggtggatggcagtgatg

SEQ ID NO: 46926 - DNA, 280 bp, Glycine max
cataacacaaggcagaaagcaagctcatcctagagttgtaaaaatggcagcagcctcctccatggctctctcttccccatccttggctggcaaggccgcgaagctgggcccatcagcccccgaagtcgggagggtcagcatgaggaagaccgccaccaagcaggcctcctccggaagcccatggtacggcccagaccgcgtcaagtacttgggcccattctctggcgagcccccggcctacctcactggcgagttcccaagtgactacagctgggacact

SEQ ID NO: 46927 - DNA, 291 bp, Glycine max
aaatgaaaccaaaaaaattttgggaaaaaaagccaaagttgggaacgtccaaaattaaatttccccgcccttgccctaatcaagttttatcctcataccccaattttttttggaaggatgggtacttttccatagcattttctttaaacacttccacctttttctttaagggggtaatttttgttaagaggacctttgtttttttggggaaaaaaaagccttttggattgacataggtcccaggatttggtaaaagggggttcctgagaaattccttatggcccttgggtt

SEQ ID NO: 46928 - DNA, 329 bp, Glycine max
gcgggagaagtacatgatggaagtgacgaaagaccctaattcagatttcgaactcgaactctacaccatcccaagctcttcaagatggttcgcgtgggaagaaatccacgaaacggagagaacagcgttcaaggaatacttcgacggaaactcaataacgcgaacccctaagatatacaaagagtaccgagacttcatcatcaacaagtacagggaagagccctcgaggaggctcaccttcaccgaggtgcgcaagtcgctggtcggcgacgtcacgttcctgcacaaggccttcctcctcttggagcattggggtctgatcaactacg

SEQ ID NO: 46929 - DNA, 429 bp, Glycine max
ctccacagttcaggttgttttgcaggatactggggtcattgctcctgagagccacccggttcatcttcatgggttcaacttctttgttgttggctctggtgtaggaaattatgatcccaaaacggatcaaaataactttaatcttgcggatcctgttgagaggaacacaattggagtgcctactggagggtgggttgctttcagattcagagcagataacccaggagtgtggttcttgcactgccatttcgaggtgcatacaacatgggggttgaagatggcattcttggtggacaatggtaaaggtcctaatgaatcactgctacccccaccaaaagatcttccaaaatgttagacttttcagtcatcgattgaacaacacacagacaagggaaggatacagagaagctaggaaaaacaagagaataa

SEQ ID NO: 46930 - DNA, 491 bp, Glycine max
caaattttgtaaccttgtcatgaatgattctctttttgatcaactctctagcattcaaagtctttatccagcttatacagtttgttacctcaccaataggttattggcttatattaataaaaaggaacaggaaaaatataagaaccctgagaacaatagttgttggagacgtccacctgtagaggaggttgaataactggccctttcattttcaaattacaaggaataggtcatgttttaaatttttaccttcttgttcaaacatgtctatcatttttgttttaaattgccctgtaggttctggcaaaactaacgactaatttcaacaaagtacactccaggcagtgtgcagatgaggctgaactggctgaacatgttgtcggtttgacatgtagcctagcatcttgtcagtttagaaagaagttatcccgattgtctgtaaatgcaaatggagcccttattccaaaggactacgttgaccggaatttgat

SEQ ID NO: 46931 - DNA, 489 bp, Glycine max
cgacgtggaaaaactcaagtccgggttagatttcattggagtaaaccactacaccagtgcctttgccaaagactgcatcttctctgcgtgtgaacaaggacgagggtcttcaaggactgaaggttttactctaagatcgccacaaatgaatggtatcagcattggagaaccgactgcacttgactggttgtatgtccacccacaaggcatggagaagatactgacttacttaaagcacaggtacaacaacataccaatgttcattaccgaaaatggaattgggatgagggagaattccaaccatgccactaaagaaatcatcaatgatgtcgaaagagtggaatacttgcgtggttacttggattccttggcaacagcaataaggaaaggagcagacgtgagagggtactatgtgtggtccttgcttgacaactttgagtggactgatggatactctataaggtttggacttcatcatgtggactatgc

SEQ ID NO: 46932 - DNA, 332 bp, Glycine max
agcaattcgtttggtggtcgcggtatggtgatatggtcggtggttgtggcggttgacagtgggtgtggtgatatggtcgccaacatgtgtggttaacgaccacgaggatacacattgcaagaactggatggtttgcagcagccttggtgccaacaccaattgcattcattttgctggccatatctggcagtggagcagcattacacataggcactgccttgatagggctaagttcaggctttgtgttttctgcagcagtatctattacttcagagctttttggcccaaacagtgttggtgtgaaccacaacatgctcatcactaacattccc

SEQ ID NO: 46933 - DNA, 383 bp, Glycine max
aattaactctcatatactattaattccagatagtcaataatagtatagccggatattattattattatgtatatacgtagtagctataggtatattattcatagcttagactcatcaatctctggtgaattaatttatttccgcacccagagagtaacgctaaagcgcaagaatcccagttgaaaatatctgttcccttgcatatggcgagcttgacatttccacagaccttgaagcttctgacctacaccgttccttccgttcgtccatcattatttgactcgaacgacactctgggctacaaaacgctttctctcctctgtacatgtatatgtctttgccgtggagtttctttccgcataagtgacatgaactgagaaaat

SEQ ID NO: 46934 - DNA, 451 bp, Glycine max
atcgttaaatacctaattgcaacaaattcctactcaaaccagaaagaagattggattatactagtattagaaatctgaaacaattcaaattaattggataatattacaatttacattttttatcattttagattcttgatttttttcaactttttggttgagtggtttctgtaggcggaatacattgctacacttaatcatgaagaaacaagactagcagttgtctgtgagagggcctttcttcagactttggatgggtcttgccgcactcctattgcagggtatgcttgcagaaacgaggatggcaattgtttgtttagaggattagttgcttaccctgatggaacccgggtgctagagacatccagggttggtccatatgcagttgaagatatgattgaaatgggtgttcagtagttagcaccagattaaagtgcgatcgggtgcacac

SEQ ID NO: 46935 - DNA, 328 bp, Glycine max
cttaaaagagcctttgctttttctttaggcctttccgaattaagtacttgtttcattttctctcgaagcaagaaaaatgttcattgagagtttcaaggttgatagtcctaacgtgaagtgcacatatactgagatgcagtccgtgtgcaactatgaaaccactgaacttgttcacgagaacaagaatggctcttatcagtgggttgtctagcccaaaactgtgcaatatgaacttaaaaccaactcccatgtccctaaactaggggttatgcttgtggggtggggtggaaacaatggcttaacccttaccggtggtgttatagctaac

SEQ ID NO: 46936 - DNA, 196 bp, Glycine max
ctgtcatgtatcaaagttttagtgttttcttctctttctctaaagacctttgatgctggccgaatgcctaaagataaagacaacaacttatatgaattacaaaccatacgtatgatcagaaaaagattgagaaagaaaacacatttctctgcatagccaaaagggagataaatacaacactgtaaagcttctcatg

SEQ ID NO: 46937 - DNA, 326 bp, Glycine max
gaagggctgcttgctcttgggcatcaacagtttgagcaagcaggactctgctggtcttatttgattgcgaacaataaggattcggacaccctgccttccgatgaggatctgcagttctataacagagctggggatatcatggacaaaggcatgttgatgagcgaggagatagaggagcaacgtttgaatggactgtgcaaatcggataactataaagagcagctagagaaaaaggggttgcatggtcttttcagggatgttccttatgatgaagctgatgaccaggctgcaaagatgaagctgcaaggatatcttttatggggaac

SEQ ID NO: 46938 - DNA, 382 bp, Glycine max
aagcaaacaaaaatgaccaaatgctgcaatgggatatgccttttctttgtattaatctgtgttatatgggctccaatgttgatgtatagcagcggtaacccgacaaacattgcaaaccccataaaagatgctagctatcaggttgatatcaagacagtaagtggaaggttgaatttgtatcaaactactctatgtgaaagactccggtgggatttactaaattcaaatgccaatcccgatccttatggctatttggatgcatataataagaatgatatccagttgatatgctgtcaagctgatgctagtacattgtggcttgttccacttgttgttcggaccagagtgattcattcccttgaatggaatactgacatggaaa

SEQ ID NO: 46939 - DNA, 424 bp, Glycine max
gttctagatcgcgatctagaactagtcataaaacttcaaagttcacacacagaagaatcagagtggctttcaatcaagagttagaagctgtaacccaagctttctcagggcatggagtggatgagaaatcattggtaacattactgggaaaatgggatcctctggagagagaatctttcaggaagaagacaccacatttgttcagtgaggatcatgaacgccattttcagaggtgggatgaccaatatgttcgtcttctcaagcatgaattcgtgcgttttaagaatgctgtggtgctttggaccatgcacccttgggaaagagatgctcgtttagtaaaagaggccctaaagaagggtccaaatgaatatggagtgctgattgaggttgcatgcactagatcctcacaagagctattgggagc

SEQ ID NO: 46940 - DNA, 344 bp, Glycine max
caagtttacaatctacgatagaaaaagttgttccactgagctggtggtgaattcaaaacttatatttaatgtgaaaaagttgttccactgagctatttttggcaaccaagttggttgtttcaccacaaaatggacatgctggactgcaagaggatgaagtcattctccaatttggaaaaattgggaaggacttgtttacaatggattaccagtaccctatctcatcatttcaagcatttgcaatctgcctcaacagcttcgctaccacggttgcttgcgaatgatgcatgtttgaacatgtcacatcatcgtacgaaaacattcttcatcatatggagaacata

SEQ ID NO: 46941 - DNA, 422 bp, Glycine max
acttgaatgtgattggatcagacccagagggcagattgggtgaggctccaagacctgaacttcgtgaacatggccgaatttctggtgcctgctttgatgcagctcgtggtattacaactggcttaaaggttagaggaactgactacaagacaccggatggaacatgcatacgagactacattgatgctcacgtgaaggctcttgagaaggcacaacctgctaaagtagggatctacaatgttggaactggaaagggtagatcagtgaaggagtttgtgaatgcttgcaaaaaggccacaggggtggacatcaaagtagactaccttccacgttgacccggcgattatgccgaggtgtatagtgacccttctaagatcaacagggaactgaattggaccgcacaatacactgaccttgagaag

SEQ ID NO: 46942 - DNA, 485 bp, Glycine max
ttcttacatggtttcattgagaatgtattagtttaaagttccttaaactaatgaaagctgtgggcagtgcataagtgaatggaactttaaactaatacattcttacatggtttcattgagaaattcaacggccacaatatttaggagtgacgaagacaacgatgattcacaaacccctttcatagtttcattttcatctagaggtccaaatccacttacaccaaacactctcaagcctgatctcgcagccccgggagttaatattctagctgcatggtctccagtctatacaatttcagaatttaaaggtgacaaaagagcagttcaatacaacatagaatctggcacttcaatggcttgtcctcatgtatcagctgcagctgcatatgtcaaatcatttcatcccaattggtctcctgctatgatcaagtctgcactaatgaccactgccacaccaatgagtcctactcttaatcctgatgctg

SEQ ID NO: 46943 - DNA, 397 bp, Glycine max
gtgtgatacaaagaatgggcctgcaaccacacaattcttggaaacatcgtcagccgataccaaggacaatgtttacagctttggaatagtattgtttgagttgattacagggagaattccccttgctgggaacaatgaacttctggcagattgggcagcagaatatgtaaggtgggggaaatccttaagagatgttgtggatccaaggctgaagtctttgcaggaagaagagattgaggaatggtctgaagtgataagaaactgtgtacaaccagatccggagaaaaggccaactatgaaagaagttacatctagactcaaggaaatcacagctatggggcctgatggagcaaatccaaaagcatcaccactttggtgggcagaaatggcaattaca

SEQ ID NO: 46944 - DNA, 472 bp, Glycine max
ggcttagctaaaatggaagttcaatcagataaaatatggatggacaatggaccctctcgccgggccaaatggtggtattcaacattccacactgtgacagccatgataggtgctggtgttctaagcctgcccaatgccatggcatatctaagatgggggtccagggatcttgatgttgttgttatcatggtgcctgaccttaaacacaatgtggcaaatgatccagttacatgagtgtgttcctggaactcgttttgatcgctaccttgatcttggtagacatgcttttggaccaaaacttggaccatggattgtactcccccagcagctaatagttcaggttggatgtgacattgtctacatggttactggggggaagtgcctaaagaagttcatggagatagcatgcactgattgcacacaactaaagcagtcttactggattctgatctttggtgccatccatttcttt

SEQ ID NO: 46945 - DNA, 288 bp, Glycine max
ggcgccgaaagggaactcaaacattttaattttaagccttttaatcgaagtcgttataatattcacacatgataacgccctgagggcttcgccaactggggtcccaagaccggggatggggttaccagaaagcagagggaccaccttaaaaaaagggctttgaatcaagctgatcataccatatgccttgaatcttaacatccttaggagctgtagcccccatatcaacatcagaagggtgaacactttttaacaccccaataacctcaccagtctcagggttggacc

SEQ ID NO: 46946 - DNA, 165 bp, Glycine max
ataaaaaacgcaagaaatggaaaaaaaaacaaacacagacaaagccacgtaaagaaaattcaatgctacaaactgcggcaaatgctgacctaaggacaaggctatcaagaggtttctggtgaggaacattgttgaacaggctgcactcagagatgttcatgaggc

SEQ ID NO: 46947 - DNA, 308 bp, Glycine max
gggaagacaaatttcataatttcaggcaagcaaaaatttatggaatcttgctctcaagttctaaccgatgaatcataaccataaaaaagatgggaggtaaacaagccataggaaactcattggccaactcaactaaacattatttagaaacctacaaaatttaacaaaatagccgccgttgtgtaaaatgacaaaactcaattgcacaagcccatcgtcgatgatagatactctgctaacagagtaagagtcaagtagttgggataccaatctcacaacaacttactactcaatgatggattggataa

SEQ ID NO: 46948 - DNA, 387 bp, Glycine max
aagaaatgctgctaagttgaatacttcagtggaggcagagcttcacatgccaaggcctcccaacaagccacgacgcttcgccttttctcaactttcatcttcaacaaggtcattcagtgagatagagttgctcggcagtgataatagaggagagtactacagagggaagctttctaatggcagccaggtggctgtgaaaaggttctcagctcagtttctcagcacacatggatcggacaagaagagattgttgaaggaaatcaaaggcgttagccacgttcgccacccgaatttgcttctggttagaggggtggtgtcaagacaaccatgaaatcatggtggtctatgactttgtccccaatggcagcctagacaaatggctattcg

SEQ ID NO: 46949 - DNA, 121 bp, Glycine max
ggtatggtgatggtggagcacatggaggtggttatggtggcggccaaggaggtggagcaggtggagggtatggtgctggtggggagcatggtggtggatatggcggtggtgaaggaggtgg

SEQ ID NO: 46950 - DNA, 368 bp, Glycine max
cagagcgaaagtaatttatactattcgatttcgatttcttggttgccaattgccgtgctttacaatatctaaacatttctcacaccccttagactacagaaaaaaataaaattacacaactttactcattgccttgcttctttctattcagactcagagtccatgtggcccattgctttaaaccctctgggtctttttttttctcctacctttatggatatcttcttctccctaacttcatatggttccagagtaagatcgcacaggcatgttcctggactaacgagatagagggttcgctgtatgaatatggctctctttttgggcctctgtggaagctttgaacccttcaacagcagaaaatcttc

SEQ ID NO: 46951 - DNA, 454 bp, Glycine max
ggcataattcacatgctacattccatcgaagccgctccattaatgtaaaatatagattacagcagaagcaacatccggtgagttaccgacatattttcatacaactcttacaactacagaacaaactcgcctaaggcgtaaatgacaaggaaaaaaaattgaatgattcaaagtcacttatagttacatcccccaaaagttctcaatagcagatcagaataatcaatgtacccactatgaaaatccaataagaataacacagggcaacagtaaattcaatactacattcatcagttagaccagacatgaactagcccaagcctgttgcctgtatagatttcattgcgctcttcatcatagaagagagcagtaatgtcttccaaagcttctgcaactgtgctcctcatcttggagccatgttttctcttctttgaattacaacaatagctacgag

SEQ ID NO: 46952 - DNA, 270 bp, Glycine max
gttcaagcttgttggagatgcacctgcatagtctagtgcttaattaggttgcagaagagtgaagagtgagacagcctggctcgaaggggaaagcctaaggatatatcaaagcatgctatatgtataaaataaatgtagcttttctaccttcggtattgatatttgaaatcgtgatttggcatcttatatatgatctctgtgtttgtctattaaaaaaaaaaaaaaaaaaaaaaaaaaaaaaaaaaaaaaaaaaaaaaaaaaaaagggggg

SEQ ID NO: 46953 - DNA, 497 bp, Glycine max
gtggcaatggcagcaccgctcttcctattctgcgggccaacaaagatttgattgtttatgcatgcgactgtagtgatgagactcttgagagggctaaagagattataagtgcagcctccacagatgcatcctttaagcatcgattccgcacattctgttgtgatctttccactaatggattcccgaactggttggcgtgcaatccttcccaagataattttttacagaaacagtcatactgcttatcaggtgtcagagaggataatgggctgcattttaccaatctgtctccctcggaagaatttgaatgttgtggtggtggagttgattttgtaacattgatattcactctatcagcagtaccactggaaaggatgccaaagtccgtcaaggaatgttttattgtgttaaagccaggaggcatggttttttttcgggactatggcctctatgatatgaccatgcttcgatttgagccagactagcaagtgggattc

SEQ ID NO: 46954 - DNA, 235 bp, Glycine max
agaataccccctcttttgctgcatcagaggagccgtaaattaagagcatggctgcccaagctcttgtatcagcagctcctcttaccttctcagcggaggctgcaagacacagccttggacccagatcactccagtctccatttggcttgtacagaaaagcctccttacttgtcaaggcagctgctaccccccctgtcaagcaaggatcagacagacctttgaggttcgcatcaaa

SEQ ID NO: 46955 - DNA, 342 bp, Glycine max
gagatactaacatcagctgattgatctactgctttcatctttctccctaacggtatcgagggaaaaatatggtggaagaacacagatgccaggcaccgcgcttctgtgccaacaattgccggtgctttggctaacctgtcgctcgcaatatgagctatatgggcttccgctgtaatgctttcactgaatgttaagtttgtgaattacaccaggggaagtttcattttccccagtgctcagccatatccccatcgcaacttttctgaggaagttgctattcttgatggctactttggcaaacttggtgcgttgatgacgcgccacgcgaggcggaggaggtta

SEQ ID NO: 46956 - DNA, 409 bp, Glycine max
aaaggtgaaatttatcaaaataagctcatgataaactctaacttaacaagcgcctaattaaattgttttgcccaagccctcctaacagctaactcaggaatcagttgacatctcaaattcactaactatccacaaggaattaaacatcaagccatgaaaaacaagaaagaaatttgtgataaacagtgatttcatacctccaccaccactcatgatcctcagcagcaagctggaagtatgtcaatgccacagtgatgaaagcagtaacaatcaagagaatgatgaagacaatgaacaggatgctgtagatggtgtaaattctgtggccccaaacactggcaaatatatagtaaagttcaatgtatatagcactgaaaggcaaaaatcctgccatcgccatctgaggaat

SEQ ID NO: 46957 - DNA, 454 bp, Glycine max
cgatgatcgtagcctggggtgagtccaccggcgagttgcgctgtctccctgtctatgagggaacttacatgcacttgagatcgcggtggtattcggtgcttgggccgacctatgtcgagtcgtgctcctacaatcgactttgactacaaggagtatgcgatgcagagattgcagcaatactggttgaagaagcctactttattggactcaccaagtatcgtttcccaagatgggattgccaatggtgtgaaccattgacatggatgcttcttatgtatttagcatgttcagcttggcatgtgtcgactgagatatagaactggcatgatgcgatgcgtaaaacttgttgataatatctaactaacaatgtgtgatttgagaatttttacaacagttatgttagtaatccctccttttgtgataagttgaggaatggaagtgagaattcctagtt

SEQ ID NO: 46958 - DNA, 516 bp, Glycine max
cgaaacttgtgcacaggtaagaaaccaagcaatagtgaagtggatcagctagtgaatctcgcagaaaaatacactgttgcaaaccatctattctggggcttgcggagacttatatgcagtgatgacaatacgggtgaccatgactactcagagtactggcatgtctactctgcttctgcctgttctgtgactccatgcgacaatgtctacactctagagatgtgcatgactggcctggatagagagaaagcacaggttttctacaaagaacaatctgcttcagctgccattatgactgttaattctggcattagaaaaattcttccagattctgagatttgtgactttgactttgagccatgtggttattcaatgaactctgttgaaggtgctgctgtttctaccattcatgttaccccagaagatggtttcagttatgcaagctttgagactgttgggtatgacttcaaagtggtgaatctgaacgaaatggttaagaaggtattggcatgtttt

SEQ ID NO: 46959 - DNA, 470 bp, Glycine max
aaaacctttcccacctctctgaacttaaaactgagtctgtcttatattgttttgggtttcctaagtgctgctgataacctcatgtatgcttatgcctatgcttacctccctgcatccaccgcctcactcgtggcttcatcatcccttgtgttttctgcactctttggatactttcttgtgaaaaacaaagtgaatgcttcgatagtgaattccgttttcatcataaccattgcattgaccatcattgcactggactcgagttcagacagatatgccaacatcagtgacagtgagtacatcatgggatttgtgtggatgtttaggatctgctcttacgggcttatattcgctctctggagcttgtctttgtgaagttgcttgaaagaagatccttcatcgttgttctggagcagcaagtcatggtttctctgtttgcatttctgtttaccactgtagggatgattatgagt

SEQ ID NO: 46960 - DNA, 387 bp, Glycine max
atggacttctggctctctttcatggctgtggttagcacttttgtatatctagctaccgttgacgaagtatataagagggcaatccacacagctgttgctatcctcaccgcccttttgggctgcaaccaaggcaactaggtcttccaatgttgttcttgtcattgtgattggggctcttggccttcttataggatggttgatagaaatctcaaaaaagtataggtccctctccttttcatttggattatcgctaagtttcattcaaaggtgagatctctgtgcttagtacaattttttgagcccggcattttccagataagatagtgatcaatggtaaaattgtgcacgctactttacttttgaagtattttatgtgcatgcattgat

SEQ ID NO: 46961 - DNA, 436 bp, Glycine max
atcattatctatctccacatttaaagcagtgctttgtttattgttcattgtatcctatagattatgaattttggaaagaggaattaatcttgttgtggatggctgagggccttttaaatccccaaagaaatggaaagactttagaagaaactggtgacgactattttgatgatttggtttcaagatcattttttcaaccttctacaagttggcctcaacacaaatgttttgtgatgcaccaactcatgcgtgatctggcaatatcctttggtggagaattctatttcagatcagaagaacctcgggaagaaatcaagattggtgtctacactcgtcatttgtcatttaccaaatttggtgatatagccttggacaactttaaaacttttgacaaagtaaaatttttgagaactttcttgccgatcaattttaaaga

SEQ ID NO: 46962 - DNA, 465 bp, Glycine max
gcaaattcattactgagacatattgggagtatagattcagatggcttaccaattggcctcagctctgacactataggcaagaaatttgcaacacaaagtaatgctcgtgtgttgaagattgttgtctttgtacatggatttcaggggcatcatctagatctacgacttgtccggaatcaatggcttttgatagatcccaaagtagaatttctgatgtccgaggctaatgaagataaaacatttggagacttcagagagatgggacataggctagctaaggaagttattgcttttcttaaaagcaaaatggacaaagcatcaagatatgggagtctgggagatattaggctaagttttgttggacattcaattggtaatctcattataagaacagcgatagcagatagcataatggagccatttctatgccacctacatacatatgtttcagtatctggtccacac

SEQ ID NO: 46963 - DNA, 484 bp, Glycine max
attcttaatcaattttatatatgtatcaacctaaccaaataattacatcactctgtcgttgacccttcctaaaactatgcacagaagtacaactgtgttttaagaaaaacgtgttgaaggcaagtaaatatacaactcagacatcaacatgcacctgttaagtgctaaccttttctttgaacaccctgtcacagaaatctgagcactattggtatctgaagggtgagagattacgcctgaaggctttagaactgaatgcagagaaggaaaaccacaacaactgctatcgaaaaagatcagggaatgaccacattatgaaccttgcaaaaatgtcagaatccagaaattcaatatgtgcagcccgacctattatagagtccagattcttgccttgggtagatgcatcaaagttgacatcacagcgcatgaagactcgatgttgcatggagttggcacggattttggtccaaacaagcattcaaca

SEQ ID NO: 46964 - DNA, 474 bp, Glycine max
catatacactgctcttattgtaacaaaaaaataaggggaaaaaggacagtgcttccgctatccactgtacatgccgaccactaagtatacattttcacaacccgtatcctctcattgatgtataacaactactcaagcaggttgaataaaaccggaaaaaataattaataattaaacagataaaaaagacaagtccaactgattcaagtatctaaaactcaaaggctcctccgtctagttcctgttaccagagccaatgctctcatagaataaaatgtaaccatggtctgtattgctggaatattcttgcgaagacccaaagaatgtctgaacagcagactcatcaatcatctcaacattttcgtcgtcaaaaaataaccagtggttatggcttttcacaaggcttacataatgcccgtggttgggcccactcccacatggacaactactgcaaatagagaatactcaatatct

SEQ ID NO: 46965 - DNA, 384 bp, Glycine max
ctctcttgtattatactcactttgtgccaatcaactttttgggtggccacttaatattttccaaggtagacgcgtaaaaaattggatgtggatccgtaggttggttttggttcccaattagcatgtgatctaactcgtttgcaaacttgtccatagctttggcgggcaaccaaattggtaataatatgccttcttctccttttgcattcttatgtgccatcagatagaatactgcaggaaagggtccagccccacctttggccactccaccatataatgccctaccccacccaaaatcaatttgtttgaaaccaaaatgtctcaaatctgacacaataaaagatctcacggcggttaacaagcatcttccattagtcaccatta

SEQ ID NO: 46966 - DNA, 414 bp, Glycine max
acaatactgtttaagttacacttcctccttgtataatgaatcaatatttcaaaatttgtcaacgtcctgtatctctccaaccataacatgaaaactgcagaaatttgagatgcctaagctaaatcagtcactcaatcattagttctgatccctttagaaactgtacatttcaaaaacactaaaaaaaaaggcccaaacctcttaaacccagtaaccatcgttccaattgggcttggaagaaggtcctccatgctcactccgacttcctgtaaatctatataaggacagcttgtttcggactgttcttaagggccctgatctattcccatgcctaatcggtaaagatatttcatccccaatcaagcttgaagttgaaaagggtctgttctccatttcttcaagtggaccggaact

SEQ ID NO: 46967 - DNA, 477 bp, Glycine max
  unsure (1)..(477): unsure at all n locations
caccgctacagaacatacataacataggcactgtctctgttctgtctgaactctgaacacagataaatccgccatgtattttcgcatctatggcgtcacgatcctcctcttcctcctcccaaccctcacattctccctctcgcagggtcagataaactcaaactcaatcctcgtcgctctgctggactcgcattacaccgaagtagctgagcttgtggaaaaagccatgcttttgcagacgctggagaacaccgtgatgaacaacaacatcaccatcttcgctcccagaaatgaagccctcgaacgcgatctcgaccctgatttcaagcgcttcctcctcgaaccccgcaatctccaatccctccaaactctncttttgtcccacatcgtccccaaaagaatcatcaaacccgaatacctaaccgggacgggcaatccgggtaggtcaaataacccgacccggcaccgaacgctagc

SEQ ID NO: 46968 - DNA, 492 bp, Glycine max
  unsure (1)..(492): unsure at all n locations
cgcggcgctcgtggcgatcctccgcgacggcaaggggcgggagaggaaggaggccgccaccgctctctacgcgctctgctcttttccggataaccggagaagagccgtcaattgcggcgccgtgccgattctcctccaaaacgtcgaaattggacttgaacgctgtgttgaagtaattggatttttggcaaaatgcanagaagggagagaacaaatggaatgttatgacggttgcgttcagattctggttaacgttttgaggaatggtagctcgagggggattcaatatgcactctttgcactcacttcgctttgctcttataaccaggaaatggttctggtggctctggaagaaggggttctagaagcttctcttgggtttgtggaagatgataatgagaaagtgaggaggaacgcgtgtaatttgattaaggttttgcgtttcaaccacaatcgggtgaggtgatactgatgatgatgaaaaatggaaat

SEQ ID NO: 46969 - DNA, 530 bp, Glycine max
atcaaatgttataattggaaagctggttctcttcagcaaaagcttaccatcaaaatatgaagattgggaggcaggtaccaaagcattgcttgacaaagagtctttgataggtggtggatcaattggtacagtctaccgaactgattttgaaggcggcatctcaattgcagtgaagaagcttgagactctgggaaggatcagaaaccaagaggaatttgagcacgaaattggtcgactaggcaaccttcaacaccctcatttagttgcttttcaaggttactattggtcatcttcaatgcagttgattctatcagagtttgtcccaaatggaaatctgtatgataatctacatgggtttggctttcctggaaccagtactagtagaggcaatagggaattatattggtctagaaggttccaaatagcagtgggaaccgcgagagcccttgcttatctgcaccatgactgtagacctgcaattcttcatctcaacattaaatgctctaacattctgctagatgacaattatg

SEQ ID NO: 46970 - DNA, 477 bp, Glycine max
caacaatgtcttgaactcacaatacctcaaggcagcacaggagttgcttgatgaaatagtaaatgtccgaaaggctttgaagcaaactggtttggaaaagcaacagagtttccgtgatattggtttagatggctccaaagattcagatggaaaatctaccagccaatccgtgcagatatcttcaggccccaatggttctgctgcaaactcttcatgtgagctatcacctgcagaacggcagaatttgttggacaagaagacaaagcttttgtcaatgctggatgaggtggataaaagatacagacagtactgccaccaaatgcagattgtggtgtcatcttttgatatggttgctggatgtggagcagctgaaccatacactgcacttgccttgcgcacaatatcgcgccactttcggtgtttgcgcgatgccattagcggccaaattcaagtgactcaaaggaacctcggagaaca

SEQ ID NO: 46971 - DNA, 405 bp, Glycine max
gctgcagatatgatgtatggtcacaataaccatcattatacagaaaatgatagtgcaacagataacacatcatctgagagtagctcctctttacaagaccgattgcttcgtcaaggaaaggatctgtatgatatggagccttcaagtcatcttacacctaatggatctcttccgcctgtcaatatcaagggtgcaaataacttgggatataaaccatcaggatatttgaaagtgaagggagatatataacatgctgctattactgctgttaaaaagcaattaggaaagcatgatcgggaagaccgtccactacttactgttgaattggatacaattcctcctgaggcatttgaatgccaaattgctgatctagctaatgaagcatactatgctgcacatcctgct

SEQ ID NO: 46972 - DNA, 403 bp, Glycine max
atcttcttattatagctcgaacccagaaaaactcttctctcgatccttctgaatttgcggatccagcattctatatccatatggcttcctcagaaagcacaaaacaagagggagtagttggtggtattggggagaaactcattccacttcatgaaaatgttctgcagaagcatgctgcattctttgacaagaatcacgatggtgttatttacccatgggagacatttcaaggcttacgtgaaattggaaatgggatcttgtcgtccgttggactttctctattcatcaatttggctcttagtcaaaccactcgaccaggaaagtttccatctctacttttcccaatagaaattaagaatatccaactcggcaaacacggcagtgacactggagcctatgatac

SEQ ID NO: 46973 - DNA, 453 bp, Glycine max
aattaataattatgaggggatgactcatttagtgatgacaagagattgaatttggtcactaacttacaatttgcaatttgtgaccacaatgaaacttaatggtataaaagcatacaataaaagccatcaaaatcctagttctcaacctaaataattgtcattctcttccttcacaataaaatgaaaagtaacatgttttccatgtaattagctcaaccaccaagtgaaaccaattttggtctcccctagtgccacctagtttagccacaggctgaaacaacagcatcaggtaaatgggcaaatacaatagagaaagcagcaacccttattggctctgatgagttcacatatataggctccaaaggaggaatgtcaccatctgagtttacactcagagcttttccatttagtaccattgtttggctatgtatatccccatcctgtggagttaga

SEQ ID NO: 46974 - DNA, 469 bp, Glycine max
gatgaattgatatccttttttttttttttgctcttggctcatgaaatcaagggattgaagtaagccctgagaattttgcaggattgaaaaggtgaaaataataagtctatcttgctaaacaattgcaaaatgagaacgtggtggcctaaggaacatggattctgaccttatgacatgactctgctattaatatgagctgcaataaggggtccaatattcccctccagaacataatttaggtctggcacctcaacgcctgtctttacatcatgtactaacttgtgcggatgagagacatacctccgaatttcttcttgccataaattgacaatgttttccttttgtatactttttatacttgcaactccttgttcctttgttgtcactagaagtttagctttcagtctgtttagtgctttcatcttatttgcaaagtggcttctctcacctcaagctgagaagattcatt

SEQ ID NO: 46975 - DNA, 472 bp, Glycine max
gatgcgaccataattgtggtcacagagagccccaaaacattaatgttgcggctgaaatcatggtttgtgaattgttttttaaaaccttgcatctgggatcaagtccttttgaggagggattaagtgtttttcttgggatgcttgaattgtttgattggaagttattgaggttcctagttaaacgagtttggtgctttatgttgaaagggatctttgattgctggtgtttataacttttattcattatgcttcagctctgtttgttccttaacactttcacacgtatgtgatcttcaatgggttgttgcagctgatcatatacactaaggagaaaaatgccattctgtttacttatcctcctgttggatcctttactagtaccggtttggtggtttcctccaaattgcctagattttctgacatgtacacactcactatagccagcgcagatccaaaatcaatttctgcaaat

SEQ ID NO: 46976 - DNA, 222 bp, Glycine max
tgaaattttcctaagtaggcactgccccctctggtatggattttctggaggccgtctcaaatggctacaaagaatggcttatataaacaccattgtctaccctttcacatcccttcctctcattgcttactgttctctgcctgcaatttgcctcctcacaggaaaatttatcataccaacgctttcccaaagaggggtccccaagactcataccctccatta

SEQ ID NO: 46977 - DNA, 402 bp, Glycine max
tcaaaacactcataacacaaagcacatagcaaagctcatccttgagttaaaaaatggcagcagcttcttccatggctctctcatccccatccttggctggcaaggccgtgaagctgggcccatcagccccagaagtgggaagggtgagcatgaggaagaccgtcaccaagcaggtctcctcaggaagcccatggtacggcccagaccgagtcaagtacttgggcccattctctggcgagcccccgtcctacctaaccggtgagttcccaggcgactacggctgggacactgctgggctttccgcagacccagaaaccttcgccaagaaccgtgaactcgaagtgatccactccaggtgggccatgctcggagccttgggctgcgtcttcccggagttgctgt

SEQ ID NO: 46978 - DNA, 402 bp, Glycine max
aggcattgtaatcaacaattacatttcctttttctttcttgaatggacaatcaaaggagttgaagctcaatttaacctgtacatcatggttttcagtccaaatttaaatatgattttgcagtaactaaacttaatccaaaatcacgagccatttactcagccagcaaaccctccataacaatgagatttgacgcttgaactgaaaacctgcccatcaacattcgtacgctgatttcactgcatccctatcactttctggacctgggcttaaaaatatttgccttgtagtatctaagttcctcaatgctttctctaatgtcatctaaagctctgtgtgtttttaattttgaaggggctctctccttatctttgggataccagcgaatgcagagagctttaaca

SEQ ID NO: 46979 - DNA, 293 bp, Glycine max
aaacacaacacaaaagcttattcattaggtctcatccattaatttccattggaggccgaaaaccgaaaccaaaaatccgggggggtgaaatttcaaaaagcaaaaacaaaggggaatggtgtttaagtacaaacaaacaaagggggggggggggtacaaatgctttggaaatttttcacacttaaaaacctgggggcttgttggggataaaacttttgccctgcacttggggaacgttggcgaatcccatgataccgatgaagccgcggggggatgcaatcttagccttttga

SEQ ID NO: 46980 - DNA, 456 bp, Glycine max
gttctttgctgctttctgccctttttattaggaaaatgtcaagacaaagcatcctcagttgctatatgagtccaagttgtacagagttctccagggaggaagtaatgtctcttgtcatattaaattttttgtctttcttttattttcacgttgtgcagtgacacctacttttagtaattgatcttatttatacttatataacaatgcctatacaaatttggtattggcagctggaattccagatgttagatggtttggagtggagggagattacaatgttctagtgatggatctgcttggacctagtcttgaagatctatttaacttctgcagtagaaagctctcactaaagacagttctcatgcttgctgatcacatgatcaaccgtgttgggtttgttcattctaaatcatttcttcatcgggatatcaaaccagataatttcctcatgggctt

SEQ ID NO: 46981 - DNA, 483 bp, Glycine max
gctaccaagtcagaaagaaagccctatttatccattttaagtacttctgattattattgttcatttgtgtcttacattactcatttgttttcaaacctgtgataaaatttgatgcttcctcaactattatagatgatcagagcatgtgattataatgataatgcaatatgtttctttgtatatcagacaatattccgcaacccaaaagcaatcaaaccatatgctgttccatcccctgagcactgcaatctaccagcggctgctatgcatacatcttcacatatggttgaggttgttggtttgaatgcaccagcagctcaggttgcacagcacaagtggcaacccaacacacctgatggccagggtacaccatttttctttcaacatggaaaagctacatcaggctctgtgggtgggaatcttacacgcacgttcaaaggtcctgctggaactggcgaagagtggcaatatccccaagcattg

SEQ ID NO: 46982 - DNA, 544 bp, Glycine max
  unsure (1)..(544): unsure at all n locations
ctcattcccatgtctgataagatggacaaagcaacattactagggagtgtggtagaccatgtgaaagatctaaagcgaaaagccatggatgtcagcaaagccattactgttccaactgaaactgatgaagtaacaattgactaccaccaagctcaagatgaaagctacacaaaaaaagtgaacatattaaaggaaaacatcataatcaaagcttctgtttgctgtgatgatcgaccagaactgttccctgagctcatccaagtcctcaaagggttgagacttacagcagttaaagctgacatagccagtgttggtggcagaatcaaaagcatattggttctttgctcaaaggatagtgaagagaataatagtgtttgccttagcactctcaaacaatcacttaaatctgctgtgaacaaaattgcttcgatatccgtggcagcaaattgtcccactagaagtcagaggcagaggttcttcttgccttctcattacgtacaataattcattgcaattntctttttcatttttgtttttaattctt

SEQ ID NO: 46983 - DNA, 479 bp, Glycine max
aacacaaacaaaagatcgacattttaacctctaataatttgacaatcatatttaacaaaaaaaaacatttaaaagattataaggatccatttgttctcatgaactgtgcagtgatcactagccgcaaagataaactaaatccatttcataacagacatcaagattatctcccatcttaatatttccaaagaaccctataccaattttacgggaaacaaacaaaaacaccgagtctgctagtctagtacaatgtaattttcaagtatctataatctcccttccccgctcaagaattcttccgctaacgaaaagaaaccccagtgaacaatatactgacgtcagtaatttgaacttcaaaacctctctccgaaacggaaaaacaatgcaccagttcctgagttgtgatcaacagcatattctgctctcactaaaccaagcttgacaccaagaccgtaggatgaaccatgacccattcgtct

SEQ ID NO: 46984 - DNA, 438 bp, Glycine max
gattcttcttacgtagcatccagcattcccttcatcgttttccaatctcctatataaccatagacaaaaaaacaaccttacaaaacacaaacacattacaatcaacaatgtccaatactctgcagcaacatcaacagtgtcccgaatcgaagcgtctcgatccgggttccaacgctcgccggcctggacaccggagatcggtatccgccggagctccgttaatctactccggcggagccaccttactcccaagcgggaacatttgtccgtccgggaagatcctcaaaccgggcttgccctcgcgcgggtcgaaccggactgatgtgttgggctccggcaccgtgaactacggccggggcagcatagtgcgaggcgtctcgggcaatattccggtgcccgtgggcgcactgccgcctacggtgaagcgcgcgctcagcg

SEQ ID NO: 46985 - DNA, 435 bp, Glycine max
cacacactcatctccacttcccacattttaatattcacacaccaccttattgatccaaagcttcaatatgggggatttcatcttctccttcaagacccaaccacaagaccatgctcaccaccaaagagcaaagcacaacaacaacaacaacaagaggctaaccgaggaccaggtcgcgattctcgagaagtgcttcgcctccaacatgaagctcgagccggagcagaagttccaccttgcaaaccaacttggtgtgcctccaagacaagttgcaatttggtatcaaaacaaaagggcacgctggaagacccagagcctcgaggtggaccatggtgtgcttcaggcaaggctagagaatgtagtggctgaaaagaagcagctagagaaagatgttgaaaggctcaaagctgagctgaagaaggctcaagagatgtt

SEQ ID NO: 46986 - DNA, 291 bp, Glycine max
attgccgatatcaagtattgggggaaaagagactaaaccctcatcttaccggttaacgacagtgttggttggtgtctgtgcagtgaccatgaacacccaccaacattgccgatgtcaagtattgggggaaaagagacgaaaccctcatcttaccggattacgacagtatcagtgtcactcttgatcctaggcacctctgcaccaccaccactggtgccgtctgtatggctttacaccaatatcgcatgtggcttagtggaaaggagatttatctttctgggggcaggttcc

SEQ ID NO: 46987 - DNA, 455 bp, Glycine max
acttagatcaacttggaatagcatctagatacaacactaaggtttattgcaggcagactttaattggaggaaactatggtcttctcaataccactactttcattccaaatcctgactactacagtgcacttttgtggtgtcagctaatggggaagactgttcttgcagctagtagtgatgttttttcaccatctttacgcacttatgcccattgttcaaaaggcagagatggtataacattactgctgatcaatttaagcaatcagactcatttcacactcacggttcatgaccgggtgcctgtgagcaatggaggaaatgaaaatgctaaaagcatccatacagaaaactcattctttagtcatctcaagagggcattttcttggattggaacaaaaggatcagatgtcacattcagggaggagtaccaattaactccaaaagatgattacctt

SEQ ID NO: 46988 - DNA, 391 bp, Glycine max
gctgatgcaatcaatgatgctgatgaagaaaccatcaaaaagctgatttatcctgttggggggtatactagaaaagcctctaacttgaaaaaaattgcaaatatctgtctcatgaagtatgatggagacatacctagctcaattgagcaactactgttacttcctggcatcggtcctaagatggctcatttggttatgaatgttggatggaacaatgttcaaggaatatgtgtagatactcatgtccaccgcatttgcaaccgccttgggtgggtctcaagactgggcacaaaacagaaaacttcgacacccgaagagacgagggaggaattgcaacggtggcttccaaaggaagaatgggttccaataaatcctctattggtaggatttg

SEQ ID NO: 46989 - DNA, 416 bp, Glycine max
cgcaagcaaaaagaaagaatcccagttgaggagaaagatggaggggaaggagcaagatgtgttctggggagctaacaagttccccgtgagacagccgctagggacggatgcgcatcaacaagacaagtgcaaggactaccaggagccggcgccggcgccgctggttgacccgacggagtttacgtgatggtcgttttacagagcagggatagcagagtttgcgggcacttttactgtttctttacatgatcgtcttaacaggtatgggagtcgccggggctaagtctaagtgtagtaccgttgggattcaaggaatcgcttgggccttcggtggcatgatcttcgccctcgtttactgcaccgctggcatctcagggggacacataatacccgcggtgacatttgggctgtttttg

SEQ ID NO: 46990 - DNA, 365 bp, Glycine max
ggctgagaatctagccattttatatagtattgtacatttctttgggtagtagacactgaaagggtcaaattgttgaagcactaaacagtagtgaagttcgttatctttgggtggctcgagccaatgcttcttttctgaaagaaaagtgtgggagataagggcatggtggttgccatggtgtgaccaattgaaggtgttgtcttcattcttccgttggtggattatggagccattgtggatggaattccactcttgaagctctctctgctggggtgccaatgctgacattccctcttttcttggatcaagttccaaatagcagccaaattgtggatgagtggaagaatgggtctaaggtagagaca

SEQ ID NO: 46991 - DNA, 405 bp, Glycine max
aataatccctagttgcattgcaatatgtaaataaatgtaaatccaatgattttcatttcataaaaaactaaatattcctaaaacaaacaatgatttgtttgtaaagtagagacaagaacaataatctagttctgcctataagcaatgtaattggctaaagcaatcaaaggagcagccttaacagggtcaaagccagcaagctgatcctgagcatccttgttcagtttcgcagcaaactccttagacttctcaatccccaaaagcttggggtaagtaaccttatcagccacaaggtcttttccagcggtctttcccaattcctgggaagacttagtaacatcgagaatgtcatcaacaacctgaaagagtagaccaatgtagcgagcgaattttctcaatttttcg

SEQ ID NO: 46992 - DNA, 385 bp, Glycine max
atcaacaaaagaattctacattctactatttctttgtcctccttacactggccttcggacaaaaaagaaagtaaactgtgactatttttttccggtggtgtaaaatggagtagtagtatatggaaaacgttaagaaaagaaaagaagaagaagaaaaaaactcctcctaagagtaattaacatgaacactggccttaatgccagattgacaaagagggcaattgtgtacggtggacccacacattgtgcacaaacacagatgcctacatggcaacaacagcactatcgattctcttaccccacactgattgcacatcctcttccccaaaacgccgtggtttcgctcgtatccgtcgcaaaccttctcctcctctcggtgggggtg

SEQ ID NO: 46993 - DNA, 469 bp, Glycine max
  unsure (1)..(469): unsure at all n locations
gttacttcctgtggttgatactgctaaactccctgatagccttgaagtcatgttcagtagctctcaattcaaggagaacttaacttactttcagcagcttcttgcggaaggagtctttgatatctctttgttgggcgcaaaatctgaagactgcangattttgaaaagacttgcattatccaatctgtcaaagtcaaaatgggtagcgcaccataattttctcaagaaatgtaaaaacaaagctggaaaatctaatactatgggatctactggtacaacatcaactaatgttttgaacaacagggcgtcaactgatgttgcaaacatcaagagaatgcgtgacagcagaaatcaaaacttaccagaaataaagacaataatgagaagccccaaagaacgatcgcaaaggcgagctgtgagggcaaagaagctgtagagaatggtgcttgctatagtccaaaacacctat

SEQ ID NO: 46994 - DNA, 498 bp, Glycine max
aataattgtaggaattgtagtaattggaggacttctggttctactcgttgtgtgcatcattaggaagtccaaagcagaaagatcacctcataaaatggacaaatctgttgctaataaatattctaccagtgtatctcctagaccaattggtacaagacatattcctcaggcaatgaagcaagctgcagttggactgccaccataccgtatcttcacatcagaggaaattgaagatgcaactaacaactttgacccatcaaatttaatagaagagggatcacagggacagctatataaaggttggctcagagatggttcagtggtccttgttaattgtgtaaaaataaagcagaaaggtttgccccacagcatcatgcagcaagtagaggtattacacaatttgaggcacaagcatatggtgagtgttctaggacactgtgtcattactgaacaggagcatccacaaacaacaagcacagtcttcattgtgtttgagta

SEQ ID NO: 46995 - DNA, 288 bp, Glycine max
ggatcattaggcctgaccttgtcgtgggtggctcaatgattttatcatctgagtttgtcaatgaaactttagatagaggcctaatagcaagctggtgtccacaagaggaagtgctgaaccacccttcaattggtggattcttgactcattgtggatggaactcaacaattgaaggcatttgtgctggcgtgccaatgctgtgttggccattttttgctgatcagccaataaactgtagacacatttgcaaagaatggggcattgggattgaaattaacaccaatgcga

SEQ ID NO: 46996 - DNA, 511 bp, Glycine max
  unsure (1)..(511): unsure at all n locations
tttggttctaactcaaggctttttggagagtacggatcgaagcggcattgcattggcaaattcagcatctgaggaaactgatttttctggtctactccatctgatgaaattttacaagagtcgaaggtttgatactgacattggactggccaaagccaaacgattttcatgactttgccgagtattttgttcttgaggctattccacatgctgttgctatggttagagctgctgacaagaaaagcccaagagaggctatcgagtttgttttacagctattgaagtacaatgacaacaatgggaacccttactcagatgtattctggcttgctgcattagtccagtcagttggtgagcttgagtttgggcaacaggttcatagactattccttttgctgattctcatggtcacctttatggattaatatgnctgatctgagcttgctgggtctattntggtttacatttaccaagtacatagcttcttaagtacctttcaattaactaaata

SEQ ID NO: 46997 - DNA, 552 bp, Glycine max
  unsure (1)..(552): unsure at all n locations
cgacgccgtctacggcctcttccagtgccgcggcgacctcaccaacgaccagtgctctcgctgcgtgtcgcgtgcggttacccagcttggcaccctctgcttcgcctcctgtggcggcgcgttgcaggtcgacggctgtttcgtcaagtatgacaatgccaccttcatcggagtcgaggacaagacattggtcaccaagaaatgtgggccgtccgttgggttgacctccgacgcgttgacccggagggacgctgtgctggcgtatttgcagacgtccgatggggtttataagacgttcaggacgagcgggtactggggatttccagggtgtggcngcagtgcaccggggattntgagtcccagcgagtgccaggattgtctttctgatgccatccaacggttgaaacccgagtgcgggcccactaactgggccgatatttacttggctaagtgctacgcgcgctacntcgaangtgggactcgctcgcgtggtaataataatgatgatagcaatcacaatgatgatgagatcgagaagacactcgctatact

SEQ ID NO: 46998 - DNA, 456 bp, Glycine max
gacttagtgaagtgggtgaggaaaggattcgatcaagaaagcccgttatctgaaatggttgatccatcgctgctccaagaagtgcgtgttaagaaagaggtgctggctgtgtttcatgtagcactgtcttgtactgagggagaccccgaggctaggcctaggatgaaaactgtctctgaaaatcttgataagattggaacgtaatgctcgaacatgtgcagtgtgctagctctaggactcagcctgagactgcagtttacacaaaagatgcatttcaatctaacaacgcatttctgtgataacactgagaaggttttatgatgtgcatcaatatggtgctgcaaacctgatccttccatcttggataagcccctttacatttgttttggaactcgagcaatttttggagagctgtaattatcatggtctcacttacattccattctcattttatta

SEQ ID NO: 46999 - DNA, 488 bp, Glycine max
gttgagtgcgtctccgttggggaagatggcaaggtcaacttggttggtatcggggattccaatttgaattaccggaggttgtttgatagcgccgggttggtttcatacaccgcagtgaggtgggcgtcgccgatggagttcgccaccggtgggttcggcttcggtcttcagtggtgggaccaacgtaaaccgggaggaccggtttcccagtttaagggtaactgggataagaaattgacatctgggattgtgcactctattgacattcatccctcgcgcaagcacacttgcctggctggtggttccttaggtacggtttttgcctgggatcttaggtggcagcaacaaccaattatactttcaggtgctggagctgccaacactgcggttcagtccatatctgaaagtgaggtttgggaggttcagtatgatcgttgcataaaatcaaacacttcatctacccggatcttaccttccatgatatgctc

SEQ ID NO: 47000 - DNA, 433 bp, Glycine max
ctagttctagatcgcgagcgaccgccctttttttttttttttcattctctgcacactttattatgtacaaacattgtggattacagacacaataaacatgatcaatcatttatactttgtgtaatcttgaagctgacaacattcatagtattgacttcagattaattaagccaagagccagaaatctttgtgacgcttagtggtaatcatgtaccctccactcttcttgctttttcttctcacagcaattgccatgcaatgtgcattctgaatgcagtactctaccaccccacctgtgactctatgccctgcccacatcatcagaagacgccatgttgtggacctcttcttctgccccaaaactagaagtgccacaccttgtttttttgcctcctccactatttttggacccttttcctttccctctattact

SEQ ID NO: 47001 - DNA, 457 bp, Glycine max
cctcaacatgtttctgttttctagtcaatggcagaaaacgatgtaccgatgctatggttccaaaggtaaaagatatagaatattaacattggcacttcttcaaagattgcagaatacaaaatcacacaaaaggaccaacacaggaaacctcagttggagaagatgaatttgaattttgactagtccgtaggcataaattcatccgggtgatccaatagatagttggctgctagatcctcgtttttattgcatgcaaagaacgcctccaccacaatatctcgatgaaatcccatagcttcaagccgttgaatggcctcattctcttcaggggtgatagtgacagtcccagaaatcatggaatccaactgactctgtaaattctcgtccccttcaggttcattcataaggtcaagtatgtcctcttgatgatcttggatgatctgcattagctgaggat

SEQ ID NO: 47002 - DNA, 322 bp, Glycine max
ctgtcctataacaaacttgagggtccagtaccctcaaatgggatgttggtgaccataaatcctaatgatcttatcggcaatgagggtctttgtggaggcattctccctccatgttctccaagtttggctgtgacaagccatcgaaggagctcacatatcagacacgtcattattggttttgtgactggcgtttcagtgattttagctcttggtgcagtatattttggtggtagatgtttatacaagagatggcacttgtataacaatttcttccatgattggttccagagcaatgaggattggccctggaggttagtagcat

SEQ ID NO: 47003 - DNA, 445 bp, Glycine max
atctaaaattaatttccatttttcttttatctagaatacatgtatttactatttgatataaatttggtcgacgtaggcaaagcatacatccaaattcagaggttaagggaattcaaaattaaaaatatattgctaattcctaaacaacttgttgctacaaaagactgattattggggagggggggaagatcgttggcttttccaccctcctgctgtcttgtcccccattatggcaaatacttttccttcttggctttgcctctccaagcattgggacgatgtctctcatggggggtctttccttgggaagctttgcagtacatagaagtgcaatccggagcacaagcagcatttcttcttggacatgcttgcactgactagctatagcaggatccaatgcttctaacaaggctttggtgcttttcttcttccttatccattcgac

SEQ ID NO: 47004 - DNA, 353 bp, Glycine max
ctcaactcttttcctttttccagctccctttaacccaaccaatttgccatgtcaagtttggaggaaccacttgttcttgacaagttaccaatcatgaataccattgacaggattcagaggttctcgtcaggttcttgccgtcctagagtagataacttgggcatgggaaactgctgaatcgaaggacgaagttgcagaacatctaacagctgcaatgaagatgatgaagagtatacagcagagacattcccatggaaaatacaaacaagagacttatcccaagatgacttcttcaatcaaaagtatctgaccaaagggaggaagtcaacgaaatttggaatgaatgatgattc

SEQ ID NO: 47005 - DNA, 537 bp, Glycine max
gcacttgcaatcctgggccacagatcaacacactccttcccaaaaggaccagtgatagctgaacctttaattacacccatgatattcactaccacaccagcataaactacggactacctgacaccactgtgctgacacaaccatcattcaatcaccattcaatgactggaagcacttcactttttgcagtcttggactaataatacattgtgacttgaagccggagaatattttggttaaaagctatagcagagatgtgaggttaaggtcgttgatctgggaagtagctattttgagacagagcacctttgctcgtatgttcagtccaagtcttatcatgctcctataggacaagaaggttattttgtggcttctatatgacaagaagattgatatttggtcacttggatgcatcttggcagaactttatacttataatgttgtataaattatttattttatattataatcattttacaaaattatttgagcatatatatatatatatatatatatatatatatatatatatatata

SEQ ID NO: 47006 - DNA, 349 bp, Glycine max
taaaaaatatccatagtataaattaatgacaattatttagaacacatggcttaaggtcaaacagaatgatacaacttacagctgatctggaaagacaacaaagcaatgaatcgagagatccctaaaaacacagaacaaactgctgaaacacctaccattgatgtgagctcaaaagaattttatggtgagggatatgatgacagtgacaagagaatccctgacatgaccataataaacaagcagcttggatggaatcctaagacttcactttgggacctgcttgaatccactctgacatatcagcacaggacatatgctgaagccgttaagaaagtcattgcaaaacccc

SEQ ID NO: 47007 - DNA, 485 bp, Glycine max
cacactgataggtcctataatacaatagcactgatacaatgaagaatataattgcacctgtgcaaagtgctatgccatctccaacttttctgtggaggttcaaggtgacactctttctgatatggggctttacttgctgcaagattggttgggattctgtcatgagaatggatgcaaatctgcgagatctgtttttatatgaagtgtttttgtattacaatcctcttcttcttgtgactatgatggtttggctttggggagtaaatttgtgggtatttctgcaatccactgtaagctatgccaaggtttttgatcttgatcaaaaccaccttactcacaaagagatatggaagtgtagcacttggatgacaatcattgtccctactagcatgactgcttacctctatctctattctcatggggaagtatctttggctgcatctcaaccagtgcttctctacattcttgttgcagtaattttgatc

SEQ ID NO: 47008 - DNA, 411 bp, Glycine max
taaaccatatgctctctagttatcgttctttttctggtgatgatatcccctttagtaggtcattttccagccacagggatcttgactctgaatctggccattctgtattgcatgcagatactccagttgcagtactacaggaaattgcactgaagtgtggaactaaggtggactttatttcatctctggttgcaagcactgaactgcagttctccatggaggcatggttttctggaaaaaaaattggtcacagagttggcagaactagaaaggaagctcaaaataaggctgctgaggattctatcaaacatttggcagatatatatttgtctagtgccaaggatgagcctggttctacatatggcgatgtgagtgggttttctaatgtaaatgacagtggttacatgggta

SEQ ID NO: 47009 - DNA, 512 bp, Glycine max
attttgtggcagcagcaagcatatttgagcctgaaaagtctcgtgtgagactagcgtgggcacaaaccagtatcttacttgagaccataacatcctatgttagtgatgcagaaatgaggaaagctttcatgaaaaaattcagtgactgtcttaacaggcgagactactccattggctggaggttgaacaggaacagaacaggacatggactcgctgagactttggttgccaccatagatcaaatctcgtgggatatactcgtgtctcacggtcatgaaattggatatgacatgcatcgcaattgggaaaagtggctttcgagttggcatcgggaaggagacaaatgtaaaggacaagccgagcttttggcgcagacaataaacctatgtggcgggcattggatttccgaggatcaagtgtcggatccactgtatcagagtcttcttcaactcactaacaatctctgcaataaacttcgttgccaccaaaaggacaaggaacttgagagcagc

SEQ ID NO: 47010 - DNA, 313 bp, Glycine max
gatgattcctccacgttgaagaagccgcgagttgtttggtctgttgagcttcatcaacagtttatggctgttgtgaatcaacttggaattgataaggctgttcctaaaaagattttggaattgatgaatgttcctgggcttactagagaaaatgttgctagccatcttcagaaataccgtttgtatcttagaaggctgagtggagtttcacagcagcagggtaacttgagcaactccttcatgagctcacaagaagcaacatttgggggaacctcaatcaatggaattgatcttcaaaccctttcagctgctg

SEQ ID NO: 47011 - DNA, 506 bp, Glycine max
cctgctaccattttgaagtgaagcgagagtttctgaagggtgccttgaaaagattttctcagttctttatttcacctcttgtaaagatggaggcaatggagcgagaagtacttgcagtagattcagaatttaaccaggttttacaaagtgatgcttgccgccttcaacaacttcagtgccatacttcagctcataatcatcctttaaatagattcttttgggggaataaaaagagcttggttgatgcaatggagaagggtattaatttgcgcgagcaaatattgaaattatacaaggattattaccacggtggattgatgaagcttgttattattggtggagagtctctggatgtgcttgagagttgggttgtggaactgtttggcgctatcaagaaaggtcaggcaaacccagtgttcacagtggaaggtcctatctgggaatctggtaaagtttatcggctagaagctgtcaaagatgttcatatccttgatttatcatggaca

SEQ ID NO: 47012 - DNA, 466 bp, Glycine max
agtctgaaatcttcatgcaagcatagttgatattgcaaacaatcttgcacaatcaatgttaattgctcggttaatatcagatgcaagaataatattacaatataagcacatttatgagccactaactttccctgaccaacaaaattagcatgctgatttgaattaattgttggaacttggaacatactcatttcttgaacagtctctctctcaaggtagcacagtaaaaacttccacatctttcattgcagggctcttgactgagtatttaaatgtccaaccatggcaggcaccagcatgttccccctttttattgagggcaacaatggctcccaaaaaatctggaaattttcttgctattcgtgttattgcatctttagcagcaagtttgggttccattcccaacctcatactctccacaacttgatagcatggaaggaagcgcatcatgatgtcaccatcccca

SEQ ID NO: 47013 - DNA, 373 bp, Glycine max
ctgaaactatcaagttctatgtatgttgaaagatcttgtgactctatggtagaggttaatattacatcttgcttttttgtatttatgaattatgattgaacccaatcaattcaagagaatggtacaatgtttcttcacagaagagttcttattctggagctacactgtttctgttgttatttctttcaaaattctaataagctggcttagtccttatgtaaaggaagaagcttgaccccactcctaccattgaaatgcacctccaccatacgaaagtgggaaggtatcacttcctccccatgcacatggacattttgtgcagccaaattgtatgccttggtttccttgcattggaatcataaactaaggctgc

SEQ ID NO: 47014 - DNA, 413 bp, Glycine max
tcttcttccccgcagcgccgcacagactcatcaaactcgttgtgactgcagctgcacagattttcctcttctctgtgcctttgcgagaacgcgcgtttggtttcaattcaatggcgggaggtaaagcgaagaaagaaaaggggaagccccatcagcagcagaagcacatgccctaccaaggcggaatatcgttccacaaatcaaagggtcagcacattctcaagaaccccttgctcgtcgattccattgtggagaaggccggcgtcaagagcaccgacgtcatcctcgagatcggtcccgggaccggtaacttgacgaagaagcttctcgaagccggcaagaaggtcatcgccgtcgagatcgatccccggatggttctcgagctccagagacggttccagggtacccctcac

SEQ ID NO: 47015 - DNA, 326 bp, Glycine max
agccagggcaaatgaaacgacttgagtcattatggattttaataaccattgtcatcgacataagtaacattagatgaaataaggatttcataatagaaaaacactggttgaagcataaaattgtttattcgtgaatgtgcataaaagcacaataagacaccatacacgaaacacatccttgttagagccagaagccgcctcattcacctatagttgcggtatacgggagtatacatgcaactctcagcacacttcacaagattctgaggacgaggaagacgggtagccaagcccagttcgtatgccttggcagcaacatttgcagc

SEQ ID NO: 47016 - DNA, 542 bp, Glycine max
  unsure (1)..(542): unsure at all n locations
gaaagttgtttaggaaagaatatctcttttatggttacaaaactaagcatcaagcaaccattagatgcttccaagaattgtgactctggtggcgtgttagaatctgacaattgcaaattaggttcatcaaaaggagttgttgatccaacaaagagttactgtcaatcggagattactttttgtccaagtcctcagaatagtttctattcagaagccaaggaaagttttgtcaatactggagccagtgaatgtgtgagtgttgataagtcagttgaaagtggagaagttactaattcctgtgaatttaatgagagcagaaagaccagcatctgtagagggagtactggaagtgacgttagcgacgagagcagcactagtagtttgagcagtactttgtataaaccccacaaggcaaacgatataagatgggaagcgattcaagccatccgagtccgtgatggggtgttggaaatgagacatttcangttgttgaagaaattgggatgtggagacataggaagtgtatatctagctgagttaag

SEQ ID NO: 47017 - DNA, 383 bp, Glycine max
taatatgtgagagcgtgagtttgcaattctttgtgaacttgaatggagcttacaaaagagacatactcatgttccttaaggctgaaaaacacagttgaagaagatgcaataaggttgcagcctggatctagtgaagtccatatgttttttccagatagccttggagatgatttgattgttgaatttcaagaatccaagggaaagcattttggtcgtgttcttgtccaagtggctactatagctgatgatccggctgacaaattacgctggtggcctatttatcgtgaaccaaaccatgagcttatgggcaagttacaactgtatgtaaattattcaacaagtgcagatgacaatagtcacctcaagcagagacagttgcatat

SEQ ID NO: 47018 - DNA, 487 bp, Glycine max
catcaagaagctcttactcagcttcaaactttgccttctcagctttgagcttctctgcctcagccaaaagctccaacttctgagatcttacaagggcaatctcttcctttagtttcacttccaaaattgacaagtcacccgtttcacttttcatggcttccagtttctccttttccatatcaacttgtcttattttatcttccaatgattccaaagacttctgcacatcttgttttgcctgttcaacatgatctttctccttctgcaaaagcactttatttaactcaaagtccttctcagcagcactcaacctttgatctttttcttcaagagcacttgacaggtccttcagatccttctccttctcactcagcgaccttgacagaacttccaactcatgctgcctttccaggatttgatcctcacaatgtttaagatcaacctccttcaactcccaagcccgtctcttttcctcaatttcattttc

SEQ ID NO: 47019 - DNA, 365 bp, Glycine max
ccgtgaacatgaaagaagaatgaagattttccgtttttcgctcttctgttggaaaagtgaaaaccagaagtactaacgaaagagaagagcgatttagaagtgatagaagatggggttgtcgttcacgaagctgttcatcaggttgtttgcgaagaaggaaatgaggattctgatggtaggtctcgatgctgctggtaagacaaccatgttgtacaagctcaagcttggagaaatcgttaccactatccccaccatcggatttaatgttgagactgtggagtacaagaacatcagcttcactgtgtgggatgttggcggtcatgacaagatccgtccactgtggaggcattttttccagaacactc

SEQ ID NO: 47020 - DNA, 489 bp, Glycine max
actatataaacaaatatatagttgagattgttgtttttcgtcctggagaacggaaagtgggttgactgagaagccttgcagaattttcaccttatgcaacaccacaggatccacgccaaatgcttacttctattggtcagttgcttaagaaatacatgacttggaagaagactggagaagagatgaactttacctatgttgagtgcttgttgtacacatttcatcacttagctcataaggttcctaatgcgacaaatagtttatgtggatacaaaattgttactggccagccatctgataggcttggagaggacttttcagagcattataatgattttactgagagattgaataatgttgaggagttcacccgggcttacaatcaagaaattaactcaaggaatggatgaaaacaacaaatctatggccggtgctaaaactgatgaagaaaaggaaaaaattaaaactaaaaagcagaatgctacaact

SEQ ID NO: 47021 - DNA, 309 bp, Glycine max
agcaccaattttatatttgaatttatgtgtaaaagtatttgaggggggttcatatacacacacaacgatggcaacaacaaaattactgaaaaaacagagaaaaaaaatataagatataacgtatacaacgctcacagataaatatattctgatatgataacagtgcactaatatttagtatcatttattcccaaaggttaacttaaatttcttcacaaggggggccttccaaacgaatataatcatacatgataccttggaagggactggtgcatcttggttgcgaaaaatatatggtatttgtgccat

SEQ ID NO: 47022 - DNA, 457 bp, Glycine max
atgcaaaaatagttcattcttattctattctcttagtatatatgtgtataatacttataatggaccatcctctatacaaaagtaccagtaatacattatatataggttgttgaatatccaagcgccctccgctatatattcattttgttttgtctttcggactctcttcttaagtccatacttaatataactttcaaaccaaccgaaacctctaattatctattgtctctgtgagtgatattcttgttgcattatttgctattaatctccttttatgccggcaaagcctcgaaagtgtcattgaaggtgtcttgttctcgggcacattcagctcaagacggaacttgggaccatcatagtggtgaaggattggcctgaaggaatcttcctccagtggttcacaagttttcctagttatcactcgtacctgagcggggaaacgagattcaccagggca

SEQ ID NO: 47023 - DNA, 462 bp, Glycine max
gaaaaatagagtattatagatatgaaaaacataattaaacattccaataataacacaaacaaaacctaaataactctatctaagatttatcatatcctaacacagcacgcgcagcgcgtatgaattggaacacagcaaaaatgagcacaacaatccccaccaaagtggaacttgctctccaagggtctctaaagtacaccaaccacaacgctgccatggtgcggttccagatgttctggtagtgcttgttgagttcatttatagtctcgtagtaacacgttgtgtttgccacaacgtgtttgcttagtccattaacgagaaccgccacttgcttatcactcccaagttcatgcacaatcactttcttctcaaccagcaactccacatcaagctgagtgtgtataagagagtcaatcagagaaacatagttgcaaatgtagggcttctcaggatagtgacact

SEQ ID NO: 47024 - DNA, 449 bp, Glycine max
attactattgcttcttatgaactagccttccaaaccatgatcaatatctctctcctagctatcctgagacagaaggattcacaggaaaattccttgctatttaatctctaaaagaaacatgcttgctcttttgcttctaccagtataccagccatcatagaatgagtcatctgaaaggttcaacaggtgcagattcttcaagaaagtgtgctgcttgaaaacattcggcagcttcaactaatgatgatgctgtaccctcagccttgtgaagaaggccaagattataccaagcagaagcgttgaatctgtcgtgccgtagcgcatccatcagaaagcttttaactgctggatttgatttattactgcatcgtttaagaactacagcagtggagattatgctaaggacatggccaggatcaatgtccaaggcatcaccaaaagcttttaga

SEQ ID NO: 47025 - DNA, 432 bp, Glycine max
gttcacacacgtattaataagttgattgtaaccacaaaggtagaaatacaacactagacaaagaggtttctaagatgagcttaatatatttatgcaattgcaaactgtcttcaaaaagttgaagattcacaagagcattatttatagcatagtagctcattacaaccatatgacagatccgtttattaaagggaaataatgacacgtatgtttaaatccatatatctgaagtacagtcaccaccaggatatctcatctcatgggcaagagaaggaccatcaggctcagttccaaagtccacaaagaagttggggttgattttcagtccacctttctcagtatcaacatcaatctgtattatgtgggagcctttctggacaagctctggataaaattgtttgtcccaagtactaaatagtgagttggtagcat

SEQ ID NO: 47026 - DNA, 476 bp, Glycine max
ggctatgacaccagaattcaagaatttctcaaattcaagtacttagcaactgctcagcggttgcacagagtttgttagaaaaaggctacgaacttgtatctggtggaactgacaaccatttagtgttggtgaacttaagaaacaagggtattgatggttctagggttgagaaggtactggaagcagttcatatagctgccaataaaaataccgttccaggggatgtgtctgctatggttcctggaggcattcgaatgggaacccctgctctcacatctaggggatttgttgaggaagattttgaaaaagtagctgaatactttgatgcggctgtcaagttagccttgcagattaaggaaaataccaatggttgatcctaccttaccttcgtacatctgaattgttatatttgcagttttaaaagcatagccagtgtcttaacgttacgtaaatcacttttcttcttgatggttaca

SEQ ID NO: 47027 - DNA, 430 bp, Glycine max
caaaaattgggaaagggaatattacctttcagactttttcttatcacgagctatgtgttgcaactcggaactttcaccctgacaatatgattggcgaaggaggctttggaagggtgtacaaaggacgcctcaaaagcataaatcaggttgttgctgtgaagaaacttaatagaaatggattccaaggaaacagggaatttcttgtagaggttttgattttgagtctcttgcaccaccctaaccttgtcaatttggtagggtattgcgcagatggtgatcaaaggattttggtatacgagtacatggtgaatggctctttagaagatcaccttcttgaactatctccggacagaaagcctttggattggcgtactagaatgaacattgcagcccggtgcagctaaaggacttgaatatttacatgaagtag

SEQ ID NO: 47028 - DNA, 439 bp, Glycine max
ggcatcattaagaaattttatagaatgattctcaaacttcattagcagctgctttttcattcattgtccttttgtgtaatcctctactgttttcaggttcgttttgttaactacattccccatgctcgaaaaaagtctcttttgaacggtgttgtcttcccacttgtatatgcctctttgctaaaacatcaagagctgtaactacgtcactaatcaaaggtcgggtatcagcttcctcctgaatacacattgctgcaactgctagtgcttggtgtagaccctttgttgggtagttccctttcagcaatggatcaaccattgatgaaaatttccttctgtctttgaatagtggttgtgcccaagtgaccaagttttgctcttcagatggtcttgactgatcaattgctcttcttcctgtgatcatctctagaaacactac

SEQ ID NO: 47029 - DNA, 336 bp, Glycine max
ccaaaaccaattgatttttttattcatcaaagttgctcttcgaatctgggtttgaaaacagcccggggatcaaattggcaacaaaagttttcctatagccaaaaaaaaaaaaaaacaattgcagttacagccccgagatcaaaagatgaactttgttttaagacagcactttttccacttcaactgtcaccttttgggggggtttctcagcatgaaaattagcaccagggcccttttttgaatagtaatcaatacccggttcggtttgcttgggaaatgcctccagtcttaacttaaaaacagctgcagggtcatccttgcgctggataaggggtt

SEQ ID NO: 47030 - DNA, 454 bp, Glycine max
acgatctcaaattatttcctcgaagaaacgaagaacagatattccatgaaaaactctgagaaacccaaggatttttcttataatcccttgcctatagcttatttgtataaagacttttttacaactgattgcgatgcctgttcaggtgttttcaggggttcattagttcaaacagagaagcttcaaaatccaccaagcattgttgggggagagagtcataaaggctcgattgggaagttggtgctacttttacaggtttgagtaactcgcttgaactttcactcgatgccatgaagtgtttaaaatacctctaaggttccaaatgtcttcaaccttttcaggttggacatttgcagcagaatctaccgcttttgcaattatctcagtgctgtgaaggatatcagctgtgacttcaaacagcacccatgcccatttgtcactgctggcatgttct

SEQ ID NO: 47031 - DNA, 464 bp, Glycine max
agaggctaggttagctcgggtctgttctggattgtcatcccgtcttcaagaatacggatctgaaaatgcacagttggaggaacttctcacttcagagagagagctgagtaaatcatatgaagctagcataaaacagctacagaaggatctgtctgaaagtaaaagggaagtgacaagagttgaatcaaatatggttgaggctttggcagcaaaaaatgctgaaattgaggcacttttaagttctatggatgctgttaagaggcaggctgcattgtcagaaggaaatctagcttccctgcaggcaagtatggaatcaatgatgagaaatcgagaactaagcgaaacaaggatgatgcaagctctaagagaggagctagcatctgctgagcgaagagcagaagaaggagcgtgtcgcacataatgctaccaaaatggctgctatggaaagagaagtggaattggag

SEQ ID NO: 47032 - DNA, 348 bp, Glycine max
catgttcaacattattgactgtaaattttcaaggatacgtagtggctctttaattgctccatgttacataagcaaatggtccataattacatttataaatgtgttaacccacaaaagggattatctattgaatataactatttacattattattctttgattctcacctgaattacatgatacaacatctcagcaccagccccttttgatcaatcctgccatcttcattgccttcaggtggctgagctagcttccgattttgtggagacatcatttctttcttcaattgcatcaaaatgtcttccattgtacactctctttgccaattagcaagcataggaaacaaat

SEQ ID NO: 47033 - DNA, 446 bp, Glycine max
gcttgtcacatccttaaacccagtttgtttcctctattttactcctgaaacttcctggttttcacgttcttttgaaactgaagttaatttgactgttccagaaaatcggttatgacaaggcagcaacagttgccaagacagctcacaaagaggggactactcttaaggtgatgatgccattgttattcttgttttcctgtttgtcttgcttattctgacctctcgttttgaatattaacaaaaaaattatgctgccatatattaattcttaacaaattaaatttaagaagtacactatatatacaagtttattcttgcagaaccatttcaactcttggattctttttttcattaatagttgtgatatttatatgagtgaattgatcacttaatagtttttgtgtttttgtccaataaatcttggctaaatatcgaaattgaaatga

SEQ ID NO: 47034 - DNA, 420 bp, Glycine max
caaacacccatcaactgatatcattattggtgttatagacacagggatatggccagagtctcctagtttcagagatgagggtataggggagattccttcaaaatggaaaggtgtttgcatggagggtcgtgatttcaagaaatccaattgcaataggtgatcatccattctcttacaaatgtttctaataaaaatgctcatatctattcataaagtcttctagtaatcataatttaacactgacaaaattacaaattgatcatatgctacacttaaattctctttataaaactgcagaaaattgataggtgcaagatactataagattcaggctacatcaggtgacaaccagactcatatagaagcagccaaaggttcccctagagatactgttggacatggaactcacactgcatcaat

SEQ ID NO: 47035 - DNA, 337 bp, Glycine max
aagtgtacttatagatattgatgggtaattgacgctggagataaggtcttcagaggagttctttgggcaattgaagttagtctcagagattgaccttatgattttctgtgaatagccgaaataacaaaggaatctgagatagtcttccacatctgtttcaaagactaagccagggttgagagctctgagtggattaatttccccaactcccatttcatgtgggccggcaatggagtttgagctgttagtaagaggcttcctcatgttgttgtagtttgtagctgttgtcatcaatgctgatttgatcattgaagaactccattttttgtgtactgac

SEQ ID NO: 47036 - DNA, 398 bp, Glycine max
gttacaaaatggctttcattataatttctgcagttagcttgtttggggcgcttgtgggtctcatcctggtgttaaggactagagagttctataaaggtgatatatacaagaagttcagagaggaagctagaactgctgaagctgaattttgtccaactcagaacaagaatggacaaactgctgcatatgaaggctagatatcattggcatggaattgataaatgattgacatagatatcaaaatgaaattagaaccagggagcttaagcaataacaaatgcaattaaatttccattagtttgtagttgatgtcatgttaggttctagtgatgttatgttttcttttcaatgaagtaaaaaaatatatcagcttgtaacaaatcaatattgtgatcagc

SEQ ID NO: 47037 - DNA, 446 bp, Glycine max
gttcggggcatttcaggagtgtcctagctgctatcaatgccgcggcaaggagaagggtgaagagcaggttcattatacatgttaagagaggagtttatagagagaatattgaggttgacaagaccaacgataatgttatgttggtcggtgatggcatgagaaataccataataacaagtgccaggagcgttcaagctggttataccacctatagttccgcaacagcaggtcactactcacaactattaattccttttcttttctctcttattttattgattcagtttattggttgaattcgtcttacccgctcttcattaattaagtctgaattttaagctttgccttttggaatatttaaggattcttcttctaatctaggaaaatcgtattttatattgcagtatactttgtactttatttaattttttatttatttataaaat

SEQ ID NO: 47038 - DNA, 359 bp, Glycine max
gcaagtattatttattcataatttattatttttgtcttggaatgtacaaaagaatattgtgtcgcttgtagaaacaaactacaacataacttaattccaaccaattgaatatcatcaaattagtaattaagcataagacaataatcaaaggccagaagtgaatggcacaccagtggcaggcaaccacgtgcggccggcaaggaggttagcaactgtgaatcgtgatgcctcagctgggctacttattctatgaaaaccgggccatcgtaccctgtttctggtggaagaaccgggcccaaagttcctgtactctccataatagagagtattcaatgcaaaattagagtctccccatggag

SEQ ID NO: 47039 - DNA, 463 bp, Glycine max
ctgatgctcagaagagcatgttagatgatagattcaagtggaaggtccgggagatggaaaagaagaaggaaggaaagcctggtgaagcaagggccaatttaaggcgctcagtcagggaaaatgggtctgatgtcgcagaacaaagtggagaaatggctagatctcttactggtccaatgttgaggaaaaattatgctcaacctgatagtaacattgatagacagttgatgccccatcctatgactgttgctagtggccccacagattggaatgaagcactcgatattatttcttttggttctcctgagcagtctgttgatggaatgaaagttgtttgtcatgagttagctcaggccactagtgatcctgaaggaagtgctatggatgaacttgtgaaagatgcagataggctagtttcatgccttgcaataaggttgcaagaacttttgacttcagtttgact

SEQ ID NO: 47040 - DNA, 474 bp, Glycine max
cgtacccttgctgactacaacattcatataggagagtactcttcacctcgtcctccgtctccgtggtggcatgcagatcttcgttaagacactcaccggcaagaccataaccctagaggttgaaagctccgacaccatcgataacgtcaaggccaagatccaggacaaggagggtatccccccggaccagcaacgtctcatcttcgccggaaagcagctcgaggacggccgcaccctcgccgactacaacatccagaaggaatcaacccttcacctcgtcctccgtctccgtggtggcatgcagatcttcgttaagaccctcaccggcaagactattaccctagaagtcgaaagctccgacaccatcgacaacgtcaaggctaagattcaggacaaggagggaatccccccagaccagcagaggctgatcttcgccgggaagcagctcgaggacggacgcacccttgctgacta

SEQ ID NO: 47041 - DNA, 491 bp, Glycine max
gttggttttggtggatcatgcttccagtaggacatattgaacttggtctatatctgtgagtgcaatggcctaccagaggtggccaattactggaaacaggtcatcaaggtgaatgactaccagaaaatgcggttcgtaaatcgcgtggtgtcatcaatcttcttccctgagactgtgttgaacattgctgttttgggatttgctttcaagaaggacactggtgacactagggagaccccagccattgatgtgtgcaagggccttttgggagacaaggccaagttgagcatatatgatcctcaggtcactgaggatcaaatcatgagggatttagcaatgaagaagtttgattgggaccaccctgctcatcttcaaccactgagtccaacttccaacaaacaagtatctgtggtttgggatgcctatgaggcaatcaaggatgcacatggcatctgcgttatgactgagtgggatgagttcaagaaccttga

SEQ ID NO: 47042 - DNA, 338 bp, Glycine max
ctgataactttaactaatcattgacataaaacagattgcacacgaagggcacttcggttattttagtttgtttcagtaaagactttgattctgctacatacaaataattaaaacttatgtcatcaaaatttctttgggcctggatcgcgcttctcagctgcggcaacgtttgcagggttaagaaactgtacgtccgtagcaaatggaagcaatgtataggttctttgcccacttctccttgacatgtgtgctaggaaaagcagaagtcctaagcgtttcctgggtttcatccaaaggcttccttgttggcacactcaggacaaaagcagcttgctccc

SEQ ID NO: 47043 - DNA, 431 bp, Glycine max
accaccacctatgacctttttcattttataaaaccaacttaaacaccaactaattctccaaaattggattaaagaatgcaaaacaatgttagaagaagcctataaaacccaatttgagctttctatatcctttcaagtttccttctaaaccattctgatattctcctgatcttgctcaccagctgagcattttttgtaattttaaagtattcttcagcatttgataacattaccattatatcatgcttgacaccttccacactccgatagtagtcattcttcaatcttgattgaattagttcaggatagaatggggcaggaaacctgtttgcaaactctaacctctcagctacttggttcaatgcttggatatcaaacctcctgtggtctaatttgatgaaataggaaagcagcttatctctgatctcatg

SEQ ID NO: 47044 - DNA, 300 bp, Glycine max
gagcgagcgagcgagcagtttcaaagataggatttgggattgggaaggcgagggattgcgctgcgtctcttcctcttctctttcgattcatccctcattcataatcttccaatccaacaacctcagccttacactcacacatacacacatctgaacgcgtatcgtccctcccatggcttcaaagcgcatcctcaaggagctcaaggacttgcagaaagacccaccaacttcttgcagcgctggtccagtagctgaggacatgttccattggcaagcaacgattatgggtcctgctgatag

SEQ ID NO: 47045 - DNA, 235 bp, Glycine max
aaaacacgacaacaagggacctggattagtactcagagataaatcaaaccaaaaaacagagtggtttttttttaagaaagaaagaaagccctgcctctggcaagcccatcaattacttgctcctcatcagttttgaattcaaacagcttttcttcatgggcatggcccttttttaaaaacaaaggaccattttgcaggttaccaattacttttaatttcacaagggctcccttat

SEQ ID NO: 47046 - DNA, 365 bp, Glycine max
aaaagttcaaaggagggaagactacatatatatcattttcccaaatatgtattcattattcacataaaatttatctcatagggacaccgatgaatcaattactacatgatatcagtaatagtgtaatactggtgtttattaagctacactcctcgagataaataatgaataaggtaattagccactaatcagatatctcgaaacatctgatatgcaccgaccctatcacgaggaatcagacgtagctctgaaccatgcttaaggaagacattacctgcactttgctgaggatgtatcccaacaccatcattggtgatgatggccctggtctggggaggcactttgaattcttctgctgcaaattt

SEQ ID NO: 47047 - DNA, 191 bp, Glycine max
gaaaaaaaggacggacaaatatctgctataacaatcaatcacaggtacattagcgagtggtcaagccaagtccatcagcgagtatataaaaatgcagaaactcgatccccctccacaagagacaacctcaaaagcccaaaaaagagctgatgctacttcaacaagtaacaccactggtttcagaaaccgat

SEQ ID NO: 47048 - DNA, 413 bp, Glycine max
gcagaaagcaagctcatcctagagttttaaaaatggcagcagcctcctccatggctctctcttccccatccttggctggcaaggccgtgaagctgggcccatcagcccccgaagtcgggagggtcagcatgaggaagaccgtcaccaagcaggcctcctccggaagcccatggtacggcccagaccgcgtcaagtacttgggcccattctctggcgagcccccgtcctacctcactggcgagttcccaggtgactacggctgggacactgctgggctttcggccgacccagaaaccttcgccagaaaccgtgagctcgaagtgatccactccaggtgggccatgctcggggccttgggctgcgtcttccccgaactgttgtcccgcacggggtcaagtttggaaagctgtgtg

SEQ ID NO: 47049 - DNA, 487 bp, Glycine max
ggcatcgtcacttgactataccccttttagatcatctctcaagttgcttttacccctggcagaacctactcgagctttgaacattcctgttattccagttgggccattgatggctactgttcatccccttgcaagctatcctccatatgttttttcttggctaaattctcagatttcagctcaagatatgatggaccaaaatctatttgagaagcttgttttgaacaacttcgataccgtaccttccaagcttctcttgcagttatcatcagttttccaaaaaggtggtttacgtacaggagtggaacattcttctacaaggaccatctccacaaaagtaatgttcctgtcttagcaattgctggtgaccgagacttaatctgccctcctgaagctgtatatgaaacggtgaagcttattcctgaagaattggttacatacaaagtctttggggaggcctggtggtccacactatgcccactatgac

SEQ ID NO: 47050 - DNA, 439 bp, Glycine max
gtgagaaacatggcttttttaagctctttagtgctgctccttgcagctctaattctatcccctcaagttcttgcaaactatgagaatcccccagtgtacaagcctcccactgagaaaccaccagtttataagccccccagttgagaagcctcctgtttacaaacctccagttgaaaaccccccaatttataagcctccagtagagaagccaccagtgtacaagcccccagttgagaaacccccagtgtacaagcccccagttgaaaaaccaccagtgtacaagcccccagttgagaaaccaccagtgtacaagcccccagttgaaaaacccccagtttacaagccctcagttgagaaacccccagtgtacaagcccccagttgaaaaaccaccagtgtacaagcccccagttgagaagcccccagtttacaagccccca

SEQ ID NO: 47051 - DNA, 535 bp, Glycine max
  unsure (1)..(535): unsure at all n locations
attgaggaagatggaacggcgccagcgtaacccgggtcttggattacagtggctgtcaaaagcttgaagccagatggccttcaaggccatagagaatgggtggctgaagttgactttcttggacagcttcaccatcctaaccttgtgaaacttattggttattgcattgaagatgatcagcggcttcttgtttacgagtttatgacccgtggaagtctagaaaatcatctattcagaagaaccgtacctcttccgtggtccaacaggattaagattgcccttggtgcagcaaaaggattggccttcctccataatggtcccgaaccagtcatttatagagattttaaaacatctaacatcttgcttgatacggagtataatgcgaagctttcagattttggtctagcaaaagcagggcctcaaggagacaaaacacatgtttctaccagngtagttggaacttatggttatgctgctccagaatatgtcatgacaggacacttgacagctaagagtgatgtttatagctttggag

SEQ ID NO: 47052 - DNA, 468 bp, Glycine max
  unsure (1)..(468): unsure at all n locations
ggcaaagtggaaacaaaagcaactatcctttgtggaaagggtgactttgataaagtcagtcctgaacacaattcctatctattttctttcatttttcaagatcctaaaaaaggtggtacacaagcttgtgaaactacaacgatggttcttgtggggagtagatacagaacacaagaagatcgcttgggtaagcaatggatcagcatgtctgtcgaaagaaaaaggtggtctgggaattttagagatttgaccaagtttaatcaggctcttcttggaaaatggaagtggaatttgttttattatcaaggagaattatgggctagagtgctggattcaaaatatggagggtaaaggaacttggatgagaatagaagggtcttagcagcatttgcatggtggtctgatctcaattatatctgccacaactccggngaggaaagctggttcaaatctagaataaaatggagt

SEQ ID NO: 47053 - DNA, 426 bp, Glycine max
gtgattgggagaggagggtatgcagaggtttataagggaacattgaatggtggtgatgaagttgcggtgaagaggctcacaagaacttcaacggatgaaaggaaggagaaggagtttctgttagagattggaaccattggtcacgtgcgccattccaacgtgttgcctcttcttgggtgttgcattgacaatggactttacctggtttttgagctatccactgttggttctgttgcttctcttattcatgatgagaacttgcctcctttggattggaaaacaaggtataagatagctctaggcactgcacgtggccttcactacttgcacaaaggctgcaagaggaggatcattcatagggacatcaaggcctcaaacattttgttaactgcagattttgaaccgaagatatctgattttggactt

SEQ ID NO: 47054 - DNA, 498 bp, Glycine max
  unsure (1)..(498): unsure at all n locations
ctgaatcttagagcagtcagtgaatataaatatctagttcagagtgactgcacgttaattgatggtgtcaatgatgctaacaactttcatcagctgatgaaagcgctggatactgttcaaatttgtaaagaagatcaagagatgatctttaagatgctcgctgcaatactatggctgggaaatatatcattccaagtagacagtgaaaatcacattgaggttgttgatgatgaagctgtaaccagtactgcccagctgatgggttgcagttcccaggaattaatgacagcattatgtacccttaaaactcaatttgacgaggatactattgccaaaaatttgacattgaggcaggcaactgaaagaagagatgcaattgcaaaattcatctatgcaagcttgtttgactggcttgtagaacaagttaacaagtcacttgaagtgggtaaaccacatactgngaaatccataagtatccttgatatttatgggtttcag

SEQ ID NO: 47055 - DNA, 483 bp, Glycine max
caggcttcaaagcattaagtgctctattgcagggaagaatgtttatattagatttacctgtagcacaggtgacgccatggggatgaacatggtttccaaaggggtccagaatgttcttgatttccttcaaagtgatttccctgatatggatgttattggcatctctggaaattactgttcagacaagaaacctgctgcagtaaattggattgagggacgtgggaagtcagtggtttgtgaagcaattatcaaagatgatgtggtgaagaaggtgctgaagaccagtgtggctgctttggtagagcttaacatgctcaaaaaccttgctggttctgctgttggctggtgctcttggtggattcaatgctcatgccagcaacattgtttctgccatttttatagccactggtcaagatccagctcagaatgtggagagttctcattgcataaccatgatggaagccgtgaatgatggcagagacc

SEQ ID NO: 47056 - DNA, 124 bp, Glycine max
agcggatgtagttatgcccacaatgtcggagcggggactgcacattttctcgagcagcttgctgaataatgagctattaacgtttttgggaagagcactttgattggattggctctaacattct

SEQ ID NO: 47057 - DNA, 456 bp, Glycine max
ctcgagccgattcggctcgagcggctcgagcaaaaaactattttggcttctgcctttccttttccagggagctcattgacaatggctgaaacaaagtgggtcatgaaggacaaaagatggtctctccatggaatgacagctctagtcacaggaggcacccgaggcatagggcatgccattgttgaagagttagctgagtttggagcaactgttcatatatgtgcacgtaatcaagatgatattgataaatgtttagaagagtggaaaaacaagggacttaatgtgactggttcagtatgtgatttactatgttctgaccaacgtaaaagattaatggaaattgttggctccatctttcatggaaagctcaatattctagtgaacaatgctgctacaaatataacaaagaagataacagattacacagcagaggatatatcagccataatgggcacc

SEQ ID NO: 47058 - DNA, 417 bp, Glycine max
gtttcacataacaaaccgtttgcagaacatcccataaaagcttagcttgtattcagtttctcttctcccaacgtttttgtcgctagtaacagaatattacaaagtaacggctttctcaatggagcgcttgatttgggttggtgggtcaacttcaagtttcaatttttttttcatttttgtctgctctctcatcttcatggacagcactcagcagaatcccttcttgattggaaccggcggatgaatatcgcaattgggtctgctgagggaattggatatctccacaaccagtcaatgccacatatcatccacagagatatcaaggcaagcaacgtgttgttggattcggattttcaggcacaggttgctgattttggtttggccagttgatccctgatggggcaacacatgtgacta

SEQ ID NO: 47059 - DNA, 481 bp, Glycine max
gacttgttgatggtattgaattagttcataagtttaaagggtttcggaatgcaaatagccatatttaccatttgctgtgaggcaggcagaaatggtaaatatgttgtctcagcaagtgaaggattctcatgtatacatctggaaaaatgaagctgattgcagacctagcaggagtaaaggtgtcactgtgacaagcacatatgaacattttcactgtaaagatgtgtcagtggccattccttggtcaggtatggatgatacatgggagatgcatgattcatattttgcagaagaacctgagcttgatgatgatggggatgaggcatgagggtctcatcggccaatcatcctcctactcctgtagaggaaaatctaggttctgagggttcacaatttgcttcaggttgcaacaacagtccacttcatggaaccattgcaagtgcaacggatagttattttcttgatagaatttctgccacat

SEQ ID NO: 47060 - DNA, 489 bp, Glycine max
cacatgaaaagagggtagaaaaataagactaaaaaaattggttagctagattttttgtttatgttttttgagatcactttgttaaaagcttttattgatagagagcttggcattggaattgtaccatatagccctcttggtcgaggcttttttggtggcaaaggagttctggaaaatatgcctgcaagtacagtcctgactttacatcatcctcggttccaagcagagaacataaacaagaacaagagaatatatgaacaaatagaaagccttgctaagaaataccagagcactcctgcccaattggcattagcttgggtacttcaccaaggcaacgatgttgctcctattcctggaacaactaagattaagaacctggatcaaaacatcggtgcattatcactgaaatttacagaaagtgacttgagagaaatttccgaggcagttcccatacatgatgtggcaaggtctcaatacttctttggaaat

SEQ ID NO: 47061 - DNA, 525 bp, Glycine max
gcgccgcctcatctcttctgctctctcattacgctctttcctccgatctcaggtgttgtttaagcttcctgtgttggcttggtatccttgcaagttcttctgtagcagattccaaggtgaaggtgtcacgttaaagtttctttcatgtttgaacaggctactatccatttgggagcaactgagctgcttggattgtatttttcttcttctagaaaaaattacagaccctcaccacccagacttagttgtatgaacggttggccaccttccattatccttgaaggagattgttcaaggatacaggttaccttagaggctgaaatcacagctgcgtataatttgaattccagcatttgctgcctctgaatatctctggaactttgtaagtcaacaaacatggctttacagaacattggtgctgcaaacagtgatgatgccttctacaggtataagatgcctaggatgattaccaaaattgagggcagaggtaatggcatcaaaactaatgttgtcaatatggttgac

SEQ ID NO: 47062 - DNA, 513 bp, Glycine max
agagaaagttcatttttggcacgtgatcagcaaataaactgtggttttgttaaaggtcctgaagggtctcaaagcactggatttgacttgacagaagatgatgcaaattacatcagcaggtgccacattgctgtgatttcatgcatatttggaaattctgatcgcttgaggaccccagccaccaaaacagtcactcgattgtcaaggaagaatgtctgctttgtgatgtttactgatgaaattacaatacggacactttcttcagaaggtcatgtgcctgatagaatgggtttcattggcttttggaaattagtggtagtgaagaatctaccctatgatgatatgcggagagtgggcaaaattcctaagttattgccgcatcgactttttccttttgcaaggtattcaatttggttggatagcaaattacggctgcagctcgatcctttacttatcttggaatattttttgtggcgaaagggttatgaatttgcaatatccaatcactatgat

SEQ ID NO: 47063 - DNA, 466 bp, Glycine max
gcaatgtctgtctcaacaagatttggttgagtcttccttttctcctccttttgtgtttcatgcacagcacatgaactcatcctcctccgccgcagagtccaccatggaagaccgccgctcgaagaagcaccaccgccgtcaccgccaccaccccgccacgacgacaacaaccttgagcacgacgaccggggagtcggacggggaggtggaggaggcggaggacggcgacccggaggcgtgggtcaccctgaacaaggggttccggcaggtgcagtcggtgctggaccggaaccggctactgattcagcaggtgaacgagaaccagcagtctcggatgcacgacaacatggtaaaaaacgtgtccctcattcaggaactcaacggcaacatctccaaggttgtctctctctactctgatctcaacaccaatttctccaacgtttgccaacaacgctccaaaaactcc

SEQ ID NO: 47064 - DNA, 498 bp, Glycine max
  unsure (1)..(498): unsure at all n locations
atgatgctgtgcactactttgaggaactaaagttaactggcctcgatcctgatactgtttcttacaatcttatgatcaatggcctcggaaaatcacgtaggttggaggaagctctttctctttttagtgaaatgaagaataggggaatttctcctgaactttatacttacaatgcattgattcttcattttggaaatgctggaatggtggaccaagccggaaagatgttcgaggaactgcaatttatgggtcttgaaccaaatgtcttcacttataatgctctcatccgtgggcatagtaagtcaggaaacaaagatcgagccttttctgtcttcaagaagatgatgattgtgccggtgtagccccaatgcaggaacatttgctcaattgcctaataaatgttgattttattgagttatctcacggngaccttttcttatgttcccgatcccaaaatggaggcatgaagggtcactttgtcttggaaatggtcttgga

SEQ ID NO: 47065 - DNA, 409 bp, Glycine max
cagctttcatcagttttttacacattctcaatgggaactcgaagtcatttctttggacggactgttctgcatggtggggcaaaatatcgagctactggtcgtggttttgttgtagagcacaagagatttgctgaaatctatagactctttgcccgtagccattttgtgaaagcaattgaattggggctgatacttgtaatttatgcatcacatagtcctgtagctactgacacatttgtttatatagccttgaccatcactagttggttcttagttgcatcatggattatggcaccatttgtgttcaatccttctggctttgattggttaaaaactgtttacgattttgatgactttatgaactggatttggtacagtggaagtgtatttgctaaagctgaacagagct

SEQ ID NO: 47066 - DNA, 416 bp, Glycine max
caccaaactatcgggacattgttctacatgatttcaataggaggaatttaaaccaatataatcatatcatttctttttggacgcaccaaactcgagaatcaaaatagcacttgggcacagcctagccccgctgtctcttcaagagagccaaataacacaaaagcacgtactacagcccttggctacaaggatatgtcaaactattgggagatttttttaagattaaagcaaaatgattaaatttctgacactcaaatccggcatccaaaactgtcaacattacaccccccaaaatacatactgtagcataagcagtagcacgactcaaaaggcataattttactcaaaagattcatcatcatcgtcaggaaggggctgactagcagctgcaagaagctcggcctcatgttgttgct

SEQ ID NO: 47067 - DNA, 377 bp, Glycine max
attcttaaaagttttatttcattgatcgaaaatttcaatgttgcccacccacaaatacaatttatataaaaacaagtgaatggtcttcaaatatccacacataaattgataagagaatacacagcgaatgacaataatatgaatacacgtcaaatgaacatgtagaatagaatacatgcaccaacacacaataagaagcactttggaatgattatatttataagattgataaatacgcactagaagttttccctgacaaatttagccttttcaagtacatatttgccctccttgtacttctgtgattcctcataagctctctgatacttccaaccaagcacctcatggcagtcagaacagtagacatcagcaacagt

SEQ ID NO: 47068 - DNA, 469 bp, Glycine max
gttagttgaagactcccaccttgacatactatcacgtattctcagaagcaaaggtgctgctaggaggtccatccagtatagctataagcatggcttctctggattcgttgcagttttaagtcagtctcacgctaagctcattgcaggatgtggcagcatcaacttatgttgaggatacactggccattggctcttttcatgctgtagccaaaggaatttctgtgtatgctctggtggcaattctagtccatatccccaaactgtcataaacactgccccttggcttattaccgtttctgccagaaccattgatagagaatttccatctaggattatcatgggaaacaatcaaactctacagggtcagagtttatatacagggaaagatctgagcaagttttatcgtattgtgtttggagaagacatagcagcttcagatgctgatgaaaaaagtgcaaggagctgcaat

SEQ ID NO: 47069 - DNA, 437 bp, Glycine max
gtgaagaacagatattgtaacttttgcaacatttacaactgagccttgatcgaagcaaagtctctaactgtgaaacccaccttatcaaatctacctctttcattgctctctctaaatttcaaatagtccaagcacacaaatggtttgtacttccttttattcccttctccaacaacttcatctggtgccaaaatcaccttgtcatcctcaaagcaccaaaagaatgatagagaaaaccggttctcatgatgtttcaaaacaactctatgttctgaggatcttagtttgtcattgctccaagcttgcaacatatcacctatgttcaccactagggttccctcagatgggtttatatctatccactctccctcatttgatctcacttgaagccctcctatctcatcttgatataagatagtaatacaactcatatcagt

SEQ ID NO: 47070 - DNA, 472 bp, Glycine max
aatccataaagatgtgtttatcgtattccatgcatatctcacaaagcaatatacactttactacttgatcaatcaaaatgcttctttgaatcagtaggtacgaacaagtactcaaattagtacataagaactcactttctcctcccctttaagctagatcacttggaaaacaaaaacttaaattttacataaaaaactgttgagacaaaaggctaaccagcaagtggattagcatgtattgttacacgattgagccttatctctgcaagcggtcagacccctgcccctgactgagttttattcatgagatcaagaactgaagatgcatggcttactttgccaaacacggtgtatagcccatttaaatgaggctgctttgcataagtcaagaaaaattggcttccattagtatttggaccactattggccattgctaataatcctcttgcattgtgcttcagagattctctta

SEQ ID NO: 47071 - DNA, 381 bp, Glycine max
acatgatatgaatttgtattgatgcaaagcacatgaactgcagtaacatctggatcaccatccatttgtacaccacacctaacaaaaagttaaattcaaagcccaatctggaaaagtgggggctagcaaaatcacaatgagaattttttttctttttaaagagaaaacaaaaaaaaaagaccttgacaaaatcctaaactctaaaaactccaaatgcctcagccatgggtattaacagcttcccacaacaaattcttaggggcagggtttgttaagtccctagcttgtagggcagcagtcctgagggtcctaattgtccactgattgggctcccaaaatgacaagctcctataaggcaaattatgcttcttgcaaaggtca

SEQ ID NO: 47072 - DNA, 402 bp, Glycine max
gttaaattgacctacttggcaccttcaccacccttttctctttctctttgcataccattaccaacactcaaagcagcaacaacacccttttttctttcctctctctctctctctctctccattctccattttcttcgagagtggtagggaaaacatggaaaccaccttggtttccaaaatgcaatttgcagcattcttttgtttggcgttgtggttgggttttcagcttgagcaggttcactgtagcgttacctacgacagaaaagccatcctcatcaatggccaaaggagaatccttttttctggctctatacattaccccagaagcaccccagatatgtgggaagatctcatttacaaggccaaagagggaagtctagacgtcattgaaacctacatctt

SEQ ID NO: 47073 - DNA, 490 bp, Glycine max
  unsure (1)..(490): unsure at all n locations
ttcttccttcgtcactggccttgaacctctcaggtttttctactctgcttcgcgctccacctatctttgcctgcaggtcctccaaactctcgcttacgttctctaccttttgctgctactcatgtatctcgttttggtgttctcaactgattctggattgggctccaaattcttgggcctggcccaaacttttgtgggcttttccgtggggttgcattactacgtgactgtgtttcacagggttgtgttgaagcaaccgcccaagaccaattggaagattcacgccatttatgccacgtgttttttcctcatttgtgtcattgctagggctgatagaaagaagaagacctacttggaagaaggtggagatgagggcaagaaaaattgaaattagtcaaattggctatatatattagctattagctatacctacattntcgttttttttcctcataattaanattttcaaattatccaaagcaacatatac

SEQ ID NO: 47074 - DNA, 512 bp, Glycine max
taactttggacagtatccatatggaggtttaatcctaaacaggccaaccattagcaggagattcatgcctgagaaagggtctgatgagttctaccctgagaaggagtttttgaagactattactggcaagaaggagaccctcattgaccttacaattatagaaatcttgtcaaggcacacatctgatgagttctaccttggggagagagatggtggtgactattggacttctgatgctggtccactagaggccttcaagaggtttggaaagaagcttcaagagattgaacaaaagcttatacagaagaacaaggacgagacgttgagaaaccgcagtgggccggctaaaatgccttacactttgctctatccttctagtgaggagggattgactttcagaggaattcccaacagtatctccatctaggggctctatggttgttgcagtactttccctggttttcaataaaagtgaatagaaggaatatgattccttcatctacctatgtatg

SEQ ID NO: 47075 - DNA, 489 bp, Glycine max
cctttgttcactcttcttctcttgcggtttgggttttagcgcagcttcttctagatttaaggaagatgggtaaggaaaaggttcacatcagtattgtggtcattggccatgtcgactctgggaaatccactaccactggtcacctgatttacaagcttggaggcattgacaagcgtgttattgagaggtttgagaaggaagctgctgagatgaacaagaggtctttcaagtatgcctgggtgctggacaaacttaaggctgagcgtgaaagaggaatcaccattgatattgctttgtggaagtttgaaacaacaaagtattattgcacagttattgatgcgcctggacatagggatttcattaagaatatgattactgggacatcccaagctgactgtgctgttcttatcattgattcgaccactggtggttctgaagctggtatttccaaggatggacagactcgtgaacatgctctgctttcattca

SEQ ID NO: 47076 - DNA, 439 bp, Glycine max
ctccgcactccgtcttcatcaatcagcttcaccactgctccaacacaggggaaaatgagggagatccttcacgttcagggagggcaatgcgggaaccagatcggttcgaagttctgggaagtggtgtgcgacgagcacggcatagatccgacggggaagtacgtcggaaactcagatctacaactcgagcgcgtgaacgtgtactacaacgaagcttcctgcgggcggtttgtcccacgcgcagtgctgatggacctggagcccggaaccatggacagcgtgcggactgggccgtacgggcagatattccggcccgacaacttcgtgttcgggcagtccggcgcgggcaacaactgggccaaggggcactacacggagggcgccgagctcatcgactccgtccttgacgtcgtgcgcaaggaggccgagaactgcgact

SEQ ID NO: 47077 - DNA, 522 bp, Glycine max
gatcgatgagctggagtaagaatctgcttcttcggccggagcacgtggaggcttcgaggatgacgctgcataggttcgggaacacttcttcgagttcgatttggtacgagttggcttacacggaggcaaaggggaggatcagaaaggggcacagggtttggcagattgcgtttgggagtgggtttaagtgtaacagtgcggtgtgggaggcgcttagacatgtaaacccttcacccaacactccatgggaaaactgcattcataggtaccccgttcacattcatacataataattaccactatcgctttcaagagacttccattcatctctaattcatcgccgtttctttaattgaattaattgggtcagtcagggaacctctttagaaaatcagagtcaattattcattctgttttcgtcggtcacttgagctttggacatgactgtattgtgaatttgtgatttgattacatcatttttttttcattcaaattcttcggattagtgttaatttttttttt

SEQ ID NO: 47078 - DNA, 440 bp, Glycine max
gcacaaaccaacgtttcatgccccctcctcctgattaggcaaccattgccactattgttgagatgggcttctcaagggcaagggctgaggaagcattgagaagagttgaaacaaatagtgttgaaatggccatggagtggctgtttagtcatgctgatgatcctgtccaggaggatgatgaacttgcacgggcacttgctctgtccctaggaagtagttctgaatctactaaagctgagagtgctgagaagactatagatgttctaactgaagagggacatgtgaaaaaacctccagttgatgatatacttgctgcatctgtaaagttgtttcagagtagtgattcagtgccatttcagttgacagatttgcttgtaacactttgcagtcagagcaagggtgatgatcgtccaaaggtaacatcttatcttctgcagcag

SEQ ID NO: 47079 - DNA, 404 bp, Glycine max
ggcttcaattggaggaatccacagtgtttgatcttttgataccctccctgtcttacacaaatgatacagtgtatgatgttgagttggtgaggaccatattggagcagtttatgtcacaaggccagagtcccccaactagtcctgcaagatctaggtttgcctttgaaagaagaaggtctcgttcagctgagaatattaacttggagttccaagagagtaggaggtcctcttcagcatctcacagttcaaaattgaaagtggcaaagcttgtggataggtatcttcaagaagttgctagggatgtgaattttcagttgtcaaaattcattgctcttgctgagattataccagatttcgcaagacacgatcatgatgatctctacagggctattgacatttatctc

SEQ ID NO: 47080 - DNA, 391 bp, Glycine max
gccaaacgatgcagatgatgtttgatgttgttgctagagaattgaaatcaatgcagcttactgatgtgcacccacaagattacctcaatttttattgccttggtaatcgggaacactttaatgaagatagttcaagcacaaatggtgcacaggtctcaacagcatataaatatcgccgttttatgatttatgtgcatgctaaagggatgatcgtcgatgatgagtatgttataattggatctgctaatataaaccaaagatctatggctggtactaaagatactgagatagctatgggtgcatatcaaccccattacacgtggtcagcaaagaaaagacatccacatgggcagatttatggttacagaatgtcactctggggagagcatct

SEQ ID NO: 47081 - DNA, 402 bp, Glycine max
gcccctgacacggagaatgtgaatggttttcggggcttcaaacacaacgacatgtccgatattcatcagcatgtattcttcttcgacctaaacaatgatggagtggtctacccattggagacatataagggattccatgcactcggatgcaatgtgattctttccttcatatagacgattggtatgcatgtgactctcaattaccctactctttctacatggctgccttcaccttttttgccaatttacataagaaacatacatagggcaaagcatggaagtgacactggtacctatgacacaaagggaaggttcatgccagcatatttggaattgatttttagtaagtacgcacgcgaggcgcctgataaatcgacattgaaggagctgtggcacatgact

SEQ ID NO: 47082 - DNA, 285 bp, Glycine max
gggcaaacaacacaacggggggacaattttgaaccaaaggaccttttgttttgcaaaattgggggaacttaaaaaacagaggggaacaataaccgccaagccatccttccgacagaacctttgggggttttagcacaatactaaaaaaagctcccatgaaagcaaccccccacagcttgttttgacacaaaccctggtgcatttgttgccaggacatacaaaactccccactcaaatttactgggggcccaaccaaaaaaggaataagcaaccttatttccttca

SEQ ID NO: 47083 - DNA, 458 bp, Glycine max
aaaaatatatattaaatttttttcactgggtattaaaccataaaccacgtgtttaccagtttggtgacaactctgggtttataaatcttgactataatgtatgagtatgaccataaaaaagcattgcatcaacgtcatagtaagacataattcagtttccataataaggacactaggaatttattggaatttaggacatcaaaaacttaacattggtgtaacttgcagaatatccctcctggaagttattcatgcataatagttctccacgaaacaaatacaacgatgacaaaaaccagaattacaagacacattaatggaaagcactatctctaaggccaggttcggtattttaggctgcactggcaatccaccacagaagggatgagcaccatagcttctgcagtttctacagctttgaccaaaggcggctcaagctagcttgaattgacccatga

SEQ ID NO: 47084 - DNA, 469 bp, Glycine max
  unsure (1)..(469): unsure at all n locations
gataagctgttttccgtcaattcactgtcagcttcagcgtatgatggtgaaaagaacatcttcagcgcggtgcctttgccggaggaaacatttaccgtggacgtgtccaaaggagaggacgaaaggcctgtttcttatttggtctctctgacattggtgagtaggctcgagcttcggaagttgagggattacctcagtggaagcgtgctttcgatccctagggatgttttgcacggcttggatttggtggtgaaggaaaatccttcgaagcagtgtgtttccttggggcggtgcttcttccccatgaaccctcctttgaggaagaaagatcttaaccatggcataattgcgattggagggtttcagcagagtcttaagtctacttctcagggattgtccttgtgcctggactattcggttntgtcctttcggaagaagctgttggtgttggattttctgcacgagcata

SEQ ID NO: 47085 - DNA, 393 bp, Glycine max
ggccaaaattggactagtttttgctgctgttgcactcactgaatcagttgctgttggccgatcttttgcatccatgaaaggataccatctagatggaaacaaggagatggtgtcattagggttcatgaacatcataggatgcttcacctcatgctatgttgcaactggttcgttctcccgcacggtggttaatttcacagcgggttgtgaaacattagcgtccaacattgtgatggccattgtggtcttgatatcactacaatgtttgacaaagctattgtactttaccccaactgctgttctcgcttcaataatgctttctgctctcccgggactcattgacatgaatgaagcttacaaaatatggaaagttgataagcttgattttcttgc

SEQ ID NO: 47086 - DNA, 412 bp, Glycine max
atgattcttggattttataaagaccatcatagacatagattttattatttggattcacaccatctctcatgccccggatgactcttacttcattgtgttgtcgcgaactcctatccaaagcaagattacccctttgaagcttctggtcagttgtgtgcttatctttattcatgaagaagttcccaccctgaccagtataaattataacatcactatcctcagcatcatcgtcatattctcctgacgaaacaatgcacacagccagagtttcctcctcaaactcacccctgatatgcaaggcatcaattccacccatggagggagcatgcaagcccacaatacacaattccattcggaaataaaaaatgtcaccaatctcaatcccaggaactgctcctattctcttcctcat

SEQ ID NO: 47087 - DNA, 399 bp, Glycine max
gctgaagaagaaggaagtttagttaagttctatggaaaagaagctcaagaataacaaaggacgtgttgcaaatgagagtgctgcgcctccttctgctaaggcacatatgaagaagttaaaatccgaaatgcataagggaatggatgctgcaaacgctgctgttagcaagtctgaaggaggaacaggtggcaaatcagctggaagtgagggccatgcatatgaaatgttgaatgaagttgcacagctaaaggaaaggaacaagattatggaaagcgagctgaaagacatggaagaaagatattcagagattagtctgaaatctgcagaggtagagggagaaagacaacagcttgttatggctctacgcaatctcaagaatggtgaaaagaactagaattt

SEQ ID NO: 47088 - DNA, 425 bp, Glycine max
gcgttaaaatatattaattttttttcccgacacggacaattggggaattcggtgattgatgattgcagaacaacacgccccaaaccaccaaagagaagcaaaatggtgatcactgcacagggtgaataatggagaactatataacacagcaggagcaaacacaaaaaagaacgaaccatagtggaacaccgaaggcacccacaacatataccccctaaactcggaaacacctaccttgataacaaaaaaaaagcctgggggcatcaacaggccccccctcactcatcatcttccgctccaatcagctccaacctcctcatagtccttctcaagagcagcaagggcctcacgagcctcaaaaaactccccttctttcataccctgaccaacacaccagggaacaaaagccctcttggcatacatca

SEQ ID NO: 47089 - DNA, 407 bp, Glycine max
ctcatttgtccactccttttttctgtagtttttattttttgtttatttttaactaactatgaattgttgtgtacacgtcaatgttcaaaagctcaattctaattgtcacatgaataattgttttgggatttgtccaacctgctgaattatttaatgaatattatactttcagagtcaagaatgtctaaagaagttattgctactcaatcacctactccttttgagtatgagatcttggatagtgatgctgaagtccttagaactgttagagcctcatccaattgtgctaatccatggattgaacctgaaaggttgaaacttagacatagaattggccgaggcccctttggtgatgtctggctagcaactcatcatcagtcaactgaagattttgatgagtaccatga

SEQ ID NO: 47090 - DNA, 239 bp, Glycine max
gcatattccaattcccaattcccaattctaaacccttattcctttcaaagaaccaaattgagtgatcgtgatggcaccaaaggcagataagaagccagcggagtagaagcccgcggaggagaagaagtcgacggtgggagacaaggctccggcggagaagaagccaaaggccggaaagaagcttccgaaggagggaggcgccggcggagaagggaagaagaagaaagatacaagaatag

SEQ ID NO: 47091 - DNA, 182 bp, Glycine max
attgacggcgcaccgacctacattccactctatctgagtaagctcaaagggtacacccgacctacaggctgcaaggcagtagcagagtccataagaactgtccatcataaatttcactacactgttcaggatggcctagatgccatccagatgtgatctatcacttgaaccatatgctgtga

SEQ ID NO: 47092 - DNA, 238 bp, Glycine max
caacgggtagatgatatcttgcagtttattgcagatttgactgtagatggtgaaggtgttggtcatgtttgcagttttagtgtcttcaattttcaagagcatggaaacagtaattatggctctccatttaatgcacctcacagccatagatcctcccaggggaagttggagaatccatttgtgagctttcagagtagttaccctgcatgggaaccaaatgctcaagggaggcagtttc

SEQ ID NO: 47093 - DNA, 244 bp, Glycine max
caatcttctctatcgagaatggcgtgtggttctatgtgatctagatgccactgccattggagttctttctataatcctctgcgtgttgtttgtgtataatcccgtgatatttgcattaggtagaaaagaggctcccaaatttgcaggttcatggcccatacttggtcacctacgactattgagtggtgtagagacacctgatagggtgtgtggtgctttggcttataagtatggagccatattc

SEQ ID NO: 47094 - DNA, 178 bp, Glycine max
gagggttgaaaggggttggtgaggaggatgtggagattgtactagacaaaagaggaattcaaggcattctgaaatgtcttgtcgttgttaaatgacatagtaataaccctgtaatatttatccttcaaatccaagagacgttgaacaaaatccacaggatctctcaacctttcaggat

SEQ ID NO: 47095 - DNA, 258 bp, Glycine max
caaaacttgctatagcagtaagctataactcatttgaggctctgtgagaattgagaaatggctaaagatgttgaggttcaagagcaaggaggagagtactctgccaaagactaccatgaccctcctccagcacctttgttcgacccagaggagctcacacagtggtccttctatagagccctcatcgctgagttcatagcaacccttctcttcctttatgtcactgtgctcaccattattggctacaaaaggcagact

SEQ ID NO: 47096 - DNA, 253 bp, Glycine max
agagtatccccaccaatggggaaagtgcgcaacaactgtgtttggcttttgctgcaaatatcgtaatatcattgccattcccatttgcagcaaaagggaatggcaatgatattacgatatttgggaatgtgcaacaaaagacactagaggtcgtgtatgatgttgagggtgggaggatagggtttggtgctgctgggtgcaactgaagttagtttgattaatagtggagttaattaaacatgctttgggcttg

SEQ ID NO: 47097 - DNA, 250 bp, Glycine max
gttgtgtgtgtgtgcgcgtttgtagataactgttgattgtatgtctttcatgctatagcaggagtgtataatctgagcgatgtcagatcttgaggctcccttgcgccctaagaggaagaaggtttgggtggactatttcgttcagtttcgatggatccttgttatttttgtggtccttcccatctccttcaccatttatttccttacataccttggggttgtaagatctgagtggaagtcctataagacg

SEQ ID NO: 47098 - DNA, 252 bp, Glycine max
ggccaccgtaccatcaccagcaacaacgggtccagtacgtgcagaggcatttgctgcagcaacagcagcagcaatggctgagaagggacggcagcgccgccgtcgacgaggtcgagaagaccgtgcagtctgaagccgtggattcgagttctcaagattggaaggcaagactaaagcttccaccagctgatactctcgataaaacagaggatgtaacggcaactaaaggaaatgagtttgaggattactttt

SEQ ID NO: 47099 - DNA, 250 bp, Glycine max
aaccaggatgagttggatgacatcataagatatggctcaaaggagttatttgcagatgagaatgatgaagcaggcaaatcccgccaaattcattatgatgctgctgctattgatagattgctggatcgtatcaagttggagatgaagaggctactttggatgatgaagatgaagatggatttctgaaggcttttaaggttgcaaattttgaatatgttgatgaggctgaggctgcagcagaggatgacct

SEQ ID NO: 47100 - DNA, 250 bp, Glycine max
tcttgctcttgttcaagattggcctatcaaattatgtaccagcgtcttttgttttcggggattccctgctcgatgtagggaacaacaactatattgtttcactggccaaagcaaaccatgacccttaggaattgattttggaatggccactggtcgtttcagcaatggaagaacagttgcagatgttataaatcagaaactgggtcttggcttttctcctccttacttggctcccactactactggatca

SEQ ID NO: 47101 - DNA, 237 bp, Glycine max
ctcagtgaccagagacagatgatgatggagatggcgaacgaacacgctgtcgttgcggcactcgcggcgttggtgctactcgcggcgagggttccatgctcactttcgaagggcagaagatccaaggcgcttccaacatcgttgccaagctcacctccctcccttttcagcagtgccaccactcaatctccaccgtcgactgccagccctccggcgtcaacgcggcatgctcgtctt

SEQ ID NO: 47102 - DNA, 238 bp, Glycine max
acgcaccagaaaacgtatgggcaaattggcagtggagatcaattaacgatgtgtacatgaatggagcattttttgtgcaatctgggcctgagctggctagcagaccattctcaagagaagacatgatcaccgctaaggtaggaaattatgtaggaaggcttacacgctattctggcaacctgttgaagtgcagagtgggtcgccttgttaattatcctttttcccattaattctcttc

SEQ ID NO: 47103 - DNA, 222 bp, Glycine max
caaagtttaagtcatcatgggtaaggaaaagactcacatcaacattgtcgtcattggacatgtcgactctgggaagtcaactaccactggtcatttgatctacaagcttggaggtattgacaaccgttcgattcaaaggtccaaaaaggggccccctaagttgaacaggaggtcatccacgtatccctgggtgcttgaaaacctcaaggctgagcgcgaaag

SEQ ID NO: 47104 - DNA, 206 bp, Glycine max
tccaattcctaattgtttaaacctaattcttatttcttcatcgttcgattcttcgtctcctaaagatgcagatcttcgtgaaaactttgaccgggtagaccatcacccctgaggtggaatccttccgaaacatcggatactgtgaaagctaaggtttcagacaaaggaggggttccccctgaccagcggaggacttatctttgcgg

SEQ ID NO: 47105 - DNA, 218 bp, Glycine max
actcgctctatttctcagcgtctgtgtttgcggctgaggattccgaacgagtgaccttcttcgtttctcgcaaagttcaagtaatcatgggtaaggaaaaggttcacatcaacattctcgtcattggacatgtcgactctgggaagtcaactaccactggtcacttgatctacaagcttggaggtattgacaagcgtgtgattgagaggttcgagaag

SEQ ID NO: 47106 - DNA, 242 bp, Glycine max
atcaaaatggttgctgctggtgctgaacatagtgtagcaatcactaaagatgggaatttgtatggatggggctggggccgatatggaaacttgggattgggtgacagaaacgatcgattgctgcctgagaaagtgactgttgatggtgacaagatggccatggttgcttgtggctggcggcacacaatatgtgtttcatcttctggtggattatacacaaatggatggggcaaatacggcca

SEQ ID NO: 47107 - DNA, 263 bp, Glycine max
atcactagaagtgttggatgcatttctatttctaactaattattgtgcttattattattgttgagaaagaaaagaatggcaaagttaataaaattctttgagttgaacacaggggccaagattccttctgttgggttaggcacttggcaagctgagcctggtgttgtagccaaagctgtcaccacagccattctggttggatacaggcatattgattgtgctcaagcgtataacaatcaagcagagattggttctgctcttaa

SEQ ID NO: 47108 - DNA, 226 bp, Glycine max
gtgattctcataaatgcagtgctaacatctattccaatttatttgctatcttttgtcagggtccctaggcaggtgattagcaagataaccagattacaaaggaacttcttatggggtggtgcagctgatcaaaataagatcccttggatcaagtgggaaaaggtgtgtttgccataggaacaaggtgggttgggagtcaaggatatcatctcgttcaacacatcat

SEQ ID NO: 47109 - DNA, 241 bp, Glycine max
  unsure (1)..(241): unsure at all n locations
gcagagatgacaggtgggatgtgtggacagaaggtgcaagagatagaggtgacagtggtgatgatgccaaagaaggtggtggacttcaacggcgtaacctccgtctgataagtgagttgctatggggancgccaccgagttcgtggggaaatgcttgggcgcattaggtcatgcagttgatgctctcactgccctgcgctcgccatagtatctccttgcagctgtatcagtgctacgcaga

SEQ ID NO: 47110 - DNA, 241 bp, Glycine max
tgcttccatcctccacaaaagatttaacctgttattaccaatgctcctccgcatttcatgcggaatagaccttccaatctttcttctgaacattgtttccctctatattctgtcagtgattggaagctacttcagctttgtcaatctgctatatattggttttctctgcatgcaaacgctgccaattgtgtatgaacggtatgaggaagaaatcaacaactgggtcggcgatgtcataata

SEQ ID NO: 47111 - DNA, 237 bp, Glycine max
gtttctttcttcaacgtttccatcatacacagatcccaatcctctctcaagccctaatttcccctcatttccatcgccatacggagaggtagcccctctggtgcaggctcggctgaatgttgtggtgttggatagttctccagggaactcaatttatcagttggcgatggtgaactatgtgaagagggtgtaccctgagcttgatgtgattggggggaatgttgtgactatgtacca

SEQ ID NO: 47112 - DNA, 251 bp, Glycine max
catgcttggctggggacgcgagaaccatggaagaagctgctggcatggcggtctcatccgcatcctgtggctggcatggccagttaagctgtgcgcattatggccagaagtgtgatcggtgagcatgaggaagactcgtcacagggcacgtgtcatcaggaagcccatggtacggtcgaaaccgagtcaagtacttgggctcattctctggcgaccccgggtactatgtaaccggtgagttcggatgtgac

SEQ ID NO: 47113 - DNA, 247 bp, Glycine max
gcctgactctttacctggactcgctgcagaataagtctccttctagaatagccagtggtcctcactttgatagggaatgtcattgggcatgaaactgccactattagcgatggatatctcgttggtcctgttgttacaatcggtactggctgtgttgttgcatcaggtgtcatgctttcacgctgcacaattatgataggttttctgcgtaacaagcatacttgcatatccaacagtatcatatggt

SEQ ID NO: 47114 - DNA, 195 bp, Glycine max
aagaagttctcgtttaagacatccccagatcctggacagaagtctcggcaacgtgatatcatatgtggtggcatgggaaagaccaactcatcaaggatatggactatgacgacattgtttcccacatcgacgatatgcactatgcaagtggatagacctcacagggagacccactcacagctcaagtgcaagaat

SEQ ID NO: 47115 - DNA, 254 bp, Glycine max
actctcttcgctcgtcgtcaaagaattcctatcttcatgctaggctggccttgctcgcaggcctggttcctccgtacttatatcgtcgacgcctccgcttactcttcaacgctttctgggattccttttcggctctgaccatggcgacgtcttcgtcatcggcggtggtcccggctgctatgtggccgtcatcagtcccgcgctgtctgtctatccaccacttgcatcgatgagcgtggcagtctcgggggtac

SEQ ID NO: 47116 - DNA, 143 bp, Glycine max
cagaggtttgatatgcaagagttgctcagagcctctgctgagattttgggtagtggttgcttcagctcttcttacaaggctgccttgttgaatggcccatcaatagtggtgaataggttcaagcagatgaacaatgtcgggaa

SEQ ID NO: 47117 - DNA, 244 bp, Glycine max
gcttctgcatgggacttggtgtgattccaaacatcttgtgttcagaaatcttcccaacaagtgttcgcggaatatgcatttctatttgctccctcacattttggatctgcacattgatagtcacttctttatttcccttcttgctccatctccttggtcttactggggtctttggattattcgttgttgggtgcatcattgcatggatatttgtctacttgaaagttcctgaaacaaagggcat

SEQ ID NO: 47118 - DNA, 186 bp, Glycine max
gccgaacttgggtcgtttcactaatccccctgattggcaggaaattcttacctattttcgtggatctgatctgcagagttattgtactcggattctacaggcttgtttgttggctatcatcaagcctctgtatgttgaccatatgccatcagctgtgcaagggtatgtggggcaggtgctagacca

SEQ ID NO: 47119 - DNA, 277 bp, Glycine max
gccaaatatatgcaatctccaaggatcttgctacttatatatccatcaattggcccatattacacagatacgcaaatgaagacgtatctttaggttcatggttattgggcctagaagttgaacatgtcgatgaacgctctatgtgttgcgggacccctccagattgtgattggaaggcaaggacaggaaatgtgtgcgtggcatcttttgattggtcgtgcagtggtatctgtaagtcggtggagagaatgagagatatacacaaaacttgtgggga

SEQ ID NO: 47120 - DNA, 274 bp, Glycine max
ggtccaatctcaattactgttccagattctgactttcatgactttgacaaagataggtcagaggaatgcttcaggccaaagcaaatatgggccttgtatgatgaggaagatggaatgccacggttgtattgtatgatccgtgaggttgtgtctgtcaatccatttaagattcacatcagttacttgagttccaaaactgatagtgagtttggctcagtaaactggcttgattcaggttttaccaaatcttgtggaaatttcagggcttttaatt

SEQ ID NO: 47121 - DNA, 265 bp, Glycine max
ggcctgcaaccctcgaaacgtgaatagccgtggcggccacctatttctctgtttaacgtcttcactcattctacattttcgcctcaaactacttcttccaccgatcactgttcagcagagaagtgttgccttggactcttgaggtgcaatgagattggagaagtgttggttctgttcttctaccatataccctggacatggaatccagtttgttcgtaatgatgcaaagatttttcggttttgtagatctaaatgccacaaaaac

SEQ ID NO: 47122 - DNA, 260 bp, Glycine max
  unsure (1)..(260): unsure at all n locations
aattaagatatncggttgtcttgcatcaagcttttgagccggatctttgccaagatcgtgttgcggattgtcatgantgctgcgtatgctactgataaggcgactatcttatacatgctcgaggttgtagacattgatgtgatcagtcgtcttaatgaattcactgcgatgagtagantagatcccagaatctatggtgctcaaatgagtaccataagactagaacaattggagattaacatgggaggggtcacagtaga

SEQ ID NO: 47123 - DNA, 257 bp, Glycine max
attttgtgtcgtcagcttctattttacgggcagaaacatttggtatcccaatccctgactgggtgacagatgagaaggccaccagtctctctacagcttctatagatgatgcagcggttattaatgatctagtaatcaagttagagaggtgccgggcaaatcttccaccagtgttcatgatgaaaccaattcaatttgagaaggatgatgacacaaactaccatatggatgtgattgctgggcttgccaacatgagg

SEQ ID NO: 47124 - DNA, 257 bp, Glycine max
gcgccgccctcgccgcctccctccccgccatcatcgcctccgttgattaccgcctctgcccccaacagcgcctccacgccgcctaccacgacgccctcgaagccctccattgggcccaggcccaggcccaagcccaagcccaatcagacccgtggctccgcgactatgtagacttctcaaaaaccttcctcatgggaagcagcgccgggggaaacatcgccttcttcacagccctaaattctctctccctctcactc

SEQ ID NO: 47125 - DNA, 251 bp, Glycine max
accggacaaaagctattagttggggccaatttcgcttccgcggggataggaatccttaacgacactggcatccaatttgtggggatcttaagaatgttcgagcagtatgcgctgttcgagcagtaccagcaacgattaagtgcattagtgggagcagcgcaggctcagcgaatcgtgaatcgggcactgttcctcatgacacttggtggtaacgatttcgtgaacaactactttctcactcctgtgtctgc

SEQ ID NO: 47126 - DNA, 254 bp, Glycine max
agacaacattgacttgtgctggctctggtggagttgaagacatgctagtggggtgcctatggttgaatgattatcttgtcactgtttctcttggtgggacaatatctatatttttagcaactgatcttgataaagccccgacaacattttctggacatatgaaaaatgtttcctccttaactattcttagaagtaaccctagggtgctattgtctagcagttatgatggcttaatagttaagtggattcaaggg

SEQ ID NO: 47127 - DNA, 252 bp, Glycine max
aaacagactcaagttttactacaatggtgaatacgctggtttcgatgaagatgagccaacatcaaggcagggaggcaagggagatgttattaaaatgttgaagaagactcacagatacaactcaataattctgattggagacggtgcaaccgatcctgaagcctgcccaccagctgatgccttcattggttttggtggaaatgttgtgagagaggaggtgagatcacgtgccaagtggtttgtctccgattt

SEQ ID NO: 47128 - DNA, 253 bp, Glycine max
caaagagttgatgagcacatagaaaacaaagctgtgctgaatgaattgaatttgagtgctgtccccagtctatatgaactatttgttaaactgattgaacgtttgttggagaacaaagaggaggacaaggattcaattgtgattttcttgcttgacatgctagagattgtgaccagagacataatggatggagacattgaggggtaaatcatttgcaatttttgtatcccttgctaatttgataaattttgga

SEQ ID NO: 47129 - DNA, 254 bp, Glycine max
ccagaacatgggatggagagctgatggtggtctgtggcttcttgttcgtggaggtggtctttatctcagcaagggcaaagggttaactgaagaatttgaggaggttcctgttcaaagccggggttttggcattcttgatgttggatatcgttcaacggatgaggcttgggcagcaggaggaagtggtattctcttgagaactactaatggtggcaagtcatggatccgtgacaaagctgccgacaacattgctg

SEQ ID NO: 47130 - DNA, 259 bp, Glycine max
ctgcttcacccgtaatcatcaccatcatcaaggacatctcagcaattaaacaatatacaaaacataatcaaactgctctgaagcagctcaatgagttcgtccgcaagaccggtggcgccggcaaaggtcgcactaacatgcgccgcaccgtcaagagtgctcctcagagcatttggtatggccctgaccgtcccaaatacttgggtccattctcggagcagattccatcatacctgaccggagaattccctggtgacta

SEQ ID NO: 47131 - DNA, 258 bp, Glycine max
gcaatggacgcccacatcaaagaaggggacgtgttcttcattccaaggtactttgccttctgccaaatagcatcaaggggtgaaccacttgagttctttggcttcaccacctcggctcaaaagaacaggccacaatttctggttggtgccacgtcactcatgaggaccatggtggggcccgagcttgcggctgcatttggtgtgagcgaggagaccatgaatcgcgtggctagggcacaacatgaagctgtgattcta

SEQ ID NO: 47132 - DNA, 256 bp, Glycine max
aagagactcacctcctcaacgaagctcaatctataggggtgtcacaaggcatcgatggactggtcgatacgaggctcatttgtgggataagaattgctggaatgaatcacagagcaagaaaggaagacaaggttttcattattttgctctctataatctttagtttaattttctgatttccttcgctttatatgatttattgtcatattaattatcttgggttggttgacaatggcaatggaaaacaactggatgc

SEQ ID NO: 47133 - DNA, 255 bp, Glycine max
gagtcccttctttgcatgttatccactgcctcagtcccggaccttggctaccggaacggggaggacaactaattccggaagtggcactttccttctcacaatgtgagtgtctcattgtactggtccccttttcttgtgcaaggtgtagctaagtcatactcagggccaaatcataataagttgtatttggatcatgttgatgagaggtgggcctaggatatggatcaaatggccctgattgtgttatcacttggg

SEQ ID NO: 47134 - DNA, 252 bp, Glycine max
caggaattgacggaggcattcgaaatcggtgaagatggttgctatgaggtttcatcagtaccaggtggtgggaagggctcttcctaccgaatccgatgagcatcctaagatctaccgcatgaaactctgggcaactaacgaggtccgtgccaaatccaagttctggtatgctttcttcttcttcttcttcttttttcaaatgttttttattcgtattcgtactgattcaataatattttttttatgatttgt

SEQ ID NO: 47135 - DNA, 256 bp, Glycine max
caaggacctacttgaagccgaaacagtgttcaaggaaatgccacaaagaaacgttgtagccgagtccgcaatgattgatgggaatgccaaagttggtcgcttggatgatgcccgtaatgttttcgacaacatgacccagaggaatgcattttcctggacaagtttgatttctgggtattttagttgtgggaaaattgaggaggctttgcatttgtttgatcaaatgcctgagagaaacgtggtgtctggactatgg

SEQ ID NO: 47136 - DNA, 252 bp, Glycine max
gttgcgtgcttggagaggagtacagatgaagggaaagtggggatttcacttcagaaggatctcatggcgattgcaggtgaggctctcaagtctaagatgactactatgagtgctcttgttcttccggcttccgagcatttggctgttccgtctcagtctcattgggaggaaaatcttcaaccccaaatggaagccttagatgcgtgacttcatacaagcctgggagcacttctgcatccacgctggtggacg

SEQ ID NO: 47137 - DNA, 104 bp, Glycine max
cgacgtgcgtggactctttgaaggtggaattcatctccctacagatgcactcagtaaaattagccccctatcagtgctcaaggaaatcttccgcactgatgatg

SEQ ID NO: 47138 - DNA, 246 bp, Glycine max
  unsure (1)..(246): unsure at all n locations
tatcagcagcagcaccagtgctaagggtgtcatcggtaccggtattatcatcagtgaaagtgtcatcgacaccgtgactgctttagcgtcccacatatccatccagcttagcaatcatagcaaggctgatgtacatgagaaaggtatacttggacaggctacatgattttcaaggaacatacctcgggcnaccttngcanctnncnaagatncatacgatcttaattttgaatgggacagtacttc

SEQ ID NO: 47139 - DNA, 158 bp, Glycine max
atttggaccttgagaacaatctcttgtttggtaatttggttgattttcaacagcctttggttttgctcagtcttgcttccaatcagtttgctggttctttgccttgctttgcagcttcagttcagtctctaactgtggtgaatttgtccatcaattct

SEQ ID NO: 47140 - DNA, 248 bp, Glycine max
catttttcttggatttattgctagctcacaaggagtgcaggttgatccatagaaggtcaaagccattcaagattggccaacccccaaaaatataagtgaggtaaggagctttcatggcttagcaagtttctatagaaggtttgttagaattttttgcactttggctacacctctaaatgaaattgttaagaaaaatgttgtttttgaatggggtgatcaacaagagaaggcttttattgctttgaaag

SEQ ID NO: 47141 - DNA, 251 bp, Glycine max
tacaagctagtttatcgtgaggagaacacgaagttgcttgtactctatgttgctgcagtagttttggtagcatggccacgccatggcgcaggctaccaaaggttccctatccgaatgaaaactggctatggcgacgttcttcggaggtaaaatgcgcaagcttcaggcttgctgtggaagcacacaacatccgagatattaaaaccattcctgaagagcacactgaacaaacaaaggactacattaatggc

SEQ ID NO: 47142 - DNA, 247 bp, Glycine max
gtcgaggcatcggcacgcacgggattggtatcttacttgacggtctctatggaacagggacaggttccactgtttctgtggaaaatgtaggactccttggcctaacccgagttggaagtcgccgagttgttaaatttctgctggttttatgatattcttctctactttaggaaagtttggagctgtgtttgcatccatacccttcccaatatttgctgcattatactgtgttctctttggccttgtt

SEQ ID NO: 47143 - DNA, 249 bp, Glycine max
aggctcgagaaggggccagattattgagcagtgtaggagatccaaagttgggaagctgttggagtgtgattttggggagagtaagtgtcattcccctagtagtataatgcagatgtttcaagggtcgcttttcttcttcagcctcaaggggattcgtataccagaagatctgcttttgattcaatgctggctgggcgtataccagtgttcttccatccgggttcggcgtacacccagtatacatggcat

SEQ ID NO: 47144 - DNA, 249 bp, Glycine max
gcctcgctctgtttctgtatctgtgtttgcggctgaggattccgaacgagcgaccttcttcgtttctcgcaaagtttaagtcatcatgggtaaggaaaagactcacatcaacattgtcgtcattggacatgcgactctgggaagtacaactaccactggtcatttgatctacaagcttggaggtattgacaagcgtgtgattgagaggttcgagaaggactacgctgagatgaacaagaggtcattcaa

SEQ ID NO: 47145 - DNA, 275 bp, Glycine max
taaaatcatgtgattatagaacattggctattggtgatggtgggaatgatgtaaggatgatacaacaagctgatattggtgtgggcatcagcggcagggaaggattgcaggcagcaagagcagctgattatagtattggaaagtttagattcctgaagagattaattctggtccatggccgctactcttacaaccgtacagcatttctttctcaatattcattctataagtccctactgatatgcttcatccaaatccttttttcatttatttca

SEQ ID NO: 47146 - DNA, 271 bp, Glycine max
ctcacgtcgcctcattccctggggtctgaatgaggggatttatttgaatgaagttgatcgagttctacgtcctggtgggtattggattctatcagggccacccataaactgggagaatcactggaatggttggaagaggactcgtgagagtctcaaagaggaacaggatggaattgagaaagtggcaaaaagcttatgctggaaaaagttggtgcaaaagggtgaccttgcaatatggcagaagcccaccaatcatattcactgcaaaatc

SEQ ID NO: 47147 - DNA, 248 bp, Glycine max
atttgagggttaatataatagaggcacaagacttgcagccaagtgataagggtagataccctgaagtttttgtgaaggctactctgggaaatcagaccttgaggactagaatctctcagagcaggaccatcaatccaatgtggaacgaggatttgatgtttgtggctgctgaaccatttgaaggagctcctgatctgaatgtggaagacagatgtgcaactaaccaagaggagtcgctgggggaggtg

SEQ ID NO: 47148 - DNA, 258 bp, Glycine max
gattgagtcatgggcaagcaagggccttgctatcactgtggagttacaagcacacactttggcgtaatgggccacctgagaagccagtactatgcaatgcatgtggatctcgatggaggacaaagggaacacttgcaaattatacccctttgcacgcccgggcagaaaatattgattatgaggatcaaaaggtttccagggtaaagagcatatcattaaataagaacacagaagtgaaattggtcaaacgaaagcaaa

SEQ ID NO: 47149 - DNA, 253 bp, Glycine max
gtgagttacagacacaacacaacgcacttcttctcactgtccccatggcatcgagcacgatccgcaaggcgattggcgtggtcaaggaccaaaccagcatcagcattgccaaagtcgccggcaatttggcccccgacctcgaggtcttaatcgtcaaagccaccagccacgaacaagtccccgccgatgaaaaatacgtccgagaaatcctgacattgacgtcgctttccagaagctacatcaacgcttctct

SEQ ID NO: 47150 - DNA, 253 bp, Glycine max
ggaggagagtgtttctcctcgccaaaggagatatggctgattccagaaatcgcttgctgatacatacgcactccagtcttatttggcgaggaggagagtgtttctccaaaaaagcccactactttgcctgaggtggccaagcagcgtgagctaagtggaactttggaaagtgcagactctatattgaaaaagcaactctctgatgcgaagtgcaaggagcttagtggtcatgacatatttgctccaccaccag

SEQ ID NO: 47151 - DNA, 201 bp, Glycine max
ttccaatcgttaacagtgtcagccaaatctgttacaatggcaagggcattaaaacgcaagcctcaatgttactgtagccatagatggtagtggagatttcaaaagcatcaatgaggcattgaagcaagtgccggagaaaaaccgaaagccatttgtgatctacatcaaggaaggcgtttaccaagagtatgttgaagttac

SEQ ID NO: 47152 - DNA, 252 bp, Glycine max
gtcaaagcaaccatcgagaggtacaaaaaagcaagttcagattcgtctggcgctggatctgcttctgaggctaatgctcagttttaccagcaagaagcagataaacttcgtcaacaaattagtaacctgcagaataacaacaggcaaatgatgggtgattctttgggctctctgactgccaaggatctcaaaaatctggagactaaattagaaaaaggaattagtaggattcgttcaaaaaagaacgagctg

SEQ ID NO: 47153 - DNA, 252 bp, Glycine max
ttgtaccatcgactttgtctttggagaacagccactgcatcaccaaagacaaagtcgatggtacctgatactgatgcaatcacggtagaattgacgcatggtgtgtgcgtagagtgtgtcctggtagccatccattcgacatttgtaaaagatggacctgtcagcttgaaccctcaaggccactgcttgatgtttttcagcaccagctgagttctccaaaattgcactttcgtggtgcgaaaaccattggaa

SEQ ID NO: 47154 - DNA, 249 bp, Glycine max
aggacattgtgcactgtactgaatttgagcttgtacctgcagctgttaatgctgctttacagactattgccaatgtttctatttcctctgaattgcaagatgctttattgaaggctggtgttttatggtaccttttgcctctgctgcttcagtatgactcaactgcagaagaatctgatgcaacagaatctcatggtgtcggtgctagtgttcaaattgccaaaaacatgcatgccataaaagcatcac

SEQ ID NO: 47155 - DNA, 257 bp, Glycine max
tgccagagcgaatctcgcagtgctcggagcaattcctcctctcgtcggaatgctcgatgattcagaagacgctcattctcaaatcgcatcgctctacgctttgctcaatctcggaatcggcaacgatgcaaataaagcggctatagtgaaaattggcgcggtacacaagatgctgaagctaattgaatcgagcggttcagattcgtcggtgtctgaagcgatcgttgcaaatttccttggcttaagcgctttggatt

SEQ ID NO: 47156 - DNA, 123 bp, Glycine max
gtaacaatggggtctctaatggcctctgccacattgactcttgtattggcaatagtgtctctaagcttgccgtctcaaatttcagctcataactacttgtactcatcacctccaccacccaag

SEQ ID NO: 47157 - DNA, 235 bp, Glycine max
ggttggctgaacaaaatggtacagtttaaagagaaatctcgcaaggcggtgcgttcattgctggagctgaagaagttggggttgcccttttgacttatcctgttctgatggcttctgatatacttctatatcagtctgattttgtcccggttggtgaagatcaaaagcagcatttggagttgacccgtgacttggctgaacgggttaataatttctatggaggaagaagtggaag

SEQ ID NO: 47158 - DNA, 261 bp, Glycine max
cctcgagccgaatcggctctaggttgcacggcacagagtggagtcacaagatggtgtcctggacagctgcagaagctgctcgcagctagcgtcctaaagtgcggcaagggcagtgtctggcttgatccaaatgaagtcaatgaaatctccatggccaattctcgacaaaacataaggaggttggttaaggatgggtttattatcaggtagccgactaagattcactctcgctcccgtgctcgtcgaatgaaggaggccaag

SEQ ID NO: 47159 - DNA, 281 bp, Glycine max
  unsure (1)..(281): unsure at all n locations
gatttcgatcatcgtttattgttgttcagagatgatcccgtaccttagacagtggcttctcntagcactagcatttccatgtttactaacacttcatctgttagtatcaggtgtagtagcaacaacatcgttcacactggttaacaaatgcgactacacagtgtggccaggcattctctcaaacgcaggagtcgccacgcttccaacaacaggtttcgtccttcaaaccggagagtccaaaaccgtaaccgctccaacctcttggggtggccgtttctggg

SEQ ID NO: 47160 - DNA, 263 bp, Glycine max
ctcagcttaacatgctactctcgatcattcatcagtgcatgtgtaaacaccctctctaggctctgcagcaagactagcagttggacagtggctttaaaaacacttattttcattcaaaggctgttatcagatggtgatcctgcatatgagcaagagatattcttctcaactcgccgcggaacacgcctcctaaacatgtctgatttcaggggcaactcaaaatataattcatgggacttctgtgcatttgtgcgcacctatgc

SEQ ID NO: 47161 - DNA, 263 bp, Glycine max
gtagtacacaacacatagagataggaagacaaaacattctcactccgaacaaaatgtcgattaacagcgaatctacgccgccaccgctgatcggcaaaatcgggccttacaccgtcttcatgacgccgccgtctacacccaaaccctccgacgaccacctcgtcaccaccaagatcgcacctccgccgcctcagattcccaaagccgttccttcccccaaacccgtctccgaccccgacgattccgtcttacggcttcttcag

SEQ ID NO: 47162 - DNA, 234 bp, Glycine max
ctttctctgaactgttcaccgaggatgagattaaggatgccttggctgagtcatatcagaacatggatgaagagattgattttgagtccttcctaagggtacatttaaatctgcaatcccgagcaatagctaaagatggtggttcaaaaagttcttcttcatttctgaaggcagctacaacaactgttcatcatgcaattaatgaatctgagaaagcttcttatgttgcacata

SEQ ID NO: 47163 - DNA, 204 bp, Glycine max
  unsure (1)..(204): unsure at all n locations
cccgtagtggtggaggacaaggagggggtgtaggatatggtggtgatcatggagctggatatggtggcggtggtggtggtggtgcgggttatggtggtggtgtagagcatggtagtggaggtggttatggtgaaggtgaaggaggtggagctggaggaggatatggagctcttggggcacatggntgntggttttgaggaggcg

SEQ ID NO: 47164 - DNA, 226 bp, Glycine max
ctctctcccttagtcaaagggactcgttgttcttctcccaggttatttagaaaagcaaaatggtgaagatttgctgcattggtgctggatatgtggggggtcctactatggcagtcattgcacttaagtgcccatccattgaagttgctgttgttgatatctctaaatcccgcattgcagcctggaacagtgaccagcttcctatctatgaacctggccttgatgg

SEQ ID NO: 47165 - DNA, 209 bp, Glycine max
aagagggggtcagagtgagaaagagaaagagagaattcgtaaaccctaatttcggaaagatcggcgatgactccctccaaggatcgcgagaacttcgtctacatcgccaaactcgccgagcaggccgagcgttacgaagagatggtggaatcaatgaagaacgttgcgaatctcgacgttgaactgacggtggaggagcggaatttgct

SEQ ID NO: 47166 - DNA, 269 bp, Glycine max
aaacaatcatgcaatagaaatctttcaagatcatgtaaggagctccatagagaacttcaaagcttgagggacatcagatctgacttacttactccgtctaaagattcaagaaagaggagggacatgactgatgttcgaattctttacagccaccacttggatgaagatattgttaagcatcagaagaagattttagcacggcttggagtttctgtggcttcctccattgcagatgcaacccatttcatagctaatcaatttgtgcgtac

SEQ ID NO: 47167 - DNA, 257 bp, Glycine max
atacccgtttgaattctctactgttgaaatgccgtatgaatcatacaatggaatcaatgttaggcttaggtacattttgaaagtgacaattagtcgaaattatgtcaacaacattgtggaatacatggattttggtgtacgcaattatgctccagctccacctattaataacagcattaagatggaagtaggaattgaagaatgcttacacatagagtttgaatacggcaagagcaagtatcatctgaaggatgtca

SEQ ID NO: 47168 - DNA, 246 bp, Glycine max
gcatcctgattgtgtgatgctggtttatccaagtggggttggtgggtttgatgtgaattggaaggagttaagtgaagctatattgggatttgataagttggactggaaagggaagcctaattcccttagcaaagagcatgtgtgttgggaagttatttataggactgctgaggctgtgaagaagcctttgacattgggggaaagattcttggttgagccatttcagaggagtggtgtttgtgggga

SEQ ID NO: 47169 - DNA, 243 bp, Glycine max
ggactcactgtgtcgtggaaccttttgtaattgcaacacataggcaacttagttccatgcatccaatttatagattattacatcctcatttgagatataccatgcagattaattcccttgcacgtgaggcacttattagtgcaaatggggtcattgaaatttcattccttactaataaatattcaatggaattaagctctgtggcatacgatcaactttggcaatttgattcgcaagcacttc

SEQ ID NO: 47170 - DNA, 241 bp, Glycine max
attattgtaaactaatagggatgaaaaaatcttaacttgtacccctttattggcagctgaagtatccagcaccaggggctccacacttcgtacggcttctgaaggagctactcttaggatcagggtttagccatgtggatgaagataagaaacgtgggcttgaccatggtgcatgggtgccactcttgtggatgtacccagaggcagacatcccagtgtgtcaactctctatttcatcaaa

SEQ ID NO: 47171 - DNA, 243 bp, Glycine max
ctttcagctgtggagtgattctggtgaagcatgcccagaaggaactgttccaatcagaagaactacagaggaggatattctcagagcaagctctatccaaagatttggaagaaaaccaagacctgtacggagagactctactggcagtggtcatgagcatgcagttgtttttgtaaatggggatcaatactatggagcaaaagctagcataaacgtgtgggcaccccgtgtaactgatgaatt

SEQ ID NO: 47172 - DNA, 260 bp, Glycine max
aggtaggttgtgtaagaactgtggggtgagggaaccagtggtgttgttgttgccatgcaggcatctttgcctttgcacaatgtgtgggaccaccgataaggaattgccctatttgtgactctggcatggatgctagtgtgcatgttaatctctcttagtacaacttttgtttttttttacataggtttttattgtagagtttacaacaacagaaactagaaagaaaaaaaacatcttgtcgaaaagacagatagaagaaa

SEQ ID NO: 47173 - DNA, 259 bp, Glycine max
atccttttgctgagcacatagcctactttgtgttatttgccattccattatacacaactgtggttgccagaacagcttctatagcatcatatgctggttatctcgcatacattgacttcatgaacaatttggtcactgcaatttcgagtgcatcccaaaggccattttcacagcatttcccttcctaaaatatctcatgtatacaccatcgttccattcactgcatcatacccagtttcggacaaattactcactcttc

SEQ ID NO: 47174 - DNA, 253 bp, Glycine max
tggatgtgctcctaatcgtgctacatggaacaccatgcttgctgtatgtagcgaggagggtaagcacaattatgttaacaaggtcttgagggaaatgaaaaactgtggatttgagcctgataaagacacatcaatacattgattagtgcatatgctcggtgcggatctgaagttgattctgcaaaaatgtatggggaaatggttaaatcaggctttactccatgtgtaacaacttataatgctcttctaaatg

SEQ ID NO: 47175 - DNA, 252 bp, Glycine max
gtggaaagaaggattccatgttacctcaatgactactgctggcagtcgctggggtgttgttatgtccaggaatgctgggtattctgatcaggttgtggagcttgactttttgtatcccagtgaaggatccatcgtcgatgggagaatggttaccggattacttctatggctgctactagtgatcaggcagccttcatactgagcataccaaaacgcaaattacttgatgaaactcaggagacactgcgtaca

SEQ ID NO: 47176 - DNA, 249 bp, Glycine max
tcacaaccctggctttgtagccttagtcttagcagggacggcttttgtcttagatttgaagagagccagggttgtgaatgtacgacaaaagccgctcctgctaagactaaggttacaaagccaaagcaaaaggttgaagatggtatctttggcacttctggaggatttggttttactaagcagaacgagctctttgtgggtcgtgttgctatgcttggttttgcagcatcattgttgggtgaggaataa

SEQ ID NO: 47177 - DNA, 226 bp, Glycine max
tagagagtgaggtcagtgagggatcggtgttcacttgatctcatcataatcggcagcgtcaattgaagaagatgccgatcagaaacatcgccgtcggaaggccttaagaggcgtctcagccgaagacgtttaaggcggctttatctgagtacatctcgagcttcatcgtcgtgttctccggctcaagcttcggcatcgccgacaacgagctcaactgcaacggcgc

SEQ ID NO: 47178 - DNA, 242 bp, Glycine max
ctccctcatcagacgctccctctccctccccttccgcaccatcgaattcacacgcaagtacccctccgtcttcgaggagttcctccccgttgcctcctctttcgcctccccccatgtccgcctcacccccgaaaccctcctcctcgactccgaggagcacctccttcacctctccgaccgcttcaaacaccatgccgccgacaggttcctcaagctcctcatgatcgccagaatcacaaaat

SEQ ID NO: 47179 - DNA, 267 bp, Glycine max
gttgaaaacacaaaagataaaaaatgggttcttctctgtggacctgtctgattttgttatcacttgcttctgcttccttcgccgccaacccaagagcaccaattgatgtgccatttggcagaaactatgtgcctacctgggcctttgatcacatcaaatacctcaatggtggttctgagattcagcttcatcttgatgctgctcagtggcaaaaactctcctgggttcgccagaaatacaccatctacaactactgtgctgactgca

SEQ ID NO: 47180 - DNA, 267 bp, Glycine max
cggagtgctgattccaatcctggccgttcatcacgatcaagcgatatgggggaaggatgcgaacgagttcaatccggggcggttcagagaaggggtgtcaagagcgggcaagcatccattgggcttcataccgtttggagtaggtgtgcggacatgcatcggacaaaacctggcgctgctacaaaccaaactcgcccttgcaatcatactccagcgttttactttctgcttggcccctacttatcagcacgccccaaccgtcctcat

SEQ ID NO: 47181 - DNA, 265 bp, Glycine max
gtgaatacgaattcaacagaaggaatctatgggtattggttgctatccaaaacgttgagtgatgcagtgggtgaggctgtgaaagctggcaccaagaagtttgcaacgaaaaacgctaccgtttttgggtctcaaagagtgcatactcttgttcagtgcacgccagatctatcaagcgaagattgcagtaagtgtttgggtgatattatgagagatattcctttgtgttgtctcggaaggagaggtggaatggttctatttccaa

SEQ ID NO: 47182 - DNA, 231 bp, Glycine max
caaaccttttgcaaaatgtccatagcagaggaggagagtccaagtgtgatgccaaaagtgatcactttcctctgctctcttcttgagagggtggctgagtcaaatgatcacaaccaacacctccaacagcaccagaagatctcagtgttccatggcctgacaaggcaaacatctcaattcagtgctatcttgagagaatcttcaagtacgcgaattgcagcccttcatgct

SEQ ID NO: 47183 - DNA, 241 bp, Glycine max
ctccaatcctgatgatattgtgattgttgttggtgcaacaaataagccacaagaattagatgatgcagttcttaggagactggtaaagagaatatacgtacctttaccagatgaaaatgttcggaagcttctgctgaaacacaaactcaagggtcaagcattctccttactaagtagagatcttgagaggcttgtaaaggagattgaacgatattctggcagtgatctgcaagcctggtgt

SEQ ID NO: 47184 - DNA, 236 bp, Glycine max
gttgatgataaataccagtactcctgtgagaacaaggtcaacactgttcatggatggatcagtgttgatgctgctgatgcaccacccgtgggtttctggatgataacgcccagcagcgagtttcgtaatgctgggcccatcaagcaggaccttacttcccatgatggccccatcaccctctcgatgtttgtgagtactcactatgctggcaaggaggtaaccatggcatttcaaga

SEQ ID NO: 47185 - DNA, 261 bp, Glycine max
ctcacagatggaaccggaagaaaccgccgccgccgccgacggaagcttcgacgaggggctgctcgggctagacgacggcggcggcggcggcagggacagagtaaagggtccgtggtcgccggaggaggacgccattctaagccgtctggtgggcaagttcggcgcgagaaattggagcctcattgcgcgcggaatcagcggaagatccggcaagtcatgccggctccggtggtgcaacagcttgaccccgccgtcaagcgc

SEQ ID NO: 47186 - DNA, 258 bp, Glycine max
ctttgttctttctggagggaaggacaagtgtgtggttttatggaatgttcatgatcatatttcaactttagcagtagaaacagcatccaatgttaaacagggctctaaaactgggggcaataatacaaaagctacagaaagcccttgtattgaaccaaggggcatttaccagggtcatgaggacactgttgaagacgtgcaattttgcccatcaagtgcgctggagttctgtagtgtaggtgatgattctcgccttat

SEQ ID NO: 47187 - DNA, 282 bp, Glycine max
gtcatagtggtttatatatgcggtgtgactgagctgaaggaggaatttaaggggaccgtctaatggaagtcgggggaaggttgtcttactatttgatgataatcccttgtctaaaattggtgtgagatttgataaacccatacctgatggagttgatcttggtggtgcctgtgagggaggtcaaggatttttctgcaatgtcaccgatcttcgtttggaaagcagtgctgtagaagaactggacaaattacttattcattcattgtttgaggttgtttttag

SEQ ID NO: 47188 - DNA, 282 bp, Glycine max
ctcgagctctacgaaccccgcggactacaagcttctagaagaagttggttatggagccaccggcaccgtctacagagcgatctatctccccttcaaccaactggtggccatcaagtcctttaatctcgatcgctgcaacgtcaatctcgacgacctgcgcagggaggcccaaaccatgagcctcatcgaccaccccaacgtggtgagggcgctctgcttcttcgccgtggaccggagcctctgggtggtcatgcccttcatggaccagggctcctgcctcca

SEQ ID NO: 47189 - DNA, 264 bp, Glycine max
taggcgcttcacaagatcctagagtctgagatcaaaggagactttgagaaagccgtgtaccgatggatactggaacctgcagatcgtgatgctgttttggccaatgttgccatcaagagtggcaaaaactacaatgtcatagtcgcaatttccacaatgacattgtagaaattgccactatcctctccccggaagagcttttggcggttagacgcgcctatctcaaccgctacaagcactccttggaagaagatgttgcagctc

SEQ ID NO: 47190 - DNA, 259 bp, Glycine max
atcttaaggtatctcaagggtaccttgtctcatggtttacttcttcagcctgcttctactgtgaaacccttggctttttatgcattctgtgatgctaattgggcatctgatgtggatgataggtgttccacctcaggggctgccttctttcttggcccaaacttgatatgcatggtggtctcgcaaggagaaggtgacagccaggtccaatactgaagctgaatatctcagcttggctcaaacttctactaaattgaca

SEQ ID NO: 47191 - DNA, 256 bp, Glycine max
ctggcagccaacatctatagtcagttacaaccatctgggaaacaatgatggtatgaatctttcggctccacaaactttccgttccaaggtaatctccaagagcaacgttgttgatgatatggtcaacagcaatgccatcctctatgagcctggtgaacatccagaccatgttgttgttattaaggtaaattttgtttcacccatttttctgtttctttctcttgtcagggctttgattattctatctgctttgttg

SEQ ID NO: 47192 - DNA, 260 bp, Glycine max
aaaatatggacaaaaaatggctaaggggaatccatgccctcgagcataatacagatgcactatggcagttggttgcccagttcgcaaacaagttcaacgttgtgctgatgatagaacaattttggtgacaacatatgaaggcacacataaccatccactgccaccagctgcagtggttgatgccatggccatagcagcaggtggcagtggatggttatggcatcaaccactgcagctgctgctaccatgttgctgtctgg

SEQ ID NO: 47193 - DNA, 251 bp, Glycine max
gtaaaactcttcaccaaaaagggcttcaacatcgaagaaatggtgatcctactcggtgcacattctatcggcatggctcattgtgacttgttcatccaaagggcatacaacttccaaaacacagggaaacacgaccctacccttaccgtcgaagcggttgaggaattcaaaaaggcatgccccaatgttaatacacctaagtacaggaacccccctgtcaactttgatgcaacaccaactgtgcttgataa

SEQ ID NO: 47194 - DNA, 248 bp, Glycine max
acagtattcttttttattgtgtttttcttctgcagagaagagtccccccctaccccccgctggcgaaggcttgattccctgcttcaatcgcattatcgttgagaaaatcgtccctcactccaagacaagcgccggcattctcctccctgagaagtcctcccagcttaattccggtaaggtgatagcggttgggcctggatcacgtgaccaggcagggaacttgattccggtgtccgtgaaggaaggtg

SEQ ID NO: 47195 - DNA, 235 bp, Glycine max
gccccatcaaccaggttatttctgctcggaagggagagtttgaaactggatacgagagaggtggacaaactcgtgaacatgtccagcttgcaaaaacgctgggtgtgtctaagcttcttgttgtcgtcaataaaatggatgagcctacagtgcaatggtcgaaagaaaggttctctgactttctcactccacacaacatacgagtttgcgaaatggggatatgctgagatacctg

SEQ ID NO: 47196 - DNA, 272 bp, Glycine max
  unsure (1)..(272): unsure at all n locations
cgcgccttcagattggtcagttggaagcaaagcacaaagccttagacagactctacgatgttatgaaagaggatgagaagaatgttttggctgtttttggtaggagcaatatttctgctttagtccaattgctcacagcaacatatcccangataagggagaagacagttaccgttatatgctctctcgtggagtcagtgagttgtgcaaagtggctaatttcggaaggagttctgccacctctcataaggcttgtcgaatctggtagtgct

SEQ ID NO: 47197 - DNA, 261 bp, Glycine max
ctcatccaaaagttgacccatttactggggagatgtttacatttggctatgcgcatacaccaccatatatcacatacagtctaatttcaaaggatggttatatgcatgatcctgtacccataacagtatcagatcccatcatgatgcacgactttgccatcacagagaattatgcaatatttttggatcttcctttgatttttaggctttaggaaatggtgaagaataagacactgatattctcatttgattcaaccaaga

SEQ ID NO: 47198 - DNA, 250 bp, Glycine max
  unsure (1)..(250): unsure at all n locations
caaaaaattcaacaccaccaagaggtttcaacaataatgtctctccagcagcaatagaattttgggagcgacttntntatcacggttataaagcagatgtttgcattaatactgataacggtggcgttgtttatgctcattctaacattcttgccatgtctactcctgttttcaggggcatgttgaagcaagcaaattgtcatcgtcgatggcgaacaatctcaattactggggttccacatgatgcagt

SEQ ID NO: 47199 - DNA, 257 bp, Glycine max
atttttgatcagaatgagcgtccagacgtatagattcatttaaaagagtatgcttatttatttattactacaaactagataactaataaagtatagtttgtagtaataaataaataagcatactcttttaaatgatctatactttattagttatctagtttttattgaacgagatgtgtcacttgcactcatggctttgtggtttgagatctcaaaccatataagtatgggttcgattgttgcatcaacaaaaaaca

SEQ ID NO: 47200 - DNA, 266 bp, Glycine max
ccaaggttcaatcttgccatcatcaatggcctcagcaagaccttcctccaatggtcttgctgaggccattgatgatagtaagattggaccaagggatgacccagatggttcgttccaagatcttgtctgaagagttcggttgggacaaagatcttgccaagaaaatctggtgctttggccctgagacccttggacccaacatggtggttgatatgtgcaagggagtccagtatttgaatgaaatcaaggattctgtggttgctgga

SEQ ID NO: 47201 - DNA, 267 bp, Glycine max
aattccatgtgcatgacagcttccctagaggcagtaatgcttctttcatagctctaattatcaaaactaaacatcctgagtcatttgatgactacagaccaatctccttgattggatgtatgtacaaggtgatagctaagttattagcaaatagattgagacaagtgatatctggtcttattgatgagaggcagacaactttcataaaaaacagacacatcctgcatgacatactacgtcttaatgaggtgattgaggaagcttgta

SEQ ID NO: 47202 - DNA, 256 bp, Glycine max
gattcttgtaactagtatccttgcgtcaggggcttatgctgatgactcggataattcagatgcgttgatatatacagggcacggtgggaatgtgatgaacactgataaagaacctgaagatcagaggcttgagcggggcaatcttgctctgaagaacagtattgaggaaaagaacagtgttaaggtgatacgtggctctgaatcaatggatggaaagtgcaggatatatgtttatgatggactgtatgaggttgag

SEQ ID NO: 47203 - DNA, 254 bp, Glycine max
gtcaaaggaataacagaatatgtctcttatgctgcaattgagaatttggtgcttggtcaagcctccaggcatggctttattagattcaagtcaagtacgccaagcaacatattaaagggggcgccagatttctgtactgtgtatgtgatttctaagggcagaatctcttcagttcggagtgctgctcgaacagccccacatgcctccccattgctgaggcacatacagattctacatgacgagaatgcacgtga

SEQ ID NO: 47204 - DNA, 252 bp, Glycine max
aggagaaagagaaggtggaggagaggtacactcattggaagtctctggttcccgttctctacgattggctcgccaaccacaacctcgtctggccttctctttcttgcagatggggtcctcagctagagcaagccacttacaagaaccgccaccgtctctatctttccgaacagactgatggcagtgttcccaatacccttgttattgccaactgcgaggttgttaaacccagggttgctgctgctgagcaca

SEQ ID NO: 47205 - DNA, 268 bp, Glycine max
atcaaaacaaccttctttctttcaggttcttgatcagtgtcaaaaccaaaagggtggttgcaaattgcaatggctaagcatgatgttgagggtggttccttcgctgcaaaggactaccatgatcctcctccagcaccattgattgatgctgaggaactcacacagtggtccttctacagggctttgattgctgagttcattgccacaatgctcttcctttacatcacagtgctcactgtgattggttacaagagccagagtgatgtaa

SEQ ID NO: 47206 - DNA, 257 bp, Glycine max
gggagattgagactcctgaaagcctttttatctttccttctttgacttcaggtcttaaacggccattaccatctggtcttttggaaaatgagtggggaactttgttaagaagaccctttataagagttccagaaaatggaaccattgagctctcaaactcaattccaaatctctactcagaacactgatgagaatgcttttgaaaccccagctgattaacaataatggagcttttttatctgccatgcaacaagaat

SEQ ID NO: 47207 - DNA, 242 bp, Glycine max
gtatggattgcacacttatttttaaagtaagtagatttggtgctggctactttataggctgtgatcaacatcctaggtgcaagtacattgctaaaacattatacggtacagaggaggaagaggatgcatctcagccaaacagtagagtagaggaaccaaaactcctaggtgttactagtggttcatatgagaaggttcttttgaaaagtgggccttatggagtttatgttcagctcggagaa

SEQ ID NO: 47208 - DNA, 243 bp, Glycine max
tgaaaagcatgctgacacgagaaatttgttagacacacggttaaaatctatcctagagagtgttcggttgaattatcttctagaaagggagggaagcaactgggatgcgaatttaaaatgggaagacattctttctcttggagaacagcaaagattggtgatggtatgtaaatatattctcttgaaattttagacatttttttttaaatttcttaaatatttttgtttcatgcagcatgcccc

SEQ ID NO: 47209 - DNA, 250 bp, Glycine max
ctcttgctgagaagatgatgatgtttatgcttgcttccttcttgcattcttttgagtggagattgcctagtggcacagagcttgaattttcaggcaaatttggtgttgttgtcaagaaaatgaaaccattagttgttattccgaagcctagactatctaaaccagaactctatcaatgatgttgtaatagtgaaatgcatgcttattacaacttatataataagatttgttacttgcttcggctgagtta

SEQ ID NO: 47210 - DNA, 252 bp, Glycine max
gagcgcagcgtacagaccgactacacgctgcgatgtgaccgcaattctcgttttatatggtcttccaaggttgcttactggatcaatcctagctcatgagatgatgcatgcatggctgcggcttaaaggttatcggactctaagtcaagatgttgaagaaggtatctgtcaggttttggctcatatgtggttggaatctgaactttcttctgcatcaggcagcaactttgtatcagcctcatcctcatctgc

SEQ ID NO: 47211 - DNA, 253 bp, Glycine max
gctagaagcaataagatgaaaatgaaagtgcttgttttgtgtgttgctacagttttggtagcatatgaatgcccatggtcagactaccaaaagttccctcttcaaatgtgaaactgggtttggtgggcaatacagcaatgaggtggcatgtgccagtttgaaggttggcctggaagcaaacaacgtagtcaagtggcaaactgttcctgcagcttgcggagagtacatagctgactacgttctaggagaccaa

SEQ ID NO: 47212 - DNA, 166 bp, Glycine max
aagaaaaaaaaaaacccttagccaacacaaccatcatggtcacctctgctattcatcaatcagcattcactggtcaaactgctctgaagcagctcaatgagttcgtccgcaagaccggtggcgccggcaaaggtcgcactaacatgcgccgcaccgtcaagagtgc

SEQ ID NO: 47213 - DNA, 269 bp, Glycine max
gctgtgactcattgtaatgatccctatgttgatgactattatcacctagcttgtctttctaaaaaaactggtgctaagttgaaaaaatcattttgcccaacccaaataaaggaacttccttctcgagcccgctccaatacagactctcatggttttcttcaggtggatgctttagggagggtttcattcctggctattcgccggcctcatgctctgcttgaagttgatccgtcaaacagtggtatctctgagcgaaatatttctgagaa

SEQ ID NO: 47214 - DNA, 160 bp, Glycine max
caggattgtctgaggatttgatttccaagtatttgacagaaacaatatactgttcatctgagcaaagtcaagaagaagaagcttgttgtatatgtcctcctcatggaagggtgtcatcatcagatgcaaatgcttttaatcacgaggcaagtcatttcct

SEQ ID NO: 47215 - DNA, 101 bp, Glycine max
cacaaggctggcatcaagctcgtcctagagttttgcaaatggaagcagcttcctctatggctctctcttccccgtcctcggctggctacggcgtgaagcta

SEQ ID NO: 47216 - DNA, 261 bp, Glycine max
gtaacaattcctcaatacttatttcttcttggacttaaatatacgtctgccacattctcatgtgcgttcctcaacatggtgcctgtatttacgttcattatggcagtgccatttgggtaagttaaacaaaaggatattaaattgattgtggaatacaagaacaataatttttatcctttgggttgaaattttactaggatagagaaggtgaacgtgcaaagcaagagtggtaaagccaaagtcatgggaacttttgtgtgc

SEQ ID NO: 47217 - DNA, 243 bp, Glycine max
ctgccaccttgagcaatctatgactttttctatttgtagtctgaaatacaacccagctagtggtgaagactcagaaatgcactttgtccgcttgctggatgaccagacttttgagctcatatcaatgagtatggttgcttcataattagctgctccttctcagatgacaataatgtgtattactgtgttggaactgcatatggactgccagaggaaaatgaaccaaccagagtaagttgagaa

SEQ ID NO: 47218 - DNA, 255 bp, Glycine max
catagccgcgcacctgcccaagagaactgacaacgacatcaagaactactggaacaccaacatcaagaaaggactcatcggaaagggcttagatccccttacctacaaaccaataaaatccaacacttttcaagcctatggtggtaatttccttgacccttccattgacaccaccaatatgaaccatgtggctcaatcggagagtgctcaaatcgaagccgaagcaagagaatctatgttgcaatttggatctct

SEQ ID NO: 47219 - DNA, 207 bp, Glycine max
cggctcgagtgctgtaacttgttccatagcagcgatcggaatcgatcttatcgctgggggtaagaggcacagaggaatagaaccgtagcactatcgactgacatcgacctcaaagtacttgtgaagctctatgcggtcattgttcgcaggactggcagcaatttcaatgctgttataatcaagcgcttgttcatgagcaacgttaac

SEQ ID NO: 47220 - DNA, 253 bp, Glycine max
caacacttccgaaccttgcattgtatctacccacttctcaaccaacaatggcaatggcaacccaagcctctctcttcaccctactcctctccggtctcaaacccagcgaccgagccaccgcgccatggaaacaatcctccaccctctccttctccacctcgaagcccctcaagttctcgcgaacaatcagagcagcagccaccgaccagaccacagaggcaccggttgggttcaccccaccggaactggaccc

SEQ ID NO: 47221 - DNA, 251 bp, Glycine max
tttaagttgacaaaaggcttcgcagcaaaagagtcagtgaagggacatatggtgaatgtagtaaaaggattgaagttatatgaggacattttcactgattcagaactgtgcaagctaacagattttgtgaatgagatccatgctgctggccagaatggggaactgtcaggtgaaacttttatattattcaacaagcagatgaaagggaacaagagagagctgattcaactgggtgttccaatatttggaca

SEQ ID NO: 47222 - DNA, 259 bp, Glycine max
ctgaagcagggtgttactactgtcttgaagtctgttttttgtggagcaccaatggctttattcatggcagttcttggtgttgttgccttggtgctctgtttttgctctgctctcttgaagtggaatgaattgaggtataggaggaaaggtttgcctcaaggcacaatggggtggcctgtttttggggagacaactgagtttcttaagcaaggtccaagcttcatgaagaacaagagggcaaggtatggcagttttttca

SEQ ID NO: 47223 - DNA, 242 bp, Glycine max
caactcttcaaaagggagaagaaaaggaaagaaaactctcaaaaaactattatagcaatggcagaacaaaaccaaaaccaaacaactgaagctggaaggcaccaagaggttggtcacaagagccttctccagagtgatgctctttaccagtatattctggcgacaagtgtctacccaagagaacctgaatccatgaaagacctgagagtgttgacagcaaaacacccatggaacatcatgac

SEQ ID NO: 47224 - DNA, 243 bp, Glycine max
atcccctatgatcagatatgaactcagtagagtgtcagcaatcttatttgttgcaatgggtacaagaaaactgcaatgccctttggaagctagatcagggcttctccaagcatggtttggacctatgctgttggactttggttggctgcagagatgcagaaaagggcttgatatgaggaccttggaagaggctatggggcagacacttcttactctacctttaaagcagcagtatgtgctgtt

SEQ ID NO: 47225 - DNA, 249 bp, Glycine max
caaatattttttcacttgctctccatcttttttcagttcatcagtggccaggtaggccatgggaagggctccatgttgtgacaaatccaatgtgaaaagagggccttggtctcctgatgaagatgccaccctcaaaaactacgttgagaaacatggcacaggtggtaactggatagctctccccaaaaaagcaggccttaagcgttgtgggaagagctgtcgtctaagatggctaaactatctcaggcc

SEQ ID NO: 47226 - DNA, 260 bp, Glycine max
gagtgatcggtgttcacttgatctcatcataatcgtcagcgtcaattgtagaagctgccgatcagaaacatcgccgtcggactgcctgaagaggcgtctctccccgtcacgttgacggcggctttggctgagttcatctcaaccttcatcttcgtgttcgccggctcaggctccggcatcgcctacaacaagctcagcgacaacggcgctgccagccctgccggcctcatctccgcctccatcggccatgcattcgccct

SEQ ID NO: 47227 - DNA, 258 bp, Glycine max
gatcaacaaggtttactactcttgcttggtgaaggctatgcctaaatcgaatattccttcagagcctgagcggaatctggaccagatcatatataaaataaagcttcctggaccagcgattttgggtgagggtaagcccgaaaatcagaatcatgccataattttcacacgtggagagggcttgcaaacaatagatatgaaccaggataactacatggaagaagctttgaaaatgagaaatttgttgcaagaatttct

SEQ ID NO: 47228 - DNA, 245 bp, Glycine max
atcttgtacaagctaggatcaatccagaagatgcgtatgctggtacttacactcattgtgaaatccacccatcactgattttcggtgtatgtgcttccatcataccatttccttatcacaatcagtccccacgtaatacttaataatccgcaatgggaaagcaagcaatgggaatatatgttaccaactaccagtttcgaatggataccttggcctatgttttatattatccacaaaagccactg

SEQ ID NO: 47229 - DNA, 250 bp, Glycine max
gaaaatgagtccaaaaataacacctatagatacggagcaagatcttatgaatttaatgggagctatttttgctgctgttttctttcttggaggctccaacacttccactgttcaacccatagttgcaattgaaagaacagtcttctaccgtgaaagagcagctggaatgtactcagctctaccttatgcaattgctcaggtggcaatagaatgtatttatgttgcaatccagacatttacttcagtctta

SEQ ID NO: 47230 - DNA, 249 bp, Glycine max
gcaagatggaagtgcttcccacttcttccatagagcaatcaccgattacaacaccgaaacccgaaagcgccgaaaaatactagggcaagattttggtgatgtccgctggcacaagactggaagaactaaaccagttgtctttaatgggattcaaaaaggctgtaaaaagattatggttttgtatgttagcaatgtaaggggaggaagagctgagaaaactaattgggttatgcatcatatcacctagga

SEQ ID NO: 47231 - DNA, 257 bp, Glycine max
gcaaacatagcggtccctatcttgaaatagtcaattcctccatcccagcagcatgtcaacatgtctcagaagttgcagcataccgtctcatattccttgactccaattcagtcttctatggcagcctctatgttggtgacgtagccaactctcgcattaggccagcgctgaggatcctcaagcaaaacatcacgctgatgactacacttgtggcagatagagctcaagcacttgcaatgaaggaatgatgaaggcat

SEQ ID NO: 47232 - DNA, 246 bp, Glycine max
ttctttgccagcagggaatctcaatgaggaagaatgggtaactgtgtatggattttcccccggtgatactaacatggtgttaagggagtttgaaaaatgcggtgaaattttgaaacatgttcctggtcctagagatgctaactgggtgcacattttgtatcagaatcgatctgatgcccataaagctctcaacaagaatggaatgcaaattaatggagtactaattgttggtgtaaactgttggat

SEQ ID NO: 47233 - DNA, 269 bp, Glycine max
gtcaaacataacaggatgcatcagattcatggggtttgtctgtgagcttcctaagcataatcttgctgccgatagttggcaatgcagctgaacatgcaggagcaattatatttgccttcaagaacaagctggtgagaactgagagagtgataatattatcatattggccaagcaataaatttatttaattaaaatgttaatttagttaaactaaagtaattccttgaacacaggacatctcattgggtgttgcattaggttcagcaact

SEQ ID NO: 47234 - DNA, 265 bp, Glycine max
aataacccacgcaaaaaccttaaattgcccattaaaactgaaaccccttttgttttttgccttagattacaactgcaaaagggtcacagcttctcgggtttgtttccttttgagaccacattcaattttttgatgtgaatcctcacaacaatgtctgggttggaggaattgagaaaaaagcttgcacctttatttgatgccgagaaggggttctcatcaagttcaacgttggacccttgtgattcttacacattctcggatggtg

SEQ ID NO: 47235 - DNA, 262 bp, Glycine max
gaaaaatagaaaagcgaggagccaggtgatgctaatgtgaaaagaggagcagaatctcggccatgtccacgtcaccgtccggcagtaccctcggtaaggccacggcggtgatgaagagcctcaacttctacctttcagatcaccccgcaatcgtgactttcagatggagtcacgacctatgctggggttccacctggtccttcctcttctcctcaatcgcctcttacgtcgtcgtttcgatcttcctccacctcacattagc

SEQ ID NO: 47236 - DNA, 273 bp, Glycine max
ttctgcagttggtgactgcttatatctataatagatgacttgaactatccggaaaaggcagacacatactatattggtaatgcaccatatgtattctcagcgtgttggaaggtttgtgcataccttctgatgtttgaagagtttggactgcttcacttgcatccttaatttcataaacatcgttcagatcccaagatgaacagctcaaatatcttttcttcaataatatgtggaaggttgtgaagcctcttttgcaataaagaaccaggagaa

SEQ ID NO: 47237 - DNA, 257 bp, Glycine max
ggaaagcaaaacatgcctacacagcataaatcagaagaagcataaaaaaatagcaacacgcaacacattctcaacaaaagaagcaaagcatgtgcacggttacacaaatggaatacgttgaccatttctttgcctccaaaatccataacgttacttctctcatcttccatggataaaacagtgaggttgtgggatttggaaactaagtcgtgcttgaaattctttgcacataatgactatgtgacctgcgtgcagtt

SEQ ID NO: 47238 - DNA, 261 bp, Glycine max
ctcactgggatggggtgcagtgctagtctcatttccttggacatcataaggtacattttcaagtcacaaaagaacaagattgctcttttggtgacttccgagtctctaagtccaaactggtacaatggcaacgacagatcaatgtttctcgccaactgtttgttcaggacgggtggatgtgtcattctcttgacaaacaaaaggtccttgaagcaaagggccatgttcaagttgaagtgcttggtgaggactcatcatggt

SEQ ID NO: 47239 - DNA, 260 bp, Glycine max
gtccgcggcaagatatccaagtccattcgacaggccttggaccagcccctgaattacgccagaatatacctggccgataccataccagaaaacgtgaaacgtgtgatatattaggactctgacctggtggtggttgacgacatagccaagctttatggtgttgatatgaaaggaaaagtcgtggctgcgccggaatattgtcatgcaaacttcacgctgtatttcacggataatttttggtcggacccggttcttgccaa

SEQ ID NO: 47240 - DNA, 255 bp, Glycine max
gaaagagaagcattagcaaaagcaagaagaactagtctaagcagaaatggcctcttcagtgatggcatctgtggccctcaaacctgcccctttcactgttgagaagtcctcagttagaggccttccctccctctcaaggaactcctcttcattcagagttgtggccagtggtggcaagaagatcaagactgacaagccttatggaattaatggtggcatggctttgagggaaggagttgatgcatctggcaggaa

SEQ ID NO: 47241 - DNA, 259 bp, Glycine max
ccgccattttccgatcatcaaatcaaatcctctttatttatttattttggcttaatttacaaaaaaaaataataacaaatggttctatgagactcacgaatacgcatgcgatggatctagaaggtggaacaactcgtcgaaactccgttaagagagagtcgtggagaacggttgtgcatctggcgtaccagagtttaggagtggtgtacggtgatttgagcatttcgccgttgtacgttttcagaagcacgtttgcgga

SEQ ID NO: 47242 - DNA, 255 bp, Glycine max
gccaactagaggaccctaagactcagagatcaggctggcagcttgtatttgttgaccgggagaatgatgttcttcttcttggtgatgatccttggcaggagtttgtgaacaatgtgtggtacataaaaatactatctccactagaagtgcaacaaatgggcaaaggtcttagtccttctacttctgccccaggtaacaaactttctactcctgccaactcttgtgataattatgtgagtcaacaagagttgagaa

SEQ ID NO: 47243 - DNA, 257 bp, Glycine max
gcaaaatgaaaggcagtggaaatgtgccaaaacaagtggcactgtgatttgtgaccacaacaaatgcatagttcattttatggttcagaccaatcaacccgtagactccttataagtgcgcagaagttcaagtgtagagaatgagtcagcctaagattaaacgccgagttggtaaatacgaggtggggaggaccattggtgaaggtacatttgcaaaggtgaaatttgcaaggaactctgagacaggagagcccgtg

SEQ ID NO: 47244 - DNA, 258 bp, Glycine max
cgccctccaagcataaaatttgcaggattagacatttccagcaacacttgaagtggtcaatcaatggccatgaagccctcaacttccacaagtgggtctggagagaagattagaaagccttatactattaccaaatctagggagagctggtctgaggaagagcacgacaagtttctcgaagctcttcaactatttgagcagtgattggaagaaaattgaagattttgttggttcaaaatcagttattcagattagaag

SEQ ID NO: 47245 - DNA, 249 bp, Glycine max
tggaaatatttggtccagaggcttctgggaaaacaactcttgctttgcatatgattgcggaagcacaaaagctaggaggctactgtgcctttgttgatgctgagcatgcacttgataagacacttgcagagtcaattggtgtagatactaagaacttgcttctctcacaacccgattgtggtgaacaagcacttagccttgtggataccttaatccggagtggttcagttgatgcaattgttgttgata

SEQ ID NO: 47246 - DNA, 256 bp, Glycine max
tgagcagccaaacactctctctctgtctcgcgaaaattctcagttggcagactgtatccgagtcacctcgaggtaagcgtatgtctacgatcatctgctgtgtgacatcgaaggtaatcactacactcacgctgctatcatcggccaagacggcagcgtttggcgcccagagtaccgacttccctcagttcaaacctgaggagataactgccatcatgaatgactttaatgagcctggatcacttgctccaactgg

SEQ ID NO: 47247 - DNA, 208 bp, Glycine max
ggagactaccctctttcggccaccataatgtctgagtattctaataagatgactcgaggtgcctttatagctgcagtgtttgccatgcagggttttggaattttggcaggaggtgtgtttgctattatcatagcatctgtgttcaagtccaagtttgattctacaccatatacgaatcaaacgttgggttcgactgttccacacaaca

SEQ ID NO: 47248 - DNA, 229 bp, Glycine max
tccacattgccttgacaaatggagagatgcaagagagtgtatttatgtggagccagatcaaagtaccgagagcaaaggtgacattttggtacaacaataagttgtgatgattaatgtagccgaggcttctttgaactttcccttgtgactgtttagtatcatggttgcttattgggaataattttgttgaaaaaaaaaacaaaacaaaaaagaaaaaaatataaagaaa

SEQ ID NO: 47249 - DNA, 243 bp, Glycine max
ggaaggagtcgaggccggaattcaatcccttgcaggcggcggcacgccgaacgagttcgtcataatcgacgacggctggcagtcggtgggcggtgacgacaagaactcaaattcgttgcagaggctaactggaataaaagagaacgcgaagttccagaagaaggaggagccagaattagggattaagaacatcgtggagatagcgaagaagaagcattcggtgaaaaacgtgtacgtatggca

SEQ ID NO: 47250 - DNA, 233 bp, Glycine max
gaacttcatggccatggccatacttgtgatcactatgattgtgaacatctgcatacagtttgtcactggtgttatttatttgttctgggtggaacatgctgtcatcatgctcatcatgctaattttgttgatgaccatggcctcctcagccataagtcttccaaagatgaaacactactttgagctgaagtataagatgaatgaagaggcacttaaagagggttccaaaacta

SEQ ID NO: 47251 - DNA, 231 bp, Glycine max
ggccaattactgtggaggaactaagccaaccaccagaagggtacccttcatccaaagtagttcttactggccttgaagcagagtcattgatgtttatttcagtaccctttggtgaagacaacataacattctatgatcgcataactagtgccttgagagaaagtgatgctatagccattagaacaagtagggaaattgagggtaacttttgtgactacattgcatcacagt

SEQ ID NO: 47252 - DNA, 264 bp, Glycine max
cttttcctcttcctcccattgaagcattttttcacaagcccgtgattttttcgctatctccatcatcaaatgatccgatgctgctagatcgaatttgacaaaacccacttcgtgtctgatcgaagcaacaactgggttctgtctgaattttgagataagatggaatcggatcttggcaagctcttcattgggggaatatcttgggacactgatgaggaacgtctaaaggaatattttgggaaatatggggaggtgatagagact

SEQ ID NO: 47253 - DNA, 254 bp, Glycine max
gaaagagaagcattagcaaaagcaagaagaactagtctaagcagaaatggcctcttcagtgatggcatctgtggccctcaaacctgcccctttcactgttgagaagtcctcagttagaggccttccctccctctcaaggaactcctcttcattcagagttgtggccagtggtggcaagaagatcaagactgacaagccttatggaattaatggtggcatggctttgagggaaggagttgatgcatctggcagga

SEQ ID NO: 47254 - DNA, 256 bp, Glycine max
gaagattttcaggtgtctgagggatctggtgatgaagcagaagcttctgcaccaccttcttttccagaacttgaattgaaaattaaggacttcattgagtcccttgggggtgcagtcttccctaagctgaattggagtgccccgaaagattcagcttggataagcacctctggtacccttcgatgcatcagtttcagtgagattgcacttttatttcgagcatctgactcattggtccatgatttgtgccatgctt

SEQ ID NO: 47255 - DNA, 247 bp, Glycine max
cagtcggagaggggggatcgggatagagcggcgccggcgccgtcgttgcaccggtcgctgacttcgacggcggcgagtaaggtgaagaaggcgctagggctcaaaacgaagtcgtcgtcgatggggagtagcaagcgtgcggcgacgacggtggagttggtgagagtgcagatgaggatttcagagcagagtgataccagaattagaaaagcattgctcagaattgctgcatgtcagcttggaagac

SEQ ID NO: 47256 - DNA, 253 bp, Glycine max
cctctctctctttctctttctctctcatccagatcttgcaaaaagcaaaagacccaatggcatcgagcgcgcccactccaggcgaagagttcgtgtacatggcgacctgtcgaaacaggccagtcgctacgcggagatggtggagttcttggagacggtctccgcctccgccgaaaccgaggacctgaccgtggagaagcgaaacttcctctccgtcgcctaaaagaacgtaatcgctgctctctgcgcctcc

SEQ ID NO: 47257 - DNA, 246 bp, Glycine max
cgaagagtataaaaaagaaattcttcgttacatgtactatcaccagaatgaagatggaggatggggactacacattgagggtcacagcgacatgttttgtactgcactaaactatatatgtatgcgagttcttggagaaggccctaatggaggtcatgacaatgcttgtgctagagcaagaaaatggattcatgatcatggtggtgtaacacacataccatcatggggaaaaacttggctttcgat

SEQ ID NO: 47258 - DNA, 212 bp, Glycine max
gcattgccaatggatgggcctcaagtgtctggtgtccacgtacaatggagtcaggaggcgcatctcgtggcccattagcagagacgaggtttggatcagtaatgtgctccatacgcgtctagtcgaggatagaggaggtcgtgattggctgtcagtgaagagggctgaatttggatttcctggtggaggtactcaatgtatacatggtgcag

SEQ ID NO: 47259 - DNA, 258 bp, Glycine max
tgtgattatccaattaaagcagttcacaaggctgcaatgcttgcatatcattgcttgaaccgcaacccgaaagcaaggcctctaatgcgagatattgtggattcattggagcctttgcaggcacacacagaggtccctattggaaaaacattgaccataatcagtgaggttcctgaatctggtttgaaaatgaaagatgatgcaatatgacttaaatgagggtggtgttgtaggcttatcagtttcacttcttgttag

SEQ ID NO: 47260 - DNA, 268 bp, Glycine max
gctcgaggtctttcgccgcaatttcgaagatccaatttctttcattgctttcattgttcttttgtctgtgattcgaaggaaagggactgtgacgatttctgtgattaggtctcgttcgtcgtaattggcctaaccggccttgccgaccatcctgctatatcaccacccatattctgagtcccttttctcatccaattctttttcttgtatcttttttcaattttaaattgttcttcgctgtcagtattggttgtgtggtatcagattc

SEQ ID NO: 47261 - DNA, 256 bp, Glycine max
gagaattcgttttctctcctctgtgtctgtcgtctaaagcttaattccgatggggactccggaattccctgatctcggcaagcattgctctgtttcttattgcaagcagcttgatttcttgcccttcacatgcgatcgctgtaatcagatatattgtttggagcaccgaggttatattaaacataaatgcacaaaggccaacaaacatgatgtcacagttgccatatgccctctttgtgccaaaggagttcgcctc

SEQ ID NO: 47262 - DNA, 257 bp, Glycine max
ggatgaagctcgttgcgccgagaagtatagagagatatgggccgagtatcgtaaacttgttccatggagaatattgccttacgtttattaggatgaaaaaaaaaagggcttcaccatgaattcttcatcccttctctctctccagattaacagaagcaagctcatcctagagttttaaaaatggcagcagcctcctccatggctctctcttccccatccttggctggcaaggccgtgaagctgggcccatcagcccc

SEQ ID NO: 47263 - DNA, 251 bp, Glycine max
caacatgataaacatggacgacacatgcgaacttgttgccaacaataatgttggttttccaactgatgcagctaataacggtatccataaaccttctttgttgggtgccaataagaccacccttggccaccacgttgcacggcgtctagttgaaatcggtatcaaagacgtattcaccgtccctggagatttcaaccttatccttcttgattacttagtagcggaacctgagcttaacctcataggttgct

SEQ ID NO: 47264 - DNA, 247 bp, Glycine max
caaaaagcagggaaaaaagcaaaatgactctggtttgaaaaaagctgtcttgttaagtggaactcctggtataggaaaaacaacttcagcaaagttggtctgccaggagcttggtttccaagccatagaggtaaatgctagtgacagccgtggaaaagctgatagcaaaattgaaaaaggaattagtggaagcaaaacaaattccgttaaggaacttgtaaccaacgaggccattagtgttaatatg

SEQ ID NO: 47265 - DNA, 287 bp, Glycine max
gttcagcacaccggtggaggaagaggaaacggtcgagttttgttgggatttgatcactgcaatatcaatagccaatgttcatagattccacatattctggcccatcttccatgagtaccttctttcagttgctcagtttcccatgttctccccaatcccatttgtagaaaaaggtattttaggccttctcaaggtctgtctcaagctcttttctgcaccaagagacgaaaaacaagccgaggaacttattttcaagtccgtaaacttaatgtggaagcttgatatag

SEQ ID NO: 47266 - DNA, 281 bp, Glycine max
cacttgccttatttttggttttgagattgagctaaaggccaactcaaccatcgaatttgttggtgattgaaagagaaggaagaagaagcaggaaatggaagcagtgagagctggtcgagaaggagcaataggtctaggtcaaggtgatggcgtagcaaggacagcactgagactgaactcaccaaaatccgtctcctcagggcaattgttgaaacccgtgatccctcttccaaggtaaaccacactattcttgtgcctcaacctctataggtcaattagtc

SEQ ID NO: 47267 - DNA, 274 bp, Glycine max
tttgctattgctgttactattgttgttgtggctgttcctgaaggtttacctttagctgtaacattaagccttgcttttgcaatgaaaaagatgatgaatgataaggcacttgttcgtcacttggctgcttgtgagacaatgggatctgccactactatctgcagtgacaagactggcacactaactactaaccatatgactgttgtaaaagcttatatatgtgggaagattaaagaagtaaatggttctaaggtctactctgatttctcatctg

SEQ ID NO: 47268 - DNA, 281 bp, Glycine max
ctagatgaggacaagaagaagaaagatttgaggaatgaatcactccaattggcttcaaaggaacaaaagatagctgatgagaatgtcttgaggcttgttgaagagcaaaagcgagagcgagaggaggcctataacaagatacttcagttggaaaaacagttagatgccaaacaaaagttggtaatggaaattgaagagttaaaagggaaattgcaagttatgaagcatcttggagatgaagatgacgcagctgttcagaatgcaatagaggagatgaatgt

SEQ ID NO: 47269 - DNA, 265 bp, Glycine max
aatctccatactgtctgatgctggtcttggaatggctatgttcagcttgggtctgttcatggctcttcaacctaagataattgcatgtgggaactctgttgcaacatttgccatggctgttcggttcctcacaggtccgccgtcatggcagcagcttccatcgctgttggcctacgtggcaccctcttgcgtatagctattgttcaggctgcactaccacaagggattgttccatttgtgtttgccaaggagtacaacgtccatc

SEQ ID NO: 47270 - DNA, 263 bp, Glycine max
caaccttattcaatgactggttttggttctttaacggaaaacctgttggtttgatctccaagaaatcttctatctcatgtaaatcaacaggagcaaataatactttctaaagagctctctgggctacaaccagaacagctcgccatgctcggcgtcgccaaggaccttggcgacgccgtcggcttcatgacgggcctgctctgcgagattttgcccatctggggcgcgcttctcgtcggcgctgctttgaacgtcgtgggata

SEQ ID NO: 47271 - DNA, 277 bp, Glycine max
gggaaaggtgattttccaatggattgtccccttcatgacagtctgcttcgcgttcattacaagggtactgttctcaatgaagaaaagagggtattctatgatacaagggtagacaatgatggtcagccattggagttctgttctggagaagggcttgtaccagagggatttgaaatgagtgttcgtttgatgcttcctggagagatagctcttgtcacatgccctcctgactatgcttatgataagtttccgaggccattaaatgtccctgagggtg

SEQ ID NO: 47272 - DNA, 274 bp, Glycine max
catattttccaagccttcacttagttttatgcaagtgtggtttttgcgagactagaaaacaatcacttagagaatgggaacgacacacaggttccaaatttagaaattggaggacaagtgttctggtgaaaggatccattctatcgctggaaaaatggatgctgcaagtggctgagtttcatgctaatgctgtagtttctgtgaaacctaaaaagccttcctttaaagaaaggaaacagaagttgcttacctttctacaagagaagtatgaacc

SEQ ID NO: 47273 - DNA, 255 bp, Glycine max
aaggcatctcaggttcctccgcagcagcatataccatctggagaagttgttggtaattcagcatcaactgcatcgcagactaaggctagaatgcgttggactccagaacttcacgaggcctttgtggaagcagttaatcaccttggtggtagttagaaggctactccaaagggtgtgttgaatcaaatggaagttgaacaggctacctatctatcatgtaaaaagccacttgcagaagtatagatctgccatata

SEQ ID NO: 47274 - DNA, 248 bp, Glycine max
tggcactggagaaagtggctgcgtctttggaacttccctgtaaatatcaaggttttgggtgcatcggtatatatccatattacagcaagctaaaacatgaatcgcaatgtgcacatagaccttacaactgtccatatgctggttcggaatgctctattatgggtgacataccctacctggtggcccatctgaaagatgaccataaagtggacatgcacaatggtagcacttttaatcatcgctacgtc

SEQ ID NO: 47275 - DNA, 250 bp, Glycine max
aagattttgtccaattgaacttgtaaaaatgactgggataaacttaagaatccaattattgaaattgaataagtaaacaatttaattggattggtccaatggtatcaaaaaaatggagtactaactcccatttgttatttattattgagttaaccgatcagcttgctttgttgtcgaacatgtctttttgatttcagagattttccggaaaaaatttgaatctatggctatatgcgaatcaatcctacta

SEQ ID NO: 47276 - DNA, 253 bp, Glycine max
tgagattttgctgctctttgaagaagggtgtttgcttgattttggagatgtcgctgctctcagatctcatcaaccttaacctctcagacactactgagaaggtgatcgcagagtacatatggatcggtggatcaggaatggacctgaggagcaaagcaaggactctcccaggaccagttagcgacccttcaaagcgtcccaagtggaactatgatggttccagcacaggccaagctcctggagaagacagtga

SEQ ID NO: 47277 - DNA, 247 bp, Glycine max
tgaagtttgtggggggtgaaactgcagcattgagcagagtatatgaatacttttgggaagaaggacttgctggagggtatatagaagagaccaggaatgtggatatgtggggcctgattattctaccaaattctcaccatggcttgcctcaggagatttgtctcctcgtttcatatatgaagaggtgaagagataggagaatgatagactagcaaatagttctacctactgggttttgttcgagttg

SEQ ID NO: 47278 - DNA, 165 bp, Glycine max
ggcaagagcagcgccgacgattggcagagggtgtcttctgagcgcagggcatccatcgggaagcagatggctgatgctgggatcaagtacatccccagcaacactttctctcactatgaccaggtgctcgacgccgccgccaccctcggtgccgttccaccaagg

SEQ ID NO: 47279 - DNA, 230 bp, Glycine max
tattattctgagtgtggtgcaagccacctatgtactatttttcctttacttatgcaaaagctacctttgtactatttttcctttacttctgcacaagctaccttcgttttgcaggtacatgggtacaataactggcataagtgacctggatcctgttcgttggccgaattctcattggcgatctgttaaggttggttgggacgaatcaaccgctggagagagacagcccg

SEQ ID NO: 47280 - DNA, 253 bp, Glycine max
ccatagtgacgaacctcatgttcttgactacagtaaatatcctggtctggaggagcgtcaaaggtttgtttataattatttgagttctgaaggttagtccactaaaatcttactcccacataccactgaaaatacatattattggcagagatctggatttaggtaactgctattgatctattctcagctgaaagaataaacttgctctacaatttggttgatttgtgatatcactccagcttatatttttagt

SEQ ID NO: 47281 - DNA, 245 bp, Glycine max
ccgttctctactgtccgatctgactcactgagttgctttctctgctcgactcggatgagttagaccggaagatcgcgccgcattaatcgccatgtctgcaccagtgaatattattgtaggttctcatgtctggattgaagatccagcacaagcatggattgatggagaagtttctaaaatcaatggtgaagaagtccatgctcgcaccacagatgggaaagcagttgtcaaaaatatttcaaagg

SEQ ID NO: 47282 - DNA, 233 bp, Glycine max
ggattgtcatagtccaggacaaggtttgatgcctgctagttttaaggttaggacagttcctttggacggtgatgattctgcaacagaagaagttttggatcctgactttggagaggcagccattggtcgtgttgctccagttgattcaggattgtggtggattattttattacgagcatacggaaaatgctctggtgatctatcagttcaggagagagttgatgttcaaacag

SEQ ID NO: 47283 - DNA, 258 bp, Glycine max
gttcgttgtcactgcagtcgccaccgacaccagagctgtgggagaactcgcgggaatcgcggtgggagcgactgtgatgctcaatatactcatagcagggccagtatccgggggctcaatgaacccagtaagaacactaggtcctgctgtggcggcaaacaactacaaagccatatgggtctatctagtagctcccatacttggagctttagctggggcaggtacctacactgcagtgaagctgcctgaagaagatga

SEQ ID NO: 47284 - DNA, 255 bp, Glycine max
taataatcctgtttaattaactaaaggctagcttcataactcttcccctcaccccaccaaatcaccccctttagtttcctggtattcttcttccacgtaggtttaattttgaggacacaagagttttcaaagcatcattggtggtggattgaaagacttggtgagtgacatcgtacacatgggaagacactcttgttgctacaaacagaagttacggaaaggcctttggtctccagaggaagacgagaagcttct

SEQ ID NO: 47285 - DNA, 247 bp, Glycine max
aatgctactatttcaatccaggttcttcggcaagtaacggataatttcagtgagaagaacattttgggtaggggagggtttggggttgtttataaaggggaattgcatgatggaactcaaattgctgtaaagagaatggaatctgttgcaacagggagtaagggattgaatgagttccaagcagagattgcagttcttagtaaagttcggcacaggcatttggtcgcccttttagggtattgcatta

SEQ ID NO: 47286 - DNA, 264 bp, Glycine max
ggctaatccctcactcttgttcttcagtctcctcctattatccgccaccgtagccaccaccttctccgccttcaagacaaagttcggcaagacctacgccacgcaggaggagcacgaccaccgcttccgtatctcaagaacaacttgctccgcgccaagtcacaccagaaattggatccctccgccgtccacggcgtcaccaggttctccgatctcactccggcggagtttcgccgccagttcctcggcctgaagccgctccgc

SEQ ID NO: 47287 - DNA, 256 bp, Glycine max
cgggtatgggagctacattggacctcataatcttcacatgggtagacggacgaccaacttccttggccagcaagtcccggcaactgtttggcttcgcttggtagctggactgaatgctcggttgaggactgatggcatggatcaattcgtgcttcactaggtcctgttgttctctggatagatagtcatgcaaacccccaacttgagtttcatggagttaatattgagctatggatagttcccagctacagcttct

SEQ ID NO: 47288 - DNA, 263 bp, Glycine max
gggcaaccggggaccggttgaaggaaactcaggctatcaacaaaagtctctcctctttgagtgatgtcatattgcgttggcaaagaaacaggagcatgtaccctttaggaattcaaaattgacataccttctcagccatgtcttggtggggattccaaaactttgatgtttgtgaacatctcacctgatccatcttcaactggagagtcactttgctctcttcggtttgctgctggagtgaatgcctgcgagattggtatccc

SEQ ID NO: 47289 - DNA, 259 bp, Glycine max
cgtttttgttttcagaccaaaccctagctccgcatcgcaaccatgtcgaccaagcaaggtggaaaagctaagcctttgaagaaacccaagtctgataagaaggattacgacgaggttgacatggctaacattcagaagaaaaaggaagaggagaaggcgctaaaggagttgaaagccaaggcgcaacagaagggaagctttggaggttctgggctcaagaaaagtggaaagaaataagggctctttatcatgattgtat

SEQ ID NO: 47290 - DNA, 278 bp, Glycine max
cgctgatccagattgtatttccaacagaactagactacctccaccggcatggccaggccgcttccgccgaggccgtcaaccaactttgtgtcgtctttgtccgttacaaacttgttggaggcggcctcaaccatcttcttgcaaacaaggcaccaccgcagcctttgatgaggttgaggttggggtcgacctcgtcggcgtcgtcgatggtgagaccgaggacgaagagggggatgccgaggaagaggactttatcctctgtgcgcttggaggtaggg

SEQ ID NO: 47291 - DNA, 276 bp, Glycine max
cggctcgaggtttagaagaacaaagcttcccacctagctaggcctttctattgtagcactcaagtttctttcttcgtggaacttaagaaaatgaaggaaaaaatcagttggacagttgcagacgccgtggactataaaggcttccctgcagacaggtccaaaacaggtggttgggtacccgcagctcttattttagggattgaaatcgtggagaggctctccaccatggggattgcagtgaacctggtaacatacatgatctcaatcatgcatctg

SEQ ID NO: 47292 - DNA, 273 bp, Glycine max
cagaagccagattgcaatatgtagactttactgtgccatatgcagaatcaggattgtcaatgatagttacagaaaagtccaacgaatccacatggatgtttatgaagcccttcacctggcaaatgtgggtggcaactggggccgtttgacttacacaatggtagttgtgtggtacctggagcgggaaccaaatcctgagtttcaaggcaattggaaaagccaagtcagcactgctcttatgtttaccttctcctctctattctttgctcaaag

SEQ ID NO: 47293 - DNA, 280 bp, Glycine max
cattaacatgactctttatttataatgcaggagctattatagatgcacgagtcagaagtgcggtgtaaagaaaagggtggagaggtcattccaggacccaacaattgtgatcacaacatacgaagggcaacacaaccatcactgtccagcaactctgaggggcagtgctgcaagcatgttgtcatcaccttccttttttggttcctcttatatggcgtcaagcttaccccaagattttcttgctcagttggttccaagttatagccaaattaatgatcac

SEQ ID NO: 47294 - DNA, 275 bp, Glycine max
gctggaattgcattgaataagaactttgtgaagcttgtttcttggtacgacaacgagtggggatacagctcacgtgtcattgatcttcttgtattcgttgccaagaagtctctttaaggtgttacttcaaagtagcttgtcttacattattaccgtatgtttatgtttagctgcgatttagtgtcttgctcgagcaaaaaatgagaggtcctgaataaatcggtttctgaaaccagtggtgttacttgttggaggagcattagctcttttttgga

SEQ ID NO: 47295 - DNA, 289 bp, Glycine max
caagaatggcacttcgttgcttggtgatgtccctttctgttctcttcactcttggtcttgcgagagaaagccatgccagagacgaagatttttggcatgctgtttggccaaacactcccattccaagttcattgcgagatcttctaaagcctggccctgcaagtgttgaaatcgatgatcaccctatgcaaattgaagaaacacagtacccgaaaaccttcttctataaagaagaccttcatccaggcaaaacaatgaaagtacaattcagcaagcctcccttcaacaa

SEQ ID NO: 47296 - DNA, 283 bp, Glycine max
tatcaagctggacccttcttatgtcagagcctaaatcgtttggccacaatatatgtcaggttgggagaagcagaaaaagcactagattgcaatcagtcaatcccatatgttgattcaatacttgctttccaagctcaggctcttcaaaatcaccttaacaaatgcatagaagcacggaaagtcaatgcgtggagtgatatactaaaggaaacacagtttgcactatccttaggtgctgattcagctccacaggtctatgctttacaaactgaagcttgctgaa

SEQ ID NO: 47297 - DNA, 283 bp, Glycine max
caattatatataatctcctgctgactcgtctttttctttggaataatgatatactgtcaaaaaccatatataatctcctgctgacacatctttttcttttcttttctttatatcattttccttattagtttctttgtttactgcagtgacgagcttaggaaaattgttacttctgacctgagaaagttgttgggagcagagggggaaccaacatttgttaaccatttctattggagtaaaggctttcctttgtatggacgtaactatgggtcagttcttaagc

SEQ ID NO: 47298 - DNA, 276 bp, Glycine max
aaagtaggatacaaccctgacaagatccttttgttcctatctctggttttgagggagacaacatgattgagaggtccacaaaccttgactggtacaagggtccaactctgcttgatgcacttgaccagattagtgagcccaagaggccctctgacaagcccctcaggcttccccttcaggatgtgtacaagattggaggtattggaactgtgccagtgggacgtgttgagaccggtgtcttgaagcctggaatggtggtgacttttgaccaactgg

SEQ ID NO: 47299 - DNA, 273 bp, Glycine max
gcagcagagggagtagcggcattaaaaatgcagatcttcgtgaaaactctgacagggaagactataaccctcgaggtcgagagcagcgacaccatcgacaatgtcaaggccaagattcaagacaaggaaggcattcctccggatcagcagcgtttgattttcgccggaaagcagcttgaagatggaaggaccctggccgattacaacatccagaaggaatcaacccttcatctcgtcctcaggcttcgtggtggcatcattgagccttccctc

SEQ ID NO: 47300 - DNA, 260 bp, Glycine max
gcatttctatttctaactaattattgtgcttattattattgttgagaaagcaacgcatggcaaagttaataaaattctttgagttgaacacaggggccaagattccttctgttgggttaggcacttggcaagctgagcctggtgttgtcgccaaagctgtcaccacagccattctggttggctacaggcatattgattgtgctcaagcgtataacaatcaagcagagattggttctgctcttcggaagctttttgatgat

SEQ ID NO: 47301 - DNA, 253 bp, Glycine max
gcaccgtggcggaattttcatgtagtggcctagcttgagatctgacaagaaagagcgagcatggacggtgctgattctcccataaatcttgaagagcaagtttgcaattggttttccaggaaggacatacccaatcatgaactgtgctataatgtcatatccaggttgctgcaaggtgaccacaaaaaaaaaaaaaaagtgttaaaatgttaaccctctattgcttcccattttgcatcaaaataataggggg

SEQ ID NO: 47302 - DNA, 261 bp, Glycine max
gcaattggcttgatgggaattcgtgcatgttaaaattcatatatagttgcaatggctcgattttcattggatgcgatatcagacactggtgcctttgtgcgatctgcttccacattcagaaattggatttcgcgggacctgaattcgcaatttccaccagaatcagggcggtatcatctctatgtatcatatgcttgtccttgggcttccaggtgccttgcttacttgaatattaaaggacttaacaaagctatcagtttc

SEQ ID NO: 47303 - DNA, 253 bp, Glycine max
attatcatcatttgttcattccgcttctaccgagttgtcaccacccaccggactcagtgaatcaccataatgggaaactgcagctcctccgattcgactcaggttgccacggcgaagtctgtgctgcaagatgggaggctgcaggagttctcgtacccggttaaggtttcgttcctcttgcagaagtatcccgcgtgcttcatatgcaactccgacgaaatggaattcggcgacgtcgtttcggccatcgacg

SEQ ID NO: 47304 - DNA, 254 bp, Glycine max
gggtatgagtctccactaccctggcctgaaagcaaattgaagatattgtacaagaatgttgcacacccgaaactagctgcatacgtaaaaaggcataattggttgatggagtctggagagtatcttacttttccccaaaaccaatctgagttcaagggagggattcttcactatcttgagtccattgaagagatggtaccagacattgaatggggtaaaaatattcgtgttgtcctggacattggatgtacaga

SEQ ID NO: 47305 - DNA, 255 bp, Glycine max
ctagaatatgctctcacacattatggctccatgaagcacacgtccggatacgattcaatagaaagtctgaccctactggtagtggtagcacacgttctgtagctggtctaacttcgtaggtcgccgaaagatacctacaggagcattactccaaggaaggacatgcttcttcatgtttccttgtggtggatgcccgtacacggatttgtcgtgggtatgcttctgtaacaatggtctctgctgaagatgcggacg

SEQ ID NO: 47306 - DNA, 267 bp, Glycine max
gagtagcggcattaaaaatgcagatcttcgtgaatactctgacagggaagactataaccctcgaggtcgagagcagcgacaccatcgacaatgtcaaggccaagattcaagacaaggaaggcattcctccggatcagcagcgtttgattttcgccggaaagcagcttgaagatggaaggacccaggccgattacaacatccagaaggaatcaacccttcatctcgtcctcaggcttcgtggtggcatcatgagcctccctcatggtt

SEQ ID NO: 47307 - DNA, 207 bp, Glycine max
ctttgttgtgagctataagctagtttatcgtgaggagaatatgaagtcgtatgtgttctttgttgctgcagtaggtttggtagcatggccatgacatggtgcagggtaccaaagggtccctctccgagtgacaactggctatagagagcgttcatcggaggtaaattccccaatgctcaggcttgctctggaacgacacaatatccg

SEQ ID NO: 47308 - DNA, 240 bp, Glycine max
ttcagtgagagatcgttgttcacttgatcttatcataatcgacagcgtcaattgatgaacatgctgatcagacacatcgccgtcggaaagtctgaagaagtgactcatcccgacacgttgaaggaggctttggctgagttcatctcaaccttcatcttcgtgttcgccggattaggctcctgcatcgcctacaacaagctcatcgacaacggcgctgactatcctgccggcctcatctcc

SEQ ID NO: 47309 - DNA, 265 bp, Glycine max
ctcttcttctcttgcggcttgggttttagcgcagttcttctagatttaaggaagatgagtaaggaaaaggttcaactcagtattgtggttattggccatgttgactctggcaatgtcactaccactggccacctgatctacaagcttggaggcattgacaagcgtgttattgagagatttgagaaggaagctgctgagatgaacaagaggtctttcaagtatgcctgggtgcttgataagcttaaggctgagcgtgaaagaggaa

SEQ ID NO: 47310 - DNA, 223 bp, Glycine max
aaaataaaacacaccctctacgtgtccacactctatgatcacacaacaccagattaattaaatctctatatataaaccccttcaggcaatccactatgaagggcaaaaccatttttcataagatgaaggaaaaagttttgggatcatctgatgccgattcaggtaaagggaagatcaagatgaagaagcacataggtcatggagttcacttggttaagggaag

SEQ ID NO: 47311 - DNA, 247 bp, Glycine max
cctttgttgtttcttgtggttttggagtctgcagcaatgtggggttcgatggtcggggaagcgcgtagggcagcgtgcaactggaactgggtttcgctccgaagcatgggtggcggtcccagaacctttctcggcggagtgaacaagtggaagtagaaccgcatgcacgaaaagctctacagagactggcagaacagaatcataccacgagagaagcagctctagccagctccgattcggtcccaca

SEQ ID NO: 47312 - DNA, 264 bp, Glycine max
gtactcaccctcattaccaacacgaaagcatagccaaaaccttttttcgaagtctctgattttcctaatggctccggcaaaggcagagaagaagccggcggagaagaagccagcggcggagaaggcaccggcggagaagaagccgaagggctagaagaagatctcgaaggaaggagggagcgagaagaagaagaagcgcacgaagaagagcgtggagacctacaagatctacatcttcaaggtcctcaagcaggttcaccccga

SEQ ID NO: 47313 - DNA, 258 bp, Glycine max
gctagacataataagatgaaaatgaaagtgcttgttttgtttgttgctacagttttggtagcatatgaatgccatggctcagactaccagaagttccctctccaaatgacaactgggtttggtgggcaatacagcaatgaggtggcatgtgccagttggaggcttggcgtggaagcaaacaacgtagtcaagtggcaaactcttcctgcagcttgcggagagtacatagctgactacgttctaggagaccaatataga

SEQ ID NO: 47314 - DNA, 133 bp, Glycine max
tataagtgagtttatcgtcaggtgaatatgaagttgcttgttttatttgttgatgcagtaattttggtagcatggtaatgccatggcgcagactagcaaaggttacgtctgcgaatgaaaactggatatggtg

SEQ ID NO: 47315 - DNA, 155 bp, Glycine max
tcaacttcatgctacacactatcgttcttccaagtgccaaccacgcttatctctgaagtcatcggcaaggtcgagatcggaatcaacggatttggaagaattggccgtttggttgccagactcgctctgcaaagagacgatgtggagctcgttgc

SEQ ID NO: 47316 - DNA, 155 bp, Glycine max
gctggaattgcattgaataagaactttgtgaagcttgtctcttggtacgacaacgagtggggatacagctcacgtgtcattgatcttgcttgtattcgttgccaagaagtctctttaaggtgttacttcaaagtagtatgtcttcacattattag

SEQ ID NO: 47317 - DNA, 147 bp, Glycine max
tttaaggttaaggcgtagatcaatgttatgttggttgggcatgtggactttgaggaggtctccaacattaacgatctgcacaagcttgttgtggagacagaagctccagtgcatgccatatgagggcatggacgtacggcctcggag

SEQ ID NO: 47318 - DNA, 159 bp, Glycine max
tatctatgtaggttgttaaggtgtatgtttctgtttttggagatgtaagacgtaaagaagtcgccattgccggcttgaaatctaaggctaaatatgttcgcagcgagttgggcaagcgtatcaagttgcgcttaactcctgagatacgctttcttgagg

SEQ ID NO: 47319 - DNA, 278 bp, Glycine max
ttcaggtactgctttcggatgcagatacagatcgctcgtacgattcaaaccgctcgtaagtcgacaggaggtaaggcttctaggaacgaagttgcaaccaaggctgcacgtaagtctgacccaactactggtggtgtgaagaagccccaccgttagcgttctggtaccgttgatcttcgtgagattatgaaattccagaagagtaccgagcttttgatccggaagctccccttccagaggctggttcgtgaaattgctcaggacttcaagactgatct

SEQ ID NO: 47320 - DNA, 274 bp, Glycine max
ctcattaatgcaagactggcacttcgttgcttggtgatgtcccttcctgttctcttcactcttggtcttgcgagagaaagccatgccagacacgaagatttatggcatgctggttggccatacattcccattccaagctcattgcgatatcttctaaagactggctctgtcagtgtcgacatcgatgactaggggctggatattgtagatttacactactcgaaaatctacttctataccgaagattccttccaggcaaaacaatgagagtaca

SEQ ID NO: 47321 - DNA, 282 bp, Glycine max
agtgcactgaacccttccacggtggtgactgagtgatgacagacaacaagtaagtttcagagctacagcacaagaaacagtctgatttaatacgcttctatgagcgggtgaggtgctgggagtataggtcgcacacttccattgttcgcttgacaaagtcgacccgcactgacgaggctcgtcgcttgggattcaaggctaagcagggctatgtgatataccgtgttcgtgttaggagcggtgagcgaaagacgccagttcccaaaagtattgtttatggga

SEQ ID NO: 47322 - DNA, 279 bp, Glycine max
gttttcacctgaacaatcggagctacatagaccgacatgtggatccgtacggattgggacctattggctatgattggctccaaaaaaacaaaagaaaaatagaaaaaaactataaactctatctgacaaagtcatggactaagattttcaactttttgaagttggacatcaatgaggcagaggctaatgttgcggtcaagttaatgacagacaagctccgttccttcaaccaacactttgatgatatatgcaacgatcagtctacgtggcttgtctttg

SEQ ID NO: 47323 - DNA, 264 bp, Glycine max
gagacatcaaatatagagatagaggctctttaggagtgacatattattgctctgtagtgttggacagcatgttggaaggtaaagctgtgatagaggatactgacatgccagataagatgcagatccaagcatggcatccgcttctgaagctttggatctctatgatgtttttgattgcacatccattgctgcccacataaaaaaggagtttgatacacagtatggttctggatggcagtgtgtggtgggatcaagttttgggtg

SEQ ID NO: 47324 - DNA, 273 bp, Glycine max
caccgcacgaatatcttgttgtttggagcgatccgagacaaactctgtaaacatgtcggtttaccaggacctccttacaggtgatgagcttctctctgactccttccgttacaaggaaattgagaatggaatgctgtgggaagttgaggggaagtgggttgtacaaaggagcagttgatgtagacattggtgcaaacccttctgctgagggtggaggagaagatgagggagttgatgatgcagctgttaaggttgttgacattgttgacacat

SEQ ID NO: 47325 - DNA, 276 bp, Glycine max
attcaatgctaaattattacagcaattagacaacttaaagacaaagctgggcttaaagactgctttggttgatgtttatggtatgatccaacgcgcggtcaccaaccctaaaaaatacggttttgtcgatggttcaaaaggatgtgttgggacggggacagtacgaatatggagattcatgcaaagggatggatacttgttcagatccagacaaatatgtattctgggatgctgttcatccaacgcaaaagatgtacaagataatagctgatgagg

SEQ ID NO: 47326 - DNA, 292 bp, Glycine max
aaaggagtgatttggagtttggagcgactgaactaatcattaatttgcactcgctgtttcagcttcatcacccttcttttgcatcatttatatctcttgagaaatggcacaagaaacctttctattcacatctgaatctgtaaacgacggtcaccccgacatgctgtgcgaccagatctctgatgcagtacttgatgcgtgccttgaacaggaccctgacagcaaggttgcctgtgagacatgcaccaagaccaacatggtcatggtcttcggagagatcacaaccaaggcc

SEQ ID NO: 47327 - DNA, 292 bp, Glycine max
cctcgagtcgattcggctcgagtgattggtgtgcatccatgtgaaactagtggcgatcggatccagctagagcctacaagctcacagttttggtttggtttgcttgattgaagatcaaggaaggaagatgttgggtgttataaggcacaagagtattcgccccgccttctccgcaatcagagacttctcttctgcagctaaagagattactgtcagggatgctctcaactccgcactcgatgaggaaatgtcagctgatcctaaagtcttcttgatgggtgaagaggttggg

SEQ ID NO: 47328 - DNA, 279 bp, Glycine max
tcaggtcaggcggggctacccgcagagtttaagcatatcaataagcggaggaaaagaagacgatagcaacaaggagcgtgcgtgcgtgcgtatgctgctctctatattcagaaccaataagaaagggaaaaagaagcattggtccttaccttagccccttttccttcatttgtttgttggttgggagagcaagggttgactgtttcttctccatattggttgtgaactgatttgtcctttgtattttctaactgatcccttccaacttccaatttttat

SEQ ID NO: 47329 - DNA, 264 bp, Glycine max
cttaaacactcgtcccaagaggcgcagagccaaaagcagaaagaacaaagaagaaattgagaaccaaagaatgactcacattgctgtggaacgcaatagaagaaagcagatgaatgagtatctttctgttcttcgctctcttatgccagactcttatatccaaaggggtgatcaagcttctataattggaggtgctattaactttgtcaaagagcttgacagaggatgcattttcttggtgctcagaaagaaggagaggggaaa

SEQ ID NO: 47330 - DNA, 260 bp, Glycine max
ttggagacgaagctctaaagccgattctccttttgaactggttgcctcactcactggccacactacagcagtggcccgtctggcggttggatgcaagatgctgtactccgggtccatggaccagagcataaaggtctgggacatggatacattacagtgtacaatgacactaaatgatcatactgacgtagtcacatcccatatctgttgggatcatatctgttgtcaagttcatctgaccgcactttttaggtctcggc

SEQ ID NO: 47331 - DNA, 263 bp, Glycine max
aacactcttctctgcagcttttgcctacaactcccttcaccatggctgaacaaaccgagaaagcttttctgaagcaaccaaaagtgtttctcagcacaaagaagactgggaagggaaagagacctggaaaaggtgggaaccgcttttggaagtccattgggcttggatttaagactcccagggaagccatcgaaggaacctatattgacaagcagtgccccttcactggcaatgtttccatccgtggccgtatcttggctgga

SEQ ID NO: 47332 - DNA, 254 bp, Glycine max
caggtgctatattagttgttgtgaagaatgacttggcgaagttgcaactcacttcccctgtgttgactagcaagggcgagaagattgcacttagtcgtcgtgttgagaagcattggcgtcttattgggtggggacaaatccaagctggaatcactctggatgtccctcccgtccctcaactgagctgaaccatgataagagacagatcacaagaattaccagcagctataaaaaccttagacgattttagatgt

SEQ ID NO: 47333 - DNA, 259 bp, Glycine max
ctgatcctggctagtcgctgccgtgggccaatctcacatttctggaggataggtaattgggtgttgagagtggattgtcatgcttccaagtatttcaacctatgatcaagaagacatcgatattgggtaatactgagggagttgattatagtgctatagcatgcgtcaagtctgcttaagtaataactcatcttaatagctatatggctgcacgatctcgtgatagcgatatgtccgtcattgcagagtattaaatcat

SEQ ID NO: 47334 - DNA, 195 bp, Glycine max
cgcagtttcttcgtttctctctctctctctctcttcagaagagcagatagacataacccattcagattaagagagagcaatcaattccaatcacaatggcaaatgcgactcaccgatgaacagatctctgagttcaaggaggccttcagtttgcgcgataaggatggagatggttgcatagggaaaaaggatttg

SEQ ID NO: 47335 - DNA, 278 bp, Glycine max
cggtggtggaaaggtttcgttcaaagtcacactcacctccgatccaaagttacccttcatcgtgtttagcgttccagacgcggcaccttttactgccgttctcaaattcgccgccgaagaattcaaagtcccgccccagaccaggctatcatcaccaacggtagcttttagcctttgggatcacaaaagcttggccacacccgcaatgtttttggattaagaaaatactttttatcatcgatttatcgttggtctcatggtgttggcataaatcccca

SEQ ID NO: 47336 - DNA, 188 bp, Glycine max
cgcgatgctaacgggaagtgcgttggtgcaaagttgataacagcaacactgtcaggcattggttatggattgactgacaacggtatctttcttgggtaccctattgttggatttagcaaccggatgcaggcatcaggacatgctgtgaacaatccatcatttcgactatccaaagttctagatcgcga

SEQ ID NO: 47337 - DNA, 264 bp, Glycine max
ctccttcttcatagcttcacacgtggagtggactgaatagttccaccagtgccgctgcatcaatgaacgaccagctctccaaccccacctccatcttcggcctccgcctatgggtggttctcggcgtctgcgttgcgccgccatcgtcctcatcctcttcctcatctccgtctggttagccttcaagcgctcccaaaccaaccccgtttccatccccgacgtctccaaggagatccaagatatcaggctcgaccacgcgcccaa

SEQ ID NO: 47338 - DNA, 256 bp, Glycine max
ccaagccaagtgaaagtcagacacaataaaaatcaaagagcataatgtcagggatcattcacaagattggcgagacccttcatgtgggagggcacaagaaggaggaggagcataagggtgagcaccatgcggagaatacaaaggggagcaccatggtgaacacagtagtgagtacaaaggagagcatcatggtgaacacaaagctggagagtaccatggtgagcacaagccagagcacccagaggggttcctagac

SEQ ID NO: 47339 - DNA, 207 bp, Glycine max
acatagtgctgctccttgcaactctaattctatcgccttaaggtcttggaaagtatgagaaaaacccaatggaaaaggcttccaattgggaacccacaagtttataagcccccagttgaaaagcctcctgtttacaagccaccagttgaaaagcccccaatttagaagcctccagtagagaagccaccagtgtacaagcaaccagtt

SEQ ID NO: 47340 - DNA, 265 bp, Glycine max
caagagatattgttcatggtacccatgtatgttatactactcaagagatattgttaattacatatgcaatgatgaagatataaaagctgtatcgtttgttggtccaattacagctggaatatatgccacagcttctgctagagggaaacgagttcagtcaaatgcaggtggcacaaatcatgtacttgtaatgcccgatgctggcttggatgcgactttagatgcccttgttcctgctggctttggtgctgcaggagagaggtgc

SEQ ID NO: 47341 - DNA, 275 bp, Glycine max
gcaagaatggcacttcgttgcttggtgatgtccctttctgttctcttcactcttggtcttgcgagagaaagccatgccagacacgaagatttttggcatgctgtttggccaaacactcccattccaagttcattgcgagatcttctaaagcctggccctgcaagtgtacgaaatcgatgatcaccctatgcaaattgaagaaacacagtacccgaaaaccttcttctataaagaagaccttcatccaggcaaaacaatgaaagtacaattcagcc

SEQ ID NO: 47342 - DNA, 181 bp, Glycine max
cgcgagacacagagagagaatggcagcacttggtggcaatcgtgatgtggcatgctgtcagatcagccatgatatcgatggtttagctcgctttgctgttgaagaacatagcacttgacagaatgcccttttggcgtttgaaaaggtagtaagtgcaacacagctagtggtttctggtacc

SEQ ID NO: 47343 - DNA, 254 bp, Glycine max
cggccaacaatggcgtccttcgatgaagctcctcacggaaacaccaagaacggcgagaatatcttcactaccaagtgcgctcactgcaacaccgtcagcaaaggtgccggcgtcaaacaactacccagatctgaatggtttgtatgacggacagctcaggtggaactcccggatatgccgactctactgctgacacatacatgaccgtagttcgtgaagaaaataggctctcgtgactacttgatcaaggccaa

SEQ ID NO: 47344 - DNA, 245 bp, Glycine max
gcgccatcaaaaatacccgatagtgcagaaaatcttggggaagtacttcgtggtgaccgcattgagaattctctctatgtgtataaaatgcgcgaccacaaatgtgcaatattctgtgtaatcttaaacttgatgctaaaactgctaaggagttcaaagagaagatcagtgatgagtatcgggtgaacatgatcctagataaccttcctctagtctgtcccttgaaacgggattgatcaggtttc

SEQ ID NO: 47345 - DNA, 278 bp, Glycine max
gctcgtgcctctagggttatcatatctccattaccatttcctctctctcactttccaagaatcttaagctataggaacagtcttatccaaccgtgagcgctgagtaccagaaggccgttgagaatgcgaagaagaagctcagaggcttcatcgctgagaagagatgcgctcctctaatgctccgtttggactggcagtctcctggaacttaggacgtgagctcgaagaccggtggtcccttcgacaccataaggcgaccctctgaactcgctcacggg

SEQ ID NO: 47346 - DNA, 116 bp, Glycine max
gaaattcgaagtagttctcacaaaggactcagtgtgccagatgcaagccttgttcctgtatcatctactattgatgtcattgaactaatgaaccttgggcaaaggaaccgtgcagt

SEQ ID NO: 47347 - DNA, 189 bp, Glycine max
gtcgcgttgtgttgcgtcgtgtcgtgcgctgttcctctgtttctcgtttttgtgttcagaccgaaccctagctccgcatcgcaaccatgtcgaccaagcaaggtggaaaagctaagcctttgaagaaacccaagtctgataagaaggattacgacgagattgatgtggctaacattcagaagaaaaagg

SEQ ID NO: 47348 - DNA, 224 bp, Glycine max
gtgcagtgggcgttggggaaggctggtgaggatcgcgtccacgtggtggtgtcggaggagcttggatggttgttcgtcgggatttacgacggtttcaacggcggcgacgcgccggagtttctgatggggaacctctcccgcgccgttcataacgagcttcagggtttgttctgggaacttgaagaagaagaacagccgttaccgcaagacagcaatccagtggt

SEQ ID NO: 47349 - DNA, 273 bp, Glycine max
tcctgatatgatatcacaacttgagagtgctggtctatcttttgttggcaaagatgaaactgggaagcgcatggagatagttgaatgtcccagtcatcctttcttcattggtgctcagtttcatcctgagttcaagtccagaccagggaaaccttctccattattcttaggattaatatcagcagcatgtgagaggacaattgtgcctgccagcaatggctatagcaagttaacaaatgggatacactcaccattgttgaaagcagcagcagc

SEQ ID NO: 47350 - DNA, 219 bp, Glycine max
ttcggctcgagctcattaattgctagactggcacttcgttgcttggtgatgtctctttctgttgtcttcactcttggtcttgcgagagaaagccatgccagagaagaagatttttcgcatgctgtatggctaaatactctcattccatgttcattgcgagaccttctatagcctggctctgtcagtgatgacatcgatgttcaccctatgctacttgct

SEQ ID NO: 47351 - DNA, 247 bp, Glycine max
gttctttctctcgcaatcttcactacattcaccgagcatttgcattcacattgaatatggctgagactacacaatctaatgctgagttgttggagtggcctaagacagataagcgccgcttcctgcatgttgtgtatcgtgttttatactgaatgttttgggatgaagcttttgaggagaagagttattccagaggagaaatatgccaatgcttttcttggattgggcctgaaacaatcccatttgg

SEQ ID NO: 47352 - DNA, 265 bp, Glycine max
aaagagctgcagattgagatggattaattatctgaggccagacctcaagagacgtggatttactgaaatggaagaggatcaaattatacagctacattcatgtctaggtaacaggtggtctaagattgcttcacattttcctgggaagacagacaatgaaatcaagaaccattggaacactaaaatcaagaagaggttgaagctcctaggtttggaccctttaaccctgaagccatctgagcaaaaggaaaagtctgttgatgac

SEQ ID NO: 47353 - DNA, 166 bp, Glycine max
ccgattgctagaatggaatttcgatgctcagtcatctctcttaccatactctgctctcttgctcttgcaggagagagccatgtccatggatcgctagctgaggacagattactcggaagctatttggcacgacactcacatgcaccatggactgcgagatcctcta

SEQ ID NO: 47354 - DNA, 150 bp, Glycine max
cccaagtgaaagacagaagacaagtcaaagacaatgtcagggatcattcacaagattgacgagacccttcatgtgggacgccacaagaaggaggaggagcacaaaggtgagcagcacatggtggagaataaaaaggggagcatcatggtg

SEQ ID NO: 47355 - DNA, 261 bp, Glycine max
ctcttcttctcttgcggtctggtttagcgagttcttatagatttaaggaagatgggtactgataaggttcacatcagtattgtggtcattgtgtatatcgactctggtatatcgactattaatggacacatgatttacaagcttgtaagaattgacaagcgtgatattgacatgttagatatggaagttgctgtgatgaataggaggtatttaaagtatgcatgagtgctggataaactttaggttgaacgttaaagaggt

SEQ ID NO: 47356 - DNA, 263 bp, Glycine max
  unsure (1)..(263): unsure at all n locations
cgcgtcgcttcgcaccagtttcaatgtacgaatatgtttgctgntatggagcgatccgtgaaaaactctgcaaacaggttggtttatcaggacctcgttacaggtgatgacgttctctcggactccttgcgttacaaggaaattctgnatggaatgctgtgggaagttgaggggaagtgggtttgtaaaggagcagttgatgtagacattggtgtcaacacttctgctgagggtggaggagaagatgagggagttgatgatgc

SEQ ID NO: 47357 - DNA, 274 bp, Glycine max
agattctagtcacaatgctggatacaaaggaagaagtaccttcaacatttataggacagaatgtctcttttagtgatgcaacgaaacagtgccgacatggcgaggcacgtaatgtgtccatcccctaacagaagggtcagcatcaccttcttcagagtgaggccagactccaaccaatgccaatctccaactcctactacgatgacaagtgcgatgactgtgtggcaacctgggcattgcgctagtccatatgctttgccaaatggtgctctaa

SEQ ID NO: 47358 - DNA, 264 bp, Glycine max
ctcagatgaatttggtagattggtttaaggcaatggtagcatctcgtcgcagtgaggagctagttgatcctttaattgagattcctccccctccaagatctttgaagagagttttattgatttgtctgcgctgtatagacatggatgtcgtaaagcgaccaaagatgggtcaaattattcatatgcttgagacagatgatttcccctttcgttctgtaagtactacacttcatccctccttctcagtttctcacaaatacattt

SEQ ID NO: 47359 - DNA, 250 bp, Glycine max
cttcttcgttccttccccaactcaatcttcgccttcgtccacaacaactcctccttcacgatcgctgccaacgttactttccatttgtaaccttcatgctcgagacaaaaattgcgaacgcagcatctggtattgccgtccatgctgagtgcaagctacagtttctggagatcaacgcgaacaggacgtaccggtatatcgttttcaggattgaggagaaatcgcagcaagttattgtggagaagccggg

SEQ ID NO: 47360 - DNA, 264 bp, Glycine max
ctagaaaagaccatcaaagtttcacttcagccttatccggtttagggtttcggtttttgacccaacctttgacgtatcgaaaccttaagtttcggatcaggtctgagcaatctggttggtagaacctttggtcttagagagtaagttttatgtctgaattagacgatcaaattcctactgccttcgatccttttgctgatgcaaatgctgatgactcgggtgctgggtcaaaggagtatgtgcatattcgcgtacagcagcgaa

SEQ ID NO: 47361 - DNA, 262 bp, Glycine max
ctttgcgcagttccctacctctcctttcaagatgcagatcttcgtcacagaccctcaccggaaagaccatcacccttgacgtggacagctctgacaccatcgacaacgtcaaggccacgatccaggacaaggaacgaattccccggatcagcaacgtctcatcttcgccggaaagcagctctaggacggccgtaccctcgtcgactacaacatccagtacgggttaaccctgcaccttgtgcttcatctacgtggtggtatg

SEQ ID NO: 47362 - DNA, 272 bp, Glycine max
cggccaagtgaaagtgagagaaaataacaatcaaagagcataatgtcagggatcattcacaagattggggagacccttcatgtgggagggcacaagaaggaggaggagcataagggtgagcaccatgctggagaatacaaagggagcaccatggtgaacacagtagtgcgtacaaaggagagcatcatggtgaacgacaagctggagagtaccaaggttgagcaccgccagagcacaaagaggggttcctagacaaagtcttggacaagatc

SEQ ID NO: 47363 - DNA, 228 bp, Glycine max
ggcgtcgctgctccgtaccagtttcactgcataaatttgagagagaactctgcaaacatgttggtttatcaggacctccttacaggtgatgagcttctctcggactccttccgttacaatgaaattgagaatggaatctgtgggaagttgaggggaagtgggttgttaagggagccgttgatgttgacattggtgcaaaccttctgctgagggtggagaagatgaggg

SEQ ID NO: 47364 - DNA, 279 bp, Glycine max
gcaagaatggcacttcgttgcttggtgatgtccctttctgttctcttcactcttggtcttgcgagagaaagccatgccagagacgaagatttttggcatgctgtttggccaaacactcccattccaagttcattgcgagatcttctaaagcctggccctgcaagtgttgaaatcgatgatcaccctatgcaaattgaagaaacacagtacccgaaaaccttcttctataaagaagaccttcatccaggcaaaacaatgaaagtacaattcagcaagcct

SEQ ID NO: 47365 - DNA, 274 bp, Glycine max
cagaaatagaggatggtgattttcttgtttgtcttgttattcacaatattgatggacctggattaagggactctgaaacccaacgatatcttgctcgactagctgcttgtgcacggattcgtgttgttgcctctattgaccatgttaatgctcctctgttttgggacaagaatatggctcatacacagttcaattggtgctggtatcacgttcctacttttgctccttacaaggtggaaggcatgttttatcctatgattcttgcacatggtag

SEQ ID NO: 47366 - DNA, 254 bp, Glycine max
cagaaatctcgtgtggaacaaaagggtaaaagctcgtttgattcggatttccagtacgaacacaagccaagtgaaagtgagataaaatagaaatcaaagagcataatgtcagggatcattcacaagattggggagacccttcatgtgggagggcacaagaaggaggaggagcataagggtgagcaccatgctggagaatacaaaggggagcaccatggtgaacacagtagtgagtacaaaggcgagcatcatgg

SEQ ID NO: 47367 - DNA, 258 bp, Glycine max
caggctttcgctctatgactgaacaatgccatgctgcaaagttattctcaaagcatatgaagcttgaggagcagatttctttgttaaaaaaccgtgttaacattgctagcggcacaccaagcaggataaagaagctaattgatgctgaggcgttagacctttcaaggttgcaagtacttgtgcttgatctgcatcctgatgtaaagggctattccttgttgacccttccacaagtcagagatgaattctgggaccttt

SEQ ID NO: 47368 - DNA, 252 bp, Glycine max
cgacagcaaaaagatggctagtttcagattttcattcggtttcggagtggtggccgccgttgttctctctctcatcttcactctttacatgcctgtcgctgttcatgcccaatccctagctccagcacctgctcctaccagcgacggaacgtccatagatcaagggattgcgtatgttttgatgatgttggctttggcactcacttatctcatccactcctccaccttctgaaaaggacgctctttcacttg

SEQ ID NO: 47369 - DNA, 130 bp, Glycine max
cggctcgagcggctcgagcggctcgaggtcagcttcaagaaccacgttattcagtggttcgaggtccctgatggcgtacttggccgatattggaaagcagtggggctagccttcaactgtagtttcctcc

SEQ ID NO: 47370 - DNA, 267 bp, Glycine max
caacaacgcttaacctctctcattccccatttcctcacctccttcaaccgctgctaaattctagggttccgaaatggacgctggcggaaagatcaagaagggcgccggaggtagaaagggcggcggcccaaagaagaagccggtttcaaggtccgtcaaagccggtctccaattccccgtcggaagaattggccgttatttgaagaaaggaaggtacgctcagcgtgtcggtaccggtgctcccgtatacttggctgcagttctcga

SEQ ID NO: 47371 - DNA, 260 bp, Glycine max
ctcattaacatgcccccctcgtctatcatccccctccataatcatcctggaatgacagtattgagcaagctgttatatggctcgatgtatgttaaatcctatgattggattgatgcacctgagcccaatgatccatctgaagctagacctgcaaagcttgtcaaagatactgagatgacagcgccgagtcccacaacggttctctatcccaccagcggaggaaacatccattgtttcagagctataactccttgtgcaat

SEQ ID NO: 47372 - DNA, 267 bp, Glycine max
atcgttcgctcttcctctcccagacaaacacatgggattgcccaatcagcaaaccgtcgattaccccagcttcaagctcgtcatcgtcggtgacggtggcaaaggaaagacaaccttcgtgaaaaggcatctcactggtgaattcgagaagaaatatgaaccgaccattggtgtggaggttcatccgttggattttttcagtaactgcggaaagattcgattctattgttgggatactgctgggcaagagaagtttggcggcctcag

SEQ ID NO: 47373 - DNA, 158 bp, Glycine max
tcttctgagagtgtttggttgaaagtagcaaagatgtatcctttcgggcaacagggtcaacagattaagggggatattgcaggtaatgcagaggaatgtagtaggatatcaccaacatcaccagtgttggagggatcgttgaccaaggcttaggcttc

SEQ ID NO: 47374 - DNA, 278 bp, Glycine max
aggtgctctcgggttgtgtctgtgaccgtgactgcgtacctgtgactgtgtagcgcccgtggtgatctggggtagggggaaccctacagtgggacccctcccccaatattccttctgtccagcccctcacttccactggagcaggtccagagccattcctcaaccccgtgaacttctccaggcaaggctgagagggttcgaagtggctgggaaggtttccaagccccctggcccttccccaaaaaatgggtgaataggcggattaactgggccaacct

SEQ ID NO: 47375 - DNA, 276 bp, Glycine max
  unsure (1)..(276): unsure at all n locations
ctgctaagcaagctgtcaaaacaactcctgagctgacaaggtctcatagtaaagctgctagcatgttttctgggacccaagaaaagtgtgctacatgtggcaaaactgcttatcctttggaggaggtaacagtggaagggcaggcctatcacaaatcttgtttcaaatgttcactggaaggtgtcgcatnactccatccaactatgcagtcctggagggcgttttgtattgcaagcaccatttttcccagctttttaagggagaagggagctataa

SEQ ID NO: 47376 - DNA, 269 bp, Glycine max
ggcattgaaggctatcaaagaaggggggaaagttgtgacaatagcaccaccagcaactccacctgctatcccattctttctcacttcagatggtgctgtgttggaggaagttacaactcacttagaaagtgggaaggtgaagccagtattggatcctaagagtccctttccattttctcagattgtggaagcatattcatacttgaagacaaatagagccattgggaaagtagtcatacatcccatcccttgaacatatataactatgc

SEQ ID NO: 47377 - DNA, 280 bp, Glycine max
gaagcagcagcaatagttgagcagcgcggaaatcgcatcgacgactgagacataaagatgggaagacaagccgtgaccaaattgctcgtctcggatcgcttcgcgcggccacggcctccgcctcttctccggcggcgtcgccggcggtcttcgtcgataagagcacgcgcgtgatctgccaaggcatcaccgggcaaaacggcaccttccacaccgagcaagccattgaatacggcaccaacatggttggtggtgtgactcataagaaaggtggcaccga

SEQ ID NO: 47378 - DNA, 277 bp, Glycine max
agatatcgagccgattcggatcgagcaaacatgttggtttatcaggacctacttagaggtgatgagcatctctcggactccttccgttacaatgacattgagaaaaggatgtgtgggaagttaggggaagtgggatgttaagggagcagttgatgttgaaattggtgaaaacccttctgatgagggtggagaagatgagggagtcgatgacgcagctgttaaggttgttgacattgttgatacattaagacttcaggagcaacccgattttgataag

SEQ ID NO: 47379 - DNA, 259 bp, Glycine max
cctattgtgttggccttcgggatcggagtaatgattaacagtaacagccgaggatttagggtttgatgtgataaatagcgtgttattccctggaattcaaatttcccttatatcttagaatgttgcggaagtttccttgtaatttgtgtcttgataataagatttcacgtatgaagttttcatccttggatctttattctccaatgaaagtggcttttgtcaaggtttaactcagttttgatgctagaaaatggatagt

SEQ ID NO: 47380 - DNA, 299 bp, Glycine max
aagcttgctactgagtttccacactgcataccttatgtcttccgaattcgaagttaatttgcaagatggctaaggaaaaggctcagatcaacattgtggtggttggtcatgtggaccctgaggaggcaaccaccattaacgagctgaagaagcctgttgtggagaaagaagctccagggcatgccatatgagggcatgcacgtacggcctcggaggggaaccagaaaattatgttaacaaaataatctggaaccctaatgtatcagtgtcatcatcagtgttagtttaagctagctttg

SEQ ID NO: 47381 - DNA, 279 bp, Glycine max
gaagcagcagaaatagttgagcagcgcgcaaatcgcatcgacgactccgacatcaagataggaagacaagccgtgacaaaattgctgtcctcgatagcatctcgacgacactccctccgaatcttctcggtcgagtcgcggaggtcttcatcgatcacagaacgcgacgtgatatgccaaggcatcaccggcaaaaacggcacctatccacaccgagcaagacattgaatacggcaccaacatggttggtggtgtgactcatcagaaaggtggcacaga

SEQ ID NO: 47382 - DNA, 290 bp, Glycine max
cttgggacaagcatcttgaaacatgggtaaaagcttcaggtatccttggaggaccaaagaacacacctccaacagtaatatctcccaaacaatacaagaaaaggttcaggaaagcaatgaccacttactttctcatgcttccagatcagtggtctcccccttctattattcctagtcattctcagtctgattttggtgaagacagcacacaacctaggactccagctgaatgattctttgttttgtgtttctgtaaattttactttcaatttgggaattaactcccccaa

SEQ ID NO: 47383 - DNA, 185 bp, Glycine max
gcgtagtacgtcggattcggctcacctcgagcgaatcggctcgagtttcttcctttgtcgtccatccactaaccatgtctcagcctgttgtcctcaaagtacgtatgtcatgtgaaggatgtgttggagcagtgaagagagttctaggaaaattggatggtgtggaatcatatgacattgatttg

SEQ ID NO: 47384 - DNA, 135 bp, Glycine max
  unsure (1)..(135): unsure at all n locations
aggagagacttattaagaagttgtggggtttgcgaggtcaatgtttaaacacgcgatgaaggtggagggtttggacgatgtagtcgacatcgtgggaaccggaagggacggtgtcaanacgtcaacatttcgacc

SEQ ID NO: 47385 - DNA, 299 bp, Glycine max
cttaagcttgctactgagtttccacactgcataccttacgtcttccgaattcgaagttaatttgcaagatgggtaaaggaaaaggctcagatcaacattgtggtggttggtcatgtggaccctgaggaggcaaccaccattaacgagctgaagaagcctgttgtggagaaagaagctccagggcatgccatatgagggcatgcacgtacgcgcctcggaggggaaccagaaaattatgttaacaaaataatctggaaccctaatgtatcagtgtcatcatcagtgtgtagtttaagcta

SEQ ID NO: 47386 - DNA, 307 bp, Glycine max
cgtgagctataagcgcgtttatcgtgaggagcatatgaagttgtttgccctctttgttggctgcagtaagtttgcgatcaatgcccaggccatggcgcaggctaccaaaggtcacctctccgattgtcaactggctatggtgagcgttcttcggaggtaaaatgcgcaagtcttaggcttgctgtggaagcacacaacatccgagccattaaaaccattcctgaagagtgcgttgaaccaacaacggactacattaatggcgaacaatttagatcagactctaaaacagttaaccaacaagctttct

SEQ ID NO: 47387 - DNA, 302 bp, Glycine max
gatagacacaaaattctcatcttcaagtcatggccatctttaaggcgctccttgcttcaatcctcatttctctgggtcatggtgaatctggtggaatcagatacaatgtatcaggtaatcaagaacacggtagagggatcaagtcctagcccttccccgccaacgatcgattgtgatgttgaatgtaatcggaggtgtcaattatcatcaagaccaaatttgtgcaagagagcatgtgggacgtgctgtcagcggtgcaattgtgtgccttcgggtacctatggtcattatgaagagtgttc

SEQ ID NO: 47388 - DNA, 288 bp, Glycine max
ccacactgaataccttaagaatttcgaagtcgaagttaatttgcaagatggctaaggaataggctcagatcaaaattgcggtggttgtgccagtggagccggaggaggcaaccaccattaacgagctgaagaagcctgtggtggagaaagaagttccagggcatgccatatgagggcatgaacgtacggcctcggaggggaaccagaaaattatgttaacaaaataatcgggaaccctaatgtatcagtgtcatcatcagtgggtagtttaagctagctttgctatgg

SEQ ID NO: 47389 - DNA, 257 bp, Glycine max
ctaagcttgctactgagtttccacactgcataccttaggtcttccgaattcgaagttaatttgcacgatggctaaggaaaaggctcagatcaacattgtggtggttggtcatgtggaccctgaggaggcaaccaccattaacgagctgaagaagcctgttgtggagaaagaagctccagggcatgccatatgagggcatgcacgtacggcctcggcggggaaccagaaaattatgttaacaaaataatctggaaccc

SEQ ID NO: 47390 - DNA, 259 bp, Glycine max
atcgagataactagaaacagtatgatgaaaatgaagatccttattttcttcattactacaattttagtagcatgacaataccatgcgtacgatatattccctctccgaatgaacactggctatgatgcccgtactccggagatgaaatgcgcaaattggagacttactatggaagcacacaacatctttagctttgagaccattcctgaagaatacgttgaagcaacaacggaatacatccatggcgaacaatatagat

SEQ ID NO: 47391 - DNA, 251 bp, Glycine max
actacttcaagggaaaccttctaatagagacaaaaacaatggtgactgcaggattgaaatgggcaccagagatgtgaccaacagagtaaaccagtaccatcacaaccagtccccaaacaattgatatcccaagatgtattacaacgttattattgttcttattcaccaccactgaagcacaccctgcaaatatcaagaaatatgttcccaccacctcagctaccaactgtatccatcaacaaacaaaatca

SEQ ID NO: 47392 - DNA, 250 bp, Glycine max
cagtacccggtttcgacactcgcgtctccccctcagtttcggatctctcccttctctcaccaatttccagattccaaaccaggattgaggaagccagtgttcaccaaggtcgatcagcttcgtccagggaccagcgggcacactttaactgtgaaggtggtcgatgctaagatggtgatgcagaaaggtcgttctgatggtcctcaatcccgccaaatgcgaattgctgaatgtttggttggtgatgaga

SEQ ID NO: 47393 - DNA, 266 bp, Glycine max
gtaattgtcaagtgaaaggacaaaaagttgcatagtgatacacagatggtgggctcaggagcatcagataggagcaaagaagctgttgggatgatggcccttcatgatgccctcagaagagtctgtctcaactcagactggacttactctgtcttctggaccattcgtcctcgcccgagagtccgaggtggcaatggctgcaaggttggagacgatagcggcagcttgatgttgatgtgggaagatgggttttgccaaggaagggg

SEQ ID NO: 47394 - DNA, 272 bp, Glycine max
cgggtctgttcctctccccactccctagctgtcttctccttctcctcttcacaatgatccaagagctggaaggaaggggaggatttctagccgtgctaatgaaatttcaggaactggtgtagatgattttgagttgaggagtcttgatgctgatgatttaaagatagaactacaggctaggaaacaacgagaggcagctctggaagttgcattagccgagaaggaatttgtggaaaagcagtaccggaaaaaaactgaagaggccaagagaa

SEQ ID NO: 47395 - DNA, 273 bp, Glycine max
cttttaaataccatgtttcttctttctttaaaataatatttactaattgatcactaccaaaaacagctggtcttcttagatgcggaaaaagttgccgactgagatggatgaactatctgagacctgatataaagagaggaaacataaccccagaagaagatgatcttataattagaatgcactcacttttaggaaatatctggtccctcatcgcgggaagattaccaggacgaacagataatgagattaagaactactggaatacccatctca

SEQ ID NO: 47396 - DNA, 279 bp, Glycine max
aatgtcactccaaatcaaccaactccaaaggatcctttatggctatccaatagtgacctaatcgggttccaaggttatgtacccactctttacgtttacaaagcaaaacccaattatagcaacaacataattgagaggttgagaaactctcttagcaagcttttggtgtactactatcctgttgctggcagattgagcttgacaaaaagtggtcgaatggaagtggattgtaacgctaagggagtgacattgattgaagcagaaaccacaaacacattt

SEQ ID NO: 47397 - DNA, 275 bp, Glycine max
cgtcaatctcattgagcgagccaaagagagagagagagaaaccccacaaaacacaaaatcaaagggactcattaatttaagttaagcaacaacaacaaaaaaatggggatagtggaagaagctcacaacgtgaaggttttaggatccggcacgcggcacatagttctggctcacgggttcggcacggaccaatccgtgtggaaacacctcgtacctcatctcctcgacgagtttcgtgtcgtgctctacgacaacatgggagctggcaccaccaa

SEQ ID NO: 47398 - DNA, 193 bp, Glycine max
tggtacgaaaaatgtcgaagctgatcttcgtgttcctttcgctcattcctcttctctgcacctccttctccccagagagaccctcagatcgacgcgtcctcgtttcgctcgatgacttcgccatcaaatcctctcattctctcttcttcaactccctcaaatctcgcggcttcgatctccaattccacacaac

SEQ ID NO: 47399 - DNA, 273 bp, Glycine max
caacgagtggggatacagctcacgtgtcattgatcttcttgtattcgttgccaagaagtctctttaaggtgttacttcaaagtagcttgtcttcacattattaccgtatgtttatgtttagctgcgatttagtgtcttgctcgagcaaaaaatgagaggtctgaataaatcggtttctgaaaccagtggtgttacttgttggaggagcattagctcttttttggacttttgatgttttctcttgtggagggggatcgagtttttggattttta

SEQ ID NO: 47400 - DNA, 275 bp, Glycine max
gtataatctgaagattctattcctatttgttctgattcttttttatatttttctttcttctggtttcaggaccgagagcactgtgaatagagagtttctggggaggaattgttttcacaatcatggaaaggctgaactcagagttgtactaccagaactgtcacataatgaaagagaatgaaaggctgaggaagaaagctcagcttcttaatcaagagaatcaacaacttctgtctgaactcaaaaagaagctctccaagggaaatgcaaaaacc

SEQ ID NO: 47401 - DNA, 271 bp, Glycine max
ctgagaggaagagagagggagattctttgtttgctaccttctctcggaaaaatggttacgttcagggtgcgtaagattcacaccatttggtgttcgatttcattttcctctgttaatgatttttacgaggtggtgttttgttatgtgtatttgcagtttcaccagtaccaggtcgttgggagggctcttcccacggaagcagatcagcaccccaagatctaccgaatgaagctctgggccaccaacgaggttcgcgccaagtccaagttct

SEQ ID NO: 47402 - DNA, 268 bp, Glycine max
  unsure (1)..(268): unsure at all n locations
ctataagctagtttatcgtgaggagaatatgaagttgcttgtcttctttgttgctgcagtactcttggtcccatggccatgccatggcgcacgcacccagaggctccctctccgtatgccaactggctatggtgagcgttcttcggacgtacaatgcgcaagttttaggcttgctgtggaagcacacaacatccgagcctttncaatcattcctgaacactgccttgatccaacctaggactacattaatggcgggcgatttcgctca

SEQ ID NO: 47403 - DNA, 272 bp, Glycine max
gacaaactccttttaagagagaaggatcgaaaatgggagctggaagtttcctcaaggtggttctaaaaaattttgatgttctcgctgggcctttgcttagtcttgcctatcctctatatgcctcggttagggcaattgagagcaagtctcctgttgatgaccagcaatggctcacttattgggttctctactccttgatcaccctctttgaacttacttttgccaaagttattgaatggattcccatctggccatatgcaaagctgatcctt

SEQ ID NO: 47404 - DNA, 288 bp, Glycine max
cgatcgaacgattcaagttacagaggaatcttacaagaggtgcaacattaaagacccgatattgtacatgaacaatggcaaatctttgtttaacattacatcaaagggccaattcttcttcactagtggtgagcctggccattgccaaaaaaatcaaaagcttcatatatctgttggtgaaggaataatagaaactatggatacagcacctggtccaagttcgtcattgcctgcatctgcaccctcctatcccacagtatttggcaatattccagtagctccttcaac

SEQ ID NO: 47405 - DNA, 277 bp, Glycine max
tttccttgcgtttccctttcattttccctcactttctcgctcgccaaacgcccctctctctcctccaatggccgaccagctcaccgacgaccagatcgccgagttcaaggaggccttcagcctcttcgacaaggacggcgatggttgtattactactaaggaacttgggactgtgatgcggtcactagggcaaaacccaactgaggcagaactgcaggatatgattaatgaggttgatgctgatggcaatggaaccatcgacttcccagagttcctc

SEQ ID NO: 47406 - DNA, 270 bp, Glycine max
tgctttgtaccattgacagtcacctcagtacctgcatcttattgtgaaggatgatgacatggtggtaatcttgaaactgatgacatcaaggatcttaaacccttgaatgatagagtcctcataaaggttgctgaagctgaggaaaaaacctctggcggtttgttgcttacagaggcaaccaaggacaaaccttcgattggaacagtgatagctgttgggccggggcatctggacgaggaaggcaacagaaaaccgttgtccgtgactccg

SEQ ID NO: 47407 - DNA, 274 bp, Glycine max
  unsure (1)..(274): unsure at all n locations
atagtgcaaaatgctattatgtcatgggagatggagctctcacacaagacccggttccangaacttaaagacaataaacccttggaagttcaagctctttgtgaatggcagggaaggattatctggagaggatactctaagcctgggaagttataatgctttgttgcaaagttctctgcctgaagacttgaagccttacaaagcagatgaagagacttttgaatcatctcatgaagcgttcaaatcagctttttctagagggtttgcttgggaa

SEQ ID NO: 47408 - DNA, 276 bp, Glycine max
gtattgctggcgctgtagctcaaactgcaatatcccatggatcttgttaaaacaagactacaaaccccatgcttttaaaagtggaagaattcctagtcttggaaccctttcaaaagatatatgggttcaggaaggaccccgggcattttataggggattgattccttctcttcttgggattatcccttatgccggcatagatcttgctgcatatgaaaccttgaaggatatgtccaagcagtatattcttcatgatggagaacctggtcctctagt

SEQ ID NO: 47409 - DNA, 128 bp, Glycine max
ctcttctactcttgcggctaaggttttagcgcagttacttctagatctaaggaagatgggcaaaggaaatggttcacatcagaattgtggtaatcggccacgtcgactctgggaagtccacaaccaat

SEQ ID NO: 47410 - DNA, 160 bp, Glycine max
cccacgacaatgtttgtccaagtccagacgccacacatgattttcacaggtcttgaagattacaaggccagaggaacacaagcagccccttactttactttgaccttttacacagaatttgcagagagcaaggacttggtactgtccgtggggatgttgt

SEQ ID NO: 47411 - DNA, 145 bp, Glycine max
tcgatttttcaccagttcagtgataaactcagaagctaggctagacattttcagctttctaccgggggacgttctggttgcatcgttggatgcattcagtagagtgtgcgatgccggtgaagtaactggaaaacatgtcatgtca

SEQ ID NO: 47412 - DNA, 264 bp, Glycine max
  unsure (1)..(264): unsure at all n locations
tcgtcattcggctcgaggcttgtgttagtgaggttagaagataaagaaagaatggcatttgcaggaacaacccagaagtgtatggcctgcgacaaaacggtttatctggttgataagttgaccgcggataaccgagtgttccacaaagcttgcttcatccgncatcactgcaaaggaaccctcaaggtctctctccctcttttacaattcttgttgattatatagtctctatctagttcaggcttctagctttggatctggtgt

SEQ ID NO: 47413 - DNA, 298 bp, Glycine max
caaggacacatttgtcttcagtatagatggcaccgtactctctaatattccatactacaaaaaacaccgatatggggtggagaaatttaactcgaccttgtatgatgaatgggttaacaagggcaatgcaccggcactgcccgagactcttaagaattacaacaagctggtgtctcttggcttcaagattatattcttgtcaggaagaacactggacaaacaggccgtaacagaagcaaacttaaagaaggctggctaccacacatgggaaaaattcactttcaaggatccacaagat

SEQ ID NO: 47414 - DNA, 152 bp, Glycine max
aggacaagctcgctgacaagttggagtctgatgaaaaggagaaaattgagactgctgtgaaagaagcactggaatggctggatgacacaagtatggagaagagatatgaggactgagagtgagcgtgaccatatatgggataaacgaggcag

SEQ ID NO: 47415 - DNA, 138 bp, Glycine max
cttcttgtcaggaagatatcttgacgagaatacaatcttgaaaacaagagtcaacaagatgttgtaattattaagagtctctggcaatgccactgcgtcgacgtgttaagcattatcatataggttcataattctcac

SEQ ID NO: 47416 - DNA, 161 bp, Glycine max
agcatttgaagttcaaaaacttgtatcatacttaccagtctttcttgacatttctcttcccatgtttcaacacatacaacaatgggttttcgtcttcctggtttcagaaaggcgtccttttcttcaaaccaagcatcttctaaaagtgaagatgtcccaaa

SEQ ID NO: 47417 - DNA, 285 bp, Glycine max
  unsure (1)..(285): unsure at all n locations
actcgagccgattcggctcgaggatcaatggcgaagaaggaagagactgagatatggananagctccttcctctaattcgagtgtacaaggatggtcgcgtggagcgtcttccctgaagatccccaaactggcgtctcatccaaagacatagtgatcgcagacaacccctacgcctccgctcgcattttccttcccaaatcccaccacactaacaacaaactccccatcttcctctacttccacggtggcgccttttgcgtcgaatccgccttctcctttttcgt

SEQ ID NO: 47418 - DNA, 247 bp, Glycine max
ctctcatctttctctcttctctctccacccaaaccctaactcccgaccctgttcccctctcgtatccgtcatgaaaggaggaaagtccaagaccgaatctaagagagccgatcccaaacttgctgtgaataagaagggaagcgccaccaaggctaggaaaaccgccgggaaaggggaaggcaggaaagaaccttaacaacccaaaaaggctccaaagtgccttctcgttttcctggaaggagttcag

SEQ ID NO: 47419 - DNA, 273 bp, Glycine max
ggttttagaggaactcaatgagataagaagaaacggggatgaaatagtcgtcagggaagggccaaagacaattattggtggatgtatagatagggagggttccagtgatatgcctagtgctttcctttgccccatacttcaggaggcaatgacaaacccacacgtggcagcagatggattttcttatgagctagaagcaatagaacactggctgcagtcggggcgtgacacatcaccaatgacaaatttgaggctgaagcacacattcctcac

SEQ ID NO: 47420 - DNA, 273 bp, Glycine max
cgcgaaggatcatggtggggttcagaaacagatacatggttatggaggtttttctgaaccctaatagggacaaaggtggggatgattctgttatagttacacagtttaatgtctccaaagctgtaagagacagcatactggtgaattttggggagtgtggtttggcttcgtcattgggatcgtttcaggggaacagtatcagacagtatggtccgccattacaatggtcacaaatattggaaactgcccggtcatgtttaacttgctggattt

SEQ ID NO: 47421 - DNA, 244 bp, Glycine max
ctatttctcaatctctctgtgtgcggctgaggattccgaacgagtgaccttccccgtttctcgcaaagtttaagtcatcatgggtaaggacaaggttcacatcgacattctcgccagtgaacatgtcgactctggaaagtcaactaccactggtcacttgatctacaagcttggaggtattgacaagcgtgtgattcagcggctcgagacagaggctaccgagatgaacaagcggtcattcaag

SEQ ID NO: 47422 - DNA, 274 bp, Glycine max
tgagtcctcaaagatctatgcttacctcttcctctgcatgatctttctctcttccgccactcccattctcggttgtgcgtactgtggcaaaccccccaaaaagcacaagcctggtcaaaacaccaaagacacccaaaacacccgttgttaagccaccagtcaccatccctcccattaatgttcctcccgttgttcttccaccaatagtgaagcccccaggtattctccctccaattccaattattaacccaccaaccacaccagggaagggagg

SEQ ID NO: 47423 - DNA, 254 bp, Glycine max
cgaactgagcttataatgattcatttctaattcctagttttctaacttttttctatatttcttttctctcaatttgcaagaatatactaattcagtttcatcttgttaatcaattagatctacgacttcgacggggattataaggatgtcggcatttctctgttcacaacaaaatatatggttttcaaaaattgcctatctaatgccaaatctgatacaattctgtcagcatggaatccccaacccgattgggg

SEQ ID NO: 47424 - DNA, 262 bp, Glycine max
ctcccttcaagatgcagatcttcgtcaagaccctcaccggcaagaacatcgaccttgaggtggaaagctctggcaccaacgacaacgtcaagggcaaggatccaggcaagggagggaatccccccggaacaagcaacgtctgcattttcggccgagaaagcaacttggagggacggaggtacccttgctggactacaacattcagaaggcgagtactcttcacatcgtcctccgtctccgtggtggcatgcagatctccgtt

SEQ ID NO: 47425 - DNA, 110 bp, Glycine max
gttgtgagctataagccagtatatcgcgaggagaatatgaagtcgtctgtcttccccgtcgccgcagtagtccccgcagcacggccacgccatggcgcaggctaccaaag

SEQ ID NO: 47426 - DNA, 262 bp, Glycine max
agccttcaaagaagtagccatcattcggcatccacgtattggagaatatgcatttggattcatcacctcatctgttacccttcagaactattctggagacgaggagttatgctgtgtctatgttcctacaaatcatctttatattggtgatatatttcttgtcaacaccaaggatgtcattaggccaaacttatcaattcgtgaaggaattgagattgttgtttcgggaggtatgtcaatgccacagatcctatcaacgatc

SEQ ID NO: 47427 - DNA, 149 bp, Glycine max
gctagtttatcgtgaggagaatatgaagttgtttgtcttctctgttgctgcagtagttttcgtagcatggccatttcatggcgcaggctaccagaggttccctctccggaatgaaactgggtatggtgagcgttcttcggaggtaaatg

SEQ ID NO: 47428 - DNA, 274 bp, Glycine max
gggggcacgaagggttctagtgacaggcacgggaccactgggttgcgtgccagcagaattggctatgcacagccaaaacggagaatgtgcgactgagctgcaacgagccgttaacctgttcaatcctcaactcactccaactactgcacgaacttaacactcaaattggctccgatgtcttcatttccgcaaacgccttcaccatgcatttggatttcgttagtaacccacaagcctatgggtttgtcacgtcaaaagtagcatgctgtggtca

SEQ ID NO: 47429 - DNA, 194 bp, Glycine max
tctgcgttcggctcgaggttcactcttattctcgatgcggatatggcctcagcgctttccttgtagcattcaatgacgatcggtcaggttacggttcacaacagtatcgtggtcattggccatgtcgaatctgggaattcctctctcactggtctcctgatgtggaagatccgatggtttgataggcgtgttat

SEQ ID NO: 47430 - DNA, 258 bp, Glycine max
aaacacaagccaagtgaaagtgagaaaaaataacaatcaaagagcataatgtcacggatcactcacaagattggggagacccttcatgtgggagggcacaagaaggaggaggtgcataagggtgacaccatgctggagaatacatggggaccaccatggtgagcacagtattgagtacaaatgagcgcatcctggtgaatccacagctggctacctacatggtgagcacaagccagtgctcgcacaggggttcctaga

SEQ ID NO: 47431 - DNA, 190 bp, Glycine max
cacaaacagagcaaaactcgctccaccaatggcgggttacagagccgacgacgactacgactacctcttcaaggtggtcctgatcggcgatcggcgtgggaagtcaactcctcctcgctcacagacgatcattgatcagtcacatgcgcgatccacgactgcgcgatcaatcatagcaactggacgagca

SEQ ID NO: 47432 - DNA, 271 bp, Glycine max
gagtagcggcattaaaaatgcagatcttcgtgaaaactctgacagggaagactataaccctcgaggtcgagagcagcgacaccatcgacaatgtcaaggccaagattcaagacaaggaaggcattcctccggatcagcagcgtttgattttcgccggaaagcagcttgaagatggaaggaccctggccgattacaacatccagaaggaatcaacccttcatctcgtcctcaggcttcgtggtggcatcattgagccttccctcatggcttt

SEQ ID NO: 47433 - DNA, 213 bp, Glycine max
cttaattgttaattctggtaaattatagtgtatgaacttttaaaaacaaaaaaaaaaaaaaaaaaaaaaaaaaaaaaaaaaaagaaaaatagaaaaaacaatagaaaagacatagtcccaggggggacgaacactgggctatggtgccgtactccggatgtgaaatgcgcaagttggcggcgtgctgtcgtacgccacaacatctgtcgcttc

SEQ ID NO: 47434 - DNA, 263 bp, Glycine max
tgaacacaagtagcagagtttacaatagctcatgcacgtgccactctctcttgggaagaagcattgaagaatgcaagcactattgggtatttcaactcagctcaagccttggcagattatgcatcaatactcaaacatgtaaagaagacattacacgccaaaaattccccagtgattgtacttggaggatcatacggtggaatgcttgcttcatggtttaggctcaaatatccccacctggcgattggtgccctggcctcatc

SEQ ID NO: 47435 - DNA, 271 bp, Glycine max
ccagacagcaagctcatcctagcgttgtaaaaacggtagcagactcctccatgggtctctcttccccatccttggctggcaaagccgtgaagctgggcccatcaggccccgaagtcgggaaggtcagcatgacgaagaccgtcaccaagcaggactcctcggaagcccatggtacggcccagaccgcgtaaagtacttgggcccattctctggcgaacctccgtacctagtcactggcgagttccaggtgactaggctgggacactgctgg

SEQ ID NO: 47436 - DNA, 236 bp, Glycine max
cgcagtgaaagtatacggtctccactgtgcttccatcaagcgggtgctggtttgtctggttgagaaggatgtcgaatttgatgttgttcctgatgatgtctctaagggggagcagatgtgatctgagtacttcaaactatagtcatttggagttgtcctgtcatcaatgatggagattatatcttatatgaatctcgtgctataatgatgtattatgctgataaatatagatctca

SEQ ID NO: 47437 - DNA, 231 bp, Glycine max
cagagcagagagaccttgaagagctatggacgtcggaaagaataacgaggatttccaagggaaagaagggtggaaacacgaaagcagctgagccctttgctaagaagagatggtacgatagcaaggctccttgcctcctcgaggtcaagactatgggaacacactcgtctctcgtacaaagggaacaaacattacagccgaaggactcacagatagggtattaaaggtctc

SEQ ID NO: 47438 - DNA, 282 bp, Glycine max
cggctacaaatttatgtttgtaggtcaaggctctggagtatgttggactggctccaaagggtagtctaagggttcaagatttcctagagacggctgcagagggactagttgaaggaggacagtaagtttcgcatctatctcataatatcacttctagccatgcatatgaaatttatggatatagtttttcacctgagtacaaatgaggatgctctttgcaacatgtacagttctcctcatcaatgtggcaatttttaatcctcaaggtctctaatctgagtc

SEQ ID NO: 47439 - DNA, 289 bp, Glycine max
ctttgttgtgagctataagctagtttatcgtgaggcgaatatgaagttgtttgtcttctttgttgctgcagtagtcttggtagcatggccatgccatggcgcaggctaccaaaggttccctctccgaatgaaaactggctatggtgagcgttcttcgaggtaaaatgcgcaagtcttaggcttgctgtggaagcacacaacatccgagactttaaaaccattcctgaagagtgcgttgaaccaacaaaggactacattaatggcgaacaatttagatcagactctaaaa

SEQ ID NO: 47440 - DNA, 270 bp, Glycine max
cgccaacctagtcttattcatcaactcggccgaaaacttttccaatgcggcaggccgcagaccctgttcgtggaaataccccatccaatggccgctcctagaggacaccaacaccaaaacaaacccactaagatggcttcctttgtatccttcctagtgctgcttcttgcagcccttatcctcatgcctcaagggcttgctacttactacaaaccaattaagaagccaccagtgtacaagcctccagtgtacaagccaccagtgtacaaa

SEQ ID NO: 47441 - DNA, 277 bp, Glycine max
tcagttctccgctagctgtcaagacgctctatacgtgtagtgctattctgcgtcttgccgcttcactctcagatggctcgtgctgataactagacagttggagattctggcgcgtagagctgaaacactgttgcctggcccagaggaaagcactttcgggctggcgatgcacgtgcttgcaattatagccctgggactcacaacctggtggccgtgaacaaggcttgatctgatagctggaagagtccaagaggaaccacagtgtacaagtcaagga

SEQ ID NO: 47442 - DNA, 274 bp, Glycine max
gtttgttgtgagctataagctagtttatcgtgaggagaatatgaagttgtttgtattctatgttgctgcagtagttttggtagcatggccatgccatggcgcaggctaccaaaggttccctctccgaatgaaaactggctatggtgagcgctcttcggaggtaaaatgcgcaagtattaggcatgctctggaagctttcaacatccgagcatctataaccattcctgaagagtgcgttgaagcaccaaatgactatattaatggcgaacaattt

SEQ ID NO: 47443 - DNA, 172 bp, Glycine max
gaatcggtcggcggctcgagggagggttgggtgactgtgcaggaggaggactgggtggtggtgcaggagactgagttgacgctggtgctggtgccggtgccggtggtggagctggagctggagctggtggtggatttccatgaaaacattaatattgttacactctccatat

SEQ ID NO: 47444 - DNA, 303 bp, Glycine max
ctgcagacagcttggatccttgtcaagcgcagtgctgaatataaacctttgcagtttttagcctttgcctttgtttataggctttttgagaagttaaaaacctttgaatctcctgtaacccccaaatataatgtgagtttcatcttttatgacagcaaatttggtgaaattttaaaatcttctgtttttgaaccatgttgagtttttagtagaattgtatagttcatgttactgttggctacaggaagagggtgaagacacaggcgaaggactccgcatgggaaaacgattgcttcgatcact

SEQ ID NO: 47445 - DNA, 269 bp, Glycine max
ctcttttgcacacccaaccgttcactaatctcactctgttccgtccaagaagaaaatggcggtgatggcggttcatcaattcgcgcaatgcatcacttgccacgcttggagccctgaccaatccatggttgctttatgcccaaacaataatgaagtgcacatctataggttggttgaagacaaatgggaaaaggtgtatgttcttcaaaagcatgaccaggtaatttctgggatagactggagtgcaagatcaaatagaatagttacgc

SEQ ID NO: 47446 - DNA, 265 bp, Glycine max
agcaacatttgaaaatgttgaagatggctgaaagaattgcggaaccacaacaatgttggcatctgtgtgggtaataaatcagaccttcgtcaccttgtagccgtgtcaactgaagatgggaagtcctatgctgagaaggaatcactttacttcatggaaacctcagctctggaggctactaatgtagagaatgcctttgccgaagttctgactcaaatctatcacattgttagcaagaaagcagtagaggtggctgaaaatgaac

SEQ ID NO: 47447 - DNA, 256 bp, Glycine max
  unsure (1)..(256): unsure at all n locations
tccaggatacaatccagaggctttgctaaaacgtcttccactagatgctttgtctcgnagatcatgctatattgttggggattatgaaccgacatgaactgccattatctttgtatgttcttaagcttaatgctccagaattggcattgtcttattgtgatcgggtctatgagtctatgcatcagccatctgcaaaaaattccagcaacatataccttctgcttttgcaaatttatttgaatcctcgaaggaccaa

SEQ ID NO: 47448 - DNA, 269 bp, Glycine max
cttcaccgcgcaccacactgagaggaagagggagtgagagagagtgttcttcgtttgctaccttctcccagaaatggttacgttcaggtttcaccagtaccaggtggtcgggagggctctcccaacggaagcagatcagcatccgaagatctaccgaatgaagctctgggccaccaacgaggttcgcgccaagtctaagttctggtattttttgaggaagctgaagaaggtgaagaagagcaatggtcaagttcttgctatcaacgaga

SEQ ID NO: 47449 - DNA, 269 bp, Glycine max
ttgaatctcagaattctctaaaagagatctttttctgctctttgaagaaagaagggtctttgcttgattttggagatgtctctgctctcagatctcatcaaccttaacctctccgataccaccgagaaggtgatcgcagagtacatatggatcggtggatcaggaatggacctgaggagcaaagcaaggactctcccaggaccagttagcgacccttcagagcttcccaagtggaactatgatggttccagcacaggtcaagctcctgg

SEQ ID NO: 47450 - DNA, 252 bp, Glycine max
gtggtctccactgactttatcggcgatagagatcaagtatttttgatgcaaaggctggaattgcattgaataagaactttgtgaagcttgtttcttggtacgacaacgagtggggatacagctcacgtgtcattgatcttcttgtattcgttgccaagaagtctctttaaggtgttacttcaaagtagcttgtcttcacattattaccgtatgtttatgtttagctgcgatttagtgtcttgctcgagcaaa

SEQ ID NO: 47451 - DNA, 248 bp, Glycine max
agttcgacgagtcggacaagggagagaagaagcagatgctgaaattcttcaactggttcgtgttcttcataagcttggggacactaactgcagtgacggttctcgtgtacattcaggatcatatagggaggtactggggctacgggataagtgtgtgtgctatgctggtggctcttctggtgttgttgtcgggcaccaggaggtaccgctacaagagactggtgggaagtcccttggcgcagatcgcg

SEQ ID NO: 47452 - DNA, 250 bp, Glycine max
accaaaccaaaccccattttattcattctcaaaacttctctctagctagctagcaccgttcatcactcacattattctttctgagaatgcattatcaagcagcagcggcgtcgtgggggagctacgtggcgggggccccacggaacagcgcggcggcggcggtggtggtgggggacccactggagcggatagagaggctggcgtcggagagcgcggtggtgatattcagcgtgagcacgtgctgcatgtg

SEQ ID NO: 47453 - DNA, 248 bp, Glycine max
ctcctggtgacaatgtgggattcaatgttaagaatgttgctgttaaggatttgaagcgtggttatgttgcctcaaactcaaaggatgaccctgcaaaggaggctgctaacttcacagcccaagtcatcatcatgaaccaccctggtcagattggaaatggctatgcccctgtcctcgactgccacacttctcacattgctgtcaagtttgctgaactcatgaccaagattgacaggcgatccggcaaa

SEQ ID NO: 47454 - DNA, 265 bp, Glycine max
cgacgattcgccttgctcgtcaaactgagcgctctcgtagatctgcacacctggagatggagcttatctctaaattaagacacccattcattgtggagtacaaagattcatgggtagaaaagggttgttatgctgcatcattataggttattgtgagggaggagatatggcggaagctataaagaaagctaatggtgtcctgtttcctgaggagaaactttgtaagtggctcgttcaacttcttatggctcttgactacttgcac

SEQ ID NO: 47455 - DNA, 257 bp, Glycine max
cacaggcaaaccagatccaaccctagatcctaagtatgttaacttcttgcaaaggaagtgtagatgggcctcagagtatgtggatcttgatgctacaacaccaaagacctttgacaatgtttactaattaatctcgaaaagaaaatggggttgttatctactgatcagttgttatactctgatgcaaggacttctccccttgtttctgcattggctgcctcgcactcagtttttgagcaccagtttgctgtgtcaat

SEQ ID NO: 47456 - DNA, 261 bp, Glycine max
ctgcctttggcattttttcgccaatccctgaggagaactgaaaaaagcagaaagtatggcttcgacggcagcgtacctggctcggcgcgcggcgcagaaggagagggttcggatcctctaccgccgtccctcaaagacactctcaactgggccgtacatcgccacctcttctacgacgacgcttcaaacctccgcgaaaggttcgaggagaacagacacgtggaagaccctgataccattgacaggctcatagcggatgct

SEQ ID NO: 47457 - DNA, 277 bp, Glycine max
aaaatcctcacccattttcttcgtagccaaacactctgaaattctcagttatgtcgtggcaagcgtatgtggatgatcacctactgtgtgaaatcgaaagtaaacaactcaatcacgccgcaacctcgggccagaacggaaccgtttgggtccagaccaccaatttccctcagtccaaacctgaggaaataactgccatcaataatgactttaatgagcctggatcacttgctccaactggattgtatatcggtggcaccaaatacatggtcatcca

SEQ ID NO: 47458 - DNA, 271 bp, Glycine max
agcgtggctccttctctgggaaggactaccaggaccctccaccagcaccactcattgatgctgaggagctcacaaagtggtccttttacagggcccttattgctgagttcattgccactttggtcttcctctaaaataatggtgtcacaagtattagggaacagccacaaacgggtccttgtgatgcgttttgttggggttggcatccttggcattgcatgggcctttggtggcatgatcttcatcctggtctactgcactgctgggattt

SEQ ID NO: 47459 - DNA, 270 bp, Glycine max
cgagcgaagagaatggctcccaagggtttaatctttttggctgtgttatgcttctcagcactgtcactgagtcgttgtcttgcggaagataatggactttgtatgaacttttacaagaatccatgccttcaggctgaagccttcatcaaagaccaagtcaagcttctctacaagggccacaggaacactgctttctcctggctcagaaacatcttccatgactgtgctgttcagagttgtgatgcttcactgttgctggactccacaaga

SEQ ID NO: 47460 - DNA, 278 bp, Glycine max
tatcgagccgctcgagccgcgcgtcgctccgcaccagtttcaccgcacgaatatcttcgttgtactggacgcgattcgcgagaataaacttctgtacaaccatgtttggtttaaccatgaacttccttacaggtgatgagcttctctctaattctttcggttacaaggaaattgagattggaatgctgtgggaagttgaggggaagtgggttgttaaaggagcagttgatgtagacattggtgcaaacccttctgctgagggtgaaggagaaattaag

SEQ ID NO: 47461 - DNA, 269 bp, Glycine max
gtttctccttttccctatactatattcaattatgccgtggtagtcacaaatatgaggttttggccctacttatgtggatcagtagctggcatggtaccagaacgtttcctctaaactacagtggtcggttcataaaggacttggccagaggcccataatgggaagcaccacttgactactgtggaaatcgtatacaacattattcctttcattattgcactagttaccactattgccttcactgtctatgccaaaaggagtctaaatcc

SEQ ID NO: 47462 - DNA, 247 bp, Glycine max
tagtggagatgttttcccaggctccacactttctgaccatgttttgcggtttaacaacataccacaggttaaaatgatggttgtacttggggaacttggtgggcgtgatgagtatctcctgtggaaagcctaaaaacaagggaaatgaattaaacaattggttgcttggttaacgggaacttttcaaggatcttcaaatctgaagtaccatttggtcatgctggagcttaaagttgttgttagatgg

SEQ ID NO: 47463 - DNA, 264 bp, Glycine max
ccgtgagacacaataaaaatcaaagagcataatgtcagggatcattcacaagattggcgagacccttcatgtgggacggcacaagaaggcggaggaacataagggtgaacacatgctggagaataccaaggggaacaacattgtgaacaccgtagtgagtacaaaggggagcatcatggtgaacaccaaactggagagtaccatggtgaacacaagccagagcacaaagaggggttcctagacaaagtcaaggacaagatccat

SEQ ID NO: 47464 - DNA, 241 bp, Glycine max
atccttctaatggggccaaccggatcagggaagacattacttgccaaaactttggctcgatgtgtaaatgttccctttgttattgcagatgcaacttcactcactcaggcaggttatgttggagaggatgtggaatccatattatacaagctcctcatggttgcagattataatgttgcagctgcacagcaaggcattgtttacattgatgaagttgacaagattactaaaaaggctgaga

SEQ ID NO: 47465 - DNA, 236 bp, Glycine max
ggagagctctgacaccattgacaatgtgaaggccaagattcaggacaaggaaggcatcccaccggaccagcagaggctgatttttgctggcaagcagctcgaggatggaaggaccctcgctgactacaacatccagaaggaatcaacccttcaccttgtcctccgtctccgtggggggttttaagctcgttgtgtaatgttggatgtgttcccaaaacatttgaagaactttgatg

SEQ ID NO: 47466 - DNA, 108 bp, Glycine max
aaaatcagcacggcaccttgcccactcttcttgtttctgcttcaagcgtgttaatatcactggcaaagctagaggtgcattcttccttaacacttccacacgacatac

SEQ ID NO: 47467 - DNA, 225 bp, Glycine max
tggtaacaaagctgatattgctgcaaaagatggtccaagaggaagcagtgggaatcttgttgatgttgcacgccaatgggttgagaagcagggtttgcttccttccagtgaggagcttcctttgactgagagtttcctagtaatgggggccttattgctgctgccaaagaagcaaggcatgacaaggaggctgtggtgaaatttttccgcaagttgatcaggaga

SEQ ID NO: 47468 - DNA, 251 bp, Glycine max
cagattattaagaacttgcagtgagcaagagaagtcaatagccggattacaagatgggtttagcgaggagcttcataagaaccatcccatggagagtgttgacaagcacattgcaaaccatcacatggagaatgttgacaagcacattgcaaaaatgcgaatggagcaaatgagattaacgggtgtagaactagccttgagaaaggagttagagtcttgcaggtttcaggcagattctcttcgccatgaga

SEQ ID NO: 47469 - DNA, 246 bp, Glycine max
attccttcttctcccagaatcggtcactaaatccgcaatcatgaagctcgataccaccggtctcgaatcgtttcccacactgcttgcgcctcaaaacgacgtcgttggagaactctccgccgctccatccttcgatgggtttgtgaaagaagctattcagatggtgaagcccgcgaagggtattacgactcttgcttttatatttaaggagggtgttatggtagctgctgattctcgagctagcat

SEQ ID NO: 47470 - DNA, 250 bp, Glycine max
agcctatcttgcaaggaaacaaaatttaagtgtgactgaagcagtgattgatactttgagcaaagacggttatgacaaaccaggggctccaaaagttatgattcaatccactaatagttctgtactactgaaattcaaggagaaaaccaagtacgagcttgtctacaagattgatgagataattcgtgatgctgttgattcagctatttcggatatcaaaagatttgctcattctgtggttgtcaagaag

SEQ ID NO: 47471 - DNA, 223 bp, Glycine max
cggcaacagtgtcttatgcggtgtcatgaagcgcgtgccagagccaccgtggcgcgtcgagaacagaggccaaagtgaattattcggctcaggtaagtctcaactgccagggattgagatccttgaacaagctgcacgtgcgaaccacccgtgcggccaaaaccaaaaccttgctgtctgcgaaaagtaacaagagtgggcgtgagggagtttttgggaggat

SEQ ID NO: 47472 - DNA, 263 bp, Glycine max
aattgagaagattccgttgccgtaatgtcaaatccaaatcatattcatattcttcgtgttcttcttctcgcccctgcattgatggctagcattgtgaattcaatgcagttcgagctgaaatccggtcaatccaagtgcatttccgaggatttgaagagtaacgtcatcaccgtcggtaattactacgttcttaatcccaacaacgatggattccccattcctgattctcacaagatcactgtgagggtgcgttcaccttatgg

SEQ ID NO: 47473 - DNA, 263 bp, Glycine max
ggcatatgtgccattgatgaatttgacaagatggacgaatccgatcgtacggctatacatgaagttatggaacaacagactgttagcattgccaaggctgggatcactacatcgctgaatgcaagaaccgctgtccttgctgctgctaatccagcttggggaagatatgatctgagaagaactccagctgaaaatattaatcttcctcatgccctcctatcaaggtttgatcttctgtggttaatccttgatcgagctgatat

SEQ ID NO: 47474 - DNA, 122 bp, Glycine max
ctccggaaacggcgccgcgccgcctgccaccctggccgagttcaccctggacggcgccggaggactcgatttcttcgatgtaagccttgtcgacggctacaacgtgccgatgctggtggtgc

SEQ ID NO: 47475 - DNA, 262 bp, Glycine max
gttgcttctgcggctagcatttcagagtcttggtgtggtttatggagacttgggcacttcacccttgtatgttttctacaatacatttcctattggagtgaaagatgaggaggatgtaattggagcgctttctttgatttctactctcttaccttggtgccactcctcaaatatgtttttgttgtattaagagcaaatgacaatggtcaaggtggaacatttgcgctttagtccttgctttgccggcatgcaaagatgaaaa

SEQ ID NO: 47476 - DNA, 263 bp, Glycine max
  unsure (1)..(263): unsure at all n locations
agcttacagacaagtcacacactgagacgacatcgnttcttgaattaaagatgaagacaacttctggaggaggaggaggagtaggagcagcagaaagtgataacagaactgccaccgtgggaattgaatttaccaagacaagaatggaatatccctactcgttcttcgaaaccaccgtggagcttcagcaactgttagtttgcacggaggccaggttctttcctggaaaacagaacttggtgaggagttactcttcataagta

SEQ ID NO: 47477 - DNA, 284 bp, Glycine max
cgccactcttcttcttcccacgctcctccttctcatacccttcgccaccctcgtctccgcccgccctcacctcgccggagactttctccgactgccctccgaaaccgataacgatgacaacgtccagggcacccgctgggccgtcctcctcgccggttccaatggctactggaattacagacatcaggctgatgtttgtcacgcctatcaaatactaaggaaaggtggcctgaaagaagaaaatattattgtttttatgtatgatgacattgcattcaatgggg

SEQ ID NO: 47478 - DNA, 284 bp, Glycine max
tcttcgtctcaaacctcttcgttccttcgattcattccatttcttccaaaatggccaaagacccagttcgcgttctcgtcactggagccgcagggcaaattggatatgctcttgtccctatgattgctaggggagtgatgctgggtcctgaccagcccgtgatcctccacatgcttgacattcctccagcagcagagtcgttgaatggggttaaaatggaattggtggaaggatgtgatgactaagaacgtctccatttacaagtcccaggcttctgcccttga

SEQ ID NO: 47479 - DNA, 278 bp, Glycine max
tacccgatttaccaaccgggttcttgcccttatgtggacgaggcttacgattgcaaagttaacggaagaaccgacaccctctacaccaattggcgctggaaacctgatgcctgtgatcttcccaggtttaatgccacagacttcttggtgagactgaaaggtaaaaaactaatgctggttggagattctatgaaccggaatcaatttgagtccattctgtgcatactacgtgaaggcctgcacaataagagcagaatgtatgaggtacacggacacaa

SEQ ID NO: 47480 - DNA, 279 bp, Glycine max
aagagaatggctcccaagggtttaatctttttggctgtgttatgcttctcagcactgtcactgagtcgttgtcttgccggaggataatggacttctaatgaacttcaacaagaactcatgccctcaggctgaagacctcaccaaagaccaagtcaagcttctctacaagcgccacaggaacactgctttctcctggctcagaaacatcttccatgactgtgctgttcagagttgtgatgcttcactgttgctggactccagaagaaggagcttgtctga

SEQ ID NO: 47481 - DNA, 268 bp, Glycine max
agagacaggcttccctgttgctgtacagcttggaactatcactgctgatactggagcatcacatgtttactcttatccagatgatgaaagtgtcttggatccacaattagcgcacatctggcattttttggcattgacttttcatcactacgaaagactgaaatgacaactgctgaaagagaacttgatcagaatacgaattttgagtggaatcgaatccaagacagtggacgagaagtagatccaatttttggacctggatatacag

SEQ ID NO: 47482 - DNA, 267 bp, Glycine max
tctcgagccgctcgagccgaatcggctcgaggaaacaacaaacacacgaccgaaaaggcgaaacggcgtttacgagtgagatctagggtttccatcgatacggagagaggatattgatagaacgacctcaacgagcaaggtcaggaggtggagtactagaacatggattcggtgccttcgaattcgcatggaaacctcgatgagcagatttctcagctcatgcagtgcaaacccttgtccgagcaagaggtaaaggtcttgtgtgat

SEQ ID NO: 47483 - DNA, 282 bp, Glycine max
ggacagttgggcaggatgccacatcgagtttcaacacgaggttgatgtgttgagcaagcttaggcatcctaatcatatcacactcataggggcctgtccagattcatgggctcttgtctatgagtatttacccaatggaagctttgaagatcgtcttgcctgcaagaataacacccctccgttgtcatggcaagctcgaattcgcattgctgctgaactatgctccgctctcatctttcttcattccagtaaacctcacagcgtagtgcatggtgacttaaa

SEQ ID NO: 47484 - DNA, 259 bp, Glycine max
cggatatcagaactcgcttctactcaaaaacatgtccaaaaacggcaggcagagagcgagatgtactgtagatagcccctatgaaggaggccacaagtgtcacctctgtcaggcgcgtccagatccatgaaggctttgtgaatgagtgtgatgggtctatgttgcttgatgacacagcaacgaggctcgagggagaaaatcggactcaaatataaattcgctgagatcatataaagtgggtgatcgagtcaagctagcg

SEQ ID NO: 47485 - DNA, 252 bp, Glycine max
agaaaaggtggtggcagctggcaatcacgtgacacaagggagctgttttatagtttccaccgtgatgatgttcctgcagaatctgttatgcataagtgtgtggtgcattttgttcccatacacaaacagctcccaaatcgtaagcagcatcctgggtttattgtgcaaaaggtgtatgacacagtagaaaggaaactctaagcttactgataaggattatgaggacaataaacagcaagaaattgatgagct

SEQ ID NO: 47486 - DNA, 248 bp, Glycine max
ctcattgagtcattgtccaactctccataattatttctcttcgatctctcgctgtcaccatgatcgacggtgtagcaatatacaatattgtcgcggctcttgtgccgctatatgtgcccatgatattagcctatgcctcagtcttgtggtggaagatcttcacaccggaacagtgttccggcataaaccgcttagggcactgtactcggttccctttcttaatttcaatttcctagcctttaacaatc

SEQ ID NO: 47487 - DNA, 247 bp, Glycine max
caacgaacctgctatctatgcagcagttcttcaagaacaggaagagatagcaaaaggcaagctctcaggagaggcactgacatgggaagacctttcaaagatgaagtacacctggagagtagcaatggaaactattaggatgtttcctcctatttttggtggcttcagaaaggcagcaacagatattgaatagatggatacttcatacccaaagggtggcagattttctgggtcacagcaatgacac

SEQ ID NO: 47488 - DNA, 271 bp, Glycine max
actcgagccgattcggctcgaggaaattttgtgaacaagagatatgagggaccagaagttcactgagaaggaaaacattgtgctcatcacagtggtgtgttgtagccccgagaagataagagacaagctttgctacaaaggtggaggctctatcaagagcattgagatactggaactgcccaagctcaaggccgagaagcctaaagcagaccctcccaaagctgagaaggccaaggccgagcccgagaaaaagaaggacggtggcggcgag

SEQ ID NO: 47489 - DNA, 279 bp, Glycine max
  unsure (1)..(279): unsure at all n locations
ttccgctcgacgttaatccatcatcacttcacttcactaatacatcatggcagacgcgtcncagaacaagtatgacagctctgacgttgacgtncaggatcgtcgtgtttttcactttctcggtaagacaaggatgaagaagataagcctcatcttcaggaggaggtcatcgctaccgagtttcaaaaagtcactgtctcagattaaggagagaacaagtacagtctcttagaaaagcttcactgatctgacagcagctctagctcttcaagtgaggag

SEQ ID NO: 47490 - DNA, 267 bp, Glycine max
atctcatcttcccaaaaccctctctcttctctgatctcattttaaccctaaccctaaccctaaccctaaccctaaccctatcagaagaagatgttgacgaaattcgagacgaagagtaacagagtgaagggactgagtttccatccgaagcggccatggatcctggcgagtctccacagcggcgtcatccagctctgggactaccgcatgggaaccctcatcgacaagttcgacgagcacgacggccccgtccgcggcgtccatttc

SEQ ID NO: 47491 - DNA, 264 bp, Glycine max
ataaacatgaggtgtatggcttccttaagctcctcattagtgctgctccttgcagctctaattctatcccctcaagttcttgctgactatgagaagcccccaatttacaagccacctgtttacacaccgccagtttataagcccccagttgaaaaaccaccagtgtacaaacctccagtgccgaagctacggaggcacccgtgccggcttaagagcacaaggcctcgatatcactgcagaggactaccacggtttcgtgcacgg

SEQ ID NO: 47492 - DNA, 265 bp, Glycine max
cttcctccgctcaacaactataagattatcttcttcttcttcttctcttcaattcttctccaatcccaaccgcaccctcttccgtccctttcttcacacttccttcaaaccacttccttcgtctttctctttccgaacagatcacactatggccacctcaaacgccaaatcagtccatgatttcaccgttaaagatgccaagggaaatgatattaaccttggtgactacaaaggaaaggtccttatcattgtcaatgttgcctca

SEQ ID NO: 47493 - DNA, 235 bp, Glycine max
tgaagagcggagagcatgggtcccaagggtttggtcgtgttgggcgtgttatgcatctcagcacggtcactgagtcggtgtcttgaggaggatgatgggctcgtcatgaacttctacaaggaatcatgcgctcaggctgtcgacgtcctcgtagagcaagtcaagcatcgctacaagcgcaatgagaacaccgcgttctcctggctcatacacatctgccatgaccgtgctggtc

SEQ ID NO: 47494 - DNA, 280 bp, Glycine max
gttgcatttgatgaggcattagaagctgtactagctgacaacaatgatgctagactggaagtttctatactggccaggagtcctgatcctgagctgactgaagcatttattaatacagaggtctatgcacgtgtatcagttgctgttctgttttacaatttggcagacttggctaggatagtgggatcaccaaatgacgatgcaaactgtattgcggcacaagaatctggcaaatcatttctactagagcttcttgactctgtggtgaatgctaaagatc

SEQ ID NO: 47495 - DNA, 146 bp, Glycine max
tgaagagaaggctcccaagggatgaatctgtttggctgtgttatgcgtctcagcactgtcactgaatcgttgtattgcggaggataatggacctgatatgaacatctacaaggaatcatgccctcaggctgaagacatcatcaaag

SEQ ID NO: 47496 - DNA, 268 bp, Glycine max
tcagatgatagggtgtactacaaggggatattcatttacacgtgctttattaggaattgctgctgatgaacttcacctttgtggtgatccagctgctgtgccccttattcaggagatattgaaaattactggtgacgagattgaggttcaattttatgagagactgtcacctttagtcccactgaatgttcctcttggatctttctctaatgtaagaaatggtgattgcattgtaaccttttcacgtcaggagatatacaaattgaag

SEQ ID NO: 47497 - DNA, 260 bp, Glycine max
cacagggagatcgcactcaaaatgtgggagttgttgatagtgaatatgttgttcacaaggcaatacaaactctgggtggtagtgatgatccgactaaagtttcaaatcggcaaaggacaactccgaaacacggtgtggcggccttcgatcaacgagttgagatacgaagacagtcaacatgggaacttgaagtcttcaaagagcggtggaatagagctattgctgaggacaagaactgggttaatccattcaagagtgat

SEQ ID NO: 47498 - DNA, 262 bp, Glycine max
ttagttttggttgtcagccatggagatcccttgcaaatcttgcaaacaattctgcatgcagctaatgaacacaaggaacccacatataatgacttagcatcaatactgactgcagttcaggtggcaccaatcttgtcccagcaccgcaaacatgcgctgcttactggagagctcagggcagtcatttgagatgtcagacccctatatatggtttcatttcaaaatacaaaacacctccccagtcatttttttaggaacaggg

SEQ ID NO: 47499 - DNA, 278 bp, Glycine max
gtcctatcaggtgttgatgttggggctggctggcaatctctagtagcatgcatcaacattgtgtgatactatctagttggattaccggcaaggataatattgggatttaaacttggtcttggagcagagggtatttggtcagggatgattgcaggcatagttttgcagactacaatccttataatcgtcacttcaatacgaaactggaaaaaagaggctgaagaagcagaaagccgcgtgagaaagtggggaggagcaatttcatatgatcaatgatt

SEQ ID NO: 47500 - DNA, 280 bp, Glycine max
ctttcttccaacctctcaagtccaacctacccctttttcttctcccaccaacttcaccgtcttcttcctcgatcatgtctcacttcaagggcaagtaccatgatgagcttattgtcaatgctgcttacattggcactcctggaaagggtattcttgctgctgatgagtcaacagggacaattggcaagcgtttggccagcatcagtgtagagaatgttgaatccaacaggcgtgctcttagggagctgcttttcaccgctcccggtgctcttaaatatct

SEQ ID NO: 47501 - DNA, 272 bp, Glycine max
ctctgcctgtatgagtgaaaaaaccttctcttttacttctctcaagtctcgagcgatttcatcatggctccagagaaggacaggctccaccaccttgcctccaagaccggcaaatctggcggtggcaagcagaagaagaagaagtcgagcaagggagagcacaaagagaaggtgaatacaatggtgctgtttgatcagggcacctatgataagctccattctgaagctcccagattcaagcatctcaatacttcgcttctttctgatcgttt

SEQ ID NO: 47502 - DNA, 245 bp, Glycine max
caaattagttcattctctttgcgcagttccctacctctcctttcaagatgcaggtcttcgtcaagacgctcgccggaaagcacatcacacttgaggtgaaaacgtctgcaaccatcgagaacgtcaagcgcaagatccgacgaacggaaggaattccaccggatcagcaacgtctcatctccgccggaatgcagctcgacgacagacgtacactcggcgacatacaagatcaagacggagtcaac

SEQ ID NO: 47503 - DNA, 259 bp, Glycine max
acaaaattcagcacaaacaatgtgaatctaatatttacaatactgaaaatgtacacagttgttggacaaagccaaaaactatattacgaagaaagtacacaaacatgcccaagacccaaggcgagtgtcaccgacgtggatttcaaacgcataaccacaacagcgtcaaatacttggctaaggtctctgaatccaacccataaaccactacccattcccatttatagatacagatatccctacaaaagtgactggcagg

SEQ ID NO: 47504 - DNA, 255 bp, Glycine max
ctgttgttgagtattctaatgttgggagaggaatgacggcggagcccaaatgcaagcgcgagatgagtgcatgtacttgtgcaatgttcatcgtatggaattgcagaagtaaagtcacagtcacagaaggtatctggtttgtttgtttttggagattcattggttgaagtaggcaacaataacttcctaaacaccatagcaagggcaaattactttccttacggcatcgacttcggcaggggttccactggccga

SEQ ID NO: 47505 - DNA, 251 bp, Glycine max
ctccaccatttaccatccttacctagcagaattttctccaatggaaagagccgcggttcgtgcatatttacacagcagggccgcaagggtattaatcaggatgccatgattgtgtgggaagatttcatgtccgaagatactatcttttgtggtgtctttgatggccatggtccacacggtcatctagtagcgcgcaaagtgagggatgcattgccaattaagctaatttcatctttgcattctaatgaatc

SEQ ID NO: 47506 - DNA, 258 bp, Glycine max
attttcctgatttcagtaatgagactgagaaggcgaatgggactaatgcataaaagaaaaccagtaaagctgccgaaaaatacagttggcaaatgttatgttacgttcctttcctctagaaaaatcccaggataggaagctggtccatagtgactactatctcgttttccaatggagcagaagcgtcctgttgggcctcttgtggttgtaggtgtcagggatggagttctttggctaattgacaggtacatggttgct

SEQ ID NO: 47507 - DNA, 249 bp, Glycine max
gttggaacatcatggcttgcgcgcaacagtggcggatgcacgtttctgcaagccattggaccgttcccttattcgcagccttgcccaatcgacatcatgcaccacctggtcataagctctctgcataaatgatgagtaaattgcacaaaaaggcttaaggccttcacaagccagaccagccgcaaatgtaacagcatgctgttctgctatccccacatcaaagcatcttgttgggaaacggcgaaggaa

SEQ ID NO: 47508 - DNA, 246 bp, Glycine max
gcttggtccatgatcctcacattagcctatggtcgtacattcattgtggagggaaatcatgttgacaaacttaagctgcaaagttgggcaatacctaagtacagtcaacaatactttattagatcacaaaaaatgcccatcaacaaaatgattgaggaaacaatattggacgcagacaaaaaaggcataaaagtgttgagtttaggtcttttgaatcaaggagaagatcttaacagttatggaggg

SEQ ID NO: 47509 - DNA, 258 bp, Glycine max
attctaacgcgctgcacacgttgtctcaatccaattttcgcgctattttcgtaatgcattaattgccggtgtcaggacaccattatttcttctcaatgcagcttatgatacttggcagatatgaaaccagtcttgctccagcatctgctgactaccattggacttggtatgaatgcagaaaaaattatgcacgttgcagtgcaccacagatacagtatcttcaaggttttcgaaatcagatgcttagatctacaagag

SEQ ID NO: 47510 - DNA, 253 bp, Glycine max
tctttatcttagggaatcttcatttatatgtgtatttttttataaaaaaaataatttgcaggagtacaaggttaaagtgatgcatgataggaacgtgtatctagttgacgttgtcagagaggatataggcagggtcttgaagcttgatttaatacaaggaagcaatctgtgggaagggactgatatgctcatctttaacacatggcactggtggtaccgtagaggacccactcaaccatgggattttgtcgaa

SEQ ID NO: 47511 - DNA, 253 bp, Glycine max
aacaacttctgctacttcctagtccaatcgcacttctgcttcgcaattatcatgggcaaggtcaagatcggaatcaacggatttggaagaattggccgtttggtagccagagtggctctgcagagagacgatgttgaactcgttgccgttgacgaccctttcatcaccaccgattacatgacatacatgtttaaatacgacagtgttcatggacactggaagcatcacgatgtcaccgttaaggacgagaaga

SEQ ID NO: 47512 - DNA, 255 bp, Glycine max
  unsure (1)..(255): unsure at all n locations
gngatttaagaagttcaattctttactcaaactttgtgttcactctttctcttttttggtgttagttcggtgaatcatggagaacccaatcgacggtggcgagttcgtgtacctttccgggttcggcaaccacttctctccgaggccctcgccggagctctgccggtggcgcagaacagccccctcgtctgcccgtacggcctctacgccgagcaaatctctggcacctccttcacctcccctcgcaaccgcaac

SEQ ID NO: 47513 - DNA, 245 bp, Glycine max
ctcgctttctctctccccgcgatggagaaagccgagagctccgcctccacatcggagccagactccgacgagaaccaccaccgccacccgacgaaccaccacatcaaccctccctccggcctcatcccctccgtcgccgagcaccactcctacctcgtcggctccgggcaatgctcctcactcctcgcccagcgcgtccaagcgccgcccgacgccgtctggtccgtcgtccgccgcttcgacaa

SEQ ID NO: 47514 - DNA, 165 bp, Glycine max
  unsure (1)..(165): unsure at all n locations
cgaaaactccttatggtcaccttcaaaaccagtcaaccaacgtgatgctgatctcatcatttttgggataagtccgaaagctcctgagttncctcagaaatgagtcgacaatttgagcatgatctgatgagtagcacaggaactatggagcttattgatgaaggt

SEQ ID NO: 47515 - DNA, 277 bp, Glycine max
caagaagaagggtctctattctctaatttacctctgcagggcttgaaaccatgactttggtagagagagttgtggttttgtttatagtgatgacaattgtgaaggtttcatatgcagctgtatacaaggttggcgactctgctggttggactacccttggcaccatagactacagattataggctgctaccaagaacttccaaattggtgacactatcatattcgagtacaatgccaattccacaatgtgatgcgaatgacgcatgccatgtacaag

SEQ ID NO: 47516 - DNA, 290 bp, Glycine max
ctagggttatcatttctccatttccattttctctctcacttttcaagaatcgtaagctatgggaaagtcttacccaactgtgagtgctgattaccagaaggccgttgagaaggcgaagaagaagctcagaggcttcatcgctgagaagagatgcgctcctctaatgctccgtttggcatggcactctgctggaacctttgacaagggcacgaagaccggtggacccttcggaaccatcaagcaccctgccgaactggctcacagcgctaacaacggtcttgacatcgctg

SEQ ID NO: 47517 - DNA, 265 bp, Glycine max
tctcgagccgaatcggctcgaggccatataatttttatttatttattataatgtccgggaacatccacaagattgaggagaccctccatgtaggcaggcacaagaaataggaccccaaaggagtacaccatagtgagcactaaggtgtacacaaaggattacgaccatggtgagcacataggtgaaccccctggagtacgacaccatgggacgcacaacgagggacttgagttataagatccaggacaagatccctggtgctggc

SEQ ID NO: 47518 - DNA, 264 bp, Glycine max
ggccaggcaagccccactcaaccaccacacctctcctcgttcacgctacccctttctgctcttcttctacctttcaagttttaaaagtataaagatggcagagacattcctatttacctcagagtcggtgaacgagggacaccctgacaagctctgcgaccaaatctccgatgctgtcctcgacgcttgcctcgagcaggacccagacagcaaagttgcctgcgaaacatgcaccatcaccaacttggtcatggtcttcggaga

SEQ ID NO: 47519 - DNA, 234 bp, Glycine max
gaaaaagacctgtggagtacatggaggatgatgtggtggttctttgtgacatggtgaggggtgcattggaagaaggcaaggtggagcaatgtgttgatgggaggctccttggtaactttgctgcagaggaagcaattcctgtgataaaattggggttgatttgtgcatcgcaagtgccatcaaatcgtccagacatggctgaggtagtcaacatattagagttaatccaatgcc

SEQ ID NO: 47520 - DNA, 242 bp, Glycine max
cttcactgaataaaagagtgaatccatatccagtgtatgaacctggaagtgcaagatgggacgaaaaaaaagaagatggatggaaagatagaatggatgactggaaattgcagcaaggcaatttggggcctgaaccggatgaagatccagatgcagccatgttagatgaagcaaggcaaccactgtcaaggaaagtgccaatagcatccagcaaaatcaatccatatagaatggtgattgtg

SEQ ID NO: 47521 - DNA, 259 bp, Glycine max
cttcaatttcaattcttttattcttcttttaattttcaggatctctggtccctcccgcgcctcttctcagagtcgcttaatttacagtctttacgcgaatcctttacgagctcgagctgtgacagaacggagtcggagcaatgccgcgacgagtcggcggcgatggttctgaaattcgtggcggtggcgtcgattctggtcgccggattcgggggagtctcgattccgctggtcgggaagtcgcggcggtttcttcgac

SEQ ID NO: 47522 - DNA, 260 bp, Glycine max
gcagctttgatcaataggtgggttggtatggaaaagaagatcatgaatagcagcatagcgaaaaaatggcgacaactcagtgggcaagatcatgggaagggtctgatagaccctctggacattgatcttcgccgctacatcattcactacggcgaaatggctcaagcggcatacgatgctttcaacacggagacagcattaaagtacgctggaagcagcagatacgccaaaaagagtttcttctccaaaggtggtttggt

SEQ ID NO: 47523 - DNA, 264 bp, Glycine max
cttcaaaccgccttcggtttgcaagcaaccgcaagagttgttgtacatactttgaaacagtgaacttgtccattcttggagcctgccaacacgtctcagaagttgctgcataccgtcttatatttcacgactcaagctctctgttgtatgacagcctctatgttggtggtgtgggtagaggtgagataagagcagcattgagaatcctcaagcagaatctcacactaatgactacaattctcacagatagagctcaaccattgg

SEQ ID NO: 47524 - DNA, 261 bp, Glycine max
cttcataaacgcctttcttctctgtttccgtttcctcgttcgaattcgctttttgatctgcgaaaatgagagagtgcatctcgatccacattggtcaggctggtatccaggtcggaaatgcttgctgggagctctactgcctcgagcacggcatcgggcccgatgggcaaatgccaagtgacaagacagttggcggtggtgatgatgctttcaatactttcttcagcgagactggtgctggaaagcacgtgccacgtgcag

SEQ ID NO: 47525 - DNA, 280 bp, Glycine max
ggactctatggcataactgatgctggccttctcccccttttggagaattgtgaggctggacttgtcaatgtaaacctcactggttgctggaacttgacagataatatagtttcagccttggccaggctacatggtggaaccctcgaagtactaaatcttgatggatgctggaaaattactgatgcaagcttggttgcaattgcaaacaacttcctagtgcttaatgatctagatgtgtcaaagtgtgcaatcaccgatgccggtgtagctgttctctcaa

SEQ ID NO: 47526 - DNA, 288 bp, Glycine max
agcggccatcatcggagtgaaaggtgaatcggtgcagagaactccagcgcggcagagaggacagttagcgtgcgagcgaagcacgcgtcgatgcagtccacgtggacagtgtgtgaacaaacgggaagcgttcttacgtaatcctcgtcttcgaattcgagcaagcaaacggcgcagtcgtagcgagactcatcaaaacgcgcgtcgtatttcgctgtataaagcgagaacgggattgttttaataaccgtttcgtccaaaccgtagggggagaacacgtgcggtccg

SEQ ID NO: 47527 - DNA, 269 bp, Glycine max
cgaagagattggctcccaagggtttaatctttttggctgtgttatgcttctcagcactgtcactgagtcgttgtcttgcggatgataatggacttgttatgaacttctacaaggaatcatgccttcaggctgaagacatcattaaagaacaagtcaagcttctctacaagcgccacaaaatcactgctttctactggtatcgaaacatcttccatgatgtagctgttctgagttgtgatgcttcactgttgctggactccacaagaagg

SEQ ID NO: 47528 - DNA, 268 bp, Glycine max
gagaaccttattaaatatggtatccattctcttacctattggattgttgatagaattttttccttggaacctgggaaaaaattctatcaacaatccgataggtaagagaatggttcccaggttccaaggaaatttaccagtaaaattgaagggaagatgaactatgaagattttgtttattttatacttgccgaacgctataagtcatccgaacctagtctcgaatactggttcaaatgcattgatttggatggaaatggagtgctga

SEQ ID NO: 47529 - DNA, 269 bp, Glycine max
taaacatgaaaattctctttgaaaagcttctttctcaatttcctcaagtcattccttggtcttttgccatagttataatctctcttcatgttagttcggtgagtctaccaaactatgaaagtatcccagcagtgattgtgtttggggactctatagtggatacgggtaacaataactacatcaccaccatagcaaaatgcaattttctaccatatggtagagattttggtggaggaaatcaaccaactgggaggttcagcaatggttta

SEQ ID NO: 47530 - DNA, 267 bp, Glycine max
caaccatgaagaagttcgacggtttcgaggtgcgagatctgactgtacctgagatcaaacagattgcagggagagctggtagatatgggtcaaattttcctgtaggagaagtaacatgcatggatgaagaggatctacccttgctccattcatctttgaattctccatcacccattttagagcgtgctggcatacttcctacctttgatctgatgtatatgtattcacgattacatccaagaaatggtttctatcaaatactggcgc

SEQ ID NO: 47531 - DNA, 273 bp, Glycine max
caagatctcctcacaggtgtaagctctgcatctggtgctagtggatatgatcctctaacttctaaaatagcatcagcattgtcattgtcagatcaactggacacgttccgggagtacaaaaacaagataatggaaatagttggagaaaacagaacggcaacaataatatcaaaaagcatatacatcttgtgcacaggaagtaatgacattaccaatacttactttgttagaggaggagaatatgacattcaagcatacacagacttaatggct

SEQ ID NO: 47532 - DNA, 226 bp, Glycine max
aatcttttgggcttttgtattgttcgcagcacggtgcactgattcgttgtcttgcggtggataattgactggttatgacactcgacaaggaatcatgcttgcaggcttaagacatcatcaaagaataagtcaagcttctctacaagcgctacaagatcactgctttctccttgctcagaaacatcttccatgactgtgctgtatcgagttgttgtgcttcactgtt

SEQ ID NO: 47533 - DNA, 302 bp, Glycine max
gttgaagaaagcataaaacaaatatatgagttggtttctattgaaacgaggttaatttctttgtttgtgatgaaaatgttgagagcagattcaagatgccagagaaatcaataccaaaggatgcagcttttcagataataaacgatgagttgatgttggatggtgcaccaaggctcaacttggcttcgtttgtgaccacttggatggagcctgagtgtgacaagctcataatggcttcacttaacaaaaactatgttgatatggatgagtatcctgtcaccactgagctccagaaccgttgt

SEQ ID NO: 47534 - DNA, 284 bp, Glycine max
tggagatcctgcttttcctggaggattgccgggtgttcctcccggtgcgcgatttgatccatatggacctcccggtgttcctggttttgaacccaacagatttgcaaggaatcctaggaggccaggatatgacactcatccagattggcaacattttcggagagatgctgattcagactacatatagtcgtaatacggacaagttgtcttaagtcaatttaccaaaaacaacttgagcaaatactagttatatggacaaattgttctccatgcgtattttcttt

SEQ ID NO: 47535 - DNA, 286 bp, Glycine max
ctcagcccctcggagggtttcattgaagagttcagaagcaggacaccaacacttaggtttggcagcatgtgtggcagtaaacaacctcaacatgaatgttgttgtgtgtgtctcacaaagtttgaaccagaatctgagataaactgtttatcatgtggccatatttttcacaaagtgtgcatggagaagtggttggactattggaacattacatgcccactttgcaggacttccttgatgcctgaagatgatgcatcttgcttttggtaaaaaaacatgtacatat

SEQ ID NO: 47536 - DNA, 292 bp, Glycine max
acttgctccgcagaaacacactctctgcacaccacattcccagaaacatcctcaacaacacatccgtaatacaacacaaaacgcaaaaccagagcctctctctctctctcgctctgtttctctccacagaagcagagaatgcatcgcttcatcgtcctcaccattctcctctccctcaccctcgcagatggaggttccattggagttaactacggtcgaatagcgaacaaccttccctccgcggttaaggtcgttcacctcctcaaatcgcaaggactgacacgtgtcaaag

SEQ ID NO: 47537 - DNA, 271 bp, Glycine max
ggcacgataaaagcgatacttctctaatgaattgtttctctaatcgatccaccaacattccattttcgtcatcatccggtaccgtgataattttcacagctacagcttcatctttatacatgccatggtaaagcctgctatgagcaccatgagcaaacctaacaccaacaaagagcttggagaggtcaacattccattcctcagctgtttccacagcagtaaccttctccctccatgatcaaagtactttgtccatcccaaatcctttcgg

SEQ ID NO: 47538 - DNA, 260 bp, Glycine max
atatagcccaagccctatacaaccaaaccctaacacacacccatttgattcagtttccatggctagcctcaaggttgcatttttggctgcagtgctctgcatggttgtggtgagtgcacccatggcacatgcagctatcacgtgcgggcaggtgacgaatagcctgatcaattgcatcggttacctccagaacggaggaacgccgccgtcgggatctgcaacggagtgaagagcctcaatgccgccgccaagaccaccgc

SEQ ID NO: 47539 - DNA, 259 bp, Glycine max
aagagaattgctcccaagggtttaatctttttggctgtgttatgcttctcagcaatgtcactgagtcgttgtcatgcggaggataatagacttgttatgaacttctacaaagaatcatgccctcaggctaaagacatcatcaaagaacaagtcatgcttctctacaagcgccacaagaatactgctttctcctgactcagaaacatcttccatgactggctgttcatagttgtgatgcttcactgttgctggactccac

SEQ ID NO: 47540 - DNA, 266 bp, Glycine max
ttgcagccaagacaagttgccatatggtttcagaatagaagggccagatggaaaaccaagcatttggagaaggaatatgaagtcctcaagaaacagtttgaagcagtcaaggccgataatgatgttcttaaggttgagaaccagaaactacaggcagagttacaagctgtaaaaagtagggattggtgtgaagctggaatgatgagccataagaaagaaactgagggttcatggagcaatggaagtgataacagtttagagattaa

SEQ ID NO: 47541 - DNA, 275 bp, Glycine max
tgtgtgatgtaggaaggtggcttgtaaattggtggattataggaaggggacttgtaagccaccttcctacaatccaccaggttacaaagcaccatcttataatccaccatcttacaagtcaccttcctataatccaccagcttataaagcaccagtttacaagtcaccttcctacaatccaccaggttacaaagcaccatcttctaatccaccagtttataagccaccttccactaattcacctgatagcaagccaccttcctacaatccaccag

SEQ ID NO: 47542 - DNA, 250 bp, Glycine max
cggcggggcattctaccgtatgatctctatgtgcttgacttgaccaatgataaatacaaatggcacagggtcgttgtacaagggcaaggacctggtccacgctatggccatgcaatggacttggttgctcagagatatctagtaactgtcagcggaaatgacgggaaaagagttgtatctgatgcttgggctttggatactgctcaaaaaccttatgtgtggcagaagctgaacccagaaggtgacagac

SEQ ID NO: 47543 - DNA, 261 bp, Glycine max
gccgtccctggcgggatcccccagtcgtcaaggaagccgtccgctcctccgcatcaaagggcaagccgccgctctcggctggcaacaacaacaacggcggatgggataattgggacccggacgacggattcggatcggccaggggcggggcggatctcaggaggaaccagtccaccggcgatgtgaggggattcggaggcggcgggaacgtgtcgaggtcgaaatcgactcaggatatgtacacgcgggctgaattggaag

SEQ ID NO: 47544 - DNA, 260 bp, Glycine max
ctgggttggtgttagatttgattttattttttttttgtagattgattaatttattggttgttgttgttgttaatccattgttcagagatagaaagagaaggaaaaaagggctattatggcaggaggaggagctccagctaaagcagatgagccacagccacatccaccaaaggatcagttaccaaatatttcttactgcattactagtcctcctccatggcctgaggccatacttctgggttttcaacattttcttgtga

SEQ ID NO: 47545 - DNA, 256 bp, Glycine max
caaagctgtaaatgatggtctttggctgcagatgcttcttagtcagagggtacaagaaattgctgctgatacatgcaaagtttgctccctcatgagtatggcttgcacttgtcagaagcaatttgcattttcacatggagcttctaccactggatcttacgcacaagaacataatcagaacattatgcctggcaatgcgggaaatatatatgttgctgaatcttctgcaggcgaaagaaatggccgttttagacct

SEQ ID NO: 47546 - DNA, 251 bp, Glycine max
ctcgagccgaatcggctcgagcggctcgagctagatttgtgtcaagagaaagatcagattgccaagaaagtgcacactataatagacaaatttgctgaaaggggattgcgatctcttgcagttgcttatcaggaaattcctgaaaaatccaaggatagccctggaggtccttggactttttgtggtttgttgcctttgtttgatcctccaagacatgatagtgctgagaccatccgaagagcacttaacct

SEQ ID NO: 47547 - DNA, 253 bp, Glycine max
gcaagtctcaattaggcactgtctgcatttggggcatgaagagtgtgaacttagccatttgtcaatgcagcgaatatggaacccgtggttgcactttggcaaaatgcgcaccttttcaccacttgtgaactctgacaagcatatcacacactctgagtccaaacttggcaagtttagctcagctgagtaactcactgtggtgaaagtcttgagtgctttcttcttcactcctgtgttggcaactcttgctgct

SEQ ID NO: 47548 - DNA, 257 bp, Glycine max
tgcttgtttgatagggaagagaagaaagagagaaaacaaagggcggtggtgagtgcttctgcttcatcatcatcagagaatggcggctactgtgtcttctgcttggtcaaagcccggcgcgtgggccctagattccgaggaacacgaagccgagctccttcaacagaacaacaacaaccccaacgacaagccactcgccgacttcccctcccttgccgccgccgccgccaccaagcccaagaagaagaaggcccaga

SEQ ID NO: 47549 - DNA, 278 bp, Glycine max
caattatctacagaaaggttgggtgcaaaagaactggaggcatcagatttagcatcaatgggagagactattttgaactagtgcttataagcaacgtgggaggagcaggggatatttcaagagtttggatcaaagggtccaaaatgagaactgggaaccaatgtcaagaaattggggatctaactggcagagcttaagctatctcaatggtcagagcttgtccttcagagtacaactcagcaatggaaggattcgcacagcttataatgtggcacctt

SEQ ID NO: 47550 - DNA, 275 bp, Glycine max
aactgggccaaggggcactacacggagggcgccgagctcatcgactccgtccttgacgtcgtgcgcaaggaggccgagaactgcgactgcctccaggggttccaggtctgccactcgctcggcggaggaaccggctccgggatgggacgcttttgatttccaagatcagagacgagtaccctgacagaatgatgctcaccttctccgtttttccttcccccaaggtctctgatactgtggttgagccttataacgctactctttctgttcatcag

SEQ ID NO: 47551 - DNA, 271 bp, Glycine max
cgatcccgatgaagaagaggatgtgctcagctacggcttaacgatcgcgtcgaaggggcaggagagattagtgaaagatctggacgcggttttggagaactgcagttgcttctccgtgcagagcgtttcggagaatgcgagaagaaaggggaggctctggatgggactgtggcgagggaggtttcgccgaaggatatggagtcggggaagaagaaggagatgatggaggagcggtgcgcggcgtattggaccacgttggcgcccaatgtgg

SEQ ID NO: 47552 - DNA, 272 bp, Glycine max
ctcgagccgctcgagccgattcggctcgagctcgatgcgaattcggctcgagctttttatacttcatcaacaacgatgctgcatcaccaacgagaggacctgaagcatttggataaagctagagttggggaagaaaaacttaaaaacatttagaagatcaaacattggactccaagattggttaatgacatccaagcatacagagccagatagctcatcaacatttgggtggaatattttgttcacaaagccaatagaaggggatttgtacg

SEQ ID NO: 47553 - DNA, 305 bp, Glycine max
tgttaaccttcccattgtctatgccagcaacaaaggaagaggtgagctaccaactcgtcacctcccctctcgttccacttctgtctgttctttcattgtcaagtgtcggactctggtctttttggaacaagaaagtgttccgtgagtgagatttcccctctcttctttaatcttcccaaagctcactaatttagtgagagaggctctaatgctgctagcgacgggtagctactaggaagagtttacggtatgaaatttctcgactataaaatttcataagagaagaaagctgctagcagagggaa

SEQ ID NO: 47554 - DNA, 293 bp, Glycine max
agctgtttggacggtcacacgcagttgtattgtagaactgaacaagggtttctctttctctttctctgtctgcttcttcactttctctcgcttcaatcgaaaaaaatcatgggcagaaaattcttcgtcggtggcaactggaattgcaatgggacaatgaggaggtgaagaagattgttactactttaaatgaagctaaagtccctggagaagatgttgtagaagttgttgtgagccctccttttgtgttccttccttttgtaaaaagtttgctgcgccctgatttccatgtc

SEQ ID NO: 47555 - DNA, 268 bp, Glycine max
ctcgagccgctcgagccgctttcctgaaaaaaagaattttgaacctgcctctgttaaagactgcatttacttgggtgggttgatagtactgtgcaagctttggaacttcttcacaagctgctacttcaatggccactgaagaggttaacaaacctcaatcgcttcctccataccctgagatgatagtgaaagcacttgaagccttgaatgaggctgatggatcgaataaatcagcgatatcaaagtacatagaaaccacctacggtga

SEQ ID NO: 47556 - DNA, 112 bp, Glycine max
accaggagaccagtttcgtgaccattggccaacgaattttggcaaatcctttaagggttcggtttcattatggccatcctgatatatttgacagactcttccacacaacata

SEQ ID NO: 47557 - DNA, 257 bp, Glycine max
ctgaaattgagatgctctctcagttccgccaccgccatctagtatcattgattggatattgtgatgaaaggactgagatgatattgatatatgaatatatggagaagggaactctcaaaagccatttgtatggttcaggtttcccaagcttaagttggaaggagagacttgagatatgcattggagcagccagaggactgcattaccttcacactggctatgctaaggccgttattcaccgtgatgtgaaatctgca

SEQ ID NO: 47558 - DNA, 283 bp, Glycine max
caatttctctctcctctctctctctacaaatccttctttctttcttctcttcgctgctcactgtagccatggctttcagagtaggaggagcgggagggggaaatgcctcttctggcatgggtgttgctgagcatagtgtaaacaccttcctggaattgcagaggaagaaagttcatcgctatgtgatttttaaaattgatgagaaaaagaaagaggttatcgttgaaaaaactggaggccctgctgagagctatgatgatttcactgcatccttgcctgaaaa

SEQ ID NO: 47559 - DNA, 273 bp, Glycine max
ctaggctcaaaaaaatattttcttttccctcttttttattctgggttttctgattatacactctagcctaatgaataaccagtaatcagcttttttgtttattttttccccgaaagtgaaaatgaagagaatgatagcgttgggatttgagggttcagcaaacaagattggtgttggggtagtgaccttagatggcacaattctgtcaaacccacgccacacatacatcacccctcctggtcaaggctttcttcccagagagacagcacagca

SEQ ID NO: 47560 - DNA, 268 bp, Glycine max
ctctggcagcctcttggtaaggacacaattgaatacttcactctgcaagatctttgggactgctattatgaatggagcgcatatggtgctggtactcctgtgatgttggaggatggtgataccgtgactcagtactatgttccatatctatctgctatccaaatctacaccaacaagtctgttgtcgcttctcgcaatcggagagaggatagtgatggagttgaatttgaaagtgattcatggagtgaggatagttcaagtgataacc

SEQ ID NO: 47561 - DNA, 251 bp, Glycine max
cgagaacaaaaaaaaaaaaaaaaaaaatccgcgattcgctcttctcttggaaaggtgaaacccagaggtacgaacgaaagagaagagcgttttagaagtgagaaaagagggggttgccgtccacgaagctgttcagcaggttttttgcgaaaagggaattggggatcctgatggaaggccccgatgctcccggaaagacacccatcttgtacaagctcaagcttggagaaatcgtcaccattatccccacc

SEQ ID NO: 47562 - DNA, 256 bp, Glycine max
catcaagttactatctataattaattaaattcctcgtggaatattgaagaagccatgtctacagctgggcaggtcatcaagtgcagagctgcggtggcatgggaagcagggaagccactgtcaatagaaaccatagaagtggcaccaccccagaaaggtgaagtgcgtttgaggatcctcttcaactccctttgccgtagtgatgtttattggtgggatgctaaggaccagactcctctgtttcctcgtatcttag

SEQ ID NO: 47563 - DNA, 240 bp, Glycine max
ggaaaactgattttgtgggtctctaatgttttgtactagtttgacccttcgtctttgttttgggtttcggagcatgacctggtttagttagttagaggtttttttagtttgtaatacttactgcgttactctcatttctcatgattaaatcggagattctggtaaagtcagtagtctaaataaatataatatattacatatagaaaaaaaagcacgtgaggtggacgagcccggaagtgg

SEQ ID NO: 47564 - DNA, 271 bp, Glycine max
gttgaaggtgtaaaggaatttgataccagatggattgggtgggctggtgtgaatgtgcctgatgatgttgggcagagagcattgacaaaagctttagctgaaatgcgatgcataccagtatttcttgatgaggagatagttaaccagtactataatggctactgcaacaacatcttatggcctctatttcattaccttgggcttccacaagaagatcgaccatctacaactcgtactttccaatcccaatttgatgcatataagaaggcaa

SEQ ID NO: 47565 - DNA, 269 bp, Glycine max
gtgccatgggtgtataaaattggaagaacatctgaaattggcaaaggagataaagaaacacaaagaagaagtctatgctcttcagtttcaaatgtcagatgaagcacttaaacagatgcctgactttcagggccggattgatgttctgaagcaaattggatgcattgatgaagacctcgttgttcaaatgaaatggcgtgttgcttgtgagatgaattctggggaggaactgatatgtactgagtgcttgtttgagaaccaaatggatg

SEQ ID NO: 47566 - DNA, 262 bp, Glycine max
  unsure (1)..(262): unsure at all n locations
ctgggattctcaagtgccagtctcttgtttcaattgatgtttcttcaaatcagctgaatggaacacttccagaagatatttctgggttgaagtccattgtgaatctcaacatatcagggaattcgtttcagggttctattgtggatttgtttcaggganagttggaggttctggaccttagcagaaaccaatttcaaggtcacattccacaggtcgtagaggtttctacatcaaagacaggcaagcatggacatgcaaagtg

SEQ ID NO: 47567 - DNA, 261 bp, Glycine max
ctcgagccgaatcggctcgagagcaactggactgatgttgagtacttgagcactgcaaaagcacccacttggggttatcactgcctccaaagcactagcagagaaggcagcatggaaatttgctgaagaaaatcacattgatctcatcactgtgatacctactctcacaactggtccttctgtcactacagacatcccatcaagtgttggcatggcagcgtccctcataacaggcaatgatttcctcataaacgctctgaa

SEQ ID NO: 47568 - DNA, 258 bp, Glycine max
ttgggagttaggttctgcacgctctgcttccagcgagtgttctttcttcgtttcaacaccttaatttgcacacgctgcttcttcagcttgagaaatggcacaagaaacctttctattcacatctgaatctgtaaacgagggtcaccccgacaagctgtgcgaccagatctctgatgcagtgctcgatgcgtgccttgaacaggaccctgacagcaaggttgcctgtgagacatgcaccaagaccaacatggtcatggt

SEQ ID NO: 47569 - DNA, 254 bp, Glycine max
aacaactatgagatcacatagctttccatctgtattgaacgatgctccaggagggtctatgatgccctcaagtgaccttaatgaatgccagttatgggtacagcctggggatttaaatggtctcaaggggcagctggtaaggttgctcgaactttctggaggatgcctgcctctggcccgagttccagcagagtaccagaaactttatgggagacctctttatgtatctgaatatggggcaataaagttggtca

SEQ ID NO: 47570 - DNA, 249 bp, Glycine max
gtttttgcagaattgtttgattgtgttgtttgttagatgcggttgtgtggagcttgcgcgccaagtgtttgacagaatgcctgaccgggatgttgtttcgtataactcgatgatcgttgggtatgtgaagtgtggggcggttgagagggcccgcgagttgtttgatggcatggaggagaggaatttgattacttggaattcgatgatcggagggtatgtgaagtgggaagagggggtggagtttgatag

SEQ ID NO: 47571 - DNA, 257 bp, Glycine max
attatttttatgccctttgaggaccattaaagtgattgtacagtttatcttaagttaattatttatttctctaatgtatataatttccagatcaactattgaagcttttgcatctgtagtagcccccctggcagaaaacttaatgcaaattctagctcagaaactgaacatcaaattcaactatttccaagagaattgttcagcaaacactagctttcttcggctgaacagatatccaccatgtccaatattctatt

SEQ ID NO: 47572 - DNA, 248 bp, Glycine max
gtttgtcttaaatggtgggcctgcgagatacttgttttgctagccggactttttccaaatccaaagttggagacatcagtcctatctatatgcttgacaatctctacattacatttcaccataccttatgggtttggggctgctgctagcactagagtttcgaatgaattaggagctgggaatccacaagcagttcgtgtggctgtttcagcaacgatgttccttgcagtcacagagggtctaattgt

SEQ ID NO: 47573 - DNA, 249 bp, Glycine max
gacaaaacatggggtacaattggtcttctatatactatgctaactatgatctctctgggtaccagcttgtgtctccaattgtgggactcctagcttacaatgctgatgaagatgcaaagtcaagcaacccttttcagcttgggattgtggctggagaaacgcctatgacaattgacttcaccaatgccacaaagatgaaccaagatggggtcaagcccttgtgtgctagctttgaaggtgatgggagaa

SEQ ID NO: 47574 - DNA, 251 bp, Glycine max
aagaaaacatttgcgaagtagactaagttcagatcatggtgcagttaaatgtcaactaacccgtcaacacagcttgagagcagcttacgcacagtacttgaagctgacagctagatttgtctctcttcaaaggacccaaatgaaccttcttggtagagacttgggcccactaaataccaaagatcttgagcagcttgagcggcaactggattcatctctcaagccagtgaggtccacaaagactacagttc

SEQ ID NO: 47575 - DNA, 249 bp, Glycine max
ccaaaccctgctgcataggaagaaagcctaggctcacatgcgaactcgctacaggatgtcaatttggcttaaattctagagtgcccagagatgccattgaaggaacctatattgacaagaagtgccccttcactggcaatgtttccattcggggtcgtatcctagccggtacttgtcacagtgctaagatgacaaggaccattattgtgaggaggaattatcttcattttattaagacataccagagat

SEQ ID NO: 47576 - DNA, 253 bp, Glycine max
tgaatctcagaattctctaaaagagatctttttctgctctttgaagaaagaagggtctttgcttgattttggagatgtctctgctctcagatctcatcaaccttaacctctccgataccaccgagaaggtgatcgcagagtacatatggatcggtggatcaggaatggacctgaggagcaaagcaaggactctcccaggaccagttagcgacccttcagagcttcccaagtggaactatgatggttccagcac

SEQ ID NO: 47577 - DNA, 248 bp, Glycine max
atcccatcggttaattttgttgatctcaacaagacttcaagtcttccttctagtcctccaatgggtgttgccccaggaaaaacatgcaagaagtgtcgctgtgttaataatcggagctgcacaaaggtgcttaagctgggaaatgctcttggaagagcagttgaccttgcacgctttaatgggtataccgaacttattgctgaattggactccatgttcgattttcaaggaaccttgataagcggagg

SEQ ID NO: 47578 - DNA, 274 bp, Glycine max
gccaatggcggttccagtggcaccacccaccaacattgtggcccaaaacagtggcaagggaaagtaccaagaatgcctcaagaaccacggtgtctcaatcggcaaacacattatcgacggctgcatcgagttcctgccggggggtcaggagggcaccctggaagcgctaaaatgcgttgtgtgcaactgccaccgaaacttccatcgtaaggagacccacgacacctactcagtgccttccaccaccaccacccaccgctgccacccccagtgc

SEQ ID NO: 47579 - DNA, 257 bp, Glycine max
ctaatactaccatcttgtactactggtcggcaatcctctgtgatcttgaacctattgatgtaaacaacccaaacactgattatgcgatgcatcttgatcggccgccagcattcttgcgccaatatatccacaagttcaatgtcctggttctcaacacaggtcaccactggaatcggggaagctcacggctaatcgatgggtaatgcatgttggtggtgtgccaaatactgatagaagatagcagtgatttggggtgc

SEQ ID NO: 47580 - DNA, 157 bp, Glycine max
gtagcctcagatgttttggctggaatcgaccaagccattgctgatggagttgatgtgatttccatctctatggggtttgatggtgttccactttatgaggacccgatagcaatagcttcttttgcagcaatggaaaaaggggtggtggtttcatctt

SEQ ID NO: 47581 - DNA, 262 bp, Glycine max
aagaagacgatctgactcagacccgttatcttcattctactcaatcgatcctcactttttcttgtcaaattaggctagttgcaaagactactcaattagagggtgagaaaatgcagaaagaggctgaagttcagaaacttatggaagagaatgttaggttgagtgcactgcttgacaagaaagaggctcaacttcttgcattgaatgaacaatgcaaggtaatggccttgaacgcttcaaacatgtaaatgccaaagtttta

SEQ ID NO: 47582 - DNA, 257 bp, Glycine max
tcagaattctctaaaagagatctttttctgctctttgaagaaagaatggtctttgcttgattttggagatgtctctgctctcagatctcatcaaccttaacctctccgataccaccgagaaggtgatcgcagagtacatatggatcggtggatcaggaatggacctgaggagcaaagcaaggactctcccaggaccagttagcgacccttcagagcttcccaagtggaactatgatggttccagcacaggtcaagct

SEQ ID NO: 47583 - DNA, 151 bp, Glycine max
atgccaagacaaagaagaataaccagtatcgcggaatccgtcagcacgcatggggaaagtgggctgctgagattcgcgacccaagatagggggttcgtgtttggactggaactttcagcactgctgaagaagctgcaagatgttgcgatgc

SEQ ID NO: 47584 - DNA, 243 bp, Glycine max
aatcgcctagggtttctatcgcaaaccctccctacctccaaccaggtcgcgtgcaaagggctttcaaagcttcggaagatcaaaatgtaacctgtactctgtggaaacctggatttcgacgcgcgtcaatccgacgtaggaagggtctttcagaagttacggcaaatttgatagagttgacatgaaatcggggtttgcttttgtctacatggaagatgaagtgatgcagagtatgaaatcaga

SEQ ID NO: 47585 - DNA, 171 bp, Glycine max
tattcgtgcactgccacctttacatttgctcatgacaccccctcccgcatgcaccagtgttcctccccgcgtgagcttaaggttatcttttgtcattaatattagggaccaagtgctacagcttcttgtgttaagaagccgtttgggtcattgttaagtgactcgactctt

SEQ ID NO: 47586 - DNA, 261 bp, Glycine max
ggcatctgcaatctgctctttgctctcgcaggttgagggcatgaacaatttaatttctgaagttgctgccatagcagtgcaagaaaagaccatgcttgatgaatgtgaaatgctactggcttcagtagcagctatgcaggttgaggaaagtagccttcggacgcatcttatgcaaatcatgcaagctttggggatgagcaagtaatcaatttcgaaaatttaaacaagcacgaaccacacctgccgccaagctaacaagta

SEQ ID NO: 47587 - DNA, 273 bp, Glycine max
tagagcatttgttcggtccaaaaccctaatcagcgttgcttccaatcgcatctcgtcttcaggaccaacatcgttgaatccatggcaacccctttacttgtataggcagaagcaacaagaagcttcccactcctccagctgcaacagcggcaacaccccattcgggtcaccaactcgagtccagaagctaatagcctcccaatcagaccctcttctggccaaagaaatcttcgacttagcctctcgccaacccaagttccgccacacttactc

SEQ ID NO: 47588 - DNA, 245 bp, Glycine max
tgcgtaaccatgcggataagaatatagtcatcattcttataggaaacaaaagtgatcttgagaaccagcgtcaagtacccacagaggatgcaaaagaatttgccgagaaagaaggcttatttttcctagagacctcagcactggaagcaactaacgttgaaacagctttcatgactgttttgacagaaatattcaacattatcaacaaggagaacctagctgctagtgataatccgggaaatgac

SEQ ID NO: 47589 - DNA, 257 bp, Glycine max
gaaaaaataaaatctggataaatgccaatacttattacgggtataaggatagaaattgaaataaataattctcgtggccccgaatcaaaaaaataagaatttggtgtattaaaaagcttgtatccatagaacatttgacgtaacatagataatgaataaataggagttaatatcattccaattgctgttacaaaagttattagtatttttgtgattaaaagatatttttggctagtaattatccccaataagactat

SEQ ID NO: 47590 - DNA, 233 bp, Glycine max
cacatttgttcactcttcttctcttgcggctagggtcagaccgcactgtcttctagacttgaagaaaatgggtaacgagaaggttcacatcagtattgtcgtcattgagccatgtcgactctggggaatccactaccactggtcacctgatttgcgagcttggaggcattgacaggcgtgtgattgagacgtttgagcaggaagctgctcagatgtacaagaggtctttcaag

SEQ ID NO: 47591 - DNA, 259 bp, Glycine max
gcaagaatggcacttcgttgcttggtgatgtccctttctgttctcttcactcttggtcttgcgagagaaagccatgccagagacgaagatttttggcatgctgtttggccaaacactcccattccaagttcattgcgagatcttctaaagcctggccctgcaagtgttgaaatcgatgatcaccctatgcaaattgaagaaacacagtacccgaaaaccttcttctataaagaagaccttcatccaggcaaaacaatga

SEQ ID NO: 47592 - DNA, 266 bp, Glycine max
ggccaggcaagccccactcaaccaccacacctctcctcgttcacgctacccctttctgctcttcttctacctttcaagttttaaaagtataaagatggcagagacattcctatttacctcagagtcggtgaacgagggacaccctgacaagctctgcgaccaaatctccgatgctgtcctcgacgcttgcctcgagcaggacccagacagcaaagttgcctgcgaaacatgcaccataaccaacttggtcatggtcttcggagaaa

SEQ ID NO: 47593 - DNA, 272 bp, Glycine max
ttgtggtccaatgcatctgtctttatccacaagtcttcactgcacatccctcatgtagcacttcctgaggaatgcgttcatcaggttgcttctgctttaacaattgagattaaccgagccttcgttattgtgcgggaaattggaactgggagagatttaaagaagttccttagcgttattgctgtattatgggttatctcggttattgggagttggttcaacttcatgaccttgttttacctattttttgtgtcactgttcacgttgccact

SEQ ID NO: 47594 - DNA, 194 bp, Glycine max
aattctcgttggaacaaagttagatcttcgagaagataagcaatttcttaattcttctccctgtgttgtagttattggtactgcaccagggtgaagaattaagaaaactgattggtgctcctgcttacatcgagtgtagttcaaaaacacagcagaatgttagagctgcctttgacgctgccatcaaaggggtc

SEQ ID NO: 47595 - DNA, 173 bp, Glycine max
aaactttcgaaagattttatccaattgaacttttaacaatgactgggataaacttaagaattcaattattgaaattgcataagtacacaatttaattggattcgtcgaatggtatcacaaaaatggagtactaactcccatttcttatttatgatggaattaaccgatcaact

SEQ ID NO: 47596 - DNA, 289 bp, Glycine max
gaactgtttaccccaagttggtcagtggaatatgatgaacaagaaaatgattaatggaatgactgttagccggtgggcatgcataaatttttcacggagcgtgcaagatagtgttgctcgtactttttgtaatgagcttgctcaaatgtgtcaagtatctggcatggaatttaatccagagcccgttatccccatctacaatgccaagcctgaacaggtggagaaagctttgaaacatgtttaccatgtggcagggagcaaaactaaatcaaaggaattggagcttttt

SEQ ID NO: 47597 - DNA, 280 bp, Glycine max
caggtacaacatggttgaccaaggtcttcttaaggaaccagtattttcattttggttcaaccgcaatccagaggaagaggaagggggtgagattgttttcggtggtgttgatcctgctcactataagggaaagcacacttatgtgcctgtgaccagaaaaggatattggcaggttataatttttttaatacttaataatgctttctttttttacctttttctatatgttaatttttatttttgttttcagtttgatatgggagatgtacttattggcggt

SEQ ID NO: 47598 - DNA, 278 bp, Glycine max
ctctagccgcggtactgcgcggagacaattttcccgcgtctggactacacggcggagcgaggtgcagacggtggtggcgaaagacgtgcacggcgagacctggaggttccggcacatctaccgagggacgccacgtaggcacttggtcgaccacagggttgagcagtttcgtgaaccagaagaaactcgtggctagggattccgttgtgtttctgagggctgagaatggtgatttgtgtgttaggattcggatggcaaagaagggagttagcggaggg

SEQ ID NO: 47599 - DNA, 265 bp, Glycine max
tgaatttgaaatagccatcaccctctatttccaccctgatgtctgtgaaaaacagttggacttgtatcaccatttgatattatatccagaagatgaatctggcccccagtctacgaagaaacctgtggttgttgaatcttataatgagattgttttgcctgaaccctcggagggttttctagcacgtgttacagaatcatcctgctggtaatgtgcctagtcttctggctggtttgatttaccaggtcctgtccaattggatctt

SEQ ID NO: 47600 - DNA, 285 bp, Glycine max
atggccactcttcttcttcccacgctcctccttctcatacccttcgccaccctcgtctccgcccgccctcacctcgccggagactttctccgactgccctccgaaaccgataacgatgacaacgtccagggcacccgctgggccgtcctcctcgccggttccaatggctactggaattacagacatcaggctgatgtttgtcacgcctatcaaatactaaggaaaggtggcctgaaagaagaaaatattattgtttttatgtatgatgacattgcattcaatggg

SEQ ID NO: 47601 - DNA, 274 bp, Glycine max
gatttgtatagcctcccaaaccttctccttacagagatggtagtgaattatctactcgagatttgcaaaaaatggttcaagctttgccccaatacactgaacaagtggaaaagatctcacttcatgtagagatagctggaaagattaacaaaattatcagagaaacggaccttcgagagcttggacagttggaacaagatcttgtttttggggatgctggagccaaggaagttattaactttttaagaacaaagcagaacacgtctcctgaata

SEQ ID NO: 47602 - DNA, 267 bp, Glycine max
ggccaggcaagccccactcaaccaccacacctctcctcgttcacgctacccctttctgctcttcttctacctttcaagttttaaaagtataaagatggcagagacattcctatttacctcagagtcggtgaacgagggacaccctgacaagctctgcgaccaaatctccgatgctgtcctcgacgcttgcctcgagcaggacccagacagcaaagttgcctgcgaaacatgcaccagaaccaacttggtcatggtcttcggagaaat

SEQ ID NO: 47603 - DNA, 268 bp, Glycine max
acaacattacaacatttcatttcataacatggagcttcttattcccttctctctcctattcacctttgcttgcattctccttgcattgttcaacactctgaaccgttcaaattccaaaatctataccacctggaaccatggaaactgcctcttcttggcaacattcaccaatttttcgggccacttccccaccaaactttgaccaacttggctaaccaacatggaccgttgatgcacctacaacttggtgaaaagccacacattatag

SEQ ID NO: 47604 - DNA, 258 bp, Glycine max
ctacttctactacttcaccctttctttctctcagactctcacttccaatggcttattcttctccctccgttattaaggatgccaaggtgcttatggttggcgctggcggaattggctgcgagcttctcaagaccctcgctctctccggtttccctgacattcacatcattgacatggacaccatagaagtcagtaacctgaacagacaatttttatttcgacaaaatggaaatttggagaaaaaatatgaatctgatg

SEQ ID NO: 47605 - DNA, 259 bp, Glycine max
ggagaccagtgatgatcttatccgtcatatgcaagaacaattcagagaaaaagctcgcaaatctgagtcaatctattatgcagcaacagatgttgtaatcctgagattcatgattgaggtgtgttgggcaccgatgttagtcgctttcagtgttcctcttgatcgaagtgatgatgaggttgtaatatctctgtgtcttgaaggcttccgctatgctattcatgttacttctgtaatgtcgatgaagactcatagagat

SEQ ID NO: 47606 - DNA, 264 bp, Glycine max
gtgattgaaaatgcacttccccttccagggattgagcatgttggaggggatatgttcgcaaaagttccacagggtgacaccataatactaaaggctgtatgccacaattggtcagacgaaaaatgcatagaatttctgaggaattgtcacaaagcattgtctccaaatgggaaggtgattgtggtggagttcatattgccagaagaacccgaaccaactgaagaatcccagcttgtttccactcttgacaacctcatgtttatc

SEQ ID NO: 47607 - DNA, 248 bp, Glycine max
gctcaacacaggcattagctgattatgctactctcatcattgatttgaagaagaatttgtcagcaactgattctcctgttgtggttttcggaggatcctatggaggaatgttggctgcttggttcaggatgaagtatccacacgttgcaattggagctctagcatcctcagctccaattctccatttcatgggtttggtttcgccagatatcttcaacaacatcatcacacaagatttcaggagcgag

SEQ ID NO: 47608 - DNA, 255 bp, Glycine max
accaagacgaggatgaggagcaagacaaagagagccaagaaagtgaaggttctgagtctcaaagagaaccacgaagacataagaataagaacccttttcacttcaactctaaaaggttccaaactctcttcaaaaaccaatatggccacgttcgcgtcctccagaggttcaacaaacgctcccaacagcttcagaatctccgagactaccgcattttggagttcaactccaaacccaacacccttcttctccccc

SEQ ID NO: 47609 - DNA, 254 bp, Glycine max
gtcgaggatgtttttgtttttgttaagaacaagcccgatttgaaaatattcgggggtttatcggtgttcttctacggcataggtgtggctgtgtatgctttcgagggaattggaatggttttgcctttggaaactgaggcgaaggacaagaagaagttcggtagggttttgggtttggggatggattcggtttgtttgggggtttagggtacttagcgtttggggaagaaactaaggatattattaccaccaat

SEQ ID NO: 47610 - DNA, 242 bp, Glycine max
  unsure (1)..(242): unsure at all n locations
cctcgagccgaatcggctcgagcgntgaaagacagatatggtgatctctatactgaagagaaactggccattagtggaattcacactcatgctggtcctgggggctatctccagtatgttgtgtacattgtaacttctcttggatttgtgcaccagtcctttgatgtcattgtcaatggcattgagaaatgcattatccaggcccatgaaaatctccgcccaggatcaatatttatcaataa

SEQ ID NO: 47611 - DNA, 245 bp, Glycine max
cgagcgcgacgccgacatcaacctctccctccccggcgacgccttcgacctcgtcgtccgtgccaagaccgccctcgagctctcctgccccaacaccgtctcctgctccgacatcctctccgccgcgacggccgaacctccctcgcctccgccgtatcctcccacctccccaccccctccatgcccatctctcaaatcacccaactcttcgccaaacgcggcttcaccgtcgaagaattcgtcgc

SEQ ID NO: 47612 - DNA, 241 bp, Glycine max
tctcgagccgattcggctcgagtatagcccaagccctatacaaccataccctaacacacacccatttgattcagtttccatggacagcctcaaggttgcatttttggctgcagtgctctgcatggttgtggtgagtgcacccatggcacatgcagctatcacgtgcgggcaggtgacgaatagcctgatcaattgcatcggttacctccagaacggaggaacgccgccgtcgggatgctgc

SEQ ID NO: 47613 - DNA, 284 bp, Glycine max
ctcgagccgtcacatttgagatccctctctcactcttcctcatcatcataaggtgcatgacgtacctaaaaacaggagaaacaaaattgtcacaaattagagagatggaagggattagtgtgtgcaagaagagttcaaaattaggaaagaaagtgacctctatcatgttattcataaggtgccttatggagatagcccttatgtcaaagccaagcatgctcagttggttgataaggacccagaagcagcaatagtgttgttttggaaggcaataaattgtgggg

SEQ ID NO: 47614 - DNA, 215 bp, Glycine max
ccgaaacgcagtgccgtcgtcgccatcaacaagtggaaggaagagggtcacgagcacgctcgcaaataccagctcaatcgcattgttcgagagcttcgcaaggacaagcgttatcaacacgcactcgaggtatgtgaatggataccttacagaaggatatgaagctggtgcaaggtgactatgctgtccacttggacttgataactaaagttcgt

SEQ ID NO: 47615 - DNA, 182 bp, Glycine max
ctgctacttcctactccaaccgcacttctgctccgcaattatcatgggcaaggtcgagatctgcatcaacggatttggaagcattggccgtttggtagccagagtggctctgcagacatacgatcttgaactcgttgccgttacgaccctttcatcagcactgattacatgacatacctgtt

SEQ ID NO: 47616 - DNA, 251 bp, Glycine max
tggaatttgacttgcgcagaattcagcaaaatatgcatgtaacacctgctgttccctttgggctaaatgagttgctcatggtttatcaggaccttttgcagagttcttgatgagccagctttgtgcctactgtgtggtagattgtgctgtcctatttggaaatcatgctgcagggaacaccgctgccaaactcatgccgtaggctgtggagctggtactggagtgtttctgtggattaggagaacgacaat

SEQ ID NO: 47617 - DNA, 258 bp, Glycine max
cgtctccctccagaactccgccggctggaacgctttgcaggaggcgctatgccgccgcgccttccgacatcgggttcgtcctcctccgccttcaccatcacaacgcctggtccaagtggcgccgtcgcctcccgcgggtcatcgccgcgctacgccgcatgcgtgacttctacatggagatctccttccacttcgagagctccctcattcccttcgtcggaaagatcgctccctccgacacctacaaaatctggaagc

SEQ ID NO: 47618 - DNA, 254 bp, Glycine max
cttgtctcttccctttttctttccagaacaacagaacaacagagcacgaagctccaccaatggcgggttacagagccgacgacgactacgactacctcttcaaggtggtcctcatcggcgactccggcgtgggcaagtcaaacctcctctcgcgcttcaccaagaacgagttcaacctggagtccaagtccaccattggcgtcgagttcgccacccgcaccttgaacgtcgattccaaagtcatcaaggcccag

SEQ ID NO: 47619 - DNA, 240 bp, Glycine max
aatggctcccaagggtttaatctttttggctgtgttatgcttctcagcactgtcactgagtcgttgtcttgcggaaggttattggccttgtaatgaacttctacaaggaatcatgccctcaggctgaagacatcatcaaggaccaagtcaagcttctctacaagggcaacaagaccactgcttcctcctggctcagaaccatcttccatgacggtccggtccaaagtggtgaggcttcac

SEQ ID NO: 47620 - DNA, 266 bp, Glycine max
atggccactcttcttcttcccacgctcctccttctcatacccttcgccaccctcgtcttcggccggcctcaacttggcggaaaactttttccgattgccctccgaaaccgataacgttgacaacgtccagggcacccgctgggccgtcctcctcgccggttccaatggctactggaattacagacatcaggctgatgtttgtcacgcctatcaaatactaaggaaaggtggcctgaaagaagaaaatattattgtttttatgtatg

SEQ ID NO: 47621 - DNA, 227 bp, Glycine max
gtgttgcgagagtgatgtcttatctcaatagagccataaaagaggagcggtatggtgatgcagctttcttaagagataaagctggcgctggacttgtgggttggtggtctggtatttcagaaggtgtagatgatccacatggtctaattattcgcataactcctgagcatggaagatatgtggcgaggagttatagtcacaggcagcttgcaactgtctgaggatgg

SEQ ID NO: 47622 - DNA, 324 bp, Glycine max
agcgtagtagctcgggttgtaaaaaagattcatgttcagttagtatcttgtgaaggcgatcgaatactagaaagaaacaaatcgatcaagcttgaaagataggaagaatttaagaaatgggtgaggaggaaatagatgattctcccttgattcaaggttttccttccggcgacgtgccatttaggagaactggtaatgtagagagggcagtagcacatataataactggtgtgataggggcaggggtgctgtctctagcatggtctgtggcacagttagggtggattgctggtccttttatcatcatagtctttgcaggaacaa

SEQ ID NO: 47623 - DNA, 279 bp, Glycine max
atctgaaaggttattgtcggcacggcaatgacagattgctaatatactcatacttggagaatggaagcttggattattggctgcatgagtgtgtggatgaaaattcagctctcaaatgggattcaagactcaaggttgcacaaggcgctgctcgcggattagcttacttgcataaggggtgtgaaccattcatagtgcatcgagatgttaaatctagcaacatacttttggatgacaactttgaagctcatttggctgattttggtctctcaaggctac

SEQ ID NO: 47624 - DNA, 273 bp, Glycine max
cggctcgagcggctcgagcggctcgagttctaatagctactgcttcgttagaagtgcaaaaattaaatgtccaacatcttctagttgatgtttgagattcatgtatccgattctcagtgaaatcttcttttccgggtgtatgatcaattccactgttaggcgcaggacccatttagttcaatccttctcagttgctttcctctattggttgtactacgtttcatgatttctaaaccttccttagtctaataatcatctactactagctattat

SEQ ID NO: 47625 - DNA, 266 bp, Glycine max
cgagatggcaccaacacaccttcgaggaggcctgaacatgctgtttcaagttgcaaccacttttgggattttcacagctaacatgatcaattttggaacacaaaagatcaagccttggggttagaggctgtccctaggcttggctacagtaccagctcttttgatgactgtgggagggatatttcttactgacactccaaatagctatattgaacgaggattcgcggacacaagaaggaagctgctgaaggtaatccgaagaacaa

SEQ ID NO: 47626 - DNA, 257 bp, Glycine max
agggactcagcggaatccaagatgctgtcgttgttgatgatgatgatacgcttatggtgtctgcgtgttgcaaacatttcactgcttatgatttggacatgtggggacagttctccaggtataacttcaatgctgtggtatcacaacaggatttggaagacacttatcagcccccatttcgtagttgtattcagcaagggaaagcaagctgcttgagtgttcctacaatgaggtgaatggtgttcctgcttgtgcta

SEQ ID NO: 47627 - DNA, 260 bp, Glycine max
ctcacctcgaccgaatcggctcgagttctattccattctcactcaaacggaccctcccacatcactacatttcctccgatgaactccgcaagcacaacacgcgccacgacgcctggatctccatccacggcacggtctacgacgtctcctcctggctccaccgccaccccggcagttccctgctcctcctcatcctcgccggcaccgacgccactgacgccttcctcgcctactcattacgaactctgcattactcctcg

SEQ ID NO: 47628 - DNA, 255 bp, Glycine max
tttgaaaccagtttcacttgaactaggaggcaagtcaccattcataatttttgatgatgcagatctagataaagcggttgagcttgctctcatggccgtagtatataacaagggagaagtttgtgctgcaggctcccgcgtatttgttcaggaagggatctatgatgaatttgagaagaggttggtggagaaggcaaaagcttgggttgttgggatccctttgatcctaatgttcagcaagggcctcaggttgac

SEQ ID NO: 47629 - DNA, 269 bp, Glycine max
ctggcttctcacagtccttccagaagacactactaacagatccaagggcagctaagttgcttgacagagagcttgggggtcaagaaagcaaggcagtgtctcctcctctcaagtcctcaaactatccatcaacggttgcatctagagcatccccacgaaagttcttcttttagttgcttagttcttttacccttcttggttgtagttaatcagctgtgaatgtgatcttgaagcttagttgagatatcattgtggtgacggtctcttct

SEQ ID NO: 47630 - DNA, 259 bp, Glycine max
cttcgctccgcaccagtttcaccgcacgaatatcttgttgtttggagcgatccgagaaaaactctgtaaacatgttggtttaccaggacctccttacaggtgatgagcttctgtcagactccttccgttacaaggaaattgagaatggaatgctgtgggaagttgaggggaagtgggttgttaaatgagcagttgatgtagacattggtgcaaaccctctgctgagggtggaggagaagatgagggagctgatgatgca

SEQ ID NO: 47631 - DNA, 184 bp, Glycine max
tatttttcaatggcttctgcagatgttgagttccgttgctttgttggtgggcttgcttgggtcaccggcaacgatgccctacgagaaagccttttcagtctacggcgacatcgttgaatcgaaggttatcaacgaccgtgagactggaaggtccagaggattcggatttgtgaccttcgcctca

SEQ ID NO: 47632 - DNA, 223 bp, Glycine max
catctctgataactggggtttcaatttctggttttcttgcattgtgtggtttcttatttggcatctacatgtacaggaggtacaagaatgctgatgtcatagaagcttgggagcttgagattgggccacataggtactcctatcaagagctcaagaaagcaacaaaagggttcaaggacaaagagctgcttggacaaggtgggtttggtagtgtttacaaagg

SEQ ID NO: 47633 - DNA, 259 bp, Glycine max
gttggctgatctgtacaacaaaattggcaagttcaaggagtctaagtcttactgtgaaaatgcactcagaattttcgggaagatcaagccaggggtcccctcagaagagattgctagtggcttgatagatgttgctgcaatctatcaatccatgaatgatttggagaaaggattgaagttgctcaaatacgccttgaagatatatggcaatgctcctggtcagcaaagcactgttgcagaaattgggcccaatgggggt

SEQ ID NO: 47634 - DNA, 254 bp, Glycine max
atggtctctaatcattgcaaatgccatgcacagttggggtttttttattgttctttcttggatgcccatatacttcagctcagtgtaccgtgtggatctcaggcatgcagcatggtttagtgcagttccatgggctttgatggctgtcatgggttactttgctggcttgtggtcggatatgatgatacaaagtggtactagtgtcattttgacgcgtaagattatgcagtgcattggttttgttggtctggact

SEQ ID NO: 47635 - DNA, 221 bp, Glycine max
  unsure (1)..(221): unsure at all n locations
tggctgtagccatggtcaagaagacacctgcatataaaaataaactaagggcattggaacttgcacgcagtgagggggcacaaacaagaagaagagtcagaagaatatggacaagaaaacggaagaagaccttagcaaagaactcgatctgcagataactggagctgaanatgcctctgtatggaaacttcttggcgtccgctttgttctattaccgtata

SEQ ID NO: 47636 - DNA, 214 bp, Glycine max
cacgtattgactcctgtcgctgagccttacaacagtgtattgtccactgatgctcctcttgagcacactaatgtggctgtcatgctcgacgatgaagcgttgatagacatgctgatgcgttcagtggacattgagaggccaagctataccagccttaatcgaatagttccttcggtgatatcatcactgaatgcgtccctgacgtttgatggag

SEQ ID NO: 47637 - DNA, 149 bp, Glycine max
cagcaataccagatcacagattcagtcctatgtctttgatgttatcagagcaagtgttccaaagatggaactagatgctacttttgagcagaagaatgaaattgcaaaagcagtggaggaagaacttgaaaaggctatgtcagcttatg

SEQ ID NO: 47638 - DNA, 263 bp, Glycine max
atacactgtgaatggaccatcaacctccaccgtgccccgccgccgcctccgcaacggacaaccctcgtggcggaacgcgccaccccatgtaccgcggcgtccgcaagcgccggtggggcaaatgggtctccgaaatccgggagccacggaagaagaaccgcatatggttggggtcgtttccggtgccggagatggcggcacgagcatacgacgtcgcagcctactgcctcaaaggccggaaggcgcagctcaactttcccgac

SEQ ID NO: 47639 - DNA, 258 bp, Glycine max
caagaatcgcgaaaaaatggttgagacaatgtttgagaagtacaattttgctggagtgtttatccaaattcaagctgttctaacattatatgctcaaggtgcttatagagatgagtgaaggtttgctgactggattagttattgactcaggcgatggtgtcactcatgtggttccagttgttgatggctattctttccctcatctaactaaacgaatgaatgttgctggtcgacatataacctcctatcttgttgatt

SEQ ID NO: 47640 - DNA, 258 bp, Glycine max
ttaacatatacaaattctctgtgttgtgttgtgtacttgtgttaattgtgttgttgttgtaggaaatttaagtgaagagagaatgatgatgaagtctgctatgtgtgcattggtgcttgtggcactggttgtggttgaagtggggcccatggctgaggctgcggtgacttgcaacccaacacagttgactccttgtcttccggcaattaattcaggttctgcaccttcgagtgcttgttgccagaagctgaaggagca

SEQ ID NO: 47641 - DNA, 275 bp, Glycine max
gaaaggcgatggacctcggaacctatgaagtgccagaaggagtggacattctaggaagatacgatgcagagtttgcaaaaatcctcacaaaagacgctttgaaattcgttgctgagctgcaacgtgagttcaggagcgatatcaagcatgcattagagaagctaccagggcacaagaagacagaggaggccacagctactactcctcctccaccaccacctgttgcatcattggagcatggtgaaggtgctcatcatgaaggagaggccaaggag

SEQ ID NO: 47642 - DNA, 313 bp, Glycine max
  unsure (1)..(313): unsure at all n locations
acgtacgctcgcgtacgcaagctcagacaacagctcgatcgcacncaaaacaccgatcctccacgacccggatccaaccatgcatcgccagacaaagcaccggatccccattccccgccccgatcgaatgccaccgagtccgctgccggaggaggcggcggcgacggttggaacttcggcggcctcatcaaaacccttacatcgaaatcggaatccataattgagacctaccgtcgcgatctgcaggaattcggcaccggtttgaagaaagagatcgaggtcgcgcagggttctctcgggaccgtgggccacg

SEQ ID NO: 47643 - DNA, 273 bp, Glycine max
gttcaactgggatgaaaatggtgttttcatttatacaacactaaatcacatcaaatattgtcttcccaatggagataatgggataataaagacattggacattccaatttatatcacaaaggtctctggcaacacaatcttctgcttggatagggatggaaagaacagatcaataattattgatgctactgaatatatttttaagctttccctcttgaagagaagatatgatcatgtcatgaacatgataaggaactcacagctttgtgggca

SEQ ID NO: 47644 - DNA, 271 bp, Glycine max
gtaattccagagccagaagtgaagtgtgtccaaagagacaaaagcgacgagtgcctcattctagccagtgatggtttatgggatgtcatgacaaacgaagaagcctgcgaaattgcacgaaagcggatccttctttggcataagaagaatggcaacaactcagtatcatcagaacaaggccaagaaggagttgatcctgcagctcagtatgctgcagagtatctttctagacttgccctccaaagaggaaccaaagataacatctctgtca

SEQ ID NO: 47645 - DNA, 242 bp, Glycine max
gcgaagagaatggctcccaagggtttaatctttttggatgtgttatgcttctcagcactgtcactgagtcgttgtcttgcggaggataatggacttgttatgaacttctacaaggaatcatgccctcaggctgaagacatcatcaaggagcaagtcaagcttctctacaagcgccacaagaacacggctttctcctggctcagaaacatcttccatgactgtgcatgtcagagttgtgatgc

SEQ ID NO: 47646 - DNA, 208 bp, Glycine max
agaaggtatgtttagaccagagagaggaggttagaaatcatgctttattatctctgcagaagtgcttgacaggtgccgacggcatttatctaccatatagcttgtggttacaatgttttgaatcttgtgatcttcactgtgcttgatgacctgcttgagattgcacagggacactctcagaaggactaccgcaacatgggaaggcaca

SEQ ID NO: 47647 - DNA, 270 bp, Glycine max
gatcatttgaattgaagcaaaatggggagtcatatgagcaagaggatccctgaaacttcctcttctaatgggctcagcaccgaattgcactacaagactgagttgagttcctatgaagctgcttgcaagcttgattctgatttgcagttctttgacaccacacttcaagctagagcaaatcaagttatcaacactcttgctgttggtgttgaagttcgagccctttcattcgattctctaaagcaaatcacagaatgccttctggagatg

SEQ ID NO: 47648 - DNA, 246 bp, Glycine max
ccgcgttcaattaggtgcatggatttatcgaagatgtaacagggaaaaaagttgccacattatttggcaagtgggatgacagcatgtattatatgaatggcaatgtaaatgtcaagcctaaagatttcacttcatcaaacgcatccttgttgtggaaaaggactatgccatctcctaatctcacccggtataatttgacaccatttgccatcactctgaatgagcttactccgggactgaagcttt

SEQ ID NO: 47649 - DNA, 256 bp, Glycine max
ggaaaggtggccctgagaatgctacttgcacctacaaaggtgtgaggcaaagaacctggggaaaatgggttgctgaaatacgtgaacccaaccgtggtgcaaggctctggcttggaacctttgacaccgctcgtgaggctgctttggcctatgatgctgctgccagaaagctttatggacctgatgcaaaactcaacctcccagaactctctgtgccttatgctgctggagtgatgaatccttctcacatgcaaca

SEQ ID NO: 47650 - DNA, 189 bp, Glycine max
ggatcctacctttaggaagctctctgtggatcacattgcctctgcatatagagatacacacagtcgattgatccttttggactacgatggcaccatgatgccgcaggcgacaatcaagactccgagcaaggaagttattactgtcttgaattatttatgcagtgatcctgaaaacatggtgttcattgt

SEQ ID NO: 47651 - DNA, 229 bp, Glycine max
ggatgccaccactcctccttttcctgatagggttcaagtgggaggatcgcccatgtacaaggtagagagaaaattgggtaaaggtggatttggtcaggtttttgttggccgtcgggagcgtgcaacaggtgctggagctgtggaggtggctctgaaatttgaacataggaacagtaagggctgtaactatggccctccttacgattggcaagtatacaacacccttggg

SEQ ID NO: 47652 - DNA, 258 bp, Glycine max
gtatgtttgcatgtatctgaagaaaaaatgagaattgggagacaagaagtggtggaagaagtgaaaaggctgctatggttagcagtgcctctcttctcagttggaattttacaatacattcttcaagccatctctgtcatgtttattggccatcttgttaccctccctctttccggcgcttccattgcctcttccttcgcatcggccaccggcttcaacttattgttggggctagctactgcactggacacattttgt

SEQ ID NO: 47653 - DNA, 261 bp, Glycine max
cttaatttctctctgccttgctcatttacacacctctccaaccttacactttcagctttatttgaatccctctctctcctttccaaatggccagcgttgaggttgcacatcaaacaccaacaacagttccagaaaatgaaacaaccgaggtaatcaagacccaggaaacaaccccggaaccagtatcagccactgaggctcctgcaacagaacaagcagcagctgaggttcctgctcaagaagaacaacaagcaactgagg

SEQ ID NO: 47654 - DNA, 255 bp, Glycine max
agttactatctataattaattaaattcctcgtggaatattgaagaagccatgtctacagctgggcaggtcatcaagtgcagagctgcggtggcatgggaagcagggaagccactgtcaatagaaaccatagaagtggcaccaccccagaaaggtgaagtgcgtttgaggatcctcttcaactccctttgccgtagtgatgtttattggtgggatgctaaggaccagactcctctgtttcctcgtatcttaggcca

SEQ ID NO: 47655 - DNA, 279 bp, Glycine max
aacttcacctagcataacctaatcgcaccccggttccgattgcatctgaatcaattctgagaagcattgacgttcaacaggttgcttcgaagtgaagtctgtaatcatgtcaagcaagtatatcatttctgctattcttggatcattggagttgcatgggtttgtgattattatgtttcagagaagaagctatttggaggtagtacccctggcactattacaaacaatgagtgggcagaagagactgacaaaaaattgcaggcatggcctcgtactgcc

SEQ ID NO: 47656 - DNA, 271 bp, Glycine max
ttggaacttctacaaaactcagagaatatgaacttcagtacatacttcaggacaatggagttcttctcacaacatatgatattgtccgcaacaattctaagtccttacaggggaataattattttgatgatgaggataatgagaaggcgcaacatgggactacatgatacttgatgagggacaccttataaagaacccaagcacacaaagggctaaaagtttgcttgaaataccaagtgctcatcgcattatcattagcggcactcctttg

SEQ ID NO: 47657 - DNA, 251 bp, Glycine max
ggaaagtccaagaccgaatctaagagagccgatgccaaacttgctgtgaataagaagggcgccgccaccaagactaggaaacccgccggaaaggggaaggcagcgaaagatcctaacaagccaaagaggcctccaagtgctttcttcgttttcatggaggaattcaggaaggtgttcaacaaggagcatcccgacaacaaagcagtgtctgctgtgggcaaagctgctggagcaaaatggaagacgatgtc

SEQ ID NO: 47658 - DNA, 246 bp, Glycine max
caggagcttgaggacgatatactaccagctgaagcggagcgtaggtatcaagaatacaaatcagagtatatctcgacccaaaaacgagcttattttaatgctcataaggatgaggaatggttgaaagataaatatcatcaacaaatttggttacagtcattgaaaggaggaatgcaaatgctcgacagctagcagaggattttttgcttgatttacagagtggaacattagaactaaatcctggtt

SEQ ID NO: 47659 - DNA, 267 bp, Glycine max
gcaatgatgagtgtggtgttaagtgtgatatgctcatggaatttgtcaaggatttcaagggtgcagcccagattctagacaaaggcggttacactcagtttacaccccattatattacttggtactgtcctcatgctttcactttgagcaagcagtgcaagtctcagtgcataaatcacggtagatactgtgctccggatcctgagcaagacttcaccacaggttatgatggcaaagatgtcgttattgaaaatttaaggcagctat

SEQ ID NO: 47660 - DNA, 260 bp, Glycine max
cacaagggaagtcctgcaattcttggagacatggaagaagatggtgctgctgctgctgatgccagtgacttcaattatgattcagaaaatcagaatcagaatcaaaaccaaaagcagaagatttcagagcgcatgttaagctggcaattgacatacccacgaggagaggaggttggtgctccaaattatgataaggatgtttctcacaaccacattcctctggtgaccattggacaagaggtatctggaaatttgtctgc

SEQ ID NO: 47661 - DNA, 244 bp, Glycine max
actcgagccgaatcggctcgagctatgcaggccagcttttctttgactggcttggtgataaactgggaaggaaacgtgtctacggaatgacccttatgctctggtgatatgctcaattgcttctggtctttctattggcaaagaccctaaagctgttatggccaccctttgcttcttccgtttctggcttggatttggcattggtggtgactaccctctttcggccactatcatgtctgagtat

SEQ ID NO: 47662 - DNA, 255 bp, Glycine max
gaaggtgaagaagggttggctcgcggttcaagtggaagaagaaggtggcggtggagggtctcaaagatttgtgatcccaatttcgtatctttatcacccctcttcaagcaccttttggataaggcttatgaggtttatggctaccacaccgagggtcctctcaaactgccatgttcagtcgatgactttcttcatctccgatggagaatcgagaaagaatccactacccatcaccaccaccaacatcatcatcat

SEQ ID NO: 47663 - DNA, 249 bp, Glycine max
tgatcatcaagcaaataatgcgccagataattacatctcttaagaaaattcacgacataggcattgtacacagggatgttaagcctgccaacttggtggttaccaaacgggggcagattaaactcattgattttggtgctgcgacagaccttcgaattggaaagaattatgttcctaatcgtacccctttggatcgtgactactgtccccctgagctatacgtgttaccagaagaaacactaagtctcc

SEQ ID NO: 47664 - DNA, 272 bp, Glycine max
tagtttttctgaactaactgcactgccactgaacacacaggttttaggatcatcttactcagtttgatcatgcagttgatgcactgacagtgttgacggataacagacataagcttgacctcgttatcagcgatgtgaatatgcctgacattgatggacttaagctccttgagttggtgggacttgaaatggacctacctgtcatcatgttgtcagcacacggtgatacaaagctggtgatgaagggtgttacacatggtgcatgtgactat

SEQ ID NO: 47665 - DNA, 284 bp, Glycine max
ctacaattaaggtctctcatacagtagtattttatctgcactacgaactggctactttatttatgtaagcagaggcaggtgagtgagtgtgtgagctagagtgaagaccgtctatgatggctcccaagggtttaatctttttggctgtgttatgcttctcagcactgtcactgagtcgttgtcttgcggaggatactggccttgttatgaacttctactaggaatcatgccctcaggcttaagacgtcatctttgtacacgtcaggcttctctatttgcgcgat

SEQ ID NO: 47666 - DNA, 267 bp, Glycine max
caggaatatggcttccttaagctcctcattagtgctgctccttgcagctctaattctatcccctcaagttcttgctcactatgagaagcccccaatttacaagccacctgtttacacaccgccagtttataagcccccagtacaaaaaccaccagtgtacaaacctccagtttacaagcctccagttgacaaaccacctgtttataagcctccagtttataagccacccatttacaagcctccagtgtataaacctccagttgaaaa

SEQ ID NO: 47667 - DNA, 237 bp, Glycine max
  unsure (1)..(237): unsure at all n locations
ctttaaagttacatagtttttcattgttttacttaatctacaatggctgcttcaacaatgactctctcttcatcatcattggctggccagctatcaagctgccccctccacccctgagcttgagatggaagggtagctgaggaaacagctccanactgtttctcaggaagccatggtacggccagaccgtgtcaagtactggagccatctctggtgagccccatctatctcactgtg

SEQ ID NO: 47668 - DNA, 100 bp, Glycine max
ctcggatcttttgtgcaatcgcccgggaatttcgacagttaaatatcactacgatcgtttcattagcacccgtggtattatacgacgaaactgtgctatg

SEQ ID NO: 47669 - DNA, 228 bp, Glycine max
ttcaagccgtagttaaagaaacgatgaggttgtatgcagctgcaccacttccaggtccaggtgaattcacaagtgagtgtaccttaggtggctaccgtatccaagcaggtaccagatttattttgaacatttggaagatgcagagagacccacgtgtatggtcagacccattagaatttcaaccagaaaggttcctcacgaaccacaagggtgtggatgtaaaaggtc

SEQ ID NO: 47670 - DNA, 125 bp, Glycine max
atttcttcaaccagtactcaaacttcttcaactggctattgaagtgtataaaattactcgtgtcagaaccaagtgaccaggttctaccatataacggtgaacttgttattgtattcctgaagttg

SEQ ID NO: 47671 - DNA, 164 bp, Glycine max
aaaacaaacccactaagatggcttcctttgtatccttcctagtgctgcttcttgcagcccttatcctcatgactcaagggcttgctacttactacaaaccaattaagaagccaccagtgtacaagcctccagtgtacaagccaccagttacaaaccaccggttt

SEQ ID NO: 47672 - DNA, 221 bp, Glycine max
gcgaagataatggctcccaagggtttaatctttttggctgtgttatgcttctcagcactgtcactgagtcgttgtcttgaggaggataatggacttgttatggacttctacaaggaatcatgccctcaggctgaagacatcatcaaagagctggtcaagcttctctaaaagcgccaaagagcactgtttctcctggctcaggaacatccttccatgactgt

SEQ ID NO: 47673 - DNA, 159 bp, Glycine max
  unsure (1)..(159): unsure at all n locations
gtctcatagcgctctgtgcgcgtactccgcaatggaatcgggttccaattcgtggagcgggaagtggcggctgacggcaacgttagggagtcncgagacgtagcgggggccccggaaacagttatcttctctgtatagcagactgcccaccctggagac

SEQ ID NO: 47674 - DNA, 243 bp, Glycine max
tattgcccaagcagtcaatggaactgcccaagcagcaggaactgcctattccattgatctctatgtctttcataccagactaaggtcattttatcaacattgggatgcacacaaaacagatctttggggctcttctgatgcaattcctgttgcatgtcctccaccttcagaagatcttcgaaacttgaaatcgactgctcttaacttatcgttccttggatttgagttccccgagacatttat

SEQ ID NO: 47675 - DNA, 279 bp, Glycine max
tggatggtcggaagccagaagatgtgaatgatgtacttgggatgcgagtgatattgaatcctaaggctggagagaattgattagaggctggagagagagcatgttataggactcatcagatcatccaatctatgtggaaggaaatcccttatcggacaaaggattatattgtcaggccaaaagcaaatggatataaaagtttgcatatggcagttgatgtgagtgaaaatggtaagacaagaccattgatggaaatacagataagaacaactgaaatgg

SEQ ID NO: 47676 - DNA, 251 bp, Glycine max
agttattccgtcaaaacttgtacagacggtcaaaactatacgatgctagaaagtcctcctccattctatctagggatgctcgtacaagacgttgggcaatcaagaaatctgaaagtggctataagaggatggaggaattccttgctttaagactaagggaaattatgaagacaaattcctgcgacttttttgtgtccaaggttgcagaaattgaggctacaatgaatagtggttattacagtagccgtggg

SEQ ID NO: 47677 - DNA, 258 bp, Glycine max
cacgatttgcagaatctccaagagagcatcatgaagacaaagcagcatatggatgttattatttggtgtacgagacatcaatttttggaagatgtgagatcacgttttactgatagttcgtcatggtcatcagttgttcggacaaggaaatcagaagcaattagacgtgcttggcctgatccaataaatcaatctgtggagtcatcaggacatgatgggtctctatttattgaagatgcaatgaataatcttgatctg

SEQ ID NO: 47678 - DNA, 266 bp, Glycine max
aaccactcttaatttctctctgccttgctcatttacacacctctccaaccttacactttcagctttatttgaatccctctctctcctttccaaatggccagcgttgaggttgcacatcaaacaccaacaacagttcgagataatgaaacaaccgaggtaatcaagacccaggaaacaaccccggaaccagtaccagccactgaggctcctgcaacagaacaagcagcagctgaggttcctgctcaagaagaacaacaagcaactga

SEQ ID NO: 47679 - DNA, 223 bp, Glycine max
  unsure (1)..(223): unsure at all n locations
ctcatgtcgattggaaatggtggcctttcatgctccatcgcatttggcgcagaccaggtgaataaaaaagataaccccagcaaccagagggctttaganacatntttcagctggtattatgcttctacagctttttctgtcgtaattgccctcacagtcatagtgtttatccaagatgcttttggatggaaagtaggttttggagttccagcagcacttatgt

SEQ ID NO: 47680 - DNA, 245 bp, Glycine max
ttgagatccgaggggagtgttccggtgagggaatgcgaacgaggcttatgctggtcacgtggctggatgaatgagcagaagaacagaatggcttcaggaaaggaagtaaattgttattttgactacctggtatcggaagctaaagaactgactgaagatcaaatttccatgctaatctgggagaccattattgagacatctgatactacattagttacaactgaatgggctatgtatgaacttgc

SEQ ID NO: 47681 - DNA, 260 bp, Glycine max
tcgttccgatcgagcgttcacggacgcagatggcgcagaagccggtgacggggacggaggggtggcggtggcaggcggataggcggtggggcttggaattagaagacatgactcatgagtgtcgtggcagtggatgggagtggtcggaggggatgccggcgaggcgttcacggaggcagagggccctctgcctccagtttggtcaaccacctgtttacaagcctccagtgtagaaacccccaattgaaaaaccacccgtt

SEQ ID NO: 47682 - DNA, 230 bp, Glycine max
aacttgcaaaagagttaggtgtagtcattccagttagcttctttgaggaggcaaacaatgcacattataactcaatagccataattgatgctgatggaactgatcttgggatttatagaaagtcccatattccagatggaccaggttatgaggaaaagttctattttaatccaggtgacactggattcaaggtaggtgcttaaggtaggcttatttgataatttgatatt

SEQ ID NO: 47683 - DNA, 226 bp, Glycine max
gaagtatcagatctggagcaggagaatagcgttggcagcgtttgcgtttgctctgctgttccaatcggcctcagcagacgacgtcgttgtgctctctgaagataacttcgagaaggaagttggtcaggacagaggagctctcgttgagttctatgctccttggtgtggacactgcaaaaagcttgctccagaatatgaaaagcttggtagcagcttcaagaaagcc

SEQ ID NO: 47684 - DNA, 264 bp, Glycine max
tgggtcatgggttctccaacatatttggaatctattgcatcctctgcggtacgagcagctattaaggtgaaggcttctgttattatttgtttcacttcttctggaagggctgcaagattgatagcaaaatatagaccaaccatgccggttctctctgttgtgatcccccgactcaagtcaaatcagctgaaatggagcttcagtggagcttttgaggctaggcaatcacttattgtcagaggtctctttcccatgcttgccgat

SEQ ID NO: 47685 - DNA, 262 bp, Glycine max
ggactaccccgccgtcgtggccagggtgtttgtgaagtaccttgacctcatgaggaagctgcaattacagtactcgcttggagcctgctgggtcccatggtgtgtgggggcttgatgattatcattttttgcccttcatatttgggtcttcgcagttgattgatcacaagtatatgaagcccaagtccattcacaatgaggatattttggagaatttctctaatgagtatttgtaccttgcttgcattgcctttgtcaagaa

SEQ ID NO: 47686 - DNA, 269 bp, Glycine max
cgagaagcttgaaagtccgatccccatgtcgaaattccatgtgatgttattagtgttagtggcgttgttatggaattcaggcgcatcagaagcagaggaatgcgagaagcgatggatccacataagaaagctcccttcaagtttgaacctggatctgctcgctaactgttcggaatacccaatgttggacgacctgtgtcccttcctagcaaaccacggtctgggacaaaaaaacccacaaccactcccacagttggtaccgaaccgac

SEQ ID NO: 47687 - DNA, 250 bp, Glycine max
gggagctgatcaatgtgacaataattataccgatacagtcatgttagttgggattccaaatgttggaaagtcggcacttgtcaatgctttgcatcaagtggggagaatcagtgcagcagaaaaaggaaagttaaagcatgcaactgtgagtccagagccaggggagactaaagacatacgaagttttaagattggtagccatcccagtatctatgtgttagacactccagctattttatctcccaaggtt

SEQ ID NO: 47688 - DNA, 266 bp, Glycine max
aattaattccttggttttgaggtttggtggcgagtgtgagcttgtttggttgaacgacaagaatgctttggctgtttttcatgatcctgctcgagctgcaactgcgatgaggaggttggattatgcaacagtttatcagggagctgttttggttgccccgaatgctggggcattggtggcatcttcagctaccaatgcctggggaggagctggggcaatgaaaggaggaggagcgctgccagcattgaaaggtaactcatggaaaa

SEQ ID NO: 47689 - DNA, 216 bp, Glycine max
ctcagatgttcctatgggcagctgacatgccttctggttgtgctggacctaaaattgacgaacatgactaagcttgtggaatatcactaacttcaactatagggatgcattcttcttgttaagtgcactgccagatatgtatccttgaacagtgtaagttccagtgatgtaaggtttcatgtctcgagaataaggtcttggtagtttcatgtgaat

SEQ ID NO: 47690 - DNA, 181 bp, Glycine max
tcttgctgaaaatcagtcaccttttatgattgatatatatccttattatgcctaccgtgattcccggagtaaagtgtctttagactatgccctgtttgatgcatcctctgaagtaattgatccaaacacaggcttgctgtacacaaacatgtttgatgcccagattgatgctatttacttg

SEQ ID NO: 47691 - DNA, 188 bp, Glycine max
ctttctcaagttagtagggataaattgccagatattggttcagacgtacgaaggggatgcggatactgtagcagatgctgtagagttcgtgctccaaaatttcactgcaatgaacaaactttgggtgcgaatgcaacatcaggggcctgcccgggagacggaaaaccgggaaaaggaaaggagcgatt

SEQ ID NO: 47692 - DNA, 258 bp, Glycine max
ctcgagccgtttttcccccatctgtagtttgtggggctagaagtttctatttctgggcattcagaagattgcaggaaaagttatcagctttatttccatattgaacagagttgttgatctaggtagtgttgggttggaatcggtgatctgtctttgggccaaatttggaggaatggagatcactagaataggccaatggttaagtcttctgatatgtgtactactattactgcagacagaaggggttcctgtgggaat

SEQ ID NO: 47693 - DNA, 253 bp, Glycine max
ggatcaacaatctgtctcatgatgtcgctcttgccgtcgctcccgatgtcgaataccgcatgcgccagattatgcaggaggcaattaagtgcatgcgccattccaagagaaccactttgacggcagatgatgtcgatgctgcactcaacttgaagaatgttgaaccaatatatggatttgcatctggtggccctttacggttcaaaagagctgttggacacagagacttgttttatattgatgacaaggatgt

SEQ ID NO: 47694 - DNA, 255 bp, Glycine max
tggtaactcaactgaaaatatcagatgtaccacagccagcaatgataagatccccaatttctcaaggatggcctatcagtgaagagagagtatcagaatggctttggaccttgcataggatagttgttgatgttgtgaggactgatagtcatcttgaattctacgaggacacgagaaatttagctaggatgtcagatattcttgctgtctatgcatgggttgatccttcaacagggtattgccaaggtatgagtg

SEQ ID NO: 47695 - DNA, 214 bp, Glycine max
gaaggcttcgactgctacgcccgcatgctctctctgcttcgtcgcttactgtcactcggcggtctgacaatgtggatgcgtctcatgcagcgctagtcggaggaaccttcttcaggctaaaaatacatgtcctgtgcatttcgagattttaaactacatagttagcacaagctaatgcaaaggagcccagtacccacccaagcaatgatgtgct

SEQ ID NO: 47696 - DNA, 251 bp, Glycine max
gatgacataaatttcacccttttaagttttaatttacctcactcaagactcaaccatgattcttttgaaatgcaaaatgaagtaatggttgcctctatataaggcacagctaacagcagaaacactcaacaccaaaacagaaccaagcgtatggataccctctctcagcttagccttctttgcctttgcctttccttctttcccctgctcgcttcccctgctttgctgtttcaggggttcaactgggaatc

SEQ ID NO: 47697 - DNA, 163 bp, Glycine max
tcttgtacactggtggcttctcaacttgtggcttgtacaagcctcatttgtacaagccaccagtatacaaaccaccagtttataagcctccagtgtataagccaccagtatacaaaccaccagtttaaaagcctccagttgaacaacctcctatttacaggcc

SEQ ID NO: 47698 - DNA, 139 bp, Glycine max
taaattcctcgtggaatattggaggagccatgtctacaggtgggcaagtcgtcaagtgcaaagctgcggtggcatgggaagcagggaagccactgtcaataggaaccatagaagtggcaccaccccagaaaagtggagt

SEQ ID NO: 47699 - DNA, 273 bp, Glycine max
tcacaaacttaagcgctgagcgtgaaagaggaatcaccattgatattgctttgtggaagtttgaaacaacaaagtattattgcacagttattgatgcgcctggacatagggatttcattaagaatatgattactgggacatcccaagctgactgtgctgttcttatcattgattcgaccactggtggttttgaagctggtatttccaaggatggacagactcgtgaacatgctctgctttcattcacccttggtgtgaaacagatgatttgct

SEQ ID NO: 47700 - DNA, 261 bp, Glycine max
aaccatccttttctttcgctcttcttccattccacactacatagtaaacacttcggacggaaacacaatacaacacaaaaagccccccccacaaaccaaatcaccttttttttcctttcaaaatgttcgccgaagagaatggcctcaagggagaccccagactccaagccatttcccaagccatcagagtcgtccctcacttccccaaacatggaataatgttccaagacataacgacattgctgttggatcacaaggcgt

SEQ ID NO: 47701 - DNA, 257 bp, Glycine max
caggacttctacaatttattggaggatgcgggaggtgatgacatagcagcaatggagttagggtcatatgagaaattatcaatggagaagtactccagatatcttacttccatgaagtcaaggtcatcatctcctggtggtgatgatgatcttgacaagttactaaacggtgtcataaagaaaaagttaaagatcatccctgagaatgtcacatggggagggcagtctgatgatgttttcaactatcttgcaggtga

SEQ ID NO: 47702 - DNA, 261 bp, Glycine max
attctacctcttcacatccatatcacagaaaactattttggtttaatttgcctttccttttcaagggagctcattgaagagacaaaaaacaatggctgaaacaaagttgagcatgatgaaggacaaaagatggtcactccgtggaatgactgctctcgtcacaggagccacccgaggcatagggcatgccattgttgaagaattggcagactttggagcaactgttcatatatgtgcacgtaatcaagatgatattgataa

SEQ ID NO: 47703 - DNA, 249 bp, Glycine max
gacacatttgagcagaaatggttcaagcacagcctctacaacatgttggtaatggtgcacggagagatgatcaagctcagtttgatccaagtgatccaccagcctacaagactgccaatatcagcgcagcaattccatcacattgctgggagaagatcacattgagatctctgagtaatgttctccgggctgtgtcggtcgtgactgcattggtagctgcagtaatcggcttcaatagctggatcttct

SEQ ID NO: 47704 - DNA, 288 bp, Glycine max
accctcgagccgattcggctcgagcttcatctgtcttttacagcaggcacgttcccttgccaggtacctgagtggggaaggatgaacatgtgcgatgctgaaagaagactccttgctaatgcattgcttgatatctccaacgagtggtttattctgctgtctgaatcatgcatccccctctacaatttcagctttgtctaccactagataatgaaatccaagcacagcttcgtgggtgcatttgatgatcccggtccatagtgaagagggcgctacaacgagcacatg

SEQ ID NO: 47705 - DNA, 281 bp, Glycine max
cccaggctcttccagaaccttctacgggagttcaagtaatccagactgctgaaaaaagttatctctcagatccacaccatgcagaacttgtggagaggcgatggggtggtagcactcacatcactgttgaagatgtgaagaagaggattgctgatttactaagagaatatgtggatagtggtgacacattagaagcctgtaggtgcatacgggaattgggggtttcattctttcatcatgaggtcgtgaagagggccttggtacttgccatggagatccat

SEQ ID NO: 47706 - DNA, 280 bp, Glycine max
cttctccatcttatttcttcttcttgaatgtgcttctgttgccaaagtttggattgtcgttttactgctgcggtggcatgggaagcagggaaaccactgtcaatagaaaccatagaagtggcaccaccccagaaaggtgaagtgcgtttgaggatcctcttcaactccctttgccgtagtgatgtttattggtgggatgctaaggaccagactccactgattacctcgtaacttacgccacgaagcatcagggattgtggagagcgtgggcgagggtgtg

SEQ ID NO: 47707 - DNA, 241 bp, Glycine max
ctctcctcgttcacgctacacctatctactcttcttctagctttacagttttaacagtatatatatggcatagacattcctattgacctcagaatcggtgaatgagggacaatctgacaagctctgcgtacacatctccgatgatgtcctcgacgcttgcctcgagcaggatccagacagaaaagttgcatacgatacatgcaccaaaaccaacttggtcatggtcttcggagaaatcacg

SEQ ID NO: 47708 - DNA, 280 bp, Glycine max
ctaattctcatttcttcatcgttcgattcttctcctcctaaagatgcagatcttcgtgaaaactttgaccggtaagaccatcacccttgaggtggagtcctccgacaccatcgataacgtgaaagctaagattcaagacaaggaagggatcccacctgaccagcagagacttatctttgcgggtaaacagcttgaggatggtcgaacccttgccgactacaacatccaaaaggaatccactctccacctcgtgcttcgcctcaggggtggcatgcaaatc

SEQ ID NO: 47709 - DNA, 171 bp, Glycine max
ttgtcaatattccctcaacttctgtttcacctacgacgctctcagtttgttcaggtctttaacaccagtcagatgcgactgcttatctcgaatgctactacaccgcgaaaatgctgcgaattctgttctgatggttcagcatccgttcatttctcattccctccatgctcg

SEQ ID NO: 47710 - DNA, 278 bp, Glycine max
aaggaagagaagttcaaggtagaggtacacaagaatatggtatggaagaactgttactatacatgtgtttgctgcttgcaacataaacatgtattcgccgttatcttattgctcccaaagatatgtaaattaatttagtaattaaaacatttgataagaaaagctgcatttgcggatagcttacaggcttcttttgtgactgttggagagcatcccgggggtagagttactggtggtgtatcatggctgatggatgtgtaaatttctatgcaggtcat

SEQ ID NO: 47711 - DNA, 272 bp, Glycine max
cgaatcgagcggtgtttgcggctgtggattacgaacgagcgaccttcttcgtttctcgcaaagtttaagtcatcatgggtaaggaaaagactcacatcaaaattgtcgtcattgggcatgtcgactctgggaagtcaactacaaatggtcatttgatctaaaggctttgaggtattgaaaagcgtttgattgagaggttcgagaaagaggctgctgagatgaacaagaggtcattcaagtatgcctgggtgcttgacaagctcaaggctgag

SEQ ID NO: 47712 - DNA, 268 bp, Glycine max
aattctttctttttctgtgagcatttctttcaggttattagcttgatcagtgtgcagtgtacaaatcataagggtagttgcaaattgcaatggctaagcatgatgttgagggtggttccttctctgcaaaggactaccatgatcatcatccagcaccgttgattgatgctgaggaactcacacagtggtcattctacagggctttgattgctgagttcattgccacaatgctcttcctttacatcacagtgctcactgtgattggtta

SEQ ID NO: 47713 - DNA, 222 bp, Glycine max
tcagactatgagctcactttcacgcataaccaccatatatctgcaaaataaccagtttacaggcactattgatgtccttgatagtctgcctctggacaatctgaatgtggaaaacaataattatactggatcgataccggtaacagctgaagaacattaacctacagaccggtggtaatgcatggagctcaggtcctgaacccccatctcctcccagggaag

SEQ ID NO: 47714 - DNA, 205 bp, Glycine max
ggcctcttcagtgatggcatctgtggccctcaaacctgcccctttcactgttgagaagtcctcagttagaggccttccctccctctcaaggaactcctcttcattcagagttgtggccagtggtggcaagaagatcaagactgacaagccttatggaattaatggtggcatggctttgagggaaggagttgatgcatctggcagg

SEQ ID NO: 47715 - DNA, 272 bp, Glycine max
tcggtatgcatgacttatatatgtctcttaagcctctcctcgaggactatatgcttcgtgtcttcactgaagaaggtgctcgcgaaaatagccacaacgaggtcgaggacagcagcgaccttgatgttgacaaaagtaagctgccattgcagttagccattgtaggacgccctaatgttggtaaatcaactttattgaatgcattgttgcaaaaagaccgtgttcttgtgggtcctgaagctggtctgacaagagattcaatcagaacccag

SEQ ID NO: 47716 - DNA, 194 bp, Glycine max
tctcgagccgctcgagccgcaatgctgcaacttctttttggcttcctgtgtcaccaaaaagggtttttgaattcctccgcgatgagaactccagaagtgagtgggatattctttccaacggtggagttgtccaagaaatggcacacattaccaatggccgagacactggaaattgtgtctccctacttcgtgtg

SEQ ID NO: 47717 - DNA, 282 bp, Glycine max
gttgattttgagatgtttcttcttgttgcaggttttcaagtgtgccattctctgggaggaggaactggatcaggaatgggtaccttgttgatttctaagatcagggaagagtacccagataggatgatgcttactttctctgtttttccttctccaaaggtttcggacactgttgtggaaccctacaatgctactctctctgttcaccagcttgttgaaaacgcagacgagtgcatggtgcttgacaatgaagctttgtatgacatttgcttccgtaccctc

SEQ ID NO: 47718 - DNA, 251 bp, Glycine max
caaaaaaagacaacacagagagaagcgtcttaataaacgctcttctctgaaaaacctgatttcttctcttcttctcttctctttcgtttcgatcttcgatctctgaaaatgagagagtgcatttcaatccacatcggtcaggccggtattcaggtcggaaacgcctgctgggagctctactgcctcgaacacggcattcagcctgatgggcagatgccaagtgataagactgttggtggaggtgatgatgc

SEQ ID NO: 47719 - DNA, 278 bp, Glycine max
gtgtatgtatctaaggagtataggaggagggatgtgttgcaagggattctcagggatgtggatgctctcaccagagatgaaatggagaaaatacccgaggaagagttggtcaacaagctccgcaatgtgttgagtgagaaacggtatttggtggtgcttgatgacatatggggcatggaggtttgggatggtttaaaatctgcatttcccagagggaagatgggaagtaagatattgctcaccacaaggaatggggatgttgctttacatgctgatgc

SEQ ID NO: 47720 - DNA, 298 bp, Glycine max
acctctcaattcggctcgagctagcctactaacttcctcgcaatttccatatcacggaactcatgaagatggagaaagcgatcaacagacagaagattttgcttcatcatctcaacccttcatcatccacccaccccaacgaatcatcctccctccatgcttcagcatgtgtggcgggggatagcgctgcttatcaaaggacatcgacattcggggacgatgttgtgatcgtggctgcttatcggactgctcattgcaaagctaaacgaggtggtttcaaagacactcttcctgatga

SEQ ID NO: 47721 - DNA, 274 bp, Glycine max
aggaggaggatactgatgacgaaggtcttgaagacgaggaggatgatgagagtgcaaatgaatatacagatgatgaagatgtaagctggcaagttcggagagcagcagctaaatgattagcagcattgattgtttctcgtcctgagatcttgtcaaagctgtatgatgaggcttgtccaaaactaatagacagattcaaagagagggaagaaaatgtcaagatggatgtatttaatactttcattgagctcttgcgtcaaactggaaatgtcac

SEQ ID NO: 47722 - DNA, 278 bp, Glycine max
tgaaaagtgggtatcaggctcttccatgggtgagatacataacaatggctggagagtatgaactgaggctaatttgagatttgtgtccttgtttggtattcacaaaataaatgtgtcattccgtgatcgtggatggaagagggagtctcgagtcattaattttttaccaaccccatatgagttactaattgtctagaaagttgttgcagctgaaaattctgagttggaaagtgtgagccgaaactcttgcaagtcccttcggtcaaatctgttttgat

SEQ ID NO: 47723 - DNA, 270 bp, Glycine max
tgaatctcagaattctctaaaagagatctttttctgctctttgaagaaagaagggtctttgcttgattttggagatgtctctgctctcagatctcatcaaccttaacctctccgataccaccgagaaggtgatcgcagagtacatatggatcggtggatcaggaatggacctgaggagcaaagcaaggactctcccaggaccagttagcgacccttcagagcttcccaagtggaactatgatggttccagcacaggtcaagctcctggtg

SEQ ID NO: 47724 - DNA, 274 bp, Glycine max
ggaagcataacttggactcttggggtggccttgttggaagctgggaaggcgtattcggttaggtttggactccgtggtttttacttgcttcagatgaagatgaatccgcttattcttattcccattttgatactttctttcattcttctgctttgtgctttgtcgtgggttgtcaattggatgccaagatttttccggagacagtatcttccatttttcaggcataacagtgcgtccagtgcatctggtattaatatcccatctcctttccggt

SEQ ID NO: 47725 - DNA, 268 bp, Glycine max
  unsure (1)..(268): unsure at all n locations
gttgtaagagtttcaataaatccacttcaactgaatcctagtgctgaagaaatggggcatggacgctatccaggtcaaccccaaggccatgctctctttcaaccattngactgtgagccaaccttacaaattggatatcatcctgatccagtatcagtggtgtcagaaggcccaagcatgaataattacatggcaggatggttaccatgaaagagtgtcaagtgtggagcataattaaagatcgatcctgccgtttcaaatctatttc

SEQ ID NO: 47726 - DNA, 267 bp, Glycine max
  unsure (1)..(267): unsure at all n locations
agtgtccagcttagaaagaaaaacgggtacgatgacgatggtctccctctcgatgtccccaaaggccatttcgctgtctacgttggacaaaacagaagtagatacanngtacccatctcttttttgactcaccccgagtttcagtctctccttcgtcaagctgaagaagaatttggcttcgatcacgaaatgggtctcactattccatgtgaagaagttgttttccgctctctaacatccatgctaagatgctagatatatatacta

SEQ ID NO: 47727 - DNA, 259 bp, Glycine max
  unsure (1)..(259): unsure at all n locations
aaggtntatggcttcttaagctcctcattagtgctgctccttgcagctctaattctatcccctcaagttcttgctgactatgagaagcccccaatttacaagccattngtttacacaccgccagtttataagcccccagatgataaaccaccagtgtacaaacctccagtttacaagcctccagttgaaaaaccacctgtttataagcctccagtttataagccacccatttacaagcctccagtgtataagcctccag

SEQ ID NO: 47728 - DNA, 230 bp, Glycine max
  unsure (1)..(230): unsure at all n locations
ctgttcactagcctgtgcattcttctctcgctctctgccttccatcacactcggcatttgctttcccaagatagtagaagatggcagacactgaggatattcagtnnattgtttgtaagcatagaacaggaatggttaaagatggatttaatggagatgatgctcnctgttttgtgctncccagcattgtaggttgtcctcgtcacactgggtgtgatggttggcatggg

SEQ ID NO: 47729 - DNA, 269 bp, Glycine max
  unsure (1)..(269): unsure at all n locations
aaanaaaaaaaaaaaatccgcgattcgctcttctcttggaaaagtgaaaaccagaagtacgaacgaaagagaagagcgatttagaagtgagagaagatggggttatcgttcacgaagctgttcagcaggttgtttgcgaagaaggaaatggggattctgatggtaggccacgatgctgctggtaagacaaccatcttgtacaagctcaagcttggagaaatcgtcaccactatccccaccatcggatttaatgttgagactgtggagta

SEQ ID NO: 47730 - DNA, 261 bp, Glycine max
caacacgaaagctagccaaaaccttttttcgaagtctctgattttcctaatggctccggcaaaggcagagaagaagccggcggagaagaagccagcggcggagaaggaaccggcggagaagaagccgaagggctagaagaagatctcgaaggaaggagggagcgagaagaagaagaagcgcacgaagaagagcgtggagacctacaagatctacatcttcaaggtcctcaagcaggttcaccccgacattggtatttccag

SEQ ID NO: 47731 - DNA, 271 bp, Glycine max
aagaagcaaacaacacaatgagttctgaaaatttgatttttatatgtatttttattatgttgataagcattagttcaggaaattgtgtagataggaataggaagaagcattatgttctggtgcatggagcatgccacggagcttggagttggtgcaagctgaagccacgcttggaatctgaaggccacaaggtcacagtgctcgaccttgcagcttctggcatcaacatgaagagaattgcagatgttgacactttctcgcagtactctga

SEQ ID NO: 47732 - DNA, 274 bp, Glycine max
ctcaccagtgcccaagcctccttattactatcaatctcctcctcctccatcaccggttcctaagccaccatattactacaaatctccacctcctccatcaccagttcctaagccaccatactattaccagtctccacctccaccatcaccgattcctaaacccccatactattaccaccaacgtcatatcctccacctccttaccactacgtgagccctccaccaccttctccatctcctcccccaccataccattacacatcaccacctcctc

SEQ ID NO: 47733 - DNA, 263 bp, Glycine max
agagaatggacgccattgattctgtgttcgatccgctgagagaattcgcaaaggacagcgtgaggctcgtgaagcgctgccacaaacccgatcgcaaagaattctccaaggttgccgtccgtactgcaattggtttcgtcgtgatgggattcgtcggtttcttcgtgaagctcattttcattccaattaacaacatcgtcggatctggttaggtaaattatatttcttcacacaaaaatgttttttttttatattctactttt

SEQ ID NO: 47734 - DNA, 264 bp, Glycine max
ctgtcatatgatggagattggattatgatctaaatatatattatttagtattttaattttgatttcatatttaggaatcaagtgaattgcaatcagaagaaaataaagtctccaatgagaaaaataagaaaagaaagctgaaaacaccggcccagcttaaggccttggagaatttttataatgagcacaaataccccacagaggacatgaaattagtacttgctgaggagttaggattgacagaaaagcaaatatctggatggt

SEQ ID NO: 47735 - DNA, 276 bp, Glycine max
atttctccgagaacaaaaaaaaaaaacgtgattcgctcttctctactaataaaccacaaaaccaacaaacgagaagaggagtgagaaaagatggggttgtcgttcacgaagctgttcagcaggttgtttgcgaagaaggaaatgaggattctgatggaaggtctcgatgctgctggtaagacaaccatcttgtacaagctcaagcttggagaaatcgtcaccaccatccccaccatcggattaaatgttgagactgtggagtacaagaacatcggc

SEQ ID NO: 47736 - DNA, 270 bp, Glycine max
gttttctttgcagacatgtcttggatcccatttccatcaggtcagtgcctatgtacttttttcagaaaggttggtggtgactggtgattgttgaagagaataatggcaagttcaactatggatattcttcatttccaccacactcctttttattgatcccactttggaatcaaaaggctagcaaaagagctgatggggtgattctatgggattatcatgtaatttgcattcagataaaacaaggagctgtccctccactagtgtgggact

SEQ ID NO: 47737 - DNA, 272 bp, Glycine max
aatcgagccgagtcggctcgagctgctcgagactgtcttccttgtatctgggtttttaggtcactcgatttcttcgctcaacattgttcttgaaaatgatattgatttgctaaatcctccggttgagcttgagaagaggaaacacaagctcaagcgtcttgttcagtcaccaaactctttcttcatggatgttaagtgccagggttgcttcaacataaccactgtctttagccactctcagactgttgttgtatgcggaaactgccagactg

SEQ ID NO: 47738 - DNA, 266 bp, Glycine max
tgggttccaacggtggaagtagtaacaacaacaataataaggtattggaaaaaccaggtcaagatcagcttgtgcagcagcagcaacaacaacaagaagcccccaagtgccctcgttgtgactcatcaaacaccaagttctgctactacaacaactacagtttgtctcagccacggcacttctgcaaagcctgcaagcgctattggacaagaggtggaactctcagaaacgttcctgttggtggaggctgcagaagaaacaagcgt

SEQ ID NO: 47739 - DNA, 138 bp, Glycine max
tgtagaggcaagttaggttgtaaacctctttgctagctatattgaactacaccataggagtagtgtgcatgtcaattcggttttgccatgtacctcttggaatattatggtaatagttgtttgaatctctttaaggta

SEQ ID NO: 47740 - DNA, 265 bp, Glycine max
acttgttgttaatttgcctataacacctcgcaggtctccgccgtggtgttcctgatcccaagatcaggatttgtgatgttggtatgaagaagaagggtgttgatgagtttcctttctgtgtccatctggttaattgggagaaggaaaatgtttcaagtgaggccctggaagctgatcgcattgcttgcaacaagtacatggccaaatttgctggaaaggatgctttccacttgagagtcagggtgcacccattccatgttcttag

SEQ ID NO: 47741 - DNA, 245 bp, Glycine max
cacaagattgagggggcccctaaccaaacctaatagcttcagaggatccatcatgcccactcaccatgcttccgccgccatttttggtattataggtaacatgatttctgtgatggtgtacttggctccggtgccaacgttttaccagatatacaaaaagaaatgcacggacggtttccactcgctgccatacttgttgtcattaatgagttctatgctttggttatactacgccttcctcaaaa

SEQ ID NO: 47742 - DNA, 273 bp, Glycine max
cttggaatcagttcggttcatcagcaccactttagtcagtctttcccttggtggttgtcgggcgatcactgctcttgagctcacatgccctaaccttgagaaagtcattttggatggttgtgatcatttggaaaaagcctccttttgtcctgttggccttcggtctctcaatttaggaatatgtcctaaattgaatatactcagcatagaagccatgtttatggtctcacttgagttgaaaggatgtggtgtactgtctgaagcatcccttaa

SEQ ID NO: 47743 - DNA, 209 bp, Glycine max
atatttttcttctctcccttctttctctctctctctctcgaccattctcttcttcttctttttcttctcctctctctctctcccctccgccatggctgaggataaggagatgtctacctctgtcatcaatgggaatgattccctaactggtcacatcatatctacaactattggaggaaaaaatggggaccacaaacagactattagct

SEQ ID NO: 47744 - DNA, 282 bp, Glycine max
cacaatgtcagtaaccaaattcaatgccatggtgtccggtttgttccagttgggaagttcatatgaatggattgttaccaaaaaagcaggtcgggcatcagagcctgacctattagctgccgaagaacgggattcaaaggcaatgagtctccaacttcacagagggacttctgatagtggactttctgagcttaccaaattaaggaatgccaagaaacagtgcccgtgaaaggaaattgaccaagttatattagaaagagcttgcccttgcattcttactgc

SEQ ID NO: 47745 - DNA, 247 bp, Glycine max
cctcgagccgattcggctcgaggcaaggtgcagcatgctaatattactgcagcaaaggctgactctgatataattcgtacacccttgggacccaggtccatgttaaaaatgctacttgatgcttcaggaggcattgtggtgacaaatgatggaaatgctatcttgcgtgaaatagatcttgctcatcctgctgcaaagtctatgattgaattgagtcgcacccaagatgaagaagttggagatggac

SEQ ID NO: 47746 - DNA, 170 bp, Glycine max
ctctgagcgtgatatagagaaggggaagaaagagagagagtgatatgaaggggaagagtggagttgaagagaattgagaacaagatcaacaggcaagtgacctttgcaaaacgaaggaacgggcttttgaagaaagcttatgagctttccgttctttgtgatgccgaggt

SEQ ID NO: 47747 - DNA, 265 bp, Glycine max
ctgatggagggttgtttccacttgcttttggtgttgttgatgtagaaaatgatgacagctggacatggttcctgtctgagttgcataaggtacttgaggtgaatactgaatgcatgccagagtttatatttttgtcagatgggctaaacagtattacagatgcagtaagaaggaagttccctagttcttctcatgcattctgcatgcgtcacttgaccgaaagcattggcaaagagttcaagaatctaggcttgtccatcttctg

SEQ ID NO: 47748 - DNA, 216 bp, Glycine max
gtgccttttgcattctctctctaaatccaacgtttggagtgtttctctctcactcctctctgcaagatccgcaccccaaaccctagcaaacccctaccgcagagggagccgagaagaacatcaacaacacgcaccagtatacaaaccacccgtttataagccaccagtttacaagccaccagtgtacaagccaccagttgagaagccaccagtgta

SEQ ID NO: 47749 - DNA, 261 bp, Glycine max
atgtcccctgaatatgcaatgcaaggactaatttcagagaaatcagatgtctttagctttggtgttttggtactagagattgttagtggaagaagaaactcaagattttatgatgatgagaatggtcttggccttttaggatttgcctggatacaatggaaggaaggcaacatattatctctaatagatagcaatatatgatgttactcatcataaagaaattttaaggtgcatacatatagggcttctatgcatgcaata

SEQ ID NO: 47750 - DNA, 270 bp, Glycine max
gcaattcacaataatccaatcatgggaatcaatatttgtctctctctttgcttcttctacatcactacccttcaacgcacaatttccacgttggcccagtctgagaattatatcatccacatggacatatcagacatgcccaaagcatactcctcccatcacacttggtatctctccactctctcttcagcattggagaattccaaagccaccaccgacaaccttaattctaagctgatttacatctacaccaatgtcatcaatggtttc

SEQ ID NO: 47751 - DNA, 256 bp, Glycine max
ctccgggaaaatggctcactggaagcttcaatctcaccagccatctcaccctctttttggaaaaaggtgctgtccttattggaactcaggatccatctcattgggatgttgttgaacccttgccttcttatggccgagggcttgaagttcctgggggaagatatcagagtttgataaatggatacatgttacatgatgtggtcgtaacaggtaataatggaaccattgatggcatgggaatggtttggtgggattg

SEQ ID NO: 47752 - DNA, 262 bp, Glycine max
tggacgtaatcatgggtgtttcttcatcatcgacacaaaaattagtctttatttttttgcttttacagaaggtgggattttgactagctgggtgtttggctgttgagtttatggagggccaagttccttgttgaacagtgtttgtgtagcctttatctgcagcttttaattgaaccaatcctaccctctttgtttccatatgaaaagatcggttttttgtgattcctccgctcattgttgttgaagggtctcgtgaaatcaa

SEQ ID NO: 47753 - DNA, 265 bp, Glycine max
tgtttataagcgaccagtttacaagctggtggtttttcaattgggggtttatacactggaggcttgtaaacccccaattgaaaaaccacccgtttataagactctagtatacaagctagcagtgtacaagcctccagtgtataagccaccagtttagaagtcaccagtgtacaatgttgcagttgagaagccaccagtatacaaagcacccgtttataagcgaccagtttagaagctagcagtgtacaagctaccagttgagaag

SEQ ID NO: 47754 - DNA, 255 bp, Glycine max
caacaaccttagcagttaattagcacaacacaaaaggagagagagagagagagagagagagagagcgagagagagagagagatggggagaagctcacgttgtacaaaggagggtttgtatagaggtgcttagagagctcatgaagacaatatcctgagagtatatatgactgtccatggtgaatgtagatggagacaccttcccaagagagcatgtgtgaaaatatgcgggaacagttatagacctcgatggttg

SEQ ID NO: 47755 - DNA, 263 bp, Glycine max
aatatgtagatggtgggccaacagaaaatactgctccaccttctgtttatggtactctaacacagatgaattcagccgatgatccccgaagtaatttcaatgtgacttggcagtttgatgtggagcctcaatttcagtaccttgttacgacttcacttctgtgacataatcagcaaaagtctcaatgaactgtacttcaatgtttacattaactcctggtttgttgccaaggatcttgatcttagtacaataaataataatat

SEQ ID NO: 47756 - DNA, 273 bp, Glycine max
cggctcgagcagagcacaaaagaaggctgagcgtgagcagatcttgcaccaccaatttgaggagaagcggaaggaacaaatcttgaaatacaagggatcgaacatttatgtgaagaacattgatgaccatgtaagtgattaagaactgagggatcattttagtgcatgtggcattataacttctgcaaaaataatgcgagacgacaaagggataagtaaagggttcggctttgtctgcttctccactcctgaggaggccaataaagctgtgaa

SEQ ID NO: 47757 - DNA, 263 bp, Glycine max
gtcaagaatgctattccatccggtctgattccttccaccaacatctcatcatacaagtcaagcacttccttgtaatgcccattcctaccatacacaccaaacattgaagtccataacacaacgtccctgcttcttacttcttttctaatctccatcccaaccaacttgaacacttgccaagccttctttactaatccacacttgccatacatctcaaccaacgcgctctgaagaaacacatcactctctatatcaggtgtcgt

SEQ ID NO: 47758 - DNA, 292 bp, Glycine max
gtacggtagtctgttagctgatgacgttgtccataccctattgacgcgcgtccctccaaccgcacctgccatccttcacgactatcacaggtttaagatcaaaggtcgcgtttatcccgctattctccctgtccagaataacacagtttatggcagggtctgtctctcttcttacatatccctacataattctaatatatgcatccatcatttaagactatttttcctcaggtgcttcttggtatctccggagtagaactagatattttagatgaatttgaggatgttgaat

SEQ ID NO: 47759 - DNA, 145 bp, Glycine max
ggaaggcccaagccgggaacatttgtgttgcatcatttgattggcgctgcagtggaatttgcaggtctactgagaggattaaagaggtacatcggaggtgtggagagggtgcgcatgctttgtggagtgcctctttctaaggggc

SEQ ID NO: 47760 - DNA, 278 bp, Glycine max
caattctacactcattcaaactatggcagcgtcttcgctctgttcctctttcacctccaaaacgtggacgccgcacgcgcgctatcaccacaaaaccctagcacctccctattccgcctttcttcgcggagacctccagctccatccaccttcggtttccggaacgcggcggagaaggcgccgccgatcgggttcggtggcgtccctcggaggcttgttaggcggcatcttcaaaggcgccgatacgggagatgccccgaagcagcaatacgctgcga

SEQ ID NO: 47761 - DNA, 259 bp, Glycine max
gtatgggttaactttcttgaatgaattggtcgaggagcatccactggggacgcataacttcatgaaaattccagtgactctttggaacttcgtttttgggcttcttatcgagggcagactctggcgaggacagtgcgtggtatgatgtactataggagggctttaatgctgcagagctttctggagagcagatcacttggagtggacaattattctcaaaacaacttcattacaactcaagattttgaatcatctcgcg

SEQ ID NO: 47762 - DNA, 240 bp, Glycine max
cttcattctctttgcgcagttccctacctctcctttcaagatgcagatcttcgtcaagaccctcaccggaaagaccatcacccttgaagtggaaagctctgacaccatcgacaacgtcaaggccaagatccaggacaaggaaggctttcccccggatcagcaacgtcgcagcatcgccggaaagcagctcgaagacgggcgaaccctcgcagactaagacgtccagaaggagtagaccct

SEQ ID NO: 47763 - DNA, 250 bp, Glycine max
gttccaggttaacaccaaacaacacatatagtgcagattcataagcttccaacgctggaggatccccatcccactccagtgacgtctgctcagagatccatgggaactcccagtactgtacacatgctgactggtgggatgctaatgggcagactccgctgtgtcctcgtatcttaggccacgaagcttcggcgattgtggagaccgttcgcaatggtgtgaaacatctgcaaccaggcgaccatgctct

SEQ ID NO: 47764 - DNA, 253 bp, Glycine max
aacgacatgaaataaagagtgggttatttgatttgaaacttactgcccttgatcagcaaagtaagactatattggttaatgatactgtcagggtgctggagggtccatctaagggtaagcaaggcattgttaagcacatttatagagggattgtctttttatatgatggaaatgagcgggaaaatggacgttacttaacttgtaaatctaatatgtgtgagaaggtcaaggttgctgttggagattgcagtgg

SEQ ID NO: 47765 - DNA, 273 bp, Glycine max
gtgcgaacagatcttgaaaattggcgcctagagtatttgaagacgatttcgatccaattaacagcaagctggagagcggggaagcagatactgatgcatcaatttccttacctatgaatagcacaagggaaaataatgttgctaagattaaagttgtggtacgcaaaagacctttaaacaagaaggagcttgctaagaaggaggatgatgttgtaactgtagctgacaatgcatatttgacagtccatgaaccgaaactaaaggttgatttga

SEQ ID NO: 47766 - DNA, 271 bp, Glycine max
cttcactctctctctttcttccctttgcttgctactcttgtcgagtgcatgctttgctattagctccagcaagctcaacgagtgccagctcaacaacctcaacgcgttggaacccgaccaccgcgttgagtccgaaggtggtttgattcaaacatggaactctcaacaccctgagctgaaatgcgccggtgtcactgtttccaaactcaccctcaaccgcaatggcctccacttgccatcttactcaccttatccccggatgatcatcatc

SEQ ID NO: 47767 - DNA, 264 bp, Glycine max
gaaacgggcaatgggtattctccccagagatcccgacagatgtgattgttgcagttggatgatccaatttcactctccataagtttagtctggcgtgtagtagtagctacatcagagaagtgatcatggaatcagagtagagtgacctaacaagaataggtatttccagcatacctggaggacaagaagcttttgaggaagccgcgaaattctgttacggcgttagcttcgagatcaccgttcacgacgtggcgtcgctgcact

SEQ ID NO: 47768 - DNA, 272 bp, Glycine max
acagaatcataagttcaaacttgaatttcactgggaaacttagcctcgatgctagtaatggaaacaccgaggtttacatgaatggtcgagagatcacaaaacttgaattgagggtactcaagctggcaaatgtgcagtgtccacgtgatacacacttttgggtctatgacgatggtcgttatgaggaggaaggtcaaaataatatcagaggaaacatttgggagaaggcctcaacaagattcgtatgtgccttattctctctaccctttccc

SEQ ID NO: 47769 - DNA, 267 bp, Glycine max
ttcagcaagtgcgttttggaagcagagaccgaaatacttcgagatggcccgtacaaagcaaactgctcgtaagtcaactggaggaaaagctcccaggaagcagcttgcaaccaaggctgcacgtaagtctgcaccaacaactggtggtgtgaagaagcctcatcgttatcgccctggaactgttgctcttcgtgagattaggaaataccagaagagcactgagctcctaatcaggaagcttcctttccagaggttggttcgtgaaat

SEQ ID NO: 47770 - DNA, 219 bp, Glycine max
tgctgctggtgctggagtttagggatgagggtttattttattggcagggttacatgagtttgtgatgatgtgttattgtgtttctttaggtttgaataaatgatatttactttaaaaaaaaaaaaaaaaaagggcgccccccgactatgaacccctccgccccgggatttaatcccggcccggaccctgagggctaccattcttcccctagagttatct

SEQ ID NO: 47771 - DNA, 246 bp, Glycine max
aaggctcctaagcatttacaagcagatctagttgctctggtacccaaattggttgaacagtcagaacactcactggctgcctgtacacttcttgagcgaattcataacccagaagcggaacctgctttacgaatacctgtatatggggctcttagtcaattggagtgtggtagtgcagtgtgggaacgcattctgtttcactcatttgaacttctgacagagtcaaatgatgaacccctaactgca

SEQ ID NO: 47772 - DNA, 249 bp, Glycine max
gtcttcaaaggggttcttacatggagatgtctttcttttatccagtgaagcttaggatcaaatcatttagagtgcccgagctttttatcgagattccagaaactgcaaccgttgggtccttgaagaggacagtgatggaggcagtgactgctgtacttggaggcggattgcgtgtgggtgtgattctccatggaaagaaggttagagatgacagtaaaactctacttcagactggaatttctcatgata

SEQ ID NO: 47773 - DNA, 249 bp, Glycine max
ggtgaatgggattcctacatgtgctgacccagaccttctcaaagggataatcagaggccagtggggtctagacggatatattgtttcagattgtgattcagtggaagtctattacaatgcaattcattacactgcaactcctgaagatgcagtggctcttgcactgaaagcaggtttaaacatgaactgtggcgattttcttaaaaaatacactgcaaatgctgtaaacttgaaaaaagtagatgtagc

SEQ ID NO: 47774 - DNA, 242 bp, Glycine max
ggaagggtctttggtcaccagaagaagatgaaaaacttctgaggcatattacgaagtacggtcatggatgttggagctcagttcctaagcaagcaggtttgcagaggtgcggcaagagctgcaggcttaggtggatcaattacttaaggcctgatttgaagagaggtacattctcacaagaggaggaaactctcatcattgaacttcatgcagtgctagggaacagatggtctcaaattgca

SEQ ID NO: 47775 - DNA, 182 bp, Glycine max
tgttgtgtgtgtgagcccatttgtatgctgctcatcgcaccagtgatacgtggtctgacagatgcctcatcagcccaatgttgtgaagcttgaggagttggttacttctagaatgtcgtgtagtctctatttggtgtttgagtatatggagcatgatcttgcagggcttgctgctggtcaag

SEQ ID NO: 47776 - DNA, 239 bp, Glycine max
ccaggattctgcttttgatctcttggctaagctttggaattgcagttattttattaatcgttgccacaagcatgagcagaaggcaggactatggggaagggtggttgaatggtgagtgctaccttgtcaaaggagggatttacgttggttcagccatattgatcctagtttcagtagaatcgttaatgggttcagctttgttaacaatgaagaccaatgaagaagcagatcagggtaac

SEQ ID NO: 47777 - DNA, 241 bp, Glycine max
ctcgagtcggtgaaatctgtgaccatacgcagaattccaacggtacgagcaacgatgccactatatgatagtctcactgagttccaaaatggccattgccacatggctattgttgtcaaacactgtgacaagacacgttattaatcttccaatagttctggctattgctcatcgtcagctgtgaaggtgtctattgatggttagaagctccccgagactgaaatttgacaaccgagatgtc

SEQ ID NO: 47778 - DNA, 230 bp, Glycine max
ctaaaacacagcattatgtccttctctacaaatatcctgaaaaactcaatcatggctagagattcttcggattcaggtccatttagaatgcttgaggggaatgtgacgattatcaatggtggtgcgagtagtctaagcgcagctactgcaagaatcttctctaaacatggatcacatgtaatcatagctgatattcaaggcgacttaggcctctctgtcgccatacagtt

SEQ ID NO: 47779 - DNA, 238 bp, Glycine max
ggcaagtcatgcggtggttgctatcagattgtttgcgacgcaagccaagtgccccaatggtgccttaggggaacttccatcacaatcactgccacaaatttctgccctccaaactatgcactccctagtgacaatggtggttggtgtaatcctcctagaccacactttgacatgtctcaacctgcctttgagaccatcgccaaatacaaggctggaattgttccaattatctacagaa

SEQ ID NO: 47780 - DNA, 236 bp, Glycine max
actgaagcaagcagaatcctcagataacatgaacataatcaaactgtttaaaacgaaggctgtgaggagaggtttggtggcaggaatggggcttcaaatcttccagcaattcacgggcatcaacactgtcatgtactacagtcccacaattgttcagttagctggttatgcatccaaccagacggcattgctcctctccctcatcacttctgggcttaacgctttcggttcggtcg

SEQ ID NO: 47781 - DNA, 226 bp, Glycine max
  unsure (1)..(226): unsure at all n locations
atggtcttttccagtggaaacggcttgaaaaccttattgttcttgcaaaggaaaatgtggccaagatgagcagcaatcctgcattgcaagtgaaaaaacacgcaaagccagtgagacttaaaagttgagagcacattggncctcacagacacaatcaaagatggagctcgccttttctttgttgatgaaggaatacgcagacagcttcttcatgctttgactgaag

SEQ ID NO: 47782 - DNA, 210 bp, Glycine max
accatttacaagtctccagtgtataaacctccagttgaaaaaccaccggtttacaagcctccagtttatattgccacctgtttacaagcctccagtgtataaacccccagttggcaaaccacccgtttataagccaccagtttactagccaccagtgatgaagcctccagtgtataattcagcagtgtacttgccatcagtgtactagcc

SEQ ID NO: 47783 - DNA, 270 bp, Glycine max
gccgcaccttgattcagagcagagcgaccttgaagagctatggctgtcggaaagaataagaggatttccaagggaaagaagggtggcaagaagaaagcgttagtgcccattctcttcactttttctttttttttttttattccaattgtggtattctcctttttaacccagttttgtttcttattcttcttccggaaatccaaagcgttggtccctttgccaataaggcttggaacgatttcaaggccccttccgattttcaggtcaaga

SEQ ID NO: 47784 - DNA, 270 bp, Glycine max
ctaacatattgacattatttttatcttagagaagctctaatcattagacaaagagagaaaaatggatgttttctgatgggtgtagaaggtctagtagaaattgatgtgaaaaaatcagcactcatcactcatgtaagcccaattgactactcttttgttaattatgtaggtgataagtgatcatctaggattgggggtgaagacaggattgccttacatctggcacagcaaagccagcaacccatttgtaaacctaaagaaggagtacaa

SEQ ID NO: 47785 - DNA, 268 bp, Glycine max
taggcttggtcctcttgaagaaaatgctgccatcacaggtgcagggtcaccaaaccttgtccccatagaggaaattgaagctgttggatttttaacagattgactatagcttctaatagttttacttgctgaagcccctaaggaagtggctggcaaaatatgagggtcagcgaaaagctcttctccttgatattctttgttgagtagtatcattcctgcgcctcctgacactttcacttcctctcccttctcagttctaccatttata

SEQ ID NO: 47786 - DNA, 268 bp, Glycine max
gttctctgttagtccttgatctggttctaaagttataatttacaggaaaagcagagggcgtcatattactatgaaggcactaattcttgttggagggtttggaacaaggttgaggccattgacactcagtgttcccaagcctcttgttgattttgctaacaagcccatgattctgcatcagatataagctctcaaggccattggcgtcaatgaagtggtactagctatcgattaccgaccagaggtcatgttgaatttcttgaaggag

SEQ ID NO: 47787 - DNA, 263 bp, Glycine max
caagattgtggaacaaggcacctttgacaaactcatggactatgccattagcttaggggcatcaattaatcagtataaggcaccaaggtgcgtcaagtttgcccccattgtggaattgttgaactcgagggtaacatccaactatttcagtcctaagtgtccaaagtgggttcctggacacaaacagtggatccatcagaattgaagaatctaaacatggcacattattatatgttttcatgcgagagtgaatctttttatgt

SEQ ID NO: 47788 - DNA, 272 bp, Glycine max
tgatgcttcactgttgctggactccacaagaaggagcttgtctgagaaggaaacagatagaagctttgggttgagaaatttcaggtacattgagaccatcaaagaagctttggaaagggaatgcccaggagttgtttcctgtgctgatatcctcgttctctctgccagagatggcattgtttcgctaggaggtccccatatccctcttaaaacaggaagaagggatggtagaaggagcagagccgatgtggtagagcagttcctcccagacc

SEQ ID NO: 47789 - DNA, 288 bp, Glycine max
gtgatttcagtgagtgatcggtgttcacttgatctcatcataatcgtcagcgtcaattgaagaagatgccgatcagaaacatcgccgtcggaaggcctgaagaggcgactcaacccgacacgttgaaggcggctttggctgagttcatctcaacctgcatcttacgtgttcgtcggttcaggctccggcatcggctacaacaagctcaccgataacggcgctgccgaccctgccgggctcatcttcgcctccataggccatgcattcgccctctacgtggccgactcc

SEQ ID NO: 47790 - DNA, 280 bp, Glycine max
atagtcttatcctatcatttagtttccccgcctaaacatgaagctattctcgttttctctagcatgtgtttttgtttttgcccttctagcttcttccctggcttcagcagctatcgtggaacacattttcaaagttcaaaacacgactatcaaacgtttttgcaaggagcaagtgattgtgacagttaatggacttttcccagggccaacgataaatgtccacgaaggtggcactgtaattgtccatgtattgaacgagggaccgtatgatatcactctt

SEQ ID NO: 47791 - DNA, 262 bp, Glycine max
tcgcgtcgctgctccgtaccagtttcactgcataaatttgagagaaaactctgcaaacatgttggtttatcaggacctccttacaggtgatgagcttctctcggactccttccgttacaatgaaattgagaatggaatgctgtgggaagttgaggggaagtgggttgttaagggagcagttgatgttgacattggtgcaaacccttctgctgagggtggagaagatgagggagtcgatgacgcagctgttaaggttgttgac

SEQ ID NO: 47792 - DNA, 273 bp, Glycine max
gtgatttcagcgagtgatcggtgttcacttgatctcatcataatcgtcagcgtcaattgaagaagatgccgatcagaaacatcgccgtcggaaggcctgaagaggcgactcaccccgacacgatgaaggcggctttggctgagttcatctcaaccttcatcttcgtgcatcgccggctcaggctccggcatacggtacaacaagctcagcgataacggcgctggaacccctgccggcctgatctcggcctccatcgcccatgcattcgccctc

SEQ ID NO: 47793 - DNA, 271 bp, Glycine max
caataatctgcacggtggagcatacttatgaaaatgaatgtgcatggcaacgttttctaccaacaggtccaattgctcttttacccatgggtgataagtttagcaatattgtttggaccatgagcccaacagagtcaaataaccgcaagtcaattaccgaggaagaatttttaaaggatgtgaattatgctttagattatggacatggacctcatccgttttaaaccaagagaacacgtctcgagttcctgataagcttgatgtaggatga

SEQ ID NO: 47794 - DNA, 278 bp, Glycine max
cttggctgcagcaatcatgtctctcagctactcaaccattgcatgggtggcttccgtggacaaaagagttcataatcacgtagatgtggctgttgagtatggctacaaagccagcacttcagcaggaaacgttttcaattttttcaatgccttaggagatgttgcttttgcctacgctggacacaacgtggtgttggagattcaagcaaccatcccttcctccccagagaagccatcaaaaggtcccatgtggaggggggtgctaatagcatatttag

SEQ ID NO: 47795 - DNA, 256 bp, Glycine max
taagctttcaagagacaaactgctttgaaaaatgggatccaaggttgttgcatccgttgcccttctcctctccatcaacattcttttcatttccatggttagctccagcagccactacgatccacagccccaaccttctcacgtcactgctcttattacacgacctagttgtccggatctgagtatctgcctcaatatcttaggctgatctctacgaatctgatccttgggatttgccaggtgatttggagcaaga

SEQ ID NO: 47796 - DNA, 236 bp, Glycine max
cttccacacttaataggaaaagaaaaaaaaaaaaaaaaagtaagcacagctttgttcggcttcaattccctaacaatggcgatggctttcaaaatggcgattacggggatgtgggttacggataagttcaaaaactccttcatggaaatgaagtggaaaaaggggcacaattacatagtcttcaagatcgttgagaattcaaggcttgtcaccgttgaaaaggtcggtggccccgg

SEQ ID NO: 47797 - DNA, 263 bp, Glycine max
ggaacagcttatgcaatatcgttctgatgttcagaaagtggaggattggctgaagcctaatgcagtgttgggagcatttgaagctagggctgctaagaaggtggttgcttgtgctcaaaatctcagcaagtttaccaatcccgaagaaggtttccaagaactctcagtcgatctagttgaggcagctgttgctcattgccagttaattgttgtttccaaatttattgagaagttgcagcaagatatccctggaaagggagtga

SEQ ID NO: 47798 - DNA, 262 bp, Glycine max
gttgagtgcactgctttgttgttggcggaggagctgaagaacgaacgcagcgagcggcgagtaacgatgtgcggtgacgccacgaactgggacgaagacgcatacagagaaaccattctcaaggagagggaaatccaaacccgaaccgttttccgaaccgcttgggccccaccctacacctctaacctcgacactctcatccttgcctctagcgacggttccgtcgcatcctactccatctcttcctccatcgccgcctcta

SEQ ID NO: 47799 - DNA, 261 bp, Glycine max
agatgcatcaagagacaagcttgaaaagcttgccttcaaagatcaagctagttcattctggcgacttgcaaaaatgaactctcctgaatggctttatgccttaattggttctgtaggatctgttgtttgtggatcccttagtgcattttttgcttatgtccttagtgctgtcctcagtgtctattacaatccaaatcacagacacatgatccaagaaattgaaaagtactgctacttgttgattggactatcatcagctgc

SEQ ID NO: 47800 - DNA, 236 bp, Glycine max
ctttttggctgtgttatgcttctcagcactgtcactgagtcgttgacttgcggaggataatggacttgttatgaacttctacaaggaatcatgccctcaggctgaagacatcatcaaagaacaagtcaagctctctacaagcgccaaagaacactgcttctctggtcagcacatctccagactggatgtctaagttgagctcactgagtggactccacaaagagtgtctagaggat

SEQ ID NO: 47801 - DNA, 224 bp, Glycine max
cctcgagccgaatcggctcgagcaataacacactgtcaccgttccgactccgttttcctctgtatttttttttctttctttcaactccccgcttcgtggaaatcccgaaccagaaaccatgcttctccgaaccgctgctgcttctgcttcgtccctctccctcttcagcccgaacgccgaacctccccgttcggttcccgctcgtggattggtggttcgcgcag

SEQ ID NO: 47802 - DNA, 244 bp, Glycine max
agaagtggttccaagggaccgccgatgctgtaagacaatttatatgggtttttgaggtaaaaacttatgatgttgtgtattttgctgaaaatactagtttgatacacggagtagtgaacgtgggcatgtatcatcttccaggatgccaagaacaagaatgttgagcatatattgatactttctggtgatcatctttaccgaatggactacatgaactttgtacagagacatgttgacacaaatg

SEQ ID NO: 47803 - DNA, 264 bp, Glycine max
tggatgattcttaccctctctatgactcttcaacctgccctcacattcgtaaggaatttgattgcttgaaatatggtcgtcctgatcaacaatacctcaaatacagatggcaacccaacgaatgcgacttaccaagatttgtgggaaagatttcttgacaaaacttaaggggaagcagatcatgtttataggagattcagtcagtctcaaccaatggcaatcacttatatgcttgcttcgttcttctgtgccctcaactgaaat

SEQ ID NO: 47804 - DNA, 224 bp, Glycine max
gacaagtgaaagtgagaacaaatagaaatcaaagagcataatgtcagggatcattcacaagattggggagacccttcatgtcgggagggcacaagaaggaggaggagcataagggtgagcaccatgctggagaatacaaagggagcaccatggtgaacacagtagtgagtaacaaggagagcatcatggtgaacacaaagctggcagagaaccatggtgagcac

SEQ ID NO: 47805 - DNA, 265 bp, Glycine max
cccatttctcaatgtgctgcactgatcatggacaagaagagcaggaggaaagaagaatccaatgttgaaatgaggagaaacccatcaatgcttcggaagctgcaagagaacaagctcagggaagcacttgaggaagcttctgaaatggctcactctccaaatctcaagacatagaccagcatgactctgctgccaaccaggatgatggccttgggagatcccgatcgctcacccggatccatgcccagcgcgaattccttcgcgc

SEQ ID NO: 47806 - DNA, 260 bp, Glycine max
caagggtgttcaggtggaatttgctggtggggctttgcgttgtggtgaatatgtaactctacggaaagttggggatgcaagtcagaagggtggtggttctggtgctcaacaaatagttattgagggtcctctgtgtgagattactataaaattcgtgactatctgtattcgcagttttatttgctttagatttggttggacagtgcaatggctaaacatgaacttctgtccttctctgcactgttttgtgtgacacatca

SEQ ID NO: 47807 - DNA, 260 bp, Glycine max
caagactccaaaatattaatctgtgcttccactttgaggttgagcagcaggttaatggggtcttcctcaatttctttggttttaatggaactgctggtgtttggagaataaaagcacttgaagaatccggtggctggctgagcggacaactgtagaagacatggatatagcagtccgagcccatctgaatggatggaaatttgatcttctcaatgatgtaaaggtgctttgtgagctgccggaatcatatgaagcttata

SEQ ID NO: 47808 - DNA, 222 bp, Glycine max
tggaacttctaaagaaacattttcaggaatttatctcaggcctcatgtctctaccaataaaactaccaggaactaaactctatcaatctttgcaggctaaaaagaaaatggtgaaattagtgaagagcattatcctagtaagagaagtaatggcttctgcaaagttccaaaagatgtggtggaagtccttcctagtgatgctaatgaaaaattaacggatga

SEQ ID NO: 47809 - DNA, 261 bp, Glycine max
atttcagcaagcgtaccaaacattttcccgagtacacctacctaacgttcaactcttgcaagtgaagtgagaaaattgaataattgattcgtttagggatggagggattaggaggactgggccacctttttgtgacatgtttgtgtcggggtttggtggtgtcatagttcttccggcaattaccgacgttaccatggcagcactttgccctggtcaagatcagtgttcccttgccatttacctctctggcttccaacaagc

SEQ ID NO: 47810 - DNA, 254 bp, Glycine max
ctcgagccgattcggctcgagcggctcgagcaaccgcatcgccaatggcgacacttctccaatcctttgctccaaacccatttcagaattcctcactagttctgggacatcaggaggtgagaggaagctgatgccacaattgaagaagagctagggagaaggagtttgctctacagtctcttgatgccagtgatgtcccagttcgtccccggtttagaaaagggcaaaggatgtacctaatgttcataagatcc

SEQ ID NO: 47811 - DNA, 276 bp, Glycine max
  unsure (1)..(276): unsure at all n locations
aanaaaggacaaaggaaagtaaataaaatataaagatggcagatgatgaatatagtttctgatgcataaaccacgatggatgaaagttgattcaggttgcaaacatggcttttccagacccatccatgtcagtttctccacagaggaagatgggaagggggaagattgagatcaagaggattgagaacactaccaatcgccaagtcacattctgcaagcgcaggaacggcttgctcaagaaagcatatgagttatctgtgctttgtgatgcagagg

SEQ ID NO: 47812 - DNA, 270 bp, Glycine max
gtgaatgtctataatgatggaaatgtcttaagcatggtaacaggtagctcccctcatggaacccatgttgctggtatagctgctgcattccacccagaggaacctttgttgaatggagttgctcctggagcacgattaatatcttgtaaaattggggactctcgattaggtgcaatggaaactggaactggtttgactcgggcactgatagctgctgtggagcatcaatgtgcatcttatcaatatgagttatggtgagcctacatcact

SEQ ID NO: 47813 - DNA, 264 bp, Glycine max
ctttcctcttctttctttctctcactttccgccaccttccttttactctgctcctaaaacccttcgattttgtgcctctgattggatctgcagctcgaaaattttccaatttaatggttccaattcgtctattcaagaaagggctaaagctttggaagttgtacagtatattaaggatacctaccatgaagggaaatgttaggtagctgctgttgaggatggcaagttgatggctgatcctgaaactggggaattctggggttt

SEQ ID NO: 47814 - DNA, 267 bp, Glycine max
gctggttattctccatccacctctctccccctccctcttaaatattactaatcatgcgtattcattcttaggtcggagctgaaagattcaattcgggaagggggtattccattcaacagggtttatggcactcatgcttttgagtatccaaggttggacgcaaggttcaatcaagtttttaacacagcaatgatcaatcacaccactatagtgatgaagaaggttctggagtgctacaaaggttttgagaacataaaaatgcttgtg

SEQ ID NO: 47815 - DNA, 268 bp, Glycine max
gtgttcagttaagagtttccgcgtgagagtggccatgggaagagctccttgttgtgacaaagcaagcgttaagagagggccatggtctccaggagaagatgctacactcaaaaattatgtagagactcatggcactggtggaaattggattgcattgcccaaaaaagctggccttagacggtgtggcaagagttgccggctacggtggctcaattatctgatgccagacatcaaacatggaggctttactgaagaagaggacaacatc

SEQ ID NO: 47816 - DNA, 264 bp, Glycine max
aagaaactgtaggattggagggaagttctgttgggcagtggtggctggatatgataggcaaaacattagatgaaggttcaacatttgaacgtattggatccaggcaacttgctggcttggtcattgctgtgtgggttaaaaccaacattagatttcatgttggggatgttgaagtggcagcagttccatgtggcttcggacgtgctattggcaataagggagctgttggtttgagaattagagtgtatgatctgataatgtgct

SEQ ID NO: 47817 - DNA, 262 bp, Glycine max
agagaatggctcccaagggtttaatctctttggctgtgttatgcatctcagcactgtcactgtgccggtgtgctgcggaggataatggacttgttatgaacttctagaaggaatcatgccctcaggctggagacgtcatcgaagaccgagtcgagcttctctacaagcgccacaagaagactgcgttctcctggctcagaaacatctcccatgaatgtgctgttcagagttgtgatggttcaccgtagctgtactccacaag

SEQ ID NO: 47818 - DNA, 263 bp, Glycine max
ctgtggtatttgtatgaggaggtatctcctcaggttgttgatcaggaccaagtaaataaaatacttactgccgttgttcaaggtatgaacgcgtctgaagggaacaatgatgttaggcttgctgctacaagggcattatataacgctcttgggtttgctcaggctaattttggcaatgatatggagcgtgattatatcatgagagttgtttgtgagacaactgtgtgccctgaagtgaaaatacgtcaagcagcctttgaatg

SEQ ID NO: 47819 - DNA, 252 bp, Glycine max
gttccatctcaaacctatcaagtggagtggctaacatggagaacctagtaaagggtctgttgtgtgaggatgaaaagagtgagagctttgtcatttctatgaagtggtttttgaattatgcagagagaaaggtacgggacttgcaaggagatgaagggagagtcatggctcgtgtcaaagaaataactgagtattttcatggggatgtgagtaaagaagagtcgaatccacttcgaatctttgtgatcgtga

SEQ ID NO: 47820 - DNA, 264 bp, Glycine max
attaaatgtcaaagttctttcagaaactgaagtaatgactattgtatctttgagtttgaaggactaaaacatggattcactctacaatgatcttattcttaacttagctttactttgaagtctagacttgcaatgatttttgatatcgcgcaatcacaagtgcatattacagaggagctgttggtgcactgcttgtgtatgatgttaccagacatgtgacttttgaaaacgtggagagatggttaaaggagcttcgcgatcaca

SEQ ID NO: 47821 - DNA, 231 bp, Glycine max
attttattgtgcaggcaaaagctgctcttgtatctgttggaatagtaagggacactcttggtaatggtaaatctggtcgtattattgattcagatatgcacgaagttggacggttcctcaaccggattttggactacctcctgatattcagaatgggttatttgagttatttgtgagtatcttggatcttcttgttcggaatgctcgcattgaaggtaaccttgacacggg

SEQ ID NO: 47822 - DNA, 265 bp, Glycine max
ctcactttcctattacagtatctttacctcaatggcaccaagttctgcagtgccagatgaacaggttgttgttggagaggagattgagcatgtaagagtggtcactttgaacaggccaaggcaattgaatgccatctcaccagaactggtttctcagctagcaacatatttggaaaagtgggagaaggatgagaaagcagaactagttattataaagggagctggtcgggctttttgtgctggaggagatttgagagtcttctat

SEQ ID NO: 47823 - DNA, 255 bp, Glycine max
gtagttattatttattaagagatggtgctaaagggtaaagtgattacagaacttgagatccgatcacctgctgccaagttcttcaatgcttatgcaaggcaacttcacaatttgccgaacattgttgacaatgtacatgagggccagttgcatgaaggtgattggcatggcattggccccgtgaagagcgggacttttaccaccgaagggaaagttactacatataaggagagcattgaagctatagatgatgag

SEQ ID NO: 47824 - DNA, 271 bp, Glycine max
cggctcgagctttcagaggctctacaccatcactcccgtcgccagattctttgctcgcaattctgatggggtttccttgtgacccttgatggccttgcttcaagacaagatcttcctacatagctggtcggagctgaaagattcaattcgggaagggggtattccattcaacagggtttaaggcactcatgcttttgagtatccaaggttggacgcaaggttcaatcaagtttttaacacagcaatgatcaatcacaccactatagtgatg

SEQ ID NO: 47825 - DNA, 152 bp, Glycine max
tgaaaggaggaaagtccaagaccgagtgtaagagagccgatcccaggagttggtgtgggataagaagggagccgccaccaaggctaggaaacccgccggcaaggcgaaggcagctaaagacggtgacaagccaaagaggggtgcaggtggtt

SEQ ID NO: 47826 - DNA, 279 bp, Glycine max
gtttcatgaaatggcttaataagcttttcagaggtgggcccaatagaggaaggggtggtcgccacctgcatgagccagcagaggaaagcagagtttggggtgctccatctagagcgttggatgatcgtgctagagctcagaaggagaaagaggatctaggccatgcaatggcactttcttcagccgaagatttaaagagaccaaacgctcatcaaggatataactggggagaagacactggtgatgattactcgaaggcacctcgtgatacccttaact

SEQ ID NO: 47827 - DNA, 262 bp, Glycine max
cgataagctaaaagtaaaagatcaacaacaactaatagtaacaatggcacaggcacaatcagcggctaattttgattaccaagattttgatccctttttcgaatggtctgaagacgaaggaagtgccacgctcattgtaatgctgccaggattcacaaaggaacaattaagggttcaagtgacttcaactcctgtgctaaggatcaatggtgaacgacagatcgttgagaacaagcggcgtcgtttttctagagaattctcc

SEQ ID NO: 47828 - DNA, 241 bp, Glycine max
cttcttcttactgggtgtgtgggttttggtagctttgtgagggagctggaatttgtaggttctatgctaatagtttgtgtatgtttgtcagctttgtagtgagcagatataatggctgttgaaaggtccggaattgccaaagatgttacggaattgattggtaaaaccccattagtatatctaaataaacttgcggatggttgtgttgcccgggttgctgctaaactggagttgatggagc

SEQ ID NO: 47829 - DNA, 248 bp, Glycine max
gttttcttccaaatctcaccagtacctgtacctcgcacaaaagaaggaagaaatggcaggagaatcatacgaggaagccatcgcgagtctgaccaagcttctcagtgaaaaagctgacctcggtggtgttgccgccgcaaagatcaaggatctgacggcggagcttgatgccgccggttcgaagccgtttaacccggaggagaggatcagaaccggcttcatccaatttaagaatgagaaatttgaga

SEQ ID NO: 47830 - DNA, 250 bp, Glycine max
ctggatctcttgcaagtgcaatcaaggacttttcagctagtgaaaattcttgcctggctgaacagtttgataagacgccggacactggcaacatagaagaagctgaatcatccttacgtgagagtggcatcttgaactatgaggaagctagagctctgctaggaagatatgaatatcagaaagggaatatagtagctgctttgcatgtctttgagggaatagatataggtgttgtgactcctaagatcaa

SEQ ID NO: 47831 - DNA, 223 bp, Glycine max
  unsure (1)..(223): unsure at all n locations
ctcgccctggtcttacatcggtaatcctcttccctatcccccccctcccactcgcgaagacacgctaggctcatcacataccaccttggtaaatctcccataagtacttcactgtcagagccaaatgactcgacagactcatgtctggctcggcaagacatcctagacattttgacatgaatggacagacagtctanttccattaagtgctttattagataat

SEQ ID NO: 47832 - DNA, 252 bp, Glycine max
tctaaaccctaaacaactctttctcttcttccttcgctcgttgttctccctcgcgtagatcgacaatggcggagacagagacgtttgctttccaggctgagatcaaccagctcctcagtctcatcatcaacaccttctactccaacaaggagattttccttcgtgaactcatcagcaacgcctccgatgctttggacaagattcgatttgagagtttgacagataagagcaagctcgatgctcagccagagt

SEQ ID NO: 47833 - DNA, 250 bp, Glycine max
aacatatacaaattctctgtgttgtgttgtgtacttgtgttaattgtgttgttgttgtaggaaatttaagtgaagagagaatgatgatgaagtctgctatgtgtgcattggtgcttgtggcactggttgtggttgaagtggggcccatggctgaggctgcggtgacttgcaacccaacacagttgactccttgtcttccggcaattaattcaggttctgcaccttcgagtgcttgttgccagaagctgaa

SEQ ID NO: 47834 - DNA, 225 bp, Glycine max
gccaagtgaaagtgagaaaaaataaaaatcaaagagcataatgtcagggatcattcacaagattggggagacccttcatgtgggagggcacaagaatgacgaggagcataagggtgagcaccatgctggagcatacaaaggggagcaccatggtgaacacagtagtgactacaaaggatagcatcatggtgaacacaaatctgaagagtaccatggtgagcacaa

SEQ ID NO: 47835 - DNA, 264 bp, Glycine max
taaaaaggcagatactgtacagtatattatattgatcatggctattacaacgaaccctcttgttgttggacgtgtaataggagatgttctggagccatttgcaagttctatccctttgagagttgtttacaacaataacaaagaagtcatcaacagtggagagctcaaaccctcccaaataatcaaccctccacgagttgaggttggtggtgatgacctcaggaccctctacactctggtcatggtggaccctgatgcacccag

SEQ ID NO: 47836 - DNA, 242 bp, Glycine max
gagaatggcagcacttggtggcaatcgtgatgtggcaggaagccagaacagccttgagatcgatggtttagctcgctttgctgttgaagaacacaacaaaaaacagaatgcccttttggagtttgaaaaggtagtaagtgcaaaacagcaagtggtttctggtaccttgtacaccatcactttggaggcaaaagatggtgggcaaaagaaggtttatgaagccaaagtttgggagaaggcat

SEQ ID NO: 47837 - DNA, 248 bp, Glycine max
cggctcgagaaggtgttagtgctgtaggtcacgttgtctcaggacggttctatattgatccacctggccttgttgaccgccttaattcatacctcccctctcagataaggatctttggttacaaacgtgtgacagcttctttagatgccaaaaagttttgcgacgggaggaatcatgtctatctcattcccgtgtttgcacttgatccaagctgtcatcgtgatatagagactgtcatggctagtttg

SEQ ID NO: 47838 - DNA, 262 bp, Glycine max
atttattgtcctgtaaaataagcaatgcattaaatctggaagtagaaagtacgttcatcttcaaaggagtgtaaaagagggtaatatgtattttacagacttgctgtagaggcatggggttagaagaattgcacccagcaggatgactggtacagtgacactgtgactgctgttctagttcctgcttacattgatagtactgaacatagtaggttggcatggaagagctccaatttgagctgaggacttggactgaacaaag

SEQ ID NO: 47839 - DNA, 157 bp, Glycine max
agatggtgaagagttcatgagtctattcattgatggaaaagccgaattatatgttgcataatcatacacgcaagtcacagaattatgtttgtactataaaatacgctctgacttgtacactgtaagaatcaataattattttatcaaattcaaggag

SEQ ID NO: 47840 - DNA, 246 bp, Glycine max
cttccatgatgctgttttcatttctttctttccttgtcatactcaaatctgaagccaacaacgaccagctacaattcgtgtaccattattgcaacaacgagtacggaaacattaccaccgaaacctactcagacaaccggaataaccttttgtccaatatgtattatgacaaagacaatgactacggcttctacaattcctcctatggacaagaccctgacaaagtttacgccatcggtttctgca

SEQ ID NO: 47841 - DNA, 240 bp, Glycine max
agttaagaatttcgtggggttgtctgtatctgatggttacattgctactggttcagagacaaacgaggtgttcatataccacaaggcttttcccatgccagcattatctttcaaattttacagtagtgaccctctttttgggaatgaagaggatgattctacacagttcatcacttctgtttgttggcgcggtcagtcctccaccttacttgctgcaaattccacaggaaatgtcaaaat

SEQ ID NO: 47842 - DNA, 237 bp, Glycine max
gaaataaatgagctgggtgcacggaggattgcagtattcagtgcacccccaattgggtgtttgccatttcagagaacagtgggacgaggattagaaaaaagatgtgcagaaaggcccaacaatttggcccaattatttaacaccaaattgtcaaaggagcttgattccctcaaccgcaactttcccaatagcaggcatgttttcatcaatggctacgaccctctacttgacatcatc

SEQ ID NO: 47843 - DNA, 258 bp, Glycine max
tagctcttcaagctctcaccaaatccatagggataaaacttgatgggagtggtgaaaggaaaagcattttcggtcactgccgcatcaggtggtgttggtcactatgctgtccaactggcaaagctaggaaacactcatgtgacagcaacatgtggagctcgcaatattgaattggtgaaaagtttaggggctgatgaggtaattgactataagaccccagatggcgctgctttgaagagtccatctggtaagaaatat

SEQ ID NO: 47844 - DNA, 251 bp, Glycine max
gcttgccaatgttcgtggcacaaacattggcaagccacacatcatatccattgtctgccaagataaatcccaatgattcatctggaggaatataaacccatactatggatatgatgtgtggcttgccaatgttcgtggcacaaaatatagccgcgggcacatatcacttcatcctaatgacatggcttattgggattggtcatgggatgaattagctagtgatgatcttcctgcttttgttcagtatgtgt

SEQ ID NO: 47845 - DNA, 255 bp, Glycine max
cattagcaaaagcaagaagaactagtctaagcagaaatggcctcttcagtgatggcatctgtggccctcaaacctgcccctttcactgttgagaagtcctcagttagaggccttccctccctctcaaggaactcctcttcattcagagttgtggccagtggtggcaagaagatcaagactgacaagccttatggaattaatggtggcatggctttgagggaaggagttgatgcatctggcaggataggaaaggga

SEQ ID NO: 47846 - DNA, 253 bp, Glycine max
attggctcgaggaagcatgagttcagatgggcaaaatttcagagttcctggaagttatataaagggaattgcctgcggaggtcgacacagtgcagtaatcacagatgctggagctgtgcttacgtttggttggggactttatggacagtgtgggcaaggaagtacagatgatgaattaagcccgaattgcgtatcttccttattgggtattcgaatagagggagttgctgcaggactgtggcatactgtgtgt

SEQ ID NO: 47847 - DNA, 260 bp, Glycine max
cacgctacacatggcgcatagagaaactcgacatacgagtgagtatcctacgctcacccgcaagaaaaaaatggcatctcacatcgttggatacccccgtatgggtcccaagagagagctcaagttcgctctcgagtctttctgggatggcaagagcagcgccgaggatttgcagaaggtgtcttctgatctcagggcatccatctggaagcagatggctgatgctgggatcaagtacatccacagcaacactttctctc

SEQ ID NO: 47848 - DNA, 252 bp, Glycine max
gctctttcttcctcttcctcagtagtgcgattttcgattctcttctctgcaactatgcctaaccctaaggtcttcttcgacatgaccatcggcggtcaacctgccggccgcatcgtgatggagctctacgccgacgtgactccgagcaccgccgagaacttccgcgcgctctgcaccggcgagaagggcgccgggcggagcggcaagcccctccactacaaaggctcgtccttccaccgcgtgatcccgaac

SEQ ID NO: 47849 - DNA, 244 bp, Glycine max
ataaattaaccttccagggaaactagagaaaaaatatatagttggaggaatatatgcatgagattaatcatgtctgtgcagagtgagcttcatggattagctgctttgcagtggtcgatttgtcaagactccctcagtaggtccaatgaggctcgaggtatgtatgagaagcttaaatctcatccaaatcctaaagtaagcaagaaagcaagacagttcatgtacagctttcaggctatggaaa

SEQ ID NO: 47850 - DNA, 186 bp, Glycine max
catagactcacttccaagttccaagctttggccattttttcccactgtttattggtgagttcctgtgtgtcattgtgttcaaacccttttgtgagaggcaaaagccaaaaagggtgacatttagtattaatttcttttttgttctgtgcctgtgattctgcttattcttgttagctttttccacac

SEQ ID NO: 47851 - DNA, 263 bp, Glycine max
accacacattcctacacaggagaccagaggcttttggatgcttcacaccgtgacttgagaagagccagggctgcagcactgaacattgtcccaaccagcactggagctgccaaggctgtgtctctagtgttgccacagctgaagggcaagcttaatggaatagcgctccgtgtgcctacacccaatgtttcagttgttgaccttgttgtgaatgttgagaagaagggtcttactgctgaagatgtgaatgcagcattcagaaa

SEQ ID NO: 47852 - DNA, 257 bp, Glycine max
agcaaaagcaagaagaactagtctaagcagaaatggcctcttcagtgatggcatctgtggccctcaaacctgcccctttcactgttgagaagtcctcagttagaggccttccctccctctcaaggaactcctcttcattcagagttgtggccagtggtggcaagaagatcaagactgacaagccttatggaattaatggtggcatggctttgagggaaggagttgatgcatctggcaggaaaggaaagggaaagggc

SEQ ID NO: 47853 - DNA, 263 bp, Glycine max
ctccacaggatgctggaactcactatgcagtcatgagctcctacgagtacctcagcaccggacttcgccagtacttggacaacaaaatggatggattctacattgctccagcttttatggacaagcttgttgttcacatctccaagaacttcatgaccctgcccaacatcaaggttcctctcattcttggtatctggggaggcaagggacaaggaaaatctttccaatgtgagcttgtctttgccaagatgggaatcaacccc

SEQ ID NO: 47854 - DNA, 160 bp, Glycine max
tggccaccgtcacttctgcagccgttgctattccctcattcactggcctcaaggcaagcgcaggcaaagtgagtgccgcaattaaagtctcagctccccaagccacaaggttgggcatcaaggcttcgctgaaagacgttggagtcgctgttgtggccac

SEQ ID NO: 47855 - DNA, 244 bp, Glycine max
ggaagacatgtggaattcgtaagcattgataagtgcaaggaggaaaatggaggcccatacaaggcttcaataccactcagtcaggccacaaatcctgaagcagatgttctactagcttatgaaatgaatggtgaaggtttcttcatgcaaaaggactacaaaatgtttccaccatcagtgaattgggataatattgattggtctacccggagaccccaaatggatttcccagttcagtgtgtta

SEQ ID NO: 47856 - DNA, 238 bp, Glycine max
atttgctgtgacatctgtgagaagtggttccatggcaaatgtgtgaagatcacccctgctagagcagagcttatcaagcaatacaagtgcccatcatgcagtaacaagagagctcgctaagcaaatttccatcagggacaataaaccatttgagtcttaacgaatctgattaatattttttttttctagatgtagctgatggatagtttttatgtttgacacatgtagatttcttgtc

SEQ ID NO: 47857 - DNA, 238 bp, Glycine max
cttcgacgatgacgccgagtatgatgccaccgataatgatgccaagtatgataccaccgacgatgatgcagagcatggtgtcatcaatgataatgccaaacatgatgacagtgccacaatgttactctgattccatctcgcacattatacaacaacaacaattaccattcatgttcagccggacactcgtggcgatctcacccatgtttttacagcagccctttgttggtgctgcatt

SEQ ID NO: 47858 - DNA, 276 bp, Glycine max
  unsure (1)..(276): unsure at all n locations
cagaacattcgggtgtgtgtggactgccacactgcaattaaatttatggcaaagattgttggcagggaaatcattgtgagggataatagccgatttcaccattttaagaatgggtcttgttcctgtggagattactggtgaaataactggaaagtggaaaccaagcatgtcaacattgtagctgcataagcagtaccgaactgaggtggattaaaatgctactaaatcagtgtacaaaggacagactgtaatcaaggtanaaaatggcaattgctg

SEQ ID NO: 47859 - DNA, 170 bp, Glycine max
  unsure (1)..(170): unsure at all n locations
tcaagggtgattgtctttcccgtcaaggctaagatacaggacaaagagggtatccctccagatcaacagaggcttatctntgctggaaagcagcttgaggatggccgtactcttgctgactacaacatccagaaagagtctactcatcatctagtgttacgtcttcgtgg

SEQ ID NO: 47860 - DNA, 264 bp, Glycine max
cttcattcattcattctctctcatcacaccttgcatggccacggcgtgcgtgacgaacgctacccgcgcggcggcgtgcagggacggcgcggcggcggcgcacctgaaaatgatctcgatattcgtcatcttcgtgacgagcgtggccgggatgtcgtcgccggtggccctcgccggaatcttccgtgggaagcctctctacgacaaggccatcgtcgtaatcaagtgtttcgcggcgggggtgatactctcgactagtggagc

SEQ ID NO: 47861 - DNA, 261 bp, Glycine max
aaaagactcaacgacgtcgtaacgggactcagcactcgcgcttcttcgttttccttctcgatgcactgtttcttgaaagggtgaagcgtgtcaaacaaggaagagtgacgtttcgccggcggagacccgatgaggaggaggatgactccaccgcgcgacggcggcggagagtggagttccagtggttcttgatggcgttgtcggtgcggccggggaggaggcgcgagatggtggcccatttgtttccgtgaactcgcttta

SEQ ID NO: 47862 - DNA, 256 bp, Glycine max
gccattgtgaagaacccgaataacccgttttacatgtactgtgggattgtgcaaagaatcactgatggaaaggcaggggttctctttgaaggagggaactgggacaggttgatcacgttcaggttggaagaacttagcgcagagaaaaaggcccccccatgaagaaccccaagtcagctgtgctcgaaccgtttcttgaaaagaagtcatagttaagcttagtttcaatttgcaaaacatgttcttttgtatcata

SEQ ID NO: 47863 - DNA, 244 bp, Glycine max
taggtaggagataagatattgaagtagtgctaagtgcgtaacacctgcagtgaacaatggcctctgcatcagcatctcttctcaagtcttcactttttcttgacaagtctgagtgggtgaagggatcaacgcttcgccgccttctgctgcatcagttgtgagatgcgaccccattgccccatcatgactcaccatcagagctggttcctatgctgatgagctcggtaagaccgcgaagacagtg

SEQ ID NO: 47864 - DNA, 245 bp, Glycine max
gatgaagtgaggaagtggatttctggtgttggtgttgacagtgttgggaagaagcttgtgaactcaaaagatggacctccaacctttgagcagcccaagatgactctggagaagctcttgctgtatggtaacatgcttgtccaagaacagagaatgtcaagagagtccaattggctgacaagtacttgaacgaggctgctcttggaaatgctaacgaggatgctattcagaggggaactttcttc

SEQ ID NO: 47865 - DNA, 258 bp, Glycine max
cggctcgagcagatgatatcaagaactggtggatttggggttactggatttcacctttaatgtatggacagaatgcaatagtggtgaatgaattccttggagatagttggaaccacttcaccccaaattcaaataagacgttgggaattcaaattttggagtcccgtgggttcttcacacatgcatattggtattggataggaattggggcgttgattggatttatgatccttttcaacattatatacactttggctc

SEQ ID NO: 47866 - DNA, 129 bp, Glycine max
gtggtagtagtagtagtaagcatacaacacttgttgcttcatttttcttttaaacttgtactgagaaacagaaccatcaattttctctgccttctcattgtgcaataaaattcttaccttgaaatctga

SEQ ID NO: 47867 - DNA, 103 bp, Glycine max
tgggcgtatggagaagttctactgggcaccaacaagggatgaccgcattggtgtctgcactggaatttttcgcaccgattcaattcctgaacaggacgttgtc

SEQ ID NO: 47868 - DNA, 260 bp, Glycine max
caaaggttgctgtaggagataagattgcagtagtgcaaagtgctaacacctgcagtgaacaatggcctctgcatcagcatctctgctcaagtcttcacttgttcttgacaagtctgagtgggtgaagggacaaacccttcgccaaccttctgcatcagttgtgagatgcaaccccaccaccccatcaggcctcaccatcagagctggttcctatgctgatgagctcgttaagaccgcgaaaacagtggcttcaccaggga

SEQ ID NO: 47869 - DNA, 248 bp, Glycine max
ttgcggctgagttaccaggaagaacagataacgaaataaagaaccattggcacaccacactcaagaagaggtctcaacaaaacacactcacaaaggaagaagctagagcctccaaatcaaaggataaggtacttcccaacaagggtgttactgttactcttccagctacttcttcccagatttcagataattcatcattatcgccagcttcatccaccagcagcgagttttccaacataacttcagat

SEQ ID NO: 47870 - DNA, 269 bp, Glycine max
cgaggcacctcatgcccacgcgctacacgctcgatgtcgatttgaaggacgcggttacccccgacgtgctccaagccaaggataagaaggttactgctctcaaggagaccaagaagcgcctcgaggagaggttcaagactgggaagaatcggtggttcttcaccaagctcaggttctgagcataatattatgcatttttgttttcaaaatgtttttggatctcgctttgtttttcgtaattgatactttataatgatgtgttgagatta

SEQ ID NO: 47871 - DNA, 99 bp, Glycine max
gtagattttggcacccttgccaattgggttcgctgtgttcttggttcacttggcaaccatccccatcaccggaactggtatcaaccctgctcgtagtct

SEQ ID NO: 47872 - DNA, 250 bp, Glycine max
ctccagttaccatctcaagtgtagagcaatccattgttgcgcgagaccctgtggcaatggccctctatgcagtggtagtctcggtttgtgctccaatatgggaggagattgttttccgtggtttccttcttccatctttaaccaagtacatgcctgtatggagtgcaatattagttagctcaatagcttttgccttggcacattttaacattcagagaatgctaccacttgtatttcttggcatggtgat

SEQ ID NO: 47873 - DNA, 229 bp, Glycine max
ctgaagggtaacaaaccggattttcacgttgcgatggcacctcagagagccaagccattctatgcctctttagttgacaggtttaggaatgcctataactctgatgcaatcaagggtatgttatgttatctatctttcaactttcatttctctttttctataataattaatagatacagtaaattcattatagcctataaagacagcaacttaaactgagattttcaca

SEQ ID NO: 47874 - DNA, 269 bp, Glycine max
tccattaacgggtggtgcctctcttccatctccccagccaaaacctctctcaagaaggccacattaggcccttctgtcttcgcaaccgttagcactccttcttctccttcttcttcttcttcttcttccttcccttctctcattcaagacaggcctgtctttgctgcacctgcggtcatcatcactgcaactgtgagagaggctatggcaaacgtatacgagcaagctattgaagaactcgagacattgttgagggagaagagtgactc

SEQ ID NO: 47875 - DNA, 240 bp, Glycine max
atttgtcttcctcagtagtgtcatttacgcttctcttctcttcagcaactatgcctaaccctaaggtcttctgcgacataaccatcggcggtcaatctgctggccgcatcgtgatggagatctacgcctactacactcatcgcaccgacgagaacttcagcgcgcttagcatctgcgattatggcgtagtcgtagcagtaagagctctactataagggttcgttcttctactcgagatcc

SEQ ID NO: 47876 - DNA, 262 bp, Glycine max
accagatcatgagaggttacctatatgatcaagaggccacagagaggactatagactaaggaggatggttgcaaacaggtgatattggatacatagatgatagtgatgagctctgcagcgttgatcggttaaaggagttgattaaatatagaggatttcaagtggctccagctgagctcgtagccatgctagttgatcatcctaacatctctgatgctgctgttgtatcattgaatgatgaagttgcaggagaggtccagtt

SEQ ID NO: 47877 - DNA, 252 bp, Glycine max
catttgacaggattggattcgtgacacaagatgatgttctgtttcctcaccttactgtaaaagaaacattgacttatgtggccctcctaagattgccaaatacattaaggaaagagcaaaaggaaaaacgagctttagaagtcattgaagagctgggattggagaggtgccaagacactatgataggaggttcctatgttcgaggaatatctggtggagagaggaagcgagtttgtattggcaatgagatca

SEQ ID NO: 47878 - DNA, 250 bp, Glycine max
cgttactgcagatcttaaggacattgattacaagtctggggatgtctgtggtgtgcttgtgcagtacgctggcactgaggccatcgtcgccgacgccacctcctccgtcgccagcatactcggccaacccgaagcctatgtgatgattgtactgaaaggatcagtacccatagcttttcgtgggaatgagcagccagcagcttatggagaattggcttccattggtggtcttaaccctagtgtagacaag

SEQ ID NO: 47879 - DNA, 245 bp, Glycine max
aagaatctcaactgatatctcagatacaggacttattgagattggaagaagtgaagaccaatcttcaatctcaatttggcagggaaccaactatggctgaatgggcagagggtgcaggacttaattgtcgattgctgcaatcacagcttcattctggtaacagaagcagagcaaagcttattcaggcacatttacgcatggtagtccatgttgccagaagtatcaggggcgtggtctcagccttc

SEQ ID NO: 47880 - DNA, 254 bp, Glycine max
gcaaaagcaagaagaactagtctaagcagaaatggcctcttcagtgatggcatctgtggccctcaaacctgcccctttcactgttgagcagtcctcagttagaggccttccctccctctcaaggaactcctcttcattcagagttgtggccaagggtggcaagaagatcaagactgacaagccttatggcattaatggtggcatggctttgagggaaggagttgatgcatctggcaggaaaggaaagggaaagg

SEQ ID NO: 47881 - DNA, 254 bp, Glycine max
cctacttgctacttcccacttccattcttttcttaaccagctaggatggtgagtgttgaagagattcgtaaggcgcaacgtgcagaaggccctgccactgtcatggctattggcaccgccactcctcccaactgcgtggatcagagtacctatcctgactattatttccgcatcaccaacagcgagcacatgaccgagctcaaagaaaaattcaagcgcatgtgtgataagtcgatgattaagaagcgatacat

SEQ ID NO: 47882 - DNA, 253 bp, Glycine max
atttctcagtctctgtgtttgcggctgaggattccgaatgagtgaccttcttcgtttctcgtaaagtttaagtaatcatgggtaaggataaggttcacatcaacattgtcgtcattggacatgtcgactctgggaagtcaactaccactggtcacttgatctacaagcttggaggtattgacaagcgtgtgattgataggttcgataaggaggctgccgagatgatcaagaggtcattcaagtatgcctgggt

SEQ ID NO: 47883 - DNA, 231 bp, Glycine max
cttggttaatggaagctccgagcatggcggcgacggagcgcacggtgttgcagttctcttcttcgcagagcctctcgacgaaagttcaccctctcgttgtcttcaacatctgcgcttgctacgtccgtcgtctcgaccaagcggagcgcgtcatcggaacgctactcggctccattctccccgacggaaccgtcgatgtccgcaattcttacggcgttccgcacagcgagt

SEQ ID NO: 47884 - DNA, 244 bp, Glycine max
aagggggtggcttgcaacccaaaattcctgaggcaaaagggtcaatcaaagctattcgaagtgtggccttcttcattcccttgtatgaactttacctcacatatggtgggatttttaggttgacctttggaccaaagtcctttctaatagtatcagatccctctattgcaaaacacatattgagagacaattcaaagtcttatgccaagggtatcttggctgagatcctagactttgtatgggg

SEQ ID NO: 47885 - DNA, 250 bp, Glycine max
aattgtttaaacctaattctcatttcttcatcgttcgattcttctcctcctaaagatgcagatcttcgtgaaaactttgaccggtaagaccatcacccttgaggtggagtcctccgacaccatcgataacgtgaaagctaagattcaagacaaggaagggatcccacctgaccagcagagacttatctttgcgggtaaacagcttgaggatggtcgaacccttgccgactacaacatcgcaaaaggaatc

SEQ ID NO: 47886 - DNA, 247 bp, Glycine max
  unsure (1)..(247): unsure at all n locations
gttagaagaggttgcataactgaacaaacaaagcaaccctatgtcgaaggtggtttgtgtcaccggagccagtggcgccattggatcatnggtggccctcctcctcctccagcgtggttatacggtccatgccaccgtccaagacatcaaggatgaaaatgagacgaaacatttggaggaaatggaaggagcaaagagtcgtctccatttttttgaaatggatcttcttgacatcgactccattgcc

SEQ ID NO: 47887 - DNA, 246 bp, Glycine max
ctcttatcttcctaatactatcagaatttttagcatactgccttcaacgaagagatttgatcctagaagggagtgcaatttgcggaaatattcttatctcctccctgctgatataataggaatccagagtcattttagccaggatgaaattgattttcatattttggagttcaacagtatacttaatgtttttgagggagagcatcctttccataattatactgttcggtctaagtacaggaaaaa

SEQ ID NO: 47888 - DNA, 241 bp, Glycine max
aaattgtcatttaagggatgcagctgcacttgctcagttctgggattggctagagacagaaattactaaggataggatattaacagaagtagaagtttcagataaacttcttgagtttcgctcaaaacaagctggtttcctagatactagctttgacacaataagtggtactgtggtagactgacaatttattttaatattttccattgaattatggttaaataaacatggaaagatactg

SEQ ID NO: 47889 - DNA, 250 bp, Glycine max
gctggccatatagttttgaattccatcttcgggtgtctcttacaacagatggggacctgactttgatatctagagtcaggaatataaatggcaagccatttagtttctcatttgcatatcacacatacttattggtctctgacataagtgagataaggattgaaggtctggagacactggattacctagacaaccttttccaaaaggaacggtttacagaacaaggagatgcaataacatttgaatctga

SEQ ID NO: 47890 - DNA, 244 bp, Glycine max
ctttgcagaagaagtgaatgcaaaggtcttctttgagacctgaacaacgaggtccaccactgagacgtttgcagaagaagtgaatgcagcattcagagagagtgcagacaatgagctccagggaatcctctctgtgtgtgatgagccacttgtgtctgttgacttcaggtgcactgatgtgtcctcaaccgttgactcatcgttgaccatggtcatgggagatgacatggttaaggtgattgct

SEQ ID NO: 47891 - DNA, 242 bp, Glycine max
cagtaagatagtcaaccaggtcgactactattttagtaatgagaatttagttaaagatgcattcttgaggcagaacatggatgaccagggctgggttcccataaaattaattgcaggcttcaacaaagttatgcatttgactgacaatatccaggttatattagatgctattcaaacttcatctgttgttgaagtgcagggtgacaaaataaggagacaaaatgattggaggagatggatta

SEQ ID NO: 47892 - DNA, 256 bp, Glycine max
ggagttagtttgcgcaattgtagaaggaaggttccttgcataataaagtgtgaaaagaaagatgatgaagttgaacacattcagaatgtttcagttgagcgtccaccctattacagttacttggactccacctccggccagctcgagccggcctccggtgcccgagcgagtattccgggccaagagtattggcccgatggaactgctattcgtctgagggctgcaagggcacctgctccaactgctgaatcatcaa

SEQ ID NO: 47893 - DNA, 256 bp, Glycine max
ttctctttatctcacgaggtgcgaggcacgaggctgaaagacacggtggaaatcgtatccttgaaaccctgccatctgaccatcgtccaagaggactacacggaagagctcgctgtcgcacacattcggcgactccttgacatcgtggcctgctacacctccttcgcctccgcaaaaccccccgccggcaagtccaaagaccctaccgaacccggttcagataatggatccgaaactaacccgaaatccaaacccg

SEQ ID NO: 47894 - DNA, 246 bp, Glycine max
aaggaaagaggacaattacttttttgcactgtcaaaatatcagaaggcattggaggatactctgaataaaaatccgaattttgtgcagccatctttccgtttaaatgaggttcaaagttggatcaacagtggcttgagggacttttccatttcccgagcatcagttgattggggcattcctgttcccgatgacaagacccagactatatatgtatggtttgatgctttactaggctatatatcagc

SEQ ID NO: 47895 - DNA, 171 bp, Glycine max
atggcaatggcgcttcgcaggctttcatcttcaattgataagcctcttcgccctctcttcaatgcgggttccctctactacaagtcgtctttgcctgatgaagctgtttacgacaaggagcgacccggagttacatggccgaagcagttgaatgcttcacttgaggtcgtt

SEQ ID NO: 47896 - DNA, 251 bp, Glycine max
gtctcttagaaggagtctcatgctttttattgagagcaaacttattatttgtgtttgcatatttctcaagtaaccgtcataaatcaatgctcaaggtgtcgacggcgcctccctcatgggtggcatctccgccggtgcagtctcatattccatcgccttatggagcggcgtcgccgctttaccatttgggactggccatgagacgaacattacattccttttttttttgtagcttttagaaacaagttttg

SEQ ID NO: 47897 - DNA, 226 bp, Glycine max
gttttctatgtttggtttgatgcacctattggatatgtctcaattacttcgtgctacacacatgaatgggagaaatggtggaaaaacccagagaatgtggagctgtatcagtttatgggcaaggacaatgtgccattccacactgtgatgtttggatctactctacttggaactagtgaaaattggactttaatgaagactattagtgttactgaatacttgaatt

SEQ ID NO: 47898 - DNA, 224 bp, Glycine max
gaagttaaaagccttagccttccctacaactccaaacatcaagacatcttcatccatggctgcctccgtctccactgtcggagctgtcaacagagctcttttgaacctgaatggttctggagctggagcttcagctcccagttcagccttctttgggaccagcttgaagaaggttattgcctcaagggtccccaacagcaaggtttccggtggaagcttcaaga

SEQ ID NO: 47899 - DNA, 275 bp, Glycine max
aaaattacgatcccgatttctttaaccgttggattttaatgaaatttggatatgttgttcgaaattcaattgcgcacactttcaccgttgagatttgcgagataatatttgtggaggaagaaaaaggaatcgcatgaaaacagtacaagtggatgcttcaatctcttcttcgtctctctgatgtttgggaattctatcggaactatcggaggaataactggaggaatctcagggaaccgctagagatgtcgctatcaccatcgaaagacacgtga

SEQ ID NO: 47900 - DNA, 260 bp, Glycine max
ttgtcttttaaggtcgtagttgggcctgagtttgttgttcctccatattcaaatgtatctctgttacagcagccaattgaggaagacagtgacgaggagcttgaatatgctgatagtactagtgtcataggcagccaatggataaatcagatgtagagattgcttccaaagtattggagacacattttagtcctgcctcggagttgggtatgggtggggctggtcatgtgtggtcaacatgtgaaggaagccatgaagaa

SEQ ID NO: 47901 - DNA, 266 bp, Glycine max
aagtagttgagaactaagaagaaggaaatggcttcctcaatgatctcctccccagctgttaccaccgtcaaccgtgccggtgccggcatggttgctccattcaccggcctcaaatccatggctggcttccccacgaggaagacacaatgacattacctccattgctagcaacggtggaagagtacaatgcatgcaggtatggccaccaattggcacagagagttcgagactcttccctattgcaaactcgatgatgcccattggca

SEQ ID NO: 47902 - DNA, 272 bp, Glycine max
  unsure (1)..(272): unsure at all n locations
gcaaagtgtttcatagtctgttgggccttaaggagcttcttccgggctaatgcaaagactgcttcacaacttgtaaaaaaatcatcaacggcgtcaatatttgaagtgccgaaaagataatgaggaatgggcggaggcggtttccaaaagtaacttcatacggcgccatctccgtagtagtgtgaatggaggaattgtatgaccattcagcccanaggaggaatttgccccacgaagagggtcgttgatgaacgaaggatcgcagatactgt

SEQ ID NO: 47903 - DNA, 268 bp, Glycine max
aacagattgctcttgcaatttcttcaccaacttccatgtgggtttcttgggttactggggatgcacagattggcctcaacgtgaccccagtagatcctgcatctgttggaagtgaggtgtggtatgggaaaaagagtggaagtacacaagtgttgggaaaggtgattctgttgtttacagtcagttgtatcccttcgaaggcctatggaattacacctctggcatcattcaccatgtgaaactcaaaggtcttgaacctggaaccaga

SEQ ID NO: 47904 - DNA, 259 bp, Glycine max
ctcatacaaaggttgctgtaggagataagattgcagtagtgctaagtgctaacacctgcagtgaacaatggcctctgcatcagcatctctgctcaagtcttcacttgttcttgacaagtctgagtgggtgaagggacaaacccttcgccaaccttctgcatcagttgtgagatgcaaccccaccaccccatcaggcctcaccatcagagctggttcctatgctgatgagctcgttaagaccgcgaaaacagtggcttca

SEQ ID NO: 47905 - DNA, 230 bp, Glycine max
ctataaaacctctatcttcttgtcattcggtgtctattcccattatcttcctctaaaccctaaacaactctttctcttcttccgtcgctcgttgttctccctcgcgtagatcgacaatggcggacacagagacgtttgctctccaggctgagatcaaccagctcctcagtctcatcatcaacaccttctactcctaaaaggagattttacttcgtgaactcatcagcaac

SEQ ID NO: 47906 - DNA, 248 bp, Glycine max
cgttcccagctccagaaactgaatcccgagcccatcgcatggatcatggactcgcacacacccgaatccctctccaccttcttcaacctcgtcttcaccatgcgcctcttctggctctgcgcctgccacgcgccccccgaagccggctccctctacttccactacctccgtcctccgaaccttcttcatcaccgtgggcgtcgacaccgaactctgcttcatgcgcaccctcggttacatcattacaa

SEQ ID NO: 47907 - DNA, 249 bp, Glycine max
agctttcacatccaacaacaactactcaactaccaaaactctattcttcaacctcaaacctcaaatcaacttcatcaaaatgcagttcaccaccatcgcctctctcttcgccgccgctggccttgccgctgctgctcctctcgagtctcgccaggacaccgcatcctgccctgtcaccactgagggtgactacgtctggaagatctccgaattctacggacgcaagccggaaggaacctactacaacag

SEQ ID NO: 47908 - DNA, 247 bp, Glycine max
ggattttatcaaaatcgctgattttggcctagcccgagagatcagttcacaaccaccctacactgagtatgtctccacacgatggtatcgtgctcctgaggtgctgcttcagtcttatctgaaaacctctaaagttggtgagtgtctgactgggagtttgggactaactaatggtgtcatttatgttcttcactaacgctttctgcattgatgatgatgatgagtaccattctaccattttgtttat

SEQ ID NO: 47909 - DNA, 263 bp, Glycine max
gcagacttaacaacagcacaaagcgggttactgtcagttcaagctaccatctctctctctctttcttagtgcctccttgccagaagttaaaatggcgcaagaaactttcctattcacatctgaatcagtgaacgaggggcaccctgacaagctctgtgaccagatctccgatgctgtgctcgctgcatgcttggagcaggaccctgacagcaaggatgcctgtgaaacctgcaccaggaccaacatggtgatggttttcggag

SEQ ID NO: 47910 - DNA, 265 bp, Glycine max
ccaatatattccattctctctgtgtatttccctacatctcccttcaagatgcagatcttcgtcaagagcctcaccggcaagaccatcacccttgaggtggaaagctctgataccatcgacaacgtcaaggccaagatccaggacaaggaaggaatccccccggaggagcagcgtctcattttggccggatagcagctagaggacggtcgtagccttgctgactgcaacattcagaaggagtgtactcttcacctcgatctccgtc

SEQ ID NO: 47911 - DNA, 281 bp, Glycine max
ggctcagacttcgggtcgactcatctttcagaatgtgtagtcgtgtcgttcaggatcttaacttgatcagtgtgcagtgtccaaatcataagggtaggttgcaaattgcaatggctaagcatgatgttgagggtggttcctgctctgcagaggactaccatgatcctcctccagcaccgttgattgatgctgaggaactcacacagtggtccttctacagggctatgattgctgagttcgttgccacaatgctgctcctttgcatgacagtgctcactgtg

SEQ ID NO: 47912 - DNA, 256 bp, Glycine max
gtagcttcttccatggctctctcatccccatccttggatggcaatgccgttcagctgggcccatcagccccagaagtgggaagggtgagcatgaggcagaccgtcaccaagcaggtctcctcaggaagcccatggtacggcccagaccgagtcgagtacttgggcgcattctctggcgagctcccgtcctacctaaccggtgagttcgcaggcgactacggctgggacactgctgggctttccgcagacccagaaa

SEQ ID NO: 47913 - DNA, 256 bp, Glycine max
  unsure (1)..(256): unsure at all n locations
agctcacgaagcttctcggcctgaggccctccgtgaagcgcctcatgatgtatcagcagggctgcttcgccggcggcaccgtactccgcctcgcgaaggacctcgccgagaacaacaagggatgcgagggctgctcgttagtctagctccgaagataaccggccgtagacgattccgcgagcccactccggacacgacacctgcgactacgctncgtgaggcacagtgcatgtctccggagattggcgaccgcagc

SEQ ID NO: 47914 - DNA, 231 bp, Glycine max
tagagaaggactgcactataatccttattttcctggtggggctattgctatgcctaaaatgcttaatgatggcgctgttgaatatgaagatggtacccctgctacagaatctcagatgggtaaagatattgtatcattcctgacttgggctgcggaacctgagatggaagagagaaaactgatgggattcaaatggatatttgttctatcactggcattacttcaagctgc

SEQ ID NO: 47915 - DNA, 231 bp, Glycine max
tttacttacactcggttccttgggccctgttttatttgcttcatcaccagtgcaacatgagtgcatacctcaagcaattctcgggatggatgtaatttgtcaagcaaaatctgggatgggaaagactgctgtttttgttctgtcgactctgcagcagattgatcctgttcctggccaagtttctgcacttgttctttgtcatacaagagaattagcataccagatatgcca

SEQ ID NO: 47916 - DNA, 256 bp, Glycine max
caaaggttgctgtaggagatcagattgcagtagtgctaagtgctaacacctgcagtgcacaatggcctctgcatcagcatctctgctcaagtcttcacttgttcttgacaagtctgagtgggtgaagggacaaacccttcgccaaccttctgcatcagttgtgagatgcaaccccaccaccccatcaggcctcaccatcagagctggttcctatgctgatgagctcgttaagaccgcgaaaacagtggcttcacca

SEQ ID NO: 47917 - DNA, 255 bp, Glycine max
attcagatattggtggtgtgcgggtgggttacggcgaccatggcgccgttgttctatgggcttcataagatgaaactgttgagaatttcgagggatgatgagactgcggggatggatttgacgaggcatggtgggtttgcttatgcataccatgatgatgaagatggttcaagcaggggagtagggttcatgctgcgtagaattgagcctgcagctattaccactccctctccccccgctgcaccacaagtttaa

SEQ ID NO: 47918 - DNA, 249 bp, Glycine max
atcctatcctatcgtagcaaagaaagacagaaagaaaaccctagcttaacttttcaacattcaagtcgcacatctttgttaagacactcactggtaagacaatcacccttgaggtcggagagttcagataccatagataatgtaaagtccaagattcacagacaaggaacgggatcccaccagaccagcaacgtctcattaatgctgggaagcagcttgaggatggacgtacactcgctgattacaaca

SEQ ID NO: 47919 - DNA, 240 bp, Glycine max
  unsure (1)..(240): unsure at all n locations
gtcctatctacgacaccaaggactggtctccaaccggtgatgtctacgatctggtaaacgccctttcccttccctccctctcaaggaactcctcttcattcagagttgtggccagtggtggcaagaagatcaagactgacaagcctcatggaattaatggtggcatggctttgagggaaggagttgatgcatctggcaggaaaggaaagggaaagggcgtttaccagtntgtagacaaat

SEQ ID NO: 47920 - DNA, 233 bp, Glycine max
tcgcaacacaacaaaaaaagacaacccagagagcgcgtcttaataaacgctcttctctgaaaacccccatttcttttcttctttcttcttctctttcgcttcttcgatcttcgatcttcgtcgctgaaaatgagagagtgcatttcaatccacatcggccaggccgggattcaggttggaaacgcctgctgggagctttactgcctcgaacacggcattcagcctgatgggca

SEQ ID NO: 47921 - DNA, 179 bp, Glycine max
cagagaaacaaagttagaagtaaagaagatcatggcttctctagcaaccttggctgctgttcaaccagctacgatcaatggccttgctggaagttccctctctggaactaagctctctttcaagccctctcgccacagtgtcaaatccaagatcttcaggagtggtgccgtggtaccaa

SEQ ID NO: 47922 - DNA, 192 bp, Glycine max
ttaaggatgaattctacctcaaccttggccttgctgtcaggaccatccgtgaggaccttcctttggtcttcgtcaaagacctcaattatgacatttatagggatcacataacattcatggatcccttgaacacatttactgggattgagaagtacaaattggtcttctgggcgttgaggtttcatggcaaaa

SEQ ID NO: 47923 - DNA, 176 bp, Glycine max
ggtcattgcaattatatttttctttggtggtagccggctctacagactccaaatacctggaggcagtccccttacaaggatttgtcaagtaatagttgcagccttgaggaaaatcggtcttcaagtgcccaatgataaatctcttcttcatgagacaatagatctagaatctgtca

SEQ ID NO: 47924 - DNA, 123 bp, Glycine max
gaaaggcggagtggcaccatcaagatttctgacgtatcatatgatacccttcatgcttttgttaattatttatacactgctgaagcgtcccttgataatgacttggcctgtaacctgttggtt

SEQ ID NO: 47925 - DNA, 100 bp, Glycine max
gtgacttgaactatcctttgatttctgatgtcaccaaatccatatcgaaatcttatggtgttctcattcctgatcagggaattgcattgagaggattgtt

SEQ ID NO: 47926 - DNA, 198 bp, Glycine max
gttccgggcagaagaatggatcaggaggttgttttcttagtggaaggaaattgagggtgaaaaaggagagagcagcaattggtggacgatcgatgcgcacactgtagtgcccatcgatcgtcctccaattgctgagcctgacagacctctatggttcccaggcagcacccctcctccatggcttgatggcactctacc

SEQ ID NO: 47927 - DNA, 194 bp, Glycine max
aaggaactggaaaaactcaacttggggtgcgttgtgatcagcgttggcaaaaagggtaactcgtttttcactcacagtataaataagaaacacccttttgtgaaagttgatagctttatcgaaattggtgggtttcctaccgcaaaggaggctcaggttatcgccgatgatgttttttcactgtttgttagtga

SEQ ID NO: 47928 - DNA, 190 bp, Glycine max
gaccctgtgttttggccggttttcataatcgccacccttgctgcaattgcggggagccaagctgttataactgcaactgtctccatcatcaatcagtgtcatgcgcttggttgcgttccgcgagtcaaagttgtacacacctcaaaacatgtatacggacagatctatatcccagatatcaattggatac

SEQ ID NO: 47929 - DNA, 189 bp, Glycine max
aaccaatggtactcacatgaacaaattaagccttggaccacaggctaacaaagatttgcatataagtgaggcactgcagatgcagattgaggtgcagagaaggctcaatgaacaacttgaggtacaaagacacttgcagcttaggatagaggcccaaggaaaataccttcagtctgtgttggagaaagc

SEQ ID NO: 47930 - DNA, 193 bp, Glycine max
aagaagatgaagagctacgacagatgcggtatgaagttggtcactggaaggagaaggagattaatgggactgagaggagattgactggaggttgtccattaactcctagggaaacttccctattgcttagagcactaggttttccatcacaaaccaggatttatctggtagctggagatccatatggtagagg

SEQ ID NO: 47931 - DNA, 192 bp, Glycine max
ggttgatatcaagattgaggatgctcttggtaggaagtggcaatgctcaaccatacaggttgatttcaatctaccacagcgttttgacatcacatatgttgactcaaatactgagaaaaggaggcctataatgatccatagagcagtgcttggatcattggaaagattctttggcattctcattgagcatta

SEQ ID NO: 47932 - DNA, 205 bp, Glycine max
gaaaaacttagctactaaggaaggatcaaagagaatggctcaagcaatggcatcaatggctggcttgcgtggttcctctcaggctgtgttggaaggtagccttcaggtgagtggctccacacgcttgaatgtggggagtggaagcagggtggcctcagtcacacgtgcagggttcacagttagagcacaacaacaacaagtgagt

SEQ ID NO: 47933 - DNA, 247 bp, Glycine max
ctcgagccgccaacctctgttcatcgtctaccgcgctttcttttcaaccagggaaagctgctgtttggataaatatacttcgaaagtatttctgttaatttaataactatgattaagctttttaaagaaaggaaaagcagagagaacttgcagaaaatgcaagtggcggaccacctgttaagaagcaaagtgctggagagttgcgtcttcacaaagatataagtgagctgaatctaccaaaatcatg

SEQ ID NO: 47934 - DNA, 192 bp, Glycine max
gctcgagcattttcacaaagaaaacgaaccaagccatcagagctaacagggtcatggaaagtctttgaggtaagtgcaactcctgtgtatgatgaggagagcacggaagaaggcaacgctgccccatatgtgtacctttgtatggaaaatctaaagaagaggagcctccccgagaacaccaactactttggc

SEQ ID NO: 47935 - DNA, 174 bp, Glycine max
tagtggtgctggttgttgctgcagatgatggtgtgatgcctcaaacacttgaagccatgtcccatgcgcaagcagctaatgtaccaattgtagttgcaattaacaaatgtgataaaccaggtgcaaattctgaaaaagttaaaatgcagcttgcttcagagggcttgcttctgg

SEQ ID NO: 47936 - DNA, 246 bp, Glycine max
ggaatatctctgcgattaatgggcttgcggatgcttgtacttgatgaagctgaccatttactggacctaggattcagaaaggatgtagaaaaaattgttgattgtttgcccgtcagcggcaatctttgctgttttctgcaaccatgccaaaggagtccgtcgtgtatctcagcttgttttgaaaagggaacacaaatatgttgatacagttggaatgggttgtgtagaaactcctgttaaggtgaa

SEQ ID NO: 47937 - DNA, 244 bp, Glycine max
cgaagttgttgaagaatggtgatgctggttttgttaagatgattccgaccaaacccatggtggttgaaactttctctgagtaccccccacttggtcgctttgctgtcagggatatgcgtcaaactgttgctgtgggagtcatcaagaacgtggagaagaaggatcctactggagccaaggtcaccaaggctgcccagaagaagaagtgaatcgtgcggtttggttcatcaggggatgtcgtttc

SEQ ID NO: 47938 - DNA, 202 bp, Glycine max
agaacttcagatattgatcaatgcagggatatatgtggatataagtgcagttatgccacatcatatagtttgtgcacttaaaaagtacgactggggtgcactatcttttgatataaaggtatgcagaacaaatcatcctaatagatctgcaatgaggggccctggggaggttcagggatcatttattgctgaagctattata

SEQ ID NO: 47939 - DNA, 195 bp, Glycine max
gcgtacgtgagagtacaactaactttcaaaaccaggcttttaacacttttgttgctgaatttgatactactaatctcaactctggacttagtaacaaacccgaaagggaacaagcattagaggctgaggtggagaaactcaaagagcagctgaaggaagctaacttggaaaaagctgaaataacatcaaagtatg

SEQ ID NO: 47940 - DNA, 191 bp, Glycine max
gcgcggcataacctaaacctatctttcttctctctctgtgtgtgcgcttcaacggcaaccagaagcagccatggccactgcaaggactgtgaaggatgtttcacctcatgagttcgttaaggcgtactcctctcacctcaagcgatccggcaagatggagctgccagagtggactgatattgtgaaaactg

SEQ ID NO: 47941 - DNA, 189 bp, Glycine max
gtgaacatgcacgtgatggtgggtgagatgaaggtggctgttgcggtggagcaaagggaagaagatgggttcgtgagtggggaggaagtggagaagagagtgagggaggtgatggagtcagaggagattagggagaggagtttgaagctgaaagagatggctttggctgcagttggggaatttggatcc

SEQ ID NO: 47942 - DNA, 239 bp, Glycine max
atcaactctttgatctccaacttcatccttcccctgcagggacataatatatcaggaaaagatctccgtgttcattgttccttaaatatcaacacagagacaggacgcttgtcagcaagaaggccaaatctgcagaatcaacctgctctagaaaaggatcgatacaaaatccgtcaagcattcattgctgcacccaggaattctcttatagttgctgattatggacagctggaacttag

SEQ ID NO: 47943 - DNA, 247 bp, Glycine max
ccacaacctctcccaagttctaaccaatacttctgtgatggctattcgtttgcctagtgttttgagtgctaaatacattcttcgccgatcaaatctgtttgcaaatcatgcagctacaacgtcactggatgtgcctaaagggcactttgctgtgtatgtaggagagggtgaaaagaggagatatgtgataccagtgtcatatttgaatcagccttcatttcaagaactgctaagtatagcggaggaa

SEQ ID NO: 47944 - DNA, 196 bp, Glycine max
ttcactatcaccatctagcgctccttattgttgatggagtgtctccatttgtgctcttgatatccgcatggatgactggggagttgatgtggcaataactggctcccagaaggcgctttccctttccctaaagctattgaggcctcaaaacatgctagatcacttagagttttctttgactggaaagactacctca

SEQ ID NO: 47945 - DNA, 211 bp, Glycine max
ggattgcctcctctggatttttgcattttgccaatgtttcggttgggacaccacctttatggtgcttggtagcattggatacagggagtgacttgttttggttaccttgtgattgtatcagttgtgtgcaaagtggtttaaagacaagaaccggaaagatacttaaatttaatacctatgatcctgacaagtcatccacaagcaataaagt

SEQ ID NO: 47946 - DNA, 231 bp, Glycine max
tacgctcggtctgcggctcgatcacaaggcagaaagccagctcatcctagagttttagaaatggcagcagcctcctccatggctctctcttccccatccttggctggcaaggccgtgaagctgggcccatcagcgcccgaagtcgggagggtcagcatgaggaagaccgtcaccaagcaggcctcctccggaagcccatggtacggtgcagaccgcgtcaagtacttgggc

SEQ ID NO: 47947 - DNA, 204 bp, Glycine max
gcatcaccaggcgatgttccttgagaccatccacctcgatggcttccctgagggttctattcatcttcagtgtggctcttccgttcactcccagttcgatactcgcaccagtagggtattcttctccaataagtgttatttaccgtaagatataccgggtcgtttcagtggagtcagtccgagagctttgactactctgcgagc

SEQ ID NO: 47948 - DNA, 186 bp, Glycine max
aaaacatattattttcattttcatctttttttgagtatcaacaaatggcaaccactgtgatgaccactctcccccaattctcagctgcccctgtgaagaacttggttgctgtgcaacccatgagtcgcaaggggaagggtgcattgggagctcgatgtgactacattggttcatccactaatctgg

SEQ ID NO: 47949 - DNA, 163 bp, Glycine max
gaaagaccttatgaagtgcaatgtcacagaaaaagatgactggaacactcacctatacatacaggattgggatcaagaatccagtcaagggtacaagaaatccaacttaggagaccaatgcacccataggtataaaatatacgtagaggattgggcttggtcc

SEQ ID NO: 47950 - DNA, 161 bp, Glycine max
caggcctaaagttgagtcttggtcttctgagttttctatgattgattgggtgaagatatttggtggggtgcctgtttcagcaagcaatattttcaaattgctttcaacaaagtcacatgttctcctatatcctggtggtgcgcgtgaggctctccattata

SEQ ID NO: 47951 - DNA, 161 bp, Glycine max
cagtgctctccggattatgcttatggtgctggtggctttcctgcttggggaatacggcccaactctgtcttggaatttgaaatcgaagtcttaagtgcgcaatgaaaaccttggtagtctgtctctgtcctaaagaataaaattcttccattttcatggac

SEQ ID NO: 47952 - DNA, 192 bp, Glycine max
gaaatttaagtgaggagctagagaatgatgatgaagtctgctatgtgtgcagtggtggttgtagcacttcttcttctggcggaggtggggcccatggctgaggctgtgacatgcaccccaacagagttgagtccgtgtcttccagcaatcacttccggtgctaaaccttccaatgcttgttgcacgaagctg

SEQ ID NO: 47953 - DNA, 250 bp, Glycine max
cgaatatcttgttgtttggagcgatccgagaaaaactctgtaaacatgttggtttaccaggacctccttacaggtgatgagcttctctctgactccttccgttacaaggaaattgagaatggaatgcttgggaagttgaagggaagtgggctgttaaaggagcagttgatgtagagattggtgcaaacccttctgctgatggtcgatgagaatatgatggagctgatcatgcggctgtgaaagtgcttga

SEQ ID NO: 47954 - DNA, 162 bp, Glycine max
ctcgtgtacgtcaagctctcagttcggtcccatatggtcgagcggctcgagagtgggtcatcgctttacatgactgctatagccttcctgtttatccttctaatcacttatacaggcacaacagatgcacaatccggggtatgttatggaagacttggcaac

SEQ ID NO: 47955 - DNA, 251 bp, Glycine max
tgttggatgccaatgtcaaggaactggggtcagaactggcaaagcaacaactaccttaatggtcagagcctctccttcaaggtcacaacaagtgatggcagaactgtggcatccaacaatgttgcccatctggctggtcctttggtcaaacctacactggtgctcaattccgctagatcttgttgtcacacgcataccagtagtgctatatagtataatagatatatagtattatgttctaggagtattat

SEQ ID NO: 47956 - DNA, 128 bp, Glycine max
gagaaactaagcatattgcctaggtcaggaggggctttgggatttacttacactcctccaacaaatgaggacagatacttgcttttcattgatgagttgcgtggccgcctggttaccctacttggagg

SEQ ID NO: 47957 - DNA, 243 bp, Glycine max
gtattttattagtgacaaaatctcatcatggagaaattgccacgttcaatccgttttgatttgttacagataagaacagttaaggttagcaacatatcattggttacttcaagaaggacattgaagaattcttttcattctcaggtgatattcgatatatcgagatgcaaagggaaagtggtcacactcaggttgcttatgttacatttaaggatacacagggagcagacacagcagttctct

SEQ ID NO: 47958 - DNA, 260 bp, Glycine max
tactgagacgactacagatggggacccacgttaaggaatcctcttttcttttcctctttctttctttctcgtaatctttcatttttttccctcttcccttttttcgatggacacggacagcttcgtttcctcgatcatgtttcgccggaggattcccacgaggttcatgtcttggccgttgatgacagcctcgtcgatcgaaaggtcattgaacgcttgcttaaaatctcagcttgtaaagttactgctgtggatagtgg

SEQ ID NO: 47959 - DNA, 266 bp, Glycine max
gggtttaatgatattgttcacagacagttaggtccatctgttgatgatgaaagtgggcttgtttttgtttttgatggaaaactgaagctggggattttgccggcaagatcttctgtggtggacatacatattttatccaggctatgtaccagcaactaaggttggagccatatgcagtgcacacaacgtttcaatatggaggcactgaaggaaagcgccatcgactgcgagtagccatgcacttcctcgatccaccagaatactat

SEQ ID NO: 47960 - DNA, 217 bp, Glycine max
  unsure (1)..(217): unsure at all n locations
aatttgtaaagctctcgactcggtattcgttttgaggagaagtaatggtcgtgaagctttccgagttacagaggtggataactgttaacgtgtagactctttcgacgtattagtcgagtgattccggatccgcataggatgatnagggcttatcgccattccgcggctacgctgaatcttctcatagctttttccaccggtggttatgctgctatgc

SEQ ID NO: 47961 - DNA, 240 bp, Glycine max
caaatcttcaagcattctgctataggttatcttcggttaaaagtattaagtatgtctaacctcagaatccttctagagaggtattagagcgtgactttgggttaggacattctcgtggttcagagtgcaaacatcatgagggtagacacactaatttagtcccatcatcatttataagctctccttctaagcaagagtttgatagcatctgaaggttcttgtctctaatcagttcaatgg

SEQ ID NO: 47962 - DNA, 218 bp, Glycine max
agaggagagagaaaatgaagaagcacaagcattactccaggaagctgaaaagcgtattaaaaagaagggaaagaaaccaatcatagagggggacaaaatcaccaagcagacattgatgaagttgactttgactgaacaactccgggaaagacaggaaatggaaaagaaactgcagaagttagcaaaaaccatggatcatttggaaagagcaaaaagag

SEQ ID NO: 47963 - DNA, 253 bp, Glycine max
gtataaattcattgaaaattgcctagcatcagttgacagacaaaaacagccatggctgatatttcttgcacatagggtacttggttattcttctgcaggattctatgtggcagaaggctcttttgaagaaccaatgggaagggaggaccttcaatatctttggtaaaagtataaggttgacatagcaatgtatggacatgtccataactacgaaaggacatgcccagtgtatcaaaatatctgcaccaacaaa

SEQ ID NO: 47964 - DNA, 175 bp, Glycine max
atatcacattttatttttctgtttttcctttctataatattcatagtttcattaccccctttatgtgcattggtcttgcaggccttacagtatgtgcaggagaacccagatgaagtttgccctgctgggtggaagcctggggagaagtccatgaaaccagaccctaaacttagca

SEQ ID NO: 47965 - DNA, 217 bp, Glycine max
ggtgtaaggaacacagcaaaacatactcttccgaggaagaaaaactgtacaggctcaaagtgttcgaggacaactatgcctttgtcgcccaacacaaccaaaacgccaataataacaataataatccaagctacactctttccctcaacgctttcgccgatctcacccaccatgaattcaaaaccactcgtctcggtcttccccctaccttgcttcg

SEQ ID NO: 47966 - DNA, 249 bp, Glycine max
ggggtgtagaaacagcgaaagagaaagagagagagagagagagatggcgtcgggctggggaattaccggaaacaaaggtcgctgctacgatttctggatggatttcagcgagtgcatgtctcgctgacgtgagcccaaggactgtgcttttctccgcgaagactacctcgagtgcctccaccattccaaagagaatttggccatggattgtgaactttgaattacagctggactttcaatatttgattt

SEQ ID NO: 47967 - DNA, 211 bp, Glycine max
ggtatgaatcgattcttgacctattctatagtgcattcctttttaactgttttcttctcttcctttcctatggcttatacttttcttttggttatttcagtgttgagatttataagcatcctaaagaagaaagaatagcccgaacttggggaaccactgcccctggcctaccctatgttgaacaaactataaccaatgctggaaattggtt

SEQ ID NO: 47968 - DNA, 216 bp, Glycine max
  unsure (1)..(216): unsure at all n locations
aacgactgataaaagacggcagaaggggatacacagcctctgcagcaatagcgagtgaagagcagnggaagacgcagcaatagggcaaagaccagcgaggtgttataggcaaattaagaacgagccataccccgaatagaggtcttgaagtggtgttcatgatccctagatcaggatttacgatgttggtatgaagaagaagggtagtgatgagtt

SEQ ID NO: 47969 - DNA, 203 bp, Glycine max
gactttgatcactgatctcatctcaattttaagatatgtcgacatatgataagccagtagaggtggaaaggggtagcaaggatgaaaagcacaaggaagatgatcaagaggaggggaagggtggattcattgagaaggtggaggatttcattcatgacattggtgagaagattgaggaagctattgggtttgggagccgagtg

SEQ ID NO: 47970 - DNA, 244 bp, Glycine max
cacggctgcaagacgacagaagggatataaagctgaggatgaagttgcaggcctgggtgagattgtgaggccaaagaagcttgatcgaccaaagggttcaaataggatgagtattatcacagttttaaagtctgaaaggccattgctttctgttgaggaaggtagtgccgatgatgaaggtgcaggcctaggtgagattgtgaggccaaagaagcgtggtcgaccaaagggttccaggaataaa

SEQ ID NO: 47971 - DNA, 143 bp, Glycine max
tgcgcgacgacgacagaaggggcgaagctcggatgactagcacaagcggtttaacgtgtttaaagcaaatgtgatgcatgtccattacactatcacgacggatatgccttactagctagaatctcaacaagattgctgccatg

SEQ ID NO: 47972 - DNA, 208 bp, Glycine max
ttagggatctggaaacctctctaaccaattgatcatgaaaacatattcatcttttgcagtaggcttatctcctgaatgatcatagtcagaagtagtgtttgagtaggaaaagcccaccctagcaggggattccaagaacagcacatttgccactgcattatgaatgcacaattgtatgttcaatctgtcatgtttcacaagtgcatca

SEQ ID NO: 47973 - DNA, 240 bp, Glycine max
ttactgtagagtgatgcttattacgaaagtgaaaccacaagaattgtacgaaatgtaaaatggacggtgaatgttgtaatttttaaaataaatattgattaacatttttttaaaacatgtaatgtaggatttcgtggaaatcaactgtcgtgtgataataacgaaatccattttcttgacaaacaacattttccattactttttccaacttaagtataagggtgcatttagaatagttga

SEQ ID NO: 47974 - DNA, 283 bp, Glycine max
accatatgtttgttgatgagatctttatgcaccattttctcttatctagtcttgtctagacccttaatcctaaagaagcttattggttttatacccttttctacaccacctgtgacttgacaccaaatggccttcctttacctttaaagtcaccacgaatgatgagatctgccatacaacttattttttcacactggcctcattggaatatgacaacaggggaagctcatttctttgtgacccccatgaatttggggcgtgcttccattatcaagtaagaaat

SEQ ID NO: 47975 - DNA, 297 bp, Glycine max
gacgacagaaggggtttatttaatttgttgcaatttaagaaacaatgcaggaatatttggaacccctttcaagctttctgaggacaatattgaactgcaatttgccacaaatcacatgggtcattttcttttaacaaatctgttgttggatactataaagagaacaacgcatgaaagtaagaaagaaggaagaattgttaatatctcctctagtggtcatcaatggctcaactatcgtggaggatcctttttgataaaattaacgatgaatccagttatcagaaattctgcgcgcat

SEQ ID NO: 47976 - DNA, 268 bp, Glycine max
atcgaacagagagagagagaatggcagcacttggtgggaatcgtgatgtgacaggaagccagaacagcgttgagatcgatgctctagctcgctttgctgttgaagaacacaacaaaaaacagaatgcccttttggagtttgaaaaggtggtaactgcggaacagcaagtggtttctggtaccttgtacaccatcactttggaggcaaaagatggtgggcaaaagaaggtttatgaagccaaagtttgggagaagtcatggttgaactt

SEQ ID NO: 47977 - DNA, 237 bp, Glycine max
gaagagtgagaatgcttaccactggatctggtgcatcgtcttccttgcacatcacccaagggaccccagttcccatttccacagccatttttgcagcccaattcacatagttttgaccagcagctccttgcaacttactctgtgccccatattcattctcaatctaaaactgcaaacacatggtgaatcatgaatgcatcattaaaattcaaactagatctagagtgaaaagctcat

SEQ ID NO: 47978 - DNA, 244 bp, Glycine max
ggaagaaatgcaagattggttattgagtgttggtattatatcccctgttacgaaagagtctgcgggtgctttgtatcatcaacaactttctcgtcagttggcagattttgttaaagttccacttgagaaagctgggggaattatcaatcttattgatatatattgtctcttcaaccgtgctcgtggcacagaattgatctcacctgatgatttgttgcaagcatgttctctgtgggagaagttt

SEQ ID NO: 47979 - DNA, 269 bp, Glycine max
gacgggctcacggcctgtaaccctcgaaacgcgaatagccgtgtcggccacctaattctctgtttaacgtcttcaatccttcttccattgatcactatttcgcagtgtttgccttagtctcttgaggtgcaatgagattggagaagtgttggttctgatcttctaccacataccctggacatggaatccagtttgttcgtaacgatgccaagatttttcggttttgtagatctaaatgccacaaaaacttcagaatgaagaggaccctc

SEQ ID NO: 47980 - DNA, 297 bp, Glycine max
tatcgagcgctcgagtacggctgaagacgacagaagggggagcgacgaagatattagggtacttgagtgacgtgcggctatcctagcactctcttctgcagctttcgccgacagcttcattcaccatggctgagcaaaccgagaacggttttttgaaacatacaaaagtgtttctcagctcgaataaaactgggaatggaaagagacccggaaagggtgtgaaccgcttttggaaatccattgggattggatttaggactcaccaggaagctatcgaaggaacctacattgacaaga

SEQ ID NO: 47981 - DNA, 289 bp, Glycine max
gggtagatctcttggtctgcatgttggcaggagaagaccacctcatatggcctttctaggcaaccctggaacaggtaaaactatggtagcacggattcttggaaaattactccatatggtgggaattctacccactgataaagtgacagaagtacagcggactgatttagttggtgaatttgttgggcacactggtccaaaaacaaggaggaagatcaaggaagcagaggggggaattctttttgttgatgaagcctatagattgataccaatgcaaaagtccgacgat

SEQ ID NO: 47982 - DNA, 293 bp, Glycine max
agaagcgacagaagggggaaaaagttttgaagcaaagtctggtctatgcaggggctgagctacaattaaagccaaagaaggactttgatgcacaaagagaaaaggaattagaagagcaagaaaaattccggccaccttagggttcaggtcaccagaataacacaaatacagaagcaaactaccctaaaggcttacttatagccttcaaactaaagagcatttctgatcaagttccattggatcagaataacattgatcagcaagccaatgacagtaatgttgtgaaggataat

SEQ ID NO: 47983 - DNA, 165 bp, Glycine max
gggcgctagttactgagtattcctgatcgctcccatgagagagctcgtcgcggcggttgcagaagaagattgcaagatgaagttcaacatcgcgaatcccaccactggatgccagaaggagctcgagttcgaggcgatctgaaactgcgggcatttgggacaagg

SEQ ID NO: 47984 - DNA, 254 bp, Glycine max
cgggactgcatactgtggcagatattttgtgttgttgctgtggtcaaatagttggctggaaatatgagtctgcacatgagagaaaccaaaagtataaagaggggaagtttgttcttgaaagagggagcattgttgatgaaatggatttctccactgaattccgtattgagagttgtgtcagcatgagtgatgctgaaaatgcttaaactttttaaaatctgctgtacttatccgatcaggtgaaagtatcgact

SEQ ID NO: 47985 - DNA, 220 bp, Glycine max
tacggctgcggagaagacgacagaagggtacggctgcgagaagacgacagaagggtacggctgcgagaagacgacagaaggggggaatggataatatgaatgaagaggccgaactgtgcagaagcagaatgtgcattcactcggggaactgaaaaatgtgggtatatattcatgatcttgatgagctcttcaattgttttatgcgacaacttaatcctct

SEQ ID NO: 47986 - DNA, 238 bp, Glycine max
ggcgcaagtttgttgagatagctagaaggaataagatggaaatgacagtgcttgttttgtttgttgctacagttttggtagcatatgaatgccatggctcagactaccaggagttccctctccaaatgacaactgggtttggtgggcaatacagcaatgaggtggcatgtgccagttggaggcttggcgtggaagcaaacaacgtagtcaagtggcaaactgttcctgcagcttgcgg

SEQ ID NO: 47987 - DNA, 250 bp, Glycine max
tcatatgcatggacacggccagcaaaaaccaagtcaacgcgtgcctcataaagcaactcctccatggcttgtctcatggattcaccttcaccttggtgtgcctcattagtattataccaaggtgcatgcagcaacacaatcacccaaggtgtcttgaccctatcaatgttggcgaggtcagattgaagccacgtgtactgaagtgattgggagtcaaaatcagtgtaggaacctagcatgatgacgtggg

SEQ ID NO: 47988 - DNA, 239 bp, Glycine max
atggttcagcgcactagtctaagatcaagtccaagattttctactaagtgtgcttagatgtcatgagacatgtaaagcatgaaggatatgcacaaagtggtctcacctccccattaggatggtccaaaatgtaattggattgaacttctcccaattcaattaaatttctctcccaacacacacattgcacttaatgcaagtaaaattataaaattacccctaatataaaaactaatcta

SEQ ID NO: 47989 - DNA, 229 bp, Glycine max
gacctcaaaaaacaaaaatcaataccttagagaaaacaaaagcacagaatcgaaagaagagttcttttttgagagagattgggatggcttcgacgaagaagatcacactgaagagttcggacggcgaggccttcgaggtggaggaggcggtggcggtggagtcccagacgatcaagcacatgatcgaggacaactgcgccgacagcggaattcctctccccaatgttac

SEQ ID NO: 47990 - DNA, 226 bp, Glycine max
  unsure (1)..(226): unsure at all n locations
gatgttagatgtattcacaatgtccgtgtaattgtggcattatttatggcttgatcattatgccgtatctttaaaacattcttcatgcttagaatcaacccaactgtttgatctgtcaaaaaaaaaaaaaaaaaaaaaaagaaaaaaaaaaggctcgagaaagagacagaaatgagncaatcgctnctgaagaagattcgcctcgagcaggaggacgaaggcgtta

SEQ ID NO: 47991 - DNA, 220 bp, Glycine max
ggatgattggcaaaagtggataagtattcgaggtggtattggtgttccttcaaacaagagttgggagtcatggtggaatgaggaacaggagcatctgcagcacactggatttctggggcggatatgtgagattatacttgacctgcgtttctttgtctatcagtatggtattgtgtatcatctcaatgtagccagaggtgacaagagcatcttggtttat

SEQ ID NO: 47992 - DNA, 254 bp, Glycine max
ggggacccaaatatggcctctaaaaactgtaaattccaagcatcatctttttgaaagggaccccattggagagggaagacaagattcatgtagctgccgagtacaaggttctgttgagtgtgtccggttccacattgctaagaaaagggctaaagttaagttggaattgggtgaggcatttcaccaatggaatttacataaggtaggtgaagaaattgggggttcatggacaggaagaagagaagaagttcaaa

SEQ ID NO: 47993 - DNA, 257 bp, Glycine max
gaaagatataaaattttgagagagcttggggatggttcttgcggtcatgtgtataaagcccgtgatatgagaacatatgagattgtcgcggtcaaaaggttgaaaagaaagttttgtttctgggaagaatacacaaatttaagagaagttatgatcctccgtaaaatgaatcacccaaatatcataaagttgaaagaggttgttagagaaaataatgaactatttttcatttttgaatcatggattgtaatctttat

SEQ ID NO: 47994 - DNA, 248 bp, Glycine max
gacattaacacgaatatatatatatatatatattaccagtactggaattcaaatctgaagaagcctagcttgtttcattgttgtccaacacaaactattgctttgtactttgcatagaaaacaagtatcaagagatttggtggtggaggattctgataatctggtcacaggggaagatggaaagcagagtggtatttgagaatgatttgaatctcaaggcaacagagctaagatggggttgcagggac

SEQ ID NO: 47995 - DNA, 236 bp, Glycine max
ggcgaaagaacttgatgaaactagcccaaagaatgataaaaacgtttagccttaatatgagtacctctggtggtcaatcatggacagccatatcagattcccctgaagacactgttagaatcacaactaggaaaatcacagagcctggccaacctaatggcgtgattctaagtgcagtttcaaccacttggttgccctattctcacaccaaggtctttgatctcccaggatgaacg

SEQ ID NO: 47996 - DNA, 282 bp, Glycine max
tccaatgtaaatataaatgcaaagcttttaaatttagtaaaatatacaaaaattgctgaaattccgaaacattgatgtacagttcaacatacctccacaattatcctcccatctaagttccttgaaccaccaggaattctatctccaactttgggcttcaaggtttgacttcccctgtcagtgctcgatggtaattgtggcactgccttggaatacttcacaatctactggcacagactaatcacaacaccatccccattacttcaataatctgctgtataa

SEQ ID NO: 47997 - DNA, 133 bp, Glycine max
gagaagacgacagaacggaaagatacacggaaacggtgggaaccgctttcggaaatccattgggcttggatgtaagactcccacggaagccatcgaatgaacctacattgacaagaagtggcccttcactggc

SEQ ID NO: 47998 - DNA, 284 bp, Glycine max
tagacgacagaaggggacagttcaattccaatatattccattctctctgtgtatttccctacctctcccttcaagatgcagatcttcgtcaagaccctcaccggcaagaccatcacccttgaggtggaaagctctgacactatcgacaacgtcaaggccaagatccaggacaaggaaggatcccccggaccagcacgttcattttcccggaagcaattgatgactgcgtaccttgctgactacacatcagaagagatactatcactcgtctcgtctcgtggtgc

SEQ ID NO: 47999 - DNA, 241 bp, Glycine max
gtacctttaggcatctttgaaggggatcacatagatactcagtaattttatcgacacgaatacagcccattgtccgtacagctaaggcacgaattaaaggatttggatcttgtgaatcctgtgcatcattatataaaatgaaattaaaaaaaacagcaacaaaccaattcagttcgcttccatcaaagagagtcagggaacaacactcagttcatgagtattattatccattcaataaaca

SEQ ID NO: 48000 - DNA, 207 bp, Glycine max
acccctaatacaaaaactagtctaggtgcccaaaaatacaagggctgaaaaatcctatatttctagggtaccctacctacaatatggagccctatatacaaggaccaaatataatgacatcctagtctaatatgacaaagataattggacccaaccttggcccatgggctcagaaatctaccctaaggttcatgagaaccctagggc

SEQ ID NO: 48001 - DNA, 185 bp, Glycine max
ggtacaaacaaatgcttctgaccatatgatcaaaatacatgattatgtttttgtagactgtaattaccatgataaatcaagcaatcggagcagctggagttgtaagcaaagaatgcaggtccgttgtcaataatatcggacaaacaatcttggaattgctcttggctgaagcaaagccacaaaag

SEQ ID NO: 48002 - DNA, 238 bp, Glycine max
tcggaagacgacagaaaggggagctttagattcttttcccctagattcagccacagttggataaaaaaaaaaagtttttcgaaaggtcacttccgaggcattctgctcgtaagtccacaggaggtaaggcacctaggtgacagctcgcaaccagggctgaacgtaagtctgcagccaattgtggtgaccttagaacccaaatcgttaacggcctggtaccgttgctcttcgtgaaatt

SEQ ID NO: 48003 - DNA, 249 bp, Glycine max
gacaacacatcgcaacacaacgcgcactctctctattctctcttgactcagaaaccctatcgttctacgcggaatcgccgattctcgccatgctgaaagccaattccgacgccaaatccgccgatagcacggtgaagcgcaagggcgctggtgccaatggaagcaatcgaagtcagctgtctaggatcctaacaagccatagtgatctccaagcgctttctacgtttccatgtccgagttcatagagca

SEQ ID NO: 48004 - DNA, 99 bp, Glycine max
ggatgacaaagaatatattcctgatcctgaggataagaaaccagaagggtatgatcccatccctaaagagcgcacagaccccgaagccaagaagcctga

SEQ ID NO: 48005 - DNA, 262 bp, Glycine max
ggagagaagttattagggtttttgagtgcggcggtccaaacactcttctctgcagcttttgcctacaactcccttcaccatggctgaacaaaccgagaaagcttttctgaagcaaccaaaagtgtttctcagcacaaagaagactgggaagggaaagaacctggaaaaggtgggaaccgcttttggaagtccattgggcttggatttaagactcccagggaagccatcgaaggaacctatattgacaagaagtgccccttca

SEQ ID NO: 48006 - DNA, 208 bp, Glycine max
gtgtgcaatgtttgccatttgcattccccatctttcagctctcggaatttggctgggattttcgacagtcttcagcctagtatacattgttatagcatttgtactgtcaattaaagatggtataaaatcaccacctcgtgattatagcattccggggacatcaaccagtaaaatatccacaacaattggggcgtctgctaatcttgtg

SEQ ID NO: 48007 - DNA, 183 bp, Glycine max
gatcacaaatctttcgctaacactcattaattgcaagaatggcacttcgttgcttggtgatgtccctttctgttctcttcactcttggtcttgcgagagaaagccatgccagagacgaagatttttggcatgctgtttggccaaacactcccattccaagttcattgcgagattttctaaagc

SEQ ID NO: 48008 - DNA, 270 bp, Glycine max
tctcgagccgataccctccgtgggctcggagagtgctctggatcatggcagagctcgctctcattggctccgatattcaggaggttattgggagtgctattgctattaggattcttagtcatggggttgtgcccctttgggccggggtcgtcattactgctcttgattgtttaatttacctctttcttgaaaactatggtgtgaggatataggctttttttgtggctctcctcagtggtgtgatggcaatctcattggcatggatgtttg

SEQ ID NO: 48009 - DNA, 237 bp, Glycine max
gctacaagccgttcccttggtatattgcttgttctatgtcgtgtttgttcctctccgttggatatattacaggttcaagaaatggcattactatctcctggtgaatgatgatatctcaatttctgtattttaagtttattgtgcaactattaaactagataaatgctagcaagtaacaatgcgtttctgtaatttaaatacactattgattggactttattagaaatcgtgaacttt

SEQ ID NO: 48010 - DNA, 218 bp, Glycine max
ggaacaaaatccgtgaacagtacccggtttcgacactcgcgtctcagcctcagtttcggatctctcccttctctcaccaatttccaggatttgaaaaatggcagattccaaaccaggattgaggaagccagtgttcaccaaggtcgatcagcttcgtccagggaccagcgggcacactttaactgtgaaggtggtcgatgctaagatggtgatgcaga

SEQ ID NO: 48011 - DNA, 228 bp, Glycine max
ggcatttaactagccctaattcgccattgaaccctatactgtgcttccgccttgatctccgcagcaatggtgaacgttccgaagacaaagaagacctactgtaagagcaaggagtgcaggaagcacacgctccacaaggtcacccaatacaagaagggcaaggacagcatcgccgctcagggaaaacgccgttatgaccgcaaacagtccggttacggtggccagact

SEQ ID NO: 48012 - DNA, 284 bp, Glycine max
tctcgagcgaatcggctcagtacggaaagacgacagaacgggactcacttatcatccttcgatcatacacttagttgcttccaattaagatggttctgctagagaagctctgggatgatgttgtggctggccctcaacctgagcgtggccttggcaagctcagaaaactcaccaccctcaaaactattgatgaaggagaaagtagcaagctgcagaagacgttgtcgatgccgtcgacaccaacaaccccgatgactcgcgactccaacgacaccgggatcggc

SEQ ID NO: 48013 - DNA, 257 bp, Glycine max
ttacccaatctctttctcgtcctttaaagaagcatgcaatgtccaaaaatatgtccttctgagaatgatctaagccatcataacttaattttaatactgtatgaatttccatactcgaaatcttttggagttttctcaattcactctcccatgcctctttactttttcgacgaagacttgcacccataacttttaaagccaaaggaatacctttgcaataggaaagtactcttctgataggtcttcatacccctctt

SEQ ID NO: 48014 - DNA, 275 bp, Glycine max
acacctccaatgaaaaaatctcctatttcaatctgaaaaagaaaatttccttgttaaagtattttctgatgtgaataattacatatttaaaaggaattcctaatcaaactaaatgtgtatttgctaacctgccagtaacctttttcagtaatcggacataagtgtggtttcctttgaagtgctttgggtcaacaccaccataaactaattcgccaccttttttcgcatttggatccccattaagccaaaaagagaacaccttctcactgataagt

SEQ ID NO: 48015 - DNA, 237 bp, Glycine max
atgaggataaagcaatggggcattcaatcgcaatgccttatgcatgtgatatctaacaaggtgtgcccaatcaatttgtaaacctttatgaaaggcccacatgacaatgaaatcttcttcaaaaactgagcaaggtttgaagatctagggagtaagatacgaacaataagataatgcagaatgcagctctcaaaagccaatgaaccggcaagaagtcttccggtcatatccgcttgg

SEQ ID NO: 48016 - DNA, 179 bp, Glycine max
actgggggcagccaagagaagaaaatcctcacccattgtcttcgtagccaaacactctgaaattctcagttatgtcgtggcaagcgtatgtggatgatcacctactgtgtgaaatcgaaggtacccacctctctcgcgtatatcggcaagacggaagcgtttggggtcagagcaccaac

SEQ ID NO: 48017 - DNA, 200 bp, Glycine max
ggcagccaaagacgacaaacatcctcaattttctgaccagcctcacactctctctctgtctctcgacaattctcagtttgcagagaacatctgaatcatgtcgtggcaagcgtatgtcgacgatcatcttctgtgtgacatcgaacgtaaccacctcactcacgctgctatcatcggccaagacgtcaccgtttgggctc

SEQ ID NO: 48018 - DNA, 219 bp, Glycine max
ggaggacgcatgtttgccccgaccaagatctggcgccgctggcacaggaaaatcgatgtgaaccagaagcgctacgccgttgtctccgccatcgctgcctccgccatcccctccctcgtcctcgcccgcggccaccgcgtcgagtccggaggcgcacccactcgtcgttagccactcgagggtcgcgtaaacgaaacgaagcgatcaaagtcctcgagc

SEQ ID NO: 48019 - DNA, 253 bp, Glycine max
agacgacagaagggggcagcaaaccagactaaactccgacgatgcctcccgtcgctcctcgatccggtgatgccatattcgccaacgtcgaacgcgtcaatgcggagctgtttactttgacgtatggcgcaattgtgcgtcaattgctcacggatctggaagaggctgaggaggttaaagcattttcataatgggggccacaatgtgggacacccttattgatgagtttttagccaagtctaatgtctccaga

SEQ ID NO: 48020 - DNA, 212 bp, Glycine max
gtatttgggatgatgggtagtggtctttttaccgtacttttcgggttagggtattggttggatgttcatgtgttggggttttttgttggtgttcagattgtttgtggagtttttcagtcaattgggtgcccttgtgtgttcacatttggggattttgcctagggaccacaaaggggttcataaatgggggtatggaactcacatacctcggt

SEQ ID NO: 48021 - DNA, 225 bp, Glycine max
ggaaggaaggatgggggatgctgataatatgataaaagaaatgcgagaaaaagggatgatgcctgatgctgttactcataacatattgattaatgggtattgcagatgtggggatgcaaagagagcctttgggcttcttgatgaaatggtggaaaaggattcagccaacactggtcacatatacatcacttatatatgttctgggtaaaaggaatagaatgaaag

SEQ ID NO: 48022 - DNA, 239 bp, Glycine max
gacagcacagcactctttgcaacacaacaaaaaaagacaacacagagagaagcgtcttaataaacgctcttctctgaaaaacctgatttcttctcatcttctcttctctttcgtttcgatcttcgatctctgaaaatgagagagtgcatttcaatccacatcggtcaggccggtattcaggtcggaaacgcctgctgggagctctactgcctcgaacacggcattcagcctgatgggca

SEQ ID NO: 48023 - DNA, 232 bp, Glycine max
ttacctgtgtgagattgatacactttgagtgattttctcctatctttgttggacccagtgtttcctctaaatggtcgtttagaaacgaaatgctaacatccaaaatctcatttacggttatgagaagatttcatcagcatactctccttccccgatagacactttgtttttcatccaaaagcatatgttgctctgatcagttggaagttttgtctctttactaaagcatgtt

SEQ ID NO: 48024 - DNA, 268 bp, Glycine max
gggacacagtttacataatgatctacgtgtgctgaagcttgatcatgttagagtgattgacacttcttatatcttccactccttggatggatctattcacaagagaccttctttgaatagcttatgtcaggctgtgttgcaccatgaagttagggaaaagggtgctccacataattgtctagatgatgccaaagcagctatggaccttgttcttgcgaagatcaaacatggagttgataaggaatttccaattgcattagttcaagag

SEQ ID NO: 48025 - DNA, 195 bp, Glycine max
attcccaattgtcgtcagtagatcaaatgcgaggtatgaacatgccaaactttgctgccatggagcagactcgtatgcttgcaaacacgttgggccaaaatggtgaccccaaatttccagaatccaaattccctccaattggaaccaaagatgagcggtggtgagtgaataatgatgacatccaggttaagggga

SEQ ID NO: 48026 - DNA, 243 bp, Glycine max
cgaccacacatggccaatcatgtcattaggacgccaacacagtttgacatattccttcctccgtttccaaagctgagatgatcctgctatgccaaaaacaatatggttaagtgacaagccttcctcttcaacaatactggtaccattatgaagatgatccctcatgggtctcaattggagaacttgtgaaggtttacttccccaagcgatgagagttgcactcctcccatttgaaaaagtggg

SEQ ID NO: 48027 - DNA, 255 bp, Glycine max
tggatgtcatagtattatcattcattctcatctttctctcttctctctccacccaaaccctaactcccgaccctgttcccctctcgtatccgtcatgaaaggaggaaagtccaagaccgaatctaagagagccgatcccaaacttgctgtgaataagaagggagccggcaccaaggctagcatacccgccggcaaggggaaggcagcgaaagaccctaacaagctcaagaggcctccaagtgcttacttcgtttc

SEQ ID NO: 48028 - DNA, 281 bp, Glycine max
cgggttgaagtttggtttcagaacagaagagcaaggaccaagctgaagcaaacagaggtggattgcgagttcctgaagaaatgttgtgagaaactgaccgatgagaatctaaggctgaagaaggagttgcaagagctgcgtgcacaaaagcttggatcaacaccactgtacattcaactctccaaggccacaacttgagcatttgttcatcgtgcgagaaactgttgaagcccaatgaagggaacaaaggagccattaacaaattgcagaacagtatagag

SEQ ID NO: 48029 - DNA, 232 bp, Glycine max
taagtaagataggaattaagatagagtaaggatgaagaagaagaaagaagggggcaaaagtgagattgttgatagagataaatagaaaaagtgagatgaaaatgaaggtaattgtattattagttgataaaatattggtagaatggaaatgaactgagtacgaaatgttcaatataagaatgaaaaatggatatggtgaaagtaataaggaggtgaaatgagaaagttggag

SEQ ID NO: 48030 - DNA, 250 bp, Glycine max
gcagaaggtgtatgggctgtagttgatgtttccattgagataggtcacgatgctgctaatgcacagccatccattagctgtagaaggcttccttctggctgtattgtgcaggatatgccgaatggttactccaaggttacttggcttgagcattgggagtacgatgagaatgttgtccaccaactttatcgcccgttgctaagttctggtgttggattcggtgctcatagatggattgccaccctccaaa

SEQ ID NO: 48031 - DNA, 234 bp, Glycine max
cagttacgaaaaatgcttgatcttcttgtgcatgcatctcaatgtcgttctgcccactgccaatatccaaattgtcgcaaggtgaaggggcttttccgtcatgggatgcattgcaaaatccgtgcctctggaggttgtgttctatgcaagaaaatgtggtatttgcttcaactccatgctcgtgcttgcaaggaatctgaatgccatgtaccacgttgcagagatttaaaagaa

SEQ ID NO: 48032 - DNA, 245 bp, Glycine max
cacacacaaaatctgtcataaacaaaagacttgatggggtttgtgtgtgtattacctatggccgctgcagaactcatacagcttgccacggttggagaagataataagggcaacctcagcatcacagaggccagagagttcataagcctctttgagcgaaccattcgtccactgtgcaaatgtcacctgacggtttctctggttctcaatcctcttcagctccacctttccgctacgcatgttta

SEQ ID NO: 48033 - DNA, 236 bp, Glycine max
aaagagacccggaaagggtgggaaccgattttggaaatccattgggcttggatttaagactcccagggaagccatcgaaggaacctacattgacaagaagtgccccttcactggcaatgtttccatccgtggccgtatcttggctggaacatgtcacagtgctaagatgaacaggactattattgttaggaggaattatctccattttatcaagaagtaccagaggtacgagaaaa

SEQ ID NO: 48034 - DNA, 276 bp, Glycine max
caccgaacaagttcatgcattgtgtaacgtgctatccgctgcaacaactcacttttggttcctgcttgatgaactatacggaaacaagtattcactatggtgcagatatgttggttactcagcatcatagatgctttacttttgacacatgctagaagaacttgtaatatcttcattaataccacttcttccgatccaggatcagtcacctcaaacctgcaactcgtgacagcatcaactaccaagtgcatggcatccccaactttaacagtgttt

SEQ ID NO: 48035 - DNA, 255 bp, Glycine max
aaagagacccggaaagggtgggaaccgcttttggaaatccattgggcttggatttaagactcccagggaagccatcgaaggaacctacattgacaagaagtgccccttcactggcaatgtttccatccgtggccgtatcttggctggaacatgtcacagtgctaagatgaacaggactattattgttaggaggaattatctccattttatcaagaagtaccagaggtacgagaaaaggcattccaacattcctgc

SEQ ID NO: 48036 - DNA, 251 bp, Glycine max
tccattatagtttatatgtctgaagggaggattatgcagtatagggcctttgttgtggctaattggttttgagatgagaccaaaaactttagtatctgcttttacatgttccaatttataggcttcctggatattgtcaagagaaggcagaccagggattggatttacctgccaatgattcatagacaaagaacccgccaaatttttgacttagaagctggcttattaatcctctttctccaacagaataa

SEQ ID NO: 48037 - DNA, 265 bp, Glycine max
ggcagtgaacatgggggactcaacttgtctcatgcaacaaccattctgttatgcttcagggatttccaatgaagccagtgagaacaacccaattcatgcacttgagcagtcaatttcgtttgggagattcatgtcagagtccctggcatgggagaagtggtccagcttctcccacaaccgctatgtcgaagaggcagagaggtactcaagacctggttcagtggcacagaagaaggctttctttgaagctcactacaagaaactt

SEQ ID NO: 48038 - DNA, 262 bp, Glycine max
ggtcgcgtttgggattcaaacctcaaaatggacgtttccgagctcgccaagaagctcggtctctccgattccaaactcgttgtacggaaagctgccgagctccgtcgcctctgcgaagtccagttcgattcctccgtcattggagtcggcgaggttgcaaaatctatcatatgcttggaaatcgccgccatgagactcagcattctcttcgaccgatcctctgcggcgaggctgagcggaatgtccgaaagagcttacatca

SEQ ID NO: 48039 - DNA, 260 bp, Glycine max
ggcgagagaagttattagggtttttgagtgcggcggtccaaacactcttctctgcagcttttgcctacaactcccttcaccatggctgaacaaaccgagaaagcttttctgaagcaaccaaaagtgtttctcagcacaaagaagactgggaagggaaagagacctggaaaaggtgggaaccgcttttggaagtccattgggcttggatttaagactcccagggaagccatcgaaggaacctatattgacaagaagtgccc

SEQ ID NO: 48040 - DNA, 266 bp, Glycine max
ggagtttagctgcagaaggtagagagagagagagatggagagcatagagcacagaacggtggaagtgaactgcataaagatgcatgttgcagagaaaggagaaggagcagtggtgttgttcttgcatggcttcccagaactctggtactcatggcgccaccagattctagctctgagctcgctcgggtaccgcgcggtggtacctgatctccgtagctacggtgacacagaagctccttcgacggtgaacagccacacgagttttc

SEQ ID NO: 48041 - DNA, 282 bp, Glycine max
cgagaagacgacagatggggagtacaaggctgctactggggctttcacgcctgaccgtgttgctgtgtattgcaagtgcgagatgccttataacccagatgacctcatggtgcagtgtgaggggtgcaaggattggtaaagccagtgtattctgctttctttgtttactgttattacatttgtgagtggtttttggatgtccgggtctccaattttagcattagatgcgttgtttgctcggatgaaggaattctctggatatttcagctcctgcagagccag

SEQ ID NO: 48042 - DNA, 244 bp, Glycine max
gagtgaagaaaatgaaagtccttgttttctttgttgctatagttctagcagcatggcattgccatggctcagaccatgaccatgaccatggccacacctaccaaattttccctctgagaattgaaactggccatggtgggcactacaattcggaaggaaccagccaaaatttggaggcttgttttggaaccacacacggtaattgcctggaaaacggttcctcaagattccgagggatatattg

SEQ ID NO: 48043 - DNA, 225 bp, Glycine max
cgatcaactaaagaaatatgtgctatctgagctcaagttgacagctgagagaaataagctgaggggatttgaacatatcaagggggtcatattagaaccgcaagaatttgacatggaaagagatttggtgactgcaacactaaagaatgtaagataccaactactcaagtattatcaggtgggaatagatgaactatacccaagttttgacagggaaaaagcata

SEQ ID NO: 48044 - DNA, 237 bp, Glycine max
acatggaagtctaagctcaaagctcagtttcctagtctcaatgagtactctccgattctgggtgacttctctactgcgactggaattgccacattcacaatgatccttgtcagccagtttatatgtgacaactattgataggcagttgttgccataatcacccctacggtcctgcttttgacacgagctgggttcttccctcttcatattgcatgggggtccgcttgcacctggtct

SEQ ID NO: 48045 - DNA, 278 bp, Glycine max
ctgttgaggcatacagaaaggctataaagacctggggaaaatggatcgatgataatatcaatccacgaaaacagattgtctactatcgtggatattctaatgcccatttcagaggtggggactgggactcaggtgggtcatgctacggtgaaactgaaccagcttttaatggctctatcctgaataactatcctttgaaaatgaaggtagtagaggaagtgatccggggaatgaaggttcccgtaaagttattaaatgtcacaaagctgaccaatttc

SEQ ID NO: 48046 - DNA, 245 bp, Glycine max
gactcaccacttcaaaacactcataacacaaagcacaaagcaaagctcatccttgagttaaaaaatggcagcagcttcttccatggctctctcatccccatccttagctggcaaggcgtgaagcttggccatagccccagaagtgggaagggtgagcttgaggaagacgtcaccagcaggtctcctcaggaagccatggtacggcccagacgagtcaagtattgggcccatttctgggagccccg

SEQ ID NO: 48047 - DNA, 170 bp, Glycine max
catcgtgatttgaaatccgcgaatatattacttgatcactcaatgagagctaaggtttctgattttgggttctcaaaggaagaggtctttgatggtcgtaattctggccttaaaggtacatatggctacaggacccagcatacatgtccctcagcaagttcacagtgaag

SEQ ID NO: 48048 - DNA, 187 bp, Glycine max
tacggctgcgagaagacgacagaagggtacggctgcgagaagacgacagaagggcctcttgcatctgttttagcatcttgatataggtcctatggagactttcatttctctagctgcggggtatgctctgttaatggtgtatcatttggaattaatataattacaatttctcaaaagaaaacagtag

SEQ ID NO: 48049 - DNA, 263 bp, Glycine max
aggactcaatggtgaagtctcctagtgattcaaatccatgcactcttcctcctccatatgagcctataaacctacaagactttctagagaagaaagctagttcaataaggcaggtagaaacttgggaagaccaatactgggagaaagaaaaagggggacaataatagtaatgtcctgatgaagattttgtcatgtcttcctttatttcgtgttgtgacaaataaatggccttttattcatacataccctatccccccaataca

SEQ ID NO: 48050 - DNA, 118 bp, Glycine max
aacttcagtgagaagaatatactgggacaaggaggttttggaactgtttacaaaggtgaactgcatgatggcacgaagattgcagtgaaaaggatggaatctggggcaataagtggga

SEQ ID NO: 48051 - DNA, 157 bp, Glycine max
gatgacatacttgttgttgtcacatctggagaaaatgtgacagaagtacagccacaatttgatgcaataagtaaatgtcctggaagggggatcattgtttcggggattgctcctccagggtccggatttgacttctatagtcgattcttctgcccga

SEQ ID NO: 48052 - DNA, 226 bp, Glycine max
gacgtctaagtttgagtgagaagaaactgaaaagtgcttccgagtctcatggagccgaccttattaggttcacacagagaaatatcctcagagtttttcctaaaggagaacgtgtccaatcctcaaatttcaggccatatttagggtggttgtatggagttcagatggttgcattcaatatgcaggggcatggcaaatcactccggttgatgcggggtatgttcaa

SEQ ID NO: 48053 - DNA, 230 bp, Glycine max
gaagcataagttagttccaaacaaggatttagcagaagcagcattcagagatttgaagaagagggaacagactgcttacaatgttgttgcttacaaggataaaccacgtttgaagagtgctgtagaaatgcttaaaactaccgaagaaatagaacagcgattgaaagaagtatattttgatcttctggcttatctaaactaggtggttggagttggtgaaaatttggttt

SEQ ID NO: 48054 - DNA, 170 bp, Glycine max
accctctacatcactcaacaaaataagaagatcagcttttaattccaatgccaataaagctgataaactgtcattatcccaaaatatgccagaagaatcctgcataaaatgatttagtgacactttaagtattctctagtctagtctcatacgtcacctgtttttttttt

SEQ ID NO: 48055 - DNA, 238 bp, Glycine max
ggtggcgctcgatggcacagaagatgggaaactgtatttgctaacagttttgagaggactgacaatgaaatcctatcagacgcagttgcgcctgaaatggtaggatctactgcctctgtggtgattctatctggttgccaaattattacatccaactgcggcgactcaagggtagttctttaccgcaggacacaaactatccccttgacagtggatcagaagccggatagacaagatg

SEQ ID NO: 48056 - DNA, 258 bp, Glycine max
ccttatctgaagcccttctacttcactagctgcatctgaatgggaagtgaggccaaaaaccttctctggttgaggacatggtgggtaatagttcatcctcatagtctgcatacgatctttaaaaactctatcatttctgtttcttccatctttagagcttttcccattttttcaacaacaaccaggctagatttttaagttcctgtgtgtagagttctaaggtgttcctgagttacaaagagaagtgactctagcatg

SEQ ID NO: 48057 - DNA, 217 bp, Glycine max
gatcatgaagaagagggtgaagaagttcaagaggcctcagagtgacaggaaaatttctgtcaagacaaactggcgcagaccaaagggtatcgattcccgtgttaggagaaagttcaagggatgcactttgatgccaaacattggttatggttcaacaagaagacccgccactatctccctaatggttctaagaagatttgttgttcacaatgtgaag

SEQ ID NO: 48058 - DNA, 238 bp, Glycine max
ggcttcagaaaattgacagtgacaactaccctgagtcactgaaccgtatgttcatcatcaatgctggttctggatttaggctcttgtggaacaccattaagtcattcctagatcccaagaccacctcataaatccttgtcctaggtaacaaataccagagcaagtgcttgaaatcattgatgccagtgaacttccagagttcttgggtggtacttgtacttgtgcagataaaggtggt

SEQ ID NO: 48059 - DNA, 254 bp, Glycine max
ggagggttgtcatcagggagccatactaagaaaaatgatggaaagtctcatattagctctcatgggcatggaattcagagaaggaatgtcatcactggatccgattcacaatatataaatcaatcgggtcttgctctagttagaaagaagagggtgcatacacagttcaatgatctacagaatgttacctacaaaagcgacggcatgcagctgataggtcccatagccaacaagatagagatataagtctcata

SEQ ID NO: 48060 - DNA, 278 bp, Glycine max
aacgcgaccggaggggatattgtgaaactgagagaaattcgcaaaccctaatttcggaaagatcggcgatggctgcctccaaggatcgcgagatcttcgactacatggcacagctcgccgtacaggccgagcgatgcgaagagatggtgttgtcaatgattatcgttgcgaatctcgacgctgaactgactgtggaggctcggaattactttctgttgggtacaagaatgtggttggtcctcggaggcatcgttgaggatcctgtcttccattgagca

SEQ ID NO: 48061 - DNA, 260 bp, Glycine max
aactccttgggataaagatagtgttgccatgttttcaacgctctaactaaggcatacaactccttatcataagtagaatagttaagggtaggaccacttaatttttcactaaaataagcaattggatgaccttcttgtaacaatacagccccaatcccaacatttgaagcatcacattcaatttcaaaagattttgaaaaatttggcaaagcaagtatgggggcaaaggttaaattttgcttaggagcattgaaagcttc

SEQ ID NO: 48062 - DNA, 263 bp, Glycine max
acggctacggctacgcgacgtagaggccacggtgaccgtgcttgatgtttcgagaaatgcactttccggcgaggttccgccggaggtaggaaaccttatcaagttggaggagttgaagatggcgaataactccgtcacaggcaccatcacggtggaactcaagacacgcgggtcacgaagcgtcgatgagtctccgggcaacggatttcgtggcgaaggtccgtctcagtttcggtgctatgagtggcctcgctgtgctgtct

SEQ ID NO: 48063 - DNA, 265 bp, Glycine max
catgcatgtctttgacaacacaagttctaagaagaggctcaaattcacggacaccaatggcttgccgcaaacctctagtataaactgcattcaagttataaatgtcatagacttcattgagtaatccctcatgcatcacgcaatctaccctctgctctacatatctgtccagtacagggagagatgcatccacacatataaaacaacaatcatatcttaagttatcaacttgaccccacttctgccctgccacaagcaagaccaa

SEQ ID NO: 48064 - DNA, 261 bp, Glycine max
agacgacagcaaggggggagttcaacgggatggggcaggtaaggcacagaatagttgaagggaatggcatgaaaatgcatgttgcggagaaaggagagggtccagtggtgttgttcctccacggcttccctgagctctagtactcatggcgccaccagattctctctctcagctccctgcggctatcgcgacgtcgctcccgatctccgtggctaccgtgacaccgacgcagcgctgcaatcatcagctacgactgcttcc

SEQ ID NO: 48065 - DNA, 285 bp, Glycine max
tcgaagagacagaaggggagaagcagaaagagaagcattagcaaaagcaagaagaactagtctaagcagaaatggcctcttcagtgatggcatctgtggccctcaaacctgcccctttcactgttgagaagtcctcagttagaggccttccctccctctcaaggaactcctcttcattcagagttgtggccagtggtggcaagaagatcaagactgacaagccttatggaattaatggtggcatggctttgagggaaggagttgatgcatctggcaggaaaggaa

SEQ ID NO: 48066 - DNA, 242 bp, Glycine max
catgacaattgctttgctactcagtaaccaggcaggggtaactcagaaaacaatgatgtggagaatggagatgataattttatcacaaataaaagaaagaatgctaataccttacataaatttgagggtggcactcttattgtttgtcccatggctttgttaagtcaatggaaggatgagcttgaaacacattcaaaggaaggtagtatatccatatttgttcattatggtggagcaagaac

SEQ ID NO: 48067 - DNA, 283 bp, Glycine max
gaagacgacagaagggctcactgacattgtatcaaaggaaggaggatatgtcacttttggatacaacaataaaggaagaattatgggagaaggaaacattggaaattagcacaagacataaataaaaaatgttttatatgttaatggacttaagcacaacctcttaagcataagccaactatgtgacaagtgcttaaaaattgaattcaacaagagttgttgtctcatttgtgaagctatttctggtaaggttgtccacataggtaaaatattaggtaatatc

SEQ ID NO: 48068 - DNA, 256 bp, Glycine max
gggtgcctctgcttcctacacgcagggtttcccgaagatttaacacctatggctcctaaagctgatagtttaaagaaggctgatccaaaggcacaagccttgaaaactgctaaggctgttaagtcaggtgctactttaaagaaaaagaccaagaagatccgaacatctgttaccttccatcgaccaaagaccttgaaaaaggataggaaccctaaatacccacgcattagtgctccacccaggaacaagcttgatc

SEQ ID NO: 48069 - DNA, 139 bp, Glycine max
ggccattgttgttgctattatcatccgcagctgcttttattcgcaccgcaaacagtgagccatggccgtcggaaagatcaagcgcatctccaaggggaagaagggtggcacgatagcggcagctgatgcctttgccaag

SEQ ID NO: 48070 - DNA, 258 bp, Glycine max
gaaccccaattccaactctaattctcataacatatcaaatctctactcatggttacttgtttgcttcttggatcatacaatttatagccaccaatagcatggtaactaatcaatatgacttgctcacccttgtcatccagtttccttctcaattagtcaggaatatgtttgtagcagattgaaccaaacactctaaggtgagctacacatggtttcacaccagtccaagcttcttctagtgtcatacctgtaagtctc

SEQ ID NO: 48071 - DNA, 205 bp, Glycine max
ccacatggaatatctaagctttgattccgttgataaatcagaaaccagtgaagattcgtatttccaatcaattactactgaattccttaattcattgaacacatccggtttgccaactcattctatcaaacttaaaattggaagtcctataatgttgttaaggaacctcgaccaaaatcaaggtctatgtaatggtactagatta

SEQ ID NO: 48072 - DNA, 239 bp, Glycine max
ggaagaacatgggaccgattggcgtgtggctataatgcaggtaatgatatggagaatgcagttcaggcaatgaagaaagcagtctcgacaaatctagcaggaaggaggccagacccctttactctggttgcatgtgttaaatacctgaaagaaaaaggagacttggatttagcccttgagattcttaagttatgcatagagaacagccatatctcagtcacttcctatgatggactggt

SEQ ID NO: 48073 - DNA, 252 bp, Glycine max
ggaaattgaattcacacaagagatggcttctcctcttcttactccttacaagatgggcaaattcaatctgtcccatagagttgttttggcaccgctgaccagacagaggtcttacgacaacgtcccacaaccccatgccatcctctataactcccagagatttccaagggggggccttctaattactgacccgggggttttaaaaggggaaagggtttcgaaaccccccggaaaggcgaagaactttttttt

SEQ ID NO: 48074 - DNA, 276 bp, Glycine max
tcttgaaggaaatcaaaggtggagttgttttggaaagccaggctgtctttattacaagcaggaaatcagtgatccaacggaaaggagtacttgaaacaacacatgagatgcttgagagattggaagcacatctcagggccattgggcagttcacggttactgcaaacatgaggggaagcagtgcagaggaagtggctgagagaatactgagtcaaccatcattaatgggtttgcagggacccactgtaagtcctgttttctgcaagcgtgatggga

SEQ ID NO: 48075 - DNA, 249 bp, Glycine max
gggacggaaacaataagaagaggctataccagtactcaaaatatcctaccagcattgctgcactgtcgtttagcagagatggacgcctcttggctgttgcatcaagttacacattcgaagaagggcctaaagcaggaactaaagccgacgaacaagatgctatctacgtacgcagtgtaaacgagattgaggtcaagccgaagctcaaagtatatcccaatcctccagcttgattcctgatggtggcct

SEQ ID NO: 48076 - DNA, 250 bp, Glycine max
tggataatcgaatttatttgtataacactcttcaacttgaaaaaggggctttaaaatctttttctgggtgccgaattgaatcattttttgtaaagtctgcaattagccctgatgcatcgaacatagtcagtggttctagtgatggaaatgcctatgtttggaaggttgacaaacctctggaagatcctactattttgaaaggtcatgatggcgaagttacagcagttgactggtgtagctctgaaattgg

SEQ ID NO: 48077 - DNA, 222 bp, Glycine max
gtcgtaagaggaagagagagtctaagacagaaatgctaagttggattactagcattgctaaaaatccttgtgattccacagtcggttcgattcctgaaaagtctaagtggaagttttacagtagtctggagatctggaagcaggttttgttgtttcgagaagctgtctttctgaagaaagattttgagacaaccagtgaacagcttaattggcagggacaga

SEQ ID NO: 48078 - DNA, 260 bp, Glycine max
gactaaagtgttagatataatggattattattttagtgaaaaaggctttgcagtttgcaggattgatggtagtgtgaaactggaagagaggaaacaacagatccaggacttcaatgatgtaaatagcaattgtagagtttttcttctttctactagggctggtgggttgggaatcaatctcactgtagctgatacatgcattctttatgacagtgactggaatcctcaaatggatttacaagccatggatagatgtcata

SEQ ID NO: 48079 - DNA, 241 bp, Glycine max
ggatacagaaaagaaaaaggaaaccctagctggataggtcaaacatcatcatgtcggacgaagagcaccatttcgagtccaaggcagacgccggtgcctccaaaacctaccctcagcaagccggtaccattcgcaagaacggctacatcgtcatcaaaggacgcccctgcaaggttgtggaagtttcgacttccaaaactggaaagcacggtcacgccaagtgccactttgttggaattga

SEQ ID NO: 48080 - DNA, 269 bp, Glycine max
gcagcatatatattagatcatccaaaagctgggccacggttggtgacaggtgaagcactaggctttgctggggttcccccaactgttatggtccagtgcttacaccaagcctttaaccacccagatgggtttgattactcctcaaagcattccaaggtggggtccctgcagatgtttatgatcaatgatggtaactgtgaggaccttggaccaggggctttttctgcggaggaggtgcataagatcaccgtgcttgatctaagaatggc

SEQ ID NO: 48081 - DNA, 216 bp, Glycine max
gagtgaatacaagccaaaagaacatcatggacattgatctatctcctcagtttcccaataaagtttactgtgccaattgtggctcctactacgcatggtccccctccgagcttcccatgctccaccaaagctacatttgtgccgccaagcttgctctcaacataaacgcctttagcccttcctcgttactcggactcgtcaaagtcgcttatgttc

SEQ ID NO: 48082 - DNA, 258 bp, Glycine max
gaagcaggaaggttaaggtcaaaaaagtccctaatttctggtgctgcttcctcaagtacaattgtttgactttgaaaatttcttgcactctcagacccaccagccaagtgatgagatctcttgtggccacccaaggcttggccagatggaaaaacctttgtggcaaattggacactcgtgccctttcaccttcttggaatctctcactgtttcaacctcattgtcaaattgagcagcagtagtagcagtagtaacatt

SEQ ID NO: 48083 - DNA, 152 bp, Glycine max
gttccaaggggttaagcgttttcagtgtgttattcttctcagcactgtcactgagtcgttgtcttgctgaggataatggacttgtgatgaccttctacatggagtcatcccctaaggctgaagacatcatcgaggatcatatcaagcttctc

SEQ ID NO: 48084 - DNA, 179 bp, Glycine max
tacggctgcgagcgacagaaggggacctcaggtcaggcggggctacccgctgagtttaagcatagcaaaaaaaaaaaaaaaaaaaaaaaaaaaaaaggggcccccgatttgtagcctcctccccccgggatttatttcgggccgggtccttggggggttcccgttttcccctatagggg

SEQ ID NO: 48085 - DNA, 254 bp, Glycine max
gggccaaggggcattacactgagggtgcggaattgattgattccgttctcgatgttgtgcgcaaggaggctgagaactgcgattggcttgcaaaggttttcaagtgtgcaattccctgggggaaggaactggatcaggaatgggaaccttgttgatttctaagatcagggaagagtacccagatagaatgatgcttactttctctgttttcccatctccaaaggtttcagacactgttgtggaaccctacaatg

SEQ ID NO: 48086 - DNA, 276 bp, Glycine max
tgaagacgacagaagggcaactgatgtatttacatccgaggatcaaagggaaaggaggaagaaacgttctgcagtgggtacacctgattacttaaccccagagatacttttggaactggacatgggtttactgctgattggtggtctgttggggtaatttaatttgagttgcttgttggtattccacccttcaatgcagagaaccctcttagcacttgtgaaaacaaacgtaggaatctcagggggtcatattaacccagcagtgacgtttgggct

SEQ ID NO: 48087 - DNA, 270 bp, Glycine max
agtcccagagtctgaagagaatcaatatgtaatgaaatgtattatgagggttcttgctgttgcggatatctctattgatgttgcacgagtttgcggtgaaagggttggctctcttcttgctgaagttttgcagaaatccaaaaaatcccacattcaatcactatctctttgagtcagtagccattcttgttaggcgggcttgtgagggggactcaactcttgtatctgtttgtgaagcaagcctttttcctaggcttgaagtaatattga

SEQ ID NO: 48088 - DNA, 276 bp, Glycine max
ccctccgtacaaaaactactcaaatatcagaaactgatagagaagggaagaagcaaatctgagagaacaaatatgcttagagtgaaatgtacttactcctgaataaatgattctccaaacttcctttttgcatgaactcataaaccagaagcctgtttttactttccaggcattagccattaggtttcaccaaatttacatgctgaagctgtccaagataattcacttcttgctgccagcaaaaagatagtaaaatcagtcatcagtagcaagaaa

SEQ ID NO: 48089 - DNA, 272 bp, Glycine max
tacgggactgtagcataaatgggagtcgctctatctacgtatacattcagacatttgtgcagtttcagctaactgtaaatgttgttgctttgatcgtcaatttctcttctgcttgtttgactggaaatgctcccctcactgcggttcaacttctatgggtcaacatgattatggacactcttggagcacttgcactagccactgaacctcctaacgaggagttgatgacaagaccacctgttggtaggaaaggaaactttatcagtaatgtg

SEQ ID NO: 48090 - DNA, 280 bp, Glycine max
  unsure (1)..(280): unsure at all n locations
agtacatccattttctagctcaattggttaaatagagtgtgcgaattattataaatctctcagtatctgagttcgattcttactgataaaaaaaatagatgttatggctgaggagttcttaccatttttaatttctctgactttgtattcgtggaatgttttagggtccttagagtatcccaaaggatcaaaagcaccaccagggtatttcttcttttcagggtcttatgcaatctcttttggtgtnncacgaaggaaatagcaaggaattcaatggcca

SEQ ID NO: 48091 - DNA, 280 bp, Glycine max
ggcattattacaataatcaaatgcactaaccacactccatcacccccatatataccccctctcctctcacactaattaacacactcatcaaaaaacccttctttctttcaggttcattacttgatcagtgtcaaaagggtagttgcaaattgcaatggctaagcatgatgttgagggtggttccttctcagcaaaggactaccataaccaatcctccagcacctttgattgatgctgaggaactcacacagtggtccttctacagggctttgattgctga

SEQ ID NO: 48092 - DNA, 283 bp, Glycine max
gggtgccagttggtgacatttcatggctagcaatccttcccctcacgggcacatgcatcagcatcagtttgcgttacagggcacagagtcaaagccttgtgacgcagaatcactggtgccggcgacccttttgattaagcacttgccagaagccattcctgacgtcaccctctctcggatcttggccaatttcggcgcttcctcagttcgcccttgctctactggcaggttgagaaattgtgcttttacggatttcaaaaatgagattgtggcatctcaagca

SEQ ID NO: 48093 - DNA, 235 bp, Glycine max
gatgtcgaagaaaatatctgcaagtttgcgaagaaaggtttgaccccgtctcagattggtgtcattctcagagattctcacggtattgctcaggtcaatagcgtcactggcagcaaaatccttcgcatcctcaaagctcacggacttgcgcctgaaattccagaggacctgtaccatttgattaagaaggcagtttcaattaggaagcatcttgagaggaacaggaaggacaagg

SEQ ID NO: 48094 - DNA, 232 bp, Glycine max
gatgtaacagctgtgatgaaagactctggaactgctatgcttggtgtgggtgtttcctccagtaaaaaccgtgcagaagaagctgcagaacaggccactttgactcctttaattggctcatctattcagtcagctactggggtagtgtataacattactggaggaaaagacataactctacaggaagtgaacagagtgtctcaggttgtgactagtttagccgacccttctg

SEQ ID NO: 48095 - DNA, 228 bp, Glycine max
gttgtagcaaatggtatttcagatttacaagctcatactgataacggtgatcatgtctccttttggaatcctttgctatcagggttatcaaaactaacttctgatccaagatcagctatcagaaagagttctttggagatgctttttaacattttgaaggatcatggtcatctattctcccacacattttggaatagcattttctgttctgttattttccctgtatat

SEQ ID NO: 48096 - DNA, 234 bp, Glycine max
ggatgaatttgaaatgactgatataggcagaatagcttatttcctaggtatagaatttgtgacaactaagagtgtcatattccttcaccaaaagaaatatgcaattgatatattgaaaggttcaacatgcttgattgcaattctgctactactccttgtgaaccaggaataaaactgtctactggtgaagacacaaacttggttgattcaacactatataggcaactcattggc

SEQ ID NO: 48097 - DNA, 228 bp, Glycine max
accttcatggtatgttactatgttaattattcttgactttcattcatttgtttttcttaccaaaccaaaccaaacagtgagcttgaatttggattcataatgatgattccagtgttgatgtaaaacatgttttatttttttcgtattgattaggctctttcgaatgggagatacaagagttgcttgcatagggcagtggtgaatagccagacaacaagaaaatctctt

SEQ ID NO: 48098 - DNA, 212 bp, Glycine max
gatctttgcatcctcactggccttgggacatttcttcccttaactgaagctcttctcgggctcggttgcctctcgaaggaatatgatctttgttttggtgcactatgtgatttgactttggcccttcatgattcagtgcttgctatgtaatttgggaacaaaagatagtcatagggcatagattctacataaactggcctagggaaagcaaa

SEQ ID NO: 48099 - DNA, 266 bp, Glycine max
acgatctaaataccgcctacaaaaggccaaagtagagaagttcttgttaatagttgctaacagtttgcttcggtctaggcaatctcagtgggatatgaccaacatcaaaatttttcatgtagtggctgcattccaggtcttctcgtacatatcctttccccgttgatgcaaaggtttcaatagcaaaaaattcaccctcttccatctttgtctgctccccacccttcacaatgggaaccgattttccagcatggatttggtagcga

SEQ ID NO: 48100 - DNA, 233 bp, Glycine max
ggaaaatgtaactaatgaaaattgggtctgatggcactcttttgcagagcttattctaatctcccgtttggttttgtcttgctttaaatttttaatgatttatttaatctttaattttcttttcagttcactatactgggacgttgcttgatggcactaagtttgattccagcagagataggggaactcctttcagtttcacgcttggacaagggcaagttattaaaggatgg

SEQ ID NO: 48101 - DNA, 241 bp, Glycine max
gagggcagcttcaaaaaggcgtgggattcagataacttctatttcgaggccaatcaagccctctgatttcgttgactttgacctcattcttgctatggacaaacagaacagagaggacatatttgaggcctttaagagatggaaagatagacattctttaccggatggcgcacataaaaaggttaagttgatgtgctcgtactgtaagaagcatgatgaaagtgaagttccggatccttat

SEQ ID NO: 48102 - DNA, 177 bp, Glycine max
gtggaactgaatgtaaacatgcactgtgagggctgtgctgagcaactccagaggaagatactacaaatgagaggagttcaaacagcaatgacagagtttaagcacaggaagggtcttgtgacagggatcatggatgccaaccaactagtagattatgtatataggcgcaccaaaaag

SEQ ID NO: 48103 - DNA, 233 bp, Glycine max
ggccattgttgttgctattatcatccgcagctgcttttattcgcaccgcaaacagtgagccatggccgtcggaaagaacaagcgcatctccaaggggaagaagggtggcaagaagaaggcagctgatccctttgccaagaaggattggtatgacattaaggctccttctgtttttcaagtgaaaaatgttggcaaaaccctcgtctctcgtactcagggtaccaagattgctt

SEQ ID NO: 48104 - DNA, 233 bp, Glycine max
gggtgctacgaaaggaggttgatcatgaattttcaataaaaactgaaatgtattcttcctgttcctgggtcgatgcccgagcggttaatggggacggactgtaaattcgttggcaatatgtctacgctggttcaaatccagctcggcccaataatttgccaatccactatgaagttatataacccatttattgttctccggaaatgactgatgtgctctgatacggaagaatc

SEQ ID NO: 48105 - DNA, 172 bp, Glycine max
cgggaagaaaggtagttccgtaccgaatgagagcttcaaactcttctccttcgatttccattgcgaacgctactttttcttcttctttctcttcattttcttcgctcttcgatcttcgtccggggactgctccgaataccaccaccaccactcgccgatggccacgatcgga

SEQ ID NO: 48106 - DNA, 236 bp, Glycine max
gagataaatttggatcgtgaacggagaaatagggaatgggctgaacttactaactgtattgaggaactcgaggttcaaagggataagctccaaaagcagagagaactgttgcatgctgatagaattgaaatttatgctcagactgaagaattgaaaaaactagaagatttgaaagctgtctctgatgataatgctatcactgaaatgcttaaatctgatatggagtctaaccaaaa

SEQ ID NO: 48107 - DNA, 202 bp, Glycine max
gctttggaagaggagtgaagcagcagagggaggagcggcattaaaaatgcagatcttcgtgaaaaccctaacggggaagaccataaccctcgaggtcgaaagcagcgacaccattgacaatgtcaaggctaagattcaagacaaggaaggcatccctccggatcagcagcgtttgattttcgccggaaagcaacttgaagat

SEQ ID NO: 48108 - DNA, 212 bp, Glycine max
gacagctattcctcttaagcttgctactgagtttccacactgcataccttaggtcttccgaattcgaagttaatttgcaagatggctaaggaaaaggctcagatcaacattgtggtggttggtcatgtggaccctgaggaggtaaccaccattaacgagctgaagaaccctgttgtggagaaagaagctccagggcatgccatatgagggcc

SEQ ID NO: 48109 - DNA, 261 bp, Glycine max
ggatttgagaattcttatggattcttcgttgatagaatggaaagaattaggggaagaggcatcgccggaacatgaaaacgaatgggaagatcgaaaagttggacgaagaaagaattgtctggtctcgacgctagagttagccaagcattctctccggagaactatagaaccagaatcggtggctttacgtcctttatcagcttttcgtcccgaattcagaccgattattcaaatcgacgggggtcaactcatgacctctga

SEQ ID NO: 48110 - DNA, 226 bp, Glycine max
cggcacaagtcactttgttgatcgagatacctagaaacagtgtcatgaaaatgaaggtccttgtcttcttcgttgctacaattttggtagcatggcaatgccatgcgtacgatatgttccctctccgactgcacactggctatggtgccggtacccggaagctgaattcgcaagttcgaggcttgctgtgtgaaagcacacaacatcttcggccttgagaccattc

SEQ ID NO: 48111 - DNA, 279 bp, Glycine max
tgaagacgacagaaggggacattttctacgtattgaatctcaagattctaagagagattttgctgctctttgaagaagggtgtttgcttgattttggagatgtcgctgctctcagatctcatcaaccttaacctctcagacactactgagaaggtgatcgcagagtacatatggatcggtggatcaggaatggacctgaggagcaaagcaaggactctcccaggaccagttagcgacccttcaaagcttcccaagtggaactatgatggttccagcaca

SEQ ID NO: 48112 - DNA, 260 bp, Glycine max
gtttgatttctgggtattttagttgtggaagaattgaggaagctttgcacttgtttgatcaagtgcctgagagaaacgtggtgttctggacttcagtggttttgggttttgcttgcaatgcattgatggatcatgctcggaggtttttctatctcatgcctgaaaagaatatcatagcttggacagctatggtcaaggcatatcttgacaatggctacttcagtgaggcttataagctcttccgtgaaatgcctgaaaga

SEQ ID NO: 48113 - DNA, 277 bp, Glycine max
cggtcgattcgagcgaatcggtcgagcggctcgagagtatagtatcaacatggccaagttcttcaaccaaattcgaggtacgagactgtgctgaccggtcagcttcctcataatacatgtgcaaatcctggttgatgaaaatgctttgaagaactttcacaacttcaatggaaacgtacaaagaaattggaatcaagtaactatacaacataagtgcagtcaggaagtgcagcatggctgcgactggtgctttctttggatcaaagtaaattgtggt

SEQ ID NO: 48114 - DNA, 244 bp, Glycine max
gggaaactcgcctgaggattgctgttggagcagccgaagggcttgcatatctccatcatgactgcaatccacgaatagttcacagagacatcaagtcttcaaatattctgttggatgagaactttgaggcgcatctttctgactttggcacggcaaaatgtatctcaacagcaaaaactcacgcatcaacttatgtccttggagctataggctatattgaccctgagtatgcccgaacatctag

SEQ ID NO: 48115 - DNA, 238 bp, Glycine max
acacacgtgttatatgtggtgaaatagttaactgatgtaaaatcaataatccgaaatgatgaccatactttttgtcccaactgagatttaattctttaagtaatcaagatagaagtgcattttcttagctactaggtttactagatatttatagtttgtcagattttaagggtgtgataagaattacaacttggctgtgacagttatgctaatgacaaataaatgctaatgagatatc

SEQ ID NO: 48116 - DNA, 237 bp, Glycine max
gaggaaataaacagcttccatttctttgcggtcttcctttccttgagagaagagcatctgaaacggcacatttagttgcagggagatctgggaagcatctcttcctcatggacaatgatgatggaaagcgtcctctgctcgtgcgaatggttaatgactctgatgatttaaagtttatgttagtattaaagtatcagttaagctcatcaaatgctagtatttgtttttgtattgttg

SEQ ID NO: 48117 - DNA, 234 bp, Glycine max
tatacttacgccatatcaatgacacgttccttctcttgaggagccaaagccataacaggcagaaaagagcttgcactttgcagctacaaacagttaaagaactagttgtaagtgcatcatacaatattaaatgaaatgcaatagtaaaaagcccgcctaccatgtagaaaccagccatatactccggagtggcaccaataggcacttgagaatcatacacaacaagtccaacct

SEQ ID NO: 48118 - DNA, 256 bp, Glycine max
gggtgttggttcttcttttgctatctcaatctcaatggcttctaagatcttctatctattatctctcctcttgctagcacaccttcttcagccacacgtatttgttaaaggagatggcagtttgatagagaaaacctgcaagaacaccaagtactacaatctgtgtttctcctccctgaaatccaatccaagcagcgcaaacgcggacccaaagggcttggctgtgatcatggttgggattggaatggccaatgcc

SEQ ID NO: 48119 - DNA, 225 bp, Glycine max
tggaaatagaagagaaaattaacaaaatcaaatggtgccaaacagccaatggtgctttgttccttctatccacaaatgataaaaccatcaaattttggaaggtaaccagccatgagaccagtttgatggctcgatgccgtagagtatatgcccatgctcatgattatcatattaattctatttcaaataacagcgatggcgaaacttccatatcagctgatgatt

SEQ ID NO: 48120 - DNA, 276 bp, Glycine max
acgacagaagggggaaaaagggagtgcctgataacccataaccgaccgcaccaccgttttcctttgctttgcgttctacaatgtcgaaaacctcagagattattacatgcaaaggaaaacctgtgactgtggaagagatacaagtagaccctcccaaagccaccgaagttcgagttaagatgctttgtgccagtatatgctccacagacatctctagcacaaaaggattcccacataccaattttcctatagcacttggacacgaaggagttggta

SEQ ID NO: 48121 - DNA, 272 bp, Glycine max
ggctgcgagacgacagaagggggggatttgtcaggtagttggggatgatctcttgatgtcaaatgcaaaacgcattgagagagcaataactgagtctgcttgtaatgcccttcttctgaaggtcaaccaagttggaactattacagaggtcattgaagtggtgaagctggcaaaagaagcacattggggggtggtaacgtctcatagatgttgagaaactatagactctttcattgctgatttatctgttggccttgcttctggtgtaatta

SEQ ID NO: 48122 - DNA, 244 bp, Glycine max
actcatgcggttgttgagccattcgtcatagcaacaaacaggcatctgagcgtggttcaccctatttacgaacttttgtttcctcactatcgtgacaccatgaacattaattcacttgcccgcaaatccttggtcaatgcagacggtattatagagaaaacattcttgtggggtaggtactctttggaaatgtctgctgttatttacaaggactgggttttcactgatcaagcattgcctaatg

SEQ ID NO: 48123 - DNA, 234 bp, Glycine max
ggtgacactgacatcactgaagatcatctaatgctctctcatctggttttgtgtgaaaaaattagccgtaatacttttaaagtgtatcctagaaagggcgaaacttgggccctttttaaaaattgggatattaaatggtacatggatgtgaaatctcatcagctctatgaatatgagtttgttgaaatcttgacagattatgttgaaggtaagggtgtatatgttgcatacatg

SEQ ID NO: 48124 - DNA, 224 bp, Glycine max
ggggggatcattgaaatttgttgatctttctgctaacaacttctcaagtggaattgaggaaattggtggagggcaatgtggtattcagtttctgaatttgtctcataaccttctgaaaggtaggttaccaaattcaattggaaaacagaattcacttaaaagtttggatttgagcttcaatgaattaggctccaacttgccagaggtgctgggaaatttaacct

SEQ ID NO: 48125 - DNA, 232 bp, Glycine max
ggcacaagtgagtttgttgatcgagataactagaaacagtgtgatgaaaatgaaggtccttgttttcttcgttgctacaattttggtagcatggcaataccatgcgtacgatatgtcccctcttcgaatgaacactggctttgagggccgtaatccgggagttaaatgcgcaaattggatggcttctgttggagcatgacacatccttgggtttgataccattcctgaagag

SEQ ID NO: 48126 - DNA, 262 bp, Glycine max
tagtccattttcattgcaatcagggcaacgctggaatccatactcacccacctcaccatcataatcttcttcttcatcaccttcatagtagattttacaacttccataacaagtttcacaaggcataaacctcacatccccacatgcctcgcatagtccatcgccatcaataccatcttcaatctttccacaacaatcaagcaatttctcaagtttcccctcctcatgcagttgctgaatttgctcagctccaccaatgtag

SEQ ID NO: 48127 - DNA, 254 bp, Glycine max
agcaatggagacagagaaatggctgcagcattttatgctgctggttttgaaccatgagatattaccatgtcagaccttcttaatggaaagatctctttgctagacttccggggaattgtgtttgttggtggatttagctatgctgacgtgcttgattctgcaaaaggttggtctgctagcataagattcaacgagtccgttttacaacagtttcaggagttttacaagcgtccagacactttcagtcttggtgt

SEQ ID NO: 48128 - DNA, 249 bp, Glycine max
ggtggtaatgagtggtgaagatgggcaaagcaccttgttgtgagaaacatggggtcagaaggggagcttggacacccgaagaagaccaagctttggttgactacatccagaaacatggccatggaagttggcgttcactccccaaacatgcaggtctcctaagatgtggaaaaagttgtcggcttcggtggataaactatcttcgcccaggcatcaagcgtggcccatttactagtgaagaagaaagta

SEQ ID NO: 48129 - DNA, 246 bp, Glycine max
ggacactgaggtttggatctttgcctgtttgggtttgtggactgccaaataagcgtttgtatatattattctcacggagtttgtgtgtgaggcagcagcacacggcacacacaaagaacaaaagtcaaagacagagagaaacaatgtcttccccaagcaaacgccgagacatggacttgatgaagctgatgatgagtgattacaaggtggagacggtcaacgatggcatgcaagagttctttgtgg

SEQ ID NO: 48130 - DNA, 229 bp, Glycine max
ggcagaagacgagtgtttcgcttagataatactaagtctttcggaatagtgatgcaatggcttcaagtcaggaggaggtgacccttttgggagctactggaagcccatttgtgtgcagggttcataatgccctaaagttgaagggagttcaataccaatatggtgaaggaaatttgaagaacaagaatgaaatggttctcaaatccaaccccagtccacaagaaaggtc

SEQ ID NO: 48131 - DNA, 261 bp, Glycine max
cagcattctccacagtttgtatactgtaggatttattggtattcgtgaggcaaacatctcatcctaatcatgtgacttgacagactactctagaatgaaggtcgtgataattcgatactacaattagcacatagcatccagcgtacgctaatccctctcagatgacactggcatagtgccgtatccggaggtgaatgcgcagttggagcttctgtgaacacacactctttggcttgagacattctgaaagtgcgtgagcac

SEQ ID NO: 48132 - DNA, 251 bp, Glycine max
agaaggcagagttggtttatgcgagaaagaaacaactcaacaaattaagggtgaaagctgaaaaggttgctgaagagaggctcggttcccaacttgatgttcttgctgctgttaagtactgagtaatctgtgtttttaaatttttgatgcctacttattaccaaattgaactacatttcaatcttgcttaaggagatcgtatttgttattggatcataaatttgatatctgataatcttgacagatgtttt

SEQ ID NO: 48133 - DNA, 228 bp, Glycine max
ggatgcaaaagtacagtagtagtgaagaaaatgaaagtccttgttttctttgttgctatagttctagcagcatggcattgccatggctcagaccatgaccatgaccatggccacacctaccaaattttccctctgagaatgaaaactggccatggtggccactacattccggaggtatcatgccaaagttggaggcttggtgtggaagcacacaacgtcattgactgg

SEQ ID NO: 48134 - DNA, 253 bp, Glycine max
ggtttggcgtttagtgatgtcataaaccaacattgcccccacagcacccctgtagtatgcactcgtaactgctctgtatctgtttcataaaccattgaaaatgaaatattaggttaaactgaaatttggcatttaatgtacttgtaagtcaaccaaccattcgaaccaccaagcaatgataagaaataatcttaattaatcttgtgaagaagcactaactagatataaattgcatgcaagaaaaaatagttct

SEQ ID NO: 48135 - DNA, 242 bp, Glycine max
agacgacagaagggggagaaatctgattcgttcattgccattgccagggttggaaagacctcgttgatgaatcaatacgtgcacaagaagtttagtcagcaatataaggctaccattggggctgattttgtcaccaaagagcttcagattgatgacagacttgtcactctacaagtgggtttcgtttcctgtttcaacgatatgggacactgctgggcaagagagattcaagattctcgggg

SEQ ID NO: 48136 - DNA, 202 bp, Glycine max
ggcagcgcttgagaccaagccccactcaaccaccacaccactctctctgctcttcttctacctttcaagtttttaaagtattaagatggcagagacattcctatttacctcagagtcagtgaacgagggacaccctgacaagctctgcgaccaaatctccgatgctgtcctcgacgcttgccttgaacaggacccagacagc

SEQ ID NO: 48137 - DNA, 179 bp, Glycine max
  unsure (1)..(179): unsure at all n locations
atttagggggcacaagtgaagttnntgttgatcgagataactgcagaaacagtgtgatgacaaatgaagagtcccttgtttttcttcggttgctacaaattttgggtagcatgggcaatgcaatgcggtacgatatgtttcctctccgaatgaacactggctatggtgcccgtacttcg

SEQ ID NO: 48138 - DNA, 173 bp, Glycine max
  unsure (1)..(173): unsure at all n locations
ggggggcatcgtttgttatagttgaaccatctaagtttaaggtagttggagaaaagactactgcaggacaggagctagccactgccctgcaaatcagagcacttcagagggttactagattgagtcgttgcagcgtggagcttntgaagaaggagatgagcgaacgtgatgtg

SEQ ID NO: 48139 - DNA, 122 bp, Glycine max
gatgcgaataaccaatgagcctactgcatcagccattgcttatggtctggatcagacagggacaagtgttcgcgagacaaatggggagctttctgagcctggtggtgagacacttgatgttt

SEQ ID NO: 48140 - DNA, 238 bp, Glycine max
tctctatcatagctgaagctgatcttcagaaactaaacaatgcattgaaaatactttctgaaactgagaagcagttaagaaattcgaagaatcaaacaacatggttcattgtagctctcctacagttaagctctgtagattgtcaatctgtggatgcaaatgataccaagttgagtcttagaggtgcatgcaatggaggtgagcttgatttgatctctttgtttattacattattttc

SEQ ID NO: 48141 - DNA, 222 bp, Glycine max
gaaaacggtcctgttactgatgttgatccaattggcaattctcctgtaatcattaagaagtctttgatggaggaaatagcttccacatgggtaaatgtttcattgagaatgaaagatgatcaagagactgataaagcttttggatgggtgcttgaaatgtatgcttatgctgtggcatctgcattgcatggtgtaaagcataatcttcgcaaagactttatg

SEQ ID NO: 48142 - DNA, 235 bp, Glycine max
gatgagaacatgttcaggttcaactattccaaggaatttctaagttgggctttgcgggttcctggctattaccagagttggcacattggcgtgagagccaagacatcgaagaagttggttgctttcatcagtggcatccccgccaggatcagggttaatgaggaggttgtgaagatggctgagatcaatttcttgtgtgttcataagaagctcaggtcaaagagacttgcgcctg

SEQ ID NO: 48143 - DNA, 257 bp, Glycine max
  unsure (1)..(257): unsure at all n locations
ggaacaaaacaagtgtttcgaatagattatcctaagtctttgggaatagtgctgcaatggcttcaagtcaggaggaggtgacccttttgggagctactggaagcccatttgtgtgcagggttcatattgccctcaagttgaagggagttcaatacaaatatgtcgaagnaaatttgagggaccagagtgaactgcttcttcaaatcaaccccagttcacaaagaaggttcagtgtttattcaaatgagaagccatag

SEQ ID NO: 48144 - DNA, 245 bp, Glycine max
tacggctgcgagaagacgacagaagggtacggctgcgagaagacgacagaagggttcagatggtatttcaggcttccagaagaaggtatttgacctcttgtacgagattgcagatattcccttcttgagcgagcacaaatctaagattatcgatctcattgagaaagctgagaaacagccaaatctcacaattggaaattcttgtagctgttgtggttgtcttcgtgtcatcctacttcagactc

SEQ ID NO: 48145 - DNA, 193 bp, Glycine max
ctgttggttctcttctcagggactccaaaaaatctttacacttgcaaatttcctttggcgatgattctgtgggagctggaggtaaagtgaatttttctgtcacttgctattttgcacagcagtttgaatcacttagaaaaaaatgctgccccaatgaggttgattttgtgcgatccatgagccgttgccggag

SEQ ID NO: 48146 - DNA, 262 bp, Glycine max
aaagtcctgggtaccgacggtttcggccgcagtgacagccgcaagaagctgcgtcacttcttcgaagtcgaccgtcatttcgtggtgttggcagccctggaagccttggctgaccgtggtgagatcgaacccaaggtggtggcggacgccatcgtcaagttcgggatcaacccggaaaaacgcaacccactggactgctgaggagacaccctgtgagcgaactcattcgcgtacctgacatcggcagcggtgaaggtgaagt

SEQ ID NO: 48147 - DNA, 266 bp, Glycine max
gagaagacgaccgaagggggagcgaagaagatattagggtttttgagtgcggtgcggcgatcctagcactctcttctgcagctttcgccgacagcttcattcaccatggctgagcaaaccgagaaggcttttttgaaacaaccaaaagtgtttctcagctcgaagaaaactgggaagggaaagagacccggaaagggtgggaacgcttttggaaatccattgggcttggatttaagactcccagggaagccatcgaaggaacctac

SEQ ID NO: 48148 - DNA, 188 bp, Glycine max
gggactcccaagagttgctagaattcaagccaacattaggtgcaggaggcatcatcgatgtgcctggagctgccaacagcatcgagatcgaccatctcgctcgctttgctgtaagaggaacaatcccatagagaaggttcgattgctggcccaaaatgtgctgattcccagattgaattgaagagtga

SEQ ID NO: 48149 - DNA, 266 bp, Glycine max
gtgggtaaacggtaacagcattggtaggtattggtcaagctaccttgcagatgagaatggttgctctccaaaatgtgattatcgtggtccatacacttctaacaagtgcttgtcaatgtgtgcacaaccttctcaaagatggtaatcaaatcaatttcttcaccaaattaattttagaattgtgttattttggtataaaaacccattagcattttatattttgttgtattacaataattaggtaccatgttccacgctcatttctt

SEQ ID NO: 48150 - DNA, 236 bp, Glycine max
acaggaagtatattaatgagataaacttctgtatgaaaagcatgatcccagtaagaaagaggcatggaagcctgtgacaaaagagtcaaacccatttcaacaatgtgcttgtgttgtctgtccactacaccatttggatggtgagtatgaggacagataagcctatgatgaatgcctatttgatcaagatattgagtaaaaggtctatactcaccccccaatcagtttgaatactt

SEQ ID NO: 48151 - DNA, 233 bp, Glycine max
aatagacgacagaaggggacaccaacaccaaaacaaacccattaagatggccttcctttgtaacccttccaatgcttgttccttgaagccctaatcctcttgcttcaagggcttgctacttaattccaaccaatttaagaagccaacaatgtacaagccttcaatgtacaagccaccagtgtacaaaccaccggtttattaagcaaaaccaccggtttacaagccggaaccac

SEQ ID NO: 48152 - DNA, 104 bp, Glycine max
gaagggagaattaggtttttagggtttacaccgagcagcgacacctccctcccgcagtagccatggttctcaaaactgaactatgccgattcagtggtgccaag

SEQ ID NO: 48153 - DNA, 224 bp, Glycine max
acggctgcggacgacagaagggcaagaaagtacaagtgaagcagtgaatgcatactatgcagcagcattgctgggtctagcatatggtgactcaagtcttgttgacactggatcaacgctggtggcgttggagattcttgctgcacaaacctggtggcatgtgaaagcagaagacaacttgtatgaagaggaatttgcaaaagatagcagtatagtgggtgttc

SEQ ID NO: 48154 - DNA, 148 bp, Glycine max
agacgacagaaggggggacgaaagagccaaaatcccagacccaagtgctgtgaagcccgatgactgggatgaggatgcacccatggaaatcttagatgaagaagcagagaaacctgaaggatggttggatgatgagccagaggaaatt

SEQ ID NO: 48155 - DNA, 197 bp, Glycine max
acatacatgttaattgcattttgcttttcagcatccatgtaagcattgctataatagcgttgaagagtcctaaaaaactcttgggactgtgttgcagctttccattgccccctcctctcagagaatatctacatggcaagtagcaacagaagttagagaggaccatatgttattataccaatgtacaaatcaattaa

SEQ ID NO: 48156 - DNA, 245 bp, Glycine max
caattcccttatgttatcaaacataaaaagggaaaaggtaatattgtagccgatgctctttcttggcgtcatgcattactttctatgcttgaaacaaaattgattggtcttgaatgtttgaaaagcatgtatgaaaatgatgaaaattttggagaaatttttaaaaattgtgaaaaattttcagaaaatggtttctttagacatgaaggctttcttttcaaagaaaacaaattgtgtgtgcctaa

SEQ ID NO: 48157 - DNA, 205 bp, Glycine max
aggaacagtaagtgacaggcgactgagccctggtggattgcctcgaaagaaatttttagttcatcgcgaccggattttggaatctgctgcacaaatgatggacctgcatgccagtaataaagtggttcttgaggtggaatatgatgaagaagtgggcactggtcttggaccaactttggaattttataccttggtgtgccaggag

SEQ ID NO: 48158 - DNA, 257 bp, Glycine max
tctcgagccgaatcggctcgacgacagaagggggaaacgaagaactcctaactactcaagcattcgtgagaaaactcactattcgtcgctcatggcactctcttctcgtctcttttccaaatccaaattgatctatggcagtcaaatacttctacaaaaggagcatgctattccagttcgtcactttgctaaagagtccgcccctcctgcccttaagggagacgagatgctgaagaacattttgtgggagtgaaaga

SEQ ID NO: 48159 - DNA, 270 bp, Glycine max
gaatacgaccgaagggagagtacagaggaaaagccatagaaaggttgaacttctctctccgattccaaagccacccgcggaggaggcgaaaaaaccccaggaggaagaaaagcccaaaccagaggagaataaacaagagcctcaggttataacggttgttcttaaagttcacatgcattgcgaagcttgcgcccaggaaatcaagagacgcatcgagaaaatgaaaggggtggaatcagcggaaccggatctaaagaaatcggaggtgag

SEQ ID NO: 48160 - DNA, 206 bp, Glycine max
gcgagaagacgacataaggggagagaacacatatacaagtttgacctggtaatcagtgatgtacacatgccagacatggatggatttaagctgcttgagctagtgggacttgagatggatcttcctgtcataatgttatctgcaaatggtgatacgaagatggtgatcaaggggatttctcatggggcctgtgattatctgctgaa

SEQ ID NO: 48161 - DNA, 300 bp, Glycine max
ttattagtgagactagtacatgagactaacaacagtaaatcagttattagaaattatataggaatactgaaaatttctatttatgatattatgtgtgtggtttcacttgcaggagctcacacatttggcaaagcaaggtgtactagtttcagagatcgcatatacaatcaaaccaacattgatagaaaatctgcattggccaggcagaggaggtgtcctaggactaatggcacaggtgacaacaatctagcaaatctagacttcagaactccaaatcattttggacaacaactacttcaa

SEQ ID NO: 48162 - DNA, 272 bp, Glycine max
tcgccaggaaagcatggttggtctattaatgagtttggtgatctgactagaggtgcagcaagcactggtaaaatgttcaatccggtaaatgaggaaaacagtaaggagccactgggcgacctgggaacactagaagctaacgaaaagggtgaggccttctatagtggggtcaaagaaaagctgagggtggctgatcttattggacgatctgtggtggtatatgcaactgaagataaatcagaacatggtataactgctgcagtaattgccag

SEQ ID NO: 48163 - DNA, 258 bp, Glycine max
ggcacaacctcaaacatgattcctatacacaatactcagacttagggagtaatggtgcaatggcttcaagtcacgatgaggtgacccttttcggagctactggaagcccatttgtgtgcagggttcatattgccctcaagttgaagggacttcaatagcaaatatgtcgaagaaaatttgaggaacaagagtgaactgcttctcaaatccaacccagttcacaagaaggttccagtgtttattcacaatgagaagccc

SEQ ID NO: 48164 - DNA, 131 bp, Glycine max
gggactgaggctgccattattccaattgggatatggggcatcgttgcttgcagggcgctttcgcagaggaatgatgacccaaaactgctcccaggccgtgggataaggatcgtgatggctttagtatgggc

SEQ ID NO: 48165 - DNA, 288 bp, Glycine max
taggctggtctacggaaccagagattctgggtacggtccccagtggagtcgtttcatatttttgtaatttacaatccctgcacaagtttgttcaactgagatatcattatcaaggttatctgatttttattttttaaccacatatctctctttaaaaatcatatactataaaacagccatcaagaatctaagtgtagagatgctatttatttacaactttgattacaaagtcacaagtgacctgtgctatatatcgtccaggtgtcattggagacaccagaaattttt

SEQ ID NO: 48166 - DNA, 289 bp, Glycine max
tatggaaaggaattacttgctgaatctgatgaaaactctgaggcattagctcttatcattgatgggaagtctctcacttatgcactagaagatgatgtaaaggacttatttcttacacttgctgctggctgtgcatctgtcgtatgctgtcgttcatctcccaagcagaaagcacttgttactagattggtaaaggttaaaactggcagtacaactctagcaattggtgatggagcaaatgatgttggaatgcttcaagaagcagacattgggatcggtatcagtggtg

SEQ ID NO: 48167 - DNA, 261 bp, Glycine max
cacaacattaaggcatggacagaaatatatttgctgagtttgtgtgatgcattggttacaagcccgaagtctacttttgggtatgttgctcatagtcttggaggtttgaagccatggattttgcagagggcgtatggggaaaccatcccagatccaccttgtcgtcgagctaagtccatggagccttgtttccattatcctcccaagtatgactgtagggccaatagcacagttgattttacttccatttttcatcatatg

SEQ ID NO: 48168 - DNA, 258 bp, Glycine max
tacggctgcgagaagacgacagctgggtacggctgcgataagacgacagaagggggaacaagagtgacgatcgaagagaatggctcccaagggtttaatctttttggctgtgttaatgcttctcagcactgtcactgagtcgttgtcttgcggaggataatggacttgttatgaacttctacaaggaatcatgccctcaggctgaagacatcatcacgtaacaagtcaagcttctctacaagcgccacaagaacactg

SEQ ID NO: 48169 - DNA, 226 bp, Glycine max
acagggtcacttatgaagagagactcaagaaaggattcttcaaatggaggactctctgatgcaccagatgtttctgatgttcgtagcagcatgattggagaaattgagaaccgttcatcgcatttgcttgctataaaggcagatattgaaactcagggagaattcgtgaattcattgataagagaggtgaacgatgcagtttatcagaacatagaagatgtagtgg

SEQ ID NO: 48170 - DNA, 220 bp, Glycine max
attgaaactgtttgtagaaatgaggaaaaaaaatttgagtcctactgatcatactttatgtaccattttaaatgcttgcagcagccctgcagtgctccttcaaggaagacaaatgcactctcttgtcattaaaatgggttcagaaaggaatgtgtttgttcccagtgctttgattgacatgtattcagagggtggcatatggccgaggcacatgtgtgtt

SEQ ID NO: 48171 - DNA, 255 bp, Glycine max
gattatatttgagttcaaacaaatcaaagccatggccacctccaacttctctattgttctctccgtctccctagccttctttttggtgctacttaccaaggcacactcgaccgataccgtttctttcaccttcaacaagttcaacccagtccaaccaaacattatgctccaaaaagatgctagtatttcatcctctggggtgttacaactcaccaaagttggcagcaacggcgtgcccacctcgggatctctcgg

SEQ ID NO: 48172 - DNA, 278 bp, Glycine max
ggtaattctagttaataaagacagatttatcgttaacaaacatttcttctttgaacagtttgcccaacaactctaaaaaggatatgcagacaacatggaatttcaagatggccatcccgaaagataaataaagtgaatcgttcgttaaagaagatacagactgtgcttgattctgtccagggagtggaaggagggctaaagtttgatccttataccggggggtttatagccggaggatcaatcatgcaggaaacggaagcacataaatatcttgtgtt

SEQ ID NO: 48173 - DNA, 217 bp, Glycine max
ggggggcgcttgttctagctgacagaggaatttgtcttattgatgagtttgacaagatgaatgaccaggatagggtgagcatccatgaagccatggagcagcagagtataagcatatcaaaagctggaattgttacatctcttcaggcacgctgttctgttattgctgcggcaaatcctgttggtggaagatatgattcctcaaaaacattctctca

SEQ ID NO: 48174 - DNA, 233 bp, Glycine max
gagcactataagcataatgcagtacatctattggccgtttttgagactaggctgaaacatatggctatggcagtgcctctaatgtgttgtgcagcaggcatgttgcatgtaccttcacggaagcaagtagtcgtggttggtgaaaagactctggggtctttgaaaacatgcttgctgcagctcatgcatcatatgatgccaacagaacagttattcatatcgatcccaacaac

SEQ ID NO: 48175 - DNA, 224 bp, Glycine max
catgggggtttactgaataatgaaacaaactccaaatattgagacatttttctctgttgttcagatagaatagcagaccacagtaatggggatgttgccattgattcataccaccgctacaaggaagatgtggccatgatgaaggatattggattcaatgcctacaggttctccatctcttggccaaggatactacctcgtggaaacctgcagggaggagttaa

SEQ ID NO: 48176 - DNA, 249 bp, Glycine max
aaagagacccggaaagggtgggaaccgcttttggaaatccattgggcttggatttaagactcccagggaagccatcgaaggaacctacattgacaagaagtgccccttcactggtaatgtttccatccgtggccgtatcttggctggaacatgtcacagtgctaagatgaacaggactattattgttaggaggaattatctccattttatcaagaagtaccagaggtacgagaaaaggcactccaacat

SEQ ID NO: 48177 - DNA, 190 bp, Glycine max
gaatcattgttggctcgtatacaacaattggaacaggagcgtgatgaattacgcaaagatattgaacagttatgcatgcagcaagctgggcctggctatcttgctgtggctacccgaatgcattttcaaaggacagctggattggagcaggagattgagagtttgaaaaagaagttggctgcatgcacaa

SEQ ID NO: 48178 - DNA, 234 bp, Glycine max
gatttgaagccagagaatgtgctgataagagaggacgggcacattatgctttcggattttgatctctgcctcaaatgcgacgtcgttccgaagctgctgagaagcataaccagttcagaaagcagtgtcaagacccgaaggagttcagcaccatcttgtgttgcagcccccatgcactcatgtttctctgcctcaagcaagagaaagaaagtggtcacaacagctatcataggg

SEQ ID NO: 48179 - DNA, 232 bp, Glycine max
gacccgcgaatcagacatggacctagatttgcggaaaagtggccatggcattggcagcaatgcatcactgcaatccaatcttgtgctgtattcttactgtcatagctcttgctcatggcgtattcgatttgctttatccctcaaagggatcccatatgagtacaaagcagtggatctttcaagaggagagcagtacagtccagacttcgagagcttgaatcctctgcactat

SEQ ID NO: 48180 - DNA, 237 bp, Glycine max
cctctaagaaagaaagcacttggctgcaagtgggtgtacaaaataaagcataaagttgatggaagtgtagaagggttcaaagcatggttagtaattcttggcaatcatcaaaatgaggggatcgattacacatagacttttgcaccagttgtaaaaatggtaacagtacgcatagtgttagccgcaacagccacacaagcttgagaattacatcagattgatgtgcataatgcattt

SEQ ID NO: 48181 - DNA, 272 bp, Glycine max
tctcgagccgaatcggctcgagtacggctgaagacgacagaaggaggtctcactcactgtatctccggcctcgcttcttctctcagattcagataccaattcggtttcttctgaaccaaacttggtttgagaaattcggccgttaattttccatggccaacaatccatcacagcttctcccatcagagttgattgaccggtgtataggttcaaaaatttgggtgataatgaagggtgacaaggagcttgttggtactcttagaggctttgat

SEQ ID NO: 48182 - DNA, 246 bp, Glycine max
cacattagatagggatgcttcctctcttatatatattgcagtcttccaattgattctttatccatatcagttgagtacaacaacttgttgctaatttgtactctgcttttacattggacagtgctactaatccttgctttttgctaatccaagtgactaggttttcaccaatgagtggcagcttccactagtgctttttctttcaagtttgtcaccaacatagtcaacatcacagtaactaatcaa

SEQ ID NO: 48183 - DNA, 240 bp, Glycine max
ggagaagacaacagatttccttgaatttggaaagaaatctttatctggaaaagtggaacccttgctcctatctttatatttaaagctcacaccgaacgagtttaatggctttgaagaagtgcagagactgtatgatcaagaaggtggcataaagctgcctatatcgaccactatgggtactgaaaatgtccttaagtttccaacacctcatgtaatccaagctagcacatttgcatggac

SEQ ID NO: 48184 - DNA, 272 bp, Glycine max
ttcgagccgaatcggctcgaggggggatgcagactggttgatagctgttgttgagcaatccggcacccttactcataccagcaatatattccacacaattcctcaggtagaacttgcaaagcgtcttgtggcttcttcttttgctgatcgtgtattctttgcaaattctggaactgaggcaaatgaagcagctatcaaatttgcaagatagtatcagaggcacacaacttctaacgggaaagttccagcaacagagttcatagcttttagta

SEQ ID NO: 48185 - DNA, 246 bp, Glycine max
gatgaggtttatacacaagttactttgcttcctcaagctgagttggaagggatgtatttagagggcaaagaacttgaggaattgggagcagaagaggagggggatgatagatcaccaactaaatcaacccctcacatgttctgcaaaacactaactgcctctgataccagcacacatgggggcttttctgttcctcgccgagctgctgaagactgttttcctcctttggattataagcagcagagg

SEQ ID NO: 48186 - DNA, 240 bp, Glycine max
gacaccgtgcaggcccaatgaggatttgaacatttacgtttttgctctgtttaatgagaacatgaagcccggcccagcttccgaaaggaactatgggctttttaagcccgatgggacccctgcttacccccttggcttccctctggcttctgtgccagtcgtcgccggtaataacaataccggcgtcgcaagcacgccgccgcagccaacgtcaccgacttcttccaccggctatttgtc

SEQ ID NO: 48187 - DNA, 265 bp, Glycine max
tgcgagagacagaaggggacgcaattgaattcaccaaggcacagttacctggggcaatgagtcaggactcgaaggcttggaagcacgccgttgaacaattcaaagctggggaacattctgcagcagggatattggtgaacacttttgaggagttggagaagttgtacgtaagagggtacgagaaagtggaaagaaatttggggtgtataggacctctttctttacaggacatgtttttcttggaaggggctgggatatgtggtaa

SEQ ID NO: 48188 - DNA, 214 bp, Glycine max
tccagctttagagaagccctggatcttgtgaaggaggccattagcagagctggttatgatgagaaaataaagatagctcttgatgttgctgctacagatttttgcataggtaaaagatatgatctggactttcaatctcctcaaaagtctggacagaattttaagtcagcagaggatatgatagacatgtacaaggaactatgctctgaatacc

SEQ ID NO: 48189 - DNA, 209 bp, Glycine max
ggggatattgggctgtataatgtgcattgctggtagtatcattattgttattcatgctcctaaggaacaacctattacatctgttctggaaatatggaatatggccactcaaccagcttttctggcatatgtgggctcagtaatagtgttggttttcattctggtcttccattttgcaccaagatgtgggcatacgaatgtgctagttt

SEQ ID NO: 48190 - DNA, 165 bp, Glycine max
ctggacagagagctgtatacactactggtcaaggggcttctgccgtaggtcttacagctgccgttcataaggatccagtcacaagggactggactcttgacgggggagcacttgttctagctgacaaaggaatttgtcttattgatgagtttgacaagatgaatg

SEQ ID NO: 48191 - DNA, 184 bp, Glycine max
ctggccgtttaaactattaagaagataatttctgattatgctatcttatgcaatgacaattaacaagtcacagggacaatcactatccatggttggattttatttgccgaaacccatattcactcatggccaattatatgttggcgtgtcatgggtcaactcagcaaaaggattaaaaattttg

SEQ ID NO: 48192 - DNA, 191 bp, Glycine max
caggattgctattgattcgatgatccccataagacgtaggcaacgagaattaagtattggtgatatactaacgggaataacagcagtagccacagagactattctcaatcaacagggacctaatgcaatatgcgtttacgtagctgatgctgctgaagcatcttcggtggctcaattggtgaatacctttc

SEQ ID NO: 48193 - DNA, 221 bp, Glycine max
gctgaagcgaaagttgaagttgatctaccaaggtgaggccttcaatgggaaactcaccaagacagcaaggtctcatggcaagaagttccaagtttctatcaaacaagaaacttcaagattactgggaaacctgggctgggcctatatgcaaaagatgaactacacgatggctgaggtggtgtatcggaaagcccaaataattgatccggattgtaacaagg

SEQ ID NO: 48194 - DNA, 259 bp, Glycine max
actcgagccgctcgagccgctcgagccgctcgagtacggctgctacgaagcgtcagcattatcgtttcaatccatcgccaaggggagttccacagatcaatgttgggtttgatgttgatgttgatggcattgtggaaatcactgctagagaaaggagaaaggggctgaagaagaagatcacgatcagcaacaagcatgggaggttgagtcctgaagagatgaggagaatggtgagagatgcagtgaggtataaggcaga

SEQ ID NO: 48195 - DNA, 208 bp, Glycine max
agggggtgggcgaggtatccagatagtgatacaatagagagtgcgttgttgctccttcgccacaactccctgccaacatgggtatctccagagattctatgcacaagaggcgtgccactggtggcaagaagaaggcatggaggaagaagagatagtatgagcttggtcgccagcctgctaacactaagctgtcaagcaacaagacagt

SEQ ID NO: 48196 - DNA, 205 bp, Glycine max
tagtgggtgggcgatgtagccagagagtgatacaatacagagtgcgttgttgctccttcgccacaactccctgccaacatgggtatctccagagattctatgcacaagaggcgtgccactggtggcaagaagaaggcatggaggaagaagagcaagtatgagcttggtcgccagcctgctaacactaagctgtcaagcaacaaga

SEQ ID NO: 48197 - DNA, 223 bp, Glycine max
tagggggagcgaagaagatattagggtttttgagtgcggtgcggcgatcctagcactctcttctgcagctttcgccgacagcctcattcaccatggctgagcaaaccgagaaggcttttttgaaacaaccaaaagtgtttctcagctcgaagaaaactgggaagggatagagacccggaaagggtgggaaccgcttttggacatccattgggcttggatttaa

SEQ ID NO: 48198 - DNA, 228 bp, Glycine max
atcctcctccatacactgaacaaaatatgaagccaaattattggattccgcatttctcactgaggacattggttgttggcctgttaaaagttcagcaagaactacaaaactttagacatcacttttttctgtaaattgactagtgtaaaaatattcgggatccaagtatccaaaggtaccttgaacgactgtggtgagatgagtatcttcaatggaaatcattcgggt

SEQ ID NO: 48199 - DNA, 232 bp, Glycine max
atattagaaatctcaagtgggttgcttgagtactggacgtaggcacgggaagtggccgaactagtataaaattgtgtttgcattctctcttcccttatcttatttattttgttgcaatcaattgtgtcttgcatgtttaaagaacattgttaaattgattgttgttgcttcttctgcattgtaagcctatccctcttaagattattgaggccacaaggtctaactctttggg

SEQ ID NO: 48200 - DNA, 240 bp, Glycine max
caaagagatagaagcaaataaagcattggagatttcaaggcttgtgttatgcattgtgggaatcatcatgggagtagttagtaatgagtactcaaatggatctgttcaaggctgcaatagtttagaggagaagctcgatgatcttcgtggcctacttggcaaggctgatggtgatcctttgagaattgtgagtgttggtgctggtgcttggggcagtgtttttgctgctttgctgcaaga

SEQ ID NO: 48201 - DNA, 218 bp, Glycine max
ttcttaaaagatataagatggaagaatgcaacctagctaagagtccaattgattttggattaaagctaggtgctggtcttgatgaaaagccagtggatgccacattgttcaagcaaatggtgggaagcttgagatatataagccatagtaggccagatattgcttatggtgtaggtctggtaagcagatatatgaatgatccaaggacttctcatatg

SEQ ID NO: 48202 - DNA, 220 bp, Glycine max
ttggggaagctggaaacgttagaagtagtgaagaaactgaaagtcattgttttcttcgttgctataataattttaggtgcagaatggcaatgcaatgggtcagagcatgagcttgagcagggcaacagctaccaaatttcccctggggaaatgaaaacggcccccggtggcaaatacatccgggaggtatcgtgcaaaagttggaggcttggtgtggaag

SEQ ID NO: 48203 - DNA, 234 bp, Glycine max
gggaaaggaaggatgttgcagatcttgatatggtgcataaaatagcacaaactgcacactgtattgcacaggggaaagttggcagtgggtttgatgtcagttcagctgtgtatggcagtcagcgctatgtgcggttttcaccagaagtgatttcttccactaaggtaggagatatagcagtgcctttgccagatagtatcactgaaattataaaaggaaattgggaccaggaca

SEQ ID NO: 48204 - DNA, 279 bp, Glycine max
gcagaagacgacagaagggggtaccaaagctgaatagccattcgtattgtcgcagagaaagaaaaccctagctcaccgtttcaagatgcaaatcttcgttaagaccctcactggtaagaccatcactcccgaagtcgagagttcagataccatagacaatgtaaaggccaaaattcaagacaaggaagggatcccaccagatcagcaacggctcatttttgctggcaagcagcttgaggatggacgtacccttgctgattataacatccaaaaggagtc

SEQ ID NO: 48205 - DNA, 273 bp, Glycine max
actacaactgagttgtacaatgtctgtatcttcccaacctcagatattcgtggagaagcagttgactttgataatcttttcatggcagccatttctgatgccttagatatacataggtctcttaatgcctgcttcaaagtaacaggctcagaaggtccaatccgtggggaccgagaagcacccactgtagttggttttttgaatgcacttttcatcttagggcttgtaccatcttgtaaaatgcctaaatcccttgatgaagatttaagagta

SEQ ID NO: 48206 - DNA, 217 bp, Glycine max
  unsure (1)..(217): unsure at all n locations
cgggataagaatgaaaatcanaagatnaaagagaaacaaatggcagcactgggtggctttaccgacatcaccggagcacagaacagcatcgatatcgaaaatctcgctcgctttgctgttgatgaacacaacaaaaaagagaatgcagttctggagtttgtgagggtgattagtgcaaagaaacaagtggtttctggcaccttgtactatatcactt

SEQ ID NO: 48207 - DNA, 232 bp, Glycine max
tacataatgaaatctaatgaagaagggaccttctcaaatggagatctcgtaccatttggaaccgttcaaatcgaaccacattctactgttttaaattacggacaaggattatttgagggcatgaaggcctacagaagagcagatggtgaggtgcagatatttcgaccagaacaaaatgctatgcgcatgcagatgggagcagagaggttgctaatggtggcaccttctgttg

SEQ ID NO: 48208 - DNA, 241 bp, Glycine max
gtcatgagacaccaacaactagttgaattggcctggggcctagcaaatagcaagaaaaagttcatgtgggtgattaggcctgatttagttgagggtgaggcctcaattttgccaccagaaattgtagaagaaaccaaagacagaggccttgtggtgggttggtgtcctcaagagcaagttttgaagcacccagcagtggctgggtttttgactcactgtggttggaattccacgcttgaaa

SEQ ID NO: 48209 - DNA, 252 bp, Glycine max
ggaaacagcacaactcaattcttcagtcagatatggatgatgcagttgacagacttacagttggacctaaacgtgttggaatagaattaggttaccaagggcaatgtcgtagagctactactgaattgggacttgcattaacttctcatctgcttcggcgatatgagcatgcaaaagttgaatgctgtgatcgcatctcaatagtacctcgtggtcagacattgtctcaattggtatttcatcgacttgatg

SEQ ID NO: 48210 - DNA, 253 bp, Glycine max
aggatctgtactgttgacatactcaaatattaagctaggagttttagagtgctgatctctgacaatatcaagaagcttgacaatatttgggccaccacaaaggttctgaagtatttttatctctcttttaatctgcaaaatgatgttgaagatctcagaaggtacgacaaaaatctcacaagaactgaatgcagtagtacaagaaacaccatataaccaaaaacaaaatcaaattaacacaagacttcaacca

SEQ ID NO: 48211 - DNA, 251 bp, Glycine max
gggatcgagagtggcccagctcgcaagcaagtagaccacactgagctgtttaagtacaagcaaatggctgaaaagctgaaacaagatgagaaggaaacaaagaaattacaggatagcttgcaaatcatgcaactcaggcttgctgcaagagaacatcattgtagaacccttcaggaaaaggtccgggaacttgagaaccagattgcagaagaaaggaaaaccagactaaagcaagaaagtagatctcttgc

SEQ ID NO: 48212 - DNA, 247 bp, Glycine max
accgaatttaagtttcctcagataaaagcacacccatggcataaggtttttcacaagaagatgccttcagaagcagtggatctagtgtcaaggatgcttcagtattcaccgaatctacgatgcactgctttggaagcatgtgcacaccctttctttgatgatctgcgagaaccaaatgcatgcttgccaaatgggcgaccattgcctccattgttcaacttcactgctcaagaactggcggatgcac

SEQ ID NO: 48213 - DNA, 256 bp, Glycine max
tgggccggtaccacatgcacctgtttatcatgccatgatattatgcataaggaacaaccttaagatttaggcagggagcatataatcataaagtcgtgtggctacctcatccatgaggagcagtccccattctctgtttcttatttcttcaatgatcttttcagattcttcagaccgcttaccaccaaaagcaaccatattatatgttgtcgcaacaactccagcattaccacggaatctctctttgctatcagac

SEQ ID NO: 48214 - DNA, 270 bp, Glycine max
cggaagacgacagaagggggggaacatcgcagcaatcgggcaagatagttcagtgctacgaacctgcaactatgaaatatttgggatatgttcctgcattgacgcatgaggaggtcaaagatcgagtgtcaaaagtaaggaaggcacaaaaaatgtgggcaaagtccagcttcaagcaaagacgcttatttttgcgtatacttttaaagtatataattaaacatcaagcgcttatatgcgaaatatcttcacgtgatactggaaagacaa

SEQ ID NO: 48215 - DNA, 248 bp, Glycine max
agataatggcgaaacggtttcagcctcacaaaagttccgacggtttatgatttatgtacatgccaaaggaatgattgtggatgatgaatatgtaattcttgggtctgccaatataaatcaacgatctttggctggatccagagatactgagatataaatgggtgcatatcaaccccatcatacatggagtcaaaaaaagggacatccacatggtcaggtatatgggtatagaatgtctttgtgggcag

SEQ ID NO: 48216 - DNA, 243 bp, Glycine max
ggctgcgaaacagaaatcgaatcagagacggtggtctggtgtgtgtgggcgcagtgtagagacgaaggtgtggcctgagtattggaatgaaaatggaattgagaaatgtggtgaaggacaagaaattctggatggcatctttccttattgcctgggccgctgctcttcagggtcacatgatgtggttacagcgccaggattccttcaaacataaattcggtaaccccgacgaccatcctcata

SEQ ID NO: 48217 - DNA, 244 bp, Glycine max
catgctcaaacagagaatcccagtatggtggaagtggtacagttgggcaaatccgatttcttggagattgtatggattggtggcttcacaatatggagatataaagcggagcattgaatccactgatgggagtagtacgacagtggaggactttgtaagatgttactttggtttcaggcacgattttctgcgggtggttgcagctgtgattgtggccttccccgtagtctttgcatggatgttt

SEQ ID NO: 48218 - DNA, 248 bp, Glycine max
agggttcaaaagaattcaagatgagcatgataagcacgaagaaagtattatgtaattacaagataaacttggcgtgactagtaaagaaaataagctatgaaagtaagcaagaaattaaaatgcaagaaatgtaaactaggcggatcctaggagtgtttagatgactgcatttaaggttcccaacagaacactcattatccttagggaaaattgcctaaaattatttgacacaaatggaagtttggaaa

SEQ ID NO: 48219 - DNA, 241 bp, Glycine max
gagacacagtccaacgttgtaggtttggtgtttgtcatgtcataagacgaagaaaggcatgggtgatagggtggagacgcttgccagattagcccagtggaaaatcgacaactttggaccttgttcctacaaaaaatctgaccccttcaagctcggaatctggaactgtgaggaataagtacctctacatacatctttttcctgaaccttcgcaggttttgaaggataatccacccttttc

SEQ ID NO: 48220 - DNA, 238 bp, Glycine max
acaagtcaatttctaatataatgtagaagcttcattgttgagttttgagtcattaaatttacaaataaatgaattgtgtgtataaaatggaaaaaaaataatcattaaggatctgtttgtttgctttaatttgataacattagatgtttttgatgaagtttgtgaagtgtgtaaatgggtgcagatgggctgctatagcttcctaccttccacaaaggacagacaatgacataaagaa

SEQ ID NO: 48221 - DNA, 258 bp, Glycine max
tctcgagcgaatcggctcgagcggctcgagacggagaagaagtcagaaggggtagaccaattgcgtatttttattttgatccttatagtcgtcctgctgaaaaaaggcaaggtgcatggatgaatgaagtctttgctcgtagtcgtgtattatcgcgtgatggcacctcagcaagattgcctgttgctcacatggtgtgcaatcaaactcctccagtaggaaacaagccaagtctaatgacattccgtgaggttgaga

SEQ ID NO: 48222 - DNA, 257 bp, Glycine max
tacagacgacagaaggggatgtgaaatttggcaggtaatggatatgttgttgttattatgtgttctcttggttgcattgccaaacctggctgtagtagagagtcgcagggctcctgttctggactactttgagtattgtgctatgagctgcagagcttacagtgcctcattggaagaatttggaggggttggtgatggaacaactttgaacacaaaagcttttcaggcagccatagatcatctgagtcagtatgcat

SEQ ID NO: 48223 - DNA, 122 bp, Glycine max
gaggaatcacgattgcaacggcacatgtggagtatgacactgcacgacgacatcatgctcatgtggactgccccggacacgcggattatgtaaaaaatatgattcccggagctgcccagatg

SEQ ID NO: 48224 - DNA, 232 bp, Glycine max
cagcgcagatagtattgataaatcagatgaattgctcaatcttgctttcgcattattgccacctgaatttttgtattcattgcaaacatcaggtatacctaatcataaattaaaacttaaggtcagatctccaatcatgctaatacgaaatctcgaccagactgatggcctgtgcaatggaactaggctcattatcaccaaactcggatctaatgtgattgaggctgaagta

SEQ ID NO: 48225 - DNA, 228 bp, Glycine max
gaagcacttagtgtgagtgtgaggaggcagactattgaaggtgctagaagaaatcttaataggatgcgtcaggaaattgacaagttcaaggccactgatgcaggtagactccgtgctgaatacaacaggcttgtcgaaggtttggcactaagaggagacctgcctgctactgatgcctggcttgcaaatccggccttgcctgatgatatactaaaggaggctgtacct

SEQ ID NO: 48226 - DNA, 234 bp, Glycine max
ctgcacctaaaagtctagttgaaaggtattatttgtaccttgtgatgagcaaactcaatgtgagaaggatcagagacattctccatgagagtatcgtaaccatagaacagatcacgctgaatgttgaccgtggcaaactccggtttgtcaaagtcatcagacaacctaaacaaacacaaatttaccatccaggtcaataagacacaaaacaaaacactccttagccaacataaa

SEQ ID NO: 48227 - DNA, 199 bp, Glycine max
ggatcattctctcaccgtagcatccatctgatcttaaattgatggcacttccaccctgccacatgtttgcacagttctatgtagctaatggggagctatcatgtcaaatgtatcagcgatctgccgacatgggcctgggtgtcccatttaatattgcatcttatgcactcctgacatgcatgatcgctcatgtttgtga

SEQ ID NO: 48228 - DNA, 236 bp, Glycine max
aattcgtgtgccaggaataggacacagggtaaagaataaggacaacaaagataagagagtagagctactacaaaagtttgcacgcacacatttcccttgcgtgaagtacatggaatatgctattcaagttgaagactacaccctctcaaaggcaaatattttaattcaaacggtgggtggggaattggtatctctttcctgggatcttttggttggcagtggactgtccagcaaac

SEQ ID NO: 48229 - DNA, 203 bp, Glycine max
accctcatttcttggaaatgtaagaagcaggatcgtgtttctaaatcttctactgaggctgaatatcgttcaatgtcttctgcttgttctgaaattgtgtggttacgtagtattttggaggagcttggattttcacagcctaactctacccctctttatgctaataatgcaagtgctattcagattgctgcaaatcccagttt

SEQ ID NO: 48230 - DNA, 250 bp, Glycine max
ggacacacttcatgttcctctacccaacaggagttcccatcagtcttctgttcaggttgtggagaaaaacaaggttgatgctgctcggtttgcccccttttggaatgaggtcataaggaatctaagggaggaggattacgtaaccaacttcgagatggagttgcttttaatgcctaagaattctggggatcttcctttggttcaatggccactttttctacttgcaagcaagatatctttggctagggat

SEQ ID NO: 48231 - DNA, 268 bp, Glycine max
tctcgagccgattcggctcgagacggctgaagacgacagaaggggaaccagggtagctatgaacagaccattagggtcttgaccacaaggagcaggacccaacttgttgcaactttcaaccgctacagagagatccatggcacttccatctctaagaaattggtggatgaaggatctgatgagtttcagagggcattgtacactgccattcgtgccatcaatgatcctattaagtactatgaaaaggtggtgcgcaatgcaatcaaaa

SEQ ID NO: 48232 - DNA, 236 bp, Glycine max
gcctctcagagtggatatatagtgtgtcttgataaccttcaaagctacatttgtaaaacactgataagtctgatccagaacgcaaaatgctacagcttggtggttttttgcaccagcagtgttcctgaatgtgatacttgagctataaatccgtccccaactacagctgcaaaattttatttatagttaagtctctttaagtgtaataaaagtttcttgtcaaatacgcaagatag

SEQ ID NO: 48233 - DNA, 231 bp, Glycine max
  unsure (1)..(231): unsure at all n locations
ggttcaaagcacgccgtgtttcgctgtctctcccatcctttcgcattctcaatacccttttgatttgtgaaaggaaagcaaacatggttgatcaggtccaacaccctacaatcatggacaaagttcctggtcagggccatctgcgnggtggacatagagctggtattagaggtgctgagggagcctaccgcgacccagctatgtgncagagagcctcttttgggaattact

SEQ ID NO: 48234 - DNA, 272 bp, Glycine max
cgacagaaggggggagaagatggccaagagatgaagtgttagcactgataaacctaaggtgcacaagtctaagcagcaatgaagagaaagaaggaaacaagggtcctctgtgggagacaatctcgcaagggatgtcatcgctgggatacaagagaagtgcaaataggtgcaaggagaagtgggagaacataaccaattacttcagaaaaaccaaggataatgttaataagagaaggtcccttaactctaggacatgtccttatttccatcaa

SEQ ID NO: 48235 - DNA, 224 bp, Glycine max
gtacagtgtttggaatccttttcgatccgagttggctgctgtgatcctaggcggagttgacaacatatggtttggacctggagtcagagtcctgtacctaggctctgcttctggaaccactgtatcgcatgtcacggacgttgtggggcctgctggagttgtctatgctgtacagttgtcccatagcagtggacgtgacctggccagtatggcatagcagcgaa

SEQ ID NO: 48236 - DNA, 230 bp, Glycine max
tggccattgttgttgctattatcatccgcagctgcttttattcgcaccgcaaacagtgagccatggccgtcggaaagaacaagcgcatctccaaggggaagaagggtggcaagaagaaggcagttgatccctttgccaagaaggattggtatgacattaacgctccttctgtttttcaagtgaaaaatgttggcaaaaccctcgtctctcgtactcagggtaccaagatt

SEQ ID NO: 48237 - DNA, 281 bp, Glycine max
  unsure (1)..(281): unsure at all n locations
tacgaagacggtaagcctcgattgagactggcacctgatatgatacacgtacgtatgatccaattaaattaatctatatgaaataaattaatctctagataattagatgatatctcttacgataatggattgattgttgctgagagaaattctgctgcgaaaatctctgtccattgtactagcagcaacggtgaaggaccagggtgcaacatttgtgacacttanaggtgctggtccatcatttccagcagagcaaactacgactatgtttctggcaactg

SEQ ID NO: 48238 - DNA, 239 bp, Glycine max
atagaagccatctcactatatcttaaccaaagaagtagtttggcatcaaatgatttctccaaattctgcaactgtggtggaaaacgtgatagtattcgacagaatgccaattattctgcaaaatatgttgaagtgatcaatactcaacagaaacaacttgagggtatgaagtacttttttgaagagacaaaattggaggtcagacaaattcaatcagaatggggaagaagcattgagta

SEQ ID NO: 48239 - DNA, 252 bp, Glycine max
gggagaaggctgatttgatcaaggtcagtgatgcggagcttgagttcctcacaggaagtgacaagattgatgatgaatctgctttgtcattgtggcaccccaatttgaagttgctccttgtcactcttggggaacatggttccagatactacaccaagagtttcaaaggatcggtagatgctttccatgtcaatacagttgatacaactggtgccggtgattcctttgttggtgctttattggccaagattg

SEQ ID NO: 48240 - DNA, 246 bp, Glycine max
gcacgtgtaaaagctaaacatgagaagtttagggagtagggaagcggaaagacctaaatttccctgcgaatctcagagaaatcatggaatttctggtcggggaggtggaggaacacaccgtactcgtcattgttgtctaggttgggcttgcgcttggtgagggacgagctggaggacgagggggcggcgcgtgcagatgtcgttgccgcgggggaggaagtcgcggccaacaaaggcttcgaggac

SEQ ID NO: 48241 - DNA, 265 bp, Glycine max
tttcttttcttccttccctatgactgagaataggcctcaggagaaaaaaagaagattgtaggggtgttctacaaagggaatgagtatgcttcgaatcccaattttgtgggatgtgttgaaagagcattgggtatacgtgagtggttggaatcacagggtcaccagtacatagtcactgatgacaaagaaggacccgattcaggttatatatatatcttgctaacttaattcaactttatataacatcatctatcttgagagtagc

SEQ ID NO: 48242 - DNA, 251 bp, Glycine max
agggttgaccaatatggatgataaatatgatgtctatagaggtgagaggggtggtttggcaggactgcagaacttggggaatacctgcttcatgaacagttctattcaatgtttagtccacactccaccactttctgaatatttcttacaagattacagtgatgaaatcaacatggacaatcctttaggaatgcgctgtgagttagcacttgcaatgggtgacttgttgaggaactgtggtcttcagggcg

SEQ ID NO: 48243 - DNA, 211 bp, Glycine max
atagggattatggactactactcgggactagaaatgaagcaaatggagaatgacatttttgtttctcaagagagctatggaaaggtgttaaagaaatttcaaaagtttgattacaactttctgaacacaccgatggaaggtaacttgatattgtcaaggcttgatggtggaaataaagaagatcctaattcgttaaagagtcttgcaggta

SEQ ID NO: 48244 - DNA, 239 bp, Glycine max
caaggacaagccagttcattgttagtgtgaacaagtatttagaggctatcaaccaaaaatgtaatgttggtatgagattcaagatgaggtttgaaggggatgaatcccctgaaaatgacaaaagattttcgggcacaatacttggagtagatgatatttcccctcactgggtgaattcaaattggcgatctcttaaggttcaatgggatgaacctgcatcttttccaagacctgataga

SEQ ID NO: 48245 - DNA, 244 bp, Glycine max
ggcgtgttgttgttgttcaggatcttccttttgccgatcaaaggttgaatggtaaaattcccaagatgttaagccatcgcctttttcctcaagcaaaatactcaatttgggtagactccaagtcccaattccggagagacccactaggtgtgttggaagcactcctttggcgcacaaattcattacttgctatatcagaacatggagctcgcagtagtgtctatgatgaggctaaggctgttgt

SEQ ID NO: 48246 - DNA, 229 bp, Glycine max
ggaaaatcacttacttatgctttagaggataatatgaagaacatgtttctagagcttacgagtcattgtgcgtctgttatctgctgtcgctcatcgccaaagcagaaggctctggttactagactggtcaaatctggaactggtaaaacaacattagctattggtgatggagctaatgatgttggaatgcttcaagaagcagatgtagggattggaatcagtggtgtcg

SEQ ID NO: 48247 - DNA, 232 bp, Glycine max
gtgacattaggatatatgttctatattaattgtatgaagcttagacgaccttgttgagtcgagaatactttaatatttatttggacaagtttaaatatgatgtaaaagaaaatgaatgtgaacatttttcccctttgaaagacttgtaaaaaaatgtttttaaaatacttttaattaatatttgaattttttattccttattagtatatatgtgaggggtagaaggtgtcat

SEQ ID NO: 48248 - DNA, 238 bp, Glycine max
ggccacactttatcatcctcagacgaatggccaagcagaaatctctaacagggagcttaagcgaatcttggagaagacagttgcatcatccagaaaggattgggccttgaagctcaatgatactctctgggcctataggacaacgttcaagacccccatcggcttatcaccgtttcagccagtgtatgggaagtcaatgcatttaccagtggagctggagcataaagcatattgggct

SEQ ID NO: 48249 - DNA, 259 bp, Glycine max
gaagacgacagaaggagttgatgttaaagaggaggatttcaaggctgcaagagaggaaggtttggctctcctcaaggtagtggatgcctatcttgtggcaaaccctgaggcctatgctgaaggaactataaatagcgatgagtttactagcactgtccagccaggaaggttgttcaaggctttggtccttgatgctccaaacctcattcccaagctgatgcccgaggccattaagaatattcaactggttgaagggaat

SEQ ID NO: 48250 - DNA, 262 bp, Glycine max
gagatagttgaaattattatttgtctattcctagatcgccaatttcagggtttgttggtgcttttgaatgactgcatggaagcgattgtcaattactttacagaccaggaatggtgctcaagttgtgagaacatagcaaaattcattgcttgcagagtctcaaaggatttgaattgcattcagactattgaatgtatttcagaagctaactctcgttgcaaacaacttaggagtgctgttgcttatcaaacactgctttctt

SEQ ID NO: 48251 - DNA, 280 bp, Glycine max
ctcgagccgtgtcccaaagaaggttgtagctcaccttttaaagcctcgtggctggaaaccgcccgttcgccgacagtttttcctagactgcaatgaaattgcagatctttgtgatagtgcagaacgcatattttcaagtgaaccgagtgtcttacagcttagggctccaattaaaatatttggtgatttgcatgggcaatttggagatctcatgcgcctctttgaagagtatggtgcaccatcaactgctggtgacatagcatatatcgactatctattc

SEQ ID NO: 48252 - DNA, 220 bp, Glycine max
ggactcagcatggacgctgttttctacttcctatgcgctgcttatgctctcgtctcttccatcgctttgaattgaagttagagtacctgagtatggctggactacgcagaaaatttttcatctcatgaacttcattgtcaacggagttcgtgctgtggtgtttggattgcacaagctagtttttcttttgcatcctaaggtgttgatttcggtgctatta

SEQ ID NO: 48253 - DNA, 244 bp, Glycine max
agtgttagcaagagaaacagtgtttagtgtaagtgagattgaagcactgtatgaactattcaagaagatcagcagtggagtaatggacaaaggattaattactaaggatgaatttcagttggccttattcaagacaaccaagaaagagagcttatttacagatagggtgtttgacttgtttgacacaaagcatagtggaatacttgatttcaaagagtttgcacttgctctctctgtctttcat

SEQ ID NO: 48254 - DNA, 213 bp, Glycine max
gaatttgttaacaatggtaccctttttgattttatacacaccgaaagaaaggtaaataatgaaacttggaaaacgcgtgtaaggatagcagcagaggcagctggagctctaacatatctgcactcagaagcctcaatagccattatccacagagatgtgaagactgctaacatcctcttagataacacttacactgcaaaagtgtctgatttt

SEQ ID NO: 48255 - DNA, 237 bp, Glycine max
gggatgatgcagccattaaggccacctatgaaagaagaaatgaaatagaattgctacctagtgttgccagttatttcttagagcgggctgttgagatactgaggactgagtatgaaccctcggatttagatatcctctatgctgaaggagttacttcatccaatgggatggcttctgtagagttttcatttcctcaaccagctcccgaggaaactgttgacactgctgatctacata

SEQ ID NO: 48256 - DNA, 245 bp, Glycine max
ggaagaggcattgagtggagtgaggggtcatgcacaagatttgttacatgttagagatttgttagagttagagtcatggagagcagcacaaaagacattgagacagagctcagcaattctgaagaaggatatttatatcataatccaaagcaagcctggaattgagagggcacaattaaggaagctctattctactctcttcaacaatgtaactagactagattatgcagcaagggataaagatg

SEQ ID NO: 48257 - DNA, 237 bp, Glycine max
ggtagactcaaagcttgttgatcttagagaaagtggcatcaagaacaagtccttcttagatggacatgtgtcatcaatggaagatattgtgaccaatgcaaaaaggaaatggcaggccttttgcgtgcaagcagaaaaggatgcaaaagacactgctgatgattctgccgcaaagcattgtcgtatggagaaactcatacagcggggtgttcatactgctcaatcggctttcgaaca

SEQ ID NO: 48258 - DNA, 264 bp, Glycine max
ttcagtcaactccttaaatttccatccggtacatcacacttttgcaactgctggatctgatggtgcttttaatttctgggataaagacagtaaacagagactcaaggctatgcaaaggtgtagtcagcccataccttgcagtacatttaataatgatggttccatatttgcttatgcggtttgttatgattggagcaaaggtgcagaaaatcgcaatccagctacagcaaagaactacatatatttgcacttaccacaggagtc

SEQ ID NO: 48259 - DNA, 241 bp, Glycine max
ctacctgtagtggtcctcacatgtatgggtgaggaacgtgaccagaagccacagctgagttgtagtatggtggcatggtgactcttggcccataatatgcctgaagatatagtagacatcttatattataatacagtcactattcactacactagagaccagacacacttgaaaacttgctgggtgaaccaatttgaaagggataaaattaatagttttataccatcgaatcaatgttttt

SEQ ID NO: 48260 - DNA, 275 bp, Glycine max
ctcgagccgcacaatctgcagatgaggccatgccggttccaaaacatgttcctcttcgtcaggctcacccatgtcttccaaatttccatcatgattggaagaaggcagagcacgaaacaaattggtcgccaccatcttcgtcatctcctgcatcgctaactcgttgaacttcgaattcacagacgaaacataatcaacaagctcaagtagagtttgccgcttaacgtccttctctttgagatgcttgacaggatcattgaaatcaaacacaacac

SEQ ID NO: 48261 - DNA, 296 bp, Glycine max
taccactgttcgattttgggacttgaccactcagacaccattgtacacttgcacaggtcacaagaactgggtcctttgtattgcatggtcaccagatggaaagtatcttgtaagtgggagcaagactggagaacttatttgttgggacccacaaactggaaagtcattatggcaagtccacttaatgtggccactaagaaatgagattgactcggtaatctccttggggaaccctgtcgcgacctgaatggctagccatgccggtcgctattcgtaagtgtccaggcacaagatgg

SEQ ID NO: 48262 - DNA, 269 bp, Glycine max
aaaatgtccaaagaacaaacatagaaagtaacatagtcgttggagtaattgatagtggaatttggcctaattcttatagctttactgacgggggatttggtccaccaccacgacaattgagctgctataactttacttgcaataacaaaataattggagcaaaatattttcgcattctgggcgggtttgagaaagaggacatcataaatccaacggatacgtctggtcacgggtctcattgtgcatccactgctgctggaaacccagtt

SEQ ID NO: 48263 - DNA, 230 bp, Glycine max
aatgaaggaggaagattttattgagagacttatgtacaggtttgatagcaagagattttgcagagattgtagaagaaatgttattcgagaatacaaggaactaaaagaactgaagcgcattcgcagagaacctcgttgcaccagctggttttgtgttgctgactctgcctttcaatatgaggtatctgatgactcagttcaagctgattggcgtcagacatttgctgatg

SEQ ID NO: 48264 - DNA, 232 bp, Glycine max
attaaaaacaattacaggatgacaaccgatacagtgctgggcgaggtgctcacattaatcttaaacgtgcagaacatgctagaataactataggcaaaattccaggtttgctttcatgaatggctatgaacctatccattattgacagtgccatttgaacttctgatgacagtatgttttctttcagctatggttgacaatcttataaacaaaacattagcctgggaagatg

SEQ ID NO: 48265 - DNA, 225 bp, Glycine max
gtgaatctgatgtggtatttgtgccattcttttcctctcttcgttataaccggttctcctccaaaactaatccacatgagaagaggagcatgaacaaggtgctgcaagaaaaattggtgaagtatgtgacggaacaagaggaatggaagaggtctggggggaaggatcatgtgatcgtggctcaccatccaaatagtatgttggatgcaagaatgaagttgtggc

SEQ ID NO: 48266 - DNA, 225 bp, Glycine max
ggagctgaaaccgagaagaagaagatggagatgtatcagatctggagcaggagaatagcgttgggagcgttcgcgtttgttctgcttttcctatcggcctcagcagacgacgtcgttgtgctctctgaagataacttcgagaaggaagttggtcaggacagaggagctctcgttgagttctatgctccttggtgtggacatgcaaatagctgctcagaatatgaa

SEQ ID NO: 48267 - DNA, 255 bp, Glycine max
gatcacaacatcatagtaagcactatagtaaaaaaaggacattcattcatctatggctacccttattgctcccagcaaccactctccccaagaagatgctgaagctctcagaaaggcttttgaaagatgggaactgatgagaacactgtcatagtaattttgggtcatagaactgtgtatcagaggcagcaaatcagaagagtttatgaggaaattaattaagaggatcttgtgaagcgcctagagtctgagatc

SEQ ID NO: 48268 - DNA, 223 bp, Glycine max
gaatgatcttgtcacttcgtgagagtctccagaactgtaaggaaacacttgcgacataccaaaatgaacttgaggctgcaaaatctgagattcagagttggcattctacacttaaaaatgagccgtccaaatctgctgggatcactccagagcccaagatgttgattaattatcttcagaccttgaaattctctgaagagtctttaagagagcagcttgaaaa

SEQ ID NO: 48269 - DNA, 264 bp, Glycine max
gacgacagaagggttggtaggaagggatggaaaaggatttagctgaatttgtacataaatgtctagtatgtcaacaaattaaagcaaagcatcaaaatcccccaggcttatttcaatgaattgatatacctgaatggaaatgggagaggattactatggattttgtgacgaggttacgtaaaacctcaaagggttatgactcggtttgggtgattgtagatcgattgactaagttagcacacttttttcctgtgaaaactacct

SEQ ID NO: 48270 - DNA, 235 bp, Glycine max
atctacatttatggttttggtttccttttgcatttctgtagaatactaaatgtttcagtggcttttgtgtgtttgttttcgaagtccaacaccacacgcataagtattgcagataatatggtgtttgttacttaatatgttataatccaaaaaagataaaatcaacgaatatcacggttttgtagattgatgaggagattcttcaggaagcggttaatatgggatttgacaggaa

SEQ ID NO: 48271 - DNA, 240 bp, Glycine max
  unsure (1)..(240): unsure at all n locations
ctccaagcccatcagctcttggatcagtcatgtgatgagcatcacatgttatggcaccccccaaatattctgctattattctggctcccctttttgttgcactctccaagctctccattaccttattcatntttccggtgatagagattcaagttgtctttaggtgaccaaaggtaagttaaaacaaaaatttgttaagccatattgctttagatttgctagcaaaagttgcatatggtg

SEQ ID NO: 48272 - DNA, 239 bp, Glycine max
ggtcacacagctattcctcttaagcttgctactgagtttccacactgcataccttaggtcttccgaattcgaagttaatttgcaagatggctaaggaaaaggctcagatcaacattgtggtggttggtcatgtggaccctgaggaggcaaccaccatccacgagctgaagaagcctgttgtggagaaagaagctccagggcatgccatatgagggattccacgtacggcctcggagggg

SEQ ID NO: 48273 - DNA, 221 bp, Glycine max
aaagagacccggaaagggtgggaaccgcttttggaaatccattgggcttggatttaagactcccaggggagccatcgaaggaacctacattgacaagaagtgccccatcactggcaatgtttccatccgtggccgtatcttggctggaacatgtcacagtgctaagatgaacaggactattattgttaggaggaattatctccattttatcaagagtacca

SEQ ID NO: 48274 - DNA, 265 bp, Glycine max
acaagacgacagaagggggaagaggaagggaacggcctggaggaaggtatatgagttttatccatggtgatggagttcaggatgtggtaatcacaggtgaaaatgggacaatagatgggcaaggagatgcgtggtggaataagtggaggcagggaactcttcagtttaccagaccaaacctagttgaatttgtgaattctagagatattattatttcaaatgtaatctttaagaattctcccttttggaacatacacccggttta

SEQ ID NO: 48275 - DNA, 233 bp, Glycine max
aagagacattaattaatcaaagatccaactgatcacctcgtcggtattgtaaatatgcagttacaaataatccagccaaagtaatgggaattaaacctatcacgattccaaatagaaaaacttcaatcatttttatttgttcgaaaggtaaaaagaaaggtaatatctatccttaaccattaatctgtattgatcatgaatctcaacgaccgagaattgtaaattgacacagt

SEQ ID NO: 48276 - DNA, 232 bp, Glycine max
atggtatctttccttctttagaattaactgtgttgttgattaagccatgatgaataaatccatgttgtgtatggacactacaacgagctttttttatgggcaggcaatgaattgtgtggaagtggaattggagcaagtgttgcagcagatcaatatgcttctgatgttgctgctttaagaaacatagttgaaaatgcatatagagggattgaacctaagccactagtcattg

SEQ ID NO: 48277 - DNA, 232 bp, Glycine max
agctccctgcatcctatcaaaacttgtacttttccagacaaagtcaacactgaaaccatggttaacatcaactggaaccccctgcaaataacaagggcaataagcacagggcacagatgaagagcttgaaggcacaacataagcatcacaaactaatgctaagttcacctgactagcacgaagctccagtgcaacctccccttgtgcagttagcttaatctgaaaatagaat

SEQ ID NO: 48278 - DNA, 289 bp, Glycine max
ggttgttggtttttgttaatccgtttggtgggaagaaatccgctacgaagattttcgctgaacaagtgaaacctctttttgaagatgctcatatccaaatcacagttcaagaaaccaagcaccagctccatgcaaaggaagttgctcgttcgctagatattactaaatacgatgggattgtttgtgttagtggagatggaattttggttgaggttagcttcattgccattacacttgttgcactatttgttatcatcatcttgatcgtcatcgtcatgttcgtggttat

SEQ ID NO: 48279 - DNA, 257 bp, Glycine max
aatgtattatctacagttggcaattatcagcgagcaggatagcaatatgagaacgctgctgattctgtcgatgaagacggatcgtttgtgcttgatgagcaagagcaagctcagacactgacagtgtcatgctggttgaatagtgcagcttgtagccttagacttgatgactatcctggagctatcatgctatgtacacaggtgcttgatgtcgactttacaatgtgaaagctcatacagacgagcacagcatatat

SEQ ID NO: 48280 - DNA, 235 bp, Glycine max
tacagatgcgacgagacgacagacaggaactcagcaggattcaagctactatgcgttgtcgtctcactgcaaggtgtgcatgcaagagttcatggtcacaacatcggaaatgaagtgtatggagcatggtgaagccacagaccctcaatctgatgtgtaggcttgtgtaccttatctgataaagtgaacatgttggcgactgcgtatggagaaaactttatatcgttatggcctc

SEQ ID NO: 48281 - DNA, 263 bp, Glycine max
catggattctagatgagtattccgaatttcatggccactctcctgcagtagtgactgggaaacctgtagaactcggtggatctctaggcagagatgcagctactggacgaggagtcctctttgcaacggaggctttgcttaaggagcatgggatgagtgtatccggacagcggtttatcatacagggatttggaaatgtggggtcttgggctgcccaattgatcagtgagaaaggtggaaaagttgttgcagtgagtgacata

SEQ ID NO: 48282 - DNA, 248 bp, Glycine max
gggaaaagttagaagtagtgaagaaaatgaaagtcattgttttcttcgttgctataataattttaggtgcagaatggcaatgcaatgggtcagagatgagcatgagcatggccacagctaccaaattttccctttgcgaatgaaaaccggccccggtggccactacattccagaggtatcgtgcaaaagttggaggcttggtgtggaagcacatatcgtcattgactggagaaccattcctcaagatt

SEQ ID NO: 48283 - DNA, 248 bp, Glycine max
ggaactaataagttgaataatcaaaggcaaaaggaagaagcaaaaccaaacgcagtgcgtgtgttcttctctgaagtctgaaccattcgttcctctcccataacatgccctctgctcaggatccattttacgttgtcaaggccgagattcaagattctattgataagctgcaatctacttttcaccaatgggaaagcaagtctggagctgcggaacaaggacatcttacaaaggaggttcttgctgga

SEQ ID NO: 48284 - DNA, 241 bp, Glycine max
ggaaatgaacaagaaaaacttgaagccagacctgttgctgtatggaactaaaatatggggtctttgcagacaaaatgaaatagaagatctatggctgtaattcgggagatgatggattgtggtctgactgctaatagttacatatatacaacccttatagatgcatattttaaggttgggaaaaccacagaagctgttaatctattacaagagatgcaggatttgggtatcaagataacag

SEQ ID NO: 48285 - DNA, 209 bp, Glycine max
actgcgaaaagacggcagaacgggaaaggaccaagggaccgtgtaagaactgtttgaaggatgctaacatatctatcaaaggagttgatgagggtccacctgttggaggcatgactcgtgtgcctaaagtccaggaagtagtttcagcgatctttggaaatagtcctagccaaggagtaaatcctgatgaagcagttgccatgggagca

SEQ ID NO: 48286 - DNA, 276 bp, Glycine max
tcccagggaaggggagaaatgagccttctaggaacaccatctggaactttgcctggtacagtataagacagtgcagtccataacactaccatcattggaaccccataatctgctataaatcctcgtagccaccctgcattgcaagccagagtaagaatatataaagtggtatttgagattatttacttaacacaaaaacattgtgtacataaaagctctatcttgtaagatatttttggggttatttacctgttccatatcgccacgttctagctc

SEQ ID NO: 48287 - DNA, 233 bp, Glycine max
ggatcctttgtattctattcttcaagattcaggtactgcgtttcggaagcagacacagatggctcgtacgaagcaaaccgctcgtaagtccacaggaggaaaggctcctaggaagcagcttgcaaccaaggctgcgcgtaagtctgcaccaactactggtggtgtgaagaagccccaccgttatcgtcctggtaccgttgctcttcgtgagattaggaaataccagaagagta

SEQ ID NO: 48288 - DNA, 246 bp, Glycine max
gatttgaatcttatgtcactgtataagaaaataggcaaggcggaatacaaatgtccaaactggtttccatttgaagtgcgcagactgttagcgaaaatccttgaccccaacccaaataccaggatatccatggcaaaagttatggaaaattcgtggttcagaaaaggattcaaacctaaatctggtcaagtgaaaagagaggctgttgatgtggctttagttgtttctgatcaaattttgggctgt

SEQ ID NO: 48289 - DNA, 243 bp, Glycine max
gggtctcgtgcaagtgtaacccaaaaccctagcggcgcctgctttcttcgttcgtcttttgcatcagccatcaggtgcgaactcaccctatggatttctatccaccgctggctgatccttcttctctaactctaatttattattttcatgatggagtctcaggtgaagcatgctcttgttgtcaaagttatgggtcgtactggatccagaggacaggtgactcaggttagagtgaagtttttg

SEQ ID NO: 48290 - DNA, 224 bp, Glycine max
gatagaagaagcagaaagagaagcattagcaaaagcaataagaactagtctaagcagaaatggcctcttcagtgatggcatctgtggccctcaaacctgcccctttcactgttgagaagtcctcagttagaggccttccctccctctcaaggaactcctcttcattcagagttgtggccagtggtggcaagaagatcaagactgacgagccttatggaattaat

SEQ ID NO: 48291 - DNA, 238 bp, Glycine max
gggttggctgttgagtggtctgttgatgaacagtacagattggaagaaggccttgccaaatatgctgatgagccaagtatcatgaggtatatcaaaattgctgccctgttgccagataaaactgttcgtgatgttgctttgaggtgtagatggttgacaagaaagcgaagaaaatcagaagaacacaatctggggaaaaaggtcaataatagaaaggataagccagtggaattagctt

SEQ ID NO: 48292 - DNA, 110 bp, Glycine max
gtatgtctcatgtcttgctcaaccaggtgaaccagttggtgtattagcttctcaatctgttggagaaccggcaacgcagatgaccttgaatactttccaccttgctggtc

SEQ ID NO: 48293 - DNA, 232 bp, Glycine max
ggagcgagagagagagagaaacaaagcagcacccatttggatcctctcttctcttctttgatctccgttaccctttttgttttctcaacagagagagagagagagaatctttcgaagttcgtttgcgtgtgttgtgtggtcagtcaccgatggcagcaccacctgcgagggcacgtgccgattacgattacctcatcaagcttcttcttattggcgataggagtgtgggaaa

SEQ ID NO: 48294 - DNA, 232 bp, Glycine max
gggtgatggaacagcaggttggcttcttggagttgtttgtgatctcaaattatctcatcctccaccaatagccacggtccctttgggcacagggaataatctaccttttgcatttggttggggaaagaagaacccagcgacagatcaaagatccattgaggcatttttagatcaagtcatgaaggctacaaaaatgaaaatagacaactggcacattctcatgagaatgaga

SEQ ID NO: 48295 - DNA, 236 bp, Glycine max
ggaataaaaagatggaagaaaatgagaaatttgcagtatccaaagctggagcagtcgatgcatacgccatggttgattcgttcaagattcatgaaaaagtgaactctcaaatcttcactggtgtgatggcctttgtgatgggcatagtgacaatggtgaggatgactaagaacatgccaaagaagctcacagacgccaacttctactccaactttggtggcgaatataaagggcag

SEQ ID NO: 48296 - DNA, 230 bp, Glycine max
gacagctattcctcttaagcttgctactgagtttccacactgcataccttaggtcttccgaattcgaagttaatttgcaagatggctaaggaaaaggctcagatcaacattgtggtggttggtcatgtggaccctgaggaggcaaccaccattaacgagctgaagaagcctgttgtggagaaagaagctccagggcatgccatatgagggcatgcacgtacggcctcgga

SEQ ID NO: 48297 - DNA, 251 bp, Glycine max
gaacacactcatcaaaaaacccttctttctttcaggttcattacttgatcagtgtcaaaagggtagttgcaaattgcaatggctaagcatgatgttgagggtggttccttctcagcaaaggactaccatgatcctcctccagcacctttgattgatgctgaggaactcacacagtggtccttctacagggctttgattgctgaattcattgccacattacttgtcctttacatcacagtgctcactgtgat

SEQ ID NO: 48298 - DNA, 154 bp, Glycine max
gactatggacttgatgaaaagtgttagaaatcagttaactgaactcatatctggtctagctgttcaagacatggcccccaatgagtttgggtttatctcaaagcttattcacgataccaaatggaagtttaatgtcacaacaagggggatacca

SEQ ID NO: 48299 - DNA, 234 bp, Glycine max
ggccatccatctccttctcttcgctattatgttttctaatgtttctctgtttgaaattttcagagaccatggccaaaagccccttcaagcttgaacatcccttggaaagaaggcaggctgagtctgctcgcattagagacaagtatcctgatagaatacctgtgattgttgagaaagctgaaagaagtgacatcccagacatcgataagaagaagtaccttgtcccagcagatt

SEQ ID NO: 48300 - DNA, 253 bp, Glycine max
atactctcaacttcaaaaggtggaagctaatgtgcacatcaaggcttctgctgatcagttccataatgttttatgcaacaggacacaccatattgccaacattttccctggaaaagtacagtctgttgaaattcataaaggtgaatggggcactgagggatccgtcatctcctggaattatttacatggtatgtgaatttcgacatcaaaattttaaccacaaatagcaatattcctttctcgtttgcattta

SEQ ID NO: 48301 - DNA, 237 bp, Glycine max
atttctctctgtttccttcttcaccgcatcaatggagttcgacggcgttctcttcggcatgtgaaaccctctcctcgacatctctgtagtcgtcagtgacgctttcttggaaacatacggaatcaactcgagaggtgcgatgcctgttgcggttaagcatctagctatgtgtgcgtacctagatacgaacctaaggatctcgtacctggatgcatgggctacttcagatctggtccc

SEQ ID NO: 48302 - DNA, 272 bp, Glycine max
atccagatcgaacacgcagtttccggcgcatctcatcgtgcaccaaaatgaacgacgcagatgcctcggagcaaatccagcagatggtgcgtttcatccgcaaggtggctgcgtagcctcccgacgagatctcggtctctgccgaagaggcattcgatatcgagcagctgccgttggttgacgccggacagaaggagctcaggcaagagtgcgaacgctaagagcgccaagtcgtcattcgccagatgattgagtactcaatgcaggtcaat

SEQ ID NO: 48303 - DNA, 259 bp, Glycine max
ctgggagtctccattaggttgcctcatgttttcttttactatgcaaatggaggatggacgagtcgttcctttggttcagtatgtggtttcccttgctatgacagaggcaatcaaggatatctgtgacaaaaatgggttacccagcatagatgttaaaatcaagtggccaaatgatctttacttaaatggctctaaagttggaggcattctttgtacctcaacatataaatcaaagaagttcaatgtaagtgcaggaata

SEQ ID NO: 48304 - DNA, 256 bp, Glycine max
gaacaaggtgggtactgctgcgccaggagagcaaatttgctgattggcagagggtcagaatgcaggagacgtccaaagagatacctgcaggctcccttcctaggtcattggatgttattcttcgtcatgagatcgtggaacaggccagggctggcgacacggtgattttcacaggtactgttcttgctatacctgacataatggcattggcatctccgggagagagatcagagtgccgccgtgatgcttctcaacg

SEQ ID NO: 48305 - DNA, 261 bp, Glycine max
gttgcttgagaatttgacacaggatgatttccgacagagtctacctagattccaacctgaaaatttggagcagaataagactatattcgagagggttaatgaactggctgcaaaaaagggatgtactccatctcaacttgcattggcctgggttcatcaccaaggaaaagacgtgtgccctatacctggaaccaccaagattgagaactttaatcagaacattggggctttgtcagtcaaactaactccagaagacatggc

SEQ ID NO: 48306 - DNA, 225 bp, Glycine max
ctcaacacaaccttctttctttcaggttcttgatcagtgtcaaaacctcaagggtggttgcaaattgcactggctaagcatgatgttgagggtggttccttcgctgcaaaggactaccatgatcctcctccagcaccattgattgatgctgaggaactcacacagtggtccttctacagggcttgcattgctgagttcattgccacaatgctcttcctttacatc

SEQ ID NO: 48307 - DNA, 273 bp, Glycine max
gtgcgaaccacaacactgcacaaagattagggtttacatttgggaggaagcaagaaagagatgggtgaggcgtgcattccaacagttgatctctctcctttcctgagagaggatgaagatggaaaaaagagagccatagaagcaatcacccaagcctgttctgaatatggcttcttccaaattgtgaaccatggagtttcccttgatttggttaaagaggccatgcagcaatctaagaccttttttgattactctgatgaagaaaagagcaag

SEQ ID NO: 48308 - DNA, 271 bp, Glycine max
gcatcactgaactaacaaagcaaccctatgtcgaaggtggtttgtgtcaccggagccagcggcgccgtcggatcatgggtggtcctactcctcctccagcgtggttacaccgtccatgccaccgtccaagatatcaaggatgaaaatgagacgaaacatttggaggaaatggaaggagcaaagagtcatctccatttttttgaaatggatcttcttgacatcgactccattgccgctgccataaagggttgttccggcgtaatccaccttg

SEQ ID NO: 48309 - DNA, 210 bp, Glycine max
agagccaccaaaggaaacgatatcctctgggagacacatcagccaacatgtcgaaaatctctgtcgccggcgttcgcacgaacgttcaacagctcctcgagtactccaacgagaccaagaagaggaacttcctcgagaccgtcgagctccagatcggtctcaagaactacgacccccagcgtgacaagcgtttctctggaaccatcaagc

SEQ ID NO: 48310 - DNA, 269 bp, Glycine max
ctccactcgtacgtaggctaagcactgaggaaagaaagaaaacatgttgatgaaaagagatgttgaaagcggtggggatggcaatgccaatcccaggccactctaccccgccatgcttgagaaccctcaactccgttgggccttcattcgcaaggtctacaccatcctcaccattcagttgctcctcaccatcgccgtcgcctccgtcgtcgtcttcgttcgccccatcgctcttttcttcgtttcctgcccggaggccttgctcttta

SEQ ID NO: 48311 - DNA, 259 bp, Glycine max
tcttcctgttcattggcttcgttttcgctggcgagtggagcgttggtcgcgttgcggtcatcttggtcggtcttgttgcttgcgttatggttgtcgttggcttcaaggccaagtggagcgccatcattcttgtcaccattctgagcgtcttcaacgtctttgtcaacaacttctggacgctccacgagcaccacccccacaaggacttcgccaagtacgacttcttccagatcctctccatcgttggtggtcttctcct

SEQ ID NO: 48312 - DNA, 240 bp, Glycine max
caagtttaatcagaggaatgttgcaaaatgtgcttctaggatgggacaatgcttctcgtctacttatgcaacagttgaagttgctgcaaatgaagttaactccatgctacctgatgttgagaggaacaattacattttctctgatggtattggtgttatcactcatgatcttgcaagggaagttgcagaaaagttgaagttggacaatgtaccctctgcttaccagatcagatatgctgg

SEQ ID NO: 48313 - DNA, 260 bp, Glycine max
agaacattgagaatccctcggatgcattggcagtggatttgaaaaacaaaatacaccttgtggagatagacttaaaatgggttagggaccagaaccccgatgattcaattaaagaaagggatgaaattgtaattcagaatctacaaccttccaaacacttggagaagatgtcaattggacactatggtggtacaaaatttccatcttggctatctgataattcattatcaaatgtggtgtctttaaggttgaccgactgt

SEQ ID NO: 48314 - DNA, 263 bp, Glycine max
cttttctagcatggaaatttctgtcccatgtgggacccccctgaactgggctgtgtttgttttagtcttggtttcctgggtttacagaacggggttgttcttgttggcgtgtgtgcttttcaggcttaactgcgagcttcagatactgaggtttgaaggacctcacaagctctttgaaaggtgtgggtctgatgcaaacatgacatttagagagcacgtgagaattaggaggcaattgtggatcacgagtcatgggtacaggt

SEQ ID NO: 48315 - DNA, 287 bp, Glycine max
aactgcttatagtcccaccttagttagtgaagagacaaaaacaacatttccatcatcttgaggagtttggtattgatttgatacttggctgtaatggattcatatgggttggtcaacatgttgaagccaaagatgacatggtagaagatcaagtgagccaatctgatccacaagttttattgcctaataacattgtatcagtcttgaagaacagcagaaaacttacacaatattggagacaagaaattacatatgcagagctgctaatgctgttagagtattgtcaa

SEQ ID NO: 48316 - DNA, 284 bp, Glycine max
ctccaatgacactggtgctaatatggaaggtccaaaggctagtactgatgcctctggggttgaaaatggcatccctgagggtggagataagcctttgcaaaaggatactgataccaaggttcaggctccaaagaaaaaggttaagaaaacaaacattcctgtagcagagttagtttatggagcaatggtgcccgcggatgtccagaaagcactagaaaaggagtttgaaatggctttgcaagatcgtgtgatggaagacacaaaagacaagaaaaatgcagttg

SEQ ID NO: 48317 - DNA, 273 bp, Glycine max
tgaacccgaagattatttccgttgtagaacaggaagcgaaccacaaccaggaccggttcttggagcggttcacggaagcgttgcattactactcgaccgtttttgactcgctggaggcgtgtccggtcgaaccggacaaggcacttgcggagatgtacctgcaaagggagatatgcaacgtggtgagcagcgagggaccggcgcgagtcgagaggcacgagccgctggctaagtggagggagcggctcgagaaagccggcttcaagccgctgc

SEQ ID NO: 48318 - DNA, 240 bp, Glycine max
caactgcctttattgaaaaccagtagcagcaaggtggattctcacagagtaaaagtcacatatggagatgagaaaacccggtttcggatgctgaaaaattgggtcttgaagatcttctgcaggaaattggtaggaaatttaatgtgagtgagacacagcaaatttgatgtcaaatacttggatgatgattgtgagtggatactactcacttgtgatgctgatttagaggagtgcattgat

SEQ ID NO: 48319 - DNA, 242 bp, Glycine max
gaagtggcctgtgaagacttcagcaacataattgggtcctcaccggatagtgtggtctacaagggtaccatgaagggtgggcctgagattgctgtgatttcccctgcatcaaggaagataattggacaggataccttgagctctattttcagagagaggtggcagacttggcaaggttaaatcatgataacacaggaaagctgttaggatattgtagagagagcagtccatttacaaggatg

SEQ ID NO: 48320 - DNA, 226 bp, Glycine max
ctcctcaggaaggttgccatacttttcgtgggggattttggaattacttcagcatggagtacttatgctaagcttggatgcacacaaggatggtttttgctcctctgttccttcctccttccagcaacatagcacatcctgcaaaagtaaaagtcatgaaaacacatggttgttgggaagacctgcatattccttccaggtatatcattttatatactcatatatg

SEQ ID NO: 48321 - DNA, 232 bp, Glycine max
cgctcataagcagtgaaaagcctcaaattggcaggattccagatgatctaggctacccttctgaccttcaaatacttaacctgcactctaaccagcttgaaggcccaataccagcacgcatttttgttccagggaagctagaagtcctggttctcacccagaataattttagtggtgcacttcctaaagaaattgggaattgcaaagccctttccagcattcgaattggaaa

SEQ ID NO: 48322 - DNA, 235 bp, Glycine max
aattgcttttcaggctgctcaagctggtgcaatgcaaatagaagtaacaattaatgggattggtgaaagggctggtaatgcctcattagaagaggttgtgatggccctaaaatgcagggtcagatcaagtcttaggtggtttgtatactggaattaataccaggcacttactgaagacaagcaagctggctttatattttcaaactattctctcaattttgggaaactttttccc

SEQ ID NO: 48323 - DNA, 277 bp, Glycine max
catggcgaaggtggcgattgttgagctcaatagaaactgtgccaatacagtggaagagatagtgaaaatggagagaaagatctttcccaagcacgaatcactggcttcattctttcacgatgaacttagaaagaaaaacagtgggttgctttatattcacgtgaatggcgtaattgcaggctatgtcatgtattcttggccttcttccttgtacggctccatcacaaagctcgcagtgaaggagcaatggaggggacaaggccacggagaggctctg

SEQ ID NO: 48324 - DNA, 123 bp, Glycine max
cttgagaactgtaagactctcaaatatctggttgatgagtgtccctttgcatttgtgaactagtatgtaatattttattcacttaaatacagcgcattactatgtgcaatgagtgtgtttaaa

SEQ ID NO: 48325 - DNA, 275 bp, Glycine max
ctaatggcttcttagaggtttctgaggaaggtgacgttctgtatgtatttccaaaagattatcgatcaaggcttggtgccaagtcatttaggattaaagctgagccattttttgaacaggccaaggctgcaggagaatactttataagggtttcttttgggacagcacttattgcatccattgttattgtttacactacaataattgctcttgtaactagcagtagaagtgaagaggacaatcgtggaaggcgtggaggcaggtcatatgattca

SEQ ID NO: 48326 - DNA, 197 bp, Glycine max
tttgaagccaactcagaatcttttggtaattttcgaggaacttggggggaatccttcaaaaatttcacttgtgaagagatcagtaagcagtgtttgtgctgatgtgtcagagtaccacccaaatattaagaactggcacattgagagctatggtaagtcagaagagttccatccgccgaaggttcagttgcattgca

SEQ ID NO: 48327 - DNA, 287 bp, Glycine max
cgcaaccatcgccggaaccctaaggttgtcgtggacggcgatcaccctcctgtcttcaactgcagctgcttccgctgctacatgagctactgggtccgctggaactcctctcccaaccaccaactcatacacgaaatcatcgacaccttcgaagactctctggctcacaccacaaaaccttctagaaaggataagagaaacaagaggggctccaaaaccaagccttccgagttgactcgctccgagtttccctcttcgccgccggaatcggtgccggagagtagcag

SEQ ID NO: 48328 - DNA, 230 bp, Glycine max
cctcgagccgaatcggctcgaggcaagctcatcctagagttttaaaacatggcagcagcctcctaccatggctctctcttccccatccttggctggcaaggccgtgaagctgggcccatcagaccccgaagtcgggagggtcagcatgaggaagaacgtcacccagcaggcctcctcaggaagcccatggtacggcccacaccgcgtcaagtacttgggcccattctctg

SEQ ID NO: 48329 - DNA, 267 bp, Glycine max
atttgtgttttcatggtgtcgttgctaatggggcattggaagggcctcgtgttgaggctgtgaactggatctcgaaagtctgtgggcactatgggttctccgctttgacaactgtactcgctgataactactgggataggttcatcacaagtttgaagtctcagaacgataagccgtggatgacacagctcactgctgatgcttgcttgtcccttgctgtgacaacggaagagacccatgtgccactcctcttggaccttcaagtgg

SEQ ID NO: 48330 - DNA, 273 bp, Glycine max
gtaccacaagtaggatcaaaggcacttgagaaggacaaactttggcaagacttagaggggttggttcaaggcattctgcaacagaagattttcttaggtggggatctaaatggacatgttcagctcgccgataaggctcaggtttgcacccagcggtcatggaaacggccttatggagttggactcctggtagctggattagatgaatcgggagctcacctctattaccactgtcccagtggaaactattttgaatatcaggcttttgctatt

SEQ ID NO: 48331 - DNA, 271 bp, Glycine max
ctcgtcgcagaaaactcctactccctaccctcctacgacgtcagaacctccctcaaaaccgtctccgacttaaaacactccctcgacgacctcacttcccaacttctccccaaaaagaaattctcattcaaaaatataccccccaccaccaccaccaagaaggacgacaaggataaggattgcgctattccactacccaaacaaccccctcaactctctacgctccttgcgccgcgtgactcgccggggttccgaaacaaaaccggtgagc

SEQ ID NO: 48332 - DNA, 257 bp, Glycine max
  unsure (1)..(257): unsure at all n locations
ctttctctttctcctccttccgctctctgcttctccggtttgtcacagaatattgatagtggtggtggtggtagtggtggtccatgtatctttccattgaaccgttgcaaaaccattcacctgacacgcatccaggtgacgcatggacaagggatccacaatgtggagggagataaggactacaatgcatatatgaagcctgaatatnttgatgcacatcttacgccactaggctggcaagaggttgacagtttgcg

SEQ ID NO: 48333 - DNA, 240 bp, Glycine max
gtttgacatccctcaagggatccactaactgaaggagcaatggggttgacatttaccaagctttttagccggcttttcgccaagaaggaaatgcgaattctaatggttggtcttgatgccgctggtaagaccaccatcctgtacaagctcaaacttggcgagatcgttaccacaaccggatggaccaggctacactctcgatggacacagtatcagctgggccaattggaagttccacat

SEQ ID NO: 48334 - DNA, 159 bp, Glycine max
cgccttgctgctattgactacatcgtttgtgatgaaagtaatgtatttgtcactaacaacaatggtaacatggccaaaatccttgctggtcgtaggaggtatatgggtcacaaaataatcatcagaccaaatgcaaagaagcttagtgcgctgttcatg

SEQ ID NO: 48335 - DNA, 288 bp, Glycine max
  unsure (1)..(288): unsure at all n locations
ctctctctctctctctgaagatggcttcacgcaggctcgtatcttctctgattcgatcctcccttcgtagatctccatcggaggccttcattttcggcttcgtgatggtcgtccaggtaatnaaaccgtgcctcaccgcacggatacttgctgaaccgcgtcgccgagtacgccaccgccgcggctgctgctaccactcctccctctggctcctcctccggggaagaaggagctcggcggcggcgggaagatcaccgatgaattcaccgggaagggcgcgatcgggca

SEQ ID NO: 48336 - DNA, 286 bp, Glycine max
gggttccaagtttgaacttgaaagtgttgaactttctctagctttttcacaaatttggttgcacttgcaactgaggcaggaaagacggatcaccagggggcacgagaggaggacagaggaaagagaacgccaaaacaagaaaagtagagaaagggtaggtgttgtacagaaatagaaattaaaaaattgagtgaaaaattaaaagggaaatttttttagaagaagagtgatagggatatggggaggggcagagtggagttgaagaggatagagaacaagataaaca

SEQ ID NO: 48337 - DNA, 293 bp, Glycine max
ctgcaatactggggtcagttaaaaaggtagacactgttgaaggtttacgggatcttcaaattccttcagggattcaacctggagattcagtgaagttgtcatgtttgggagttccagacataaataaaccatctgttcgaggcgatcattatttcttgtgaatgttcttattccccaggatatcagtggcaccgaacgtgtacttgctgagcagttagcttcactaagagcatctagcaaaagggattcactgtcttctaatgacaatgggatacccaaaggaaaattcaatg

SEQ ID NO: 48338 - DNA, 271 bp, Glycine max
gtagaatttcacccccttggtgttatcggtgccattgtgtcgtggaactatcctttccacaatatttttaaccctatgttggcagcagttttttctggaaatggcgttgtgattaagaaattcgtgtgattctggttgtagatttcggaacatgctagttggtctggatgcttttacttcagaatcatccaatcagcccttgctgccataggagctccggaggaccttgttgaggtgataacagggtttgctgaaacaggagaagcactgg

SEQ ID NO: 48339 - DNA, 253 bp, Glycine max
aacacatccctgccacggcatcgatccgagtgaccttcttcacaatagatcctcagccgcacgatcattgtcttttgggtgattcctagccgtccataatctcgaaaagatgaacaaaggagacatgtaaaagagatctttgtaagagtcatccatatcatacccttcactttcctgggaaaaaattggaacctgcctctgttaaagtttgtatttttctgagtgggtgggttgattgagagtgctgtgcaag

SEQ ID NO: 48340 - DNA, 258 bp, Glycine max
caaaggtaacacagctgaaagccacaggttcttcagccagctttgttgaacagtatgcaacagcctctgcaacagtgaggaagatcttgtcctcaccaagcaaagtagcaaagtttgatgtgtggagcttgtctattactattgggccagggtttgccagaacaagctggtcaaagaggtgctttggtatagagaggaaaaagagaaagcatactccatgatgggctgatgacagcactgaatgaatcacagagataa

SEQ ID NO: 48341 - DNA, 277 bp, Glycine max
cgttgaagaggcctacaacaagctaatagttgaacttgagagaagtgttcctacattggttggcattgaatgtcccaaggatgagaaacttcctcgtcgcaaaatttttgacaaacctaagacgcgctgcttcactattctccctatggagtttaatcttgtggttcgtcagaagtttttaaattttgtgaggttcattatgaagaaaagggacaagcttagttgtcaagttggaatcaacccatactccatggaatggactggtttggccaataga

SEQ ID NO: 48342 - DNA, 278 bp, Glycine max
tcattttcacctcaggaacgttgcgtcaataccggaagacacataagcatgttgatttgagagctgtgaagaaatggtctaggcagattttggaaggccttttatatcttcacagtcacaatccgccggttattcatcgagaccttaagtgtgataacatttttgtcaatggtaatcaaggggaggtgaaaattggtgatttaggattggcagctatccttcaacaagccaattcagctcacagtgtcataggtacccctgagttcatggccccagaa

SEQ ID NO: 48343 - DNA, 162 bp, Glycine max
cacacaacaaatttctagagcgagacagtgagaggagagatatactagccgatcctccatggcgtccaccaaggaccgcgaaaactttgtgctacaccgacaagctcgacgaacaacccgaacgctacgaagaaacggtggaagcaatgcagaatgtggcga

SEQ ID NO: 48344 - DNA, 274 bp, Glycine max
caagaacatctctctggtaaacacagcaaatcaacgttcttgagctgggaggacagacttcgtatagcagtggatgcagccttaggattggagtatctgcaaaatggttgcaagcctccaataatccacagagatgtaaaatctacaaacatcttgttgaatgaacacttccaagcaaaattgtctgattttggtctatccaaagctatcccaactgatggggaatctctcgtgtcaactgtccttgctggtactcctggttatctggaccctc

SEQ ID NO: 48345 - DNA, 271 bp, Glycine max
atttccttctgaataacctccacacatgtgtaagaaacaaatcaagacaacatgaaacacaaaaataccttgccataaaaaggattcaacggtagaataatctcacaacttgtagaagtttgaagaaagtctgagaacccgtgattgcaaaggcagcaacagccaaccactcattgatgctgaggagctcacaaagtggtccttttacagggctcttattgctgagttcattgccactttgctcttcctctacattactgtgctcacagtt

SEQ ID NO: 48346 - DNA, 265 bp, Glycine max
cgaagatggatcctcggaattttcatgcctggaattaccgaagtttgttgctgaactgatgacacgatcagatgacgatgagctgaaatacacagaggaagtgatagcgactaatttcagtaattactctgcatggcacaatcgtagtgtgcttttgtctaatttgctgaaaagaaaggctgaaggatatttccctaaagaaaaagttttggaagaggagtttgagcatgtccacaatgctatttttaccgatccagatgatcag

SEQ ID NO: 48347 - DNA, 264 bp, Glycine max
gtttgacaataaatgaattactagttgtagaatattattctcgtcagacttaaacctaactaaaataacacgagtttttataccaggattttccgccattcatatatcatagacatggatatggtaaaattgtcattccttgcccacttttttcaactattttttgtattaccgaaaaattatgaatagagagtccatatcaaaaaatgggaaataatggtatgcattgtgatgagtaatattgatgaatttggtaaagattcg

SEQ ID NO: 48348 - DNA, 266 bp, Glycine max
cggctcgagttttgttttttgtatatattaaggcggcacagacccaagtgggtgtaagtcagtcttgggaacaatatgcgaagaactggcttgttacatttgttatgccttgtcattgctttagtaagtgtgcaagcagaagatgcgtataagtattacacatggacggtgacttatggaactatttctccattgggtagtccccagcaggttattcttatcaatggtcagtttcctgggcctagacttgacttggtgactaatga

SEQ ID NO: 48349 - DNA, 253 bp, Glycine max
gccctttgtacaatggctctacgtgtgctacaatcaaagagagccagaattgcatcatcaatgggaggcatgactccacctaccttcgctggagatggaaaccaagtgaatgccatcttccaaggtttgaaccaaacacttttctgcaactcataagaaacaagcatgtagctttagttggggactctatggctaggaaccagatagagtcccttctttgcttgctagccactgcatcaactccaaaacgtgt

SEQ ID NO: 48350 - DNA, 280 bp, Glycine max
taatacacaagaagctggattctcccacagtgttgtgtactccaaatcgaaagaactgtgcagttggattatgtacgtggacgttgacgagttcgtgttttctccctcatggggacatgaaactgaaaatagtgttgttgttccttcgttgaaaaagttattggcgagggaaataataaagggggggactagggtgggacaagtttcgatgaggtgcatggaattcgggccttcggggcaacggcggcacccggaggaaggagtgacgcaggggtacacg

SEQ ID NO: 48351 - DNA, 277 bp, Glycine max
attgctgctcctgctttttcttcaacaagctgctgttcagcttctgtttggcatgacccaagcaaagatcagacaattttgaaaataatccgggttcttcctcctgctattccaactagtcaagtaaagaccaactcatcaaactgggagcgtgcaattgctgaaaggttttggtggagccttttggttggagttaattggtgggatgctgtgggctgtacacagagtgctgctgaggatggtattgtttcactcaacagtgttatcgcagtcttgg

SEQ ID NO: 48352 - DNA, 286 bp, Glycine max
cattattaggaattatggagtccttgttgacaaccacagaactagcaaatattgtgccaaagctaaaaaatgctagcctctcagtttttgtagaaacatttagcaatgagtttgtgtctcaagcatgggatttcttctcagatgcaactgttgagatcaacacatatattacgggagcacaaattgatggtatcatcacagacttccctaaaactgctgacagatacagaaggaacaaatgcttaggtttgggtgacaacaaacctacttacatggaacctgttca

SEQ ID NO: 48353 - DNA, 280 bp, Glycine max
aacaacttctgctacttcctactccaaccgcacttctgctccgcaattatcatgggcaaggtcaagatcggtatcaacggatttggaagaattggccgtttggtagccagagtggctctgcagagagacgatgttgaactcgttgccgttaacgaccctttcatcaccaccgattacatgacatacatgtttaaatacgacagtgttcatggacactggaagcatcacgatgtcaccgttaaggacgagaagacccttctcttcggtgacaagccagtca

SEQ ID NO: 48354 - DNA, 247 bp, Glycine max
ttaccacttgccgtcaaagtaattgggagatcactcagtcatcagccttctgagttgtggctaaagatggtggaagaattgtcacagcattctatacttgattctactactgaactacttacatgcctccaaaagatcttgaatgttttggaagatgatcctgtcatcaaggagtgcttcatggacctagggttatttcctgaagaccaaagaattcctgttaactctctcattgatatgtgggcag

SEQ ID NO: 48355 - DNA, 280 bp, Glycine max
taaagcttgctacattctgctttgctcgaaattctcatcatgtcaagcctcaatgcggctgaacccatagcatttctttaacctttgcagtttcatggcttccctcacttgttctgtatcaagccaatgaccatttctgctatgtacaatctgccatgaagcttacaagccgacacgagagagctccattctcttgcacttggtttcatgggcattgttctcagtattttcagagcatcttcaagcttccctgaccttccaagaagatcgactaggcatt

SEQ ID NO: 48356 - DNA, 248 bp, Glycine max
cactgccagatttcttcatggccgatcagtttactagccaggttcaagccttgagaagttttgagttctatatatgctactatggttggggagacttcaaacaaagagaaacatcttgcaagtcaaacaggatattcatagctttttcgttcattcctgctgtgattccatactggtcacgcttccttcaggtacaaaacttcattccactctcgtctgatgttgagattttccagtagttatatatg

SEQ ID NO: 48357 - DNA, 248 bp, Glycine max
ctcatgatgcccctagatgaagaagttctttctaaggttgcacaatacatggttgatgaatggtttgattgtgttgatgacgaggattcctttgaggaagtctctttaagtgcagcactcaatggtgttgagggtttggactatatgggcagaattcctcttgccacatctgagggttttcctcatgtgctttcacgcaaaaatggtgataaaggctgaaggagatttgtatctggggatggtgaaga

SEQ ID NO: 48358 - DNA, 221 bp, Glycine max
ctgcagggggtctagtttgctttcttgacatttatcgtcaaaatttctatgtttgtaacccattgactcaatccttaaaggagttaccagctcgttcagttagggttgggtctcgtgcgtctgcagggatgacagtaaatggaaactcaactagtgctggctacaagatcctattagttggttgtgatggagaatatgacatttatgactcagtgacaaag

SEQ ID NO: 48359 - DNA, 184 bp, Glycine max
ccaatcaccgccgaattacccatctatttggcgaattcgttgaacagtttgcgtctggagggtcaaacaaccgctgcaattgagattctgcagcagttcaactgggaggtgccggattgggttattgtacccgggggcaatctgggaaatatttatgctttttacaagggttttaagatgtgca

SEQ ID NO: 48360 - DNA, 268 bp, Glycine max
cccagaccgcggtcaggcttgtgcttcccggtgaattggccaagcacgccgtttctgagggtaccaaggccgtcaccaagttcaccagctcatgaaccgactattatttggattttgtttctggttgcacacacaaatctgttctatgtatctggagacttatgtttggattttgatcagtaattgtgcatgaacgttgtagtggtgctgatatagttagtatattcttggtatggtacatggagtgggctgtttcagtattaatgca

SEQ ID NO: 48361 - DNA, 253 bp, Glycine max
gaatggcacttcgttgcttggtgatgtcccaatctgttctcttcactcttggtcttgcgagagaaagccatgccagagacgaagatttttggcatgctgtttggccaaacactcccattccaagttcattgcgagatcttctaaagcctggccctgcaagtgttgacatcgatgatcaacctatgcaaattgaagaaacacagtacccgaaaaccttcttctatccagaagaccttcatccaggcaaaacaat

SEQ ID NO: 48362 - DNA, 268 bp, Glycine max
cgagcaagaaggacgggaggtcggggattaccgcggcggatgaggcggcgacggcggaggctgcggcggtgatgcggatggagatggagagggagctggaggagaaagtaaagagagcggaggtggcgaagagtgggagtttagtattctgtgcgggtgaggcgcaggtgtatacgctggaccagctcatgaagggttcagctgaacttttagggagagggtgtttgggaaccacttataaggcggttcttgatagccgtctgatggt

SEQ ID NO: 48363 - DNA, 257 bp, Glycine max
ctctctctctctctctctcaagatctgaacaatttcgttacccttttctcgattcgatcttcagatctgtcgccgaaagcaaacatggttgatcaggtccaacaccctacaatcatggacaaggttgctcgtcagctccatctccgttctggtctttcatctggtattagaagttatgatggagcctaccgccacccagctatctaccaaagaccctcttttgggaattactcgaatgctgcattgcagtttcctgt

SEQ ID NO: 48364 - DNA, 291 bp, Glycine max
aaaggtcagtgatgtggagcttgatcaaatcaaccttctcccaaatgctgagtatttgcttacgagcttcctcagcatttgggagaaggctgacttgacaccaggtcagtgatgtggagcttgagttcctcaccggaagtgacaagattgatgatgaatctgctttgtcattgtgcaaccccaatttgaagttgctccttgtcactcttggagaacatggttccagatactacaccgagaatttcaaaggatcagtagatgcttttcatgttaatacagttgatacaactg

SEQ ID NO: 48365 - DNA, 285 bp, Glycine max
atccacctgctcagaaggaggccattgaagcgctgcctaccgtcataatcaatgagaattcgcagtgttctgtgtgtctggatgattttgaagttggttctgaagccaaagagatgccttgtaaacataggtttcatagtgggtgtatccttccctggctggagcttcatagttcttgtccagtttgcaggcttcagttgccattggatgagtctaagcaagactctgatctgtcaagggatagcagaagccaaagggaggatgaaagtattgaacatgacaatg

SEQ ID NO: 48366 - DNA, 273 bp, Glycine max
aagaagtatatgcttgctaaggaaaacattaaagaggtaccatctttccagagtagaaagcttcttttggcatgctctctgaacttgatgtcctgttacttgaagacaagccagtataatgaatgcataaaagaaggttctgaggttttggcatatgatgcgaagaaccttaaggctctttatcgaagaggtcaagcttataaggaactgggtctactaaaagatgctgtttctgatctgagcatggcacttgaagtgtccctgatgatgata

SEQ ID NO: 48367 - DNA, 289 bp, Glycine max
aacagagtatgtgttcggtggatacgagtactgtattcaaattttgcaaggttttgtaaggaccaggagtatctgatatctctgcatgggaaagcagcaagggagagattcgactatgtggagggtttcgtgatagttgatgaagggctgatcaacaattggaggtcttcgttctttgcagctagtaaccctgttaaaatcacttccctcaacgctgacggaggtgttttgtactgcttggagattaccaaaaactacgaccaagggaacgcagattctgttgatgagg

SEQ ID NO: 48368 - DNA, 280 bp, Glycine max
gaaaatgactatttggttttcaatttcaatgattacccaaatggaattgtgacacttttcaattttcttgtcacggcaacctgggacgaagttatgacgagctacaaggaattaactgggacttcttggacttatttgtacttcattagcttctacttaattactgttttgctgcttttgaacttgattattgcttttgtcttggaggcattctttgccgaaatggaacttgagtcatcagaaacttgtgaaggaaatggcaaggaagttgaaggagata

SEQ ID NO: 48369 - DNA, 285 bp, Glycine max
gctccattggttctgaggctgcttgctctggtgcagacagtggcacagtctgttccatttccttttcagctgagttaactcatcctgaaaacattgaatttgttcataagcaagtatctcaaacaatagaaacaagaataaatagtacattatcattcaatcacacaatatttggtataataagtttgttgatttttataataattatcttatgagtcattcaaataatcatgtctaattgattaatagtgtaaaacttttaagtacatatgtactaaattctgg

SEQ ID NO: 48370 - DNA, 283 bp, Glycine max
ctctgggttgatgaccaatgctcccttcatgttgaatgtagactgtgacatggttgtgaacaatcccaagtttgtcctgcatgctatgtgcattttgatggattccaagagtgggaaagaagttgcttttgttcaatgtttccagcaattctacgatggaataaaagatgacccttttggaaatcagtgggtggctgcctatgagtacataatacggggcatggcaggacttcagggaccatactatggaggaacaaacaccttccatagaagaaatgctatt

SEQ ID NO: 48371 - DNA, 283 bp, Glycine max
ctcaattatttctttccgcggttttggtgattctgaactctacgttttgttcgattctttctatccgcagatgtgttggatccattttttccgcctcggagtttgagccaggttctgaacatgatggaccaggtcatggacaatccgttcctctccgcgtcgcgcgggatcggagctggcgctggagtgcgtcgcggatgggacgcgaggcagacagacgatgctctgcatctgcgcgtggacatgcctgggctcggcaaggaagacgtgaagatctccgtgg

SEQ ID NO: 48372 - DNA, 283 bp, Glycine max
tgagtccatacgcaatgcaattatagttcttcaagatatcggggcattgtcaaatgatgaaaaactcacccaactaggggagaagcttggttctcttcctgttcacccattaatatgcaggatgcttttttttgctatattgatgaactgccttgatccagctttaactcttgcatgtgcatctgattatagagatccatttacacttccaatgttacctgaagaaaagaagagagcttcagctgccaaatatgagcttgcttctttatatgggggttgtagt

SEQ ID NO: 48373 - DNA, 204 bp, Glycine max
gggtgagccagagggttgggccttccatgaagagccaggctaaggggggagggaggttgggacagcagacgggactgtggtgcttgccgtagggggcttggaggaaggtgagggagaggaaggtggggggtgcgattaggaagagggtaaggagggagcggtggaagagagatgagtctgagtagtgttctgggatcattgttg

SEQ ID NO: 48374 - DNA, 277 bp, Glycine max
cgtgcctctagggttatcatttctccatttccattttctctctcacttttcaagaatcgtaagctatgggaaagtcttacccaactgtgagtgctgattaccagaaggccgttgagaaggcgaagaagaagctcagaggcttcatcgctagaagagatgcgctcctctaatgctccgtttggcatggcactctgctggaacctttgacaagggcacgaagaccggtggacccttcggaaccatcaagcaccctgccgaactggctcacagcgctaac

SEQ ID NO: 48375 - DNA, 278 bp, Glycine max
ctcacggttggtagacctgttgtgacaaacattgtcattcctatttgcataaaaaatgcaatttcaagccaaactgaagaaaatgctttgtctgatgttgaagttctaaggttagcagctgcagtagaaacaaattcagtacatccagtggtaaagcgattgtggatgctgctcaggctgctaattgtcataatgctaaggtaaaagatggaacattcctggaagaacctggatctggtgctgtggcaacaatttatgacaaaaaggtttctgttggg

SEQ ID NO: 48376 - DNA, 270 bp, Glycine max
cctgatttacaagcttggaggcattgacaagcgtgttattgagaggtttgagaaggaagctgctgagatgaacaagaggtctttcaagtatgcctgggtgctggacaaacttaaggctgagcgtgaaagaggaatcaccattgatatgctttgtggaagtttgacacaacaaagtattattgcacagttattgatgcgcctggacatagggatttcattaagaatatgattactgggacatcccaagctgactgtgctgttcttatcatt

SEQ ID NO: 48377 - DNA, 289 bp, Glycine max
ggataggggttaatgttgaccctagtttgccaccagaagatgtaacatttgctgtggttcccactttctcttactttgagttcataccactccacaggaatgaaaaaaatttcagctcaggaggtgatgatttcattgaagacaagcctattccactgtctcagatcaaagttggacaagagtatgaagtagtcctcacaactttcaccggactgtacaggtgcaggttaggggatgtggtggaagtggcaggcttccacaatgggaccccaaagttgaactttgtgtg

SEQ ID NO: 48378 - DNA, 283 bp, Glycine max
ggacttttctcgcaccctcgcggagctcttgtgattgatgtcaccaaagtgttgcacgagctggatttgcttccagctagggtgatcagcaccaacaccataacggttactggtgaatcaggtgaagaaaatgaggaaaaagtgctgtttgccaagaagagtgaaatagagacacaaagggaaatcactacagtttggaagaagtttgtgatggagaggaagaagatgaatggtgtttgttagagccttgtttttggatcattttttgagctacttatggaga

SEQ ID NO: 48379 - DNA, 204 bp, Glycine max
ctcaggagccacccacaaaacattagacatctgcttaaagctgatgtgcctaccatatcacagattgacgagttccattcgatgcagaggatgatgaatgctcctgattcaaatgatcatattgatctactgttgagcattgatatgttgggtttacaaggcgcaggtacagcctttccaaacaacattgcctatgatgataag

SEQ ID NO: 48380 - DNA, 264 bp, Glycine max
  unsure (1)..(264): unsure at all n locations
ccgcacgtttccctatacaccataatgctccatgcttacgcacagaaccacagactccgcgaactatcgacctctttcgtagaattcccttcaaggacgtcgtttcctggaactccatcatcaaggggtgtcttcattgcggcgatatcgtcancgcccgaaagctgttcgacgaaatgccccgccgaaccgtcgtgtcgtggaccacactcgtcgacgggttactgcgcttgggaattgttcaagaggctgaaaccttgttct

SEQ ID NO: 48381 - DNA, 170 bp, Glycine max
gttccaagcagctgtccgcactacagaatatgcccgagagattccacctctgacttggtacaggagtaccattgcccagatggcaatggcaggatttcttccttttagtgacatctacatagagctgtactacatttttgccagtgcatggggccacagcatttatacga

SEQ ID NO: 48382 - DNA, 234 bp, Glycine max
ccatcatcatggccacctctgctattcagcaatcagcattcgcaggtcaaactgctctgaagcagctcaatgagttggtccgcaagaccggtggcgccggcaaaggtcgcaccaacatgcgccgtaccgtcaagagtgctcctcagagcatttggtaactcaacattatgattattagtgttattattgttatggaatgtaactataagttggtatgcatgaacaaaacaacag

SEQ ID NO: 48383 - DNA, 179 bp, Glycine max
cgacagctacatatgttcggaggaagcggtacacgtggcaatgacgctggacactacatacatccgaggatccatggcggcgatcctctcggtcatccaacactcgtcgtgcccgcagaacacattcttccacttcgtctgctcctctagcgcgtccctcctacgcgccgcgatctccc

SEQ ID NO: 48384 - DNA, 257 bp, Glycine max
agcgaactagagagcagaggctgtatttatgcgcatagcatagcaacagccaacaaacataacaatggctgccaccttggaacctgagaaaaaaagccttctcagacaccactccgagaagcacttcaccgccggcgaaatcgtccgcgacatcatcatcggcgtttccgatggccttaccgtccccttcgccctcgctgccggactctccggagccaatgccacctcctccattgttctcaccgccggcatagccg

SEQ ID NO: 48385 - DNA, 273 bp, Glycine max
caatgtggggatctcaacttctttgaatttccgaattcaaaatcataatctattgttggtggagactgaggggcattacacaactcaaacaaatttcaccagttttgatattcatgctggccagtcatactcttttctgctttccactgaccagaatgcaagtacagactactatattgttgcgagtgccaggttcgtgaatgaatcattgtgggagaaggttacaggtgttgcaattttacactattcaaattccaaggggccagcaactgg

SEQ ID NO: 48386 - DNA, 269 bp, Glycine max
aagattcagtcagtaatcctggccatccattttcttcaggtgtgactttggctaagcttgctgctgttacaatggatgaggaggggaatgaaacttttgatacaagtggtgctttggataggctgaggaagtcagtgcaccttgagagactagctctttatcatgattctaaccagcttccttgggagattgataagagatgggcggatataaatccacaagaatggattgagatatttgaagatggcataaatgagcctactggggat

SEQ ID NO: 48387 - DNA, 268 bp, Glycine max
gaccgtggtttcgtggaatctcatgatgtcttgtttagctaagaataacaaagaggagaaggctcttgaacttttcaatgaaatgctcgagcagggttttgaacccgacgatgcttccttggtcacggtgttacctgtttgtgctcgcttgggagctgtggatattggcgagtggatccattcctatgcaaattccaaggggttcctacaagacactattaacgtggggaactcgctcgtggatttctattgcaaatgtggcaacttg

SEQ ID NO: 48388 - DNA, 265 bp, Glycine max
ggaggataggaagagcgacaaagcgaagggggagctgatgctggctgtttggatgggtacacaggctgatgaggcttttcccgaagcttggcactcggatgctgcgatggttagtgggagtcatgctcttgcgaacattagatcgaaagtttatctgtctcccaagctttggtatttgagggttaatgtgatagacgcacaggacctgatgccaactgataagggtagataccctgaggtatttgtgaaggctattctggggaat

SEQ ID NO: 48389 - DNA, 272 bp, Glycine max
tatggcttcactgttgatccaggatacactgaatggacaagatacttctctcagcctaggaagggacacaatccacttcaaggaagagcatactaccaactcctagaatgccttggggtaattaggattcactctcccatgaggtctaagaggatgaaagactggtcagatatacctagtcgagaaatgataagtgaagcacatgcagcagcattgcgcttgaaaaggagtcaagctggtcagggtggtgatttaggtcagtttggcaattg

SEQ ID NO: 48390 - DNA, 274 bp, Glycine max
cagcaattcaacagctgacaaattggctagcgaaagagcaagagcattcaacttcaattggttcttggacccaatcatattcggcaagtaccctacagagatggagaacgttcttggaagcctcttgcccaaattttccagctcacgaaaaagagaaactcaagagaggcttggatttcattggcgtcaattactacacggctttctatgtccaagattgcatgtactccgcttgtaaaccaggacccgggatctccagaacagagggttcata

SEQ ID NO: 48391 - DNA, 173 bp, Glycine max
cagttcccaaagtttattaacctttttggttatgttttatgcattagcagtgatcacgtttggtactgctgtgccagctggtcaatttgttcctggtataatgataggatcaacatatgggcgtcttgttggcatgtttgtcgtaaagtattacagaaggctcaacattgaag

SEQ ID NO: 48392 - DNA, 251 bp, Glycine max
gaaaggggtaggtgttgtacagaaatagaaattaaaaaattgagtgaaaaattaaaaggcgaaatttttttagaagaagagtgatagggatatggggaggggaagagtggagttgaagaggatagagaacaagataaacagcaagtcacttttgcaaagaggagaaatgggcttctcaagaaagcctatgagctatctgttctctgtgatgctgaggttgccctcatcatcttctccaaccgaggcaagct

SEQ ID NO: 48393 - DNA, 246 bp, Glycine max
atgaacggtaccgtttcgttgatgggatcttcattaacagcttcttggaattggaaactggtcctataacagcattgcaagatgaggaaagggagtacccacctttatatcctgttggaccacttgtccaaactggacagcatcttctgcaaatgggttggacttggagtgtctagcatggttggacaaacaacaagttgcttctgttttgtatgtttcttttgggagtggtggaacactctcaca

SEQ ID NO: 48394 - DNA, 275 bp, Glycine max
cgagccgattcggctcgagcggctcgagccatatccttgtgataatggtcttactgaaagctgtgccgggtgtttcacggagataggtgatgtgtattctatgacaggaactgttggagttcccatgacaaccattgatgccaggcttgaatctgtgccagagattgaagccaggcttgaatctctggcacagattcaagcctggcttcaatctgtgccagagatgggatatgatgccctctccaatgtaccccgtggagaaatttgtctgagag

SEQ ID NO: 48395 - DNA, 229 bp, Glycine max
aaggtgaagtatggctccaaggtgcaaattgttctgcaggacacaagcatagtgactactgaggaacaccctatgcatgttcatggattccacttctttgtagttggttcaggttttggcaacttcaacccagcaactgatcccctcaagttcaaccttgtagacccacccgtgaggaacaccattggaacacctcctggaggatgggtggccattcgttttgtggctg

SEQ ID NO: 48396 - DNA, 244 bp, Glycine max
aatcaaagccatggccacctccaacttctctattgttctctccgtctccctagccttctttttggtgctacttaccaaggcacactcgaccgataccgtttctttcaccttcaacaagttcaacccagtccaaccaaacattatgctccaaaaagatgctagtatttcatcctctggggtgttacaactcaccaaagttggcagcaacggcgtgcccacctcgggatctctcggtcgtgccctt

SEQ ID NO: 48397 - DNA, 166 bp, Glycine max
atccacattggtcaggctggtatccaggtcggaaatgcttgctgggagctctactgcctcgagcacggcatcgggcccgatgggcaaatgccaagtgacaagacagttggcggtggtgatgatgctttcaatactttcttcagcgagactggtgctggatagcacg

SEQ ID NO: 48398 - DNA, 258 bp, Glycine max
aagcctccagtgtacaagccaccagtgtacaaaccaccggtttataagccaaaaccaccggtttacaagccgaaaccaccggtttacaagccaccatataagaagccaccataaggtggtttcttgtattctttggtattctcagaatcgacaaggagaagcctgagaaggtcaattcttgttgcaagctgttgttggaggtgtggtcagggtacgaggaggaggagcaggagcaggggaagcaatgcatgaaacgca

SEQ ID NO: 48399 - DNA, 247 bp, Glycine max
ctctgtatctgtctctgtgtttgcggctgaggattccgaacgagcgaccttcttcgtttctcgtcaagtttaagtcatcatgggtaaggaaaagactcacatcaacattgtcgtcattggacatgtcgactctgggaagtcaactatcactggtcatttgatctacaagctctggaagtattgacaagcgtgtgattaagaggttcgagaaggaggctgctgagatgaacaagaggtcattcaagta

SEQ ID NO: 48400 - DNA, 240 bp, Glycine max
ggaagattggaggctgtgaaattggggatggcgttgcaggtctgtgccgtgaggagaacgtttgagagtgctttgtatgtctccaatgctgtgatagacatgtactgtaaatgcggtgacccacttgaggcccatcgcgtgtttagtcacatggtttatagcgatgtagtttcttggagtaccttgattgctggctactcacaaaactgcctataccaagagagttataaactgtatatt

SEQ ID NO: 48401 - DNA, 263 bp, Glycine max
gctatttgcagaaattgagcacatgaagaagagggagatacacttgaacaatgacaatcagcttcttagagcaaagatagcagcaggtgagaggagtcaccataatgttaacgggttgtctggaagcataagctatgaatcgatgcaatctcagtttgactcccgcggcttcttccaagtaactggattacaacctaataataatcagtatgccggacaagacaacatgtcccttcaatttgtttgaagagtttaagcttaag

SEQ ID NO: 48402 - DNA, 256 bp, Glycine max
cgctcttccaagcttgatgctgttgattccagcatggtcgaacgagatgccaccattcaagcaattcgaaagaaacttttgaaagcacaagagcgaatgaagaggtacgctgacaagaaacgcagagaggtgactttcaattgtggtgagtgggccctggtcaaattccgaccacaccggcagacatcggccaagggagctcagcgtacccccggcaaactatccaaacgcttttatggtccatttcagatactag

SEQ ID NO: 48403 - DNA, 280 bp, Glycine max
gcaagaatggcacttcgttgcttggtgatgtccctttctgttctcttcactcttggtcttgcgagagaaagccatgccagagacgaagatttttggcatgctgtttggccaaacactcccattccaagttcattgcgagatcttctaaagcctggccctgcaagtgttgagatcgatgatcaccctatgcaaattgaagaaacacagtacccgaaaaccttcttctataaagaagaccttcatccaggcaaaacaatgaaagtacaattcagcaagcctc

SEQ ID NO: 48404 - DNA, 279 bp, Glycine max
gttggtcttgatgctgacaactgcaaagttctggtcaacattgagcaacagagccctgatattgctcaaggagttcacggtcatatgaccaagaaacctgaggaaattggtgctggtgaccaaggccacatgtttggttatgctacagacgaaacacctgagttaatgccactcactcatgtgcttgctactaaactttgtgccaggctcactgaggtgagacagaacaaaacatgcccctggctgaggccagatggtaaaacccaagtgacagttgag

SEQ ID NO: 48405 - DNA, 242 bp, Glycine max
  unsure (1)..(242): unsure at all n locations
gagaaagtggagccccttgattccacacatcatgcaccacagncattagaggacaagtgttattctgttggatctaaatgtagattccgtcacaaagatggacgttggtacaatggtcaagtggtgcagttggataatgcagtggcaaaagtttcatttcttactcctacttctgagaatatgttgatgtgcaagttctttttacaacaacgatgtcgatttggtagtaactgtcgcctatc

SEQ ID NO: 48406 - DNA, 261 bp, Glycine max
ggtaaagagctggatgatcatttcctgaaagcatctggatgtataaaggaaattgctgttcttatagatatcaatggaggagatactcttcttcggcagaattctcggcatcttgataggaagagaggcaattctgcaaaggtcttcagtgtactgtcatggagtaggtattcaaagtcacccccatccaccaaagatggtgctcaattttctggtcatagtgaaccatgcaaacctggagctcattgtgccacagttaaa

SEQ ID NO: 48407 - DNA, 105 bp, Glycine max
gtttgataggtttgacgacgtgcgtggactctttgaaggtggaattcatctccctacagatgcactcactaagattagccccctaccagtgctcaaggaaatctt

SEQ ID NO: 48408 - DNA, 246 bp, Glycine max
tctacgacaggcttccaagattttgggccgttaaatcaaatcttcaggtttccagaggactcacaaccagccgggggcctggaactacttaccagtttgctttgtccttggcggacagctatttggggactctgttgccaatgaggttgcagaatcgatgtttatgagaacagatgatgatcatgcagctaaggagttcaataaagttgaatggtctgttggccaccacacccctagtgtcctcgt

SEQ ID NO: 48409 - DNA, 225 bp, Glycine max
caaatggcagcatcgtcacaatcaacgccactgaaggcggtgctggagcggaatgtggaagagattcgtgtagtggcggcgagctcaccgtgaggtatacgacgccagcctcagatgcttcggcgagaactacgttcaggaaatccttcataaagcaccacaccttcccgacgacatcgaatgccatttaatctaatcggcaatttgcagagcaacaaagtcaag

SEQ ID NO: 48410 - DNA, 289 bp, Glycine max
gaaaatgttagacagagaagcaagtcttgagagctctaaaatctggattgaaccaaagcatcaagcaactgaggttaaagttccagtaatatactacctttcccgaaatggccagcttgagcatccacatctcatggaggttccaatctcttctccacagagagtgctatgtctcaaagacgtgatagatagattgagttttctccggggacaaggaatggccaacatgtattcttggtctacaaaaaggagttacaaaaacgggtttgtgtggcaagatttgtccgag

SEQ ID NO: 48411 - DNA, 123 bp, Glycine max
caggtattgtaaatgtgagatgccttacaaccctgatgacctaatggcgcaatgcgagggctgcactgactggtaagtttcacatgtaaggtgatacttatcttcaatttattccacacaaca

SEQ ID NO: 48412 - DNA, 245 bp, Glycine max
cgtgaagaatccgaaattcacaagcctgcacttccaagtcttttttagacaattttcttctcaagtctcagcaatacaatacaacaatgggttttcgtctacctggtatcagaagggcatcatttgctgaaaaccaagcatcttcaaaagctgtggcggtgccaaagggctatcttgcagtctatgttggagagagaatgaagcggtttgtgatcccgatatcatacttgacccaatcttcattc

SEQ ID NO: 48413 - DNA, 165 bp, Glycine max
ttgccatttctcttatctcatcagcctgttcagatagccttcatggagtcacctgttaatggcgtcgattccttatcagaggttcagaattcagtttctggggtacatcatgatcttctttcatctgggactccccgtccttcacggcctcccttgagagcatct

SEQ ID NO: 48414 - DNA, 243 bp, Glycine max
ttcaagtatgcctgggtgctggacaaacttaaggctgagcgtgaaagaggaatcaccattgatattgctttgtggaagtttgaaacaacaaagtattattgcacagttattgatgcgcctggacatagggatttcatcaagaatatgattactgggacatcgcaagctgactgtgctgatcttatcattgattcgaccactggtggttttgaagctggtatttccaaggatggacagactcgt

SEQ ID NO: 48415 - DNA, 223 bp, Glycine max
tcacaacaatcttctttcttacaggttcttgatcagtgtcaaaaccaacagggtggttgcacattgcaatggctaagcatgatgttgagggtggttccttcgctgcacaggactaccatgatcgtcctccagcaccattgattgatgctgaggaactcacacagtggtccttctacagggctttgattgctgagttcattgccacaatgctcttcctttacat

SEQ ID NO: 48416 - DNA, 251 bp, Glycine max
gtgaaatctaacaacatcttgttggatggggacttcggtgcaagagtggcagattttggagtagctaaggtagtcgatgccaccgggaaaggaactaaatccatgtccgtcatagctgggtcttgtgggtacattgcaccagaatatgcatacacgcttagagtgaatgagaagagtgacatatatagttttggtgttgtcatacttgagttggttactggaaggaggcccatagaccctgaatttgggga

SEQ ID NO: 48417 - DNA, 269 bp, Glycine max
gtttctcttgatgggaatgtcgttggtgcagtttggccctttagtgtgatctacactggaggggttaatcccctcttgtggaggcctattaccgggattggctcgttcgatcttccctcgtatgatattgaggtcacaccacttttggggaccttcgttggatgggaagagccattcggtggggttcagcgtgacgaatgcagtgaatgtttggtttgtggatgcaaatttacatctttggttggatgggaagagcagtaggacaagga

SEQ ID NO: 48418 - DNA, 265 bp, Glycine max
  unsure (1)..(265): unsure at all n locations
ctttcttttccctctctcaattccacacagcatattaacagacnacttttggaaaaggaactgctttttgagggaaaggacggaattttttgtgtgggagggtggaacccggaattcggtttgcttggggtagagaggctgaagattcagtgtaacgtgtgtgaggctgcggaggccaaggttctttgttgtgctgatcaggctgggctgtgttgggagtgtgatgagaaggttcatgcggctaacaagcttgccagcaagcacc

SEQ ID NO: 48419 - DNA, 270 bp, Glycine max
tccacatctcatggaggttccaatctcttctctacagggagtgctatgtctcaaagatgtgatagatagattgagctttctccggggacaaggaatggccaacatgtattcttggtctgcaaaaaggagttacaaaaacggttatgtgtggcaagatttgtccgagaatgatttcatttacccaagtagtggccatgagtatgtcctcaaaggaacacaaatgatagacgcttctttgagttttcgatcctgcgaaacatacaacatcaa

SEQ ID NO: 48420 - DNA, 255 bp, Glycine max
gtcaaagctgatggtgcaaacatcaagccgattccgccgaagccactcaccatctccgacctcttgccggccccgatgcacggctcgcagctgcgcgtggcgtaccaaggcgttcccggcgcgtactccgaagctgcggcggggaaagcgtatccgaacggagaggcgattccgtgcgaccagttcgaggctgcgtttcacgcggtggagctctggatcgcggatcgcgcggttttgccggttgaaaactccctc

SEQ ID NO: 48421 - DNA, 233 bp, Glycine max
atgacattcctatagtgacagatgtgcatgagaccatccagtgtgaagcagttggcagagttgcagatatcattcagattccagcattcttgtgtcgccaaacagatcttctagttgcagccgccaaaactcggaaaattatcaacattaagaagggccagttctgtgctccttcttaatgttgataattttcccagttttggctgctgcaactagctagttctagatcgcga

SEQ ID NO: 48422 - DNA, 251 bp, Glycine max
ggatgattcacctgctgtcgttagtctggcttgcggcagtctttcaggcattgcatcatcaacagcaacgtttccgttggatcttgtgaggcggaggaagcaacttgagggggctggtgggcgagcccgtgtgtatacaacaggcctctatggtgtgtttaggcacataattcagacagaaggggttcgtggtctctacagaggaattctgcccgaatattacaaggtggtgcccggtgtaggtatttgtt

SEQ ID NO: 48423 - DNA, 282 bp, Glycine max
atctaaatcatgctcatgcagttgattccctacagaattctgagaaaggaggagctgctttacttggtgtttgtcgaggaaaggtttctgaaggaattgatttctccgatgataatgccagagtagttattattgttggtattccatttcccaatataaatgatattcaagttgcactgaagaagaaatataatgacacctacaaatcatccaaaaatcttttgagtggaagtgagtggtactgccaccaagcattccgagttttaaatcaagcagcagggc

SEQ ID NO: 48424 - DNA, 283 bp, Glycine max
gcataaaatggttagatgataaaccgaaacaatctgttgtttatgtttcttttgggtccgtggtagtactcaacgaagagcaaatagaggaaatagcttatggtttgagtgacagtgaaagttacttcttgtgggtactcagagaagaaactaagcttcccaaagattttgcaaagaagtcagagaagggtttagtaattgggtggtgctcacaactaaaagttttagctcatgaagctatagggtgttttgtaacacattgtggttggaactccacattgga

SEQ ID NO: 48425 - DNA, 275 bp, Glycine max
taaagaacaaatgacaattagaaagaaagcttttgcaataatagaagaagtttttgagaggcatggtgccactgccttagatactcctgtttttgaattgcgagaaactctcatgggaaaatatggagaagattcaaagttgatttatgatcttgctgaccagggtggggagcttctttctttgaggtatgacttgacagttccatttgctaggtttgtggctatgaatggtctggtatctttcaaaaggtaccaaatagccaaggtttacagaa

SEQ ID NO: 48426 - DNA, 178 bp, Glycine max
cggctcgagcttgcccatcaacttctttaatgtgcaccggttactcatcaccagcgttatggtggctgcaaaattcatggatgacttgtactacaacaatgcttactatgcaaaagttggaggaattaccacaatagagatgaactttcttgaggtggactttttatttggtttgggt

SEQ ID NO: 48427 - DNA, 279 bp, Glycine max
ctaccttcagaagatatatccagacgagtggaaaaactttcttgcccgaattggccgtgatgaaaatacacttgagagtgaactttatgataatcctagtgatattcttgaactgcgattttgggcttcatatcgggggcaaacattggccagaacagttcgggggatgatgtattatcggaaagctcttatgcttcagacctatttggagaggacaacagcaggagatttggaggctgcaataggttgtgaggcagtaactgatacacatggctttga

SEQ ID NO: 48428 - DNA, 277 bp, Glycine max
tccggagcttgtttcctacatctaccaaagtgaaatgtttgagtgacgccgggtttttcctagatgcagttgatgtatctgggggtcacacactgaggaatctgtttggaggtgtagttaagttacaggaggtgcaaaaaaatctgccaaatagttgtctcaaccaactggacccaacttcgtgtttttttcctcagaatttgatcaactatgttgagactccactgtttctgctcaatgcagcttatgatgcatggcaggtccaagaaagtttggt

SEQ ID NO: 48429 - DNA, 272 bp, Glycine max
ggcaatcaagacactctctatgctcactcactgcgccagttttacaagtcatgccgcattgagggcagcgtggacttcatctttggaaacgctgcagcagttttccaagactgccaaatcctagttcgtcccaggcagtgaagccagagaagggtgagaacaatgccatcacagcacacggcagaacagaccctgcagaacccacaggctttgttttccaaaactgtttgattaatggcactgaggaatatatagcattgtacctcagcaag

SEQ ID NO: 48430 - DNA, 279 bp, Glycine max
cccaattcactgatgaagagttgaggagtcaaggccgttgccctatgacaccggaagaggttggattgttgctagcagctatgggatttgacaatagcactcgtttatatcttgcctctcacaaggtctatggtggagaggcaagacttcacatttgagggaattatttcctcaaagttgaaatgcttgccgtgaaccctcacctaacaatcaaccctaccattccaaagctcgaacgtgaacagtgagtgagtgagttattcagaagccaggatttgg

SEQ ID NO: 48431 - DNA, 261 bp, Glycine max
caaaaggatcttggagaagattgtgcagccgaacagaaaggattggagcaccaggctagatgatgctctttgggcgcataggactgcctacaaagaacccataggaatgtcgccttatcgggttgtctttggcaaggcatgccacttcctatagagatagagcacaggtcctactgggctgtaaagacctacaacttctttattgatcaggctggagaggaaaggacgtagtaactaagtgagctagatgagatccgttta

SEQ ID NO: 48432 - DNA, 274 bp, Glycine max
ctcgagcggattcggctcgaggactggaatgagtgatttgactccctataaatggcacaagtcaaaatggaggtgcatgatggtcagatgggatgaggatattgagattagtcatcaagatagagtatctccatgggagattgatccttcttcgtctcttcctcccttgagcattcaatcctccagaaggctgaagaaactgaggccaggtctgcaggctgccacacccagtcacctcaccactggaggcagtgggtttatggactctgaggag

SEQ ID NO: 48433 - DNA, 274 bp, Glycine max
ggaaagtgttgtttttctttttttcatttgcattgcaaagcaaaaaccttgcacattgcaatggcttccaacaaggttattgccaccatcttggttctttctctccttgcctactcaacatcattcaccaatgcatgtggcacatgccacccaaaacctactccttctccccctcctccatcagggaagtgccccaaggacacattgaagctaggggtgtgtgctgatgttctaggacttgttaatgttgttgttggttcccctgtctctagca

SEQ ID NO: 48434 - DNA, 273 bp, Glycine max
  unsure (1)..(273): unsure at all n locations
ctcatttcaatttgcacttgcatttgcgtttcatttggcgttttgtttctttctggaagcttcgttcgggcatcaatggcgtccttcgatgaaggtgctcccggaaactccaagaacggcgtgaagatcttcaaaaccaagtgcgttcagtgccacaccgtcgacaaagctgncggccacaaacaaggtatctatcgtcagtcatcatcttcgtttccccttttttctttaccctaattaacaatcagatctacgattccgatgctactttta

SEQ ID NO: 48435 - DNA, 258 bp, Glycine max
ccctctctctatctctcacacacactttctctctctctctctctcacccagatcttgtagcaatcgcgagcgctcccactccacgcgaagagttcgtctacatggcgaagctggcggagcaggccgagcgctacgaggagatggtggagttcatggagaaggtctccgcctccgccgagagcgaggagctgaccgtggaggagcgtaacctcctctccgtcgcctacaagaacgtgatcggcgctcgcgcgcctcctg

SEQ ID NO: 48436 - DNA, 145 bp, Glycine max
gatgaaatccatgctcaaatgactctgcaaccactgaattctgaaagagaagtttttcccatatctgattttgggctaaagcacagtaaacatcccagtgagttcttctgcaaaactttgactgctagtgacacgagcacgcatg

SEQ ID NO: 48437 - DNA, 302 bp, Glycine max
acaggtttcttctctgtacttgattccaatatgttaactttggataccatcaaggaagcctgcacttctgttggggttgccaagcatggacggccgattgggttagacgaaaagataaaggtggatcttattgttattggatctgttgctgttgatccaaagacaggtgctcgattgggaaagggagagggatttgcagaacttgaatatggtatgctgaggtacatgggagccatcgatgattcaacacgagttgttacatctgtgcatgactgccaattggtggatgatattccagttga

SEQ ID NO: 48438 - DNA, 297 bp, Glycine max
ctcttccactacctcttcccactactcacactactcttcctcttccaagccaaagaaggagtttccattagccctttgcaattgatcacacacccacttgaccccttaacaaagcaagaaatcaccctcgtccaagccacataggttatgatgtgcgagctggtgtgataatttcaactgcatcaatttacgaccctgaagtgcataagtcacgtcaagtattatacagagggtacatttctgaattatttgtgccatatcaagacccaggtgaggaatggtattacaagactttct

SEQ ID NO: 48439 - DNA, 275 bp, Glycine max
  unsure (1)..(275): unsure at all n locations
cgagacttctaacctacctcccatcctcaatgccattgaaatttacagagtgaaagagttcccgcaacaagacacatctcnacgagatgtccatgngattacaatcatcaagtctgtttatgcggtgacaagagattcgcaaggtgatccatgcagcccgaaagactacttatgggagggtctgaatcgtacgtatcccgtaaatgactccccaagaatcataactttgaacttatcttcaagtggattgtcaggaaaaatagacccttcaattt

SEQ ID NO: 48440 - DNA, 267 bp, Glycine max
ctcctctacataaatactttgcgagaaggccctcttcttgctactcacatccacataccaagcaactctccaagaaataaaaaaaaaggcaggctcctttttatcatccgcaatgaagtacgccttcggtctcgctgccctggcagccctggctaccgccagcgatgtccacgacctcaccaaggacacctttgattcattcgtcaaggagaacgacctcgtcctcgccgagttcttcgcgccctggtgcggacactgcacggccct

SEQ ID NO: 48441 - DNA, 262 bp, Glycine max
agctagtttatcgtgaggagaatatgaacttgtctgtcttctttgttgctgcagtagttttcgtagcatggccatgccatggcgcaggctaccaaaggttccctctccgaatgaaaactggctaccgtgagcgttctcggaggtaaaatgcgcaagtcttaggcttgctgtggaagcacacaacatccgagcctttaaaaccattcctgaagagtgcgttgaaccaacaaaggactacattaatggcgaacaatttagatca

SEQ ID NO: 48442 - DNA, 262 bp, Glycine max
aatcaattcttcacgggctaactgcttatgctaagccagggcaactcttggcaataatgggtccctctggctgtggcaaatctactctacttgattctttagcagggagattaggttcaaacacaaggcaaaccgcggagattctgatcaatggccacaaacaagcactgtgttatggaacctcagcatatgtcacacaagatgatacattactcaccaccttaacggttagagaagcagtgcactattcagctcagctcca

SEQ ID NO: 48443 - DNA, 290 bp, Glycine max
cagaaaccaaaaagcggagaataaaccaaacacaaacacaaaaacctcccaggaaaaacgacaaatatgttcaactccgaacactccgattcggattgtcccacgttgccaaccgccaccaccccgacaacctcggagccgaagaaaagagggagaaaaccgattctcggacgcgagactccggtaaaccacgtggaggcagagagacaacgtagggagaagctcaatcatcgattctatgcgcttcgtgctgttgttccgaatgtttcgaggatggacaaggcttcgct

SEQ ID NO: 48444 - DNA, 259 bp, Glycine max
gtggctgactgccaagtcctcccggcgacctccgtgggtgctgaaggaggggacgagcttaggagatacatggcattcgccgcacagctgcggacaccagcaacggcaaccataatattcaagggcacaaggctcgggattaaaccagcgcccaaggtggcatctttttcggccagagggccaaacccggagtcccctgagattctgaagccggatgtgatagctcccggattgaacattctggcggcttggctagtac

SEQ ID NO: 48445 - DNA, 268 bp, Glycine max
ctcgagccgttttaaaaaaaaaataatttctttcttttccccccgaagattcccaatccagcaaccaaaggaccatggaaacgcaagaaaatcaagaaccccaactacaaaggaaagtggaagattccatggattgataacccagaatttgaggatgatcctgatctttatgttctcaaaccaataaagtatgtgggcattgaagtgtggcaggtgaaggcaggttcagtttacgacaatatcttaatttgtgatgacccacagtatg

SEQ ID NO: 48446 - DNA, 284 bp, Glycine max
tcttatgttagggtttaataaccttctgtactcatggggtgtggcatatctcccaatctcaacctcaggaattctcttatcctttcagcttgctttcaccctcattctctcagccatcattgtacaacaaaaaatcacattttcaaatcttaattctatgatcctcatcaccatgagttccgccattctagcctttaactctagtcacgagaagtcagaagggctaacccaaaaggactacatcatagggttctcttgcaccataggtgcaagcttcttgtttt

SEQ ID NO: 48447 - DNA, 200 bp, Glycine max
cacgatgttgttgatgcaagccagcaactgacagatttattgctgcaactgcttgaacggcaaaggttaaaccatggtgaagtgcaagcttttggcaccccacgtagattagtggttgctgttgaaaatctttgcaccaaacaggcagaaaaggaggttgaagttagaggtcctcctgtttcaaaagcatttgatcatga

SEQ ID NO: 48448 - DNA, 252 bp, Glycine max
atcgccaaaagagctttgagcaacatcaccaaaatgaccactgaattcgtccccaaccccaagatgctgtaccgaaacctcggtaacactggactgcgagtccccgtttttagctacggaggatggttgaccgtcggcaacacccaaaagggcgatattgtcaaggatctcatgaagaccgcgttcgacaatggtatcaacatgttcgacaatgctgaagcgtactctggcggagagtccgagcgagacatg

SEQ ID NO: 48449 - DNA, 244 bp, Glycine max
atgggaacatggaaagggctacttccaaacactcttctcctctaacgagaggctgctggctttcttgaatgtgaagaatctctaactgccagctgcagaagaagcagaatcaatatggactgatacatttgggtttagcaagatgaatccagatgagctcaccaactatagaaagaactgccatcagatggtaagtttcaaagggaccaatatgctgcataaaatggtacttcgtgtcgggtca

SEQ ID NO: 48450 - DNA, 285 bp, Glycine max
ctcgagccgcccgtgttctggtcgacttttctcccttctccacatttgctcattctcctcaccattctgctcagacaccgcacagcgaacaaatccaccattcattttcctttttcgcaacagcgcaatggctcgaagatccctcccgctcctgaagcacctcctctcgcggcggatcccggcccgatccggtgacactgatcccgggcgacgggatcgggccgatggtgactggcgcggtggagcaggtcatggaggccatgcacgcgcccgtctacttcgaga

SEQ ID NO: 48451 - DNA, 240 bp, Glycine max
taaattgtgagtgcaggatggcgcacggtgtggggaaatcctgcagaagtagggagtgttctaggaggggaagtgtttgatgtggtcttggacaacaatgtgcaaggatcttgagactgtgaggccggtgattgattgggccaagagttcaggtgtcaagcaattcctgttcgtcagcagtgctggaatctacaaaccaacagatgaacctccacatgttgaaggcgatgttgttaaagc

SEQ ID NO: 48452 - DNA, 252 bp, Glycine max
cgagaacaagcagaggaagagggagggaaagctggaccagctgggcttaacaagttaggatctagttcaacggcggagctacacccgaaagccgctgtcgccggtgctggaaaacacatgcctccggcgagtgtgatgacccgtctcatactgattatggtgtggaggaagcttattcgcaaccccaacacttactccagtctcattggtgtcattggtccctcgtggcgtttaagtcgcatgtgcacatgc

SEQ ID NO: 48453 - DNA, 277 bp, Glycine max
cagaacattcacgataccgacgaggagatcgacgatttgtacaacgccagggacgtggtgatgaagaggatggtgaaggacgagtacttcaacatggatgataaaaagtgggatgacattgttgaggacgggatcaagcacgggcttcttagggacaccaaggagtgcgaggagattctcgaggatatgctcagctgggacaaactcctacctgatgacataaaacagaaggtggaagtaaaatttaatgagctaggggacatgtgtgaaaaggtga

SEQ ID NO: 48454 - DNA, 270 bp, Glycine max
ctgacttggtggttgtttcccctgatgttggtggtgtcgcaagagctcgtgcttttgcaaagaaattatctgatgcacccttagctattgtagacaaaaggcgccatggacacaatgttgctgaggtgatgaacctgattggtgatgtaaaaggaacagttgctgtaatggtggatgatatgattgacactgctgggaccattgctaagggtgcagcactattacatgaggagggagctagggaagtgtatgcatgctgcctcatgccgt

SEQ ID NO: 48455 - DNA, 287 bp, Glycine max
  unsure (1)..(287): unsure at all n locations
gttcatttttctacatattcacacattcagntaattgaaccataggataaaaaattagatgactcatatttgtatcttagtaaatcagacttaaaataaacattcgaaatcggagttgtccgattttcatctaactggctggtactaatattctaattgtgggaatgtttgttttaaatctgatttactcagtggagataactagaaacagtgtgatgaaaatgaaggtccttgttttcttcgttgctacaattttggtagcatggcaatgccatgcgtacgatatg

SEQ ID NO: 48456 - DNA, 287 bp, Glycine max
caagcctaaaaattcttatattagatatatatttcatttctcttcattattcatattttatgtcctaggacatagatattctagatacccattatgaatcgcccgccaaagtcttcctacttctccaatgttctaattagatccgaagacaaatcaatcaaaagtcagtggacctgaattgaatcatgactatataagctattctgatattcagatttgatatagatgaaatcgtggaagcggaccttttattgatttccttggaccacgtaagacttcgtcgtccg

SEQ ID NO: 48457 - DNA, 255 bp, Glycine max
tggtggtggtggaggaggaggtggtgctggtggagcacatggtggtggatatggaggtggtgaaggagctggtggtggctacggtgcaggaaatggtggaggaggtggcggtggaagtcgaggtggaggtggaggaggtgctggtggggcacatggaggtggatatggtcgtggtgaaggtgctggacaaggagctggtggaggatatcgtggtggagcagttggtggtgacggaggcggcggcggcggctctgg

SEQ ID NO: 48458 - DNA, 127 bp, Glycine max
cgccaattactttgggtcgctgacccaggcatcacctatcagagtggggtctttccaaggggaagaaatatatgctccattcaacaccctgattccaatggtgaaccctgatgatgttgtgtttcgg

SEQ ID NO: 48459 - DNA, 219 bp, Glycine max
gccaccatcatccagaccccgcccatggtcgccgtcggcgtcgtcggctacgtcgacaccccgcgcggcctccgctcgctcaccaccgtgtgggccgagcacctctcggacgaggtcaagcgtcgcttctacaagaacctggtaccgctcgaacaagaaggcgttcaccaagtacgccaagaagcacgccgagtcgggttcggcctcgtcggtcgcccg

SEQ ID NO: 48460 - DNA, 281 bp, Glycine max
agggggtagtgtggtgtggcaaagtgaggtggagggtcggtgaaagctaaaaccaaaccaaagccttttctcgtcttctcttgttttccattttaaagaaaaatgagcgtgttttggcaggaaggtggtatggcgaaggacgttgaggttgctgagcgtggctccttctctgggaaggactaccaggatccttcatcagcagcactcattgatgctgaggagctcacaaagtggtccttttacagggctctcattggtgaattcattgccactttgctctt

SEQ ID NO: 48461 - DNA, 274 bp, Glycine max
cttttcactacttgtctcttccctttttctttccagaacaacagaacaacagtagcccaagctccaccaatggcgggttacagagccgacgacgactacgactacctcttcaaggtggtcctcatcggcgactccggcgtgggcaagtccaacctcctctcgcgcttcaccaagaacgagttcaacctggagtccaagtccaccattggcgtcgagttcgccacccgcaccttgaacgtcgattccaaagtcatcaaggcccagatctgggata

SEQ ID NO: 48462 - DNA, 285 bp, Glycine max
cggctcgagatcaacatcaaatcctccaacgttgtctcgtacaaaattcacttggacacggggttcccgaccttgacgctggaagaacaaagcttggccatatcgctgccgctaaagtacggtccctttgttgagtccattaacaagaggggtttgaacttgtcggaggtggtgtgctcctgcttcaccgtggggtggtacggggaagccaagagcactagggctttgaggttggagtgtttttccaagaatggaactgcgaatatctacgtgaggcccattagt

SEQ ID NO: 48463 - DNA, 227 bp, Glycine max
atcacgcatgtaatttttgatttgataggaaataatttgcaaagtcaagtcatgacatatctatggttcggaattaggatgaaacacttacctgtgcgagattgaaacactttcctctaaatggtcatttagaaacgaaatgctaacatccaaaatctcatttatggttatgggggatttcatcaacatactctccttccccggtaaacgcattgttcttttcactc

SEQ ID NO: 48464 - DNA, 265 bp, Glycine max
acatggagatgttcattttgcaaagttgtatagaagatctggagcagaagaacttggctttgttaactgaatgtgaaaagcatgttgaggcatcaaaattttcttacaaagttatttctgagttggagactgaaaactttatgcaactgatggaagaagagtttttgttacatgaaattagaaagcttaaaatggctattcatcaagtgtgtggggctcttcagattgatccatatggtgtgcacgacaaaggaatccagcaaga

SEQ ID NO: 48465 - DNA, 277 bp, Glycine max
agacaatcttgatgacagtttcagtgatgagaagttgaaggatctattttctgagtttggaactataatgctcttgcaggtgatgattgattcaaatggacggagtaaggggtctggttttgtttccttttctactcctgaggaagcaagtaaagctttgaatgaaatgaatggcaagttgattggacgaaagcctctatatgttgctgtggcccagcgcaaagaagagaggaaggctcatctacaggctcaatttgctcaaattcgagcacctggt

SEQ ID NO: 48466 - DNA, 274 bp, Glycine max
agctttagcaaattccaattcccaattcccaattcccaattcgaaacccttattcctttcaaagaaccacattgagtgatcgtgatggcaccaaaggcagataagaagccagcggagaagaagcccgcggaggagaagaagtccacggtgggagacaaggctccggcggagaagaagccaaaggccggaaagaagcttccgaaggagggaggcgccggcggagaagggaagaagaagaagagaaacaagaagagcgtggagacatacaagatct

SEQ ID NO: 48467 - DNA, 274 bp, Glycine max
cgactatggaacgatatttgtatctccttgcgcctctcaatgtttaaacctaatctatgaggaattctccaaggttgattggattagtagatgtattttacaagcacaaaccatatcaaagttaatatacaataatgcttcattgctcgatcttacgaagaagtacactggaggccaagaacttatcaggactggaatcacaaagtctgtatccaccttcctgtctttacagtctatgttgaaattgagaacaagattgaagaatatgttccac

SEQ ID NO: 48468 - DNA, 232 bp, Glycine max
tcaaagagcataatgtcagggatcattcacaagattggggagacgcttcatgtgggagggcacacaaaggaggaggagcataagggtgagcaccatactggagaatacaaaggggagcaccatggtgaacacagtagtgagtacaaaggagagcatcatggtgaacacaaagctggagagtaccatggtgagcacaagccagagcacaaagcggggttcctagacaaagtca

SEQ ID NO: 48469 - DNA, 236 bp, Glycine max
tttgatttccaattcaattgcaatctatcgactagctcgtagagtagcttcttccattgcttctccctctgctaacaacctcgtatatggtggagtattgtcaagcagacatttcgtgagcaaagatatcaagtttggggccgcggctcgcgccgcaatcctccagggggtaactgacgttgatgatgctgtcaaagtcaccatgggacccaagggtcacaatgtgacaattgaga

SEQ ID NO: 48470 - DNA, 272 bp, Glycine max
ctcctttcttccggagcctctcaatgtgttctacctcaggtggagcagctagggcagccacagagtaccatgtctcaaaatgctatttctttaccaccttttcctggtagggagtgctcaatagaccaagaagggagcaatgatccacaaaaccatctcttatttggtgttaatatagagccctcgtcccttctcatgcctaatggaatgtcaagccttaagggggtctgtggaaacaatggctcctcaaccttgccatatcaatcttctaa

SEQ ID NO: 48471 - DNA, 264 bp, Glycine max
agccgaatcggctcgagcaacaatgccaatgcatcaccatcaccttcttcttccccgagctctctctcttgtttctcacatgacctccctcaactccgacggcctctgcctgttagctctcaaagcggctgtggacgccgaccccaccggagttcttacttcctggtcggaaaccgatgtcaccccatgtcattccccggcaatctcctgcaccggcgacaaagtaacccaagtctccctcccaagaaaaaacctcaccggtta

SEQ ID NO: 48472 - DNA, 266 bp, Glycine max
gaccagggtatcatgttcggatatgccaccgacgagacccccgagctccttcctctgaccgtcctcctctcccacaagctgaactcggccatgaccaaggctcgcaaggattgtactctgccatggctgcgacccgacaccaagactcaggtcactgtcgagtacgcccacgatggcggtgccgtcgtccctctccgtgttgacaccgtcgtcgtctctgcccagcacagcgaggacatcactaccgagaagctccgcgaggagat

SEQ ID NO: 48473 - DNA, 257 bp, Glycine max
cagattcggaggaggaagctcagagaggaagatggaaacaggaggaaagagatggttactggaagatgatgcagaagtatattggctcggatgtaacatcaatggtgacactaccagttattatatttgaaccaatgactatgattcagaaaattgctgagttgatggagtactcctacttgttagatcaagcagatgaatcagaggatccatacatgcagttagtttatgcaatgatgtactttatgtaatcatca

SEQ ID NO: 48474 - DNA, 304 bp, Glycine max
tccttccataaggcggattagaccctccaccaaatcagagacatattgggacctttcaatcttggaaatccgggagaatttacaatgctagaacttgccaaggtggttcaagaaacaatcgaccctgatgctaggatagagtacaggccgaacacagaggatgatccgcacaagagaaagcctgatataagtagggctaaggatcaacttggctgggaacccaaggttgatctgcgcaagggcctcccactaatggtttctgacttccggcaacgcatttttggtgaccagaaggaaaaggcaa

SEQ ID NO: 48475 - DNA, 290 bp, Glycine max
ctcgagccgttttttagaaaacacaaaatatagcacatttaagataaaatatagcacatttaagcataaagaataatatattgttctctatttagaaaatatctaaacattgctattgtaaaagttgtaaatgcttataaacaccctaatattattgcagaatttatagctggacaattaaagaatagagtttcctttcgtaaagcaatgaaaaaagctatcgaattaactgaacaggcgggtacaaaaggagttcaagtacaaattgcaggacgtatcgacggaaaaga

SEQ ID NO: 48476 - DNA, 146 bp, Glycine max
cgtgagacgccatgaagggaaagccaggggaagttccgggtttttctggctcaacgccgccgagatgcagattgacgttcttgcccctggctgggacgccgagtccggcatagcgctcccttcgcaccgaatcgacacgttttgga

SEQ ID NO: 48477 - DNA, 281 bp, Glycine max
cggaagtcggggctgagcgacgggtggaactacaacacggatctcaccggcgggtactacgacgccggcgacaacgtcaaattcgggtttccgatggcctttaccaccacaatgcttgcgtggagcgtgctcgaattcggtgacgtcatgcctcccaatgagctcaggaacgccctcgtcgcaattcgttgggccaccgattatctcctcaagactgtttctcagcccaatcggattttcgttcaggtgggtgatccaaactcagaccatgaatgttggga

SEQ ID NO: 48478 - DNA, 282 bp, Glycine max
caccaatttcgctttcaccgaaggagcttatgctggaagcacgttgagcatgcttgggaggaatcccatatcggagcagaatagggagttgcccattgttggtggcactggcgtgtttagatgtgccactggctatgccattgctaatagcgttaattccgtttctacccctcaacattttgttgtcgagtacaatgttacagtgtggcatggctagtgtgttttttttttatctataaaaataaaatatgataccagagaatttataattctgttcaaata

SEQ ID NO: 48479 - DNA, 270 bp, Glycine max
ttggaggaagacatgaggacttatgacatggaatgcatatctatgagaaagagggccaatcaattcgtgactttggaggttcccgggctagctgagagcagaccctcgctggttcatggggattttatctttgtcaagctcacatctgaacgtgataataacaccacacccgtttaccagggatatatccaccgagttgaagctgatgagatctatttgaagtttgatcctggatttcacttttaccacagggatgaaaatcgctatgat

SEQ ID NO: 48480 - DNA, 287 bp, Glycine max
cagtgacagtcatctaagcactgatgaagccattggtgcatataggaaaaatggatctcctttggtcagtcttgagtactctactggatgggaccctttggctgatagtaggaatctcaatggctatagtcaagagatgttccagagtttgaggttcaacttggaggaagtggagtcagctactcagtatttctcagagttgaatctgttgggtaagaatagctttagtgcaacttatagaggagttttaagagatggatctgttgttgctgtgaagagcatcagca

SEQ ID NO: 48481 - DNA, 271 bp, Glycine max
cgcttttgagagaggcaatgacggatccgctattggagcgatacaaagtaattattctggatgaagcacatgagaggactttggctactgatgtgctatttggccttcttaaggaagtgcttagaaatagacctgacttgaagttagttgttatgagtgcgacacttgaagctgagaagttccagggatattttagcggggcccctcttatgaaggttcctggaagactacatccggtggaaattttctatacccaggatccagaaaggga

SEQ ID NO: 48482 - DNA, 267 bp, Glycine max
catttttaaggacattctcaccagcacactttgagaatggtgattggaacaagggtgggaagtgtgtgaggactatgccattcaccaagcaagaaatgaggcttgaggatggggcagttgagtacattctagagatgtatgtgacacaagtggaggagtttagagaggcacaaagggtggccacaaagagagggttggagtttctaatgatgaacactactgaaattatgttgcttaggcctgatggacaccctaacaactatggac

SEQ ID NO: 48483 - DNA, 266 bp, Glycine max
attggattatggagtggcattgcttggttggttggaatgactgtattcattgctgtgttgtctgaatatctgatgcatcctcaattgtgctggttgcagggataaagatctggctcatattgaggaacatatgaaggcattcaaggccaaaggtggtgatgtgtcttggcacatccacgatgaaagatccctacttgctctgcagggtcctcttgctgctcccgttcttcaacacctaacaaaagaggatttgagcaagctattct

SEQ ID NO: 48484 - DNA, 255 bp, Glycine max
tagacctacaacatctgggaatcggatgaatttaattctctggtgtagaagttcggtgtttagagagttgaaaagatatcagagagatttttatagctggtgtggagaatgcaaacagaagaaggcggagagagtgtgtttgtgaattatggcaccaaacaggaattactgaagagcgaaatataattggcctcgtgaactttcacatgcaaattatgttttattcggctggtgtggagaatgcagacggaagaa

SEQ ID NO: 48485 - DNA, 277 bp, Glycine max
gtaagggcaacgatattctgtgtcgcgattatgctagtcttgatggtttgattaccaagcaagttcatgagcaagatggcagacatgataaacagtctttgtggtggtgatgaaaaattgatgcgtgacaggacacacctgctgttggcttgtgttcaaggatggcaatttgtaagacagatgtttggagagttgaatgtggaatcccttctggatttccgctcacagttatttgcaatagatttttaatgagatgctcattagatatagctatgaa

SEQ ID NO: 48486 - DNA, 238 bp, Glycine max
ctcctacaaagaacctatagctcaggttattaagcgcattactgatggtggggcagatttctcgtttgaatgtgtaggtgacactgatacgataaccactgcattgcagtcatgctgtgatggatggggtttgactgtaacacttggtgtgccaaaggtgaagcctgagatgtctgctcattatgggctactcctaatgggaagaacattgaaaggatctctatttggaggatggaaa

SEQ ID NO: 48487 - DNA, 278 bp, Glycine max
  unsure (1)..(278): unsure at all n locations
gtttacgacgtgaagcacatgatgaggttctgtgacacgctctacggtagcttaccgcgcgtcaagatcttcaccaccgcaaccgtccctccgaccactaccgcctcctcacctncaacgttgacgctctcaacctcatccaggtcggcctcaccctcaccgacgccgccggcaacctccccgacctcgccggaaaccgctccatctgggaattcaacttccgtgacttcgacgtggcgcgtgacgctacgctccgattcatcgatcttctcgtcgtc

SEQ ID NO: 48488 - DNA, 278 bp, Glycine max
agtgatttcagtgagtgatcggtgttcacttgatctcatcataatcgtcagcgtcaattgaagaagatgccgatcagaaacatcgccgtcggaaggcctgaagaggcgactcaccccgacacgttgaaggcggctttggctgagttcatctcaaccttcatcttcgtgttcgccggctcaggctccggcatcgcctacgacaagctcaccgacaacggcgctgccacccctgccggcctcatctccgcctccatcgcccatgcattcgccctcttcgt

SEQ ID NO: 48489 - DNA, 269 bp, Glycine max
atcactattctccctatggagtttaatcttgtggttcgtcagaagtttttaaattttgtgaagttcattatggacaaaaagggcaagcttagttggcaaagtgggattcaacccatactccagggaatggattggtttggccaatagattactgagtaagggcaacgatatcctgtgttgcgattatgctagttttgatggtttgattaccaagcaagttatgagcaagatggcagaaatgataaacagtctttgtggtggtgatgaaa

SEQ ID NO: 48490 - DNA, 295 bp, Glycine max
  unsure (1)..(295): unsure at all n locations
cttnaccttctgctctagaaaattcagtgctgaaanatggcttcggctactctctctgtaggcaaaacagcctttcaggcaaaggggacaggcttctctgaattctctggcctccgaagctcatcaggcttccttcccttttctagaaaatcttcagaggatttccattctgtcattgccttccagacctatgcagttggaagcagtggaggatacaagaagggtgtgacagaagcaaaactgaaggttgccataaacgggtttggacggattggacggaacttcttgaggtgct

SEQ ID NO: 48491 - DNA, 295 bp, Glycine max
ccgcaagtcgaacggttgagacttgccactccaggtcagccaaatgggcttgtcttctcctcctaggaccttccttgcagatttggattcgaaaccttccttcttaggcgcttcacatcaatagcgtttgtgctttgttcacaaggacctgcttcatcatcctcatcagatggctcacgtgcggaaccacttgtagtggtggtggccccttttacttgattatctctcgcgtttggtttattagcagacaatgggcaagtacgacaaatacgacgtcgaaaagcaccgcgatgcc

SEQ ID NO: 48492 - DNA, 177 bp, Glycine max
ctttcaattttttctgattcacactatttacttccagatttattcagcaatttgaataaagttgtggttctggatgatgatgttgttatccaacaagacttatctgccctgtggaacacagacttgggagataaagtgaacggtgcagtgcagttctgctcggtaaagctgggtcaa

SEQ ID NO: 48493 - DNA, 293 bp, Glycine max
ccttgatggtaccctaacatcaagtgttggacctgagtgtgtagagttgatctcttgtgtgtagagttgatctcttgtgtgtagagttgatctctagtgtgtagagttgatctcttttgttcagagagcaatctctggtgtgttgttttgatttgattgtaaacacgggagtgtgattgacagggagtgtcaggggttctcatatctaagagtggctcttaggtagaggtcgcacgggtagtggttaggtgagaaggttgtaaacagtggctgttagaccttgaactaacact

SEQ ID NO: 48494 - DNA, 244 bp, Glycine max
tgaatctcagaattctctaaaagagatctttttctgctctttgaagaaagaagggtctttgcttgattttggagatgtctctgctctcagatctcatcaaccttaacctctccgataccaccgagaaggtgatcgcagagtacatatggatcggtggatcaggaatggacctgaggagcaaagcaaggactctcccaggaccagttagcgacccttcagagcttcccaagtggaactatgatgg

SEQ ID NO: 48495 - DNA, 114 bp, Glycine max
agcatttggtcacttgaagtcatcagattttctagcttatggaatcaaatctgtggccgaagatgtcttgcctgtgctgactgatgcattcgatggaaatctattgagccttga

SEQ ID NO: 48496 - DNA, 300 bp, Glycine max
gaacgtaaaggtcttgacattgttcgtcgtgactggagcatattagctaaagaactaggagatttttgcttgactcaaattttatcgggagggtcatgcgaagatgttgtggagtcaatccacaactcactaatgaaggtacaagaagaaatgagaaacggacaggtagcattagagaaatatgtcattacaaagacattgactaaacctcctgaagcttatcctgatgccaagaaccagccacatgttcttgtggcacaaagattgaagcaacaaggctactcttctggttgctctgtt

SEQ ID NO: 48497 - DNA, 281 bp, Glycine max
ctcgagccgttttcgatcagatgcgtgtcaggaggctgaggccgaatgagaggacttacactactttgattgatgggttctgccagaaagggttgatgaatgaggcttataaggtcttgagtgagatgattgttagtggattttcgccatcggttgtgacttacaacgcccttgtccatggatattgcttcttggggagggtgcaggaggctgtgggaattttgagggggatggttgagagaggtttgcctcctgatgttgttagttatagcactgttata

SEQ ID NO: 48498 - DNA, 270 bp, Glycine max
cgcgatctggcaaagagcttgagaaggaacccaagtttttgaagaatggtgatgctggttttgttaagatgattccgaccaaacccatggtggttgaaactttctctgagtaccccccacttggtcgctttgctgtcagggatatgcgtcaaactgttgctgtgggagtcatcaagaacgtggagaagaaggatcctactggagccaaggtcaccaaggctgcccagaagaagaagtgaatcgtgcggtttggttcatcaggggatgtcg

SEQ ID NO: 48499 - DNA, 184 bp, Glycine max
cgacagggtttggtagcgtgtgccagtgtgcgcgaaaggaatttgcttgcggataccgcgaagatcgttgagaagaataagatctgcaagcgcaaagacaatttctgcagaaagatcctcacggacgaattgttaacccttggatacgatgcctcaatttgcaaatctcgctgggaaaaatctc

SEQ ID NO: 48500 - DNA, 288 bp, Glycine max
cagtccgttgttccgagcaaacaagggtatgtaccgaaccggaacccagaccgggctcggtccaaaccattccagcagttccaagaaagccgagaaccggaaagactagaaagcccaacgctcgtgtctggtcctcgatgtcgtctttgtgttcttcggtgacggccaagaaacagaagaaaaaggtcgaggcccaaaacggtggggcccagtctctgcgacggtgcagccactgccaggtgcaccaaacgccacagtggagaaccggcccactagggcccaaaacac

SEQ ID NO: 48501 - DNA, 227 bp, Glycine max
caagatgtcagcattgaatatgatgcatgtacaattccaaatgattgtgcgttcttggttgttgccaaggttggaaatcacaaacaaattgttggttttcatgttgctggaagcactggatgactgggatatgcttcattgataccatatgtagagtcagttgtgcaagctcaacgtgctgtagtttactttgacttcgtccctgtggaggttgatagtcatgaggg

SEQ ID NO: 48502 - DNA, 228 bp, Glycine max
gctcgagaattaatacaaagtatagattgctagctatatatcaaagaaaaagcttgctttgtgtggaggctgcagagtgaattcaaggtggtgttcatggccatgatgatggattagagtcatacttatactagcggcttgcatgcttcccctttcagtggaagccatggttcgccactacaagttcaacgtggtggtgaagaatgtcacaagattgtgttcaacaaa

SEQ ID NO: 48503 - DNA, 180 bp, Glycine max
acaacatcaccgacattctcgcagccaaccccgactacagagacttcaacgacttcctctcccaaaccggaatcgccggcgacatcaacacccgccagaccatcaccgtcctcagactccatatcctcctcgactacttcgacaacaccaagctccaccagatcaccaacgggaccactc

SEQ ID NO: 48504 - DNA, 282 bp, Glycine max
cttcgcttctattttttggcaagacatctgagaactctgtgaacaacagtaccagtcagctttctgcagttggtgttgtggaggagttatttgaagagggttctgcaatgcttaccgaaaggctaggtaaggattttccgcttaataaaaattctggtattttccgttgtgcggtttgccaagtggaccaaccccctggtgatgatggtttatcagtgaactctcggccttttttctctccagcatctagtccattcctctgcacaaactgtcagaagaaga

SEQ ID NO: 48505 - DNA, 232 bp, Glycine max
cacacacatccacaaaccgcaaatatggtcgtcaaggtcggtatcaacggtttcggccgcattggtcgcatcgtcttccgcaacgccgtcgagcaccaggacatcgacatcgtatccgtgaacgaccccttcattgaggccgagtacgccgcctacatgctcaagtacgactccacccacggtgtcttcaagggtgacatccatgtctccggcaagaacctcattgtcaacg

SEQ ID NO: 48506 - DNA, 264 bp, Glycine max
caactattaattctatcattgctgcacgcaatatccactctcaattattacggttggactcggacatggaacatgggatgaaatgcagcactttgatgataacattactcaacgcttatttgataactttcagtttgtgaatttcacaaagattacgtctgagatcaaagatgcatcaaagaaggaagcagcatttgcacttgctgcccttatggaaattccaattcagtaccggataacccaaaatctacaaatcgcatgaaa

SEQ ID NO: 48507 - DNA, 269 bp, Glycine max
ctccagcagcagcagcaacaacaacaacagaaacaccatcgccatcagtaccgctcatcaatccctcacacttactacgagcagagccatgagacaaccaatgagatagtgtttggggcaatgcaggagcaggataggaagcaggagtctgtggttatcaagcctgtggattatggggagtcaatgtatgaacacaatattaggtctagaatgagttccatgggctatggttacaggtattgagtatataacagttagaagtttagatt

SEQ ID NO: 48508 - DNA, 259 bp, Glycine max
gggaggagcggcattaaaaatgcagatcttcgtgaaaaccctaacggggaagaccataaccctcgaggtcgaaagcagcgacacaattgacaatgtcaaggctaagattcaagacaaggaaggcatcactccggatcagcagcgtttgattttcgccggaaagcaacttgaagatggaaggaccttggccgattacaacatccagaaggaatcaacccttcaccttgtcctcaggcttcgtggtggtcatcgagccttc

SEQ ID NO: 48509 - DNA, 273 bp, Glycine max
ccgggtggcacggttcagattagctggcacgagagcaagcccgtcttaaccctcgatttccaccctctctccgccacactcgccaccgccggcgccgatttcgacatcaagttttggcaaataaaacccgcggggtcgccgaagaagcttcccgtagtttcctatcttagtaacctctattaccacagctctgcagtcaatgttattcgcttctcatcttccggggaattgctagcctctggtgctgatggaggggacttgataatatggaag

SEQ ID NO: 48510 - DNA, 280 bp, Glycine max
ggaggttatatcgtgaaccgtccaactctagccagaaggtttatcccagaagaaggaaccaaagaatatgatgagatggtgaaggatcctcaaaaggcatatctgagaacaatcacacccaagttcgagacccttattgacatttcagtgatagagatattgtcaaggcatgcttctgatgaggtctaccttggccaaagggataatccaaattggactacggattcaaaggcattggaagctttcaaaaagtttggaaacaaactggcagaaattgagg

SEQ ID NO: 48511 - DNA, 272 bp, Glycine max
gccagatcggatagagagtttctttatcaaattttggaagaagttatcaaagctggggcaacaactttgggcataggtgacactgtgggcataacaatgccattcgagattagacaattgattgctgatataaaagccaatgtccctggagcagaaaatgttattatttctatgcactgtcataatgatcttggacatgctactgcaaacgcaatagaggctgctcaagctggtgcaatgcaattagaagtaacaattaatgggattggtga

SEQ ID NO: 48512 - DNA, 279 bp, Glycine max
cgggactttcactagccgcagcagcctcaggaggagaataaggatgtctcacaggaagttcgagcacccaaggcacgggtcactgggatttctccccaggaagcgtgctgctcgtcacaggggaaaagtgaaggcattccccaaggatgacccatccaaggcacccaagctcactgcattcttgggttacaaggctggtatgactcacattgttagagaggtcgagaagcctgttacaattattgagacccctccaatggttattgttggtgttgtggg

SEQ ID NO: 48513 - DNA, 270 bp, Glycine max
ggcagactggccatagcatccacgctttaatcgaccactgcttcttctacttttctttcctcaagttgttatcgtccgccattcactcctcttttacatttttagggttttaactttctttcacttctttttttatactaatttgctccactgctagggttttggcgggagtcgtcgtcgtcattgaatcagccatgcctcggtactactgtgactactgcgacacctatttgacccacgattctccatctgttagaaagcagcacaatg

SEQ ID NO: 48514 - DNA, 271 bp, Glycine max
ccctgttgctgttttggttaggctgcttcgatctggcttagaaagcactgttgttggtgcattaaatgctcttcttgtgttggaaactgatgatggaactagtgctgaagcaatggctgaaagtggtgctatagaggctctcttggagctcctgggatctcatcagtgcgaggaaactgctgcaagactgttggaagttttgctccacaatgtacagatcagagaaacaaaagttactaagtcagccatcttaccattatcccattatctc

SEQ ID NO: 48515 - DNA, 267 bp, Glycine max
ctcattggaaggttgagagctgcatatgaagaaaatggaggccttcctgagaccaatccctttgcaagtggcgccataagagtctatcttagagaggtgagagattctcaatctaaggctagaggaatcccttataagaagaaaaagaagaagaggaatgttatcaagcccaacggagacacctcctcctcaaacttgcctatgcagtaataatgaagtattcatgtgatatccctaaattgtttcaaagtcatgaatctgttgcta

SEQ ID NO: 48516 - DNA, 238 bp, Glycine max
cacgatcttgactggtcttgcaaattagcagttgaaatttcttggatatctactcacaaacgtcactcttcccatgcttcttatgccatcaaaaattacagagttttagttgaacaactagaaagggtgaatgtcagtcaaatggatagcgatgcacaaattgcattctggatcaatgtgcacaatgctcttgtgatgcatgcatatttagcatacggaattccccagggttctctca

SEQ ID NO: 48517 - DNA, 252 bp, Glycine max
cttgggagttaggttctgcacgctctgcttccagcgagtgttctttcttcgtttcaacaccttaatttgcacacgctgcttcttcagcttgagaaatggcacaagaaacctttctattcacatctgaatctgtaaacgagggtcaccccgacaagctgtgcgaccagatctctgatgcagtgctcgatgcgtgccttgaacaggaccctgacagcaaggttgcctgtgagacatgcaccaagaccaacatgg

SEQ ID NO: 48518 - DNA, 261 bp, Glycine max
tggaaagaaggaaggtggattccagagaatatatttacaccaagatggtggttctggatctagacgtgggtctgtggtttcactccctggtggtgatttaccaactgatggtgaggttgtacaggctgctgctctggtgagtcggtcagccctttataacaaggaccttatgtgtcaacggccagttggaccagctatgattcatccgtctgaaacaattgcaaaagggccaagttggagtgacctttttgaacctggagt

SEQ ID NO: 48519 - DNA, 287 bp, Glycine max
catgaatcaagaacatcacggtgtgatcagtttcttgacatttttgctagtgaagggtgccgaatggttgaactgtcatgtgctgaacatgattggcatgcagctggatcacaatttatcacgcatactaccggaagatttttagaaaaactggagttggagggaacgccaattgacacaaagggctatgagactttgttgagtttggtggaaaatactgctggagatagttttgatctatactatggtttgttcttgtataatataaatgccatggagcaactaga

SEQ ID NO: 48520 - DNA, 148 bp, Glycine max
ccaaaatcccaattgtctcgaatttcttctctttttggaatggaatatttacagaatccccatgactaggaccaaaccttattctgtggtccttacataagattcctctttctcattcttaagcaagtcccgagagggcttaattgat

SEQ ID NO: 48521 - DNA, 279 bp, Glycine max
gtctccatacatcaacttgggaggttaaagagacggcaacgttgtgctgtccgccttgaccgagccagagcttcgtcttggccctcgattttgccctgtaaaactaatcccagtcacaacagaaataatcaatggcaccgaaacagaccaaggctgagaagaagatcgcttacgatgcgaactgcattgcttgccaagctaggcataaggcccttctcatatgggcttgtggttctctctgtttatgataatggttcagtgttcagccctgaggttctt

SEQ ID NO: 48522 - DNA, 129 bp, Glycine max
gacaaggaagaacgtatttaagcactctggaacggcatagtgtcagggttagatcgtcaatgcatgtatggacgcttaagaattgggttgatatgaactgttaagactttgtatgtggggaaagaccat

SEQ ID NO: 48523 - DNA, 283 bp, Glycine max
ctgacaaattgtttccatgctgactacaagcttgcaatagtgaaagtagctttagggcttggggtgctatgcctctgcagctacatcacccttccattatatgctcttgttactcagatgggctcgagaatgaaaaaatcaatatttgacgaacaaacgtcgaaggcgttgaagaaatggcacatggatgtgaaaaagaagcaaggagtgaaacttggaaattccagggtgcgagccctggatggaagctccactgcttcaacaatacactcttctggtccca

SEQ ID NO: 48524 - DNA, 278 bp, Glycine max
aacagatgctggtttatgaatttatgtctaatggcacattgagggatcacctttctgttacagctaaagatcctctgacttttgccatgagattgaagatggcattaggggcagctaaaggtcttttgtatctacactcggaagctgatcctccaatatttcaccgagatgtaaaggccagcaacatattattggactctaagttttctgcaaaagtggctgattttggactttcacggcttgctccagttccagatatggaaggagttgtgcctggt

SEQ ID NO: 48525 - DNA, 276 bp, Glycine max
tctcttcagtccaaatccatggtcctctggtgcctttgaaaactggaccgtcataaaggacatgctgaatgtgccagttctctatattattggagcctttattccagcaacaatgattgctgtgctttattattttgaccatagtgtggcatctcagcttgctcagcagaaagagttcaacttaagaaagcccccttccttccattatgatttgcttctattgggattcatggttataatatgcggtctaattggaattcccccgtcaaatggtgt

SEQ ID NO: 48526 - DNA, 274 bp, Glycine max
aagagaagcattagcaaaagcaagaagaactagtctaagcagaaatggcctcttcagtgatggcatctgtggccctcaaacctgcccctttcactgttgagaagtcctcagttagaggccttccctccctctcaaggaactcctcttcattcagagttgtggccagtggtggcaagaagatcaagactgacaagccttatggaattaatggtggcatggctttgagggaaggagttgatgcatctggcaggaaaggaaagggaaagggcgttta

SEQ ID NO: 48527 - DNA, 222 bp, Glycine max
caaaattttggaggcaagaagcagtatgtgaactgggctaggagtcacggccagtaccttacttcagatgatgatttctttaggagccctgttgttaagggttattacatgaaccatgtgaggactgttctcaacagatataacagatttactggcatgcattacaaagatgacccaacaatcatggcctgggagcttatgaatgaacctaggtgcacatcg

SEQ ID NO: 48528 - DNA, 262 bp, Glycine max
tgccaacacaaacaacaacaacacacaacttaaatcaccaccttcttctccttacaactacaagttgtctttcaaatactccatggctttaatcgtggaccttcccattggtaccccaccgcaggtccagcccatggtgttggacaccggaagccagctctcgtggattcagtgtcacaaaaaagcacccgcgaagcctcccccaacggcgtcgtttgacccttctctctcctctaccttttctacccttccgtgtactcac

SEQ ID NO: 48529 - DNA, 268 bp, Glycine max
gcgaaatgctaaggaaagaaagcaagcaatacaaaaaaaaaactcggattctgcgggtcaaatcaccctctttctcccatataagctacgactagtgtttagtgtcattccgcttcttcactctacactctctcaacacatgctttgcttagatcacagggttatgtggagagagaaactactctgattggatccctcactgtgcgggagtttctgtattattcagctcttcttcagcttcctggtttcttttgtcagaaaaagagtg

SEQ ID NO: 48530 - DNA, 235 bp, Glycine max
ctcgagccgcaccagccctcatcttccggagaacattggacatctcctctctcttcttctttgcgcgcttatggagctggagacaagaagaaataagtcttgtttactttttctagtttcactagactgtttcgatgtacgagttgtcttatttttgttttagttcaagattttgctttgagaaatatgttttacctaatcgagacatgatttactgaaaaagtacaattggctt

SEQ ID NO: 48531 - DNA, 260 bp, Glycine max
agcagaaccatctctatgttcaagagttttgcagccccatgacaaatttcttatatttgcatctgatggactttgggaatacatgacaaatcagcaagcagccgagattgttcagaagaacccacgaaatggggttgcaagacaacttgttaaggctgctctaaaggaggcagctaataaaaggaaaatgaaatataaagagcttcagaagattgagaaaggaaacagaaggacttttcatgatgatatcactgtgattg

SEQ ID NO: 48532 - DNA, 255 bp, Glycine max
cttttactcaacctcaatggactcctcctcatcgttttcgagcctccgcgcgtacctcaacgcactctctcacacccccacgcgcctcgcccaacgcgccctctccgtctccacctcctacgatgagatgagtcaggtccgctcccgctccggcaccagcatgcgcaagaccctccgctggttcgatctcgtcggcctcggcatcggcggaatggtcggcgccggcgtcttcgtcaccaccggccacgccacccg

SEQ ID NO: 48533 - DNA, 275 bp, Glycine max
atcttttataattttattcgaattcaaatataataccaaaaccgatccttgtttggccattggctctctacgtactagcggtttgaaacattacagcctcaaagagtaagttatatatatatatatatagagagagagagagatagagagaagaaattggagatagacatggggcatcactcttgctgcaacaagcagaaggtcaaaagagggttatggtcacctgaagaagatgaaaagctcatcaactatatcacaacttatggacatggttg

SEQ ID NO: 48534 - DNA, 273 bp, Glycine max
caatctttgggcttgcctctcacaaattcaaagtttctatctgggatcctgatggggtttctgaatgtcagaaagccaattctctgtcgcgggctgctgaaaactggcttaggctattgcgagtcaatcatcctgattacaattactttatgtctcattacgcatatgtgagatgacccgagtttctctaagcagaagcagcccaacttccgaataccagtttatgtaatccctgcccagtatatttgtgttgtccattaaattaacagttgt

SEQ ID NO: 48535 - DNA, 107 bp, Glycine max
ggagaattgtagtcttccatatgcaaatcatggtcacgtgatcttaggtgatccttcacccgttttgtattatcgcatcagtagcactgggattcgctgtgtggttg

SEQ ID NO: 48536 - DNA, 222 bp, Glycine max
cagagagtgatttcagtgagtgatcggtgttcacttgatctcatcataatcgtcagcgtcaattgaagaagatgccgatcagacacatcgacgtcggaaggcctgaagaggcgactcaccccgacacgttgaaggcggctttggctgagttcatctcaaccttcatcttcgtgttcgccggctcaggctccggcatcgcctacaacaagctcaccgacaacg

SEQ ID NO: 48537 - DNA, 283 bp, Glycine max
caaatttggagccgtttttgcatccattccacctcccattgttgctgcactgtactgcttgtctactcgttatgttggtatgtctcatttttaagatatactcataagatacattcaaacttttggtttactttgatacttacaataatcagcgtgtaatgttccacttccattcattatttgtaggagcgggaggtctaagttttcttcaattctgcaacctcaacagttttagaacaatatttgtattaggctactccatcttcattggcttgtcgtgtcg

SEQ ID NO: 48538 - DNA, 283 bp, Glycine max
ctcgagcgctgttactacttaaccacatattttggtgcatctcttctttttccctcacccaattcatcatggctgaaattgaataccatgcaaaatccaatactaacactcaacccctaaagctctttggcatcaacattagcaagtccccagaagatcaaactcatgaagcaggttcgaattctgagcctttcagttcaagaaagtacgagtgtcagtactgttgcagagaatttgcaaactcacaggcactaggagggcatcaaaacgcgcacaaaagaaa

SEQ ID NO: 48539 - DNA, 288 bp, Glycine max
cggaattcggtcgcctcgagcgaatcggctcgagggctcgaggagtttcttgtccacttccctttctttctagcgaatcaattctgagaagcactgacgttcaacaggttgcttcgaagtgaagtctgtaatcatgtcaagcaagtatatcatttctgctattcttggatcatttggagttgcatgggtttgtgattattatgtttcagagaagaagctatttggaggtagtacccctggcactattacaaacaatgagtgggcagaagagactgacaaaaaattgca

SEQ ID NO: 48540 - DNA, 281 bp, Glycine max
ccaatctccaactgggcaatggccagacctttcagggaatttcagtgaatacatttgatccacaatatagaggttatccattaatttatggtggagatgcgcccaacatagctggtggatataatagttcaatatccaggtattgccccgaaaattctttggatgtagctttggtgaagggaaaaattgttttgtgtgaagacagaccttttcctacatttgtgggatttgtttctggggcggctggtgttataatttcaagtacaataccttagttgacg

SEQ ID NO: 48541 - DNA, 276 bp, Glycine max
ctccaaatgttgtttataaaggaaagttggagaatcaaatgaggattgctgttaagcggtttaataggaatgcttggcctgatgctcggcagtttttggaggaatcaagatcagttggtcagcttcgtaaccaaaggttggcaaatttgcttggttgttgctgtgaaggggaggagaggttgcttgtggcagaatatatgcccaatgaaacacttgcacagcacctttttcattgggaaacacaacctatgaaatgggcaatgcgactaagagttg

SEQ ID NO: 48542 - DNA, 274 bp, Glycine max
gtccgaagtagactcaagcaaggataaaaacaaagctgagggaaaggcaacaggaggaaaatcaactggagacaaagaacccaccaaagccaaggcaaaacctgctgacaaagaagtggctgagaaagagaacgaagttagcgtcagtttgcttaatattcaagttggattaattcgcaaagcatggaagcatccatctgcagatagtttgctagttgaggagatagatgttggggaggacaaagtgcggcaggttgttagtggtttggcaaag

SEQ ID NO: 48543 - DNA, 272 bp, Glycine max
ttgaatgtagtttctcgaagcaagcttcatggattagttgcctgtggtggtgaagatggtgctgtggaatgctttgacatgcgagtgagatcttcagttggtagaattgatgctgttggacctagtggtgatgttgaccaggaggtcactgcattggaatttgatgaagatggtggtttcttaatggctgttggaagtagtgctggaaaggttctcatctatgatctgcgctcgtctaatcctgtacgaatacaggatcatatgtatggcag

SEQ ID NO: 48544 - DNA, 265 bp, Glycine max
acgttctcaacaaatgagaacacttttacagtaggagggtcttttgctgttgaccctctgacacaggtcaaagcaaggctcaacaatcatggaaagctcggggccctcctgcagcacgagatcataccaaagtcagtgtttactgtttctgtgtatttggttcaaagaagggaagaggaaggaggaaaaaggtctgaccaacttattaagttcaagaaaagggaaggggaggggaggagaaatatattgttgtgcttctataagt

SEQ ID NO: 48545 - DNA, 258 bp, Glycine max
ctccaacacagcttgtgaagcctctcgagagaaacactaggtatgtggacgctgttctgaccataccaaagggcactttattccccatgtgtggaatgaacttggcattcgaccgtgatctcattggaccagcaatgtactttggtctcatgggagatggtcaaccaattggacgctacgatgatatgtgggctggctggtgctcaaggtgatcactgatcatttggggctaggagtcaagactggtctgccctatat

SEQ ID NO: 48546 - DNA, 253 bp, Glycine max
tcgagcagaggcacatcctggtgacaatgtgggattcaatgttaagaatgttgctgttaaggatttgaagcgtggttatgttgcctcaaactcaaaggatgaccctgcaaaggaggctgctaacttcacagcccaagtcatcatcatgaaccaccctggtcagattggaaatggctatgcccctgtcctcgactgcacacttctcacattgctgtcaagtttgctgaactcatgaccaagattgacaggcgat

SEQ ID NO: 48547 - DNA, 243 bp, Glycine max
gttcagaagtttgaggtctggaactaaaggcgctctaactggagtggggttatcaataggctaccctaccaaagctgacatgcaacctggtggacttgttgtcatttcagcttctccaggaggtcctgcatatagagctggtgtttcgtctggagatgttatcctggctattgatgatacaaacacagaaaacatgggactatatgatgcagctgaacgtctacagggaccggaaggaagctc

SEQ ID NO: 48548 - DNA, 247 bp, Glycine max
aaaggtaatcttcataaagcatgtgaacttttttacaggctgttcaaaagcattttatcattaagaaatcctgttcctaaggatgtccaattccagtgggctttgactgaagcctctaaagattccaatgtaggagagttttttacaaagttagttcatagtgaaaaggcgagaatcaagtcaatatggggattcaatgatgacatggatatatcctctatcatggaagaaccacctctcttgccat

SEQ ID NO: 48549 - DNA, 246 bp, Glycine max
agcacattgatatctaaggaaggaatggaaaagatgttagggagaaattgtgggaagttgaagaccaagattgtgtgcactttgggaccatcaagtaggtcagtggagatgctggagaagcttctgaaggcagggatgaacgtggctcgcttcaacttctctcatggcactcactcttaccaccaagagacccttgataatctcagaactgcaatgaacaacaccggcattctctgtgctgtcatg

SEQ ID NO: 48550 - DNA, 250 bp, Glycine max
gttcgcagtcatctctgcctgcacaaatttatcttcactaaagcatggatgtggactccatggctatatctttaaatttggattttgttttagcatctctgtgggcaatgcacttataaacatgtatgccaaatgtggttgtttgaatggttctcgtaagatgttcctagaaatgccaaacagagacaatgttacttggagtagtttgatcagtgcctatggccttcatggatgtggtgaacaagcttta

SEQ ID NO: 48551 - DNA, 252 bp, Glycine max
atcgtgaatgcgtataaaaggaaaataaagaaattagcgtcaaaatgttgggtgtgttcagcagctccatagtgtcgccgccggaagcggttcgaggagaagaacccctccgccgtgtcggtggaggtcggagagcatgtccagctcgcttatacccaccacaacgagtcgccgtttcagcccagatcctttgctgtcaaggatgaggtgttctgcttgtttgagggagcccttgacaatttgggaaacttg

SEQ ID NO: 48552 - DNA, 229 bp, Glycine max
cgggcatttcacatactagagttcatcccagtgaaaagaaagtgggaggctgatgaatcaatcatgcgccatacgctttctacattcaaggatccacaagatcctctctggcttgcgcttttcccagaaggcactgatttcactgagcaaaagtgccttcggagtcaaaaatatgctgctgaacataagttaccggttctgaaaaatgttttacttccaaggacaaagg

SEQ ID NO: 48553 - DNA, 225 bp, Glycine max
ccagaagatatgggactctgttcctaaaccacaggcccacaaggaaaccccattaagtgaatttctcaatgtctgaagttgttgctctttctagttatgaagacaaggaagagcaatttaaagatcaggttgctagcttgcggcaacggttccatcattctatcgctcctggtgggcttgcaggggatggcgtggagtagttcctgcttctggcttttcttttag

SEQ ID NO: 48554 - DNA, 241 bp, Glycine max
ctcgagcgcaagaagtaaagaaaactattggaatattcactgagaaagcatgggctggagctacctttaatctttttctctttaccctagcaagtcatatggttggagccgtctggtacatgctttctatagagtcagaggtgtttttgtctatgattttatcagggtcaatgaaagacaagttttattgagaagttgaaagacaccttcaattttggaatatactttgatgctttagatt

SEQ ID NO: 48555 - DNA, 232 bp, Glycine max
gaaatactgcaagatattcgtgatcagcatggagttgcagtttcttacatgcaagcttggcgggggaaggaacgtagcatggctgcacttcatggaacatttgaagagggttaccgtcttctccctgcttactgtgaacaaataaggaaaaccaaccctggtagcattgcgtctgttgttgccactggacaagaaaattgttttcaacgactgtttatttcttatcgtgcat

SEQ ID NO: 48556 - DNA, 293 bp, Glycine max
ggtggtatcagttggcgtcacactgaatcaggcattcccaatgagcaaattcgagaagttagatctgatgtgagtctaattgttagatcagttgttaccgttggcaactatgacaatgtaatagattgggagttcaagccaagtggttcaatcaagccttcgatatcactatcaggcattttggaaattaaggcagtggatattactcacacagatcaaataaaagatgaccaacatggcacattggtctcagaacacagcattggtgtttaccatgaccattactacatata

SEQ ID NO: 48557 - DNA, 282 bp, Glycine max
gatattgtctaagaaaggagtcatcatattacccgacatatatgctaatgccggtggagtgactgtgagctactttgagtgggttcagaatattcagggatttatgtgggatgaagagaaagtgaaccgtgagctgaaaaagtatatgactaaagccttccgcaacataaaggcaatgtgtcaaattcataactgtgacttgcgaatgggagccttcagtctcggagtgaaccgtgttgctcgagctacacttctcaggggttgggaagcttaatagaacac

SEQ ID NO: 48558 - DNA, 240 bp, Glycine max
atcggctgaggtgggtttctttttttaggggacaggtttgtggagatacttgggagtccttactatacggcgccagaggttttgaagcggaattacgggccggaggttgatgtgtggatgctggggtgattctttatattttgttgtgtggtgttcctccgttttgggcagagaccgagcaaggtgtggctttggcgatcttaagaggtgtgattgacttcaagagggaaccttggccac

SEQ ID NO: 48559 - DNA, 258 bp, Glycine max
gcaagatatccctggaaagggagtgaaacagcaattagaacttctttgtagcatttacgctttgtttcttcttcacaagcatttgggtgattttcttgcaactggctgcatcactcccaaacagggttcccttgcaaatgagctgctgaggtccttgtattcacaggttcgtcctaatgcaattgcacttgttgatgcgtttaactacactgatcactaccttggttcggttcttggtcgctatgatggagatgtgta

SEQ ID NO: 48560 - DNA, 264 bp, Glycine max
caaccttctttctttcaggttcttgatcagtgtcaaaaccaaaagggtggttgcaaattgcaatggctaagcatgatgttgagggtggttccttcgctgcaaaggactaccatgatcctcctccagcagcattgattgatgctgaggaactcacacagtggtccttctacagggctttgattgctgagttcattgccacaatgctcttcctttacatcacagtgctcactgtgattggttacaagagccagagtgatgtaaagg

SEQ ID NO: 48561 - DNA, 243 bp, Glycine max
cgcaaatataagttcactgtggacatccctgtcacactagtcgctggaaagaacacaattgatctcttgagtttaactgtgggacttcagaactatggagccttttttgacacatggggagtggggatcactggtccagtgatattgaaaggttttgcaaatggcaacacgcttgatctctcctcccagaagtggacctatcaggttggcctccaaggggaagatttgggtctgtctagtggg

SEQ ID NO: 48562 - DNA, 259 bp, Glycine max
ccctctccgaaccctcgatcactctcacgcgctcctatattcgctcctccaccgtcgctctctcgaacaaccacaacaccatcttcatcacatggcaaacgcagcatctggtatggcagtccatgatgactgcaagttgaggtttttggagctgaaggcaaaaaggacacaccgtttcatagtttttaagattgaggagcagcagaagcaggtcattgtggagaagcttggtgagcctgcccagggctatgaagatttc

SEQ ID NO: 48563 - DNA, 245 bp, Glycine max
caaacatgcaagtgactcagtccgacgtggcagcgattctatactcctcggcaaccacgggaacgataaagggtgtgatgctcacgcaccgtaacttaaccgcgatcgccgcgggatacgataccgttcgggagaagcggaaggagccagcggtggtgctctatacggtgccgtttttccacgtgtacgggttcacgttcagcttgggggcgatggtgctgtcggagacggtggtgatcatggag

SEQ ID NO: 48564 - DNA, 286 bp, Glycine max
ctcgagccgcttcgtcaccgaggacaagcttgtcgccgttcgcgaccccttcggattcagacctttggttatgggaaggagaagtaacgggtctgtggttttcgcttctgaaacctgcgctcttgaccttattgaagcgacttatgagagacaggtttaccctggtgaggttcttgttgtggataaaaacggtattcagagtctatgcctcatgtctcatcctcaacccaaacaatgcatttttgaacatatttactttgcacttcccaattcggttgtttttggg

SEQ ID NO: 48565 - DNA, 262 bp, Glycine max
cgacgccaagcgaatgctgcagatcgtatcatcccacgttgattcttccaaaacaaccaacttgaccgaggttttgatggcggtatcaagcgctataatatgcaggcttgcctttgggaggaagtatgatgacgacggcgccgaaaaaagcaggttccatgggctgcttaatgactcgcaagctatgttgctctctttttttgtttcggattacattccgttcttggggtggattgataaactcaccgggatggttactcgt

SEQ ID NO: 48566 - DNA, 221 bp, Glycine max
gattggggaactgagagagtgagtgagtggagtagcagaagagaagatgggatctgtgtgtatctgagactgtgcatcatccctgttcctaacgattcttgtggacagacaggttgttacctgtggtaatgttccattggagtcctcctttcaaaaagttcctagatgtgtgtatacttctacaagcttgtttgaatatcgagggtgggattcaaaagcag

SEQ ID NO: 48567 - DNA, 245 bp, Glycine max
ctttctattctgttatccaagagaaaccaccccttaacccttctcaagcatctgctgattatactgcaaatccaaaagtgcaagagcttcccccaaacgtgaccaatgtgaggttcgattggaagctatgtaaggaaccgcagaatgttgattttataccctgtttggataatttcaaggcgattaaggctcttaagtctaggaggcacatggagcacagggaaaggcattgtcctgagactaga

SEQ ID NO: 48568 - DNA, 254 bp, Glycine max
cggcgccgggagagtccatggtggagcacgccgatttgaaggacggcggcggagacgcctgagctggcagattgggcggtgtaagacggagattctgcagcacccgctgtacgagcagctgctgtcggcgcacgtcgcgtgcctccggatcgccacgccggtggaccagctgccgatgatcgacgcgcactggcgcagtcgcagaatgtggtcgcgaaatacgcagtgttcggacacaacaacatcgtcgccga

SEQ ID NO: 48569 - DNA, 212 bp, Glycine max
tgccaacaatttatctggccagttaagcgagcaactaagtaagctctctaacctaaaaactttggtggtttctgggaacaggttttctggggaattcccaaatgtgtttgggaaccttttgcagctagaagaattagaagcacatgccaattcattttttggacccttgccttccaccttggctttatgccctaagcttagggtgcttaatc

SEQ ID NO: 48570 - DNA, 208 bp, Glycine max
taattccttgagtggtgagttatttgctcatgatggtatgccttaccttgacaatttagaggtctttgatgctagtaataatcagttagacggtaatctaccttccttcacgtttgtggtatcacttcggattcttcgccttgcatgcaaccagttgactggattactgcccgaagctctattgaaggaaagttcaatgatgttgtct

SEQ ID NO: 48571 - DNA, 219 bp, Glycine max
agaaggcacatttctgtggtaccacaggagccttgtttgtttgccactactatttatgaaaacattgcttatggacatgagtcaaccactgaagctgagataattgaagctgcaactcttgccaatgcacacaagttcatatctggtttgccagatggatacaaaacatttgtgggggagagaggtgttcaactgtccgggggacaaaagcaaagaata

SEQ ID NO: 48572 - DNA, 285 bp, Glycine max
ccagatgtggacatagagggtgtaacttgtgctcctacccatggtattagcattggaagcctaggagtgcacaattctcaggcatgtgtctcaaacttaaccgttcgcaacaccatcataaaggaatcagacaatggcctgaggatcaagacatggcaaggaggaacgggctcagtgacaggcctgagatttgagaatatccaaatggagaatgtgaggaactgcatcatcattgaccagtactattgcatgtccaaggagtgtctcaaccagacatcagctgtg

SEQ ID NO: 48573 - DNA, 276 bp, Glycine max
ctcgagccgaaataatctttctagctctatatatagcccaccaagccttagcaatttgaacacaaaacaagtgtttcgaatagattatcctaagtctttgggaatagtgctgcaatggcttcaagtcaggaggaggtgacccttttgggagctactggaagcccatttgtgtgcagggttcatattgccctcaagttgaagggagttcaatacaaatatgtcgaagaaaatttgaggaacaagagtgaactgcttctcaaatccaacccagttcac

SEQ ID NO: 48574 - DNA, 264 bp, Glycine max
ggggatttgtggcaccatattttatggcgatgatccatgttgctgcagcagtaagattttactataaaggattctcacctgaagaaatggcctatacttctggtggtgagaacaatacttttcctttctagggttatcattggtggccttcctagccatatgcactcttgttgagcttctttcaatgtggaacttgacacggatagaagtccaactgtgcaacatgttatctcccgaggcaccacaactctttctcgcttctta

SEQ ID NO: 48575 - DNA, 262 bp, Glycine max
gcagaaacttcagaagcagcacaattgtattccagatgaacactatgtccagacattgcttgcaatgcatgaccttgaaggtgaacttgaacgtagaacactgacctataccctatggaaccagtctacaacaaaaatggagaataaaggctggcatcctattactttcggctattcaaatgctagccctcaaaggataaaggaaataaaggttttcttctgatgcctcatacttgacttgagcatagatttaaccatttgt

SEQ ID NO: 48576 - DNA, 244 bp, Glycine max
cataatacgctcaggcctccgattccaaaacgatgtgattccgagtggaaaaagctgatggaagagtgctggagtcctgatcctgcagccaggccaaccttcacagatattaaaaatagacttcgcaacatgtcagattcagtgcccaaaaagagacataacattgctagacgatgaaacttacatttttttttcttgtaaattaatgtatgcaaatacaaaagacagatgaaaacaattgttc

SEQ ID NO: 48577 - DNA, 260 bp, Glycine max
acgagatccctgtgaaaatcgacactcagacttttgagattttactacttagacaaattgatacacttgccaatcggttaacaaattcctgaaacgaatttgtggtctactgaactctcaaagcttgcagccagtgcctttatggcacagaggatcacatctgtgaatgacatgtcagcactctgtgagactattgatgctgatgtgtcacaggttatttttatttttatttttccatttgtgattgttagttgttagtt

SEQ ID NO: 48578 - DNA, 280 bp, Glycine max
ctgaaaacccaaagtgcttctctcctctgtctttttctctctcttgctatccttttggctagtcgcactgctgcaagtgcaactccaagaagcgcagtgccaagccaccatgtttcaacatccaacagaagcctttttccttccacttttctctttggacttggttcttctgcttaccaggcagaaggagcagcaagtgtagatgggagaggaccacgcatatgggacacctacactagacagcatactgaaaagatttgggatcatagcaccggtgaca

SEQ ID NO: 48579 - DNA, 270 bp, Glycine max
ggattataacagattaagacctttgagttaccgtggtgccgatgttttcatactggctttctctctcataagcaaggccagttatgaaaatgtctctaaaaagtggattccggagttgaagcattatgctcctggtgtccccattattctggttggcacaaagcttgaccttcgggatgataagcagttctgcattgaccatcctggtgccgtacctattaccacagctcagttcaaaaacacaggagaacgtgaaggcagtctttgatg

SEQ ID NO: 48580 - DNA, 267 bp, Glycine max
ctggctacactttccaacccttcattcctcctctacctttccctgatcatcactgcaatgtgctttgctgtttcgcagcccttcatcggcgtgaactacggccaggtcgccgacaaccttccggcgccggagcctcggcggagctcctcaagtccacgaccgtcggaaaagtccgtctctacggcgccgatccggcgataatcaagtccctggcgaactccggcatcggaatcgtgatcggcgcggccaacggcgacattccgagtc

SEQ ID NO: 48581 - DNA, 273 bp, Glycine max
gggtagccagctttggaggctatctgtttgaaaaagacgttctgaccatgtcatttgctccaaaagatgtacacgaggcacaagtgtcatttgcactggaacggggaattcctgccacattaggtgtcatgggcactgtaagattaccctaccccggttctgtctttgatcttctccactgtgctcgttgtagagtcccttggcacgtagaaggtggcaagctgctcttggagcttaatcgtgtattacgccctggaggttactttgtatggt

SEQ ID NO: 48582 - DNA, 272 bp, Glycine max
cactgaactaacaaagcaaccctatgtcgaaggtggtttgtgtcaccggagccagcggcgccatcggatcatgggtggtcctactcctcctccagcgtggttacaccgtccatgccaccgtccaagatatcaaggatgaaaatgagacgaaacatttggaggaaatggaaggagcaaagagtcatctccatttttttgaaatggatcttcttgacatcgactccattgccgctgccataaagggttgttccggcgtaatccaccttgcatgt

SEQ ID NO: 48583 - DNA, 266 bp, Glycine max
ctttgcaacacaacaaaaaaagacaacacagagagaagcgtcttaataaacgctcttctctgaaaaacctgatttcttctcttcttctcttctctttcgtttcgatcttcgatctctgaaaatgagagagtgcatttcaatccacatcggtcaggccggtattcaggtcggaaacgcctgctgggagctctactgcctcgaacacggcattcagcctgatgggcagatgccaagtgataagactgttggtggaggtgatgatgctt

SEQ ID NO: 48584 - DNA, 263 bp, Glycine max
ctaggctagagggaattcaaccaaaagtttgctcttcaaatggtatttctagcagttataatgctagggaaattaagcttgtggctgttaatcccaagaaaagtagtccaaagcataaaagttcatcaaaggagacctttgctttttggaggatgcatggcagtgtgacatatgtggttctaaatctggaaggggatttgtacctaatgaagtcagtgctgaccaatgaccacatttgatgcaatcctacccccaaggacatt

SEQ ID NO: 48585 - DNA, 260 bp, Glycine max
gcgaaacagagcgataagttcaacgaccaattaatgtcgaatctggaggtgaagagggttgtttccggtgaagggttcacctgcggcgaggtaaacgacggtggactaatctgctggggacccacttcggaaaatttgggaaacattaacatttccaatgttaccgacagttttgcggttctggtggctggccggaccgccgtttgcggcgttttcaacgtttccggcgagttaaaatgctggggcgacccggtttcgta

SEQ ID NO: 48586 - DNA, 273 bp, Glycine max
aaagtatcggaacaatagcaatcgttgccgttaagattccaatgacaactataggagtacttttaatggataaatctggaagacgaccacttttgctggtgtctgcagtgggaacatgcgtaggatgcttcctggcagccttgtcattcattttgcaggacttacataagtggaaaggagttagtccaattttggcactagtgggtgtactggtatacgtgggatcttactctataggtatgggagcaattccgtgggttataatgtcagaga

SEQ ID NO: 48587 - DNA, 265 bp, Glycine max
tgaagccgccaccatatccactgaatggtttggagccggtgatgagccagcagacacttgagcttcactgggggaagctgttccaccaccacaacaaatccctgtacctccctctggaattgatactgtccaaccatctggctgggattaaactagtgttttttgatgctatgattttgccccgtccctcaatttcagtttacctgtctttctttgaagtaaaatatggatttttttttgtagcaaaggaacttgtttttctatt

SEQ ID NO: 48588 - DNA, 274 bp, Glycine max
gtttgtattctttctgctattggtgcaatcggtaatgttacccttcgacagcctgcaatgtctggtggtattgctacctacgagggccgctttgagattatatctttatcaggttctttgcagcaatctgaaaataacggtgatcgtagcagaacatgcactttgaatgtaactcttgcagggtctgatggacgtgttttgggtggtggagtcgctggaacgctaactgcagcatcaactgtacaggtcattgtgggtagctttattgcgtttg

SEQ ID NO: 48589 - DNA, 147 bp, Glycine max
cagagatgtaaggtggcgtcctggggtagacctaatacctgttcactgtcgcagtactgacaatttcgatttaaatatcactgctcttgaacaagcatttagtcaagcaagaaaacgaggagtcaaagttcgtggaattctaatttc

SEQ ID NO: 48590 - DNA, 254 bp, Glycine max
gtggatgctttatcaaacaattatgtgaggtatagaaagtacacaattgatgatattgaagctgcaacaaatttttttaccgagtcacagaagattggagaagggggttatggtccagtttataagtgccatctggaccatacacctgtggcagtgaaggttctacgtcctgacgcagcacaaggaaggtcacagtttcaaagagaggttgaggtattgagttgcattaggcatccaaacatggttctcctcct

SEQ ID NO: 48591 - DNA, 274 bp, Glycine max
agaagattctatatcattctgttgttccattattgccattgctgacaccaccattcccagtggaagttgatacacccctcttgatttggttcaacacaacagataaaggaacaacagaagattctatatcattctctgaagccaagaagcttatgaggttggtgaatgtggagtcattgaagatgaagcttggtatggaccggaaggaagtcatttgctattctgagcttcttgaggcctgtgagagtgtggggattgcaaggagtcctgagga

SEQ ID NO: 48592 - DNA, 195 bp, Glycine max
aacaagtaccccgagagacagccgattgggacggcggcgcagagccaagacgacggcaaggactaccaggaccggcgccggcgccgctggttgacccgacggcgtttacgtcatggtcgttttacagagcagggatagcagagtttgtggccacttttctgtttctctacatcaccgtcttaaccggtatgggag

SEQ ID NO: 48593 - DNA, 263 bp, Glycine max
cacaggaggaatatattcaagatggcattgactgggctaaagttgaatttgacggcaccccagggctgccttcaacctttgtgagaagaggccactggggttattatccttgtcagatgaagagtccactttcccaaatggcacaatttaacatttgctaacaagcttaaacagcatttgaattctaattcatgtttcaaaggagaaagagaccaagcctttactgtacaccattatgctgggcaggtaacctatgatacaac

SEQ ID NO: 48594 - DNA, 238 bp, Glycine max
ccaaaattatttaaccttttttcgtcggaactttagggggttctctaaaaaagatagcgggaaaaaataattcctaaagtcgagactacgaggaatgtataaaccaatgcttccatagattttattgtggtttacaattatactttcacacctgtttattggggatcatttcccaacaaataaaataaaaagagtaactgcaatgattgacataaagatttatctagttctctatgtg

SEQ ID NO: 48595 - DNA, 259 bp, Glycine max
caaggttcaagaaccagatggcaacccatgtcaaggaattgggggggccacaccatccaccattgtagtcactgccactaatttctgcccccctggtggatggtgtgaccctcccaatcaccatttagatctttctcaactgtgtttcagcaaattgcccaatacagagctggtattgtgcctgtagtttacagaagggtacggtgcatgagacgcggtggaatcaggttcaccatcaatggtcattcatacttcaatt

SEQ ID NO: 48596 - DNA, 256 bp, Glycine max
agttctcagcctgcatcatctgaggccagttcatccctgccgccagagcctattgctttggctcagtccatggggcagatggtgcttcattctgatcctgctcctactcctcctcctgcaagtaactcatcaagaggtttccccttcgacctggaaagggtagctatggcaccaagtgtgttgttaaggctaatcatttctttgctgagttacccaacaaagatctgcatcaatatgctgttacaattactccaga

SEQ ID NO: 48597 - DNA, 165 bp, Glycine max
gatagagtcccaattgagacactgcatagagatctccaagacgcatctcaaagattggagatgcttaaggcagaaaaggctaaagttgaatctgaggcgataatgtatcggaatttagctggaaagacagaagctgatcaaggagtctgtctgatgcctacaata

SEQ ID NO: 48598 - DNA, 185 bp, Glycine max
cttaattgcaagaatggcacttcgttgcttggtgatgtccctttctgttctcttcactcttggtcttgcgagagaaagccatgccagagacgaagatttttggcatgctgtttggccaaacactcccattccaattcattgcgagatcttctaaagcctggccctgcaagtgttgaaatcgatga

SEQ ID NO: 48599 - DNA, 274 bp, Glycine max
cgtgctattggggaattctgccgtgaagatgatgagctttttctcaattcaaatgctcagggcatggcattttctgacaaaaataaacagcttcaattgcctgggaaccacattgaaaatcacatgcatcaaggccagcctaatctggggaattcttttttaagtggtataaagcagcgattactttcattcatattccagggactatggaatgaagacagagatgataccttgaggatccaaaggctcaggcagaaattttacttccactttc

SEQ ID NO: 48600 - DNA, 271 bp, Glycine max
caatgagcttgctcgttggggtgtttctcatggtggcggtgaagaaagcagtgatcttggtggcgctcggagcggttattgtgcccgtcgttgttttgatcgcgtggaactgcgtttgggggagacgagggcttttagggtttgtgaaaaggtaccctgatgctgaacttagaggcgccattgatggacagtacgtcaaggttaccggggttgtaacctgtggcagtattcctttggagtcatcctaccaaagagtacctagatgtgtata

SEQ ID NO: 48601 - DNA, 280 bp, Glycine max
cagaaaaagaaaaaagcgatcatagtttcacttcggccttatccagtttagggtttcggttctctaccctatctttcacgtatcgaaaccttaaatttacgatcaggtctgagcaatctggttggtagaacctttggtcttagtgagtcaagttttatgtctgaattagacgatcaaattcctactgccttcgatccttttgctgatgcaaatgctgatgactcgggtgctgggtcaaaggagtatgtgcatattcgtgtacagcagcgaaatggtagga

SEQ ID NO: 48602 - DNA, 274 bp, Glycine max
cttccaccctttggcttattcgtgggagcaatacatatcattccttcagaggcaacaaaggagttgtaaattaagagcatggctgcacaagctcttgtatcatcatcatctcttaccttctcagccgaggctacaagacaaagtcttggaccaagatcactccaatctccatttggcttctccagaaaagcctcctttcttgttaaggcagctgctactccccctgtcaagcaaggatcagacagacctttgtggtttgcatcaaagcaaagtc

SEQ ID NO: 48603 - DNA, 263 bp, Glycine max
gtatggactcattgttggcatcatcctctcttcccgtgctggccaatccagagctgattagtataaaatttccgtggttcagtgcgctacaagcaacaggctcccctttgccgctgttgttgttgctgcaccaccgaacaacttcccctgtaaatcgcgtttcgtttgtgcaaggttttaaaagatggctgatgctgaggacattcaacctcttgttgttgataatggaactggaatggtcaaggctggttttgcaggtgatg

SEQ ID NO: 48604 - DNA, 198 bp, Glycine max
actcgagccgaatcggctcgaggaaagacctactgaagaatttacacatatcggtggtctcgcaaaacaaattgaagaacttacgagaagctatcgttttgcctattgcccatccagataagttcaagagtcttggtattagacctcccaagggtgtattgatgcatggacctcctggtgtcggtaagactatgatgg

SEQ ID NO: 48605 - DNA, 256 bp, Glycine max
ataccctgaccgaatgatgctcacattctctgtgttcccatcccctaaggtttctgacactgttgttgagccttacaatgcaaccctatcagtgcaccagctcgttgagaatgcagatgaatgcatggttttggataacgaagctctctatgacatctgcttccgcacgcttaagctcaccactccaagctttggggatctgaaccatctaatttcagccaccatgagtggtgtgacatgttgtcttcgtttccct

SEQ ID NO: 48606 - DNA, 131 bp, Glycine max
atgctgatcaaagaggccattcatgtaattagctgtggatatgaagaaaagactttatggggaacagagattggttggatttatggttccgtcactgaagatatcttatcggggttcaagatgcaatgtcg

SEQ ID NO: 48607 - DNA, 256 bp, Glycine max
tggggttgttgtgccatttgctgccattgctgttcaaatacgccttaggaggaggcgatcattctatagccactagcactcttcagttgtcaagagcaagcagcgttgttatgcttctagcatacgctgcttacatcttcttccaattgaaaacccatcgtaaattgtttgatgcacaagaggtggacgaagatgaagagaaggcagttataggattttggagtgcatttacgtggttggtgggtatgacattggt

SEQ ID NO: 48608 - DNA, 193 bp, Glycine max
cctctttagacccagatgcggtggaggctgacgctgccaagttgcccccacaaggtggaagagtgtcgctgaagaaggtgtttcgggcacggttaaaagaattttcggaatctcatcctgagggtgatgaaattccagaagggacattgcctgagccattcaatcgccaacagaaagacagtgttgtggacat

SEQ ID NO: 48609 - DNA, 152 bp, Glycine max
actcgagccgattcggctcgaggaaaaggatcagctcagggaggagaccgtagctggaaaagtaccccagggaatgcgggatgaccttatcagatgtcctccaacatataaatttgagaggcacaaaccaggtgtaggagggtatgattctg

SEQ ID NO: 48610 - DNA, 169 bp, Glycine max
cttgcctcagaagctgagctgaaaaagacagtgtttcatgacttccatgttgctcatggtgggaagatggttccatttgctggatggagcatgccaatccaatacaaggactcaatcatggactctaccatcaactgtaggcagaatggtagcctttttgatgtttccc

SEQ ID NO: 48611 - DNA, 222 bp, Glycine max
gcaattaacagcaacattgttcggataactccaccgctgtcccaatatagtagaggaagattggtggctgggtcatttcagggatacactggccatgtggatggaaaaccaagtgatgctcgtttcaatcatcccaaaggcataactgtggatgataaggggaatgtttatgttgctgatactcagaatctggccatcagaaagattggagatgctggtgtg

SEQ ID NO: 48612 - DNA, 287 bp, Glycine max
cacttttggggaagaggtcgagtttcacagcagcatggtgtacgtcaaggctcagaaatcaaaagcctacttcaagagatatcaagtcaagttcaagagaagaagagagggaaaaaccgattaccgtgccaggattcggttgattaatcaggacaagaacaaatataacactccgaaataccgatttgttgttcgctttagcaacaaggacattgttgcacaaataatatctgctagcattgctggcgatattgttcttgctgcagcatatgcacatgagctgccac

SEQ ID NO: 48613 - DNA, 288 bp, Glycine max
cattcactgagatctcatatccctccacagcttgtgcactttgacaaactgcaggtatttgatctgtcttccaacgatttttttggaaacatcccatcatttataatctctgtgccttcccttcagtacctaaactcggcctcaaaccatctaagtggtaacctatcagtgaatatggcatgtagttcttcactaacatttgtggatatctcacacaaccttctggttggaaaattgccatcctgctttggttcaatgtcttcacaggccaaagtgctatattctggg

SEQ ID NO: 48614 - DNA, 276 bp, Glycine max
catcgccatcggagccttcgcggcgctggagagaggcatcttcgtcgcgtgctcggcggggaacaccggacctcgcagcggttctgtcgcgaatgtcgctccgtggatcatgactgtcggcgccggcacgctggaccgtgattttccggcgtacgctactctcggaaacggaaaacgctttgccggagtttcgctttacagtggagaggggatgggagacgaaccggtcggtttggtttatttcagcgaccggtcgaactcgtcaggcagcatttg

SEQ ID NO: 48615 - DNA, 255 bp, Glycine max
aacatattatgcccaaaacgtttctagaaagacatagtttctttgttgtgccattataaacgtcctccaaggaaacctttaaagactgcaccacaaagaaactatctctttctagaaacatattatgcccaaaatgtaaagggaaaggttcaaaaagtggaactgctggtaggtgttttggatgcaaaggcactggtatgacacctacaagaaggcagattggactaggcatgattcaacaaatgcaacatgtct

SEQ ID NO: 48616 - DNA, 286 bp, Glycine max
atcctcttggatctctacaagagatgtgggagacttgatgatcaaattggtctactgaagcacaagttgtacttgattcaacaaggattcgctttcaatggacagcgaacaaagactgcaagatctcaaggaaagaagtttcaagtctctgtggagcaagaagccactagattgctgggaaacttgggatgggcactgatgcaacagaacaattacatagaagcagaagacgcctaccgtcgcgcgctttcgatagccccagataacaacaagatgtgcaatctgg

SEQ ID NO: 48617 - DNA, 283 bp, Glycine max
tgagaagctgcaccaatctccctcagtgctgattcctgctcttcgtacagtgggaaatattgtgactggagatgatatgcagactcagtgtattatcaatcatggtgcactcccctgccttttgaacctgttgacaaataatcataaaaaaagcattaagaaagaagcttgttggactatatcaaacattactgctggaaataaagaacagatacagactgttattgaagctggtctggttgcaccccttgtcaatcttcttcaaaatgcggaatttgacatt

SEQ ID NO: 48618 - DNA, 283 bp, Glycine max
cacaacaccatcctcgtgctcctcgaagctccaaagcaacaacagcagaaacaagaagaagaaccttatatttctttgcaaaacctgcgatccgaggaagaaagcaacgatgtcgtcgccgggaagcgcacacgcaacggcgattctgaaggaagaggtggacatagtgatccctacgatacgtaacctggacttcttggacatgtggaggccattcttcgagggataccatttgataatagtgcaggacggtgatccttcgaaagttatcaaggttcctgaa

SEQ ID NO: 48619 - DNA, 279 bp, Glycine max
gttgtaaagttgctctcaaccaattggttctcaattaggatcacattctacattagttccaaacaaaaaaccatttaaatgatcatcaagaccatgttatcaccattttaatgaatgttgttgttttgcagattcaatggtgaagatttcctaacaagacttagagggaagagtatcatgtttgtgggagactctttgggtttgaaccaatggcaatcactcacttgcatgcttcacatagctgtgccacaagccccatacagcttagcaaggaatgga

SEQ ID NO: 48620 - DNA, 284 bp, Glycine max
tgaacctgttcaacaactccatcaacgaaaccctaccttcagaaatctccctctgtaaaaacctcatccacctcgacctctcccagaatcttctcacgggcccactcccaaacacgctcccgcaacttcttaatctccgctacctcgacctcaccggcaacaacttctccggccccatccctgactcattcggaacattccagaacctggaagttctctccctcgtttcgaatcttctagaaggcacaatcccttcctccttaggtaatgtgagtactctgaag

SEQ ID NO: 48621 - DNA, 280 bp, Glycine max
tgcagattttgaacgggatttggaatcatggaatataagtcttgtgcagggaggtgtagactccagaaatttgttccacaactatatcatggtgtggatacaggatatgcaacttagtttacttgatttatgtaaagcagaaaaggtgccatgggctggagtaaccacaaaccactccacctccccatttgccgaggaaatgtatgagaaaatcaaagacaaccttaccctttacgaagttgtaatcaatagatggcctcaatactcactttatttggaa

SEQ ID NO: 48622 - DNA, 290 bp, Glycine max
tgcacatttggaaagtgttgtttttctttttttcatttgcattgcaaagcaaaaaccttgcaaattgcaatggcttccaacaaggttattgccaccatcttggttctttctctccttgcctactcaacatcattcaccaatgcatgtggcacatgccacccaaaacctactccttctccccctcctccatcagggaagtgccccaaggacacattgaagctaggggtgtgtgctgatgttctaggacttgttaatgttgttgttggttcccctgtctctagcaagtgttg

SEQ ID NO: 48623 - DNA, 286 bp, Glycine max
tactttgccttctttgcttttctcgggctaacaaaagacgacgccgttttgacccggcgaccgggaaatggtggagccggtggagcttcgctgcgaggagcagctctcgcttctgtcagattcgagcaatggtgatcggtcgtggcggttgaacttcgacgggtttcagctatcttcggagaacccgaggaggcagttgaaaccccttgccgacttcaagaattgtaacggggttctaggtcaagaagataatattgcagagtactatcagcagcaggttgaagtg

SEQ ID NO: 48624 - DNA, 299 bp, Glycine max
  unsure (1)..(299): unsure at all n locations
ttccataatacgttntctttgaaagacaattggcctcttcaacacataagtctgcatgtgaagaagaggccaattgtctttccaagatcacttatgttggctattgtaatcatgaacttcttctttgtgggtatggcattggcaaaggatataccttctgttgaaggagataaaatatatggcattgatacttttgcaatacgtataggtcaaaaacaagtattttggatttgtattttcctttttgaaatggctttcggagtttccctagtggcaggagcaacatcttctagcctttt

SEQ ID NO: 48625 - DNA, 278 bp, Glycine max
gacagatcacaagaaacaccagcagctataaaaacctgagacgaatttagatgtgggaagggagggacatcaagagtgattccagcttggatttgtccccacccaataagacgccaatgcttctcaacacgacgactaagtgcaatcttctcgcccttgctagtgcacacaggggaagtgagttgcaacttcgccaagtcattcttcacagcaactactctagcccccgtcgacattgatccaatgttcaacattaacatctctcctttagccagctt

SEQ ID NO: 48626 - DNA, 180 bp, Glycine max
agataagcaagtatgtgggcgtttccgtggttggcaagacattggcggtgatgggctttggaaaagttggatctgaagtggccacgcgcgcaacagggttgggcatgcacgtgattgctcatgacccctatgctcctgctgacagggcacgtgctattggtgtggatctggtgtcctttg

SEQ ID NO: 48627 - DNA, 256 bp, Glycine max
acgcgttgacttggtttttgctggccatgttcatgcttctgagcgcttcactcgaatttacgatgataaggctgattcatgtggaccaatgtacgtgacaattggggacggaggaaatcgggaaggccttgcgttaatgtttaagaaccctccgagcccgctctcattgtatcgagagccaagctttggacatggaaggttgcgaatactaaatgaaacacatgcacattggtcatggcaccgaaacaatgatgct

SEQ ID NO: 48628 - DNA, 275 bp, Glycine max
gatagactcaattatgcagcgatgaggatgtggtttttggggaatccaccaggcaaggcaaccattcaagttcaaaacattgaagactttacatggttgaatgcaagttacagtcccgttcttaaacagttgggttcccaatccatgattgattattacttcaaggctcatcgagcagcctctgattcaaatctgaagtttcggaatccaaagtatttgtctatcttgaaccacctccgattctatctgcctgagatctttccaaagctcaacaa

SEQ ID NO: 48629 - DNA, 273 bp, Glycine max
agatattctggagatattgactaatggaatttatagaagcgttgaacaccgagcaacaatcaacgcagagaaggagagaatttctattgctacatttcacaggcctcaaatgaacagaattgtaggtccaacgccaagccttgttactcctgaaaggcctgcactgtttaaaagaattggtgtagcagattactatagaggctatttttcacgcgagttacgaggaaaatcatacattgatgttattaaaataaaaaatacataggacataaa

SEQ ID NO: 48630 - DNA, 178 bp, Glycine max
tgttgtagtttagtactgaaaaatgggttcgaagatagcaacagtacctaccctaggcctgttggccatgctccttttgatctcctcggaggtcttagccgctagtggtggtgcgggtaactttggtggtggtaaccctagtgttggtggtggattacctggtggtggtggtgatgtt

SEQ ID NO: 48631 - DNA, 249 bp, Glycine max
cctcgagccgaatcggctcgagcggctcgagcttggtatctggggaaccaagggacaaggaaaatctttccaatgtgagcttatctttgccaagatgggaatcaaccccatcatgatgagtgctggagagttggaaagtggaaatgcaggagagccagcaaaactgatcaggcagagataccgtgaagccgagacttgatcaagaagggaaagatgtgtgctctcttcatcaacgatcttgatgcagga

SEQ ID NO: 48632 - DNA, 245 bp, Glycine max
gacaaatatggttgtacgtacaattacttggccgaaaaaactttatctgaattcgtgcagatttattgagccaacgatcttggtggatcccccactggaagcagcaattatgtcggaagagatttttggcccattgcttccaattattaccgtggagaagattgaggacagtattaaattcataaatgctagacctaagcctcttgccctctatgttttcaccaaaaaccatacactccagagaa

SEQ ID NO: 48633 - DNA, 190 bp, Glycine max
ctaaaatcacttcatcatggcttcctcgtgtgcttcctctgccattgcagctgttgccatctccacaccaagttcccagcagaatggatcactcttgggaagcacaaaagcttcttttcttagtgggaggaaactgaaggtgaacaactttacagcaccagttggagcacgatccagcactacagtttgc

SEQ ID NO: 48634 - DNA, 226 bp, Glycine max
atttaattctctctccctctctctctctctctctctctctctcttttctgagtcacaaaatattgtttttgtacaaacattaacaccatggcagatgtcctgagtgaagaacagattggtgagatcaaagaagcctttggcttgtttgacaaagatggagatgggtgcattactgtggaagaattggccactgttattcggtcattggatcagaaccccacagaag

SEQ ID NO: 48635 - DNA, 270 bp, Glycine max
gaacattgtatctgtggttggtggtaaggttaacatgggcttgaggtttcttcaagatgctgcttgcggaggaaacttgaagcagtttcttattgttgttggatgtctgtttgctggtgctgtgatcgggagctggtgcaattttatatctgtcatctatattggttttgttgcagcacatacacttccagttctctatgagaagtatgaggatgaagttgacaactttgtatacaaggtctttggtcagatgcaaaatcatatcgaaat

SEQ ID NO: 48636 - DNA, 227 bp, Glycine max
aatcgagccgatcggctcgagctggaatacctcaagccagatgatgacttctgaaatggtctactgtatagcggttgagtcactatcaatacttgagaagatgcactcaaaaggttatgtgcatggggatgtaaaaccagaaaactttttacttggtcaaccagctacagcgcaagagaagaaactgtttcttgttgaccttggattagcaacaaaatggagagaca

SEQ ID NO: 48637 - DNA, 174 bp, Glycine max
ctcagactgtctcagaccatccaaatgaatctattcatgtacttcatgttggaaagatgaggatgaagctctgtaaaggaaatacaacaattgccaaagaatactattctagttcaatgcagctttgtggagttcgaggaggtgggaatgctgcagcacaggcagtcttttggc

SEQ ID NO: 48638 - DNA, 285 bp, Glycine max
cccttttggggttttgtattgatcctgaggagggtttgtttttggtgtacaagtatgtttcagggggcagtctggagcgccacttgcatggacggaagaagggtagttcacctcttctgtggcctgtgaggtacaaagttgcgattgggattgcgaagctgtagcttatctgcatagtggaactgaaagatgtgttgtgcacagagacattaagccctcaaacattctgctttcttcaaggaagattcccaagctatgtgacttcggattagctacatggacttc

SEQ ID NO: 48639 - DNA, 228 bp, Glycine max
cttgctcactgtgattgctggctccgctgagagggctccaactctgtaaatcaatcatctttatactcttctccactcttaaatgtacaatacatctcactatataagagtggagaagagcataaagatgattgatttatccgggcgaagagaagagacaaattaagatggaggggaaggagcaggatgtgtcgctgggagcgaacaagttcccggagagacagccga

SEQ ID NO: 48640 - DNA, 241 bp, Glycine max
cacggtttgaggagtacgtaaagattgggagagataagaagtccatccagttcgagctagatgataagatattggagttgatgcaaagaaggctttccctttccgcacctatcacttctatgcagaacctagagcagccaaagctaaattgggatggcaatcaaccacaaacctccctgaagacctaaaagaacggtttgaggagtacgtaaagattgggagagataagaagtccatccag

SEQ ID NO: 48641 - DNA, 249 bp, Glycine max
ggctccaaagagacagggagagactatttctcaagggcataagaactatgacctcatgcttaatctgcagcttggtatcagacatgctgttggaagacctgctccaagtacatctcttgatttgaagtcttctgcatttgatcctaaagaaaaagtgtggactaaatttcccccagaaggatctaagcacacgccacctcaccaatcttgtgagtttagatggaaagactactgccccgtagtgttggg

SEQ ID NO: 48642 - DNA, 238 bp, Glycine max
gcactctttgcaacacaacaaaaaaagccaacacagagagaagcgtcttaataaacgctcttctctgaaaaacctgatttcttctcttcttctcttctctttcgtttcgatcttcgatctctgaaaatgagagagtgcatttcaatccacatcggtcaggccggtattcatgtcggaaacgcctgctgggagctctactgcctcgaacacggcattcagcctgatgggcagatgccaa

SEQ ID NO: 48643 - DNA, 251 bp, Glycine max
ccacatatgagcacaagtctgcttccctctctcctgttcttcctagtcctcatcctcttgctacttgacccttctgaacccgaaaacgtacccatttactggggtcaaaacgccgacgagggaactcttaatgaaacatgtgcaacacggacatactcgcatgtcatcatagccttcctttccagctttgggaatcgccagacccctcaactcagcctggctgatcattgtgacccctctactaatgggtg

SEQ ID NO: 48644 - DNA, 264 bp, Glycine max
gcagcacttggtgggaatcgtgatgtgacaggaagccagaacagcgttgagatcgatgctctagctcgctttgctgttgaagaacacaacaaaaaacagaatgcccttttggagtttgaaaaggtggtaactgcgaaacagcaagtggtttctggtaccttgtacaccatcactttggaggcaaaagatggtgggcaaaagaaggtttatgaagccaaagtttgggagcagtcatggttgaacttcaaggaggtgcaagagttc

SEQ ID NO: 48645 - DNA, 248 bp, Glycine max
attcgatctggtcctcatatgggtggacagcatcataattgctgttcctccatcctttagacctgatcctcgacagatgcgaagttatcaagatctggatgccccagaagacgaagtcactgtgatagactatcggagcttgtaggtgtctcactgggtggttggttgaattccctaatttcaatgagattgggtgggtggcattacgctttcttgatgagagctgcagtctacccttaatagggttg

SEQ ID NO: 48646 - DNA, 183 bp, Glycine max
caacgttataaggctgatttggattcaaaatccattgacgctacactggcattgcatgccagttgggagccaaggcattcaaggtactgccacaggtttccatggcagcaatatgtaaaactcggagctgttcttcgtcaatttgggtatactgtggtagccctacatggctgtttgagaaca

SEQ ID NO: 48647 - DNA, 264 bp, Glycine max
aacttcatgacgctgcccaacatcaaggttcctctcattcttggtatctggggaggcaagggacaaggaaaatctttccaatgtgagcttgtctttgccaagatgggaatcaagtgagtttctagctgaactagcccctccattatgtgcatttttagattcacgttagttcatccagaaccacattgaaatatcagctcagctaatgtaattttatgtataacatcacttgttcgatgtcatgctgaggaattgattttgact

SEQ ID NO: 48648 - DNA, 115 bp, Glycine max
gttctagatcgcgacaggccgccttttcgttttggtacttaaactacattcccatttgacttggcttttggagattccatcatcctgtattttgggttcctgttttcggacttca

SEQ ID NO: 48649 - DNA, 251 bp, Glycine max
atatccttcaacccacggtgtttatgaggcaggtattgacgaaatttgcaatattaatgtttcccttggcatcagttccaacagagacaattttcattccacacatagctgcactcgcaggatttgttccgtgtgctgagacaggtataatgcaaacattgcggtggtggtctccccttgccaaatgatatgcacgaataaccataagtccagcatattctccagcagcaccagcatttggttgcaaactc

SEQ ID NO: 48650 - DNA, 228 bp, Glycine max
cgagccgaatcggctcgactcgagcggtcgtcgccacgtggcgggaacgatctcaagcgcatacggttcagtcgagagacgttcaataaatggcaagctcaaaggtggtgggcagagaactacgacaaggttatggaactttacaatgttcaaaggtttaaccgccaagcatttcctcttccaacgcctctaagatctgaagatgagagctcaaagcttgaatcagta

SEQ ID NO: 48651 - DNA, 248 bp, Glycine max
gtgggagcaatacatatcattcattcagaggcaacaaaggagttgtaaattaagagcatggctgcacaagctcttgtatcatcatcatctcttaccttctcagccgaggctacaagacaaagtcttggaccaagatcactccaatctccatttggcttctcaagaaaagcctcctttcttgttaaggcagctgctactccccctgtcaagcaaggatcagacagacctttgtggtttgcatcaaagca

SEQ ID NO: 48652 - DNA, 254 bp, Glycine max
caagacatctgaaccctgtgtttgctactggagcatttgtcgttcctgcatctctttactttgttctaaagaaactttttattaaaccttattaccttagaaggaataaacagaaggctctggaggagaaggagaaaacttctgctcaggttaaggaagcacgagctacagcagagaaagctcagaatttacaacaaaatgtggctaataggaaaagatacaagcaattagaaacaggtggactggttattatg

SEQ ID NO: 48653 - DNA, 158 bp, Glycine max
ctcgagccgtgaactgggacgaattctcttcggctgtgaaggaagttcatgctgatcgcatgggcggtgcaactaagagattggtgatccctgacaggcccaaagaagaggattatttctatgccaatccagaggaatgttttgaactatcagatgtt

SEQ ID NO: 48654 - DNA, 243 bp, Glycine max
gttcaaaatgtgggatgggaatatggtctggtaaaaccacgtggagctattcgtccagatggctgggcttacagatttcccaagactaataccactatcttatattattggtcggctagcttatgtgatctgcagccttttaacatcacagacaaacagaccaatgtttccatgcatttagatcgccccccggctttcatgagacggttcctccatcgctttgatgttttggttcttaataca

SEQ ID NO: 48655 - DNA, 243 bp, Glycine max
ggaactcagcttcctaatcttgtatcaaagtttttccaaattggttcagtgcatcctgctctatttgaggttggactgcgttattcagcacggagatatatcagggggtaatgctcgttgtattgcaatgctaagagcatttcaagatgccattagagattactgcacaccacatgaaaaggtccttgttagggatttcgcttcaaaaatcagtagttatgtatctttctttactgaatgtag

SEQ ID NO: 48656 - DNA, 192 bp, Glycine max
tgtgagcattcagcactgaatttgggcattgcagggcacggtgaaaagcttagttgcaaaaccgtggctgaaggttgagcaagcaagacccctcgtttccagcgtcggcattcgatgaatatcggcaggccaaggagcaagttgtggttttgggatgagaggtcagaagtctcgctctggccctgccgttac

SEQ ID NO: 48657 - DNA, 259 bp, Glycine max
cacaacaagaaactgttaaagcaagcacaacaactgaaaccccaacaagcaacctcaagtttctcaacaaagcagttacaaacaagccaaggtattcatcactagcatgcactgtacaacaagtagaagatgtcaaggtagtattgaaaatgctacccatatttgcttgcaccatcatcctcaactgttgcctagctcaattgtccacattctctgttgaacaagcagccacaatggacaccaagcttggttccctaaa

SEQ ID NO: 48658 - DNA, 255 bp, Glycine max
aagcaaaacgccatataattccctcttatttgaaataatgtccgggatcatccacaagattgaggagcctccccatgtgggacggcacaagacagaggagcacaaaggagaacaccatggtgagcacaaaggtgaacacaaaggagaacaccattgtgagcacaaaggtgaacacaaaggagaacaacaccatggggagctctcggcgggacttgtggataagatcatggactagatccatggtgatggccatga

SEQ ID NO: 48659 - DNA, 254 bp, Glycine max
gggaaaatttgaatggaaatatgggcatccctatttggcatgcattcttaattttagtcagacatgggccctgtattgccttgtacggttttattctgtcacaaaagataagttggagccgatcaaaccattggcaaaatttctgacttttaagtcaatcgtcttcctgacatggtggcaaggtgtggctgttgcatttcttttttccatgggcccatttaaagggtcattggctcaagagctgaaaacacgta

SEQ ID NO: 48660 - DNA, 222 bp, Glycine max
cgacttcacacagacccaagtgctagcaaagaatcagacgagacagttcaacatcaccctgaacgcaaacctattgtatggaaatatgtctcctaggtaccacagtgtccgaactatatataccacttcaggcatcagtgggaaattaattaatttttcatttgtgatgaccgagacttctactctacctcccatcctcaatgccattgagatttacagagt

SEQ ID NO: 48661 - DNA, 240 bp, Glycine max
gtggggtggcagttgaagaggatgagaggagaagttttttggaggtggaagaggttggtttgatgggtttgaaggagaaaagaaatgggttgtttgggccagatgatttttatgcacgtgatatagtgtgggccaaagctgggagaaaggaacctttttggccagccattggtattgctcctatgactcaggcccccgagttagctcccgcgtcttgtatagccgatgcagcttgtgtaa

SEQ ID NO: 48662 - DNA, 228 bp, Glycine max
ggaaacgaattcatcccatgccttttcctgattcatctgtacctgttcaaccaagacctatgaatcctaaaaaggatattgcagtttatggatatggaagtgttgcatggaaggaacggatggaggattggaataaaaaacaaagtgaaaaacttcaggttgttagacatgaagggggtaaagatagtgatgagctggatgatcctgacttaccaaaaatggatgaag

SEQ ID NO: 48663 - DNA, 267 bp, Glycine max
cggtgagggccttccatggcttccgcttgtgcttcctctgcaattacagctgttgccatctctacgccgacgtcagttaattagtttgtccactttcccatttgatttatttgcaaatatctctattttattcattacatgcatgtgtacagttccgggcagaagaatggatcaggaggttgttttcttagtggaaggaaattgagggtgaaaaaggagagagcagcaattggaggacgatcgatgggcactacagtgtgcgcagtt

SEQ ID NO: 48664 - DNA, 259 bp, Glycine max
gttggaacgcgtccacgagtacaatttcgaccaccctgatgcttttgacacggagcagttgttagagtgcacgatgaagcttatcagtggccagggcgtgcatgttcccatttacgacttcaagaagcaccaacgctcttccgatagttttcgccaggtttaaactagacaatgtcgttttgttaccacttactgggatttctttttagttgatgtggtgcttttggttcaggtgaatgcttctgatgtgattatattg

SEQ ID NO: 48665 - DNA, 196 bp, Glycine max
ggtatggctccatgtttaagtcacacattttgggttatacttgtgtgatgatttctgatccagaagcagcaaagtttgtgctgaacaaagctcaagtcttcaaaccaacatttcctgtaagcaaagagaatatgttgggaaagcaagcaattttgtttcaccaaggagcataccatgctaaccttagaaagcttgt

SEQ ID NO: 48666 - DNA, 270 bp, Glycine max
actcgagcgaatcggctcgagtataggtgccaggatgcactagacacctatctgaaacttccacagaagcattacaatcactggctcggttctttctcaggttgggaaagcatactttgagctagttgattatttagaagctgatcgtgcctttagtcatgctcgtcagattacaccttatagtttggaaggaatggatatacactcaacagtcctttatcatttaaaggaagatatgaagctaagttacctggcacaggaattgatttc

SEQ ID NO: 48667 - DNA, 263 bp, Glycine max
cacttttaagttaaatagtttttcattgtttcatttaatctacaatggctgcttcaacaatggctctctcttcatcatcattggctggccaagctatcaagcttgccccctccacccctcagcttggtgttggaagggttagcatgaggaaaacagcctccaagactgtttcttctggaagcccatggtacggcccagaccgtgtcaagtacttgggcccattctctggtgagcccccatcctacctcactggtgaattccca

SEQ ID NO: 48668 - DNA, 266 bp, Glycine max
caaattatttatctttctacaagtcaacattggttcatatgaaatgttagtggggtatccgcccttttattcagatgaaccaatgttgacttgtagaaagatagtaaattggagaaattatttaaaatttccagaagaagctaaaatttcggcagaagcaaaggatcttattagtagcctcctatgtaatgtggatcagaggcttggaaccaaaggggctgatgaaataaaggcgcacccatggtttaaaggtattgaatgggaca

SEQ ID NO: 48669 - DNA, 295 bp, Glycine max
ctaaactacaaaggctgctgtaggagataagatattgaagtagtgctaagtgcctaacacctgcagtgaacaatggcctctgcatcagcatctcttctcaagtcttcacttgttcttgacaagtctgagtgggtgaagggacaaacacttcgcgaaccttctgctgcatcagttgtgcattgcgagccgaccaccccatcaggcctcaccatcagagctggttcctatgctgatgagctcgttaagaccgcgaaaacagtggcttcaccagggaggggtattttggccatggatg

SEQ ID NO: 48670 - DNA, 294 bp, Glycine max
ccatcatctccgatcatcacacaaatccaaaatgcacaacaacgaccacatacccgttcaccacgtgcagggttccaacccgaagcccgtgaaactgaaccggcaccacacgatgcggtactacgtccaccgggtccacgaaagcctcacaacccgcgtctccaagatgatctgcgctaccttcttaggccttctttttattgtgggcctcatcaccttcatcctctggctcagcctccggccccacaggcccaggttccacatccaggagttcaacttgccgggcctgaccca

SEQ ID NO: 48671 - DNA, 295 bp, Glycine max
ctctctctaggatctgcttctttctcttatcaattctcattcgtaatcattcattcctccaatctacgactacactgttgtttctccctcaacacaacacaacatgttcctctttgactggttctatggcattctcgcttccctcggtctctggcagaaagaagccaaaattctcttccttggtctcgataatgccggcaaaaccaccctccttcacatgctcaaagacgagagattagttcagcaccagccgacgcagcaccccacttcggaggaattgagcattgggaagatc

SEQ ID NO: 48672 - DNA, 283 bp, Glycine max
tagaactaactaggtgaacatggcagcagggtacgcatccggttattctctagaacacactccaacatgggcaattgccctagtttctttcattcttattcccgtctcaatcatcttggagcatctcattcatctaataatcaaatggttaaagaaacatcggaggagcgatttggttgaagcaattgagaggcttaaatcagagttgatgatcttaggattcatgtcgcttttgttgacagtaactcaagacgctataatagacatctgcataccagtgatg

SEQ ID NO: 48673 - DNA, 195 bp, Glycine max
cgcagttctcgagtttgagtctcgcgttgacgctgcacttgctagaaagaaggctgacatccaggaagcgctcaaaaacccgccatgtattcagaaaactcttcgtatttatgtatttaatacttttgctaatcaaattcgcacgattccgaagaagccaaatgtggagcctccaacctggacgctaaagatagt

SEQ ID NO: 48674 - DNA, 148 bp, Glycine max
cttgagaaagcaagtaatctggatcctactcttatatatcctcacacgtacagggctgcctctttaatgagaactcagaatgctcaagctgcactagcagaaatcaatcggattcttgggttcaaactttcaccagaatgtttggaag

SEQ ID NO: 48675 - DNA, 99 bp, Glycine max
tccctgcaggccattattacaaagctgcaagagctgcaaaatccgctggcatggctaaggaaaactacaccatcatgcacttggaccttgcctcgctcg

SEQ ID NO: 48676 - DNA, 100 bp, Glycine max
cgccaagattccttctcttgggttagggacttggcaagctgaacctggtgttgtagctgaagctctcaccacagccattcaggttggatacaggcatatt

SEQ ID NO: 48677 - DNA, 135 bp, Glycine max
cccgtactagcggcgagcgacatgggagcagcctagaccgtgaaaacggggttagtacggagactatacaagtgtcgtgctgctaggcgatcatcagagaatgctgcagcctagatggcgagagtccagtagccg

SEQ ID NO: 48678 - DNA, 202 bp, Glycine max
actttcgcttctgaatcttcaacaatggtgctcgagttttttcactcgtattgatttcttcaacaggcgacgatgatctgtatcgacaactctgaatggatgcgtaacggtgattactctccttctcgatttcaagctcaagcagacgctgtgaatctcatttgcggtgctaaaacgcatctaatccagaaaatacagtggg

SEQ ID NO: 48679 - DNA, 264 bp, Glycine max
tgataaggctgctgcgtatatggaaatgaccgaacttattaagaaggcaaaaaacaatgcctctgcttatgagaagaggtctgagtactgtgatcgtgaacaagcaaaggaagatctggagatggtcactagattagatccacttcgggtctatccttatagatatcgtgctgcagtattgatggacgaccacaaggaagaggaagccattgcagaactctctagagctattgcatttaaagctgatttgcatctcttgcatct

SEQ ID NO: 48680 - DNA, 172 bp, Glycine max
gcgtgccattgttcctgtctttcctccttctgagtcaaaccgtgttagagagggttttctaagaggggagcaggttcctggcgagttgcagtgcgaaccttcacaattttttatgctttttgacactaacaatgatggactcatttcctttgcagagtacatcttttttgtt

SEQ ID NO: 48681 - DNA, 248 bp, Glycine max
cctcgagccgaatcggctcgagcggctcgagcttggtatctggggaactaagggacaaggaaactctttccaatgtgagcttgcctttgccaagatgggaatcaaccccatcatgatgagtgctggagagttggaaagtggaaatgcaggagagccagcaaaactgatcaggcagagataccgtgaagccgcagacttgatcaagaagggaaagatgtgtgctctcttcatcaacgatcttgatgcag

SEQ ID NO: 48682 - DNA, 266 bp, Glycine max
aaagaggctaaggtcttggggatggctcttggcatttcttgtttaaatgggattgaagaagctgaagctcagtgtgctttgttgaattttgaatcattatgcgatgggtgtttcagttcagattcagacatattcctttttggtgcaaggactgtatatagggatatctgccttggagatggtggatatgttgtttgttatgagatgacagatattgaaagaaaacttggatttggaagggactcattgattgctctctccttgct

SEQ ID NO: 48683 - DNA, 272 bp, Glycine max
ctctccctcactctcaccatcgcggcgcaaccgccaaccccctcgactgccccgccgcctctgccgccacacctcagctaccccgactcctgggacgagcccttcgcgccggcgtccaccaagctccgtctcatgtgcagctacggcgggcacatcgtcccccgcccccacgacaagtccctctgctacgtgggtggcgacacgcgcatcatcgtgtccgaacgcgccacctcactcgcagacctctccatgcgcctctcgaaaactttcct

SEQ ID NO: 48684 - DNA, 262 bp, Glycine max
cggattcaaaacatcgtgcaggaaaagaatctggcatagcccttgatgcatgcatgcagtggctggattcgaaggatgagagttctgttctctacatttcatttgggtcacagaacactataactgcatctcaaatgatggctttggctgaaggattggaagagagtggtagatcgtttatttggatcataaggccaccttttggttttgacatcaatggagagttcattgcagaatggttgccaaaagggtttgaagagag

SEQ ID NO: 48685 - DNA, 268 bp, Glycine max
aaattcctagtgaagcacccacaattattgaagattctcgccctccattctcatggccagaaaatgggacaattgaaataattgatttgaaggtccgttacaaggagaatcttcctatggtgcttcatggagtaacatgcacatttccaggtggaaagaagattggaatagttggacgtactggcagtggaaaatctactttaattcacgcgttatttcgattgattgaaccagcaagtgggagtatccttatagacaacattaatat

SEQ ID NO: 48686 - DNA, 215 bp, Glycine max
cttcatttataaaatatgctgttggtccagattttactgttggtcaggactacccagtggtacctttggtagatttggaataaatggttgagccataatcagagttcttagatgccatgttctgggagccagaatatgacattattgtaagcgatgatgctgactctgaatacaatgcaaatgaggatagttctagtgcagccgggcaagggagt

SEQ ID NO: 48687 - DNA, 256 bp, Glycine max
caaacagtgagtcataagatagcattatcgaatgacgatgagcactatacaatcgacgccaggaagctcagggtatttggatttgtttcctgaccgaaaaatgtcactttttaagaacccttatattctcggactaactgcagttgctggcattggtggcatgctttttggctacgacacaggtgtgatatcaggagcccttctatatattaaagatgattttgaaggggttagacaaagtaatttacttcaggaa

SEQ ID NO: 48688 - DNA, 188 bp, Glycine max
ctgcttccgctgtcagggaaactggttggatcccataccacatcgttgccaaagccaacaacaacagcaacaacaacgttgtagccgttgtcccactctatcttaaaacccactcctacggcgaatttgtttttgatcattcttgggctaatgcttaccattcttatggctacaattattaccccaag

SEQ ID NO: 48689 - DNA, 174 bp, Glycine max
cgctcataccggttctgaaatatttaaggaatgcgtgaggcgagctctaaaaggcaagaccattattcttgtaacgcaccaagtagatttcctacataatgtggatcaaatattggtgacgagggacggtatgatagttcaatcagggaaatacgatgaattattagattctgg

SEQ ID NO: 48690 - DNA, 212 bp, Glycine max
aaaaccggtagtacaaaaggtgcggctattctgaaggactgggagaagtatttatcactattttggcagctggttccacctagtgaagaggatacccctgaggcaaatgccaagtatgacacaactacggcagatcaggtcacttatcagtctgcttagggtgacgatgcaaggttacattacattgattacgccaggctatggagccattg

SEQ ID NO: 48691 - DNA, 268 bp, Glycine max
tcgctatgggatcaaagaggggattgataatgggggtatggaactcgcatacctcagttgggaatatcattggttcggttgtggcttcgggggttttggagtttggctggggttggtcatttgtggtgcctggaatcctgatcattttggtagggattttggtgtttttgtttcttgttgtgaaccctgaggatatgggatttgtgcatcctgggatggacatcgaaatgagtgttgacacggatagtgcagagaatcggcagaaagt

SEQ ID NO: 48692 - DNA, 246 bp, Glycine max
cctttacaagctccaccgtggcatgacatctgctgtaatacaagatatttgttttagccattacagtcagtgggttgccatcatttcctctaagggaacttgtcatatttttgttcttgccccatttggtggtgagacagttcttaagatgcacgatcaagacactgatgggcctgctctgttgccaatttttcctctgccatggtggttcactccacatttcacagtaaaccagcagcagtattg

SEQ ID NO: 48693 - DNA, 242 bp, Glycine max
ggttgcgtgaacgctatgagttgcatcatggagtcaaaatatcagatagtgcacttgtttcagcagcagttcttgcagatcgatacattacagaacgcttcttacctgacaaagccattgatcttgttgatgaagctgctgcaaaactgaagatggagatcacctctaagcctacggaattggatgagatagacagggctatattgaaattggagatggaaaagctctctttgaaaaatgac

SEQ ID NO: 48694 - DNA, 250 bp, Glycine max
gcagtacattgaggatgttaagaagtgtctgaactacattaaagatggagaaagctatgagttatgcctcacaactcagataaggaaacctattgaggaattgaattctcttggactttatctgcatttgagagaaaggaatccggcaccttatgctgcttggcttaatttttcaaaggagaatctgagtatttgctgttcttctcctgagaggttcctgcagttggataggaagaatatactagaagat

SEQ ID NO: 48695 - DNA, 262 bp, Glycine max
cgctgaacaaaaaaggttaacactttgtgctgctttgtttctccctcttagaaataccacttacagagaaaagaaagctaagaagattcctgttgttaatcatattatccgggaatctctcaagcggaaagctaaggatgcggaaatggttagtcttctttccttgtagcctaagtaaagttctaaggatgtattataacttgcataatgtaaattattttcagtattacttactctggttgatactttgtgttggttaacg

SEQ ID NO: 48696 - DNA, 180 bp, Glycine max
ctcagtagtgtcatttacgcttctcttctctgcagcaactatgcctaaccctaaggtcttcttcgacattaccatcggcggtcaatctgctggccgcatcgtgatggagctctacgccgacgtcactccccgcaccgccgagaacttccgcgcgctttgcaccggcgagaagggcgtagg

SEQ ID NO: 48697 - DNA, 246 bp, Glycine max
ctttctctttctctgtctgcttcttcactttctctcgtttcaattgaaaaaaatcatgggcagaaaattcttcgtcggtggcaactggagatgcaatgggaccacttatgacgtgaagaagattgttagtactttaaatgaagctaaagtccctggagcagatgttgtagaagttgttgtgagccctcctttggtgtgccttccttgtgtaaaaagtttgctgcgccctgatttccatgtctcggc

SEQ ID NO: 48698 - DNA, 238 bp, Glycine max
atcagaggttgatggtcagacagttgcgttttttggtgttttcgatggtcacggaggttcccggactgcagaatatctgaaaaacaatctgtttaagaatttgagtagccaccctaactttatcaaagacacaaagactgctatagttgaagcatttaaacagacagatgttgactacctcaatgaggaaaagaggcatcaaagggatgctgggtcaactgcatcaacagctatgttg

SEQ ID NO: 48699 - DNA, 250 bp, Glycine max
attaactagtgccatggcatgaatgatgatgatgatgaatagcacaggagggttacatggtgcctccgagcaaatcagcaaaggcagtcccacaggagcgtctgaagagcagaatgatcttccacgacgggcgtttcgtgcagaggccagacccaatgaatgccctcatcaccttcacatggctccctttgggtttcgtcctctccatcataagggtctacttcaacctccctctcccagaaggcatcgt

SEQ ID NO: 48700 - DNA, 250 bp, Glycine max
ctgaggagtattccggcatagattacagtcttcccctaaaccaaatggtgaaggattggcaggagacagaaggaaaggacttaagctatgtggacctacaagacagtaagagtagtatccctgcaaggcctactgggtttgccgagtctttcacttctgtcgatggccggtgaaacaagttctttatggatttcttgaaagcaagttgtttttccattttctagttttcacttggtgaaatccggattga

SEQ ID NO: 48701 - DNA, 170 bp, Glycine max
gaaggggatgattccaaagaaaggactgtccaagttactggtgataagaggcaaattgaaattgcacaagaattgataaaggaggtcatgaatcagcctgtcaggccatcatctggtggctttggtcagcaggcctatcgcccaccccgtggatctggtggcccacccca

SEQ ID NO: 48702 - DNA, 155 bp, Glycine max
atagggacatgcttatgatgcttgcacgaaacaaaagggtagaagaagctaaaaaggtttggggtgatttgaaaacagaggaagttttatttgatcagcatacattcggagatattatcagagcttttctagataacgggttgccctcagaggca

SEQ ID NO: 48703 - DNA, 198 bp, Glycine max
gtcacttcaaggaaatagactaactgggaagattccagaagtgattggtttaatgcaagcccttgcaatattggatttgagtgagaatgagttagtgggctcgattccccccattcttggtaatctgactttcactggcaaattgtaccttcatggaaacatgcttacgggtcctatacctcctgaacttggcaatat

SEQ ID NO: 48704 - DNA, 279 bp, Glycine max
agcaattgcaccggcaatggcatgtgcctctccagtggaatttgtgaatgtaaatctggctatactggcattgactgttctactgctgtttgtgacgagcaatgcagccttcatggcggggtttgtgataatggagtttgcgaatctcgctgttctgactatgcgggatacacttgccacaacagctccatgctcttctccagtctttcagtttgcagaaatgtgctgggaaatgatatctccgggcagcattgtgctcccagtgaatctagcatacta

SEQ ID NO: 48705 - DNA, 198 bp, Glycine max
gtttctatccctcactaggagctcttctccattggttcttcatctgcatgcacacacttgcatagttttggaaaccaagaatttttgaagggtagcatcaacaacaagttctggaaatggagatcaccaatgtcagcgagtatgaagctattgcaaagcagaagttgccaaagatggtgtttgactactacgcatctg

SEQ ID NO: 48706 - DNA, 271 bp, Glycine max
ccaaattccaattcccaattcccaattcccaattcgaaacccttattcctttcaaagaaccaaattgagtgatcgtgatggcaccaaaggcagagaagaagccagcggagaagaagcccgcggaggagaagaagtccacggtgggagacaaggctccggcggagaagacgccaaaggccggaaagaagcttccgaaggagggaggcgccggcggagaagggaagaagaagaagagaaacaagaagagcgtggagacatacaagatctacat

SEQ ID NO: 48707 - DNA, 269 bp, Glycine max
cagcaacaagaccaaacattatgtttcctgcaagcttgttttctagattcatgcattcacctattcaagttcatttccgtgctgcaaagagatttttgacgtatatcagaggtacaactgattatggtttgtatttcttaaaaactgaaagtggagaacttcaaggatatgcagatagtgactgggcaggaagtgtagatgatcctaagagcacctctggttatgctttctcattttgtagtgctgttttttcatggaattcaagtaag

SEQ ID NO: 48708 - DNA, 271 bp, Glycine max
atgccccatcacttcaagatgacttttatttgaatctggtggactggtccacacaaaatgttcttcctgtggggctaggcacttgtgtgtatttatggagcgcttcaaacagcaaagtgactaagttatgtgacttggggccttatgatggtgtctgctctgtccagtggacccgggagggttcttttatatccattggtacaaatcttggtcaagttcaggtttgggatggaactcagtgtaagacggtcagaaccatgggtgggcatca

SEQ ID NO: 48709 - DNA, 264 bp, Glycine max
tgctgttggggttaattcaaatgaaaatgacttccttgaggcattcaagaggccagcagaaattgtcactggttattttggccagtttgctgtgaagcctcttcttggatatctgttttgcatgattgcagtaactgttttacgcctaccaacaacagtaggcgcaggaattgtattggtggcttgtgttagtggtgctcagctttcaagttatgctactttcctgactgatccacaaatggcacctttaagcatagttatgac

SEQ ID NO: 48710 - DNA, 262 bp, Glycine max
acttaatccaggctcagaagattgcttttaacgagagccagaggccggtgtacccattttctgctatagtgggacacgatgagatgaagctttgccttctcctaaatgtaattgatcccaagattggaggtgtaatgatcatgggggacagaggaacggggaaatctacaactgttagatcattggtagatttgcttcctgaaatcaaggttgttgctggtgaccatataattcagacccagaggatccagaattcatgggt

SEQ ID NO: 48711 - DNA, 260 bp, Glycine max
caactccaaacacaagacatcctcatccatggctgcctccgtctccactgtcggagctgtcaacagacctcttttgaacctgaatgggtctggacctggggtttcagctcccagttcatccttctttgggagcagcttgaagaaggttattgcgctcaagggtccccaacacaaagatttcctctggaagcttcaagattgttgctgtagaagagaagaaagatattgaagagacccagcagaccgacaaggacagatgg

SEQ ID NO: 48712 - DNA, 182 bp, Glycine max
accgcaattaaggccaatgtgcttggaataaacttgaacgtacctgtcacgctcagcgtgatccttagtgcttgtcaaaaaactgttcctcctggtttccaatgtccctcctaagatattaatcaaattaggtcgagttatctctcatcgtctcgatctgccgtcagagaaatgtttagata

SEQ ID NO: 48713 - DNA, 184 bp, Glycine max
ccttcaagaacattcttggcttggtatagcagagctgattacactgcatatgcattcaacacacgtccagttagccgaaatccatgccagaagccttttgtgttttacttctcaaaggctaaatacaattctacaatgcaacacatagtgagtgcatatgaaaggcaccgcgtccctcatcctg

SEQ ID NO: 48714 - DNA, 231 bp, Glycine max
aagaaattcttgctcatgcagttggggaagatgtcattatgaatgacagtaatgttgttgattttgttgatcatggagacaaggtaacagtggagctggagaatggtcactcatatgatggagatcattggttggagcagatgggatatggtccaaggtgaggaaaaagttatttggccaaacagaagctacttactctggctatacttgttacactggtattgcagattt

SEQ ID NO: 48715 - DNA, 270 bp, Glycine max
gagaatgtactaaaccgattgatgtctcatcagtttggttgggtttttaacactccagttgatgttgttaaattgaacattccggattattttactgtcatcaagcatccaatggatttgggtactgtgagaagagaataacctctggcgaatattcaaatcccatggattttgctgctgatgtgcggctgactttcgaaaatgcaatgttttataatccagctggcaatgatgtacacacatggcagagacccttagtaaattttttga

SEQ ID NO: 48716 - DNA, 260 bp, Glycine max
gaagaaggcagtgaaagactcccccgtgtggaagcgagagtgtcagagaaggacgtgctccttcggatccactgccaaaagcagaaggggcttttgctcaaaatacttgtcgagattcaaaaattccatctctttgttgtcagtagcagtgtccttcctttcggggattccatacttgacataaccattgttgctcagatggacaaggggtacaatttgaccattcatgtattgtaaaaaacctacgcgtggctactttg

SEQ ID NO: 48717 - DNA, 273 bp, Glycine max
ccatcatcaaagttttttcctttctctgctctttgccttctctgacacatttggtgccttgtagagcgtgttttggcaggaaggtggtatggcgaaggacgttgaggttgctgagcgtggctccttctctgggaaggactaccaggaccctccaccagcaccactcattgatgctgaggagctcacaaagtggtccttttacagggctctcattgctgaattcattgcactttgctcttcctctacattactgtgctcacagtcatagggtac

SEQ ID NO: 48718 - DNA, 158 bp, Glycine max
aaaatggatggtagtcattggtgctcaaaatggggatgaagggaagacaattctctaccaaagtgaggattttgttaattggagtctggaattgaaccctttttttgcaacagataacactggagtttgtgagtgtccagatttttttcctgtgtcca

SEQ ID NO: 48719 - DNA, 272 bp, Glycine max
cctcgagccgaatcggctcgaagttgaacaagggtttctctgtcagcttcgtcactttctctcgtttcaatcgaaaccaaaacaaaatcatgggcagaaaattcttcgttggtggcaactggaaatgcaatgggaccactgaggaggtaaagcagattgtgactactttgaatgaggctaaagtccctggagaagatgtcgtagaagttgttgtgagccctccttttgtgttccttcctgttgtaaaaagtttgctgcgccctgatttccat

SEQ ID NO: 48720 - DNA, 204 bp, Glycine max
gtggactttgcatgcttcaagccaagccttgcatgcctctgctccaaggaaatgttgctcgaccgagcgaatcgcgtcggcttcctctccgaggaaaattacaaacttgtgaacaagattctcgaccggtccggtctgggaccatggacctacgtctcggagggcctgctggagatccctccgagactaacatttgaggaggcg

SEQ ID NO: 48721 - DNA, 182 bp, Glycine max
gtagccttaaaatttgagcatagaagcagcaaagggtgcaattatggacctccatatgagtggcaggtttacaatgcactaggtggtagtcatggtgttccgcaagctcattataacggacggcaaggtgactactatattatggtcatggatatacttggccctagtctgtgggacgtttg

SEQ ID NO: 48722 - DNA, 190 bp, Glycine max
ctttacaggaataatatatccagatttgaagccagacaatgtgttactccagagacatgggcatgtgtccctaacagattttaatttgtcatgtttaacatctagcaagccacagcttataattccagctaccaattcaaacaagaagaaaaagaagaaacagacaagtcaagaggttccaatgtttatg

SEQ ID NO: 48723 - DNA, 172 bp, Glycine max
gccatagtgagtactgcaatagctggagcaatcctaggagcttcagttggaggatggatcaacgatcgatttggaaggaagaaaggaattgttatagcagataccctcttttttatagggtctgtcatcatggctgctgcttcaggcccagcaattctcatcctgggtcgtg

SEQ ID NO: 48724 - DNA, 178 bp, Glycine max
caagaattggtcaaaaactttagaagctcaatttagaagcaagatagataaattgtcgaaagtgaaccacaagaattttgtgaatcttattggatactgtgaagaagaggagcctttcaccagaatgttgttttttgaatatgccccaaacggaacactatttgagcatctacacata

SEQ ID NO: 48725 - DNA, 262 bp, Glycine max
  unsure (1)..(262): unsure at all n locations
tgcaattgaagtcgaagtcttgcccttctctcttcaactccatacacaagacatccccatnnatggctcncaccgctncantgtcggagctgtccacagagctcttttgaacctgaatgggtctggacctggggtttcagctcccagttcatccttctttgggagcagcttgaagaaggttattggctcaagggtccccaacacaaccatttcctctggaagcttcaagattgttgctgtagaagagaagaaagagattgaa

SEQ ID NO: 48726 - DNA, 258 bp, Glycine max
cagaagtccataatccatacaaaagagcttacctggcatgtatatttgtcttcatggaacaaatgatgatattgttgattggtctcatggcaagcgattgtgggaactctccaaggaaaaatatgatcccttgtgggttaagggtgggggtcattgcaaccttgaaacattcccggagtacatcaagtacttgcgcaagttcattaatgcaatggagaaactctcactcacaaaacagacaaacaaacaactcacaca

SEQ ID NO: 48727 - DNA, 244 bp, Glycine max
gttccttgcttcttggattgatcagtagagcaacccttggttatgcagcaatgcatgctgaaacagttccaattcaccctcttgtgattgcaggctggtgtggcttaaccatacaagcttttaacatgcttccagtggggtgccttgatggtggaagagcagtgcagggtgcttttggaaaaaatgcgctagtgggctttggtttaacaacgtatacattgcttggattaggagtggtatatct

SEQ ID NO: 48728 - DNA, 255 bp, Glycine max
aaaatttgcaggtgatactgcagagcttggtatcatcagagcagggacattaatgaaaactaaagttgttttaaactcacgagttcatttggttccctatcacattgatgaaggtctgccttcctatctaataattgctggtttagtattcacacccctctcagagccattgattgaggaagaatgtgaagactctatagggctaaaattattggcaagggcacgttattcattggcaaagtttaaaggggagca

SEQ ID NO: 48729 - DNA, 249 bp, Glycine max
taaattttctattccccaaatctcctccttagactgacaacccaatatagccattggatcgaattcagtctgaattcggtctaatggtttgggagttctaattaagtctaaggatggacaaggtgacgaggttggcttctgaaaacggtgtggtgattttcacaaagagctcttgttgcctctgctatgcagtccacattctgtctcaagaacttggtgtgaatcctgtggttcatgagattgatcatg

SEQ ID NO: 48730 - DNA, 265 bp, Glycine max
caaccccaacacttgtactgtctcaagcaaccatggcaatggcaacccaagcctctctcttaaccccacccctctccagcctctccttctccagcccgaagcccctcaagttctccagaacaatcagagcagcagccgccgacgagaccacagaggcaccagcaaaagtagaggctgcaccggtcgggttcaccccaccagaacttgacccaaacaccccttccccgatcttcgggggcagcaccggcgggctcctgcgcaaggc

SEQ ID NO: 48731 - DNA, 258 bp, Glycine max
cggatattaaagacacctctaaagatggatatagttttgaagagatatccatcaagaaagaagcgtttgagggagaagagaagttttgtgcaaaatccttgggaacagtaattggttttgccatttcaaagctgggaaagaacattcaagtactttcaagttcctttgtcaataagcaagagcaatacactgtggaaggagtgcagaatcttggagacaaagcagtgatgtgtcatgggctaaatttcagaactgcag

SEQ ID NO: 48732 - DNA, 221 bp, Glycine max
caaagacgcttcacgaacaagtttgaagcaatctccatccatatcatggctagaccccaacaacgctatcgaggtgtccgccagaggcactggggctcttgggtttctgaaattcgccaccctcttttgaagactagaatatggctgggaacgtttgaaaccgcagaggatgcagctagagcgtacgatgaagcggcaaggttgatgtgtgggccaaaagc

SEQ ID NO: 48733 - DNA, 256 bp, Glycine max
acttcacagagaaagctctgagattgattgcaaagaaagcaatggccaaaaatactggtgccaggggtttaagagcactactggaaagcattttaactgaagccatgtttgagattccagatgttaaagcaggaaatgaactcattggtgcagttgttgttgatgaggagtcagtaggatcagtaaatgcccctggttgtggaggaaaaattctttgtggagatggtgctttggaactgtacctagctaagatgga

SEQ ID NO: 48734 - DNA, 255 bp, Glycine max
caagcaatttgcatccacaaacctcgccagacgctgcatctcctgttttgtggatgcagcttcttgcaagtctttgaataatcccttcatgatcggttttgggatcttgcaacttttcttgtcccacattccaaacttccatgagcttacctggctctcaactgctgcctgtatcacctcttttggttatgtattcattggcagtgggctgtgtctcttggtcgtcctctcaggaaaaggagcagcaaccagcat

SEQ ID NO: 48735 - DNA, 252 bp, Glycine max
ggaagcacatcaaaatgagatcaggattgaaaatgaagctgatgttgctgatgcaaaagaagcaggatatgaaaaatccttggttgctagactggttttaaagaatgagaagcttgcaagtcttgctaacaacattcgaattattgcaaacatggaagatccaattggtcgagtgttaaaacgaactgagcttgcagaggcgctgattttggagaaaacatcatcttctctaggagttcttttaattgtttt

SEQ ID NO: 48736 - DNA, 225 bp, Glycine max
cccgctcgagccgctcgagccgctcgagctcgagccgtggtagttctggattattacggttttctaccagtggtacgtcttttacatgagcttggccacgtggttcaacaaatttgcaaccgtgcatcatttaccagaatttctggattatgtgttgatcctgactttgtggagatacctgctcaactgttagaaaactggtgttatgaaagctattctctcaag

SEQ ID NO: 48737 - DNA, 279 bp, Glycine max
agaatatgcatggcgtaggatcaataaaggaatacagctcaaccgctgtgagaacaagaccttgtgcatggagaaactttcactggttctccctgaaacaccaccatacttcccaagacagtttggacgctgtgctgttattggtaactcgggagatctcttgaaaactatgatttggaaatgagatagatggttatgaagttgtcattagagaaaatggtgctccaacacagaactacactgattacgtgggtaggaaagcacatttcgccttctaaa

SEQ ID NO: 48738 - DNA, 275 bp, Glycine max
gttttattggattgcatgcaaagacttcaagtccaacctggggatattatagtcaaacagggtggtgaaggtgattgtttttatgttgttggtagtggagaatttgacgtctcggcgactcaggaagaaaaagatggggaggcacctagggttttgcagcactaatcagctgaaaaactttcatgctttggagaacttgctctaatgtacaataaacccctccaggcttctgtatgtgctgttacaaaaggaactcttggtctttaaaacgagaa

SEQ ID NO: 48739 - DNA, 264 bp, Glycine max
ctcgagccgattgaagttgaagtcttgcccttctctcttcaactccaaacacaatactgcaatatccatggctccctccgtctccactgtcggagctgtccacagagctcttttgaacctgaatgggtctggacctggggtttcagctcccagttcatccttctttgggagcagcttgaagaaggttattggctcaagggtccccaacacaaagatttcgtctggaagcttcaagattgttgctgtagagagaagaaagagatt

SEQ ID NO: 48740 - DNA, 264 bp, Glycine max
tagaggagggcctgatggtttgtctgaaggggactggatttgtccaaggtgtgacaatgttaattttgcctttagaaccacttgcaacatcaaacattgtggagccgtcaaacctagctcaaacaaaccaaatacagcagttatccctgaaggtagttggacttgtgaaaaatgcggtaacctcaactatccctttcgaaatgtatgcaaccgcaaagactgtagaaatgagaaaacagtttctgctagtgacatctctatatt

SEQ ID NO: 48741 - DNA, 285 bp, Glycine max
ctcgagccggtaaagactgatcatatggctcgtgccttgtccaagacatatagatcaccactggtggatacaatacaatctctgccacatcatcagcagattgtactctgctcttctatgaaacattttcgtggagccaagaaagatgccatccttggagagttgtataaatcgtatgtgggggtatgcaaatcttgtttaattcctccagcgggaatcttagaattttcaaacatgtgcagagtgctaaatgaccagggccttattaaacttggacaatctcga

SEQ ID NO: 48742 - DNA, 285 bp, Glycine max
agttattattggaccgtgcagaaacactactacagctgattaaaatcagatatccaaaccttcctcaaacatttctggatgctaccaaagttcaatatggcaaggatattggacattccattttggaagcatattccagagttcttggaaatttagccttcagcatactgtctagaataggagatatattgcaggaggattctttaagcaatcctaattcacctgtggcgataaaatgctctcctgggattaatctctctcaaacttgggaggtcagttcacata

SEQ ID NO: 48743 - DNA, 282 bp, Glycine max
gtttttctttttttcatttggattgcaaagcaaaaaccttgcaaattgcaatggcttccaacaaggttattgccaccatcttggttctttctctccttgcctactcaacatcattcaccaatgcatgtggcacatgccacccaaaacctactccttctccccctcctccatcagggaagtgccccaaggacacattgaagctaggggtgtgtgctgatgttctaggacttgttaatgttgttgttggttcccctgtctctagcaagtgttgtgcattgcttg

SEQ ID NO: 48744 - DNA, 249 bp, Glycine max
agtcttgatgcgttggatgaacaagagaaatgtatattccttgacattgcttgtttgtttgtgcaaatggaaatgaagagggaggacgtggttgatatattgaatgggtgtaattttagaggagatatagcactgactgtactcactgcaagatgtctaattaaaatcactggtgatggtaaactgtggatgcatgatcaagttagagacatgggaaggcaaattgtgcatagtgaaaaccgtgcagac

SEQ ID NO: 48745 - DNA, 239 bp, Glycine max
ctcttgtgtaggcatttgcatcacagtatgtttattgcctcaagaaattgggacttgatcccagaaaggtcaatgtcaatggtggtgccattgctcttggacatcctttgggtgttacaggtgatgttgagatgttcagtcagaaatttaacttacttttgccttattattttcttattaaatggaagaggtaatgctaaaatcttcagagaggcacctgcaactggaacctttatatt

SEQ ID NO: 48746 - DNA, 244 bp, Glycine max
atcctggaaccacagctatagctactgcccagggagaagaactgaagaaggcaattggtgctgctgtgtacatagagtgcagctcaaagactcagcagaatgtgaaggccgtgttgatgctgcaatcaaggttgttttgcaaccacctaagtccaagaaaaaaggaaagaagaagaacacgccttgtgttttcctctgattcaagttgttgaattgcaattgcagttgcagtggtattgttcaa

SEQ ID NO: 48747 - DNA, 237 bp, Glycine max
atgatcaattgaagtctccctgctttttttgtctgtattttcataacagaatgcttttcagctggctttcttcgcatggtctgcgcttcagtttgggattaaatcctgttccattcgcacacggaggacgtggtgatcagaatcacaatgggggtccttattcaaatcctctgcagctacgttactcttcctctctacgctctagtgacacagatgggttcaacaatgaagccaacg

SEQ ID NO: 48748 - DNA, 239 bp, Glycine max
gatcatgggttctggatccggattgactgtaatcgacaatctctgtcagatgagccagtctctaggattcgacaatgcacatatatttgtttccatgatcagtatttggacttccttggccgtgtcggaggaggttacatatctgagcttgttgtgagggatcatgcatatccaaggccagttgcattggctgtatttcaactcattatgactcttgggcatgttttccttggtatggg

SEQ ID NO: 48749 - DNA, 272 bp, Glycine max
tgcagcttcatgggaaatccattattatgtggaaattggttcggatccatatgtgatccttacatgccaaaatccaaagtggttttttcaagggctgcaattgtttgtctcattgttggtaccatcacattattggccatggtaattatagcaatctacagatcaagccaatcaatgcaattgattaaaggatctagtggaactgggcaaggcccccccaagcttgtaattcttcacatgggcttggccatccatacctttgatgacattat

SEQ ID NO: 48750 - DNA, 272 bp, Glycine max
gtcgtggaattgctactttagagtcgttgcaatttgatttggctaccattatagcagcaactaataaattctcagaccagaataaaataggcaaaggtggatttggagaagtttataagggtattcttcttgatggttcacaaatagccgtaaagagattatcaaaaagttcaaagcaaggatcaaatgagttcaagaatgaagttttattaatagccaaacttcaacaccgaaatctagtgactctaattggtttttgctttgaggaagaa

SEQ ID NO: 48751 - DNA, 266 bp, Glycine max
ctaactggcaactaattaacgtgtttgggactcgcgagttgtgcattcctaacacccatttcaggaagcccaagcattgggagatgactagaaagaggatacagatcaagaaaatcgacaacatcagttcgaggcaagtgactttctccaagagaaggaaagggcttttcaagaaggctcaggagttgtcaaccctttgtgatgcagacatagctctcatagtcttttctgcaactagcaagctctttgagtatgccagttcaagc

SEQ ID NO: 48752 - DNA, 273 bp, Glycine max
cggtagtaccaaaattgtctgtctggatccaaatgaagaacttccacacagaagagtcgacggactgcaacgtcccaatgcaagacgcgatgggtggttggagattgagatgggggagttcttcaatacaggcttagatgatgaagtgcagatgagtgtcgtggagactaagggtggtaattggaagagtggcctctttattgaacgaatagaagttaagcctcaggacgagaattaagcaaatatcttgtttagtttaattcacagaactat

SEQ ID NO: 48753 - DNA, 275 bp, Glycine max
cgaacctggtcttccttacttggatatcataagtctgctcagggataattctcctttgccaattgcagcataccaggttcttttctttgcccattctagcactaggcaaaacgtttctgataaaaagttgatcagatattcaatacattttaaccagtgaattctgctttaagcttgctgcaagtgacagaagtctatacgtagtagacaaatatcacacctctagtttaatatcaggctgaggtacaagtttatggttgctttaacagttattg

SEQ ID NO: 48754 - DNA, 272 bp, Glycine max
ggaacacaaagtagccacaacaactgaaggacaatccataagatgtaaagcggcaatttgtcgcaaagcaggtgaaccactgagtattgaggagatcattgtggcgccaccaatgcctggtgaagctcgcattcgtattatatgctcctctctctgtcaaaccgatatcagttttcggaacatgcagatgtatcttctgtgttttgaaggaccatcctgccatttatccaagaattctgggtcacgaggcaataggggttgtggaaagtgta

SEQ ID NO: 48755 - DNA, 203 bp, Glycine max
atctggggatgcaaaggacaatgaaaatctttccaatgtgagcttgtctttgtcaagatgggaatcaaccccatcatgatgagtgctggagagttggaaagtggaaatgcaggagagccagcaaaactgatcaggcagatataccgtgaagctgcagacatgatcaataagggaaagatgtgcgatctcttcatcaacgatct

SEQ ID NO: 48756 - DNA, 271 bp, Glycine max
ataacacacacggttggttctccctaccttttctttttcctcaaaaagaataaaagggaaacaattgagtgaggttgctactcttcaatagtaaacttacccatggaagagggcagggttgtgaatgagtacacacaagatggaactgtggatcttaaagggaaacccattctcaaatccaaaagtggtggttggaatgcttgctcctttgttgttgtgtacgagatatttgaaagaatggcttattatggaatatcatcaatttgatact

SEQ ID NO: 48757 - DNA, 202 bp, Glycine max
ctcgagcgctccttttgacttctgggagagatcctggaattgtccccagaaattcaagcacctcctgaatttgatgaaacatgtgatatacctaccccttccatggagtggattaatggcacaacccctcatctgaaactacctcgaactaaagatgttgttgttaatggtcacatagtgaaagtaaagttctgtgatacgt

SEQ ID NO: 48758 - DNA, 234 bp, Glycine max
gtaggatgtctgagctccttgccccaatcaaaacggtgcggttaactagaaaccgcgacgaggatgcgaaaatgatgaaaaatttgctggggcaaggggacctggtggtttgtcctgaagggaccacatgtagagaaccttatttattgaggttcagccctctgttctcagagatgtgcgatgagattgtccccgttgcagttgattcccacgttagtatgttccacggaacca

SEQ ID NO: 48759 - DNA, 269 bp, Glycine max
gtctgctccaacaactggtggtgtgaagaagcctcatcgttatcgccctggaactgttgctcttcgtgagattaggaaataccagaagagcactgagctcctaatcaggaagcttcctttccagaggttggttcgtgaaattgcccaggatttcaagactgatctgcgtttccagagccatgctgtgcttgcattgcaagaggctgctgaggcataccttgttgggctctttgaggacactaacttgtgtgccattcacgccaagcgtg

SEQ ID NO: 48760 - DNA, 260 bp, Glycine max
ctcgagccgctcttagacttgagtcacattctctctcttctattctaattctgctttctatctctctctacaattccaaaaccctacccccttccaattccaattccaattcatcctctaacatgggttctgaaggttccactgtcgtcgttcctaggaatttcagattattagaagagcttgagagaggtgagaagggaattggagatggaactgttagctacggaatggatgatgctgatgatatctacatgcagtcc

SEQ ID NO: 48761 - DNA, 261 bp, Glycine max
ctatcatttcattaaatggggagagaaaaagttattctgatcaacttgatactgcctttcggttacgagctgttgatgtgtgacactgacatggtttggttgaagaacccacttccatatcttgctagttatcccaaagcagatgttttaacatccagtgatcaagttgttccaacagtggttgatgatagtctggaaatttggcaagaagttggtgctgcttacaacattggaattttccattggagacctactgagtct

SEQ ID NO: 48762 - DNA, 253 bp, Glycine max
ttctgtcactgcattcatcgagtactcaagaaggcattgatgcaattacaacccgggtagtggcaattcgtggggagagtgaaacaagtactattactacccatgctttaacgggagaaactgttattcgaacatttagtgggactggagcgggaatggatgttgttgtttccagtgtcaaggcctatattgctgcactaaacaagatgtcgggtttcaaggaatcctctcaatctgctgaaaaatttcaatt

SEQ ID NO: 48763 - DNA, 253 bp, Glycine max
ttcaagtactacaccatctccgatctgttaactgttagcaaccccgtgaggacgcaggccaccgaggaggaagggacttgggggctgaactttaccggccaaggcggtaaccaggtgaacatctccacgggcgtggtgcagacgcagctcaacaacgcgctgagggagaagtttcctctggcggtgtaccaggtggacaaggtgctgttgccgttggagctctttggacccaccaagaccactcattcttctg

SEQ ID NO: 48764 - DNA, 243 bp, Glycine max
attcaattttcatttaccgccaaacgctctctctcactcagcactgtgaaagtgccatggaagcagaagaacaatttgaacttcctcatcaatctcacgattctccggttcaaggcatggaacgagtggtggctacggtgagcggctaccatggctccgagcgattcaatctcatcaagctgatttcacaggctggcggcaattacgttggtgctatgtcgaaatctataactcatctggtgt

SEQ ID NO: 48765 - DNA, 233 bp, Glycine max
cacttttaagttaaatagtttttcattgtttcatttaatctacaatggctgcttcaacaatggctctctcttcatcatcattggctggccaagctatcaagcttgccccctccacccctcagcttggtgttggaagggttagcatgaggaaaacagcctccaagactgtttcttctggaagcccatggtacggcccagaccgtgtcaagtacttgggctcattctctggtgag

SEQ ID NO: 48766 - DNA, 268 bp, Glycine max
gtagcacgtttgagaaatgttttaaagggtgacaacgatattaggaatgcacaaacttctgtcactaatgccgttttgcatgccgaaagaagattacatcaaatgatgtacactgaccgtgattaccagaggaatcctattttgaagttcgcttctgttaccccaatagtcaccgtccaaaattgggcagaaaggggttattctgtcgtcaatattcagtgcaaggatcgagttaagcttttgtttgatgttgtgtgcaatttgacag

SEQ ID NO: 48767 - DNA, 255 bp, Glycine max
cgttgccattctcatcctcttctttctctctctaccattgccatggatccctacaagcaccggccttccagcgccttcaattctcccttctggactacaaattctggtgctcctatttggaacaacaactcctctttaaccgttggagctagaggtccaattctgctggaggattatcatcttgtggagaagcttgcaaattttgcatagggaacgtatcccagaacgtgttgtccatgccagggcgctagtgca

SEQ ID NO: 48768 - DNA, 264 bp, Glycine max
cttgcaaactagttttgttttgggaacatcatcacattacattagattggtggtaatggcagcgtcactacaagcagcagctactttcatgcaacccaccaagttgagcaggagcaacactttgcagcaaaagtctactcagtccatttccaaggcttttggtttggaacctgttggagctaaaaaggtcacatgctcccttcaggctgatcttaaggacttggctcacaagtgtgttgatgctaccaaaattgcaggattcgc

SEQ ID NO: 48769 - DNA, 173 bp, Glycine max
agtacccaaaaaaagtggttaaattagagccttagaaattaagtagacagatggtcttgtggtcctgctaatttgttccgcaaaatggtgatggagattgtgaggaacaagaaagttaagttttggaagaaagtgtatgttatatacagctttttctttgttcgcaaaatcat

SEQ ID NO: 48770 - DNA, 157 bp, Glycine max
cttgatcgctcacaaccgacaagtgatcctgccaatcatatttccagccttagagaagaattctcagggccactggagccaggcagtgctcaacctaactcataacgtgagacaaatgtttgtggagatggatgagaagctgttcctggcttctcat

SEQ ID NO: 48771 - DNA, 191 bp, Glycine max
gttcgataagggttacatgtctcctcactttattacacaccaggagaagtccattgtagagtttgactgggttaaagttttggtacttgatcaaaagatttcaaatgtcaaagaaatagttcctttgctggaaaaggctatgcagttgagtgttccactctgaattattgcagaggatatcacaaggcaag

SEQ ID NO: 48772 - DNA, 265 bp, Glycine max
gttgagacaaattcgccctaagcatcttcaagatgtgttgaagataagttatgatgcattagatgaagaagagaagtgcatattccttgctatggcttgtctgtctgtccaaatgggaatgaagcctgatgatgtgattgatgtgttaagaggttgtggttttaggggtgagatagctattacggtgcttgtgcagaaatgcttaatcaaaatcaccgatgaggacaatacactgtggatgcatgatcaaattagagacatgggg

SEQ ID NO: 48773 - DNA, 268 bp, Glycine max
attgtgtaccacttgcttcttgcaatgaacttatatgtaaagatttctttctttacatggagagtaatcaattgggactgtttgctacttcaacggctcaaattcatgatgctcctgctgttggaggagctgtccatggtgttccttcaactgagaagataactttcctcctcttgagactggaagatggagagatcttggacaagaaggtcttcagtaatgacttcgttaatttaacccataatatgggtgtcttcttgtatgatga

SEQ ID NO: 48774 - DNA, 264 bp, Glycine max
cttttgagtcaatttgaacatgagaatatagttcaatacattggcaccgaaatggatgcatcaaatctgtatatctttattgagcttgtaaccaaaggttcccttcgaaacctctaccagagatataatcttcgagattctcaagtatctgcctatacaagacagattttgcatggtttaaagtatcttcatgaccgaaatattgttcacagggatattaaatgtgcaaatatattggtggatgcaaacggatctgttaagctt

SEQ ID NO: 48775 - DNA, 262 bp, Glycine max
cgatcactcagatacacctcacatattagctataccctttccagcagaaggacacatcaaacccatgtttaatttagccaaacttctttcccatagaagccacagaatcaccttcgtgaacacacatcacaaccacaatcgcctcctccaattcacagatttaccctcattccacactcaatttcccgcattcctctttgcatccatcactgatggcataccctctgacaatcctagaaaaggtgcctaataaactacttcc

SEQ ID NO: 48776 - DNA, 216 bp, Glycine max
ggttccccaagagattctgttcgacatgggactcacacagcatcaatagcagctggtgttcatgtcaacaatgctagttattttggtttagcacaaggaacagcaagaggtggttcaccttctactaggattgctgcttataaaacatgctcagatgaaggatgctctggtgccaccatactaaaggctattgatgatgctgtgaaggatggagta

SEQ ID NO: 48777 - DNA, 197 bp, Glycine max
tactatacacaccctctttctctcctcctccttcttcttcttctccttctttctctttttcattctttctttcaacatgggtggcatcagcctcgaagaaataaaaaacgagaacgtcgatctggaacggattccaatagaggaagtgtttgagcagctgaaatgttcaagagcaggtctaacatcagaggaagggg

SEQ ID NO: 48778 - DNA, 213 bp, Glycine max
actggcttgtctttgtcagaaacttctatcagctgctggaattgatgatcaagtgcagcccggctcgttttactcgagatggcattcccttgaaagcccattggatccatcattgagggacaaatacgccaatctcaatgacaaggagcctcagcagcaactccacgaggccaagcgaaggcagaggaggtccaatcagaagcttgtattcga

SEQ ID NO: 48779 - DNA, 281 bp, Glycine max
ggtttgattaggcaaccaaagtatggtcatctaaaggagcttcataaggccatcaagatgtgtgaacgggctttagtttcagctgacccagctgttacttcaatggggaacttccaacaggctcatgtatacactacaaaatctggagactgtgctgctttcctctcaaactttgatacaaaatcttctgttagagtgatgttcaacaatatgcactataacttacctccttggtccatcagcatcctccctgattgcagaaatgttgttttaatacagca

SEQ ID NO: 48780 - DNA, 270 bp, Glycine max
atcttgcttcactttcaggaatacttaaatgcatttgtaggtattttaggcactgctctagttccctgcctgtacttcaacttccaatctgtgcaatacctgtcggcacgtgggtgcccaaaattggggaatcaaatcggcagcctctagcaatgttgagaccaaccgcttctcttgcgtcagcctaaatttattagttcaaggtgtgaactttttgtctgaccttgaacatagtgtatcaaaaagaaaagcaacagagagaaagaatga

SEQ ID NO: 48781 - DNA, 281 bp, Glycine max
aaacaaacatgggaacagcatgtggttatggaggaggcatagttgatgccctaaatgctaatttctatggaaatggcactcaaactttggatctagctcacggatatggcactgaccaaacggtgtggcgttatcttattcccttccttgcatgctacttcaaggtgctggttcacgatttgcctttcgccccaaatgtaaggccttcttctctttatgatccaaagaagtattcaacctttaatggatatgctcaggacttggttgccttcttgatgagc

SEQ ID NO: 48782 - DNA, 260 bp, Glycine max
agtatgttagcaccaggagtttctctggctataacatggaaccttctatatctgttactgatggcaaagcagggaattcctgcttgagtacaacactgactgatttggcctcaaatgttgactcaagtagttcatcaataggatgtaccggcaccaaagatgtggagatgatggataagtttgcagattctatttcacctgtgccaccactccttgcttctagttaagaactgattctctttgtagaagttttttagtag

SEQ ID NO: 48783 - DNA, 254 bp, Glycine max
ggaagaaaacaccaccgtcccgatgaacttggaaatccaaagggatcaaaggcaacaacttcccgagctgattgatccctggaataacgatgaagtgcttgcgctcttgaggatcagatctagcatggaaagttggttcccagaactcacttgggaacatgtctcaaggaagctagcagagcttggatataagaggagtgcagagaagtgcaaggagaagtttgaagaagagagtagatatttcaacaacatta

SEQ ID NO: 48784 - DNA, 254 bp, Glycine max
gcgagagagagagagagagagagagagagagagagaaatggcttgcaggcaattgtgggcttcaagagctgcctcttacctgaggatctctgtgtttcacagaggcttttctaatgttgttaaagatttgaagtatgctgattctcatgagtgggtgaaagttgatgaaaattctgcaaccgtcggcataactgatcatgcccaagatcatttaggaaaagttgttgaagttaatgaagcgcttaacagctctc

SEQ ID NO: 48785 - DNA, 244 bp, Glycine max
gtgacgaacaacatgaatgtcgttcatagaaccggacgttgttgagttgaggtaatgtcgtgtggacgtgaacgaacactttcatttaaaaatccaaacaccattgaatgttcaggtttgatttcgccgtccccttccgtctatcatttttttctttaccttcagtttttttttgaaagataatggcagacaccgaggacattcaaccactcgtctgcgataatgggacaggaatggttaaggc

SEQ ID NO: 48786 - DNA, 249 bp, Glycine max
gctttagccagctggatcgacaaggaaatagaagctgattttgagacagttatcacaacaccagttttccagacgccttcgccaatggagaaacaggctgctaatctttatacaagaaaaatattttcaaagtttcagatgagcttgttgaaacttttgtttatactgcaaatagaattgaaggagatgggccaaatagcacatttagagttgcaaaatttgaggatgaccaaaaggcatacatggtta

SEQ ID NO: 48787 - DNA, 252 bp, Glycine max
tggattactttatatttggttggagctttgtcacattctaatcctttttttttaaaaaacaaaaatttctatgaaatagctgtcaagttaatttagaagtgaactttgccagattcaacaaggcgtattaggttgggctaagcattttaaaattattggtggaattgctcgaggacttctccatcttcgtcaagactctagactgaagatcattcacagggatctcaaaacgagcaatgttcttcttgatag

SEQ ID NO: 48788 - DNA, 247 bp, Glycine max
attggagaaattgaaaaccgttcatcacatttgcttgccataaaggcagatattgagactcagggagaatttgtgaattcattgattagagaggtgaacaatgcagtttatcagaacatagatgatgtagtggcatttgtgaagtggctggatgatgaactttgcttccttgtggatgagagggctgtccttaagcattttgattggccagagaagaaagctgacacattaagagaagcagcatttg

SEQ ID NO: 48789 - DNA, 247 bp, Glycine max
tggaagtgaatgataaccatttaagtggacatatcccgcccgagcttggaaagcttacagatctgtttgacttgtaagagtggttaccttgaagtatcaattttgttgatttttaaatataagtttgatggagtgacccatcattctttcagaaatgttgcaaataacaatcttgaagggccaattcctagtaatcttagctcatgtaaaaatctcaacaggctcaatgtgcatggcaacaagttga

SEQ ID NO: 48790 - DNA, 274 bp, Glycine max
ggtactgccactttccctattcctggtacacccaattttcacattgcaatgtacaagggatggagctccgagcaagttcccttgtatgcaggtgctacccagaagcacgtttttccgttcaacaatgggaaaacattgccgtcaaagtgggaagatgctgagaggtggattatcagccctgtttcggcagacacagagtcagtcatcatcaatgcccctccaagaggacaagtctggtgggttcaaagacgttggcaccaatgtgtcccgtgct

SEQ ID NO: 48791 - DNA, 275 bp, Glycine max
catgagtgtgccaggcacaggaaatgacattgtcggactatggaaaccatagtccataaggcgctttgcaacatcttcaggctctatcccagcagtattctaccatagagatagcttacaattaagcagaatatgaataatcccgattggttgaaaaaaaaactgcaatgatcagttggacctaccttaaagcctcttaagtcaataatgaattcatgagcaactgttccattgaccccacggaaaagaacagggtaatgattctgtaaaactta

SEQ ID NO: 48792 - DNA, 267 bp, Glycine max
attccaataacctctccagctgttacaattgctctgttgctggtaatggtaatgatctaccatacaagatggaagcagaagcaaaatccgaccaatcaacagattaagatctttttggaaagacagggaccccttcaaactaagcggtatgattattctgagataaagaaagtgaccaactccttcagaaacaaattaggccaagggggattcggaagtgtatacaaaggaaaattaccagatggagcttatgttgcggtgaagatc

SEQ ID NO: 48793 - DNA, 186 bp, Glycine max
aggccatatctaaggcttttggttatggaacctgctggagttaataaggtcacatgctcccttcaggctgatcttaaggacttggctcacaagtgtgttgatgctaccaaaattgcaggctttgcccttgccacctctgctctcgttgtttctgatttgttctatgaaggatcttctggtttgtaa

SEQ ID NO: 48794 - DNA, 163 bp, Glycine max
cgtttgccgattgacagagaaagagaaatgggagaacgacaaggaatcccaatggctttggggctcttggcgatgatcctcttcttcattgcttcctcttcctctcacctcgttcgcgcttccggtgacgccgacgacgcgatcttctacgagtcgttcgacg

SEQ ID NO: 48795 - DNA, 274 bp, Glycine max
gaagcaacggcatcggttgatactgctactgataatcttatccagaagattattcgaagagagtttagagattgcactgtgtgcactattgcacatcgtattcctactgttattgacagtgatctagtgctggtactcagtgatggtcgagttgcagagtttgatagtccatctaggctgttagaggacaagtcatctatgtttctgaagttggtgacggagtattcatcgcggtcaagtggcataccagacatttacatggatgacaatgcat

SEQ ID NO: 48796 - DNA, 198 bp, Glycine max
gtgaaaatcccaaagctcttggaaggttgaggtcagcgtgtgagacagctaagaggatactctcttcaagttctcaaaccactattgagcttgattctttatgtgggggggttgatttacatgcaaatttttcaagggccttgttcgaggaattgaacaaggcattgttcatgaagtgtatggagacggtggagaagt

SEQ ID NO: 48797 - DNA, 235 bp, Glycine max
ctgctgagcagtttcttacattgagggcctttggcactccagcaattgtgctcgcattagctgcgcaaggcacctttcgtggatttttagatacgaagacacctctatatgctgttgatatttaatagctttcattctgctatggaaattgagtgacaaagtgctgctactcccttccgaattttatgggagaaaatttttcagctatctgaaatctggactttggctgtgttta

SEQ ID NO: 48798 - DNA, 239 bp, Glycine max
cagattatatcctggtgtttctgatgcattaaaatttgcaagctcgagagtgtacattgtcaccacaaaacagagccgctttgctgatgctttactccgagagcttgccggagtgaccataccacctgaaagaatatatggccttggaactggtcctaaggtagaagttctgaagcagctacagaaaaagccagagcaccaaggactgacactgcactttgttgaggatcggctagcta

SEQ ID NO: 48799 - DNA, 254 bp, Glycine max
cttaacattagctcaaatttcatttatgggggaattccagaatctctatcctcgatgaggaatctaaggagtcttgttttggttgataatctcttcaatggaagtgttcctgacctccaaaggctaacttctctagaagagctcaacttgggaggcaataaagtgggtgctcaattcccttcagtgggaaagaatcttgtcactattatgttgagaaataattcactgagatctcatatccctccacaacttgt

SEQ ID NO: 48800 - DNA, 247 bp, Glycine max
gttcttactaacatggttgcatacattcaaaaagaatttcctggaaacacacttaaattctggcgattacaatccccaaggtacttttatggtggtgactggaatcaaaatgggagctgcttgttcaacaagccccttgaggaggatgagcttgacttatggtttgaacccaggaacaacggagttaacaaggaagcgagagtgttgaattttgtgattgaagaagcattacaagctgcaaacattc

SEQ ID NO: 48801 - DNA, 250 bp, Glycine max
gttcggtgtatctaggtgtgcttgaagatggcactcaattggctgtaaaaaaattggaaggtgttggacaaggtgcaaaagagtttaaagcggaagtgtccatagttggaagtattcatcatgttcatttggttaagctatcagttattgttcaagttgaagagatcttccctcatatgacagagttaacaagtttttgttcaagtcacctatgtaacaaggatatactctagctagagtagttgcaaat

SEQ ID NO: 48802 - DNA, 244 bp, Glycine max
ctgaggaagatcagggaaaagctgtaggttgagatggttcaatcaattggacccaagaataaacagaagtcctttcacggaggaagaagaagagcgtcttctagcttctcaccggattcatggcaatagatgggcagtaattgcaagacacttcccaggacgaactgataacgctgtcaagaatcattggcatgtgatgatggcaaggattcggagagaaaggtctaaaaattatagtccaaaa

SEQ ID NO: 48803 - DNA, 240 bp, Glycine max
gtaagttttggaggatctaatattgatccaacggcttgggcggataagaagtgccctggtgaatctcgtttccctgctcaggttcaagtgattactaggaaagtttgtgagccactagaggaagattccttcagaccaattcttcacgactacgacggccctaagttccgtcttgagctgagtgtgcctgaggcactgtctcttctggatatctctgcaaaccagaacagtttcgatgac

SEQ ID NO: 48804 - DNA, 217 bp, Glycine max
cttgagcctgcttctaatggtgcatcctgatgatgttgtgtttgggggatgatgatatcagcatacttggacctagctcatgccatggccacggccagggtgtttgatatcgatctgccacctacaccgacgccgtacatagtatccatcgatccactcaccgcgatctatgtcccttattgcatagctggcaaccaaggagaccgagtcaataacg

SEQ ID NO: 48805 - DNA, 245 bp, Glycine max
ggagagcaaatctaatgccatcattgatcatcttcttcgagattgtgatttagttggaaggtttctccaggcagataaacattgtattctttcagtggaaagcagtcagcacacagtacctgctgtggaaaacggggaacacgtgtaggaaacattggacatattactcgaattttcaataaacttgtccacttggctcgtaaccaaagccacattctggcatgtctccaggagaatagcgagtg

SEQ ID NO: 48806 - DNA, 248 bp, Glycine max
tgacgatggtcgaaagctgtgcctggagtgtcttgactcagctatcatggatactcatgaatgccaacctctctatgtcgaaatacaagagttttatgagggtttacatatgaagatagagcagcaagttccgatgcttttggttgagagacaagcactgaacgaggctatggagggagagaagaatggtcatcatcacttacctgaaaccagaggactttgcttgtccgaagagcaaactgttccca

SEQ ID NO: 48807 - DNA, 246 bp, Glycine max
ttactacacaggttttgatgcactcatgtcctcaacattttcaggtgagtgtgcatcttgtgtgtgcaggaaagaggccttggttgtgggagggaaactagtgaggtataggggttggtcaatgaccatattttttgttgtgggggtgttgtgtttgaggattatgtgcaaaatctcaggagaaaactatgcagggaaatttttgttcatcaaagccttgatggaaaggtttagctggattttaat

SEQ ID NO: 48808 - DNA, 244 bp, Glycine max
atttcctataactttatggctaataagtatccaatgttcttttattttccttcaggtaagtccacagctatatggagacaactatccaaggttcttcacttattggactactgatgcatatcaaacaactgggtgctacaacttactctgttcaggctttattcaaaccaacaataggatagcaataggtgctgcaatttccccaagatccgctttcaacagaagacaatttgatattggccta

SEQ ID NO: 48809 - DNA, 242 bp, Glycine max
gaggcattaggattttgagcagacctagaattccagtccctttcgatgatcctgccggtgattacactgtcctcattggagattggtacaagctcaaccacacggatttgatgtctctgcttgatagcggtaggaagctgcctttccccaatggaatcctaatcaatggtcgtggttctaatggtgcatatttcaatgtggaacaaggaaagacctacaggcttaggatatcaaatgtgggg

SEQ ID NO: 48810 - DNA, 252 bp, Glycine max
atttgatttttcaacgattcttcttctacgcgtcttcttcttcacactctcactcccaagtcccaatggcctcttctcctccctcttcctccgctattaaggatgccaaggtgcttatggttggcgctggcggaattggctgcgagcttctcaagaccctcgccctctccggtttccctgacattcacatcattgacatggacaccatagaagtcagtaacctgaacaggcaatttttatttcgacaattcc

SEQ ID NO: 48811 - DNA, 239 bp, Glycine max
gtagatgtgcttgatgatggttataaatggaggaagtatggtcagaaagttgtcaagaatagccttcacccaagaagctactaccgctgtacccataacaactgtagggtgaagaaaagagttgaacgactctctgaagattgtcgtatggtaataactacctatgaaggcagacacaaccactctccttgtgatgactcaaattcatcggaacatgaatgtttcacctctttttgaac

SEQ ID NO: 48812 - DNA, 132 bp, Glycine max
tgcaaatggatggatacaagggatgtccttatcgtaaatcctactggttctaatcaagttgatcctgactatttggaatctgagcaaagacttgaaaaatggtactctttgaatccatgtaaggtaatcatt

SEQ ID NO: 48813 - DNA, 245 bp, Glycine max
gggatattgccccagccaagaatattgatggctatggcaagggatgggttgctgccaccatttttttctgacataaacaagtgcagccaagttcctgttaagagcacaatagttactggccttgttgcttcactcttagcattttctatggaagtctctgaactggctgggatggtcagtgtgcggtacacttcttgcattcaccatggtggcaatatctgtgctaatactaagatatatcccac

SEQ ID NO: 48814 - DNA, 254 bp, Glycine max
gcgttaaacaaaacgtaacggagggtcgacggtttttggtgcaagccaacgtgcgtgaactcgccgccgtgctctccgccgggaataacaagcgtccctggctgacgtggagccaccaacctgtcccccacccgaggctccggtcggaaaccgggtcgggttgtccgctgttaagtgattacggctgcaacgttccggcgccggaagttccaccggcgagttcattcatgtcggagtggtttgatattcggggc

SEQ ID NO: 48815 - DNA, 252 bp, Glycine max
ctcgagccgcgcgcagtgctgatggacctggagcccggaaccatggacagcgtgcggactgcgccgtacgggcagatattccggcccgacaacttcgtgttcgggcagtccggcgcgggcaacaactgggccaaggggcactacacggagggcgccgagctcatcgactccgtccttgacgtcgtgcgcaaggaggccgagaactgcgactgcctccaggggttccaggtctgccactcgctcggcggagga

SEQ ID NO: 48816 - DNA, 247 bp, Glycine max
agcagataagcatgttgtgaactgcattgagtctcatcctcatacaatggttcttgccagcagtggtattgagaatcacatcaagatatggactccaaaggcccttgagaaagctactttgcccaaaaatattgagcaggtatgattttggtcttcttgagttaattattgcaagttggaacttaaaagcacataatgatattattacctgtggatgaatgccttttatgtgtaggaagcttgttat

SEQ ID NO: 48817 - DNA, 187 bp, Glycine max
ctcttcaaaaggtagaagaaacggaatgaaaactctcaaaaaactattacagcaatggcagaacaaaacctaaaccaaacaactggagctggaaggcatcaaaatgttggtaacaagagccttctacacagtgatgcactttaccagtatatgctggcgactcgtgtctacccaagagaacctgaat

SEQ ID NO: 48818 - DNA, 181 bp, Glycine max
cgaaaattctcagtttgcagagaaaatctgaatcatgtcgtggcaagcgtatgtcgacgatcaccttctgtgtgacatcgaaggtaaccacctcactcacgcgctatcatcggccaagacggcagcgtttgggctcagagtaccgacttccctcagttcaaacctgaggagataactgcca

SEQ ID NO: 48819 - DNA, 182 bp, Glycine max
cttctactgtggctcttctctctatgggcggttaaaccctcagagcgtgagggattggatcgcttgccacgtgatgttcttcgggccaaagtcggatgtcggtcttcatgatgctggtggggtgcatgaggaggtgcttgaggtgctgaagcggtgcctggaactagggtttgtgacattgc

SEQ ID NO: 48820 - DNA, 181 bp, Glycine max
actctctctctctctctgaaaattaaaactaagcgtgtgctctgccatatcccaagtggaacaagaagagttgctcgccaaattagaggtgttcaagatccgagcgagggacaagcatggccgcaagatcgttcgcattatcgccaaactcgtcccaggtagattgattaattaattaatt

SEQ ID NO: 48821 - DNA, 228 bp, Glycine max
gaaaaagaagggattatttcatcattctagttttttggctggaggagctacattagctgctggaaggctggtggcttagaatggaattcttaagtccatctctgcttatagtggacactaccggccatcagatgacactcttgattgtttcttatcatatttcaaggaaaatggtgtcaagcttgatgaatttgagttgcacattgcaaatgaagattctgatatgta

SEQ ID NO: 48822 - DNA, 233 bp, Glycine max
aaaacaactggtcctgtgctgctccatgttgtcactgaaaaaggccatggatatccatatgcagaaagagcagcagattagtaccatggagttactaagtttgatccattaactggaaaacaattcaaattcaatgctgccacccagttatacacaacatactttgcagaggctttaatttctgaagcggaagcttacaaagacattgtcggaatccatgctgcaatgggagg

SEQ ID NO: 48823 - DNA, 103 bp, Glycine max
atcaaggacaatgaagaagctgtcaaggcttatggaattcacctgggaactgaaatgtgcaaaaagattttagctcatttaattaagacattgcatctttata

SEQ ID NO: 48824 - DNA, 233 bp, Glycine max
gatagctagaagcaataagatgaaaatgaaagtgcttgttttgtttgttgctacagttttggtagcatatgaatgctatggctcagactaccagaagttccctctcctaatgaaaactgggtttggtggtcaatacagcaatgaggttgcatgtgccagttggtggcttggcgtggaatcaaacaacgtagtcatatggcaaactgttcctgcagcttgcgtagagtacatag

SEQ ID NO: 48825 - DNA, 228 bp, Glycine max
gtgaatctcaaaaaggagtacaagggcattttctggcaagaagagatcattccattcttccaaagtgccacctttccaaaagaatgcacttctgtccaaaaattctacattgaactctccaagcactgtcaaagagaagcttggtgctgttgatccctatttcaccaagcttgcatatgccatggtgactctgattgaagctctggatgagcttacttgcaccacatc

SEQ ID NO: 48826 - DNA, 231 bp, Glycine max
acaaaccagtttttggaatcattgaaagcagaaggtgaggtcattcttgaagatgttcagccaaaactctcccactctcgggtttctgccccaccacctactgattctatcactttgactgttgaggataaactaaatgtgacactttaacgagatggtggtctcagtaattttgatgttcaaggcacattgtctctccaaattcttaaccaagaggatgcacatattcaa

SEQ ID NO: 48827 - DNA, 235 bp, Glycine max
gaagaatcttgctggaagtctcacatataggtatgacctggttgacttgacacggcaagtattatcaaaattggcataccaggtataccacaaggcagttacttcttctcagaagaagaatattgaagccttgcaatttcacagcaatctagtttcttcaactgtcaaaagatattgatgtattgcttgcttcggttgataactttctctttggaacttggcctgagagtgctaa

SEQ ID NO: 48828 - DNA, 231 bp, Glycine max
aaataaactcgagtatggatattgtcaggaagactatttgtattacgttacaagtaactctttaaatatagtataaaaagagttacttgtaacgtaatacaaataaactcgagtatggatattgtcaggaagactatttgactttgttttttcaaccccccaataaattcgaatattatggttatgacactgtttttttcagcattcatttttctataatagagagttcta

SEQ ID NO: 48829 - DNA, 236 bp, Glycine max
ctgttatgtcactagattttcaccctaataaagatgatcttatctgctcttgtgatgttgatggtgagataagatattggagcattaacaatggcagttgtgctagagtctcaaagggtggcacagctcaaatgagatttcaacctcgtctagggaggtacctagctgcagctgcagagaatgttgtttctatactcgatgtggaaactcaagcatgtcgatattcattaaaagga

SEQ ID NO: 48830 - DNA, 233 bp, Glycine max
ctcagagaaccttaataattactcattcaaatcaggctttgaatgacctgttcgagaagataatgcagagagatgttcctgcacgttatcttcttcgacttggtcaaggagaacaagagctagcaactgatcttgattttagccggcaaggtcgtgttaatgcaatgcttgttagacggttagaattgctgagtgaagtggagaggctagcaagatctcttcaattgcccgag

SEQ ID NO: 48831 - DNA, 235 bp, Glycine max
gtgagagctctttgagggatcttctccatggatctgaatatgttcttacatatgaagacaaagatggagattggatgcttgatgttcactgattcatgtcggagactaaggatcatgaaaggctctgaggcaattgggctagctccaagggccatggaaaaatctaggagccaaaactaatgcagaaaaaacctgtttgaccgaagctggttattactgaagcatataaagattt

SEQ ID NO: 48832 - DNA, 265 bp, Glycine max
aggctatgtgatttaccgtgttcgtgttaggaggggtggccgaaagagaccagttcccaaaggtattgtttatgggaagcccacaaaccagggagttacccaactgaaatttcagcgaagcaagaggtcagttgccgaggagcgagctggacggaagctgggtggacttagggacctcaattcttactgggtgaatgaggtttgttattgtattacttctgttgaaattgaaatttggttgtgaatcatgtgttgatttggtaaa

SEQ ID NO: 48833 - DNA, 258 bp, Glycine max
cattattgcacatacaggactggatttgaagaaaacaaggaactgcccattgtgctaaatacagtcttggctggaaggtattatgtaacagaatatcttggttcagctgccttcagtagggttgttcaggcacatgatcttcagacaggaatagatgtttgcttgaagatcattaaaaacgacaaagacttttttgatcaaagcttagatgaaatcaagcttctgaaacttgtcaataagcatgacccagcagatcta

SEQ ID NO: 48834 - DNA, 245 bp, Glycine max
atggtcgctatggagtaggagattggtcattccttaaatgccgagagcacatggcaaatgagagggacaagcgcaaagcattccaggaagtttgcaataatttcaggcctgttatgcattattttttcttggagagatttttacagccagctgagtggtttgaaaagagacttgcttatacccgaagtgttgctgctagttctatggttggttacattgttggccttggagatcgacatgcaatg

SEQ ID NO: 48835 - DNA, 243 bp, Glycine max
gttttctgttttggaccatggacttggtttttaccaaatcaagaaaaggatgagcttttttgggccttcaaatcttgcttggagaaggctcaattttggtggaaacctctcacacaagaaagcatagtttcttttgggttcattctacttggtgtttagagatggtgagaggaaagactcagctgaggcgcatagagaacgccacaagcaggcaagtcaccttttcaaagcggcgtaatgggt

SEQ ID NO: 48836 - DNA, 232 bp, Glycine max
gttgagtagccttttactcctagagaaattttgtagctatagagaggaagccaaagagaccttgattatctttattataataataatggaccaggcgaccacgttcaacaaatatgcctttgcttgtgctgcagttgcttcaatggtatccatcatatctggctatgacacgggtgttatgagtggagcaatgatattcatcaaggatgacattggaatcagtgacacccaa

SEQ ID NO: 48837 - DNA, 272 bp, Glycine max
gttcatatttcaccagaacaggcagacgctctaagacatgctcctggagtgaaatctgttgagagggactggaaagtgaggagacttacaacacataccccacaatttttagggcttccaactggggtttggccaacaggaggtggctttgatcgggctggagaagacattgtgattggatttgtggactcagggatctatcctcatcacccaagttttgcagctcataatgctgagccatatgggccagttccaaagtatagaggaaaatg

SEQ ID NO: 48838 - DNA, 271 bp, Glycine max
gaagagcatcactgaactaacaaagcaaccctatgtcgaaggtggtttgtgtcaccggagccagcggcgccatcggatcatgggtggtcctactcctcctccagcgtggttacaccgtccatgccaccgtccaagatatcaaggatgaaaatgagacgaaacatttggaggaaatggaaggagcaaagagtcatctccatttttttgaaatggatcttcttgacatcgactccattgccgctgccataaagggttgttccggcgtaatcca

SEQ ID NO: 48839 - DNA, 271 bp, Glycine max
gcagcgtgcttcattcaggctgcgtggcgccggttcaagaagagaatgctgacaaagagccttagcttgagggaatgccagtccttcaatcacgacgaacaagtcggggatgaaatggaacatggggaagaagagcacagtgcagtgacttcaaacactgcacaagtgaaacagaacctaggtgtcactatacttgcttcaagatttgctgcaaacacaaggagaggggttcagaagattaaggatgtagagttgcccaagtttcaaaagc

SEQ ID NO: 48840 - DNA, 267 bp, Glycine max
acggagactccgtcgccggcgtccccgccggctccctcctcgtgctcaaccgcgacgacaagaaaatcttcgaagcattcgagaacgccggaactccgatgagcgactccgacgcggcggggttctgctcgcagagcagcgtgtaccgtccggggatggatgtaacgaaagcagagctcgtcggaagaaccaattggagaagacaagaaaagatggaaaatgttggagaatggaaagctagggttttcgaagtgcataacgtggttt

SEQ ID NO: 48841 - DNA, 239 bp, Glycine max
gggtgatcaaaagcaatttgtacacattgacccgaatgatctgtatccctatcttcttgttaatattgggtctggtgttggcatgattaaggtggaaggagagggaaaatttgagcgagttagtggaacaagtataggcggaggcactttctggggtttaggaaagcttttaaccaagtgcaagagttttgatgagctgctggaattaagttatcgggggaacaatagagcggtagata

SEQ ID NO: 48842 - DNA, 233 bp, Glycine max
ctttgttcactcttcttctcttgcggctagggttttagcgcacgtcttctagatttaaggcagatgggtaaggaaaaggttcacatcagtattgtggtcattggccatgtcgactctgggaaatccactaacactggtccactggttttccaagctgggaggccttgaccagcgtgggattgagaaggttgagaaggaagctgctgagatgcaccagaggtctttcaagtatg

SEQ ID NO: 48843 - DNA, 234 bp, Glycine max
aaagacggcgtcttcataaacgcctttcttctccgtttccgtttcctcgttcgaattcgctttttgatctgcgaaaatgagagagtgcatctcgatccacattggtcaggctggtatccaggtcggaaatgcttgctgggagctctactgcctcgagcacggcatcgggcccgatgggcaaatgccaagtgacaagacagttggcggtggtgatgatgctttcaatactttctt

SEQ ID NO: 48844 - DNA, 238 bp, Glycine max
ctttactcgtcatattaccaatattgacatttgcattccacaaattctgccagagacgttttgagccagcatttaggaagtaccctcttgaggaagcaatgtcaaaggatttattagagaagagcacagaacctgacttgaacatagaggcttatttggctgatgcttacttgcacccaatcttcaggtcatttgaggtagacgacgaattggttgaagtcagagtagataatcacca

SEQ ID NO: 48845 - DNA, 215 bp, Glycine max
cttattgcgaaccagttgagcaggccaattcaagccattctttatcagcaggactggctcacagtgttggtctcaggaaacagccattgagggtgtacagcatagtgaaatccgcagcaatagctcgtcgggacgctgaggttctcatgaagtttgcaagggccggttaccaggagatactatgggatcatgctgcaggcgtgatcatcatacaa

SEQ ID NO: 48846 - DNA, 235 bp, Glycine max
atctcaaaggtatatcctgccatgttcgtagacagtgttactgagcttgcatttgatgatatcacccctgaggaccctgatttttctttcattcaaggcctggcagaagctggacttatcgaaagcaggctttcaagatgttatgatagaccgtggtccacaaatgaagcctatggcccatttaacttctccccggaaagccctttatcacgtcaggatcgtgacacttggaaga

SEQ ID NO: 48847 - DNA, 236 bp, Glycine max
gattggatgagtgtaattgagaaagaagactggaaaagtgttacggatttggttacaaatgcaaagcagtttgtgtcttcagtgcaagatgtagctcgcagacttgctgattatgcaaatttcaggagaaacaaaagtttagctgttggtactgctgataaggagttgccagttgccactgaagctcctctgccctccaaagctgcacaggagaattcaggtgtcacgaaagttga

SEQ ID NO: 48848 - DNA, 250 bp, Glycine max
gggtgaagagcactgtgagagtgccggcgattagttcaaaagtcgccgatattccaccggacgagtactcctggaggaagtacggtcagaaaccgatcaagggttccccatacccaaggtgagtgatatttaattttgaccgttgatttagttgacttttatctcatcaagactcgttccctgacgtcgattttttttatcatcaggggttactacaagtgcagcacgattagagggtgcccagcgagga

SEQ ID NO: 48849 - DNA, 239 bp, Glycine max
atggaagctggccgtcctgttgctctggagaattggcgcctctgccccaccaatggttgctgcagaggctccaattctccagcagtattcaccatacatggactctggcctgactataatgatggaagctggccgtcctgttgctctggatctagacttgatccaaaagagatatcaacattgactaatgctttagagcaatattggccatcattgagctgtagcaagccatcattatg

SEQ ID NO: 48850 - DNA, 246 bp, Glycine max
caggacagcataaggacaccctcctgtgacttttgccattgctgcatgcgagacacagaatgttaatgtatctggtttgccatgttgtgggttgtctgatggaagtagcacaactgcaaaaggcatgtggagtaaaatggtgaaggatgggcaattttaccaggagaatttcaattctggacctagcatgccctcatcgcctggagagacactatgtgctgctgttgcagcttccatgtgggttga

SEQ ID NO: 48851 - DNA, 190 bp, Glycine max
gaagccagaagaaatggggattgaggaagacaatatcaggaagtacacaacccctgcctacagggcccctgagatgtgggatctgttcctgagagaagtcattaatgagaaggtggacatatgggcaattggaatgtcctctttttcgcatatgctacttcaaaagtgttattgatggggtatcaaagct

SEQ ID NO: 48852 - DNA, 253 bp, Glycine max
gacggatttgtcattcggaacaaagctagggaaaatcctgaaaacccttctattgaactgggaccagaatttaagaaggttagcaacttcttgagtcgctacatcaccgttcctagtaacggacatcatgcttccctaaaagttgctaatcatctatagttctgagcctcgttcatcctcaaggggaccatcatcattgtatcaaaacccggtgttaagctataagttcccgacggtgttgccattgtagaca

SEQ ID NO: 48853 - DNA, 250 bp, Glycine max
ctttcttctccgtttccgtttcctcgttcgaattcgcttttagatctgcgaaaatgagagagtgcatctcgatccacattggtcaggctggtatccaggtcggaaatgcttgctgggagctctactgcctcgagcacggcatcgggcccgatgggcaaatgccaagtgacaagacagttggcggtggtgatgatgctttcaatactttcttcagcgagactggtgctggaaagcacgtgccacgtgcagt
